United States Patent Application Publication US 2013/0332133 A1 - sequence listing, part 41

SEQ ID NO: 275243 - DNA, 1399 bp, Unknown
  Bacterial polypeptide expressing nucleotide sequence isolated from the Sargasso Sea
gctgtctaccgccaatatcaccatgcaattcgggccaaagcccctcttcgaaaacatctcggtcaaattcggggaagggaaccggtatggcctgatcggtgcgaacggctgcggaaaatccaccttcatgaagattctggggggcgatctggaaccgagctccggcaacgtgatgctcgaaccgaacgtccgcctcggcaagctgcgccaggatcagttcgcgtatgaagacgtgcgcgtgctcgacgtcgtgatgatgggccacacggaaatgtgggccgccatgaccgagcgcgacgcgatctacgcgaacccggatgcgactgacgacgactacatgcacgccgccgaactcgaggcgaagttcgccgagtacgacggttacaccgccgaagcgcgcgcgggcgagctgctgcttggcatcggtatcgcgatcgaagatcacaacggcccgatgagcaatgtcgcgccgggctggaaactgcgcgtgctgctcgcgcaggcgttgttctcgaagccggacgtgctgctgctggacgaaccgaccaataacctggacatcaactcgatccgttggctggaagacgtgctcaaccagtacaactcgacgatgatcatcatctcgcacgatcgtcactttttgaaccaggtctgcacacacatggccgacatggacttcggcacgctgaaggtctatccgggcaattacgacgactacatgctggccagcacgcaggcgcgcgagcgtcagcagaacgccaacgccaaggcgaaggagcgtgttgccgacctgcaggatttcgtgcgccgcttctcggctaacaagtcgaaggcgcgtcaggctaccagccgtctgaagatgatcgacaagatcaagatcgaggaattcaagccgtcgtcgcgacagaacccgttcatccgcttcgagtacgagaagaagctgcacaacatcgcggtggtggcggacaagatctcgaagaagtacgagcgcacgatcttcaacgatttcagcatcagcgtgcagccgggcgagcgtatcgcgatcatcggcgagaacggcgcgggtaagaccacgttgctgcgctcgctgctcggcaagctcacgctggaccacggcacggtgaagtgggccgaaaacgcgaacgtcggttacatgccgcaggatacgtacgaagaattcccggacgacgtcacgctgatggaatggatcgacggttatcgccaggaaggcgacgacgagcagatggtgcgcggcacgctcggccgtctgctgttcaatgccgacgacatccgcaagtcggtcaaggtgctctccggtggtgagaagggccgcatgatctggggcaagctgatgctgggccgccaccaatgtgatgctgatggacgagccgaccaacca

SEQ ID NO: 275244 - DNA, 2092 bp, Unknown
  Bacterial polypeptide expressing nucleotide sequence isolated from the Sargasso Sea
gatggccgcctgccagccgtcaaatgcaggttccaacccgcctcccgacccgtttgccggccttgtccgtccggccatgccggtaacgccgcccgcgaccggtacaatgggcgcttccgattcctctcttcgccgtctccccatgtcgctctattccatatccggcgcgcagctcgcgttcggtcacgtcgcgttgctcgatcacgcggatttctcgctggaagccggcgagcgcgtcggcctgatcggccgaaacggcgcgggcaagtcgtcgctgctgaagatcgtcgccgggctcgcgaagcccgacgacgggctcgtcacgcgccagcaggaactcgtgaccgtctacgtgccgcaggagcccgaattcgagccgggcgcgacggtgttcgatgccgtcgcatcggggcttgcgcacacgcgcgaactgctcgaagagtacgattcgatcgcgcaccgcctcgcggatatccccgaaggcgccgaacacgatgcgctgctcgcgcggatgaacgcgctgcagtcgtcgctcgatgcgcacgacgcgtggagctggcgcacgcgcgtgtcgatgacgctcgcgcagatcggcctggcggacgtcgatgcacccgtcgatgcgttgtcgggcgggatgcagaagcgcgtcgcgctggcgcgcgcgctggtgctgcagcccgacgtgctgctgctcgacgaaccgaccaaccacctcgacttcgacggcatccgctggctggaagagctgctcgtcgcgcagcgcgcgggcctgctgttcatcacgcacgatcgcgcgttcctcgaccgcgtcgcgacgcgcatcgtcgatctcgatcgcggccggctgctgtcgtacccgggcaatttttccgcgtaccagacgcgcaaggcccagcagctcgaaattgagcgcgtggaaaacgagaagttcgacaagctgctcgcgcaggaagaagtgtggatccgcaagggcgtcgaggcacgccgcacgcgcagcgtcggccgcatcgcgcggctcgtgcagatgcgcaacgaacgcgcggagcgccgcaacacgctgggcaacgtgaagctggatgtcgcgcagggcgagaagtccggcaagatcgtcgcggaactgaccgacgtgacgaagcgctacggcggccgcgcggtcgtcgatcgtttctcgacgacagtgatgcgtggcgacaagatcggcttcatcggcccgaacggcgccggcaagacgacgctgctcaagctgattctcggcgaactgaagcccgacgaaggcacggtgcgcatcggcacgaacctgcaggtcgcgtatttcgaccagatgcgtgcgcagctcgaccaggaaaagagcctcgcggataccatcagccccggcagcgaatgggtcgagatcggcggcgtgcgcaagcacgtgatgagctacctcggcgatttcctgttcgcgccggaacgtgcgcgttcgccggtgaagtcgctgtcgggcggcgaacgcaaccggctgctgctcgcgcgcctgttcgcgcgtccggccaacgtgctggtgctcgacgaaccgaccaacgacctcgacatccagacgctcgaactgctcgaggaactgctggccgactacgacggcacggtgctgctcgtcagccacgatcgtgcgttcctcgacaacgtcgtgacgtcggtgatcgcggccgagggtgacggcaagtggcgcgaatacgtcggcggcttcaccgactggcagatccagagtgcgcgcgccgatcagctcgcgcagcaggaagccgcgaagcgcgcggtcaaggaagccgcgcccgtcaaggaagattcggcgaaaagcgctgcgggccgcaacgcgcaacgcacggtcaagctgtcgttcaacgagcagcgcgagctcgattcgctgccggagaagatcgccgcgctcgaagaggagcagaagacgatcaacgcgcggctcgaagacggttcgattttcgcgaaggatccgcaggaaggcacgcgcctgaccgagcggttcgcggcgatcgacgacgaattgctcgaagcgctcgaacggtgggaaacgctcgaggcgaagcgcaagcccgcgtaa

SEQ ID NO: 275245 - DNA, 668 bp, Unknown
  Bacterial polypeptide expressing nucleotide sequence isolated from the Sargasso Sea
catgagcaatacggatttcgtgctggctgtggaaggcctgagcgtgtcgttcgatggtttcaaggccatcgattcgttgaacctgtacgtcgatcgcggtgagttgcgcgtggtgatcggaccgaacggcgcgggcaagacgacgctgctcgatctgatctgcggcaagacgcgagcgagcgaaggcagcatcaagtttcgcaacgaagagatgacgcggctgccggagtttcgccgcgtacgcaaagggattggccgcaagttccagacgccgtcgatctacgaaaacctctccgtgttccagaacctcgaagtgtcgtttccgcgcgggcggggcgtgttcggtgcgttgacgttccggcgcaccggcgacgtgctcgaccgcgtgcgcagcgtggccggggaaatcggccttgaaaaccagctcgatctcgaagccgggctgctgtcgcacggacagaagcagtggctggaaatcggcatgttgctgatgcaggacccggagctgctgatgctcgacgaaccgattgccggcatgagcgtgcgcgaacgcgagatcacggccgagctgctcaagcggatctgccagaaccgctcgatgatcgtgatcgagcatgacatggcattcgtcgcgcagatcgctcacaaggtcaccgtgatgcaccagg

SEQ ID NO: 275246 - DNA, 1286 bp, Unknown
  Bacterial polypeptide expressing nucleotide sequence isolated from the Sargasso Sea
tctcgaccgtgtcgctacgcgcatagtcgaactggatcgcgggcggttgctgtcgtatccgggcaatttcagcgcttatcagacccggaaggcgcagcagcttgaaatcgagcaagtggaagcagccaagttcgacaaactgctcgcccaggaagaagtgtggattcgcaagggcgtggaagcgcgccgcacgcgtagcgtcggccggattgcacggctcgtggagatgcgcaatgagcgcgccgaacgccgcaacgtgcagggcaacgtgaagctcgacgtggggcagggcgagaagtccggcaagatcgtcgccgaactgaccgacgtcaccaagcgctacggttcgcgcacggtggtcgacaacttcacggccacggtcatgcgcggcgacaagatcggttttgtcggtccgaacggcgcgggcaagaccacgctgctcaagatgatcctcggtgagttgccgccagacgaaggcacggtgcggatcggcaccaatctgcaggtcgcatacttcgaccagatgcgcgcgcaactcgatctggagaagagtctcgccgatacgatcagccccggcagcgagtgggtcgaggtcaacggccagaagaagcacgtgatgagctatctcggcgacttcctgttcgcgccggaacgcgcgcgttcgccggtcaagtcgttgtcgggcggcgagcgcaatcgtctgctgctggcacgtctgttcgcgcgcccggccaacgtgctggtgctcgacgaaccgaccaacgacctcgacattcccacgctcgaactgctcgaagaactgctcaccgaatacgacggcaccgtgctgctggtgagccacgatcgcgcgtttctggataacgtcgcgacttcggtgatcgcttcggaaggtgggggcaagtggcgcgagtacgtcggcggctttaccgactggcagattcagcgtgaccgctcgcagcagatggcgcaggacgcgcagaaagaagcggccaaagaagcggcaaaagaaacggcggccccgaaagatgccggcgcagcaagccgcaatacgcaacgcgccgccaagctgtcgttcaaggatcaacgcgaactcgaatcattgccggcgaaaattgccgcgctcgaagcggagcagaaaaccattggcgcacagctcgaagacgggtcaatcttcgcgaaagatgccaaggaaggtacgcgtttaaccgagcgctatgccgcgatcgacgaggagttgctgatcgcgctggaacgctgggacgagctggaaaacaaacgcaagtgat

SEQ ID NO: 275247 - DNA, 769 bp, Unknown
  Bacterial polypeptide expressing nucleotide sequence isolated from the Sargasso Sea
atggagggtcgggcatggggtcagggtacgaccgcccggtaccgtggcggggtgtcggtggtcgagttgcgtgccgcggtcgcgctgctgggccgttttcccgccctgtccggggtggacctgacgatccatgccggtgagacgatcctcctacgggggcccaacggtgccggcaagacgacccttctgcatctgtgcgccggtctgctacgccccgagtcgggctcggttcaggtacttgaccacgacctcaccgaccgcgcgggccgtcggtcggtacggcgccgggtggccctactgggccataccaccgggttgtacgaggacctgacagtgggagagaacctgaggttctgggcaagggctgccggcctctcgactgtcgacgccgaccgtcgactcgacgatgcccggaagcgcctcgaggtgtcggaccgacttgttgaccagccggtccatacattgtcggctggccagcgacgccggacgtcgttggcggccctgttggcccgccgaccggacctgtggctgctggacgagccgcacgccggcctcgaccagtcggggcgcgacctcgtggacggcctgatcggtgacgcggtggccgctggcggcaccgtggtggtgtcctcacacgaactggaccgggtggccgcgttgtcgccgcgaatggtgacgctggcaggcggcgccgtcgtcgatgggtcaggggcggactcacctcctcctgtcgaggagccatccatagggcaggaaaacagacgatgag

SEQ ID NO: 275248 - DNA, 679 bp, Unknown
  Bacterial polypeptide expressing nucleotide sequence isolated from the Sargasso Sea
gatgctgaaattggatcaaatcagctgccgttacggtcaggtcgaagttcttcaccaggtcagtctgcagctggaacagggagaaatcctcggcctcctgggacgcaatggagcaggtaaaaccaccctgctcaaatgcctgatgggtctccttcctctggtttccggaaagattgtcatgaatgacgaaatcctgtccgggaaacctgcccatgaaattccaaaaaagggaatcggtcttgtaccccagggacgccgcctctttccgtacctcagtgttgaggaaaatctgaagatgggactgctggtgaatgacgaaaaacccggactgctggattggatcctcgaattgttcccggtgctccaggaccgcatgcagcagaaggcgggaaccctcagtggaggagaacagcagatgctggccaccgcaagagcactttgcatccagccgaaattcctgctgcttgatgaaccgagtgaaggactgatgccaaaatacgtggaaaggatctttgaaacagtcgaacgcctgaaaaaagaaaatgtcggaatcttgctggtggaacagaaaatcgatggagtcctgaaaatctccgaccgtgttgcttttttagaaaatggaaacctggagcatcaaacaacccccgaagcactggctgaaaacgatgaaccccgcttt

SEQ ID NO: 275249 - DNA, 721 bp, Unknown
  Bacterial polypeptide expressing nucleotide sequence isolated from the Sargasso Sea
ggtcactggaagcccaagagtcgccagagcctgaaattcaacctcgatccggccgagaagagcagcctcgatgtcctggagttcagcggtgccagcctgtcgttcgaatccctctcgaggccgatactgagcgacgtgggggtcagcgtccgaagggggcagaagataggggtgatagggccgaacggggcggggaagaccacgctgctgaggctcatcacgggagacctgggcctggactcgggccagctggaggtcgcaccgggggtgcagatcggctacttccaccaggaccaccggaccctggacttcgagctcacccccgtccaggaggtccagaggctgaagcccaggatggagtacggggccctccgggcactgctcgggcagttccagttcacgaaggagatggtctcgacaaagctgagcaggctgagcgggggcgagagggcccggctcgcgctcctccgcctcctcctcgaggagaacaacatgctgctcctcgacgagccgacgaaccacctggacacggacgcgaaggaggccctggagaccgcattggccgagttcgacggcggaatcatcacggtgagccacgatcggtacttcctcgacaaggtgtgcgacactatctgggacctgcgcggtgacggtggcctggtcgtctggccggggaactactcggactacaagagggggacgatctccacaacggactaag

SEQ ID NO: 275250 - DNA, 661 bp, Unknown
  Bacterial polypeptide expressing nucleotide sequence isolated from the Sargasso Sea
aatgacaagtgatgaacaaaatttcattgaaataaaaggtgtcagtaagcattttggtgatgttgttgctgtagacaatgttgatttagcaatcaaaaagggtgagcttttttccatacttggtgcatcaggctcagggaaaacaacccttttgaggatattagctggactagagataccaagccaaggaagtatattaatcgatggtgttgacatgacatcggtggctccatatgacagaccagtaaacatcatgtttcaaaactatgctttgtttccccacatgagtgtgtttgagaacattgcatacggcttaaaaaaagaagggctacaaaaagagagtattgaagaaaaagttcagagaatgctcagtctagtgaaacttgagggttatgataacagaaaacccaatcaactctctggcggacagtcacaaagagtcgccctagccagatcgcttgtgaaagaaccaaaagttcttcttctagatgagcccatggcggcgcttgataaaaaactcagacagagcactcagtttgagctgatggatattcattatgagcttggcataacctttgtaattgtcacacatgaccaagaggaagcaatgacgctctcagatcgaattgcgatcatggagcaagggcagtttgtgcaatag

SEQ ID NO: 275251 - DNA, 1099 bp, Unknown
  Bacterial polypeptide expressing nucleotide sequence isolated from the Sargasso Sea
aatgacaagtgatgaacaaaatttcattgaaataaaaggcgtcagtaaacattttggtgatgttgtcgctgtagacaatgttgatttagcaatcaaaaagggtgagcttttttccatacttggtgcgtcaggctcaggtaaaacaacccttttgaggatattggctggtttagaaataccaagccaaggaagcatattaatagatggcgtggacatgacatcagtggctccatatgacagacctgtaaacatcatgtttcaaaactatgctttatttccccacatgagtgtgtttgagaacattgcatacggcttaaaaaaagaaggactaaaaaaagaaagtattgaagaaaaagttcagaagatgctcgctttagtgaaacttgagggttacgagaatagaaaacccaatcaactctctggcggacagtctcaaagagtcgccctagctagatcgcttgtcaaagagccaaaggttcttcttctagacgagcccatggcagcactggataagaaactcaggcagagtactcagtttgagctgatggatattcattatgagcttggcataacctttgtaattgtcacacatgaccaagaagaagcgatgacgctctcggatcgaattgcgatcatggagcaagggcagtttgtgcaaataggctccccaaatttaatatatgaaaatccaaggtctaagtttgtggctgacttcttgggcaatatcaatcttcttgaagcgatcatcactgaacaaaatgacaaagagatcattgtcgactgtgctgcacttgggggtgagttaaagtttgatcaaactgaacaagcgaatgcatctgaaatgactgtggccctcagaccagagaaagtgatgatcgaaaaaaacatgccaacgaatgatgatcaaagtcatattaaaggcattgttgaagactttggatacttcggtaatctttccatatatcgtgtcaaaactgagagcgggcatgtcattcaggtcagtaaacaaaatagagatcgagttgagcagtccattaagtgggaagatgaggtatacctttcttgggataatgacagcctgatgttattgggtgaatag

SEQ ID NO: 275252 - DNA, 1006 bp, Unknown
  Bacterial polypeptide expressing nucleotide sequence isolated from the Sargasso Sea
aatgacgagtgatgaacaaaatttcattgaaataaaaggtgtcagtaaacattttggtgatgttgttgctgtagacaatgttgatttaacaatcaaaaaaggtgagcttttttccatacttggtgcatcaggatctggtaaaacaacccttttgaggatattggctggtctagagataccaagccaaggaagtatattaatcgatggcgtggacatgacatcggtggctccatatgacagaccagtaaacatcatgtttcaaaactatgctttgtttccccacatgagtgtgtttgagaacattgcatacggcttaaaaaaagaagggctacaaaaagagagtattgaagaaaaagttcagagaatgctcgcattagtgaaacttgagggctatgagaatagaaaacctaaccaactctctggtggtcagtcacaaagagtcgccctagccagatcgcttgtgaaagaaccaaaagttcttcttctagatgagcccatggcggcgcttgataaaaaactcagacagagcactcagtttgagctaatggatattcattatgagcttggcataacctttgtaattgtcacacatgaccaagaggaagcaatgacgctctcagatcgaattgcgatcatggagcaagggcagtttgtgcaaataggttctccaaatttaatctatgaaaatccaagatctaaatttgtggctgacttcttgggcaatatcaatcttcttgaagcaatcatcactgaacaaaatgacaaagagatcgttgtcaactgtgctgcacttggaggtgagttaaagtttgatcaaactgaacaagcgaatgcatctgaaatgactgtggctctcaggccagaaaaggtaatgattgaaaaaaacatgccaacgaatgatgaccaaagtcatattaaaggcactgttgaagactttggatacttcggtaatctttctatttatcgtgtcaaaactgagagtgggcatgtcattcaggtcagtaaa

SEQ ID NO: 275253 - DNA, 1099 bp, Unknown
  Bacterial polypeptide expressing nucleotide sequence isolated from the Sargasso Sea
atgacaagtgatgaacaaaatttcattgaaataaaaggcgtcagtaaacattttggtgatgttgttgctgtagacaatgttgatttaacaatcaaaaaaggtgagcttttttccatacttggtgcatcaggctctggtaaaacaacccttttgaggatattggctggtctagagataccaagccaaggaagtatattaatcgatggcgttgacatgacatcggtggctccatatgacagacctgtaaacatcatgtttcaaaactatgctttatttccccacatgagtgtgtttgagaacattgcatacggcttaaaaaaagaagggctaaaaaaagagagcattgaagaaaaagttcagagaatgctcacattagtgaaacttgagggttatgaaaacaggaaacccaaccaactttctggtggtcagtcacaaagagtcgccctagccagatcgcttgtgaaagagccaaaagttcttcttctagatgagcccatggcagcgctggataaaaaactcagacagagcactcagtttgagctaatggatattcattatgagcttggcataacctttgtgattgtcacacatgaccaagaagaagcaatgacgctctcagatcgaattgcgatcatggagcaagggcagtttgtccaaataggctctccaaatttaatatatgaaaatccaagatctaagtttgtggctgacttcttgggcaatatcaatcttcttgaagcaatcatcactgaacaaaatgaaaaagagatcgttgtcgactgtgctgcacttgggggtgagttaaagtttgatcaaactgaacaagcgaatgcatctgaaatgactgtggccttgagaccagagaaagtgatgatcgaaaaaaacataccaacgaatgatggccaaagtcatattaaaggcattgttgaagactttggatacttcggtaatctttctatttatcgtgtcaaaactgagagtgggcatgtcattcaggtcagtaaacaaaatagagatcgagttgagcagtccattaagtgggaagatgaggtttacctttcttgggataatgacagcctgatgttattgggtgaatagt

SEQ ID NO: 275254 - DNA, 1804 bp, Unknown
  Bacterial polypeptide expressing nucleotide sequence isolated from the Sargasso Sea
atgcgccgacgagttgttcgcgaagctggctggcaagcatgcgggattccggtaagacggcggtggggcgcgtgccgtcgtgttggcgggccggtcgggcggcggccagggtgctggaaatgcgctgccggaacggcgtggtcggcagtttctccgacacctgctaaaatacacggttttccgtcgatttctcctttaacgggacctgccgtgctttctactgccaacatcacgatgcaattcgggccgaagcccttgttcgagaatatctcggtcaaattcggcgagggcaaccgctatggtctgatcggcgcgaacggctgtggcaagtcgacgttcatgaagatcctcggcggcgatctcgagccgagcgccggcaacgtcgcgctggagccgaacgtgcgtctcggcaagctgcgccaggaccagttcgcgtacgaagacgtgcgcgtgctcgacgtcgtgatgatgggccacaccgaaatgtgggccgccatgaccgagcgtgacgcgatctacgcgaacccggaagcaaccgacgacgactacatgcacgctgccgagctcgaaggcaagttcgccgaatacggcggctacgatgccgaggcgcgcgcgggtgcgctgctgctcggcatcggcatcgaggaaaaattccacaacggcacgatgagcgaggtcgcgccgggctggaagctgcgggtgctgctcgcacaggcgctgttttcgaagccggacgtgctgctgctcgacgaaccgaccaacaacctcgacatcaactcgattcgttggctcgagcaaacgctcaacgagtacaactcgacgatgatcatcatttcgcacgatcgtcacttcctgaactcggtgtgcacgcacatggccgacatggacttcggcacgctgaaggtctggccgggcaactacgacgactacatgctcgcatcggcacaggcgcgcgagcgccaggccgcggcgaacacgcgtgcgaaggagcgtgtcgcggaactgcaagacttcgtgcgccgcttctcggcgaacaagtcgaaggcccgccaggcgacgagccgtgcgaagcagatcgacaagatcaagatcgaggaattcaagccgtcgtcgcgccagaacccgttcatccgcttcgagttcgagaagaagctgcacaacgtcgcggtggtggcggaagagatcacgaagaagtacgaacgcacgatcttccagaacttcaacctgtcggttcagccgggcgagcggatcgcgatcatcggcgagaacggcgcgggcaagacgacgctgctgcgttcgctgctcggcgcgctcacgctcgatcacggcacggtgaagtggtccgagaacgcgaatgtcggctacatgccgcaggacacgtacgaggagttcccgaacgacatcacgctgatggactggatcgaccagtaccgcaaggacggcgacgacgaaacgatggtgcgcggcacgctgggccgcctgctgttctcgtcggacgacatcaggaagtcggtgaaggtgctgtcgggcggcgagaagggccgcatgatctggggcaagctgatgctcggccgccacaacgtgctgctgatggacgagccgaccaaccacatggacatggaatcgatcgagtcgctgcagatcgcgctcgagcagttcgaaggcacgctgatcttcgtgtcgcacgaccgcgagttcgtgagcgggctggcgaaccggatcatcgaagtgcgtacggatggcacgctgttcgacttcggcggcaattacgaggagttcctgacgagtcaggggcaggagtaag

SEQ ID NO: 275255 - DNA, 334 bp, Unknown
  Bacterial polypeptide expressing nucleotide sequence isolated from the Sargasso Sea
ctgcaccatgcggccgataccagcgtggatctgtggcgggtactggcccaggtcggtctggccgggtttgaagaaaaccccaccggtcagctctctgccggccagcagcgccgtgtcgcgctggcccgcctgtggctcagagacaagccggcgctctggatcctggatgagccgttcaccgccatcgacaagcagggggtgaaggtgctggagcggctgttcctgatccacgccgaacgagggggcatggtgatcctcaccacccatcaggacatgaccctgatgcagggacggttgaagaccctctctctcacgcccttgctgcaggagtagt

SEQ ID NO: 275256 - DNA, 1091 bp, Unknown
  Bacterial polypeptide expressing nucleotide sequence isolated from the Sargasso Sea
cattttaaagtcgtttggggagacaaaagttctccgagacgtcagcctcgaaatttacgatggtgaatttactgctctagttggaccgtcaggttgcgggaaatccacattgcttaggatattggcagggcttgaggatcttgatgacggttctgtcaggatagataacatagatgtttccgaggctagtgcctctgaacgaaacctatctatggtttttcaatcctatgcgctctatccacacctaacagtgcgtgagaacattgctgtccccttgcgaatgagagaattaaattcaagccaacgattacccttttttggcagctttcttacccccacaccaatcaaacagaatatttctgataaaataactgctgctgcaaaaatgcttgaaatcgatcacctactcgaacgaaaaccgggtcagctctcgggcggacaacgtcagcgtgttgcgcttggtcgcgcccttgttcgcaagcccaaagcctttctccttgatgagccgctctcaaatcttgacgccaaattaagggttcaaacacgctcagagataacgcaattgcatcggcagctgaagtcaaccttcgtctatgtcactcatgatcaagtagaagcaatgaccatggctgatcgaatagcagttatgaaggatggcgaaatcctgcaatacgatacaccagaaaatatttacaataagccttcatccgtacatgtggccgaattcatcggctctcccaagattaatatttttccagctggactgataaatcaaaattatgactccaaactcaaactaggtgttaggccagaaaatattaaacttaatgaggggacatgtaggctaaaggtgattatttctcacgttgaaaacctcggaccggaaatccaagtccagttcgaacttccttccaataaagaccggttttactcaaaatttgaccccaagtatttaggacattttcctgttgacagcgaagcacagattggatttgacgaagtcgattgccatcttttcgatgacaagggtcgccgccttgatccctctagagtcagacaattctttgaaagcttaaaccaagccgcatgac

SEQ ID NO: 275257 - DNA, 712 bp, Unknown
  Bacterial polypeptide expressing nucleotide sequence isolated from the Sargasso Sea
ttggaattcgcgactgcgaaaaagcgttcatgtggtagactagcgccattttttaaaacctcttttttaggttggagtagccaagtagtgttagaggcgtgcggattaacgtgcagcaaacgagatagaaccctttttgaggggctttcactggttgttaatactggtgagttgctgtacttgcgcggccctaacggtgcaggaaaaaccagcttacttcgcatattaactgggttgagtgcacctgagtcgggcgccgttttatataacggtgtaaacatttccgaagacaagaccggctattatcgcgatcttttctatttaggacataagagcggtactaacggcagcctttcagccttggataacttatcattttggttagcccaacacagtatatcggtacaagaaaatacgctgtatgacgtcttggcaaaagtagggttagttgggcttgaagatgtgcctgttaggtatttgtcggcaggtcaacagcgtcgtgtggcgctatcaagactatggcttaagccagcaaaggtgtggatattagacgaaccgtttacagcgcttgatgtaaaaggggttcacatgcttgaaaaaagtatgaaagagcacgttggtcgcggcggtctcatcattactacttcgcatcaacacctatcagaaactgcaggggaacaccgcgtatttgacctggagtaccgcttttaat

SEQ ID NO: 275258 - DNA, 1099 bp, Unknown
  Bacterial polypeptide expressing nucleotide sequence isolated from the Sargasso Sea
atgacgagtaatgaagaaaatttcattgagataaacggcgtcagcaaaaattttggcgaagttgttgctgttgataatgtggatttagcaatcaaaaaaggtgagctcttttctatacttggagcatctggctcgggcaaaacgacgcttttgagaattctggctggcctagagataccaagtcagggaagcatattaatcgatggcgttgatatgacgtctgtgtctccatacgacaggcctgtaaacatcatgtttcaaaactatgctttatttcctcacatgagtgtttttgacaatattgcatatggcctaaagaaagaagggatggaaaaagaaagcattcaagaaaaggtagagaggatgcttgcattggtgaaattggaaggttacgagagcagaaaacccaatcaactctcgggtggtcaatctcaaagagtcgccttggcaagatcgcttatcaaagaaccaaaggttcttctgctagatgaacccatggcggcacttgataaaaagctcagacagagcactcagtttgagttaatggatatccacgatgaacttggcataacctttgtgattgttactcatgatcaagaagaagcgatgacactctctgaccgtattgcaatcatggaagaaggtcagtttgttcaaataggttctccgaatttaatttatgaaaatccaaaatctaaatttgtggctgacttcttgggcaatatcaatctcctggaagcaacaattactaagcaaaacgatagtcagattgttgtcaactgtgccgcacttgggggtgagctaaagtttaatcaaactgaacaatccaatgcacttgaaatgactgtggccctcaggccagagaaagtggtgattgaaaaaagcaagccaacaaatgatcagcaaagccatgttaagggaattgttgaggattttgggtacttcggcaacctttcaatttatcgtgtcaggactgaaagtgggcatatcatacaagtcagcaaacagaatagagatcgcgtggagcaatccatcaaatgggaagatgaagtttacctttcttgggaaaatgacagtttgatgttactgggtgagtagt

SEQ ID NO: 275259 - DNA, 622 bp, Unknown
  Bacterial polypeptide expressing nucleotide sequence isolated from the Sargasso Sea
tatgcttgaagccagagaattactttgcgagcgggatgacagaatactgttcagcgagttgtcatttcgcgtcaacgcaggggaatgggtacaaattaccggcagcaacggcgcagggaaaaccactctgctgcggttgcttaccgggctggcgcgtcccgacgcaggggaggtttgctggcaagagcaacctctgcatcacgtgcgggacagctaccatcagcaactactgtggatcggacatcagccggggataaaaacccggctttcggcgttggagaacctgcgtttcttccatcatgacggcgacatcgcgcagtgtctggctgcgctggcgcaggctggacttgccggatatgaagatatcccagtgaaccaactttccgccggacaacagcggcgcgtggcgctggcccgtttgtggctgacccgcgcccgactgtggatcctcgatgaaccctttaccgccattgatgtgaacggcgttgagcgactgactcagcgtatggcgcagcatacggagcagggcggtattgttattctcaccacccaccaaccgctcaatgtcgagaccgataaagtgcgacgcatttcgctgaccagtgagagggcaacgcaatga

SEQ ID NO: 275260 - DNA, 1099 bp, Unknown
  Bacterial polypeptide expressing nucleotide sequence isolated from the Sargasso Sea
atgacaagtggtgaacaaaatttcattgaaataaaaggcgtcagtaaacattttggtgatgttgttgctgtagacaatgttgatttagcaatcaaaaagggtgagcttttttccatacttggtgcatcaggatctggtaaaacaacccttttgaggatattggctggcttagagataccaagccaaggaagtatattaatcgatggtgtggacatgacatcggtggctccatatgacagacctgtaaacatcatgtttcagaactatgctttatttccccacatgagcgtctttgagaacattgcatacggcttaaaaaaagaaggactacaaaaagaaagcattgaagaaaaagttcagaaaatgctcgctttagtgaaacttgagggttatgagaatagaaaacccaatcaactctctggcggtcagtctcaaagagtcgccctagcgagatcgcttgtcaaagagccaaaagttcttcttctagatgagcccatggcggcgcttgataaaaaactcagacagagcactcaatttgagctaatggatattcatgacgagcttggaataacctttgtaattgtcacacatgaccaagaagaagcgatgacgctctcagatcgaattgcgatcatggaacaaggacagtttgtgcaaataggctctccaaatttaatatatgaaaatccaaaatctaagttcgtggctgacttcttgggcaatatcaatcttcttgaagcgatcatcactgaacaaaatgacaaagagatcgttgtcgactgtgctgcacttgggggtgagttaaagtttgatcaaactgaagaagcgaatgcatctgaaatgactgtggctctcaggccagagaaagtaatgattgaaaaaaacatgccaacaaatgatgaccaaagtcacattaaaggcattgttgaggactttggatactttggcaatctttctatatatcgtgtcaggactgagagtggacatgtcattcaggtcagtaaacaaaacagagatcgagttgagcagtccattaagtgggaagatgaggtatacctttcttgggataatgacagcctgatgttattgggtgaatagt

SEQ ID NO: 275261 - DNA, 517 bp, Unknown
  Bacterial polypeptide expressing nucleotide sequence isolated from the Sargasso Sea
caccactgaacttcgtaatcaatttgcttatgtgtctcaagagcctataatttttgctaatacggtatttgaaaatataaggtttggaagacctaatgcgtcaattgatgaagttgaaacagcagcaaaaaatgcagcatcccatgaattcattatgaacttaccaaatggctataatacttttgtaggagagagaggcgtattactttccgttggacaaaaacaaagaattgcaattgctcgagcatttttgaaaaatgccccaatacttctgcttgatgaacctacagcttctctcgatgcagaaagtgaaagtcttatacaaggggcattggaaaaactatcaataagtagaactgttattgtgatagcacacagactttcaaccgttaaacgagctaataaaattttagttttaaatgaaggtaaaatagtttctgaggggactcatgaacaactcattaacgaaaaaggtctttattcaaagcttgcaaaacttcagtttttaaccaattaa

SEQ ID NO: 275262 - DNA, 515 bp, Unknown
  Bacterial polypeptide expressing nucleotide sequence isolated from the Sargasso Sea
cttacgattcaatagtttaaaggaaattgaactttcatctcttagagaaaagattggtctagtaagtcaagatgtatttttgtttgaaggcaccgtaattgagaacatagcttatggagatttgaatgcctccgaaagtgaagtatggaatgctgctcaaaaatcagaagctgatgaatttataaataatttgccacaaaaagaaaacacaattgtaggtgagagaggtcagaaactatctggtggtcaaagacagagaatatcaatagctagagcaattctaaaaaaccctgaaattttaattttagatgaggctacttcatcagttgataatgaaactgaagcagctattcaaagatcacttgatattcttaaaaaagatagaactgttatagttattgcacacagactttcaacagtaagaaatgctgacatcatttatgtattagaaaatggttctgttgttgagtcaggcaatcatgattcattattagacattgaaggtgtttactcga

SEQ ID NO: 275263 - DNA, 472 bp, Unknown
  Bacterial polypeptide expressing nucleotide sequence isolated from the Sargasso Sea
actatttccaggttcagtaaaggaaaacattctgtatggtaatcccgaagcttcgatggaggaaatcaccgaggctgctactgttgcagaagcaatgagcttcattgaagaactcccaaatggctgggagacaaatataggtgaggatggacaccgcctatcaggtggccagagacagaggattgctatagccagggcagtactgaaggatgcaccggtattggttctagatgaggcaactagcaatgtagataacgaaactgaggctgcattacaacgttcaatagagaggatatcagtggataggacgacactgataatagctcacaggctatcaacagtaaggaaggcggacaaaatagctgttatggagcgaggcaagattaccgaaatggggagtcatgacgagctgatatcgaaagacggcctgtatgctagactttggtctgtccagacaggggaggcgtcataa

SEQ ID NO: 275264 - DNA, 734 bp, Unknown
  Bacterial polypeptide expressing nucleotide sequence isolated from the Sargasso Sea
ccgctttgaagcggttgatttcgcctatgccggtcgtgctgcactgttgcagggctttgatttgacagtcccggcaggctcgaccctgggcattgtcggtgccaccggatctggcaagagcacggtggtgaaattgttgttgcgtctctatgagcgcgatggcggacgcatctgtctcgatggtgttccgatcgacaccctgcagcttcaagacctacgccgctgcatcgccctggtcagtcaggacgtttacctctttcacggcaccgtggccgagaacattgcctatggggtggccgatccagatccagtggcgattgagcaagccgctcgcctggcggaggcctccgcattcatcgatgccttgccccaggggtacgacacactcgtcggcgaacgggggcaacgcctgtccggtggacagcgccagcgcattgctctggctcgcgccatcctcaaagacgccccagtgctggtgctcgacgaagccaccgctgcggtggacaacgacactgaagctgcgatccagcgctcattggctcagatcacccagcaccgcacgaccgtcgtgatcgcccaccggttgagcacggttcgccatgccgactggattgtggtgatggatcagggcaggattgttgagcaggggtctcacgacagcctggtggccaacggagggatctacaccaatctctggcaggtgcaggccggagaagggcttatcgcttcctgaa

SEQ ID NO: 275265 - DNA, 517 bp, Unknown
  Bacterial polypeptide expressing nucleotide sequence isolated from the Sargasso Sea
gcgccgctgcatcgccctggtgagtcaggacgtctacctcttccacggcaccgtggccgaaaacatcgcctatggcgtcgcagatccagatccggtggcgattgagcaggccgctcgcctggcggaagccgccggattcatcaacgccttgccccagggttacgacaccctggtgggggagcggggacagcgcctctcgggcggacagcgccagcgcatcgccctggcccgcgccattctcaaggatgccccggtgctggtgctcgatgaagccaccgcagcagtggacaacgacaccgaagccgccatccagcgctccttggcgaagatcacccagcaccgcaccaccgtggtgatcgcccaccggttgagcacggtgcggcatgccgactggattgtggtgatggatcagggccggattgtggagcagggcagccatgagagcctggtggcccagggcgggatttacaccaacctttggcaggtgcaggccggcgaagggtttatcgcttcctga

SEQ ID NO: 275266 - DNA, 428 bp, Unknown
  Bacterial polypeptide expressing nucleotide sequence isolated from the Sargasso Sea
gagcgcgaccgatgaggaagtcctacaggccattgaggccgcctatctgggtgatgtgattgagcggctccccgacgggctcgagagcatcgtaggcgagcgtggactcaagctctcaggcggtgagcgtcagcgggtatcgattgcccgggcggtgctcaaggacgcaccgattctggtgtttgatgaggccacctccagcctcgatagccactccgaacaagcagtgatgagcgccttcagagcgctggcaggccgacatacggcgctggtcattgcccaccgactctcgacggtggtggatgccgatcgcattgtcgtgattgaacacggcgcggtggtggaagagggcacccatcacgaattactcgaagccaacggaaaatatgtcgagctgtggcgtattcagcgcgagcagcagggttagc

SEQ ID NO: 275267 - DNA, 586 bp, Unknown
  Bacterial polypeptide expressing nucleotide sequence isolated from the Sargasso Sea
ttgttaagattctacgaatttcaaaatggaattattgaaattggaggtctttcaattaaagaagttgacaccactgacttacgtaatcaattcgcttttgtatctcaagagccaataatttttgctaattcagtatttgaaaatataaggtttgggagacctaatgcatcaattgatgaagttgaaacagccgcaaaaaatgcagcagctcatgaattcattatgaatttacctaatgactatgatacttttgtaggagagagaggtgtattactttctgttggacaaaaacaaagaatcgcaattgctagggcatttttgagaaatgccccaatactattgctcgatgagcctacggcttcactagatgcagaaagtgaaaatcttatacaaggcgctttggaaaaactatcaataagtagaactgttattgtcatagcacatagactttcaacagtaaaacgagcaaataaaattttagttttagataaaggtaaaatagtttctgaggggacccatgagcaacttattaacaaaaaaggtctttatgcaaagctagcaaaacttcagtttttaacaaattaaa

SEQ ID NO: 275268 - DNA, 949 bp, Unknown
  Bacterial polypeptide expressing nucleotide sequence isolated from the Sargasso Sea
caggctttaagtggccagttggctgtgggcacctacagcgttctggtgttcatcacccagcggctgctgtggccgctcacggccctcggccgcacgcttgatgagtaccagcggtccatggcctccacccagcgggtgttggatctgatcgacaccccagtcacgatccgcagcggccagaccccgctggaccgacggctggtgcgaggagagattcactttgagcaggtggatttcgcttacccggggcgggcttctctgctgcagggcttcgatctggtggtgccgtccggggcaacggtcggcatcgtcggctccaccggctccggcaagagcaccgtggtgaaactgctgctgcgcctctatgagcgtcagggggggcgaatccttttggacggtcgtccgatcgaacagctgcagcttcctgatctgcggggtgcgatcgcgctggtgagccaggacgtctacctcttccacggcacggtggctgagaacatcgcttatggcgttgccaaccctgatcctttggctattgagcaggctgcccgtctggcggaggcggctggtttcatcgaagcgctgccggatcgctacgacactcttgttggcgagcgtggccaacgcctttccggtggccagcgtcagcgcatcgctctggcccgggcgatcctcaaggatgccccggtgctggtgctggatgaggccacggccgccgttgacaacgacaccgaagcggcgattcagcgctcactggaccagatcacccgcaaccgcaccaccgtggtgatcgcccatcggctgagcacggtgcgccacgccgatcggattgtggtgatggagcagggacggattgtggaacagggccgccatgacgagctgctggcccatggtggcgtttacgccaatctctggcaggtgcaggccggcgaacggcttatcgcttcctgaa

SEQ ID NO: 275269 - DNA, 1273 bp, Unknown
  Bacterial polypeptide expressing nucleotide sequence isolated from the Sargasso Sea
gttaatttaaaaatagctttaatagttggcttcacactagccttggtatatggaattattttcttttttacccgaagtttaatttttaagattggtaaagaacgcttaaaagcaagtgagtcacttttcatatctgttagtgaagcttttggagccatcaaggaaattaaagtctctggatcagaaaaaaattttattaatagatattcttatcctgcaaaaaatcttgcaaagtctcaagctttattaggtttaattagtaccttacctcgttttgcacttgaagcgattgcttttggtggcattatattagtgatcctttattttattgctcaaagtggaagttttaatgatataattccaattattgcattatatgtttttgccggttaccgtttaatgcccgctattcaaggtatatacagatcagcagcacagatacgatatgctaaaccatcactcgatagtttatataaggacttaaaaaacttaagatctacaatttcagcaaatagcgaaaatagattacagctaaaaaaaaatatttctctaaagaatattttttatcagtatcctaattcaaaaaagttagttcttaatgatcttaatttaaatatctcagcgagctctaaaataggtatagttggcgctactgggagtggcaaaactacaattgtagatataattttaggtttattagaatttcaaaaaggacgttttgagattgatggtaaattaattgagaaaaataatatgagatcatggcagaattcgattggttatgtgccacagaatatttttttatcagatgatactgtattggctaatatagcctttgggatagaaaaaaatgaaataaatcaacatagtgttgaaagtgctgctaaaatagcaagtctacatgaatttgttgttaatgaactaccagaaaaatatcaaacgtatataggagagaaaggcataagattatcaggtggtcaacgacaaagaataggaattgcgagagccttgtatcataaaccaaaattactaattttagatgaagcgacaagttccttggataatttgactgagcaagatgttatggatgcagtccataacatgggcaaagatttaactgtaataatgattgctcatagattgagtacagtaaaagaatgtgatagtatagtagttttagagaaaggtgagattaaacatcaaggaacttttcaagaattaaccaaaattaacgattattttcgcctagctacaagtgactttaaaaaatgaa

SEQ ID NO: 275270 - DNA, 742 bp, Unknown
  Bacterial polypeptide expressing nucleotide sequence isolated from the Sargasso Sea
gaggggagattgcttcgagcgggtggattttgcttaccccggtcgagcggcactgctgcaggggtttgatctgacggtgccgtcgggtgcaaccgtcgggatcgttggatccaccggctccggcaagagcacggtggtgaaactgttgctgcgcctctatgagcgccagggggggcggatcctgctggatggccgtccaatcgaacagctccagcttcaggatctgcgcggtgccattgccttggtcagccaggacgtctacctgtttcacggcacggtggctgagaacatcgcctatggggttgctgatcccaatccagcggccatcgaacaggccgcccgtctggcggaggccgcaggtttcatcgaggctctgccggatcgctacgacaccctcgtcggcgagcgcggccaacggctctctggagggcagcgtcagcgcattgcactggctcgagccatcctcaaggacgcgccggtgctggtgctggatgaggcaacggccgccgttgacaacgacaccgaagcggcgattcagcgctcccttgagcagatcacccgtaaccgcaccaccgtggtgatcgcccatcggttgagcacggtgcgccacgccgatcggatcgtggtgatggagcagggccggatcgtggaacagggacgccacgacgacctgcaggcccaaggtggtgtttacgccaacctctggcgggtgcaggccggcgaacggcttatcgcttcctga

SEQ ID NO: 275271 - DNA, 748 bp, Unknown
  Bacterial polypeptide expressing nucleotide sequence isolated from the Sargasso Sea
ggtgtgatgccacggcagttcatccagctacgtgatgtgagcttcagctactccggcagtgaggaatctgtgctgtcgaacgttgatctcaccattcccgttggatcacgcatcgccctggtcggtcgcacgggcagcggcaaaaccaccctggcccatctgctgcttggtctgttccgccccagcagtggtgatctcaccctggacggtcttcctctgaatgaggaagagttgccggcctggcagggcaactgcgccctggtgccccaggacatccgactgctggacgccagcatccgcgacaacgtcgccttcggctgtgatccggaggagatcgaagacgatcaggtctgggcagcgctggaagcagctcagttcgacgatgtcgtcagcgccatgccgtatgggcttttcacaatgatcggtgaaaacgggatcaagctgtccggcggacagcgtcagcggttgtctctggcccgtgccttctaccgcgatgccaaggtgctggtgctggatgaggccaccagtgctctcgacaacaagaccgagcacgatgtgatgcaggccttggatctggtgggacgtcgctgcaccacgattgtgatcgcccatcgcctctccaccgtgcgcaagtgcgatcgcatctatgagatcgaagacgggcggatcaaagcgtcgggtgatttcgacaccctcttcctcctgtcggacagcttccgcgagatgacccggttcgaaaccgcctgag

SEQ ID NO: 275272 - DNA, 823 bp, Unknown
  Bacterial polypeptide expressing nucleotide sequence isolated from the Sargasso Sea
tatcgtatattacctgcattacaacagatttatgtctcattaacacatctacgaattgttggtccttcacttgactccattcatgatgatcttaagagcttacaaccacaagttaaagttgaaaaagataaaaattctctacaattagataaaagtataaatttaaatcatattcattatcattatccaaattcatcaagtacaaccttaaaaaatattaatcttaatattcctgctcgtaaaacagttggtttagtaggtgccaccggtagtggtaaaactactactgttgatataattcttagtttacttgaagctcaacaaggaacactagaggtagatggtaaagtgatcaataaagataatcgaagagcttggcaacgttctattggttatgtacctcaacaaatttttctggctgatgacactgtagctgcgaatattgcttttggagttgatccaaaaaatatagatatggaggctgttgaacatgcagctaaaattgcaaatttgcatgaatttgtgattgatgagttacatttaaaatatcaaaccactattggtgagagaggggtgagattgtctggcggacagcgacagcgcattggaatagctagagcgctttataataagccacaagttctaattttagacgaggcaacaagtgctctagataatctcacagagcaggctgttatggaggcagttcataatctgagaaaaaatattacaattattttaattgcacaccgtttaagtacagtaaaaaattgtgataaaatattcttttttaacaaaggtcagctgaaagccaaggaacttt

SEQ ID NO: 275273 - DNA, 445 bp, Unknown
  Bacterial polypeptide expressing nucleotide sequence isolated from the Sargasso Sea
tgctgctaacattgcttttggtgttgataaaaaagatattaatcaagaacgtgttaaattagttgctaaaattgcaaatattgatgaatttgttattaataagttgccacaacaatatcaaactactgttggtgagcgtggtgtaagattatcgggaggagagcgccagcgtataggaattgctagagccctttatcgtgaccctcaagtattaattttagatgaagctacgagtgcactagacaatttaaccgaagagttggttatgaaagagattcacaaaattagcaatgacaaaactattataatgattgctcaccgtttaagtacagtaaaaaaatgtgatttaattttttatttagaaaaaggagagcttaaagcacaaggaacatatgaggaattaattaaatccagcgaggggtttaaaaaaatagaaaataaatga

SEQ ID NO: 275274 - DNA, 517 bp, Unknown
  Bacterial polypeptide expressing nucleotide sequence isolated from the Sargasso Sea
ttattcagtgcaagtgttgaagaaaatttgcgttacgggaaatccgaagcttccggggatgagatccgcaatgcggttgaaaaggcttttgctacggagttcattgagggacttcctcaaaaatacgaaagttttttgggagaacaaggggtcaggctttcgggcggacagcggcagcggattgcgattgccagggcgcttctcaaggacccggcgttgctattgctcgatgaggcgaccagtgctcttgatgccgaaagcgaacggatggtccaactggcacttgatgacttaatgcgcaaccggaccagtattgtgattgctcatcgtctttcgacggtgatcgacgcagatcagattgcggttctcgaccagggaaggttggtcgccctcggaactcatcgagaactgatggattcttgcgaactctattcccagctcgcccgcttacagttcagggagcccaggctcctgaaacccacctgcaagcggttcctgcctgattatcaaatctaaa

SEQ ID NO: 275275 - DNA, 523 bp, Unknown
  Bacterial polypeptide expressing nucleotide sequence isolated from the Sargasso Sea
ggaaagctggcgccaaaagatcgcactggtgccgcagcatcccacgctgttctcgggggatatcttctacaacattgcctacggcgctaccgagccaacccaggcggcagtggaagccgcggcgcaaatggcccatgcccacgagtttatccagacactccccgagggctaccagagccatctgggcgcgcagggtgtccggctgtcaggaggacagcgccagcgtatcgcgctagcccgcgccattctcagcgacccggagctgttgctactggatgaagccaccagcgccctcgacaccgagagcgagtggcacgtgcaacaggcgctcaccgaaatcatgcgggagcgcaccacaatcatcattgcccacaggctctccaccgtgatcaacgcggatcgcatcgtagtaatggatgaggggcaagtcatcgacagcgggccccacgatgagctgatgaaacgttgcaagctctaccagcgcctcgcgcggctacagttccagaccgaaaagacgcgttaa

SEQ ID NO: 275276 - DNA, 319 bp, Unknown
  Bacterial polypeptide expressing nucleotide sequence isolated from the Sargasso Sea
ttctggaggtgaaaaacaacgagttgctatagcaagagccttactaaaaaaacctaaaattttcttttttgatgaagctacttcttcgttagatacaaaaacagaaaaagaaattcaaaataatctagaacatttatcaaaaaatataacaaccataataatagctcatagactttctactgttaaaaatgctgacaatataattgtattaaataatggagaaatagctgaaacaggaaatcacaaaaaattattagaatttaatggattatattcaagcctttggagacaacaagaaaaaaactttaaagataagtaa

SEQ ID NO: 275277 - DNA, 694 bp, Unknown
  Bacterial polypeptide expressing nucleotide sequence isolated from the Sargasso Sea
actgacgcggtcgtcgtcctcgcaaggtgggccggacccgtccagcatccgcggcgagctcaccctccaaaacgtgcacttcaagtacaaaacccgcccagacaacctcgttctgcagggcataaacctcaatatgcgccccggaaccacgaccgcgttggtcggcaagtccggcggcggcaaatccaccatcatccatctattgctgcgtttctacgagcccacgaagggcaaaatcttcctcgacaagaagtacgatttacatgatattgaccccagggtcgtccgccagctggtcggcttcgtcgcgcaggatacgcagttgtttgcgaccacgattttggagaatctgctctatggtttaccagatagggagtcgatttcgacggatagtgtgattaaggcttgtaaattagcaaacgcccacgagttcatctgcgaaatggaggaaaaatacgaaaccagggtcggcgaaaaaggtatcatgctctcaggcggacaaaaacaaagattagcattagctaggtgttttctgagggagccgaaattcctgtttttggacgaagcgacttctgcgttagatgcggaaaacgaggctttggttcagaagggtatcgacgagctgctgaagaagacggatgcgacagttttgctgatcgcacacaggctttcgacggtcctgaactctgaccag

SEQ ID NO: 275278 - DNA, 673 bp, Unknown
  Bacterial polypeptide expressing nucleotide sequence isolated from the Sargasso Sea
tttcgatataaatttcttttatccagaatcgaaatatgcagctttaaaaaacgtttcacttcaatttaattcaggtgaatcaataggaattattggttcttcaggtgcaggaaaaacatccttagttgatttaattttaggattactacagccgcagtcaggtataataaaatataataatgttgagttaaaaaaagtactaactcattggcgttcacaaatcgcatatttaccacaacaagtgtttctcattgataatacaattcgtaaaaatatagctctcggggaattagaatcagatattaataatgaacgaattatagaggcacttaaaatggcttctttaagtgatttaataaatcaactccccgaaggtataaatactgttatcggtgaacatggggcaaaattatctggtggtcaaagacaaagaattgctcttgcaagagcattttatcatagacgcactattttaatattggatgaagcgacaagtgctttagataatgatacagaagcttttattgtttcagaaattcaacggttgaagagacataaaacaatgatagtgattgctcatagactttctactgtaaaacattgcgatcgaatatacagattagaaagtggtaaaatagtggaagaaggtactcctgagaaagttttgaagtaa

SEQ ID NO: 275279 - DNA, 522 bp, Unknown
  Bacterial polypeptide expressing nucleotide sequence isolated from the Sargasso Sea
acgatgtaaatttattttctttaagaaaaaatatatctctagtgagccaagatgttatactttttgacgatacagtaagatctaacatcttatatgcaaatcctaatgctactgatgatcaaatttatgatgcttgtaaactagctgcagcagaagaatttattattaaacttccagacggatatgataccaaaattggtgagaatggtgtaaaattgtcaggtggtcaaaaacaaagaatatcaattgcaagagcaatattaaaaaattcgcctattatcttattagatgaggcgacttcagctttggatactgagtcagaaaagaaagttcaagttgccataagaaagttgacagaaaatcgaactactttggtgatagctcatagattgtccaccgtttacaatgcagacactatatttgttgtaaataacggtaacattgtcagttttggaactcacaaagaattgattgagaagagcttagagtataaatctttgtatcaaaaacaattggcttaat

SEQ ID NO: 275280 - DNA, 289 bp, Unknown
  Bacterial polypeptide expressing nucleotide sequence isolated from the Sargasso Sea
tcagcgccagcgaataggaatagctagagcactatacaataaaccaaatgtattaattttagatgaggctacaagtgcattagataatcttactgagcaagcagtaatggatgctttacaaaatttaaacaataatattactgttgtgatgattgctcatcgtttaagtacagtaaaaaagtgtgataatatttttttgctggaaaaaggagagcttaaaggagaaggaacatttgaaaaattaattaaagaaaatgaaaacttccgagccaatgtcaataaaatgtaa

SEQ ID NO: 275281 - DNA, 932 bp, Unknown
  Bacterial polypeptide expressing nucleotide sequence isolated from the Sargasso Sea
catggagtcactaggcggcgttgccatagcgatcataattttttatggcggcagtcaggtcattgtcggcgccactacaccaggtacttttgcttcctttatagctgccttactgatggcttatccggcaatgaaaaatctggcaaacctcaatgctaatcttcaggaaggcctcgcagcggcgcagcgggtttttgcccttatagatacgagcccgactattcaggataaaaagggtgcaagaaaacttgaaaatattcagggtaatgtgaagtttgaaaatgtaagttttagctatgagaataaccgtttagccctgtcagatatcaccttagatattccagctggaagtaccgtcgcattggttggaccatcgggagccggaaaatcaactatcttaaatcttatcccgcggttttacgattgcgataagggttgcgttttaattgatgacgaaaatataaataatgtcgtggtatcctcacttcgtgcaaatatcgccttagtctctcaagatatcaccttatttgatgataccatccgtagtaatattgcctacggaaaaccaaatgcctctgatgatgaaatcgtcaacgctgcaacagcagctgaagcacatgaattcatcaccagtctaccggatggataccaaactcatgttggtggccgcgggctaaagctatcaggcgggcagcgtcagaggatagctatcgcccgggctatgttaaagaatgctccaattttattacttgatgaggcaacctccgcgctagatacggagaccgaacgtcaagttcagtcagctttagaaaatttgactaagggacgcacaacaattgttatagcgcatcgtttatcgactgttatgtccgccgaatataatctttgttatgaattcaggagaaattatcgaaaagggcagtcacgctaaa

SEQ ID NO: 275282 - DNA, 745 bp, Unknown
  Bacterial polypeptide expressing nucleotide sequence isolated from the Sargasso Sea
gttggggatttttcatagcattgttttaaatcaagttgattttaaatatgaaggtcaagaatcaaaagctattgatggtattagtctagctataccctttaaatctaccgttggcattgttggcagtactggatcaggtaagacaacaattgttgatattattttaggtttattgagaccaaatagcggctttataatggttgatgatacattgattaataatacaaatatccgtacatggcaaaaaacaattggttatgtacctcaacagatttatctatctgatgatactatccaagcgaatattgcatttggacatgatccaaataatattgattttaaaaatattcaaaatgcagcatcaattgcaaatctacatgattttattatagaaaaacttccaaacggatataatacaaagattggcgaacagggtgtccgtctatcaggcggccaacgacaaagaattggaatagcaagggcattgtattatgatccggaagtccttgtatttgatgaagcaacaagtgcattagataatcttactgagaatgcagtaatggaagctgtttctagtattgcaaataaaaaaactatcataatgattgctcataggctttcaactgttcgtgattgtgataatatttttgttttagatgaagggaagctcgttggagaaggtagttatgatcagctaatgaatactaatctggaattccagaaaatgattaagtttgataattaa

SEQ ID NO: 275283 - DNA, 786 bp, Unknown
  Bacterial polypeptide expressing nucleotide sequence isolated from the Sargasso Sea
tcgattgggagaatgagttggattcaggtaggtatgttactaaacgagcaaaaggcgcaatcgatcttaaaaacgtatcctttagatatccagggtcaaatattagtgctttaaagaatatttcgctgcaaatagtagctggtgaaacgattgcgatcgtaggaccatcaggtagcggaaaaactacactggttcaactgctcgctcgattttatgcgccttcagctggagaaataacacttgatggaattaatatagaagagtactccattaaaaattttcgatctcaaatatcaatggtttcacaatcggtgactttatttagagatactgtttttaacaatatcgcatttggcgaacttaaaggctcaaactccgaaaaagttttcaaagcaagcgatatagctaattcaacttcctttatagaagcacttacagatggttttcaaacagagttaagcgatgaaggagagagtataagtggtggccagcgtcaacggattgcgatctctagagctgtacttaaggatgcacccatctttattttagacgaagccacatctgctctagatagtgaatctgaatctctgattcaagaagcgctagatgcaataataagtaatagaaccagtattataatagcgcacagactttccacagtagaaaaagcagatcgtatctatgttttagatgaaggaaaagtgatagcagttggaaatcatcgcgagttacttcaacagcaaggtctatacgctcatctttataataaggattttaaggattgaa

SEQ ID NO: 275284 - DNA, 696 bp, Unknown
  Bacterial polypeptide expressing nucleotide sequence isolated from the Sargasso Sea
ccgaccgtcccattctgcaggatgtgaactttaccattcccgccggccacaccgtggcggtggtgggcgccagcggcgcgggcaaatctaccctcgcccggttgctgttccgcttctacgaagtcgataagggcgcaatccggattgatggccaggatatccgatcggtcacccaagacagcctgcgttcggccatcggtgtggtgccgcaggataccgtgctgttcaacgacaccctttaccgaaacctggcctatggccggcctgaggccaccgaggaagaggtgtaccgggcggcgaaaatggcccatctggaaaactttatccacagtcttccagaaggctacgaaacgaaagtcggcgagcgcggcctcaagttgtctggcggcgaaaaacagcgggtggccattgcccgggttatcctgaagaacccgccaatactgatcctggacgaggcaacctcctccctggactccttgtccgaacaggccatcctcggtgccctgaaagaggtcagccaccagcgtactaccctggtgattgcccacaggttatccacagttcgcgatgccaatagcattctggtgatggacgggggccggattgtcgaaagtggcagccatcacgagttgctggcccgcgatggtcattacgcccgtctttgggaacagcaacatcggactgaggataactgat

SEQ ID NO: 275285 - DNA, 448 bp, Unknown
  Bacterial polypeptide expressing nucleotide sequence isolated from the Sargasso Sea
attcgttttggtcgcgaggcaacggatgctgaggtgcggcgtgcggcagaactcgccaacgcctccggattcattgaggctctcccccttgggtacagcgcgcgagtggaagaacgcggctgcaacttctctggcggtcagttgcagcggctagccatcgctcgagcggtgctcggcaatcccgccgtcatgctgctggatgaggccacaagcgccttggatgccgaagccgaagctgccgtccagcagggtttagagcaggccatggctggacgcaccgtgttcgtgattgcccaccggctttccacggtgcaggaagccgatcgcattttgttcctcgagcgcggccgcatcatcgagcagggcagccacgatgaactcatgcgttctggcggtcgctacagcgctttgtgcagccggcagatcattcgtcctgcactgatctgat

SEQ ID NO: 275286 - DNA, 373 bp, Unknown
  Bacterial polypeptide expressing nucleotide sequence isolated from the Sargasso Sea
gctcttgattttattgagaataccccacacggatttgagacagttgttggggaaagaggtgtaaaattgtctggaggacaaaaacaacgaatagctattgctagagcattgctaaaaaacccttctattttaattctcgatgaagctacctctgcgctagatactgaatcagaaaaaaaagttcagacagctattgaatcattgatgaaagatagaacggcattagtaatagcccaccggctatcaacggttcaaaaagcggacaaaatcattgtgattgaaaatggaaaagtggctgaaacaggttcgcatgaaactcttttcgaaaaaaatggaatttatagacgactttatgatttacaatttgattaac

SEQ ID NO: 275287 - DNA, 370 bp, Unknown
  Bacterial polypeptide expressing nucleotide sequence isolated from the Sargasso Sea
ttgggagaacaaggggtcaggctttcgggcggacagcggcagcggattgcgattgccagggcacttctcaaggacccgacgttgcttttgctcgatgaggcgaccagtgcacttgacgccgaaagcgaacggatggtccaaaaggcacttgatgacttaatgcgcaaccggaccagtattgtgattgctcatcgtctttcgacggtgatcgacgcagatcagattgcggttctggaccagggaaggctggtcgcccttggaactcatcgagaactgatggattcttgcgaactctattcccagctcgcccgtttacagttcagggaaccccaggctctcgaaacccacccgcaagcggttcctgcctaat

SEQ ID NO: 275288 - DNA, 625 bp, Unknown
  Bacterial polypeptide expressing nucleotide sequence isolated from the Sargasso Sea
ttgttcaatgatactgttgcttacaatattgcctacggtggcgtcaaagataaggagtggaaggcgctcgtggatgacccaaagcgccatgatgagctgattgagaagatcaagccttcatctcagagggcccagatccacgattatatcatgctcaagagcaaaggctatggagagctagttggtgagagaggtctcaaactctcaggaggagaaaagcaacgagtcgctatcgccagagccttgctcaagaagtccaagattatgtgcttcgatgaggccactgccgccctcgataccgagactgagcggcaagtccagctggccattgatgacgtagcaaaagactccacgactttgatgattgctcacagactctccacagtcaggaactgcgacaagatcatcgccttgaagcacggcgtcatccaagagcaaggaactcacgatgagcttttggcaattcctggaggctactacaaagaactctgggagaagcaagccgaatccaaggaagcagagcgtaaagaaaaggaagaaatcaccagactccttgccgaacaggctgaagtctacgagcagagaagactcagagctgcaagcatcggcaaaactgagaattgaa

SEQ ID NO: 275289 - DNA, 1068 bp, Unknown
  Bacterial polypeptide expressing nucleotide sequence isolated from the Sargasso Sea
aagaggagatcgaacagcaccgccgtgcccgctaccgcaccatgcgcttgctggcgctgcagcacccggtggtgggcttcatcgaagcggctggtatcttggccatcctgctgatcggtgccctgcggatcagtgctggtggcctcagtggtgccggcttcagcagcttcattgcggcgctgttgatcctgatcgatcccatctcccggctgatcaacaacttcaatgagttccagcagggccaggcctcgctcggccgtttgcgcgagatcgagcgcgagccgatggaagagcctgatcgccccaatgcccggcccatgccggcgctccagggggccttggatctgcgcaatgtgagctttgcctatgagcctggcaagccggtgttgcagcagctgaatttgcgtgttgagcccggtcaggtggtggcgttggtgggtccctccggcgcagggaagaccacgctgttctctctcttgctccgcttcaaccaggcccaacagggggaactgctgctggatggtgtggatctgcgcgatttgcgcgccgctgaattgcgccgctcgattgccctggtgccccagcagagcgcgctcttctccggcacggtggccgaagcgattcgttttggacgcaacgccagcgacgcggaggtgcgccgggcggctgaattggccaatgcagctggcttcattgagtcgttgccccaggcctatgactcacgggtggaagagcgcggaagcaacttctcaggcggccagttgcagcgccttgccattgcccgtgctgtgctcggtaatccggcggtgatgctgctcgatgaagccaccagcgcccttgatgctgaagccgaagcctccgtgcagcaggggctagagcaggccatggccggccgcaccgtctttgtgattgcccaccggctgtccacagtccaagaagccgatcgcatcttgttccttgagcgcggccgtatcgttgagcaaggcagccatgatgagctgatgcgatccggtggtcgctacagcgccctgtgcagcaggcaaatcattcgtcccgcattgatctgag

SEQ ID NO: 275290 - DNA, 1807 bp, Unknown
  Bacterial polypeptide expressing nucleotide sequence isolated from the Sargasso Sea
catgatcgactcgggttctcgacccaaaagcagaaatcttcgcagcctgatgccggtattggcgtttctcaagccctatggctggaggatgttttttgcaggacttgccctggttttcacatcagcggtgacgctttcccttggtcagggagttcgactgttgattgatgaaggtcttgttcagggttcgaaggagaagttgaccctgacgctgatgttttttaccggactggtttttttgatgtcctttgggacctttacccggttttacctggtttcctggataggggaaagggtcagcacggacctccgggttgccgtgttcgggcatctgatccgtcttcatcctgcattttttgaaactaacctgagcggtgagatccaggcccgaattactgcggacaccaccgttctgcagaccgtcatcggctcttcgctgtctattgcattgcgaaacggattgatgctgattggaggcatcgggtggttgttctggatcaaccccaaactgactgcaacggtattggcggtgattccggtggtggtcgtgccgattattattttcgggaggagggtccggcgactttcaagaagcagtcaggatcgggtggccatagtgggagcttttgtaggagaggccctgcaaaatatcaagattgtccagggattcaaccatcaggcagaggatgtccggcagtttaatggacatgccgaaaatgccttccgtaccggaatccaacggatccgccagcgtgcggtgctgattgcgattgtgatcctgctggtgctgggctcgattggatcgatgctctgggttggaggaatggatgtcctcgaaggaagaatcagccccggtgagttggcagcatttgttttttacgccgtgattgtgggcagtgcagtgggattcatcagtgaggtttatggtgatctccagcgagcagcgggggccaccgagaggcttctcgaattattggacgctaaagctctgatccaggatcctcatcggccaaagcttcttcccggaaagatccagggagcggtttccattcagaatttgggtttcagctatccttccaggccagagcagaaagctcttgatggcatccagcttgaggttgaatccgggatgaccatggcattggtggggccgagtggcgcgggcaagtccaccctgcttgacctgctgttacggttctacgattcccagcagggcagcatttgttttgagggtattgatctgcgggatctgtcactcgaggatttgcgccgtcacattgccctggttccccagcaaccggttttattcagcgcaagtgttgaagaaaatttgcgttacgggaaacccgaagcttccggggatgagatccgcaatgcggttgaaaaggcttttgcttccgagttcattgagagacttcctcaaaaatatgatagctttttgggagaacaaggggtcaggctttcgggcggacagcggcagcgtattgcgattgccagggcacttctcaaggacccggctttgcttttgctagatgaggcgacaagtgctcttgatgccgaaagcgaacggatggtccaacaggcacttgatgacttaatgcgcaatcggaccagtattgtgattgctcatcgtctttcgacggtgatcgacgcagatcagatagccgttctcgaccagggaaggttggtcgccattggaactcatcgagaattgatggattcttgcgaactctattctcagcttgcccgcttacagttcagggaacctcaaaatcctgaaatccacccgcaagcggttcctgcctaa

SEQ ID NO: 275291 - DNA, 1819 bp, Unknown
  Bacterial polypeptide expressing nucleotide sequence isolated from the Sargasso Sea
catgcccttgcgaagccagacctggagagatctgcggcgcctgttgaaggagttgccacccagccggcttcgttttcttgtggtggtgctggtggcctctttcctgcagggcctgatggacatcctgcttgtgggtctgctggcgcggctggtgggcttgatggccggcgtgaaactggcggatcagatccccggcatccacgtttttggtgggggcatgctcgatcaggccggctggttgctggggctgctggtcgtggcgttctggctcacctccggcctgcgctttggcgtggcctttctgcagagcatgctcagcgccgagatctggaacgacctggtcaacaaggtctaccggaatctgatgctgcaggactatgagttcttcacgcatcaccgcaccgccaatctttccgagagcttcaatcggatcctgaacaaggtctccacgaccgtggtcagtccgatgatcacgattgccggcaatgccctttcggtattggtgctgctgtgcggtgtggtgctggtcctgggcaccccggctctgctgatgttcggtttgatgcttggtgcctatgccttggcatcgaagctgatcattccctatctgcgcttcgccaccaagcagcgggtgcgctactccagacggatccatctgctgctgatggaatcactgcgatcgatgcgggatgtgcagctctattccgccgagcgattcttcatcaatcgcttcgccagcgatggcgttgtggccaagcgctacgaccggttgaccaaattgctgccggatgtgcctcgttatgtcatcgagccagctggaatcacgattctgtttctcgtgggcctcggaccctctgttctcagtggggatgccgtcagcgtgcgggaggccattcccaccctggcagcggtgctcggtaccttgctgcgcatctcgggacccctgcagaacaccttccgcaatatcaacaaacttcgcggcggtttgcctgaaattcaggatgcactggagttgctggaccttcgccccaagcgcctgaacgccagcgcaccgggggtccccacgcccagtggtgtgatgccacggcagttcatccagctgcgtgatgtgagcttcagctactccggcagcgaggaatctgtgctgtcaaacgttgatctcaccattcccgttggatcacgcatcgccctggtcggtcgcacgggcagcggcaaaaccaccctggcccatctgctgcttggtctgttccgccccagcagtggtgatctcaccctggacggtcttcccctgaatgaggaggagttgccggcctggcagggcaactgtgccctggtgccccaggacatccgtctgctggatgccagcatccgcgacaacgtcgccttcggctgtgatccggaggagattgaagacgatcaggtctgggcagcactggaagcagctcagttcgacgatgtcgtcagcgctatgccgtatgggctgttcaccatgatcggtgaaaacgggatcaagctgtccggcggacagcgtcagcggttgtctctggcccgtgccttctaccgcgatgccaaggtgctggtgctggatgaggccaccagtgctctcgacaacaagaccgagcacgacgtgatgcaggccctggatctggtgggacgtcgctgcaccacgattgtgatcgcccatcgcctctccaccgtgcgcaagtgcgatcgcatctatgagatcgaagacgggcggatcaaagcgtcgggtgatttcgacaccctctgccgcctgtcggaaagcttccgcgagatgacccggttcgaaaccgcctga

SEQ ID NO: 275292 - DNA, 2698 bp, Unknown
  Bacterial polypeptide expressing nucleotide sequence isolated from the Sargasso Sea
atgacacattcaccgaacccgccatcttctgcgcgattaccccgttcccagctcaccagtcggatcgtttccgagctcgcgcgcgccgtatggcgctatcgcaaacagacggtgctgtcgattttgctgatggtggcggccaagctggcggtggtgctgattccgctggttttgaaacatatcgtcgacggactcggccatcccgttgcgcaggcactatttcccgtttttctggtattggcatatgcgttgctgcgcttcctcggcgacgcgctcaacgaagcccgcgatgtggtcttcagcatcgtcacgcagcgaaccgtggccgcattcaccgagagaacgttcgcgtacctgcaccgtatgagcgcgcggtttcatacccggcgagaaaccggcgcaatcgtgcgcgacgtacagaaaggcgcggacggtatcggctttttgctgggcgtcgccttgttcaccatcgtgccgacggcctttgagatcgcggcgatcgtcgcgatcatggtgcgcggctacgcgcgcgaattcacactggcgattgccgccacctttggctgctacgcggtctatacgttcattttcacgcggcggcgggttgcatttcagcgcgctgtcaatttactcgaggcgaaatcggacgggcggctggtcgacagtttgctgaactacgacaccgttaagtacttcgcaaccgaggagacagaaacacggcggctcagcgaagtgctggaacagtgggtacacgccagaacggcgaatcagcgtgccttgaccgcgttgcatgttggacagagcgcggtgattgcgctcggcattgcggcgatcatgctgctcgcggcgcaacgtgtggtgggcggcaccatgagtgtcggcgatctgattctggttaatgcgtacctgattcagatctgcatgcccctgaatacgctcggcttcgtctttcgcgagactaatgacgcgatggtcaacgtcgagcgcatgttcgcgattctcgcggcgcgcgggcgagtgggcgaggacatcgacgaacccgccgcgcaaccgctggtcgtgagcgtgggcaagatcgacttcgagcacgtggactttggctacgacccggcgcggccgatcctgcgcgatgtcgatttccatgcctatgcgggcaagacgctggccgtggtcggcggcagcgggtcgggcaagtcgaccattgtgaagctcttgttccggctctatcagcccgaccgtggcgccatccggatcgacggccaggatttgagcaaggtgacgcagcaaagcctgcgcgaagccatcggcatcgtgccgcaagacaccgtgctgttcaacgagacgattgcctacaacattgcgtacgggcggccctccgccacgcgtgcggatgtcgtgcgcgccgcgcgtgccgcacaactggacgagttcatcgagcggctgccggatcattacgacacccgcgtcggcgaacgtggcgtgcgcctgtcgggcggtgagcgtcagcgcatcgcgattgctcgcgccattctgaaagacccgcgcattatcgttttcgacgaggcgacgtcggcgctcgacacgcgctccgagcgcgcgatccagaccgaattgacacgcctcgcacaaggccgcacgtcgatcgtgatcgcgcatcggctttccaccgtggtggacgcggactggattcttgtgatggagcatggccgcgtggtcgaacagggcacgcatcgggaactgctgtcgcgtgacggcgtgtacgcgaaaatgtggtcgctgcaagggcagcaaggtgaactcgagcatgcgcagcgcaagctgaccgcgcaatcggtcagcctcgccacgttgacctccggcgcggtcgacgcgctgcacgacgaaatcgccgcgcggcacgtggccgtgcaggtggaactcagcgacagcgatttgcgcgtgaccggcgatcctggcgttctgcaacccgcgatcgcggaattgtgccgcaacgaaatcgtgcaggcgcggcccggcgagcgaatcgtgttgcgggtcgagcggcataacaaccatgcgtggctcaacgtgctggggtcgggcgacaagccggcagagctatcggcgtcggcggcgcagcgcatggaagcgacgctcgccagcgcgggcggcgcttttacgctgatgccgctgcacgggcggctcgcgtatgtcgcgatactgccgctgcgtgccgtcgccgatgcgaggccgcacgtggcgccgacgctgcgtgaagaaggcgcgaagccgctcgacgatctgctcgtgatggccatcgacgatcaggaagaagcgcgcgacgccctcgaagcggtgttgagcgcgaatggcgcgcgggttcggctcgcgtcgtcgggtgcggaagcattggattggctaggacgcatgcaaacaagcgattggccgaacctgctgttgtgcgatattgtgcttgccggggaagacggttacgacgtgctgcgtcgcatacgcgcgctcgaaagcgaacgctccggtagcacgcatgcgatcttgccggcgatcgcgctgaccggctacgccgagactgaagaccgtgtgcgtgccgaacaagcgggctttaaggcacatttgccgaaaccggtggcgccggaaaagctgatcgcggagatcaggaagctggcagccgatcgaccgcgtgcagccacggctccttaaa

SEQ ID NO: 275293 - DNA, 1345 bp, Unknown
  Bacterial polypeptide expressing nucleotide sequence isolated from the Sargasso Sea
tgctatagtaaaatctgtaaccggtgtgataaaagacgttcttgtaatttttttctgttaggaaatatgttttatcaaagttggacacttacaatatttgctttttttgcatttccactagctatatggccaattagaaaaataggaaaaagtataagaaaaattacatgcacaatacaaaatgaaatagcagttttttctaatgttttagcagaaagtataaaaggtattagacaagtaaaagcctatacgaaagaaaattatgagaaaaaaagagcttttgaaactgttggttacatacaaaaatattttacgaaatctgcttttataagtaatcgtctaagtccattaatggagtttattggaagtttagcaattgcattatctatttatgttggaggagtttttgttttaaatgaaaccatgacaacaggtcaatttatgagttttcttgttagtcttttattagcataccaacctgttaaagctttaggaaacttaaatattagtgttcaagaaggtctagcaggtgcagaaagaatatttaatttacttgatacatctagagataagatggaaaatatatcaaaagaaaataatattagattagatggagatataattttaaaaaatatttcttttgcttacgacaaaaaaagggttttagaagaagtaaatattaaaattccaagaggtaaaaaagttgcaattgttggattgtctggctctggtaaatctacaattgccaatattatattaagattttttgatcaatttgatggagaaatttcaattggatctaaaaatatcaaaaatatggaattaactgagttaaggaataatatttctatggttactcaagaaacagttttatttaatgacacaatttctaataatattaaatatggaaaattaaatgcaaatgatatggaagtagaaaatgttgcaaaattatcaggaattcatgaattttcaaattcattagataaaaaattaaatactataattggtgaaagtggaattaaattatctggaggtcaaagacaaagaatagcaatagcaagagcattaattaaaaatgctcctattttaattatggatgaggcaacttcttcacttgataatattactgaaaaggaaatacttataacaattaaaaaattaatggaaaatagaacaactttaatcatcgcccatagattaagcacagtagaagattcagatatcatatatgtattagacaaagggagagttgaaaattttggatctcataaagaattattagttaaatcaaaattatatcaaaaactgcaactaaaagagcagcttgagaatgagttttaaa

SEQ ID NO: 275294 - DNA, 520 bp, Unknown
  Bacterial polypeptide expressing nucleotide sequence isolated from the Sargasso Sea
tattagtttgaaatcacttagaaatttgatggggatagttactcaagaaactatattattaaatacagatattaaatcaaacattgtatatggatcagataaaacaaatgtatctatgttaaaaagttcggctctggctgcaaatgcaattgaattcattgaacaatttaaagatggatttgatacaattgttggtgaaaaaggtgtgagattatcaggaggtcaaaaacaaagaatagcgatagctagagcaatatacagaaaccctccattgcttattctagatgaggcaacttcagctttagattcccaatctgaaaaaaaagtacaaattgctattgaaaatttaatgcaggatagaaccgttttggtaatagctcaccggttatcaactgtaaaaagggctgatcaaataattgtcctaaaagatggcagaattattgaaaaagggaaccatataaatctatatagaaataaaggtgtttattataatttgtacaattctcaatttgataattga

SEQ ID NO: 275295 - DNA, 704 bp, Unknown
  Bacterial polypeptide expressing nucleotide sequence isolated from the Sargasso Sea
ttacagttaccctaaagcatcagaaaaagcgttaactaatattaatttatgtattcaagctcgtagcactgtcgggttagtaggccctacaggtagtggaaaaactacagcagttgatataatccttggtcttcttgaacctcagcaaggtgcacttgaggttgatggaaaggtgattgataagtataatcgtaaaacttggcagcgttccattggttatgtgcctcaacagatttttctatctgatgattctgttgctgctaatattgcttttggcgtagaccctaaagatgtcaatcaagatgctgttgagcatgcttctaaaattgctaacttacatgattttgtaatcaatgaattgccctcacaatatcaaacaacagtgggtgagaatggcattagattatctggagggcagcgtcagcgtataggaattgcaagagcaatttaccataaaccccaaatattaattctagatgaagctacaagcgcattggataatcttacagagagagctgtaatggaagcggtacataatcttagaaaaaatattactatcattatgattgctcatcgtctgagcactgtaaaaaattgtgacaacattttgctattagagaaaggagaggttaaagaccagggaaaatttgataaattgattaaaataagtgatcaatttcgagctactgcaaaaaatctctgaa

SEQ ID NO: 275296 - DNA, 973 bp, Unknown
  Bacterial polypeptide expressing nucleotide sequence isolated from the Sargasso Sea
cttgtcgcggtgatgctgcttgccgccattagtgttcaggcgggcgagctgaccgttggcgatttcgttctcgtgaacgcctatatgatccagatcaccatgcccttgaacttcctcggcacagtctatcgcgagattaggcaggcgctggtggacatgcggcagatgttcgacctgctggacgagccgcccgaggtgcaggatagacagaacgcatcgcagctgcggatcgcgaagggccgagtgcagtttgaagcggtcagcttttcatatgattccgagcggccgatccttgaggatgtcagcattgacatacccgccggccagaccattgccatcgtaggtccttccggatcgggcaaatcgacgaccggccggcttctgttccgtttttatgacgtcaccggcggcgccgtcgtcattgacggtcaggatgtgcgggatgtcacgcaagacagcctgcatcaggccattggggtggttccgcaggacacggtgctgttcaatgacaccatctattacaacatcgcctatgggcacgcgcatgccacactcgatgaggtcatgaaggccgcaagggatgcgcagattcatgatttcatcatgtcgttgcccgacacatatgacacgcgcgtcggcgagcgcgggctaaaattgtccggcggagagaagcagcgggtcggcatcgcgaggacgctgttgaaggacccgccgatcctgcttctggatgaggccaccagcgcactcgacagcgagaccgagcatgaaattcaggaagcccttgaacgcgccgggcagggcaggaccgtgatcacaatcgcccatcgcctgtccaccgtgcagaatgccgacaggatcctggtgctggagaaaggcaccgtggtcgaagacggcacgcacagcgaactgctttcgaaaaacgggcgctatctcgacctctggacgctgcaaagctcggagcaggccgcctgat

SEQ ID NO: 275297 - DNA, 770 bp, Unknown
  Bacterial polypeptide expressing nucleotide sequence isolated from the Sargasso Sea
cttcgcctacaacccaaaggagcgattgatcctcaaccgcgtgtctttcaccgtcgatccggggacgaaggttgcgctcgtcggtcggtcgggtgcgggtaaaagtacgattagcaagctgctgtaccgcctatacgacatccaaggcggcgtcattcgcatcgccggtcaggatgtgaagcattgcacgcagcgaagcattcgattgcacattggtatcgtgccgcaagactgcgtgctgttcaacgaaagcatcgaatacaacataggctttggaaaaatcggaacgggcgagatcgcgacaaaggaagaagtctccaccgccgccgaacacgcccaattcgatgagtttgtgaagcgtcaaccgttgggttacgatactctcgtcggcgaacgcggtttacgactcagcggcggcgaaaagcagcgcgtcgccatcgcccgcgcactcttgaaaaacccaccgatcatggtttatgacgaagcgacgtcgagtttagacacgcacaccgagaaacaaatcatgatggccatcaactttgccgcgcaaggacgcaccaacctcgtcatcgcgcaccgattgagcactgtcatggacagcgatcaaattttagtgctcaaggagggtgaaatcgtcgaacggggcgaccacgtggcgcttcacgccaaagagggtggtttgtaccgagacatgtgggatcagcagctcaattcgagaagttccagagaagatcgagtcgcatccgcagcgactctgaatgcgttttaga

SEQ ID NO: 275298 - DNA, 1834 bp, Unknown
  Bacterial polypeptide expressing nucleotide sequence isolated from the Sargasso Sea
aatgaaaaaacaaaaagttaatatcaaaagaataactgaattcattaaaccagaatggttctttatgaccatttcaataatcaatggactcttttatgttattttcaatgctatctcaatatggttaacagcatcgctagtaaataatgtattgatcgactttgataagctagtccaaaatcaaaaacaattattggcaaatacgtctccttccattaatgaaaagatcaagatattggtaaacgaatttattttgcgtgatacaaacatcgagaccctaagagtactttgtttttcaatcgtattgatctttatactaaagaatatattcctttatcttaagaacttgtcaatgtcatttgttcaattaaggatcgtaacacaattaagaaatcgtatttacgcacatttgcaatctctttcactttcatttttttataaaagaagatctggcgatctatcttcgatcataatacatgatgttagcatgctaaaccaatcgattggtacgacctttcaaaagatcatagtagaaccaataaatattttagcatttactaccttgttattcattatcagttggaagttaatgttggttgctttattaattattccattatctcagctcgttattcaatacattgggaagagcataaggcgtaaagctagacgaaatacaaaacagataggcggtatattgagcataataactgaaaatcttacctctaccagaattgtaaaagcatttgcaatggaagcccatgagatagatcggtttaataatgaatcttggaaatattttggattattatttcgttctgcaaaattacgtttaacctcatcacctattatagaaactatcggtgtatctatggctgttttactattgtggcttggaggatctgaagtgatcattggttcagcactttcatctgaagattttttaagatttatgtttttattattctctatgttaggtccgatccgttcattgagcaatgtccatattacgcttcagaatggatatgcatcagccgagcgcatttttgacatactagatgaaaaaactgatgtcaccgatgcagggcattatgatattgagcatttaaatgaaggtttaaaatttgataacgtaagttttaattatggtgaaggttcattcaaattatccaaaataagttttgaaataccgaaggggaaaacagttgctttagtaggtgcaagtggatctggtaaatctactatagctgatctaattcctcgattttttgatatattagatggctccatctacgtagatggtaaaaatattaaagaatataaacttagatcattaagaagaatgatgggtattgttacccaagagaccattcttctaaatagctctattcaagacaatattacttatggtagcgatcttgacgaaaaaaagttgattgaagcagcgcaaggagcaaatgctcttgaatttatacacaccctagaggataaatatgagacattagttggggaaagaggggttaaactatcgggtggacaacagcagcgaattgcaattgctagagcaatttataagaatccatcgctactgcttttagatgaggctacttcagctctagatactaagtctgaaagattggttcagagtgctctagataatttgatggaaaatagaacagtactagtaatagcacaccggttatctaccgtgaagaatgcagatactattatcgtattggataatggtgaaatagttgaatcaggtacacacgaagacctttataatttaaatggtatctattataacctttataatattcaatttgatagctga

SEQ ID NO: 275299 - DNA, 784 bp, Unknown
  Bacterial polypeptide expressing nucleotide sequence isolated from the Sargasso Sea
ggtgcgagatcttaaaaatgctgaggcttttaactttcggggcggaaaactcaaattttctaatgttagttttaattataatgaaaaccgacgtattttagataacgttagttttgaattacctgctggtaaaactttagctattgttggtccaagtggttcgggaaagtcgaccattgcgagattaatttataggttttatgacgttacgagcggcaggataattttggatgaccagagtatagatgaggtaactcaggatagtttgcggcaacaaatcggaatagttcctcaagatacagtgctttttaatgatagtatctattacaatatcgcatatggtcggccagacgcttctccgtctgaaattgaggcggctgctaatttagcaagtattggtgagtttatattaagtttgcccgatggttataacactaaagtgggtgagaggggattgaaactctctggcggggaaaagcaaagaatagcaattgcaaggaccattctcaaagacccaggaattttaatttttgatgaggccacctctgccctggattcccgaaccgaaaaagaaatacagactgcattctctcaagtatcagaaaacaaaactaccataattatagcacatcgactatccacagtggttaacgctgataatataatagttttaaataatggaaaagttgctgagtccggtagtcatgaacatttgttacaggcccacggtctttatgaaaatatgtggaaaagacagctcgaaaaagaggagcaagaagattaa

SEQ ID NO: 275300 - DNA, 487 bp, Unknown
  Bacterial polypeptide expressing nucleotide sequence isolated from the Sargasso Sea
tggttatgttcctcagcagatttacttatcagatactacagtatctgaaaacattgcatttggattaaatgaggatgagattagtcaagaaagtgttgaacgagcagcaaaaattgcgaatttacatgaatttattattaatgaattaccttcacaatataaaacaataattggagaaagaggagtcaggttgtcaggtggtcaacgccaacgtatagggatagcaagagcattatatcacgaaccaaaattattgatttttgatgaagcaacaagtgcattagataatattactgaaaaatcagttatggaagctatttataataaagactacaaaatcacaaaaattttgattgctcatcgtttaagtacagtaaaaaaatgtgataagatttttttatttgacaagggagaacttaaacatgaaggaaattatcaagagctaatagaaaatagtgaaaagtttaggtcaagtgttaacgattaa

SEQ ID NO: 275301 - DNA, 916 bp, Unknown
  Bacterial polypeptide expressing nucleotide sequence isolated from the Sargasso Sea
aaatacaacgaaggacttgatattaataaaactcttgatggcgaagttcaaatagataatgtctctttctcttattcacatgactcagatccggtcttaaacaatatttcaattagagctactaaaggtgaaacagtagccttggtaggtaaatctggcagcggaaagtctactatagttaatttattaaatagattctatgacgactatgaaggcaaaataacaatcgatgggtatgacattaaaaaaattaagttaaccgatttaagaaattcaatctcatatgtctcccaagatccgactttattcaatgacactgtaaaaaataatattgcttatggtttaaaagaagtaacagatacagaagttttccaagctgcaagagaagcaaatgcctatgcatttattatgagtttgcctgaaggtttcaatacaattattggagataaaggagttactttatcaggaggagagaagcaaagagtagcaattgcaagagccttacttaagaaatcttcaatattaatttttgatgaagcaacgtcagctttagataatgaatcagagaaggaaattcaatcagcaattgaaaaagcttctaaggataaaaccacttttataattgcacacagacttagtacagttgaacaagctgatcagatttgtgtgcttgaaaatgggataattacccaaagcggcacacacaatgaattgattaaagaagagggtctttacaatgtattgcaaggaaaccctgaactaatagaagacactaaatcagttaaccttgaaaaagattttgtaccaactttaatcaacgaaaagaagagtttttgggaagaattcaactttggcaatatagcattaaccccactgagctttctctattggtctgttagtacttttaaaaattcat

SEQ ID NO: 275302 - DNA, 577 bp, Unknown
  Bacterial polypeptide expressing nucleotide sequence isolated from the Sargasso Sea
ttttatgatccagatagtggagaaatattaattaataagaaaaatataaaaaaatacaaacaaaactcattaagacaaatgataggtgtcgtcccccaggatacagttttattcaatgacacaattttttataatatttcttatggtttaataaactcaagtgaagcagaagtaataaatgcagcaaaaattgctggtatccatgattttattgaaagtattcctgataaatacaatactattgtgggtgagagaggtcttaaattatctggaggagaaaaacaaagagttgctatagcaagagctgttttaaaaaatccatcaatcctcttttttgatgaagcaacatcagcattagacactaatacagaaaaagaaataaataaaaatttaaacaaaatatctcagggtaaaaccacattaattatagcacatagactctcaactgtgtcaaatgcagataaaataattgttatagataaaggaaacatcgttgaagaaggagatcattcaagcctactaaataaagatggattatacgcattaatgtggaataaacaaaaacatcaaaattaat

SEQ ID NO: 275303 - DNA, 383 bp, Unknown
  Bacterial polypeptide expressing nucleotide sequence isolated from the Sargasso Sea
aagaggattgaaactttcaggaggtgaaaaacaaagggttgctattgctagaactctactaaaaaatccacctattcttgttttagatgaggctaccagtgcactggatactttaactgaaagagaaataaaacaatctttaaatgaccttgcagaaaaaaggacaactattattatagcccatagactgtcaactgttgttgaagcaaataaaatccttgtattggataagggaaaaataatagaacaaggaacccataaacagcttttaaggaaaaagggtttatatgccgatatgtggtctacccagcagacaatcaaaaaagctgaggcaacccttaagaatgtaaagccagaatataaaaaacttctaagtaattaat

SEQ ID NO: 275304 - DNA, 676 bp, Unknown
  Bacterial polypeptide expressing nucleotide sequence isolated from the Sargasso Sea
tctgaaaaatgttagatttagttatccaaaaacatttgacgaggccctcagtgggatatccttaaaaattaaagcaggtgaatcaataggattggttggaccttccggttctgggaaaactacattggtagatgtgcttttaggagtattggaaccgcaaaaaggcaaaattacattcaatggaaagttgcttggtccagttctttcggattggagagcaaaagttgcttaccttcctcaacaagtatatctcatagacaattctgtccgttgtaatgttgcccttggactatcggaggaagaaattgatgattcccgtgtaaaagaatccttacaaaaagcccgcctccttgagactattgaaaaactgccgcaaggattaaacacaatgctcggtgaacgtggaattcgtttatctggtgggcaaaggcaaagggtggctttagcaagagcattctaccatgagcgagaagttctagtcatggacgaggcaacgagcgcacttgataacgaaacagaacttgaaattatagaagaagtaaaattacttaaaggacaaaagacattgattgtgattgcccaccgcttgagtacggtacaacactgcgacatgatttatcggttagagtacggcaaaatcattgaatctggaacgccggatcatgttttaaattaa

SEQ ID NO: 275305 - DNA, 391 bp, Unknown
  Bacterial polypeptide expressing nucleotide sequence isolated from the Sargasso Sea
gatggaagccctcgatgccgtgggcttcctcgacgacctcaagaccctgccgatggggctggagacgccactgcctggggagggacggcaactctccggcggccagcgccagaaactggcgattgcccgcgccttgatcggccaaccaaagctgctgcttcttgatgagcccaccagtgccctcgacccaagaagtcaggcgacggtgctcagcaccctgcgccagctgcgctgcacccgactcctgatcgcccatcggctcagcacggtgaagcaggccgatctgatcctggtgctgcagaacggagaactggtgcagcagggggattacgccagcctggccgacagcgatggagccttccgcgcgctgatgcagcagcagggggtctga

SEQ ID NO: 275306 - DNA, 767 bp, Unknown
  Bacterial polypeptide expressing nucleotide sequence isolated from the Sargasso Sea
tgatatttcttcaggattcaaaataagcaatgtaagtttttcttttccgggaagatcaaggaatgttttggataatttagatgttgatattccagtaggaaaaacatttgctatagttggcccttcaggagcaggaaaaacaacacttgcccaaatgcttatgcgtttctgggaccccgacaaaggtagcataatgtttaatgagattgatcttaagaatttcaaactggaagatcttcgttccagaatagcattggttgcacaagacacgtatcttttcaacaatagtttaagagacaatattttgattgctaaacctgatgcaactcatcaagagttgcaggaagcggtaaatttatcagctctttctgaagttgttcaaagccttcctgaaggacttgatactgaggttggagaacgaggagcaagtctctcgggagggcagagacagcgagtagcaattgcgcgtgcatttcttaaagatgcaccagtattaattctggatgaagcaacttcacacctagatgcagtcagtgaaaacatagtacataaagccctaaatcaactcaaaaaaaacaggactacattgatcatcgcccatcgtctttctactgttagtgatgcagatcagataatagttttggataaaggacacattgaggaaatcggaacacacagggagctatttaaaaacaaaggtttgtacagaaaacttatttcaaaacagctaagcagaactgatatacagcgagataaagcactatgaa

SEQ ID NO: 275307 - DNA, 477 bp, Unknown
  Bacterial polypeptide expressing nucleotide sequence isolated from the Sargasso Sea
ttttctataatattgcttatggcaggcctgaggctagcccacaagaagtgcaaaatgctgctgaactggcacaagtgcatcaatttattatgggcctgcccgatggatataatactccggtgggagaaagagggctaaaactctctggcggcgaaaaacaacgggtagcgattgctagggcactactgaaagatcctaaaatctttttatttgatgaagctacatcagccttagatacaaaaacagaaaaagaaatccaaacaagtttaggacaaatttcatctgggagtacaacattagtcattgcacatcgactttcaacagtaattgatgcagacgaaatactggttctgagcaatggcgagataaaggagcggggtcagcactcctctttactcaatttggatggtttatatgctgacttatggcgccgccagcaagatgcaaagtcaaaacaaaatatctcttccgaatagg

SEQ ID NO: 275308 - DNA, 664 bp, Unknown
  Bacterial polypeptide expressing nucleotide sequence isolated from the Sargasso Sea
atccttcagtattcctgaaggtaaatctttagcaatagttggaccaactggtgctggaaaatcaacaataagtaaattattgtttcgtttttatgatccagatagtggagaaattttaattaataagaaaaatattaaaaaatacaaacaaaactcattaagacaaatgataggtgttgttccccaggatacagttttattcaatgacacaattttttataatatttcttatggtttaatagactcaagtgaagaagatgtaataaatgctgcaaaagtagccggtattcatgattttattgaaagtattccaaataaatacaatacaattgtaggtgagagaggtctaaaattatctggaggagaaaaacaaagagtcgctattgcaagagcagttttaaaaaatccatcaatacttttttttgatgaagcaacatcagctttagatacaaatacagaaaaagaaataaataaaaatttaaataaaatttctcaaggcaaaacgacattaattattgctcacagactctctactgtttcaaaagcagataaaataattgttttagataagggaaatatcgttgaagaaggaaatcatttaagtctgcttaacaaaaatggattatacgcattaatgtggaataaacaaaaacacgaaaattag

SEQ ID NO: 275309 - DNA, 957 bp, Unknown
  Bacterial polypeptide expressing nucleotide sequence isolated from the Sargasso Sea
attaaccgatttaagaactcaatttcttatgtttctcaagatccaactttatttaatgatacggtcagaaataacattgcttatggtttaggtgaagtttcagattccgaggtttttcaagttgctagagaggcaaatgcttatgaatttattatgagtttaccagatggtttcaacacaattattggagacaaaggagcaacattatccggtggagagaagcagagagttgcaatagcaagagccttgcttaagaaatcctctatattaatctttgatgaagcaacttcagcgttagacaatgaatctgaaaaagagattcaatcagcaattgaaaaagcttcaaaggataaaactacttttatcatcgcacatagactgagtacagttgaaaaagctgatcaaatttgtgtcctagaaaatggaataataactcaaagtggtactcataatgaattgatcaaagaggagggtctctacaacttacttcagggcaaaccagaactaatagaagatagtaaaactattgaccttgagaaagattttgtaccaaccctaatcaacgaaaagaaaagcttttgggatgaatttaatttcggaaatatcgcattaaccccactgagctttgtctattggtctgttagtacatttaaaaatatattttttatacctaaagcttccaatgaaggtgaggtacctgtggtagttgtaggtaatgtgactgtaggcggtaatggtaagacacctcttgttagccaaattgctctagaccttaaaaatcttggttttaaaccaggaataatcttaagaggttataaaggcagtttcacaggcacaaagcttgttaatgataatacaacagcaaaagaagtcggcgatgaagcaatttttcattttaatagaggttttaatgtcgttgttgatagggacagatcaaggggccctttcttatttaga

SEQ ID NO: 275310 - DNA, 1012 bp, Unknown
  Bacterial polypeptide expressing nucleotide sequence isolated from the Sargasso Sea
ggttgcgaccggattgggtggcctagctgttgtcattgccggggcgtatatggtcgaaggtggtcgcctcgagagtggttatctgccgttactgacattactttccatggctgcgttcttgccgatctccgaaatctcgaacgttagccgtcaattggccgatacgctcggttcaacccgtcgtctctatgccgttgataacgagcccgtgccggtctccgatggtaatggcgtggcctttaatatgtccggcggcggtttacccattgtacttgaggatgttgacttccagtacgaaggcggcaatcgccaagccctacatggcgtcaggtttgaggtgcccgcggggaagactgttgctcttgttggctcatccggcgcgggtaagacaacaatcgcacatctcttaatgcgattttgggacccgggaagcggagttattcggattggcgggcacgaccttagggactatgcgctcgacgaccttcgaagcaaactggccctggttgctcaggatacttatctctttaacgattcacttcgtgcgaacatcctcattgctaaccctgatgtcgacgaaacgactttgatggcggcggttgtgcgtgcctcgcttgaagagttcgtaggaggattaccagatggattggataccaaggtgggtgaacgggggatgagcctctcgggggggcagcgccagcgggtcgctattgcccgtgcatttttgaaagatgcgccagtgttaattctcgacgaagcgacatcgcatcttgacgcagtaaacgagcaggcggtacgcgcagcgcttgaggagttgatggaggatcgaacgacgattgtgatcgcgcaccggctttccacggtccgaaatgccgatctaattgtggcgctcaacgaaggccgtgtatttgaaagcgggacgcacgatgaattactggcgaagagtggtctttacgcgcagttggtagcccatcaactggccggtgctgccggacgaacagcggcggaataa

SEQ ID NO: 275311 - DNA, 711 bp, Unknown
  Bacterial polypeptide expressing nucleotide sequence isolated from the Sargasso Sea
cgggaagatcaaaaaatgtattggataatttaaatgttgatattcccgttgggaagacatttgctttagttggcctttcaggagcaggaaaaaccacacttgcccaaatgcttatgcgtttttgggatccagaccaaggaagcatcaagtttgatgagattgatcttaagaatttaaaactgcatgatcttcgttccaaaatagcactggtagcacaggacacttatctcttcaacaatactttaaaagacaatattttgattgctaaacctgaggcaactgagcaggaattgcaggaagcagtaaatttttcagctctgtctgaagttgttcaaagtcttcctgaaggacttgaaactgaggttggagaacgtggagcaagtctctcaggagggcaaagacagcgagtagccattgctagggcatttcttaaagatgcaccagtattaattctggatgaagcgacttctcaccttgatgcagtcagtgaaaacatagtacataaagcacttaatcaactcaaaaaaaacaggactacattgataatagctcatcgcctttctactgttcgtgatgctgaccagatcatcgttttagataatggacatattgaggaaatcgggacacatgaagaactatttaaaaacaatggactatacaaaaaattgatttcaaaacagatgagcggatctgggttgcagcataattaag

SEQ ID NO: 275312 - DNA, 2083 bp, Unknown
  Bacterial polypeptide expressing nucleotide sequence isolated from the Sargasso Sea
cctgcaaccgggcggccggtcaacccatgaaaagcggcgccagccagcttctgcgacaatagaaagatcaggaattgtacgggaaagcgcccagccgggtcgcgcgacatcgagcagagtgccgggttggcatgctgccggtcggcgcgccgctgcgaactccgtcgcttccatcctctccccagccgatcccatgcgccgtacgccctcgtccgaaccttccccgatctcgacccagccgcgcaacgactggcaaacgatcctgtccttactgccttacctcgctacttataaatggcgcgtcggcttcgcgctgagttgtctgatcggcgcgaaggtcgcgaatctcggcgtgccgatcgtaatgaagcggatcatcgacggcctcgcgtcggtgaagcatctcaccgcgctcggccgtgcgcacgattcgcctggcatcgtgctgcttggcggagtcggtttgatggtggtcgcctacgcggtggtgcggctgtccacctcgcttttcaccgagctgcgcgagatcctgttcgcgaaggtgaccgaaagcgcggtgcgccagctcgcgctgaaagtgttccgccatttgcatgctttgtcgctgcggtttcatctcgatcggcagacgggcggcatgtcgcgcgatatcgaacgcggcacgcgcggcatcacgcaactgatttcgtattcgctgtacagcattctgccgaccctggtcgaggtcggcctcgtgctcggctttttcatcgtcaaatatgaggcgtattacgcgatcgtcacgttcattgcgcttgccgcgtacatcgtattcaccgtgaaggtcaccgaatggcgcacgcattttcgccgcacgatgaacgagctcgattcaaaggcgaattcgcgcgcgatcgattcgctgctcaactacgagacggtgaagtacttcggcaacgaagagtgggaagcgcaccgttacgacgaaaatctcaagcgctatcgcacggccgcgatcaaatcgcagcgctcgctgtcggcgctgaacttcgggcagcaggcgatcatcggcacgggtctcgtgttcatcctgtggcgcgcgaccgaaggcgtgatggccgggcgcctcacgctcggcgacctggtgctgatcaacaccttcatgctgcaactctatatcccgttgaattttctcggcgtcgtatatcgggaactgaagcagagcctcaccgatatggatcgcatgttcacgctgctgggtgcgacgcaggaagtgcccgacgtgccggacgcgcccgcgttgcgggtgagcggtgcgcaggtacgcttcgaacatgtgaacttctcgtatgagccggcgcggcagattctgcacgacgtgagcttcacgattccggcgggcagcactacggcagtggtcggccatagcggctcgggaaaatcgacgctcgcgcggctgatgttccgcttctacgatctggaccgtgcgacgggtggcgcgatcaccatcgacggccaggatattcgcgacgtcgcgcaggattcgttgcgcgcctcgatcggcatcgtgccgcaggatacggtgctgttcaacgattcgatctactacaacattgcttatggccgtccgtcggcgacccgcgaggaagtgatcgcggcggcgcgcgcggcgcatattcacgacttcatcgaaggactgccgaagggttatgaaacgccggtcggcgagcgtggcctgaagttgtccggcggggaaaaacagcgtgtcgcgattgctcggaccatcctcaagaatccgccgatcctgttgttcgacgaagcgacctcggcgctcgattcacgttcggaacgtgcgatccagcatgagctcgatcagatcgcccgcgagcgcacgacgctgatcatcgcgcaccggctttcgacggtggtgcacgcgcagcagatcatcgtgatggacaaagggcggatcgtcgagcgtggaacacatgccgagttgttgagtgcgaacgggctgttcgcgcagatgtgggcgttgcagcagcaacgtgccgctgagacgccggagtcggcggaaacggtgagcgcgggcgagggcggacggtga

SEQ ID NO: 275313 - DNA, 1177 bp, Unknown
  Bacterial polypeptide expressing nucleotide sequence isolated from the Sargasso Sea
aaagcggttagacaaattgggctcggaagaccgagaagctttaggtgatttgaatgctttcgtggttgacacagtgcaaggtttgggcgaggtattggcctttcaacaaacaaccacaagatcgaagtcctttctgcaacgagtccaacgtcacattgacactcggcttccgttctacagcgacctttctcgccagaccgcgttgctggaagtggcaacgggccttggtggcttagcggtcgtcgttaccggagcaacgctggtttcctcgggagacctaaatccaaccaccctcccgttacttacccttcttgccttggcgtgcttcttaccggtatcagaaatcgttcatgttggccgtcagttggccgacaccctgggcgcggcccgccgactgcaccaagttcacaacgaaccagtagtcgttaactccgctacggccccaacacccatcaacgttcacaacgccacgaacgcgatcagcttccaccaagtcgaattcagctatccgggaactgaaatccacgctttagcgggagtctcattcgaagtagcagctggctccacagtcgcaatagttggcccttcaggggctggcaagaccacagcagcccaactgatactgagattctgggacgcggacacgggtcatattcgtttgtttgatcaaagcttgtgcgatctcgaccttgacgacctcagagcgcacgtcgcgatggtcagccaagagacttacctattcaacgacacccttgcccagaacattttgatggctcgacccgatgcaactgaagctgaagtaacagcagcaattgaacaagcctcactcactgatttcgtacacaatctgcccgaagggctagaaactaacgtgggtgaacgcggagttcgcctatctggcggccaacgtcagcgagtagcaatagcccgagcgttcttgaaagatgcgcccgtactcatcttggatgaagccacatcacacctcgacgcagtaaatgaagctgctgtgcacgaatcgctgcaacaactcatgcatggccgcaccaccttgatcatcgcccaccgactatcgacagtgcgaaactcaacacaaatcgttgtcatggaggcaggaaagattgtccaaatcggtgaccacgactcactcttacaagaggggggcctgtactcccggctc

SEQ ID NO: 275314 - DNA, 1687 bp, Unknown
  Bacterial polypeptide expressing nucleotide sequence isolated from the Sargasso Sea
gttgaccttcggctttggtgtgacccgagttgtcgcattcattgggattggtgcggtcagcgcgctggcagtgcgtgcggtcaagacgggggaaccattcgtcgacctgctgatcctgcttgcggtactggcgcccgttgccggtgtcttccactggttcgaatcttggatcgcccatgatatggcgttccgtctcctcgccgagatgcgcatcgcgctgttcgaaaaactcgatcgtctcgcgcctgcctacatggtgcggcggcgcaccggcgatatggttgccatggcgacgcacgacgtggagacggtggagtatttcttcgcgcacaccgtggcccccgcctttgtcgctgttctgatcccgagtatcgtcgtgggtgtgctggtgttcttcggttgggagctggcggcggcattgctcccattcctcgtgttggtcgcgatgacaccgttcttcacccgcaagcgtatcgacgaattggggtcgcgggcgcgcgaagcgctaggtgaattgaatgcccatgcggtggacacgattcagggcctcggcgagatcgtcgccttccagcggactcctgagcgccgcgccgagctgatcgagcgaactgagaaccatcacgtggttcgtctgccgtttttccgtgatctcactttccagacctccttgctggaggtagcgacgggtctcggtggtctcgcggtcgtcgtcgccggggcggtactggtcgatgcggggcggctggagagcgggattctgccgttgctcacgctgctctcgatggcggccttcctgccgatttcggaaatctcgaatgtggggcgtcagttggcggataccctcgggtccacccgtcggctttacgctgtcgataacgagccagtgcccgtgaaagatgggccaggcgtaacggaagacacaggtgcccgcggcctgccgatcgaactcgacggcgtcgacttccagtacgaggcggggaaccgccgcgcattgcacggagctgcatttgagtcgccggccggcaagacggtggcgctggttgggccctccggtgcgggcaagacgaccattgcgcatctgctgatgcggttctgggacccggaagagggagcgatccgcctcggcggacgggaccttcgcgactatacgcttgacgatttgcgtcggcgcatcgcgctggtggcgcaggacacctatctcttcaacgatacgctccgcgccaacattttgatcgccaatcccgatgcggatgaagtggcgctgatggcagcgatcgaccgggcctcacttggtgagttcgtggcaggcctgccggacggtctagagacgaaagtcggagagcggggtatgcggctttccggcggccaacgccaacgcgtcgccattgcgcgcgccttccttaaggacgcaccagtgctgatcctggatgaggcgacatcgcatctcgatgcggtcaacgagcatgcggtgcgggaagccctggaagaactgatggcggaccgtacgaccatcgtcatcgcgcatcggctctccactgtccgcggcgccgacctgatcgttgcactcaacgaaggccgcgtgatcgaaactgggacccacgaggccctgctcgcgaagggcggcctctatgcccagcttgtcgctcaccaactcgccggcgccgccggccgcagtgcggcggagtag

SEQ ID NO: 275315 - DNA, 730 bp, Unknown
  Bacterial polypeptide expressing nucleotide sequence isolated from the Sargasso Sea
ctggaagaggtttcttttacctatccaggccgctcgacaccggccctagacgcagtcaatctctcaatcgaaccaggtcagaccttggcccttgtaggaccatcgggcgctggcaagacgacgcttgcacaccttcttcttcggttctgggatccacagtcgggacgtattgttttccagggctataacctcgaggaacaccggctcgatgatctccgggcccacatggcgctagtggcacaggacacctatctgtttaactcaacgctacgatccaacatcctgctggcccggccggacgcggacgagtttgcgcttgagcatgccatcgaacgcgcggcgctgagcgattttgtagctggtctgccggacggtctggacacgcccgtgggcgaacgcggcatgcggctatccggcggccagcgacagcgggtagccatcgcacgcgccttcctgaaagatgccccaatcttaatactggatgaggcgacttctcacctggacgcaatcagtgaacagaaagttcgccaagctctggaagagctcatgcacgaccgtactacggtgatcatcgcgcaccgcttgtcgacggttcgcgatgcggacaaaattgtcgccatggaggacgggcgcatcgccgaacaagggtcacatgcggaactcttagccaggggcggtctttatgcccatctggtgcagcgtcagatggcaggtacggcggccgaataag

SEQ ID NO: 275316 - DNA, 2056 bp, Unknown
  Bacterial polypeptide expressing nucleotide sequence isolated from the Sargasso Sea
cttgaagattattaccggattattgggctgcccccctaaagatatagatatcacgccagacgaaccctttgatattattgtcgataggctgcagcagcagaccgacagccggatccgccaacgtcacattgctccccgcaaactcgccaaacagacgctccccctggtcctgctcagtgacaacggcaacccctgcgtcctggcccagcggcagggggagcaggccctgatcctggaccccgccgtcggcaacccgcaggtcatcgaccagcaggcgctgctgactcgctggaacggacgagtctatcaagtacgcagacaacagagccgctttgacatccgctggttcatcccggccttcctgcagcaaaaacggctgctgggggagatattgctcttttcgctggtcttgcagctcctggctctcatctccccgctcttttttcaggtcgtcatggacaaggtgctggtgcatcaggcctggtcgacgctggatgtgctggtgttcgggctgctgatcaccgccctggtggaggtctgtctgcgcggattgcgggagtaccagtacgcccacaccgccaaccggatcgacatccagctcggcctgcgcatggtgcagcacctgtttgccctgcccctgctctatttcaagagccgccaggtgggggccatcgtgacccgggtgcaggagctcaataccatccgcgagttcctgaccggcaccatgttcaccctgacggtggacgtgctgttcatgttcgtcttcctggcggtcatggccagcctctccgccatgctgaccctggcgatcctgctctccatccccgcctatgtactgatcgcctggtggatcacgccgcgcatgcagcaggcggtcgaacagcagttcggccacgccgccgccaacaccgccttcttgaacgagacggtcgctggcgccgagaccctcaagagcctagcgctggaaccgcgcttcgtgcggcgctgggatgagcagaccagccagatggtgaccgccggttaccgggttcagcagctcaacaacgcctcccagcacggcgtcatgtggctgcaaaagctggtgagtgccggcgtgctctggctcggcgcgagcgaggtgatcagcctgcagctcaccatcggccagctcatcgccttcaacatgatggccggccacgtggcccagcccctgtcacggctggtcgagttgtggggccagttcatccagacccggatcgcggtggacaaattgggtgacatgctcaacctgccccccgaacaccagcgtgacggcgcgggccaggtgagtgccggtgccattttgctggagcgggtgcggtttcgctatcagccggacgcccccctcatcatcgatgatctctccctgaccatagcgcccggcgaaacgctcggggtggtcggcagctcaggctcgggcaagagcaccctggccagactgctgctgcgcctctaccaacccgagcagggcgagatcttcatcgacggccagcccatccgccagcttcccctccaccacctgcgtcaacagatgggcgtagtgctgcaggagaaccacctgttcaacaaatcggtacgggacaacatcgcccagtcgatgccccatgccagcctggatcagatcatccgggctgccaccctggccggcgcccacgacttcattctgcggctgccccttggctatgacaccgtgctggcggaggggggcagctcgctctccggcggccagcgccaacgcatcgccatcgcccgcaccctgctggccgaccccaggatcctcatcttcgacgaggccaccagtgccctcgacgatgaatcccaggcgctgatccagcgcaacatgcgccagatcgcctgtggccgtaccgtcatcaccatcgcccaccgtctctccaccgtgcgccagtgcgaccgcatcatcgtcctgcagcgcggcaagatcgtcgagcagggcgaccacgccagcctgctggcgcgaggggagcactacgcccggctgtggcgactgcagcaggacttgcacgaggagaccccatga

SEQ ID NO: 275317 - DNA, 3541 bp, Unknown
  Bacterial polypeptide expressing nucleotide sequence isolated from the Sargasso Sea
atgtatttcgaccgacgactatgggcaatgatggcgggactgcgctggcgggttgccgcggccgtcgcgctcggcctgctcgcgatgggtgtcgggattctgcgtttcgtatttctcggccgcgtgctggcgctggtcttttccggcgcgccggcacgcagcatcggcgaagccgtcgttgcaaccgcggcctgcgtgctgctgcgcgcgtggctcgaccatcgccgtacggtgctcgcgcagcacacggccgggcgcgtgcaggccacgttgcgcgcgcggctgttcgaccggattgccgcactcggccccgcgtggttcagcggcgaacgcacgggcggcgtgatgctggccgtcgtcgacggcgtcgagcagctgcagacctttttcggcacctacctgccgcagctcgtgatcgccgcgtgcgcgccggtgatgatcttcgcggtgctcgcgtggtgggatgtgccgacggccgcgatcctgctggtcgcggcgctcgtcacgctcgcgctgccgcaactcgtgcaccgtgccgacaagcgcgcggcgctcgcgcgctccgcagcgttcaaggcgttcggcgaggaatttctcgacgcggtgcaaggcctgccgacgctgaaggcgttcgggcaaagcacggcgttcggcgcgaagctggccgcgaaggcgcgcgcgctgtccgacagtacgttctgggtgctcgcgctcggcctgctcacgcggttcttcaccgatctcggcaccggcctcggcgcggccgccgcgatcgcggtcggcgcgtggcgcgtgcggcatggcgacatgagcctcgaggcgctgctgatcgtgctgatgtccggcagtgaaatcttccggccgctgcgcgacctgcgttccgtgctgcaccaggggatgatcggccagtcggcggcgaacgcgatccatgcgctgctcgatgcggatagtcatgcaccggccgccgacgcgccgcgtgtgacgggcctgcggccggagatcgcgttcgacgccgtcagcttcgcgtatccggggcgtcgcgcggacgcgcatgcggcgctgagcttttcggttcgcgagggcgagacggtggccatcgtcgggccgagcggtgcgggcaagtcgaccatcgtgcgcctgctgctgcgccagcacgatgcgcagggcggcgcgatccgcatcggcggccacgacgtgcgcacgctcgatgccggccaggtgcgcgagatgatcgcggtcgtcgcgcaggatgcgacgctgttcgacggcagcgtggccgacaacctgcggctcggccgccccgacgcgagcgatgcggacatgatcgccgccgcgcgtgccgccaacgcgcacgatttcatttcggcgctgcccgacggctacgcgacgcgcatcggcgaacgcgggctcatgctgtcgggcggccagcgccagcgcctcgcgattgcccgcgcgctgctgcgcgatgcgccgatcctgctgctcgacgaggcgctgtcgtcggtcgacgcggagaacgaagcgctgatccagcaggcgctcgaccggctcacgcgcgggcggaccacgctcgtgctcgcgcaccggctgtccagcgtgatcggcgccgaccgcatcctggtgctcgaccaggggcaggtggtcgacgagggcacgcatgcggcgctgatcgcgcgcgacggcccgtatcgccggctgatggggccgcaactggaagcggtcgccgagtcggtcggtgcggcggcgacggccggcccgaccgcgcgcgcatcgtcgggcccgcaggtgcggccgctgaacgacgatgcggcggagatcggctggccggaaaccctgcagacgctattgcgcttcgtgcgtccgtggacgggcaaggtcgtgctgacggtgctgttcgggatcggccgcgtgctcgcgttcatcggcgtcggcgtgatcggcgcgctggtggtcggcgcggtgccgggcggccacgtgagcccgacgctcgtcaccgcactgctcgtgatcgcgccgttggcggccgtgctgcactggctcgaatcctggctcgcgcacgacatggcgtaccggttgctcgcggaaatgcgcatcgcgctgttcgcgacgctcgaacgcctcgcgccggccgggctgctgcgccgccgctccggcgatctcgtgtcgctcgcgacgcaggacgtcgagaccgtcgagtatttctatgcgcacacgctggcgcccgcattcgtcgcggtgctcgtgccggccgccgtgctggtgctgctcgcgtcggtcgcctggccgctcgcgctcgtgctgctgccgttcctgtcgtgggccgggctcgcaccggtgctggcgcggcgtgacgtcgaccggctcggcaccggcgcacgcgaagcgctgggccagctcggcgcgcacctgaccgaaacgatccaggggcttgcggagttgaccgcgttccaggccgtcgcgcgccggcgcgcagcgttcgtggctgaggtcgatgcgtaccgcaagcaacgcgcgaagctgctcgacgatctgtcggcgcagagcgccgcgctggaaatcgcgagcgggctcggcgggctggtcgtcgcggcgctgggcgcgctgctgtgcgcacgcggctggtttccgcgcgagtcgttgccgctgctggtgctggtggccgtggccgctttcatgccggtggccgaaatcggccaggtcgcgcgccagctcgccgatacgatcgcgtcgacgcgccgcttgcgtgcgctggagaaggagccggtgccggtgacggacggcacgcaggcgatgcctgccgatccggccgtgcgtttcgaggccacgtccttcacgtacccgggccgcagcgtgcccgcgatcgaccgcgtgagcttcgaggtgcggcccggcagcacggtcgcgctggtcggtgcgtcgggcgccggcaagtcgacggttgcgagcctgctgctgcgcttctgggatccgcagcagggccgcgtgacgctcggcggcgtcgacctgcgcgacttgcggctcgacgacctgcggcagcacatcgcgctggttgcgcaggatacctacctgttcaacgacacgctcgaagcgaacatccggcttgccgcgagcgatgcgtccgacgcggacgtgcagcgtgcgatcgaccatgcggcgctcggcgacttcgtcgcgcggctgcccgatggactggcgacgcgcgtcggcgagcgcggcgtgcagctgtcgggcgggcagcgccagcgtgtcgcgattgcacgcgcgttcctcaaggatgcgccggtgctgatcctcgacgaagcgacgtcccatctggacacgatcagcgagcagcagatccgcgcggcgctggaagacctgatgacgcagcgtacgtcgatcatcatcgcgcaccggctgtcgaccgtgcgcaatgccgacctgatcctcgtgatggagcacggcagcgtgatcgaggcagggcggcatgcggacctgatggcgcggcagggcgcgtatgcgcggctcgtgtcgcatcaggcgagcggggtggcggcgtaag

SEQ ID NO: 275318 - DNA, 840 bp, Unknown
  Bacterial polypeptide expressing nucleotide sequence isolated from the Sargasso Sea
tttcctgacgtgattattgaaacaattaatattagcgcatattggccaggtgcttgtgccgaagacctagatactggagttgtaggctatctcgagcctagtttgttggaattggaaggaatagagagaattgtatcgcgttcctatgaaggagtatctaggataactattgattttgtttctaactgggatatggaaaaggcattagatgatgtcaagattgcaattgaagaagcccaaaatttacctgatgaattagacgatattgacgtcaagaggcgagtatggagagatcgcgtaacgaacgttgttttttctggtccctttactattgaacaattagaaaaatattcagacgaatttctacaacttttatatagtgaaggaattgcaaaaacttctactcggggaggaatggaaccaattgtacgagtagtggtgccagaaattagccttcttaagaataacttgactctgcgtgaattatcaaatgctgtcagttcgggcgcttcaagtagaccagcaggtgaaacaagtgatgggttagccagattgaaggctggttccgataaaacacaacaaatagacctggctgaaattactgccaaaacgtctttaaatggtgaaagcataaagcttggggatattagcgcgattagcatcgatgaatttccaacggtggaattctttaaaggaaaaaatccggcgataattactagagttgacagggggtccgatggagacgccatcaaaatacaagataaagtggaaactttaataaaaaaatttcagctaaacatgcctgaaacgctaactatcgaattgtctgggacacgtacg

SEQ ID NO: 275319 - DNA, 287 bp, Unknown
  Bacterial polypeptide expressing nucleotide sequence isolated from the Sargasso Sea
tgcaatagctggagaggatcctaactggggaagaattataatggctattggcaaatcagacgctgagattaatttaaagaatttatcaattaaacttggagatattaatattattcaaaatggaaaactttctaaccagtataaagaagatgaggctgccgcttatatgaaaaattctaatattgaaattagtgttaatgttgcaaatggcaataagaattttacagcatacacaatggattttacaaaaaaatatatagaaataaatgcggactatagaagttaag

SEQ ID NO: 275320 - DNA, 331 bp, Unknown
  Bacterial polypeptide expressing nucleotide sequence isolated from the Sargasso Sea
atgagcatcaagctgggcgacattgcccccgatttcgagcaggacagcagcaccggccgcattcgctttcacgactggctgggtgacagctggggcgtgctgttttctcaccccgccgacttcaccccggtgtgcaccaccgagctggggctgacggccaaactggccgagcgcttcgcggcgcgcaacgtcaaggccatagccctgtcggtcgaccccgtcgactcgcacctggcctggatcaaggatatcgaggaaacccaacacacccacgtaggttttcccatcatcgccgacgccgaccgcaaggggccgagctgtagacctgatc

SEQ ID NO: 275321 - DNA, 835 bp, Unknown
  Bacterial polypeptide expressing nucleotide sequence isolated from the Sargasso Sea
taatgagaaagagatacaagcaggtgattctggtgtcgatatatacaacctaatcaagtacacacgctctaatcagaatacatgtatcaatcaaagacccatcgtttcgataggggataaaatcagcaagcatgacatcttggcggacggaccttctatagatttgggagaattgtctttgggtcaaaatgtaagaattgcatttatgccttggcatggatataactttgaagattcaattttgatttcagataagctagtaagagacgataaatttaccagtattcatatacaagaattaacctgtgttgcaagggacactaagcttgggccagaagaaatatctgcagatatccctaacgttggagataatgcactttccaagttggatgaattcggcatcgttcatatcggtgctgaggtaaaagcaggtgacattttggtaggaaaagtaactccgaaaggagagactcagctcagcccagaagaaaaacttctaagagctatatttggagaaaaagcttcggatgttaaagatagttcactaagagtttcatcaggtgccgatggaacagtgattgatgttcacgttttcaccagagatggaattgaaaaagacggaagagcagagtctattgaagaatctcaactagctgaaattcaaaaagatattgatgatgaattaaaaatacttgagcaggcagcattctcaagattagaaaccctgttaatagggaagaaagtagcttcaggtaaaggccttaaaaaaggatcaaccattacagcagctgatcttgaagaaattataaagatgattggttccagatcagattag

SEQ ID NO: 275322 - DNA, 869 bp, Unknown
  Bacterial polypeptide expressing nucleotide sequence isolated from the Sargasso Sea
ggctgctggccgaccagttcaagacttcatggtgctggtgctattgggcgcggccatcatctcggggctggtaggcgaggtcaccgacacgctggtgatcctcgtcatcgtggtgctcaatgcggtcatcggctttgtgcaggcctggcgcgccgaccaagccatggcggcgctgcgccagctggcggcggcacacgccaccgtgctgcgcggcggcatggtgcaggtcctacccgccactgagctggtgcccggcgacatcgtgctgctggaggctggcaaccagatcccggccgacctgcggctcatcgagattgcacagctgcaggtggatgaatcggccctcacgggcgagtccgtcaccgtggccaagcagaccgaggccctggcggccgaagacgtgggcgcgctgggcgaccgtaccaacatggccttcaagggcaccacggctacccatggccgggcgcgcgggttggtcgtagccaccggcatgcacaccgagctgggcaaggtggccacgctgctcgacaccggcgaccgcagcacaccgctgcaactgcgcctggccgcgtttggcaagcgcctggcgattgcggtattgggcatctgcgcggtgatctttgtggtgggggtgctgcgtggcgaggcgccgctgctcatggcgctcaccgccatcagcctggccgtggccgccatccccgaggccctgcccgccgtagtcacggtgctgctggccctgggcgcgcgccgcatggtggccgtgcatgcgctggtgcggcgcctgccgtcggtggagactctgggctcggtcaccaccatctgctcggacaagaccggcaccctgacccaaaaccgcatgcacgccgagc

SEQ ID NO: 275323 - DNA, 1508 bp, Unknown
  Bacterial polypeptide expressing nucleotide sequence isolated from the Sargasso Sea
tatgcctcctgaaagagtagatttcatggatgtctcccctcagcaggctttctcagtaggtgcttccttaattccatttttagaacatgacgatgccaaccgggcattaatgggctctaatatgatgaaacaagctgtacctactcttcaagcagaaaaacccttggtaggtactggcgttgaaaggttgatcgcaagagactctggctcctgtgttactgcttctagaggaggaacaattgaaagtatagatgctagtaggatagttgtaagggttaatgagaaagagatacaagcaggcgattctggtgtcgatatatataacctaatcaagtacacacgttccaatcagaatacatgtatcaatcaaagacccatcgtttcgataggggataaaatcagcaagcatgacatcttggcggatggaccttctatagatctaggagaactgtctttgggtcaaaatgtaaggattgcatttatgccttggcatggatataactttgaagattcaattttgatttcagataagctagtcagagacgataaatttaccagtattcatatacaagaattaacctgtgttgcaagggacaccaagcttgggccggaagaaatatctgcggatatacctaacgttggagataacgctctttctaagttagatgaattcggtatcgttcatatcggtgctgaggtaaaagcgggtgacattttggtaggaaaagtaactcctaaaggagagactcagctcagtccagaagaaaaacttctaagagctatattcggagaaaaagcttcggatgttaaagatagctcgctaagagtttcatcaggtgcagatggaacagttattgatgttcacgttttcactagagatggaatagaaaaagatggaagagcagagtctattgaggaatctcaactagcagaaattcaaaaagatattgatgatgaattaaaaatactagagcaagcagccttctcaagattagaaagcctgttagtaggaaagaaagtagcttcaggtaaaggtcttaaaaaaggatcaaccattcaagcagctgatcttgaagaaattaacaaagatgattggttcaagattagattagataatgaaagcgccaataaacagattgaaaatatttcaaaaagtctaaaagaatataaagatgacttagacgttgcctttggaaaaaggaaatccaaagtaactgatggtgatgatttagcaccaggggtattaaaaatcgtaaaagtctatctagctattaaaaggagaattcagccaggagataaattagccggaagacacggaaataagggtgttatttcagttattatgcctgaagaagatatgccattcgatgaaaatggacagcctgtagatatagttcttaatccactcggcgttccttctaggatgaatgttggtcaggttcttgaaactcatcttggatgggctgcaaaagaattagggacccagataggtgagatgatagatactg

SEQ ID NO: 275324 - DNA, 780 bp, Unknown
  Bacterial polypeptide expressing nucleotide sequence isolated from the Sargasso Sea
gggcggtttggcgcgtccgtttccttttccgatttcacgtttgacttttcgcagtgcacgtactacttcaagatcgccgtcgcgttggcggtggcggcgattcccgagggcctccccgcggtgatcacgacgtgcttggccctgggcacgcggaagatggcgaagaagaacgcgatcgtcaggcacctccagagcgtcgagacgctcgggtgcaccagcgtcatctgcagcgacaagacggggacgctgacgacgaaccagatgagcgcgaccacggtggtggtccccggcgcgtccgacggcgccaagctgcgcgtcttcgacgtcgagggcaccagctacgaccccagggacggcggcgtgatcgggctgagaacgctggatcagtcgctggcggcggtgagcctgatcggcacgatgtgcaacgaagcctcggtcgcgcccgtcgacccgagcgacgccgaccaggggttcaagtgcctgggcgaacccaccgagggcgccttaaaagtcctcgccgagaagctcggcgtggaccaagacgcggagatgagcgcgatcgcggacgcgcgcgcgcgcgacccgatcgccggcgcgagggcggtgagcgactcggcgaacgcgcggttcgagaaggtggcgacgctggagtttgaccgcgcgcgcaagtccatgtcggtgttggcgcgtgcgcgcggcgcgtccgccgccgaggctaagctcgcggttcgcgggacgaagaaaaccgccgccaaggcgaaggcggccgacaagaacacc

SEQ ID NO: 275325 - DNA, 1567 bp, Unknown
  Bacterial polypeptide expressing nucleotide sequence isolated from the Sargasso Sea
tttggaatttacaagcgagcgcaagcgcatgtcgacgctttgttcgtgcaacggtgagtccacgctattcgtcaagggtgcaccggagagtgttctggctctgtgtacgtccgtgatgtcgtctcaaaacgggcgagtggacagaatgacggataaaattcgcgagcaactgctgttgcaaatgcaaaactacgcgagcgacgcgttgcgagtgttggcgctcgcgatgaaatcttgtggtcgtggggaaacgtgctcagagagcgatgaacaaggtctcacgttcatcggtctcgtcggcatgatagacccacctcgaccggaagtgcgatattcgttgcaaacgtgcaaagaagccggcattcgtgtaatcatggtgaccggcgacaatcaacagaccgcggaggcgatcgcgtcgcagattggattgggtgatgcgtacaatccgttgacgggagggaagcttgacaacgagttcaaaggtcgctcgttcaccggagctgagttcgagttcatgactgaggaacagcgagaggaatccgctcgaagcatgtgcgtgttctctcgcgtggaaccggcgcagaaaagtaagctcgttgagattttgaagcgacagggaaatatcgtcgccatgactggtgacggtgtgaacgacgccccagccctcaagtgtgccgacatcggtatcgccatgggcagcggtacggcggtggcgaagagcgcctcggacatggtgctcgccgacgataatttcagcaccatcatcgaggccgtcgccgagggcagagccatctataacaacgccaagcaattcattcgttacatggtgagttcgaacattggtgaagtagtgtgcattttcatcgccgcggcgctcggtttcccggagacgctcgtgccagtgcaacttttgtgggtcaacttggtgacggacggcttacccgcgaccgcgctcggtttcaatcgagcggacggtgacatcatgagccagagacctcgcagtccccgcgagcagatcgtcgatcgttggttgctgatcagatatctcatcatcggcgtgtacgtcggcgttgccaccgtcggctctttcggctggtggttcatgtcgtacgagggaggccctcagttgacgtgggcgcaactcacgagcgcatcgtactgcatcggtgacgcgtgcgacgcgtacaaggacaggcgcccgagtacgatggcaatgtcgacgctcgtcttgattgaaatgttcaacgcgctcaactctctgagcgagaacaggtccttactcacgcatcctccatccaccaactggtggcttctgagcgccatcatcatcagcatgtggcttcacatggtcatcatgtacgtcccgtcattcgccaagacgttcacgatctccgcgctcaactacgacgaatggaaggctgtgttctggttttccattcccgtcatcttcatcgacgaggtcttaaagtacgtcaccagacgccaccgcgcgtccatcgttctctggctcaagcgcgccgcaaggaaagacattcttcctcgcactcgaagttcttcacgattttag

SEQ ID NO: 275326 - DNA, 1435 bp, Unknown
  Bacterial polypeptide expressing nucleotide sequence isolated from the Sargasso Sea
catgccgatccgacaggacgacaaccgaccgaaccgtcgcttcggaatcatcaacctggtgttgatcggcttcggggcgcttctgctcttgagcagtttcgtgcccaacaacgcgatgcagcaggtgcccaaggtgccttattcattgttcctcgatcaggtgaatgatggcgccgtgaagcgcgcttacatcacccaggaacaaatccgctacgagctgagcgaaccggaggagggcacgccaccggtgttggcgaccacgccaatcttcgacatggatctgccccaaaggttggaaaccaaaggcgttgagttcgccgctgccccgccgaagaagcccaacatctttactaccatcctcagctgggtggtgccgcccctgatcttcatcctggtgctgcagttcttcgcccgccgttcgatgggcggcggcgcccaaggggcgttgagcttcactaagagcaaggccaaggtttatgtgccggacgaggaatcccgcgtcaccttcgctgatgtggcgggcgtcgatgaggccaagcaggaactcaccgaaatcgttgatttcctcaagacccctgagcgctatgccgaaatcggagcgcggattcccaagggtgtgttgcttgtgggccctccaggcaccggcaagaccctgctgtcgaaggccgttgcgggcgaagcgggtgttccctttttcattatttccggctcggaattcgttgaattattcgttggtgccggtgccgcccgtgttcgggatctgttcgaagaagctaaaaagaaagccccctgcatcattttcatcgacgagctcgacgccatcggcaagagccgttccggctctatgggcgtggtcggcggcaacgacgagcgggaacaaaccctgaaccagctcctcaccgagatggatggcttcaccgcccaggacaaaccggtgatcgtgttggcagccaccaaccagcctgaagtgctggatgctgccctgctgcgcccgggccgctttgaccgccaggtgttggtggatcgcccggatctgtccggccgtaagaccatcctggagatctacgccaagaaggtgaaacttgctgatgctgtggatttagacagcgtggcgcaggccaccagcggctttgccggcgccgatctggccaacctggtgaacgaagcggccctgctcgctgcccgtgcttacagaaccaaggttgagcaacaggatcttggggaagccatcgagcgggtagtggcgggccttgagaagaagagccgcgttctgcaggacgacgagaagaaagtggtggcgtaccacgaagtgggtcacgcgatcgtcggtcacctgatgccaggcggaagcaaggtggcgaagatctcgatcgtgccccggggcatgagcgccctcggctacaccctgcagttgcccaccgaagaacggttcctc

SEQ ID NO: 275327 - DNA, 915 bp, Unknown
  Bacterial polypeptide expressing nucleotide sequence isolated from the Sargasso Sea
ggctatgggggattcggaagatcaaaggcgaaattattgattgaagccacaggcaaagtaacgttcaacgatgttgctggagtagaggaagcaaaagaggaagttgaagaaatagtggaatttttaagagacccaaaaaaatttagtaggttaggtggtaaaattcctaaaggagcattattaattggtccaccaggaactggaaaaactttgctagctaaagctattgccggtgaagcaaatgtaccttttttctctatatcaggttctgattttgttgaaatgtttgttggtgttggagcgtctagggttagggacatgtttgatcaaggtaaaaaaaattctccttgtataatattcatagatgaaattgacgctgtaggcagaagtagaggtgcaggacttggtggcgggaatgatgaaagagagcaaactttaaaccaattgttagttgaaatggacggatttgatacaaatgagggaataatattaattgcagctactaacagaccagacgttctcgatccggctttattaagaccaggaagatttgatagacaggttgttgtaggcaatcctgatataataggtagagaggcaatactaaaagttcacatcaaaaaaattaatactggtccagatgtaaaattaaggaccattgccagaggaacgccaggattttctggagcagatttagctaacttagtaaatgagtcggctcttttagctgcaagaaaaaataaaagagtagtaacaatgtcggatgttgaagaagccaaagataaagttatgatgggcgcagagagaagatcaatggttatgagtgaggatgaaaagaaacttaccgcttaccatgaagggggccatgcaatagttgctcttaatgaaaaagcatcagacccaatcacaaagcaa

SEQ ID NO: 275328 - DNA, 936 bp, Unknown
  Bacterial polypeptide expressing nucleotide sequence isolated from the Sargasso Sea
atgccctctctgttcggggtgttactctcttggtttcctatgcttttactaatcgctgtatggatattttttatgagacaaatgcagggtggacgaggtggagctatgggttttggaaaatcgaaagcaaagttaatgaacgaaattaagggaaaggttacttttaatgatgttgctggagttgaagaagccaaagaagaagttgaggaagtagtagagtttttaaaagatccaagaaaatttagtcgtcttggtggtaaaattccaagaggctgtcttttagtaggacctccaggcacaggaaaaacattattagccagagctattgcaggcgaagcaggtgttcctttctttacaatttcaggttcagactttgttgaaatgtttgtaggtgtaggagcatcacgagtgagagacatgttcgaacaaggtaaaaaaaattcaccatgtatcatatttattgacgagatagatgctgtaggaagaagtagaggagcaggcttaggtggaggtaacgatgaaagagagcagactttaaaccaacttcttgtagagatggatggttttgatactaatgaaggtgtaatcattatcgctgcaactaacagacctgacgtgttagacccagcattattaagaccaggaagatttgatagacaagtggttgtatcgttgccggatataattggccgagaaaaaattttaaaggttcatagtaaaaaaatttcgatggctccagatgtaaacttaagaactatagcaaggggtactccagggttttcaggagcagatttagcaaatttggttaatgaggctgctcttttagctgctagaaaaaataaaagaatagttacatacttagaatttgaagaggcaaaagataaagtgatgatgggagctgagagaaggtcaatggtaatgacggaagagagaaaa

SEQ ID NO: 275329 - DNA, 805 bp, Unknown
  Bacterial polypeptide expressing nucleotide sequence isolated from the Sargasso Sea
atgtattttgctttaggacttcttatttttattggagttcagcaatataattctacggtcagcgcacctgaaagtaaatcttttacagtatttaaaaatgatattacctccggtttagtaatagaagccacaataaaagagcaatcaaatatggttgaatttaaaatagcaaatgatgaaactttatatcaaacagaatatccagagggttttgaaggagaagtatttcaacttttagttgatcaagatatagtcttaaatactgatacagagcctgcagggttccaagattatgtttttgcatttttaccctggctatttcttgcaggatttatgttctatatgttttctcaagttagatcaaatggaaatcagattatgcaatttggtaaatctaaggctaaggagcttgacgaagaagcaccaaaagttacatttcaagatgtagccggtgttgaagaagctaaagaagagctagaagagataaaagagtttttgaaatctcctgaaaaatttaacaaacttggtgcaaaaattcctaaaggagttctacttgtcggtcccccaggaacaggcaagaccctactcgcaaaagcagttgctggggaagccggagttccattttttagcatttcaggatctgattttgttgagatgtttgtaggggttggagctagtagggttagagatttgtttaaaaaagccaaagaatcatcaccagcaatcatctttatagatgaaattgatgcagttggaagaatgagaggggctggtcttggtggcgggcatgacgaaagagaacaaa

SEQ ID NO: 275330 - DNA, 948 bp, Unknown
  Bacterial polypeptide expressing nucleotide sequence isolated from the Sargasso Sea
gggtcccccaggaactggtaaaactttattggcaagagcaattgctggagaggctggagttccgtttttcactatatctggatcagatttcgttgaaatgtttgttggtgtcggagcttcgagagttagagatatgttcgaacaaggaaaaaaacattcaccatgtattatatttattgacgagattgatgcggtaggaagaagtagaggagcaggccttggtggtggaaatgatgaaagagaacaaacacttaatcagttattagttgagatggatggttttgatactaatgaaggtgtaattattattgctgcaaccaatagaccagatgtattagatccagctcttttaagacctggaagatttgataggcaagttgttgtttccaacccagatctaattggtagagaaaaaattctaaaggtgcatgcaaaaaaaatatcaatggcacctgatgttaacttaagaacagttgctagaggaacacctggattttctggagcggacttagcaaacttagtaaacgaagctgcattgctagccgcaagaaaaaataaaaggattgtgacatatcaagaatttgaagaagctaaagataaagtaatgatgggatctgaaagaagatctatggtaatgtcagaggaagagaaaaagttaactgcttaccatgaagcaggacatgcgatcgtaacaataaatgaaaaggctgcatatcctatacataaagcaacaataataccaagaggaagagctctaggaatggttatgcaattacctgaaagagatgaagtttctcaaacaagagaacaacttcatgcacaaatggccattgctatgggcggaagagttgcggaggaaataatttttggagatgacaaagtaaccacaggagcggcaagcgatattgaacaagctactaaaagagcaagggctatggttatgagagc

SEQ ID NO: 275331 - DNA, 919 bp, Unknown
  Bacterial polypeptide expressing nucleotide sequence isolated from the Sargasso Sea
attttggccaagaatggcgtcgacatctccgtcagcgaaggcgagcaacagggcaacgtcgcgtccttgatcggcaacttgttgttcccgctcgtcgcgttcggtggtttgttcttcttgttccgccgcgcgcagggcggtgaaggcggtggtatgggtggcatgggcggtggcccgatggactttggtaagtccaagtccaagtttcaagaggttccggaaaccggcgtcaccttcgccgacgtcgccggcgtcgagggcgccaagttggaattgcaagaagtcgttgactttttgaagaacccggacaagtacaccgcgctcggcgccaagatcccgaagggttgccttttggtcggtccgccgggtaccggtaagactttgatcgccaaggctgtcgccggtgaagccggcgtgcccttcttttcctgcgcggcgtctgaatttgtcgaactcttcgtcggcgtcggcgcgtctcgcgttcgcgacttgttcgaaaaggccaagtccaaggcgccgtgcatcatcttcattgatgagatcgacgccgtcggtcgccagcgtggctccggcatgggcggcggtaacgacgaacgcgaacaaaccatcaaccagctcctcaccgagatggatggtttcgaaggcaacacgggcgtcatcgtcctcgccgccaccaacagaccggacgttctcgatagcgcgctccttcgtccgggccgtttcgaccgtcaagggaccgtcgaacgaccggacgtcgccggccgcattcgcatcctcaaggggcacgcccggggcaagacgttggccaaggaggtcgactttgacaaaatcgcgcgccgcacgccgggtttcaccggcgctgacttggaaaacctcatgaacgagtccgccattctcgccgctcgccgggagctcacgg

SEQ ID NO: 275332 - DNA, 940 bp, Unknown
  Bacterial polypeptide expressing nucleotide sequence isolated from the Sargasso Sea
attcggaaatctaaagctaaattattatcagaagctagaggtaaagtaacatttaatgatgtagctggaattgatgaagctaaagaagaagttgaagaaatagtagaatttttaaaagacccaagaaaatttagaagacttggaggaaaaattccaagaggagcacttttaattggaccgccaggaacaggcaaaactttacttgcaagagcaattgcaggagaagctgatgtacctttctttacaatttctggatcagattttgttgaaatgtttgttggtgttggagcatcaagagtcagagatatgatggagcaaggaaaaaagaatgctccgtgcataattttcatagatgaaattgatgctgttggaagaagtagaggagctggacttggtggaggaaatgatgaaagagaacaaactttaaaccagttacttgttgaaatggatggttttgatactaatgaaggcgtaatagtaattgcagcaactaatagacctgatgttttagatcctgcattattaagaccaggtagatttgatagacaagttgtggttccaaatccagatataattggaagagaagcaattttaaaagttcatattaaaaaaattacgatagggcctgacgttaaattgagaacaatagcaagaggtacgccaggattctcaggggctgatttagcaaatttatgtaatgagtcagcattattagctgctagaaaaaacaagagaattgtaactatgtcagacatagaagaggctaaagataaggtaatgatgggcgcagaaagaagatcaatggtaatgaccgaggatgaaaaaaggaaaacagcttatcatgaaggtggtcatgcaatagtctcattcaatttagatcattcagatcctattcataaagcaacaattataccaagaggcagagccttaggaatgggtg

SEQ ID NO: 275333 - DNA, 1099 bp, Unknown
  Bacterial polypeptide expressing nucleotide sequence isolated from the Sargasso Sea
ggcaattatagtctttttgactatcggtctctacaatatgtttaaaaaccctcagactaattctagagctgggaataaaataatattttcagaatttttaacatcagtagataatggagaagttttaaaagttgaaattcaaggaaataatataaaaggagtttactcaaatggtaataatttttcaacttatgctccaaatgacccaaatttgatcgaaaaactatctgaaaaaggagtgagtatatctgctgcacctatagaagaaaaaatgccatctttgttcggagtgttgttatcttggttcccaatgttattactgattgctgtttggattttcttcatgcgtcaaatgcaaggtggaaaaggtggagcaatgggctttggcagatctaaagctaagatgatgaatgaattaaaagggaaagttacatttaacgatgttgctggtgttgaagaagcaaaagaagaagttgaagagattgtagaatttttaaaagacccaaaaaaatttagtagacttggaggaaaaattccaagaggtgcacttttagttggaccaccgggtacaggaaaaacattacttgctagagctattgctggtgaagcaggagtgcctttttttactatctcaggatcagattttgtagaaatgtttgttggggttggagcttctagagttagagatatgtttgaacaaggtaaaaaaaattctccttgtataatttttatagatgaaattgatgctgttggtagaagtagaggagcaggtttaggaggaggaaatgatgagagagagcaaactcttaatcagctccttgttgagatggatggttttgatactaatgaaggtgtaataattattgcagctactaatagaccagatgtgcttgatccagctttattaagaccaggaagatttgatagacaagtagttgtttcaaacccagatataattggaagagaaaaaattttaaaagtacatgtaaaaaaaattaaaatggctccagatgtaaatttgagaacaattgcaagaggaacaccaggtttttcaggtgcagatcttgcaaatttagtcaatgagtcagctctattagca

SEQ ID NO: 275334 - DNA, 697 bp, Unknown
  Bacterial polypeptide expressing nucleotide sequence isolated from the Sargasso Sea
ggcggcgaaattcgccaagctcggcattcgaccgccgaaaggggtgttactgtacggacctccgggaacggggaagacgttgatcgcgcgggcgtgcgcggcacagacgaacgcggcgtatctcaagctcgcgggtccgctcttggtgcaaatgttcatcggagacggcgccaaactcgtgcgagacgccttcgccttggccaaggagaaatcgcccgccatcatcttcatcgacgagatcgacgccataggcacgaaacgtttcgattccgacaccaacggcgatcgagaggttcaacggacgatgttagagctcctgaaccaactcgacgggttctcgagcgacgatagaatcaaaatcatcgccgccaccaatcgcgccgacattctcgaccccgcgctcatgcgttcgggtcgtctcgatcgtaagattgagttcccgcaccccaacgaggacgctcgcgctcaaatcatgaagattcactcccgcaagatgaacgtcaatccagaggtcaacttcgaggagctcgcgcgaggcaccgaggatttcaacggcgcgcagctcaaagccgtgtgcgtggaagccggcatgctcgcgcttcgacgagacgccgtcgaggtgcagcacgaggatttcaacgagggcatcgtgcaggtgcaggcgaagaaaaaagccgatctcttctattacgcgtaa

SEQ ID NO: 275335 - DNA, 960 bp, Unknown
  Bacterial polypeptide expressing nucleotide sequence isolated from the Sargasso Sea
ttctgtgaaaaaagtgaaagttttaaaagttgaaattcaaggtacaaatataaatggagtatattcaaatggtgataatttttctacttattcaccaaacgatccaaacttaattgaaaaactttcagatatgggagttagtatttctgctgctcctatcgaagagaagatgccatctttatttggtgttttgctttcatggttcccgatgttattgctaattgctgtttggatattttttatgagacagatgcaaggtggtaagggcggagcaatgggtttcggtagatcaaaagcaaaaatgatgaacgaaatgaaaggcaaagttacattcaatgatgtagcaggtgtagaggaagccaaagaagaagtagaggagatagttgaatttttaaaagacccaaaaaaatttagtagacttggaggaaaaattccaaggggagctttattagtgggacccccaggtacaggaaaaactttacttgctagagctatagctggagaggcaggtgttcctttctttactatatcaggatcagattttgtagaaatgttcgtaggggttggggcttctagagtaagagatatgttcgaacagggaaaaaagaattctccttgtataatttttattgatgaaattgatgctgtgggaagaagtagaggagcaggtcttggaggtggaaacgatgaaagggagcaaacactaaaccaacttcttgttgaaatggacggttttgatactaatgaaggtgtaattataattgctgcaactaacagaccagatgttttagatcctgcactattaagaccaggtagatttgatagacaagttgtagtttctaatcctgatattattggaagagaaaaaatattaaaagttcatgttaaaaagataaaaatggctccggatgtaaatttaagaactattgcaaggggtacaccaggattttcgggtgcaga

SEQ ID NO: 275336 - DNA, 916 bp, Unknown
  Bacterial polypeptide expressing nucleotide sequence isolated from the Sargasso Sea
gtcacgttcgcggacgtcgctggctgtgacgaggccaaggaagaagttaaggaagtcgtggacttcctgaaggacccgcagaagttccagaagctgggtggccgtattccccgtggcctgctgctggtcggccctcccggtaccgggaagacactgctggccaagtccattgcgggcgaagccaaggtgccgttcttcagcatctcgggatcggattttgtggaaatgttcgttggcgtgggcgcggcccgcgtgcgcgacatgtttgacaacgccaagaagaacgccccctgcattatcttcatcgatgaaatcgacgccgtgggccgccagcgcggtgcaggcctgggcggcggcaatgatgagcgcgagcagaccctgaaccagatgctggtcgagatggacggctttgagaccaacctgggggtgatcgtggtggctgccaccaaccgtcccgacatcctggacgccgccctgctgcgccctggtcgttttgaccgccaagtgtatgtcacgctgcccgacatccgcggccgcgagcagatcctgaatgtgcacatgcgcaagatcccgatcggccaggatgtggcccctgcgatcatcgcccgtggcacgcccggcatgagcggagccgatctggccaacctgtgtaacgaagctgccctgatggctgcgcgccgcaatgcgcgcaccgtcgagatgcaggactttgagaaggccaaggacaagatcctcatgggccccgagcgcaagagcatggtcatgcccgaggaagagcgccgcaatacggcctaccacgaggctggccacgccctgatcggcaaactgctgcccaagtgcgacccggtgcacaaggtcaccatcatcccacgtggccgtgctttgggcgtgacgatgagcctgcctgctcaagacc

SEQ ID NO: 275337 - DNA, 898 bp, Unknown
  Bacterial polypeptide expressing nucleotide sequence isolated from the Sargasso Sea
aatttagcaatgtggggaattatagtcctattaacaataggattgtataatatgtttaaaaacccacaaggatcaatcggagtaaaaaataacattattttttctgattttttaaaagaagtagatgagggacgagttgttcaagtagaaattcagggcaaaaatattaaagggattttttctaatggaaaaacatttactacttacgcacctgatgatccaaatttaattcaaaaattaagcgataaaggtattagtatatcagctagccctatagaggaaaaaatgccatctctacttggaatattattgtcatggtttccaatgttgttattgattgcagtttggatattttttatgagacaaatgcaaggcggaaaaggtggtgcaatgggttttggaagatcaaaagctaaaatgatgaatgagttgaagggtaaagtgactttcaatgatgttgcgggagtggaagaagctaaggaagaagtagaagaagttgtggaatttttaaaagatccaagaaaatttagtagactagggggaaaaataccaagaggctgtttgttagttggtccgccaggtacaggcaaaactttattagctagagcaattgcaggagaagctggcgttccttttttcactatatctggatctgattttgtagaaatgtttgtaggtgttggagcatcaagagtaagagatatgtttgaacaaggaaaaaaacattcaccctgtataatttttattgatgagatagatgctgtaggaagaagtagaggagcaggtttaggaggcggtaatgatgagagggaacaaactttaaaccaacttttagttgaaatggatggttatgatacaaatgagggagttataattattgcagctacaaatagacctg

SEQ ID NO: 275338 - DNA, 823 bp, Unknown
  Bacterial polypeptide expressing nucleotide sequence isolated from the Sargasso Sea
atgtcggtttttcagagcttttcaccgagtgaatcgtctcgttcacaaaccgactacacaacgtttttgagagaagcagaacagggaaatattcgtgaagttcgcattaataatgatggcgaaattcgcggtacaaagcgttcaggcgaaactttccaaacttttgtaccttacttcgatgacaagttagtatctgacttgtttaaaaacgacgtaagagtttacggtgaaccaccagaagaacagtctcttttgacgtctatctttatttcatggttccccatgttgttgcttattggtgtgtggatattcttcatgcgtcaaatgcaaggtggcggtggccgtggcgctatgtcgttcggtaagagtaaagcgcgcttgcttggtgaagaccaaattaagacgacatttgctgacgtggctggttgtgatgaagcaaaagaagatgtctctgagctggttgatttcctacgcgacccatctaagttccaaaagcttggcggtaaaattccaaaaggcgttttgatggtaggtcctcctggtacaggtaagacattacttgctaaagcaattgctggtgaagcaaaagtaccatttttcactatctcaggttctgacttcgttgaaatgttcgtgggtgtaggtgcatctcgtgtgcgcgatatgttcgaacaagctaaaaaagcagcaccatgcattatcttcattgatgagattgatgccgtaggtcgacaacgtggtgcaggcttaggcggtggtcacgatgagcgtgagcagacgctaaaccaaatgctagttgaaatggatggttttgaaggtcacg

SEQ ID NO: 275339 - DNA, 766 bp, Unknown
  Bacterial polypeptide expressing nucleotide sequence isolated from the Sargasso Sea
acgccagaacttataaatattttaaaaaatgagggaataagttttgatgttcatccagtaaaaacagctcctcctgcattaggaattttaggtaatttgctcttcccggctatcttaattggaggtttaatttttttagctaggaggtcaaatggtatgcctggtggtcctggccaagcaatgcagtttggaaaaacaaaggcaagatttgcaatggaagctgaaactggagttgtattcgatgatgttgcaggcgttaatgaggctaaacaggatttgcaagaagttgtcacttttctgaaaaaaccagaaaaattcacttctgtaggagcaaggattccaaaaggggttctattagttggacctcctggtactggtaaaaccctattagctaaagcaattgcaggtgaagctggtgtgccatttttctcattatcaggttctgaatttgttgaaatgtttgttggtgttggcgctagtagagttagagaccttttcaagagagctaaagagaatagtccttgtttaatttttattgatgaaattgatgctgtcggaaggcaaagaggtgcaggtattggtggaggtaatgatgagagagaacaaactttaaatcaattacttactgaaatggatggattcgaaggtaatagcggcataataataattgcagccacaaacaggcccgatgttctagactcagcgctaatgagaccaggcagatttgataggcaagtaactgtagatgcacctgatatcaagggca

SEQ ID NO: 275340 - DNA, 871 bp, Unknown
  Bacterial polypeptide expressing nucleotide sequence isolated from the Sargasso Sea
aatatcaaaggtgtaatgtctaacggagaaatgtttaatacttatgcgccagatgatccaaatcttattcaaaaattaagtgataaaggtgttagtatttcagcaagtccattagaagaaaaaatgccttcgttgtttggagtacttttatcatggtttcctatgctacttttaattgctgtatggatcttcttcatgagacagatgcaaggtggtaaaggtggagctatgggttttggaaaatcaaaagccaaaatgatgaatgaattaaaaggcaaggttaccttcaacgatgtggctggagttgaagaagccaaagaagaagtagaggaggtagtagaatttttaaaagatcctaaaaaatttagtagactaggtggaaaaatacctcgtggatgtctattagttggacctccagggactggtaaaactttattagcaagggcgatcgctggcgaagcaggagtaccattctttacaatatcgggttcagactttgtagaaatgtttgttggtgttggagcctcaagagttcgagatatgtttgagcagggcaagaaacactcaccatgcataatattcatcgatgagattgatgctgttggaagaagtaggggcgcaggtttaggtggaggtaacgatgaaagagaacaaacacttaatcaattgcttgtggagatggatggctttgatacaaatgaaggtgtaataataattgcggcaactaatagacctgatgttcttgatccagctttattaagaccgggaagatttgacagacaggtagtagtttctaatcctgacttacttggaagagaaaaaatattaaaagtgcatgctaagaaaatatcaatggcacctagatgttaat

SEQ ID NO: 275341 - DNA, 721 bp, Unknown
  Bacterial polypeptide expressing nucleotide sequence isolated from the Sargasso Sea
attgaggaaaaaatgccatcattatttggtgtccttctttcgtggtttcctatgttgttattaattgctgtgtggatcttttttatgagacaaatgcaaggaggcaagggtggagcaatgggttttggaagatctaaagctaaaatgatgaatgagctaaaaggtaaagtaacttttaatgatgttgctggagttgaagaagctaaagaagaagttgaagaaattgttgaatttttaaaagatccaaaaaaatttagtagattaggaggaaaaattccgagaggggcattattagtcggacccccaggcactggtaaaacactattagcgagagctatcgctggagaagctggtgttccttttttcactatatcgggatcagactttgttgaaatgtttgtaggagtgggtgcttcaagagtaagagatatgttcgaacaaggtaaaaaaaattcaccatgtataatttttatcgatgagatagatgcagttggaagaagtagaggagctggtctaggtggtggaaatgatgaaagagaacagactctaaatcagcttttagtagaaatggatggctttgatacaaatgaaggtgtgattataattgcagcaacaaatagacctgatgtacttgatcctgcattattaagaccaggaagatttgatagacaagttgttgtttcaaatccagatattattggtcgagaaaaaattcttaaag

SEQ ID NO: 275342 - DNA, 782 bp, Unknown
  Bacterial polypeptide expressing nucleotide sequence isolated from the Sargasso Sea
gttagttggacctcctggcacaggtaaaacacttttagctagagcaattgctggagaagcaggtgtaccattctttactatttcaggttcagattttgttgagatgtttgttggtgttggagcatcaagagttagagatatgtttgagcaaggaaaaaaaaactcaccttgtataatttttattgatgaaattgatgcagtaggaagaagtcgaggtgcaggactaggtggaggaaacgatgaaagagagcaaacacttaatcagttattagttgaaatggatggttttgacactaatgaaggtgttattattattgcagcaactaatagaccagatgtactcgacccagcattattacgaccaggtagatttgatagacaagttgtagtttctaacccagatataattggaagagagaaaattcttaaagtgcatgtgaaaaaaattaagatggctccagatgtaaacttaagaactgtagcaaggggcactccgggcttttcaggtgcagatttagctaatcttgttaatgaggcagctcttttggctgcaagaaaaaataaaagaatagtaactttaaatgagtttgaagatgctaaagacaaggtaatgatgggatctgaacgaagatcaatggttatgacggaagaagagaaaacccttacggcatatcatgaagcaggccacgcaatagtcacaataaatgagaacgcagcttatcctatacataaagcaactataatcccaagaggtagagctctgggtatggtaatgcaattac

SEQ ID NO: 275343 - DNA, 850 bp, Unknown
  Bacterial polypeptide expressing nucleotide sequence isolated from the Sargasso Sea
cttttgaatgaagcaattggaaaaattacttttgatgatgtcgcaggaattgatgaagcaaaacaagaacttgaagaagttgtagaatttttgaaagatccaaaaaaattctctagacttggtgggaagataccaacaggtgctcttcttgtaggccctccaggtacaggaaaaacacttttagcaagagcaattgctggagaggcaaatgttcctttcttctcaatatcaggttctgattttgtagaaatgtttgttggtgttggtgccagtagagtaagagacatgtttgaacaaggtaaaaaaaatgctccttgtattatatttattgatgaaattgatgcagttggtagacataggggagctgggttaggtggtggaaatgacgaaagagagcaaacactaaatcaattacttgtagagatggatggattcgaagctaatgctggagtcattattgttgctgcaactaacaggcctgatgtccttgatcccgctcttcttagacctggtagatttgatagacagattactgtttctaatcctgatataattggaagagataaaatactaaaagtgcatattaaaaaaataaaagtttctccaaaatttgactcaaaagtcattgcaagaggcactccaggtttttctggagctgatttagctaatcttgttaatgaagctgccttattagcagctagaaaaaataaaagaatggtgacattggaagattttgaaaatgctaaagataaagtaatgatgggatctgaaagaagatcaatggtaatgtcggaagatgaaaaaaaattaactgcatatcacgaagctggacacgcagttgcaacacttc

SEQ ID NO: 275344 - DNA, 942 bp, Unknown
  Bacterial polypeptide expressing nucleotide sequence isolated from the Sargasso Sea
gcgctatgtcttttggaagagccgtgcccgcttaatgggcgaagatcaaatcaaaacgacttttgctgacgttgctggttgtgacgaagccaaagaagaagtcaccgagctggtagattatttaaaagacccatctcgcttccagaaattgggcggaaaaataccaaaaggtattttaatggtagggccgccaggtacgggtaaaactttgttagccaaggccattgccggtgaggcgaaagtaccgttttttgccatctcaggttctgacttcgttgaaatgtttgttggtgtcggcgccagccgtgtgcgtgacatgtttgaacaagcaaaaaaggccgctccatgtatcatctttattgacgaaattgacgccgtaggccgtcagcgtggtgcaggtttaggtggtggtcatgatgaacgtgaacaaactttaaaccagatgctggtagaaatggatggttttgacggtaacgaaggtatcatcattatcgccgcgaccaacagaccagacgtgctggacgccgcattattaagaccgggccgttttgaccgtcaggtggtcgtaggtttacctgatgtacgtggccgtgaacaaattctgaaagtacacatgcgcaaagtgccgttaggtgacgatgttaaggccagtgtgattgctcgtggtactcctggtttttctggtgcagatttagccaacctggtgaacgaagccgcattgtttgccgcccgtggtaacagccgtgtggttggcatggaagagtttgaaaaagccaaagataaaatcatgatgggtgcagagcgccgctctatggtgatgtctgaagctgaaaaagaaatgactgcataccacgaagcaggacacgctattgtgggttgcctggtgccagagcatgatcctgtacacaaagtcactattattcctcgtggccgtgctttagg

SEQ ID NO: 275345 - DNA, 901 bp, Unknown
  Bacterial polypeptide expressing nucleotide sequence isolated from the Sargasso Sea
aaaggcgctctattaatcggccctccaggaactggtaaaactttattagctaaagcgatagcaggagaagctaacgttccatttttcacaatttccggttctgactttgttgaaatgtttgtgggcgtaggtgcatccagagttagagacatgtttgagcaaggaaaaaaacatgctccttgcataatttttattgatgaaattgatgcagttggaagaagtagaggcgcaggtttaggcggaggtaatgacgagagagaacaaacattaaatcagctattagtagaaatggacggtttcgatacaaatgaaggtataattttaattgcggcaactaacagacctgatgttcttgatccagctttattgagaccaggaagattcgatagacaagtcgtggtcccaaacccagatattttgggaagagaagctattcttaaagtacatgttaaaaaaataaacacaggcccagatgtaaaattaagaacaatagcaagaggtactccaggattttctggtgcagatttggcaaatttaattaatgagtcggcattacttgccgctagaaaaaataaaagagtagttactatggcggatgttgaagaggctaaagataaagtgatgatgggtgcagaaagaagatcaatggtaatgacagaggaagagaaaaaattaactgcctaccatgaaggcggacatgctattgttgctttaaatgaaaaggtttctgatccaattcataaggctactattataccaagaggcagagctttaggtatggtaatgagattgccagaaagagaccaactatctgtaactagagaaaaaatgtattctgacatagcagttgctatgggtggaaggatagccgaagaaataatttttggatatgaaaaaataa

SEQ ID NO: 275346 - DNA, 937 bp, Unknown
  Bacterial polypeptide expressing nucleotide sequence isolated from the Sargasso Sea
ttcctctaacggagtaagtatcaacgcgacacctcaagaagataaaatgccctctcttttaggaatattgctctcatggttccctatgcttttattaataggtgtttggatattttttatgagacaaatgcaaggcggaaaaggtggtgcaatgggctttggcaggtctaaagcaaaattgttaaatgaagctcaaggcaaggtaacttttaacgatgttgctggagttgaggaagctaaagaggaagtagaagaaattgttgaatttttaaaagacccaaaaaaatttagtaggttaggaggaaaaattcctaaaggagctttattaataggtcctcctggtacaggaaaaacattactagccaaagctattgcaggagaagcaaatgttcctttcttttcaatttcgggatctgactttgtagaaatgtttgttggtgttggagcctctagagttagagatatgtttgaacaaggaaaaaaacactcgccttgtattatttttatagatgagattgatgcggttggtagaagcagaggagctggcttaggtggaggtaacgatgaaagagagcaaactttaaatcagcttttggtagaaatggatggttttgatacaaacgaaggaataattttgattgcagctacaaatagacctgacgttttagatccagctttattaagaccgggaagattcgatagacaagtagtagtcggtaatccagatataattggaagggaagctatattaaaagtacatgttaaaaaaataaacattggtccggatgttaaattaagaacaattgcaagaggaacacctgggttttctggtgctgatttagccaatttaataaatgagtccgctttacttgctgcaagaaaaaataaaagagttgtgacaatgtcagatgttgaggaagctaaagacaaagtgatg

SEQ ID NO: 275347 - DNA, 883 bp, Unknown
  Bacterial polypeptide expressing nucleotide sequence isolated from the Sargasso Sea
ggattattcaatgtttttaaaaactctcaaagagattactcttcagttacatacacatattcaactttaatagataaagctcaaaatggtgaaattaaatctgttgaaattcagggaaataatatttttggtcaaactatggatggtgttgatttttcaacatacgcccctagcgatcctaatttaatcgaaactctcaacgacaatcaggtagccattaacgcaaaacctgaacaatctggtatgcaccctctactaagtatatttgtctcttggtttccaatgctacttttaattggtgtttggatattttttatgcgtcaaatgcaatcaggtaagggtggaggtgcactaggttttggaagatcaaaagcaaagttactcaatgaaaataaacaaagagttacttttaacgacgttgcaggcattgatgaggctaaacaagaattagaagaggttgtttcttttttaaaagatcctcataagtttcaaagattgggtgctaaaataccaaaaggcgctcttttggttggacctcctggcaccggaaaaacacttcttgctcgtgcaatagctggtgaagctggagtgccattcttctcgatttctggatcagattttgtagaaatgtttgtaggtgttggagctagtagagttagagatatgtttgaacaaggtaagaagaacgcaccatgtattatatttatagatgaaatagatgctgttggtaggcacagaggtgctggattaggtggtggtaatgacgagagagaacagactctcaatcagcttcttgttgaaatggacggttttgaagctaacgaaggtgtgattattgttgcagcaactaatagaccagatgttcttgaccccgccattacta

SEQ ID NO: 275348 - DNA, 751 bp, Unknown
  Bacterial polypeptide expressing nucleotide sequence isolated from the Sargasso Sea
tttagtaggctaggaggaaaaatacctcgtggatgtctcttagtagggcctccaggaactggtaaaactttattagcaagagcaatagcaggcgaagcaggagtaccattttttacaatttctggttcagactttgttgaaatgtttgttggtgttggagcctcaagagttcgagatatgtttgagcaaggaaaaaaacactcaccatgtataatatttatcgacgaaattgatgctgtaggtagaagtagaggtgcaggtttaggtggtggtaacgatgaaagagagcaaacactcaatcaattacttgtagagatggacggcttcgatacaaatgaaggtgttataataattgcagcaactaacagaccagatgtacttgatccagctttattaagaccaggaagatttgatagacaggtagtagtttctaatcctgacttattaggaagggaaaaaatattaaaagtacatgctaaaaaaatatcaatggcaccagatgtaaatttaagaactattgcaagaggaactcccggattttctggtgcagatcttgcaaatttagttaatgaagctgcattattagcggcaagaaaaaataaacgaatagtcacttatatagaattcgaagaggcaaaagataaagtaatgatgggatctgagagaaggtcgatggtgatgagcgaggaagaaaaaaaactcactgcttatcatgaagcaggccatgctattgtaactataaatgaaaagg

SEQ ID NO: 275349 - DNA, 741 bp, Unknown
  Bacterial polypeptide expressing nucleotide sequence isolated from the Sargasso Sea
ttctaatgaggtaattttttctgaatttttagagtctgtagaacaaggtgaggtattaaaagttgaaattcaaggaaacaacataaatggtgtatatgcaaacggcaaaagctttaaaacttattcaccaaatgatcctaatttaatagaaaaactctcagagaagggtgtgagtatatctgcggcacctatagaggaaaaaatgccctcattgtttggcgtcctactttcatggtttccaatgttattattaatagctgtttggattttctttatgagacaaatgcaaggtggaaaaggtggagcgatgggctttggaagatctaaagcaaaaatgatgaatgaaatgaaaggtaaagtgacctttaatgatgttgcaggagtagaagaagctaaagaggaagttgaggaaattgttgagtttttaaaagatccaaaaaaatttagtagattgggtggaaaaatacctagaggtgcacttcttgttggtcctccaggaacaggaaaaactttattagctagagcaattgctggtgaagcaggtgttcctttctttactatctctggatcagattttgtagaaatgttcgttggtgtgggagcatcaagagtgagagacatgtttgagcaaggaaaaaaaaattccccttgtataatatttattgatgaaattgatgctgttgggagaagtcgaggcgcaggtcttggtggaggtaacgatgaaagagaacaaacccttaa

SEQ ID NO: 275350 - DNA, 748 bp, Unknown
  Bacterial polypeptide expressing nucleotide sequence isolated from the Sargasso Sea
gctgcaccgattgaagagaaaatgccatcattatttggagttttattatcatggttcccaatgttattgttaattgctgtttggatcttttttatgagacaaatgcaaggtggcaagggtggagcaatgggctttggaagatctaaggctaaaatgatgaatgaattaaaaggtaaggttacatttaatgatgttgctggcgtagaggaagctaaagaagaagtcgaagaaattgttgagtttttaaaggatccaaaaaaatttagtagattaggtggaaaaattccaagaggtgcattgttagttgggccaccaggcactggtaaaactttacttgcaagagcaatcgctggtgaggcaggcgttcctttttttacaatctctggatcagatttcgtggagatgtttgttggagttggtgcatcaagagttagagatatgtttgagcaaggaaaaaaaaattcaccatgtataatttttattgacgaaattgatgcagttggaagaagtagaggtgctggtttaggaggtggaaacgatgaaagagagcaaaccctaaaccaattattagtagaaatggatggatttgatacaaatgagggagtaattataattgctgctacaaatagaccagatgttttagatcctgcgctgcttagaccaggtagatttgacaggcaggttgtggtttctaatccagatattattggcagagaaaaaattttaaaagttcatgttaaaaaaatta

SEQ ID NO: 275351 - DNA, 775 bp, Unknown
  Bacterial polypeptide expressing nucleotide sequence isolated from the Sargasso Sea
tccaaaaaaatttagtcgccttggtggaaaaattccaaaaggagctttactaattggaccaccaggaactggtaaaacgttattagccaaagctattgctggtgaggctaacgttccatttttttctatctctggatcagatttcgtagaaatgttcgtgggcgttggcgcatctagagttagagatatgtttgaacaaggaaaaaaacattctccttgcataatatttatagacgaaatagatgctgttggaaggagtagaggagcaggcttaggtggaggtaatgatgaaagagagcaaacattaaaccaattacttgttgagatggatggctttgatactaatgaaggaatcattttaattgcagctacaaacagaccagacgttttagatcctgcattactaagacctggaagatttgacagacaagtggtagtaggaaatccagacattattggaagagaggctattttaaaagttcatgttaaaaaaattaatacaggtccagacgtaaaattgagaacaattgctagaggcactccaggattttcaggtgcagatttagcaaatttgatcaatgagtcagcacttttagctgcgagaaaaaataaaagagttgtgactatgtcggatattgaagaagcaaaagataaagtgatgatgggcgcagagagaagatcaatggtgatgtcggaagatgaaaaaaaattaactgcatatcacgagggtggtcacgcgattgtagctttgaatgagaaagcttcagatcctatt

SEQ ID NO: 275352 - DNA, 898 bp, Unknown
  Bacterial polypeptide expressing nucleotide sequence isolated from the Sargasso Sea
aaacaaaaagttacatttaatgatgttgcaggtattgatgaagcaaagcaagaattagaagaggtcgtttcatttttaaaagatccccataaatttcaaagactgggcgctaaaataccaaaaggtgctcttttagttggtcctccaggcacaggtaaaacgcttcttgcacgagcaatcgctggtgaggcaggtgttccattcttttctatatctggctcagatttcgtagaaatgtttgttggcgttggagccagtagagtaagagacatgttcgatcaaggaaagaaaaatgcaccatgtatcatttttattgacgagattgatgctgttggaagacacagaggtgctggattaggtggaggaaacgatgagagagagcaaacactaaatcaactccttgttgaaatggatggttttgaggctaacgaaggtgttataattgtagcagcaacaaatagaccagatgtgcttgaccccgcattattaagacctggaagatttgatagacaagttgttgtgcctgcaccagatattattggtagagataaaatattaaaagttcatacaagaaaaattaagatggatcaatcagttaaaactattgctattgctagatcaactcctggattttctggtgcagatttagctaatatagtaaatgaggctgcattaatagcagccaggaaaaacaaaaaaattgttacaatggatgattttgaggatgcaaaagataaagttatgcttggaacccaaaataagtctaaaataatttctgatagtgagaaagaagtaattgcctatcatgaagcaggtcatgcgctagcgaatttgcattgtaagcatgcagatccaatttataaatcttctatcattccaacaggtagagcactaggtt

SEQ ID NO: 275353 - DNA, 730 bp, Unknown
  Bacterial polypeptide expressing nucleotide sequence isolated from the Sargasso Sea
ggtttggatattttttatgagacaaatgcaaggtggcaaaggtggagccatgggatttggaaaatctaaagcaaaaatgatgaacgaattaaaaggtaaagtgactttcaacgatgttgctggagttgaagaagcaaaagaagaagtggaagaagttgtagaatttttaaaagatccaaaaaaatttagtagacttggaggaaaaatacctagaggttgtttattagtaggcccgcctggaacaggaaaaactttgttagcaagagctattgcgggagaagcagctgtaccattttttacaatatcaggctcagattttgttgaaatgtttgtaggagttggtgcttcaagagttagagatatgttcgaacaaggaaaaaaaaattccccatgtataatatttattgatgaaattgatgcagttggaagaagtagaggggcaggacttggcggcggaaatgatgaaagagaacaaactcttaatcagttacttgttgaaatggatggttttgacacaaatgaaggcgtaataataattgctgcaactaatagacccgatgtattagatccggctcttttaagaccaggtagatttgatagacaggttgtagtttcaaatccagatattattggaagagaaaaaattcttaaagtgcatgctaaaaaaatttctatggctcctgacgtaaacttaagaactgtagctcgaggaaccccaggtttctctggt

SEQ ID NO: 275354 - DNA, 898 bp, Unknown
  Bacterial polypeptide expressing nucleotide sequence isolated from the Sargasso Sea
tttgggtctactggcactcttttttcttcccaatatcctgaataatgacaacgctactgacgtgccttttcaggacttccgtactcaggtggcctcaggcgaggtttcagaagcccaatttaataacaacactggaaaaatttcctttgagtcaacaactggcgaaaagttcaaaacatcaggccctcttgagctctcaggcgatgatgagaggcttttccttgagaacatagaagactttaaattctttaccccaggttcaaatatttggactggattcattatccctgttctgggcccattggcgttaatacttctttttttctactggctaaaccgacgtgctcaaggacaaatgggaaacattatgtcaatagggcgttcaaaagctaaggcctacacaaccgagagacctgagtcatcatttgacgacgttgcaggctacagaggggtaaagcaagagatccaggaagtagtcgatttccttcaggattcagataaattcgctgatattggcgctcgaatccccaagggcgttcttctggtgggtcctccaggaacaggcaaaaccctaattgctagagctgttgctggtgaagcaggagttccattcttatctgtgactggaagcgatttcatggaaatgttcgtgggtgtgggagcaagccgggttagagatttgtttcagagtgcccgaaaaatgggaagcgctataatttttatagacgaaattgactctataggacgcaaaagaggcgctggtttaggtggcggtcacgatgaacgtgaacagactctcaatcaaatgcttgctgaaatggacggttttgaagccactgaaggaattgttatgatggctgccaccaaccgccccgatattcttgacccagcgttattg

SEQ ID NO: 275355 - DNA, 952 bp, Unknown
  Bacterial polypeptide expressing nucleotide sequence isolated from the Sargasso Sea
aatcaagctaaatttgtgactatcgatgatgtagaaacgagattcgatgatgttgctggtgttcctgaagccgctgaggaattaaaagaggtaataacttttttgaaagaaccaaagaaatttgaaaatcttggagcaaaagttcctaaaggtgtacttttaattggccctccaggaacaggtaaaacattattggctaaagcaattgccggtgaatcaggagttccttttctctcaatatctgcatcagagtttgtagaactttttgttggtgtaggtgcaagccgtgtgagggatctattctctaaggctaaggaaaaatctccttgtataatttttattgatgaaattgattctattggtaggcaaagagggtctgggatcggaggaggaaatgatgaaagagaacaaactctcaatcagcttttaactgaattagatggttttgcggataattccggaattattgttttagcagcaacaaataggccagatattttggatgcagcattattaagaccaggaagatttgatagaaaaatagaagtaatgcttccagatttagttggaagaaaaaaaattctttcagttcactcactttcaaaaccactttcaagcgaagttgacttaggatattgggcttctagaactgttggattttcgggagcagatcttgcaaatttgatgaacgagagtgctattcactgtgcaagagatgaatctaaattaattagtgatcttcatatagaaaatgcacttgataaaattactatcggcctgagaagttcattaataacttctccaaatatgaaaaaaatcatagcttataacgaagtaggcagagctattgtatctgctgcgagaaatggtattgaatcagttgataaaataacgattctacctagatctggatctctaggaggatatacaaaaatatgcccgacgaagaagt

SEQ ID NO: 275356 - DNA, 871 bp, Unknown
  Bacterial polypeptide expressing nucleotide sequence isolated from the Sargasso Sea
atgtggggtttgatagtcctattatcagtagggctttttaatctttttcaaaatccaagcaaacaaaactcggtaaagaacgaaattgctttttcaaaatttttagaagaagttgatacaggaagagttgtagaagttgagattcaaggaaataatattaaaggtattttatctgacggctctaagttcacaacatattcaccaaattatcctgacttagtaagtaaactttcagaaaaaaatgttagcattgttgcttcaccagtagaagataaaatgccgtctcttttgggagtgcttttatcttggttcccaatgttgctcttaataggagtatggatattttttatgcgccaaatgcaaggaggcagaggtggagcaatgggctttgggagatcgaaagcaaaattgcttaatgaagctcaaggaaaagttacctttaacgatgtagctggaattgaagaagccaaagaagaagtcgaggagattgttgagtttttaaaagatccaaaaaaatttagaagattaggtggtaagataccaaaaggcgctttactaattggacctcccggaacaggaaaaacacttttggcaaaagctattgcgggagaagctaacgttccgttctttacaatttcaggttcagactttgttgaaatgttcgttggagttggtgcgtcaagagttagagatatgtttgagcaaggaaaaaaacatgctccgtgtataatttttattgacgagatagatgccgttggaagaagcagaggtgcaggcttaggcggcggcaatgatgagagagaacaaactttaaatcagcttttagtcgaagatggatcggttttgatacaaacgaaggtatcattttaat

SEQ ID NO: 275357 - DNA, 910 bp, Unknown
  Bacterial polypeptide expressing nucleotide sequence isolated from the Sargasso Sea
ggaaaaggtggggcaatgggattcggaagatctaaagcaaaaatgatgaatcaagttaaaggaaaggtaacttttaacgatgtagcaggagtagaagaagcaaaagaggaagttgaagaagtggtagaatttttaagagatccaagaaaatttagcagactaggaggcaagattcctagaggttgtttattggtaggtcctccaggaacaggtaaaactttattagctagagcaatagcaggagaggctggagtacctttttttactatttcaggatcagattttgttgaaatgttcgttggagttggtgcctcaagagtcagagatatgtttgaacaaggaaaaaaacactcaccatgtataatatttattgatgaaatagatgcagtaggaagaagcagaggagctggcttaggtggaggcaacgatgaaagagagcaaactttaaatcaattgttagtagagatggatgggtttgataccaatgaaggtgttatcataattgcagctacaaatagaccagatgttttagatccagcattattaagaccaggtaggtttgatagacaagtagtagtgacattacctgatataattggaagagaaaaaattcttcaagttcattcaaagaaaatttctatggctcctgatgtaaatttaagaaccatagcaagaggtacgcctggtttttcaggggcagatcttgctaacttagtaaatgaatcagcattgttagctgcaagaaagaataaaagaatagttactacttctgaatttgaggaagcaaaggataaagttatgatgggtgctgaaagaagatctatggtaatgactgaggaagaaaaaaaacttactgcatatcatgaagctggacatgctatagttacaattaatgagaaaggcagcctac

SEQ ID NO: 275358 - DNA, 802 bp, Unknown
  Bacterial polypeptide expressing nucleotide sequence isolated from the Sargasso Sea
ggcagatttttagattacattaattcaggaagggttacatctgttgatatttttgagggaggcagaaatgcagtaatagagacaatagattcggatttagataataaagttcaaaggttgcgtgtagatcttcccggcttaacaccagaacttataaatattttaaaaaatgagggaatcagttttgatgttcatccagtaaaaacagctcctcctgcattaggaattttaggtaatttactcttcccagctatcttaattggaggtttaattttgttagcgaggaggtcaaatggtatgcctggaggtcctggccaagcaatgcagtttgggaaaacaaaggcaagatttgcaatggaagcagaaacaggagtagtttttgatgatgtagcaggagttaatgaagccaaacaggacttacaagaagttgtcacttttctaaaaaaaccagaaaaatttacatccgttggagcaagaattcctaaaggagttttattagttggccctcctggaacaggtaaaaccctattagcaaaagcgatagcaggagaagcaggtgtaccattcttctcactatcgggttcagaatttgttgaaatgtttgttggtgtaggtgcaagtagagtaagagacctttttaaaagggctaaagaaaatagtccttgcttaattttcattgatgaaattgatgctgtaggaagacaaagaggggctggtattggaggaggtaacgatgagagagagcaaactctcaatcaattactcactgaaatggatggattcgaaggtaatagcggaatca

SEQ ID NO: 275359 - DNA, 955 bp, Unknown
  Bacterial polypeptide expressing nucleotide sequence isolated from the Sargasso Sea
tacttttttgcatttttaccatggctatttttagctgctttcatgttttatatgttctcacaagttagatcaaatggaaatcaaataatgcaatttggaaaatcgaaagccaaagagctagatgaagaatctccaaaagtaactttcaaagacgttgccggtgtagaagaagcgaaagaagaacttgaagagattaaagaattccttaagtctccagaaaaatttaataagttgggagcaaagataccaaaaggggttttacttgttgggcctccgggaactggaaaaactcttttagcaaaagcagtagcaggagaggcaggagttccattctttagtatttcaggatctgattttgtcgaaatgtttgttggagttggggcaagtagagtaagagatctattcaaaaaagctaaagaagcatctccagcaataatttttattgatgaaattgatgcagttggaagaatgagaggagctggtttaggcggaggtcatgatgagagagagcaaacattaaaccaacttttggttgagatggatggatttgaagcaaatcagggtgtaatccttatggctgcaaccaacagacctgatgttttagacccagcacttctcagaccaggcaggtttgatagacaagttattgttggtaggccagatttatctggaagaacacaaatacttaaggttcatgcaaaagataagccgttagcaaaaaatgtcaattttgaaacattagcaaaacaaacacctggttttactggagctgatttagcaaatttattaaatgaagcagccttactagctgcaagaaaaaataaaaaatcaatcggaattgcagatattgaaaactcgatagatcgggtaatggctggtccagaaaagaaaagtcaagtaatgacagaagaggaaaatttattatcgcttatcatgaaacaggtcatgcggtagt

SEQ ID NO: 275360 - DNA, 889 bp, Unknown
  Bacterial polypeptide expressing nucleotide sequence isolated from the Sargasso Sea
tgctatgggatttggtaaatctaaggcaaaaatgatgaatgagctaaaaggaaaagttacgtttaatgatgtagctggtgtagaggaagcaaaagaagaagttgaagagatagtagaatttttaaaagatccaaaaaaatttagtaggttaggtggaaaaatcccaagaggggctctgctggttggacctccaggtacaggaaaaactttattagccagagcaattgctggtgaggcaggtgttccattttttacaatttcagggtcagattttgtcgaaatgtttgttggagttggggcgtcaagagtaagagatatgtttgagcaaggtaaaaaaaattctccatgtataatttttatcgatgagattgatgctgtaggtagaagtagaggcgcaggcttaggcggaggaaacgatgaaagggaacaaactttaaaccagttattggttgaaatggatggttttgacaccaatgaaggtgtaattattattgcagcaacaaatagacctgatgttcttgatccagctttattaagaccaggaagatttgatagacaggttgttgtttcaaatccagacataattggaagagaaaaaatattaaaagttcacgttaaaaaaattaaaatggcaccagatgtaaatttaagaactattgctagggggactccaggtttttctggtgcagacttggcaaatattgttaatgaagcagctttacttgccgctagaaaaaataaaagaattgttactttactagaatttgaggaagcaaaagataaagttatgatgggtgcagaaagacgttctatggttatgacagaggatgagaaaaagttgacagcttatcatgagggtggacatgctttagtatcgtttaatatgcca

SEQ ID NO: 275361 - DNA, 877 bp, Unknown
  Bacterial polypeptide expressing nucleotide sequence isolated from the Sargasso Sea
ttcgatttctcaaaaaaataaaattattttctcagaattcttaacagaagtcgataatggaagagtagttaaagtagagatacaaggaaaaaatataaaaggggtattatcaaatggaaatcaattcaccacttatgcccctgaagatccgaatttaatccaaaaactaagcgataaaggtgtaagtatctcagcaagtccattagaggaaaaaatgccttcattattaggaatacttctttcttggtttccaatgcttttactaattgctgtttggatcttttttatgagacaaatgcaaggaggaaaaggtggagcaatgggctttggaagatctaaagcaaaaatgatgaatgaagtaaaaggaaaagtaacttttaatgatgttgctggggttgaagaggctaaagaagaggtagaagaagttgtagaatttttaaaagatccaagaaagtttagcagactaggtggtaaaattccaagaggatgcttattagtgggtcccccaggtactggtaagacattactagctagagcaattgctggtgaagcaggtgtaccattcttcacaatttctggatcagattttgttgaaatgtttgttggcgttggagcttcaagagtaagagacatgtttgaacaaggaaaaaaacattccccatgtataattttcattgatgagattgatgcggtgggaagaagtagaggagcaggtcttggtggaggaaatgatgaaagagagcaaacacttaatcagttattagttgagatggatggttttgatactaatgaaggtgtaattattattgctgctacaaataggccaaatgtattagatccagcccttttaagacctggaagatttgatagacaagtt

SEQ ID NO: 275362 - DNA, 679 bp, Unknown
  Bacterial polypeptide expressing nucleotide sequence isolated from the Sargasso Sea
atgaatatattttcaaacaaagattctcaagtaaatactgatgaaattaatgttacgtttaatgacgttgctggatgcgatgaagcaaaatatgaactagaggaggtagttgattttttaaaaaatccaaaacgatatgcggatgcgggagcaacaataccaaaaggagttttgttggagggtccaccaggcacaggtaaaacgctgcttgctcgtgctgtggcgggtgaggcaggggttccttttttttcagcgagtggttcacaatttatagagatgtttgtaggtgtgggtgcttcaagggtgcgagaattattcaataatgcgaatgaggcagcaccagcagtaatatttatagatgagattgatgcggtaggtcgtcaaaggggcaccggattagcgggaggcagtgacgagcgagagcagacattaaatcaaatattaacaaatatggatggttttacgaaatctacaggaataattgtattagcggcaactaaccgagctgatattttggacggagcattgacgcgtccaggaagatttgaccgtaagataatggtagggcttccagacaaggaaggtcgagaaaagataattgatgtgcattttaaagataaaaaggtaagggatgaaaaatatttaaagaatatagctacgcttacgaccgtttttcagg

SEQ ID NO: 275363 - DNA, 775 bp, Unknown
  Bacterial polypeptide expressing nucleotide sequence isolated from the Sargasso Sea
accaagaggtgcattattagtgggacctcctggtacaggaaaaactcttttagctagagcgatagcaggtgaagccgcagttcccttttttactatttcaggctcagattttgtcgagatgtttgttggtgttggtgcatcaagagtaagagatatgtttgagcagggaaagaaaaattccccatgcataatttttattgacgagatcgacgctgttggaagaagtcgtggcgcaggtctaggaggtggcaatgatgagagagaacaaacattaaaccaattattagttgaaatggatggtttcgatactaacgaaggagttattataattgctgcaactaacagacctgacgttttagatcctgcattattaagaccaggtagatttgatagacaagtagttgtctcaaatccagatataattggaagagaaaaaattctaaaagttcatgttaagaaaattaagatggctccagatgtaaatttaagaacagttgcaagaggtacaccgggtttttcaggagcagatctagcgaatcttgttaatgaggcagctttattagctgctagaaaaaataaacgtattgttactttggtagagtttgaggaagcaaaagataaagtaatgatggggtctgaaagaagatcaatggtaatgactgaagaggaaaaaactttaacagcttatcatgaggctggacacgcaattgtgactattaatgagagtgcagcatatccaattcataaagctactattatcccaagaggaagagct

SEQ ID NO: 275364 - DNA, 931 bp, Unknown
  Bacterial polypeptide expressing nucleotide sequence isolated from the Sargasso Sea
tcttgttgaaaaattatctgataaaggtgttagtatttctgcagttccaatcgaagataagatgccctcattgttaggagtattattatcttggttcccaatgttattgttaattgcggtttggatattttttatgcgtcaaatgcaaggcggcaaaggtggagcgatgggctttggtagatcaaaagctaaaatgatgaatgaggttaaaggaaaagttacctttaatgatgtcgcaggagttgaggaagcgaaagaagaagttgaggaggttgttgaatttttaagagatccaaaaaaatttagcaggcttggaggtaaaattccaagaggttgtctgctagtgggacctccaggaacaggaaaaactttgttagcgagagctatagctggtgaagctggagttccattttttactatatcgggatcagactttgttgaaatgttcgtaggtgttggagcatctagggtgagagatatgtttgagcaaggaaaaaaacactctccttgtataatttttattgatgaaatagatgctgtcggtcgaagcagaggagcaggcctaggcggtggaaatgatgagagagagcaaactttaaatcagttactagtagaaatggacggttttgatacaaacgaaggtgtaattataattgcagctaccaatagaccagatgtattagacccagcactgttaagaccaggtagatttgatagacaagttgttgtttctaatccggacattattggacgggaaaaaattttaaaagttcatgcaaaaaaaatatctatgtcaccagatgtaaacttgcgaactgttgctagaggaacacctggattttcaggtgcagatttagcaaatcttgtaaacgaagctgcacttcttgcagcaagaaaaaatagaagaatagttacagcacaagaatttgag

SEQ ID NO: 275365 - DNA, 853 bp, Unknown
  Bacterial polypeptide expressing nucleotide sequence isolated from the Sargasso Sea
atgaattttaaaaatctagcaatgtgggctgtgatagtctttttaactattggtctttacaatatgtttaaaaatccacaaggttcaatttcccaaaaaaataatattatattttcagaatttttatcagaagtagacaatggaagagtagtacaggttgagatacaaggtaataacataaaaggagtattttccaatggagaaaaatttataacatattctccgaatgatcctaacttaattgaaaaattatcaaataaaggagttagtatatctgcatctcctttagaagaaaaaatgccttcgcttttaggagttcttctttcttggtttccaatgttattgcttatagctgtttggatattttttatgagacagatgcaaggaggaaaaggtggagcaatgggttttggtagatccaaagcaaaaatgatgaacgagttaaaaggaaaagtaacttttaatgatgttgcgggaattgaagaggctaaagaagaagtagaagaagtagtagaatttttaaaagatccaagaaaatttagtagattgggtggaaaaataccaagaggttgtttgttagttggccctccgggtactggaaaaactttattagctagagctattgccggagaagctggagttccttttttcacaatttctggttcagattttgttgaaatgtttgtaggtgtaggagcatcaagagtaagagatatgtttgaacaaggtaaaaaacattctccatgtataatttttatagatgaaatagatgcagtgggaagaagtagaggtgcaggacttggtggaggtaatgacgagagagagcaaactctaaatcagttattagttgaga

SEQ ID NO: 275366 - DNA, 943 bp, Unknown
  Bacterial polypeptide expressing nucleotide sequence isolated from the Sargasso Sea
aatgcacccaattttaagtgttcttctctcttggtttccaatgcttttattaattggagtgtggattttctttatgaggcagatgcaatctggtggtggaaaggcgatgggtttcggtaaatctaaagctaaacttttgaatgaagcaattggaaaagttacttttgatgatgttgcaggaattgatgaagcaaaacaagaacttgaagaagttgtagaatttttgaaagacccaaaaaaattctctagactaggtggaaagataccaacaggtgctcttcttgttggccctccaggcacaggaaaaacacttttggcaagagcaattgccggagaggcaaatgttcctttcttctcaatatcaggttctgattttgtagaaatgtttgttggtgttggtgctagtagagtaagagacatgtttgaacaaggtaaaaaaaatgctccatgtattatatttattgatgaaattgatgcagttggtagacatagaggtgctgggttaggtggtggaaatgatgagagagagcaaacactgaaccaattgctcgtagaaatggatggattcgaagctaatgctggagttattattgttgctgcaactaacaggcctgatgtccttgatcctgctttattgagacctggtagatttgataggcagataactgtatctaaccctgatataattggaagagataaaatactcaaagtacatataaaaaaaattaaagtttcaccaaaatttgactctaaagttattgcaagaggtactcctggtttctctggagccgatttagctaatcttgttaatgaagctgctctattagcagctagaaaaaacaaaagaatggtgacattggaagattttgaaaacgctaaagataaagtaatgatgggatctgagagaagatcaaatggtatgtcggaagatgaaaaaaattaa

SEQ ID NO: 275367 - DNA, 784 bp, Unknown
  Bacterial polypeptide expressing nucleotide sequence isolated from the Sargasso Sea
tggaagatctaaggcaaaactaatgaatgaagttaagggaaaagtaacatttaacgatgttgcaggcgtcgaagaggcaaaagaggaagttgaggaagtagtagaatttttaagagatccaaagaaatttagtagacttggaggaaaaattccaagaggttgtttgttagtaggtccgccaggcactggtaaaacattattagcaagagcaatagccggtgaggcaggagttccattttttacaatttcaggctcagatttcgtagaaatgtttgttggagttggagcttcaagagtaagagacatgttcgagcaaggaaaaaaacattccccatgtattatttttattgatgagattgacgcggtgggaagaagcagaggtgctggtttaggaggaggcaatgatgaaagagaacaaacattaaatcagttgctcgttgaaatggatggttttgatacaaacgaaggagtcattataattgcagcaactaatagacctgatgtattagaccctgcactattaagaccaggaagatttgacagacaagtagtggtttcgttacctgatattattggaagagaaaaaattcttaaagttcatagtaaaaaaatatctatggcacctgacgttaacttaagaactattgcaagaggaactccaggtttctcaggagctgatcttgcaaatttagttaatgaggcagccttgttagcagctagaaaaaataaacgtattggtacttacaacgagttcgaagaagcaaaggataaagttatgatgggg

SEQ ID NO: 275368 - DNA, 828 bp, Unknown
  Bacterial polypeptide expressing nucleotide sequence isolated from the Sargasso Sea
ccgttggaagataaaatgccatcacttttaggcatcttactttcttggtttccaatgctattattaattggtgtttggattttttttatgcgtcaaatgcaaggcggaaaaggtggagcaatgggttttggaagatcaaaagctaaattattaaatgaagcgcaaggaaaagttacatttaatgatgttgctggagttgaagaagcaaaagaggaagttgaagagattgtagaattcttaaaagatccaaagaaatttagtagactgggaggaaaaatacctaaaggagctttattgataggtcccccaggaactggaaaaactttattggcaaaagctatcgctggagaagcaaatgttccgttcttttctatctcaggatcagattttgtggaaatgtttgttggagtaggtgcatctagagttagagatatgtttgagcaaggaaaaaaacattctccttgtataatttttatagatgaaatcgatgctgtaggaagaagtagaggagcaggtcttggcggtggtaatgacgaaagagagcaaacacttaaccaacttttagttgaaatggatggttttgatacaaatgaaggtataatattaattgcagctacaaacagacctgatgttttagatccagctttattaaggcctggtagatttgatagacaagtagttgttgcaaacccagatattatcggaagagaagcaattttaaaagttcatgttaaaaaaataaatactggacctgatgttaaactaagaacaattgctagaggtacacctggattttctggtgcggatcttgcgaatttaataaatgaa

SEQ ID NO: 275369 - DNA, 815 bp, Unknown
  Bacterial polypeptide expressing nucleotide sequence isolated from the Sargasso Sea
cgaattattgggaaacctgttgaaagagaagtttcttggatactttccacactactttcttggtttcctatgcttttactgataggtgtttggatttttttcatgcgacaaatgcaatcaggatctggtaaggctatgggttttggtaaatcaaaagctaaacttctgactgaaaagcaaggtaaagtaacttttgaagatgttgctggtatagacgaagcaaagaccgagcttgaagaaatagtcgaatttttaaaggatccaggaaaatttcaaagactgggtggaaaaatacctaaaggttgtctattagttggacctcctggtactggaaaaacacttctagctagggctatagctggtgaagctggagtacctttcttcactatatcggggtcagattttgtcgagatgtttgtaggagttggtgcaagtagagttagagacatgtttgagcaaggcaaaaagaatgcaccttgtataatttttattgatgagattgatgctgttggaagacacagaggtgctggacttggcggtggaaatgatgaaagagagcagacactcaaccaattactagttgaaatggatggttttgaggcaaatgaaggtgtaattttaattgcagccactaatagaccagatgttcttgatccagctttgttaaggcctggtagatttgatagacaagttgtggtaccaaatccagatattcttggaagagaaaagattttaaaagtccatatgaaaaaagtgcctttgtcagatgatgtccagccaaggacaattgcaagaggtacaccaggattttctgg

SEQ ID NO: 275370 - DNA, 870 bp, Unknown
  Bacterial polypeptide expressing nucleotide sequence isolated from the Sargasso Sea
tcgggaagggttacatctgttgatatttttgagggaggcagaaatgcagttatagagacaatagattcggatttagataataaagttcaaaggttgcgtgtagatcttccaggtttaacaccagaacttataaatattttaaaaaatgagggaattagttttgatgttcatccaataaaaacagctcctcctgcattaggaattttaggtaatttactcttcccagctatcttaattggaggtttaattttgttagcgaggaggtcaaatggtatgcctggaggtcctggccaagcaatgcagtttggaaaaactaaagcaagatttgcaatggaagctgaaacaggagttgtatttaatgatgttgcaggggttaatgaagctaaacaggatttgcaagaagttgtcacttttctgaaaaaaccagaaaaatttacttctgtaggagcaagaattcccaaaggggttctattggtaggacctcctggtactggtaaaacccttttagctaaagcaattgcaggtgaagctggtgtaccgttcttctcattatctggttctgaatttgttgaaatgtttgttggtgttggcgctagtagagtcagagaccttttcaaaagagctaaggagaatagtccctgtttaatttttattgatgaaatcgatgcagtcggcagacaaagaggtgcaggtatcggtggaggcaatgatgagagagaacaaactctcaatcaattacttactgaaatggatggtttcgagggtaatagtggcataataataattgcagctacaaataggcccgatgttctagactcagcgctaatgagaccaggcagatttgatagacaggtaactgtagatgcacct

SEQ ID NO: 275371 - DNA, 802 bp, Unknown
  Bacterial polypeptide expressing nucleotide sequence isolated from the Sargasso Sea
aaccttcactacttattctgcaaactatccaaatttagtagaaaagttatcagaaagcggtgttagtatttcagctgttccaactgatgagaagatgccatcagttcttggagttctactgtcatggtttccaatgttattgttaattgcggtatggattttctttatgagacaaatgcaaggtggcaaaggcggtgccatgggttttggaagatctaaagcaaagatgatgaacgaagttaaaggaaaagttacttttaatgatgttgcgggcgtagaagaggcaaaggaagaagttgaagaagttgttgagtttttaagagacccaaaaaaatttagtaaattaggtggcaaaataccccgaggctgtcttttagttggccccccaggaactggtaagactcttcttgcgagagctatagctggagaggcaggagttcctttctttacaatatcaggatcagattttgttgaaatgttcgttggagtaggcgcgtcaagagtaagagatatgtttgaacaaggtaaaaaacattctccgtgtattatttttatcgatgagatcgatgctgtaggtagaagtaggggagctggcttaggtggcggtaacgatgaaagggagcaaacacttaaccaattgttagttgagatggatggatttgatacaaatgaaggagtaataattattgcagctaccaatagaccagatgtattagacccagccttattgagacctggaagatttgatagacaagtcgttgtttctaacccagatattataggaagagaaaaaatacttaaa

SEQ ID NO: 275372 - DNA, 895 bp, Unknown
  Bacterial polypeptide expressing nucleotide sequence isolated from the Sargasso Sea
gatgtggggtttaatagtcttgttggtagtaggactatttcaactttttcagaatccaaaaaaatcaatgaattctgaaaaaattgcattttcaaattttataaaaaatgttgaggaaggtagagttgtacaagtcgatatcagaggaaataatattgagggaatattatctgacggtacagcgtttaacacttacgcaccaaacgatccaaatcttgtagaaaaacttacatcaaagggtgttagcataacagcttcgccacaagaagataaaatgccatctttattaggagttcttttatcatggtttcctatgttgttgcttattggagtttggatattttttatgaaacaaatgcaaggaggcagaggaggagcaatgggctttggtagatcaaaagctaaattgctttcagaggctagaggtaaagtaacttttaatgatgttgcgggcatagacgaagcaaaagaagaagtagaagagatagttgaattcttaaaagatcctagaaaatttagaagacttggtggaaaaattccacgaggcgctcttttaattggacctccaggtacagggaaaactttattagcaagagcaattgctggagaagcaaatgttcctttttttacaatttctggttcagattttgtagaaatgtttgtgggagttggagcttctagagtgagagatatgatggagcaaggaaaaaaaaatgctccttgtataatatttatagatgaaattgatgctgttggaagaagcagaggcgcaggtttaggtggtggaaatgatgaaagagaacaaacattaaaccaactacttgttgaaatggatggttttgatactaacgaaggtgtaattataattgcggcaactaatagacctgatgtttag

SEQ ID NO: 275373 - DNA, 888 bp, Unknown
  Bacterial polypeptide expressing nucleotide sequence isolated from the Sargasso Sea
tttgtgggttattataggccttctattaatagcattatttaacctttttcagggcgcctcttcaaataggtccacttctgaaatttcgttttcagattttatatctgctactgaaaatgggaacgtttctgaagtaaatattactggtaataatgtttctggatactttgatgatggtagaccttttacaacctattcacctgattatccaaacttggttgataagttaaatcaaaatggtgttaagattactgctgaaccagctgatagaagcatgcacccaatactaagcgttctattatcatggttccctatgctgctccttataggtgtatggatattttttatgcgacaaatgcaatctggtggaggtaaggcaatgggatttggtaagtcaaaagcaaaactacttaatgaagcagtaggaaaaattacttttgatgacgttgccggtatcgatgaggctaaacaagaattagaagaagtagtagaatttttaaaagatcctcaaaaattttcaagacttggtggtaaaattccaacgggagcgttattgattggtcctcctggtacaggtaaaactcttttagcaagagcgattgctggagaagcaaacgttccttttttttcaatatccggttctgattttgtagaaatgtttgttggtgttggtgctagtagagtgagggatatgtttgaacaaggaaaaaagaattcaccttgtattatatttattgatgaaatagatgctgttggtagacacagaggagcaggccttggtggtggtaacgatgaaagagagcaaacattaaatcaacttttagtagaaatggacggttttgaagctaatgctggagttataataattgctgcaacaaatagacccga

SEQ ID NO: 275374 - DNA, 790 bp, Unknown
  Bacterial polypeptide expressing nucleotide sequence isolated from the Sargasso Sea
atgaattttaaaaatttagcaatgtgggcagttatagtttttttaactattggtctttacaatatgtttaaaaacccacaaacgtcactaaataaaaataatacaattatattttctgaatttttaacagaggttgaaaatggaagagttgtgcaagttgaaatacaaggaaataatataaaaggaattttatctgatggcaccgtgttctcaacatattctccaaatgatcctaaccttattgaaaaactttctagtagcggggtaagcatatctgcttcaccgattgatgaaaaaatgccatcactatttggagttttgttatcgtggtttccgatgcttttattaattgcagtttggattttttttatgagacaaatgcaaggtggcaaaggtggagctatgggatttggccgttccaaagcaaaattaatgaatcaactaaaaggaaaagtaacatttaatgatgttgctggtatcgaagaagcgaaagaagaagttgaagaagttgttgaatttttaaaagatccaaaaaaatttagtagacttggaggaaaaataccaagaggatgtttgctagtaggacctcctggaacaggtaaaactttactagcacgagcaattgctggagaagcagatgttccgttttttacaatttcaggatcagattttgttgagatgttcgttggtgttggggcatctagagttagagatatgtttgaacaaggaaaaaaacactcaccatgtattatttttatagatgaaattgatgctgtaggaagaagcagag

SEQ ID NO: 275375 - DNA, 857 bp, Unknown
  Bacterial polypeptide expressing nucleotide sequence isolated from the Sargasso Sea
tggagttttatctgacggatcaaaatttaaaacatattctccaaactaccccgaattagttggtaagctttctgataaaggtgttaatatagttgcgtcaccacttgaggataaaatgccttcactaattggtgtattactttcttggtttccgatgttgctcttaataggtgtttggatttttttcatgcgccaaatgcaaggtggcagaggtggagcaatggggtttggaaaatcaaaggcgaaattattaaccgaagctcacggcaaggtaacgtttaacgacgttgctggcattgaagaagcaaaagaagaagtagaggaaatagttgaatttttaagagatccaaaaaaatttagaagattaggaggaaaaatacctaaaggagcattattaattggtcctcctggtacaggaaaaactttattagcaaaggctatcgcgggtgaggcagacgttcctttttttacaatctctggttcagatttcgttgagatgttcgttggtgttggcgcatcaagggttagagatatgtttgaacaaggtaaaaaacatgctccttgtataatttttattgatgagattgatgcagtaggaagaagtaggggtgcagggttaggtggaggaaacgatgagagagagcaaactttaaaccaacttttagttgagatggatggcttcgacacaaatgaaggaattatattgattgcagcaacaaacagaccagatgtccttgatcctgcactcttaagaccaggaagattcgatagacaagttgtagttcctaatccagatataattggaagagaagctattttaaaagttcatgttaaaaaagtaaataccggaccggacg

SEQ ID NO: 275376 - DNA, 927 bp, Unknown
  Bacterial polypeptide expressing nucleotide sequence isolated from the Sargasso Sea
tccaagaggagctttactggttggacctccaggcacaggaaaaactttattagcaagagctatagctggtgaagcaggagttcctttttttacaatttctggatcagattttgttgaaatgtttgtaggagttggcgcttctagagttagagatatgtttgaacaaggaaaaaaaaattcaccttgtataatttttattgatgaaattgatgctgtaggtagaagcagaggcgctggtttaggtggaggcaatgatgaaagagagcagactctaaaccaacttttagttgagatggatggttttgatactaatgaaggggtaataattattgctgccactaatagacctgatgttctagacccggctttattaagaccaggcagatttgatagacaagtcgtagtttctaatccagatataattggaagagaaaaaatcttaaaagtgcatgttaaaaaaattaaaatggctcccgatgtgaaccttagaacagttgcaagaggaactcctgggttttcaggcgcagatcttgctaatttagtcaatgagtcagcattgttagctgcgagaaaaaataaaaggattgttacattgaatgaatttgaagaggccaaagataaagtaatgatgggtgcagaaagacgatcaatggtaatgacggaagatgaaaaaaaactaactgcatatcatgaaggaggacacgccttagtttcttttaatatgcctagttatgacccgatacataaggctactataattccaagaggtagagctttaggtatggtaatgaatttgcctgaaagagacaaacatggtcactctataaagtatttgaaagccaggttagctgtatgctttggtggcagagttgcagaggaagtaatttttggaaaagacaacatttctactggtgctggaggtggaaa

SEQ ID NO: 275377 - DNA, 853 bp, Unknown
  Bacterial polypeptide expressing nucleotide sequence isolated from the Sargasso Sea
aatgatgtgggctataatagtttttttaactattggcttgtacaatatgtttaaaaacccccaaggttcggttagtcaaaaaaataatattatattttcagaatttttatctgaagttgaaaatggaagagtggttcaagttgaaatacagggaaataatattaatggtgtaatgtctaatggagaaaaattttcaactttctctcctaatgatcctaatttaattgaaaaattatctgacaaaggagttagcatttcagcatcacctatagaagaaaaaatgccatcagttctaggagttcttctttcttggtttccaatgttattattaatagcagtatggatattttttatgagacaaatgcaaggtggaaaaggtggagctatgggctttggaagatctaaagctaaaatgatgaatgaattaaaaggaaaagttacatttaatgatgtagctggagttgaagaggctaaagaagaagttgaagaagtagttgaatttttaagagatccaaaaaaatttagtagacttggaggtaaaattccaaggggatgtttactagttggccctcctggtacaggaaaaactttactagcaagagctattgctggagaagcaggagttcctttttttacaatttctggctctgactttgttgaaatgtttgttggtgtaggagcatcaagagtaagagatatgtttgaacaaggtaaaaagcattcaccatgtataatttttattgatgaaatagatgcagtagggagaagtagaggtgcaggtctaggaggtggaaatgatgaaagagaacaaactttaaatcaattattagtagagatggatggttttgatact

SEQ ID NO: 275378 - DNA, 904 bp, Unknown
  Bacterial polypeptide expressing nucleotide sequence isolated from the Sargasso Sea
catgcttttgcttatcggtgtgtggatatttttcatgcgtcaaatgcaaggcggaagaggtggagctatgggatttggaaaatctaaagcaaaattattatcagaagctagaggcaaggtaacatttaatgatgttgccggtattgatgaagctaaagaggaagtagaagaaatagtagaatttttaaaagatcctagaaagttcagaagacttgggggaaaaattccaaaaggagcacttttaattggaccgccaggaacaggtaaaactttattagcaagagcaatagcaggagaagccgatgttcctttttttactatttctggatcagatttcgtcgaaatgtttgtaggtgttggcgcttcaagagttagagatatgatggaccaaggaaaaaagaatgctccatgtataatttttattgatgagattgatgctgttggaagaagtagaggagctggacttggtggtggaaatgatgagagagaacaaacattaaatcaattattggtcgaaatggatggtttcgatacaaatgaaggtgtaataataatagcagcgactaacagacctgatgttttagatcctgctctaataagacctggaagatttgatagacaggtagttatacctaatcctgacattataggaagagaagctattttaaaaattcatattaaaaaaattaatgtaggtcctgatgtaaaattaagaacagttgcacgtggaactcctggattttctggagccgatttggccaatttaacaaatgaagcagcgttgttagcagccagaaaaaataaaagaattgtaactatgccagatattgaggaagcccaaagacaggtaatgatgggggcggaaagaaagatcatggtcatgaccgaagatgataaaaaataa

SEQ ID NO: 275379 - DNA, 819 bp, Unknown
  Bacterial polypeptide expressing nucleotide sequence isolated from the Sargasso Sea
aatgaattttaaaaacctagcaatgtgggcagttatagtaatcttaactataggcttatataatatgtttaagaatccacaaggatcggttaatcaaaaaaataacattatattttcagaatttttgactcaagtagacaatggaagagttgttcaggtagaaattcaaggaaaaaacatcaaaggtgtaatgtccaacggagaaatgtttaacacttatgcacctgatgatccaaatcttattcaaaagttaagtgataagggtgttagcatttcagcgagtccattagaagagaaaatgccctcattatttggagtacttttatcatggtttcctatgctacttttaattgctgtatggatatttttcatgagacaaatgcaaggtggcaaaggtggagcaatgggttttggaaagtcaaaagccaaaatgatgaatgaattaaaaggtaaggttacatttaatgatgtagcaggggtagaagaagccaaagaagaggttgaagaagttgtagaatttttaaaagaccctaaaaaatttagtagacttggtggaaaaatacctcgtgggtgtcttttagttggacctcctggaacaggtaaaactttactagcaagagcaatagcaggtgaagctggagtacctttctttacaatatcgggttcagactttgtagaaatgtttgttggtgttggtgcttccagagttcgagatatgtttgaacaaggtaaaaagcactcaccatgtataatatttattgatgagattgacgctgtcggaagaagtagaggcgcaggtttaggtggaggcaacgatga

SEQ ID NO: 275380 - DNA, 765 bp, Unknown
  Bacterial polypeptide expressing nucleotide sequence isolated from the Sargasso Sea
aaaaattccaagaggtgcacttttagtaggaccaccaggtacaggaaaaactttactagcaagagctattgcaggagaagctggagtgccttttttcactatctcaggatcagattttgtagaaatgtttgtaggggttggtgcttcaagagttagagatatgtttgaacaaggtaaaaaaaactctccttgcataatttttatagatgaaattgatgctgtaggaagaagtagaggagcaggtttaggtggaggaaatgatgaaagagaacaaactcttaaccaacttctcgttgaaatggatggctttgataccaatgaaggtgtaataatcattgcagcaactaatagacctgatgttttggatccagctttattaagaccaggaagatttgatagacaagtcgtggtttcaaatcctgatatcataggtagagaaaaaattttaaaagttcatgtaaaaaagattaaaatggctccggatgttaatttgagaaccgttgcaagagggacaccaggattctctggagcagaccttgcaaacttagttaatgagtcggctcttttagctgcaagaaaaaataaaaggattgttactttaaatgaatttgaggaagctaaagataaagtgatgatgggcgcagaaagacgctcaatggtaatgactgaagatgaaaaaaaattaacagcataccacgagggtggacatgcgctagtttcttttaatatgcctagttatgatccaattcataaagccacaattat

SEQ ID NO: 275381 - DNA, 901 bp, Unknown
  Bacterial polypeptide expressing nucleotide sequence isolated from the Sargasso Sea
aactatatgaatttaaaaaatttaataatgtggggaattatagtcttactttctgtagggctattcaatatgttccaagatcccaaaaaaataaattccgaaaataataaacttcctttttcaagttttatgagtgaagtagacgcaggaagagttgtagaagtgcaaattcaggggaataatatttcaggagtcttagctgatggaaaatcttttagcacttattctccaaattatccaaacttagttgagaaattatcagagcaaaatataagcataattgctacaccattagaagataaaatgccttctcttttaggaatattattatcttggtttccgatgttattattaataggtgtttggattttctttatgcgtcaaatgcaaggaggaaaaggtggagctatgggatttggaagatctaaagcaaaacttttaaatgaagctcaaggaaaagtcactttcaatgatgttgcgggagtagaagaagcaaaagaagaagttgaagagatagttgagtttttaaaagatcctaaaaaatttagtagactaggaggaaaaattcctaaaggagcattattaattggtcctccaggaacaggaaaaactttattagctaaggcaatagcaggtgaagcaaatgtaccttttttttctatttcaggatctgattttgttgaaatgtttgttggagttggagcatctagagttagagatatgtttgaacaaggaaaaaaacattcaccgtgtataatttttattgatgagattgatgcagtaggaagaagtagaggcgcaggactcggtggaggcaatgacgaaagagaacaaactctaaatcaacttttagtagagatggatggttttgacactaacgaaggaataattttaattgcag

SEQ ID NO: 275382 - DNA, 781 bp, Unknown
  Bacterial polypeptide expressing nucleotide sequence isolated from the Sargasso Sea
atgaattttaaaaatttagcaatgtgggcaataattgtttttttgacaattggcttatacaatatgtttaaaaatcctcagtctaatcctagaggttcaaatcaggttatattttcagatttcttagactcagtagaaaatggagaggttgtaaaagtagagatacaaggcaacaacattaatggtatatattcaaatgggaatagttttaaaacatattcacctaatgatccaaatttaattgaaaaactttcagataaaggtgtaagtatttctgctgccccactagaagaaaaaatgccatcgttgtttggtgtgttactgtcatggttcccaatgctattattaattgcagtctggattttctttatgagacagatgcaaggaggaaaaggtggtgctatgggttttggaagatcaaaagccaagatgatgaatgagttgaaaggaaaagtaacattcaatgatgttgctggcgttgaagaagcaaaagaagaagttgaggagattgttgaatttttaagagatcctagaaagtttagtagattaggtggaaaaattccgagaggtgctttattagttggtcctccaggtacagggaaaactttgttagctagagctatcgctggtgaagctggagttcctttttttacaatttcaggttcagactttgtagaaatgtttgttggagtaggagcatctagagttagagacatgtttgaacaaggaaaaaaaaattcaccatgtataatttttattgatgagattgatgcagtaggga

SEQ ID NO: 275383 - DNA, 894 bp, Unknown
  Bacterial polypeptide expressing nucleotide sequence isolated from the Sargasso Sea
tcatgatgtagctggtgttgaagaagcgaaagaagaagttgaggaagttgttgaatttttaaaagatccaagaaagtttagtagattaggtggtaagataccaagaggatgtttattagtgggccccccaggtactggtaaaacattattagctagagcaatcgctggtgaagcaggtgtaccattctttactatttctggatcagattttgttgaaatgtttgtcggtgttggagcttcaagagtaagagatatgtttgagcaaggtaaaaaacattctccatgtataatatttattgacgaaattgatgctgtaggaagaagcagaggagcaggtcttggtggaggaaatgatgaaagagagcaaacacttaatcagcttttagttgagatggatggatttgacactaatgaaggtgtaattattatagctgcaactaatagaccagatgtattagaccctgccttattaagaccaggaagatttgatagacaagttgtagtttcaaatccggatctaattggaagagaaaaaattttaaaagtacacgcaaaaaaaatatcaatggcacctgatgttaacttaagaacagttgctagaggaacacctggattttctggtgcagatctagcaaaccttgtcaatgaagctgcattgttagctgcaagaaagaataaaagaatagttacatatcaagaatttgaagaagctaaagataaagtaatgatgggatcagagagaagatcaatggtaatgtcagaggaggagaaaaaattaactgcttaccatgaggctgggcacgcaattgtaacaataaatgaaaaggccgcttatcctatacacaaagcaacaataataccaagaggtagagctttaggaatggtaatgcaatt

SEQ ID NO: 275384 - DNA, 949 bp, Unknown
  Bacterial polypeptide expressing nucleotide sequence isolated from the Sargasso Sea
gcatgggatttggaaatcaaaagctaaattattgaacgaggctcagggtaaagttactttcaacgacgttgcaggtattgaggaagcaaaagaagaagtggaagaaatagttgattttttaaaagatccaagaaaatttagaaaacttggaggaaaaattcctaagggagctctattaataggaccaccgggtactggtaaaacacttttagctaaagctattgcaggcgaggccaatgtacctttctttacaatttcaggatctgattttgtagaaatgtttgtgggagttggagcttcaagagttagagatatgtttgagcaaggaaaaaaacatgctccatgtattatttttattgatgaaatagacgctgttggaagaagcaggggcgcaggtctaggtggtggtaacgatgaaagagaacaaactttaaaccaacttttggttgagatggatggttttgacaccaatgaaggaattatattaatagcagcaacaaatagacctgatgttttagacccagcattattaagaccaggtagatttgatagacaagttgtagtgcctaaccccgatattttaggaagagaagctattttaaaggttcatgtcaaaaaaataaatactggtccagatgtgaaacttagaaccattgctagaggaacccctggtttttctggagccgatttagcaaatttaattaacgagtctgcattattagctgcaagaaaaaataaaagggtagttacaatggtcgatatagaggaagcaaaagataaagtaatgatgggcgctgaaagaaggtcaatggtaatgacagaagaggaaaagaaattaactgcgtatcatgaaggaggacacgctattgttgctttaatgaaaaagcatctgaccctatacataaagcaactattatacctagaggaagagctttgggaatggttatga

SEQ ID NO: 275385 - DNA, 820 bp, Unknown
  Bacterial polypeptide expressing nucleotide sequence isolated from the Sargasso Sea
tgtttgttagtaggtcctcctggaacaggaaaaactttgttggcaagagcaattgctggagaggcaggagtccctttctttactatttctggttctgattttgttgagatgtttgttggagttggcgcatctagagttagagatatgtttgaacaaggaaaaaagcactcaccatgcattatttttattgatgagatagatgcagttggaagaagtagaggagctggcttaggaggaggaaatgatgaaagagaacaaacgttaaatcaactgttagtagagatggatggtttcgatacgaacgaaggagtaattataatagcagcaaccaatagaccagatgttttagatcctgcattattaagaccaggcagatttgataggcaagtagttgtttcattgccagatataattggaagagaaaaaatattaaaagtgcatgcaaaaaaaatatctatgacacctgatataaatttaagaacaattgcgagaggaactcctggattttcaggagctgatcttgcaaacttagtgaatgaagctgcacttcttgcggctagaaagaataaaagaatagttacttatcaggaatttgaagaagcaaaagataaagtgatgatgggagcagaaagaagatctatggtcatgacagaggaagagaaaagattgaccgcttatcacgaagctggccatgcaattgtaacaattaatgaaaaagcagcttatccaatacataaagcaacaatcataccaagaggaagagcactaggaatggttatgcaattacctgaaaaagatgaggttcacaaacaagagaaca

SEQ ID NO: 275386 - DNA, 793 bp, Unknown
  Bacterial polypeptide expressing nucleotide sequence isolated from the Sargasso Sea
aatgaaaaactttagtaaaaatataatactttggattgttataggtcttcttctaattgccttattcaacttatttcaaaatagttcaacttcaaataagacagcagaaatatctttttccgattttctaattgcagctgataatggaaacatttcagaggtaaaaattgttggaaatgatgtatctggtttttttgaggatggaagatcttttaatacttactcgcctaactatccagaccttattaataagctgagtgagtcaggtgtaaagatagtagctgaaccttctgaaagatcaatgcaccctattttaagtgttcttatctcttggtttcctatgttattgttaattggtgtttggattttttttatgagacaaatgcaatcaggtggtggcaaggcaatgggtttcggtaaatctaaagcaaaattgttaaatgaagctataggaaaagtaacctttgatgatgttgctggaatagatgaagcaaaacaagaacttgaagaagttgttgaatttttaaaagatcctaaaaaattctcacgacttggaggaaaaatacctacaggagcattattagtaggccctccaggaactggaaaaacattattagcacgagcaatagctggtgaagctaatgttccttttttttcaatttcaggatctgattttgtagaaatgtttgtaggtgttggtgcaagtagagttagagatatgtttgagcaaggaaaaaaaaatgcaccttgtataatttttattgatgagattgatgcagttggtagacataga

SEQ ID NO: 275387 - DNA, 814 bp, Unknown
  Bacterial polypeptide expressing nucleotide sequence isolated from the Sargasso Sea
ttttaatatgtttcaggatcctaataagataaatactgataggaagacattaccattttcaaattttttaaatgaagttgaggctggtcgtgtagttgaggttcaaatacagggcagtaatatttcaggaattttagctgatggtaaaaaatttaaaaccttctctccgaactatccagaactagttgacaaactttcatctaaaggtgtaagcataaacgcatccccccaagaagataaaatgccatctcttttgggaattttattatcttggtttccaatgcttttacttattggtgtttggatattttttatgcgtcaaatgcaaggtggaaaaggtggagcaatgggatttggtagatcaaaagcaaaactattgaatgaagctcaaggcaaagtgacatttaatgatgtagctggggtagaagaagctaaagaagaagttgaggaaattgtagaatttttaaaagatcctaaaaaatttagtcgccttggtggaaaaattccaaaaggtgctcttttaattggacctccaggaacgggaaaaacattattagcaaaagctatagcaggtgaggctaatgttccatttttttctatctcggggtcagactttgttgagatgtttgttggagttggtgcatctagagtgcgagatatgttcgaacaaggaaaaaaacattcaccatgtattatattcattgatgaaattgatgcagttggaagaagtagaggggcaggtctgggtggaggaaatgatgaaagagagcaaactctaaaccaattacttgttgaaatggatggctttgataca

SEQ ID NO: 275388 - DNA, 880 bp, Unknown
  Bacterial polypeptide expressing nucleotide sequence isolated from the Sargasso Sea
atgaaaaattttagtaaaaatatagctttatggcttattattggcttattgttgatagcactattcaatctttttcaaggaacaggtaataaaaactcttctagattaatatcatttactgatttcttaactgctacagaatcaggtaacgtatcggaggtctttattagaggtaataacgttgaaggttattttgatgatggccgctcatttaaaacttactcaccaaattatcctaatctggtagaaaagcttaatgaaaatggagttagaattaatgctgaagcttcaaataaacctatgcatcccctactaagcgtattgatatcatggttccctatgattttgttaattggtgtatggattttctttatgagacaaatgcaaggtggtggtggtaaagcattaggctttggcaaatcaaaagctaaattactaaatgaagcaattggaaaaattacttttgatgatgtggctggaatagatgaagcaaaacaagaattagaagaagttgtggaatttttaaaagatcctaataagttctcaaaacttggaggtaaaatacctactggtgcattacttattggaccacctggtactggtaaaacattacttgctagagcaatagcaggtgaagcaaatgttccatttttttctatctctggttctgattttgttgaaatgtttgtaggagttggtgcaagtagagttagggatatgtttgaacaaggtaaaaaaaattctccatgtattatttttattgatgaaatagatgcagtaggtaggcacagaggcgctggtcttggaggtggaaatgatgaaagagaacaaacactaaatcaattgttagttgaaatggatggtttgaagcaaatgcagg

SEQ ID NO: 275389 - DNA, 907 bp, Unknown
  Bacterial polypeptide expressing nucleotide sequence isolated from the Sargasso Sea
ttacttttcccagctattttaattggaggtttaattttattagccagaagatcaaatggtatgcctggtggccctggtcaagcaatgcaattcggtaagacaaaggcaagattcgcaatggaggctgaaacaggggtagttttcgacgatgtagctggtgtaaatgaagctaaacaagatttacaagaggttgttacttttctgaaaaagccagaaaaatttacttctgttggtgccaggatacctaagggtgttttgttggtagggcctcctggtacaggtaaaactcttttagcaaaagcaattgcaggtgaagcaggtgtcccatttttttcattatcaggttctgaatttgttgagatgtttgttggtgttggtgcaagtagggttagagacctctttaaaagagccaaagaaaatagcccttgtttaatctttattgatgaaattgatgcagttgggaggcaaagaggtgctggtattggaggtggaaatgatgagagagaacaaaccctaaaccaattacttactgaaatggacgggtttgaaggtaatagtggaataataattatcgcagccacaaacagacctgacgttttagattcagctcttatgaggccaggtagatttgatagacaagtaactgtagacgcgccagacatcaaaggcaggttatcaattcttgaagtgcactctaggaataagaaacttcaagaggatttaacccttgaaagcatcgcaagaagaactccaggttttactggagcagatttagcaaatttattaaatgaagctgctatcttaactgctagaaggaggaaagattcaataagcatttctgagatagatgactctgtagacaggattgtcgctggcatggagggttcccctttaacagacggaagaa

SEQ ID NO: 275390 - DNA, 793 bp, Unknown
  Bacterial polypeptide expressing nucleotide sequence isolated from the Sargasso Sea
atgagacagatgcaaggtggcaaaggtggtgctatgggatttggaagatcaaaagctaaaatgatgaatgaattaaagggcaaagtaacttttaatgatgttgctggtgtagaggaagctaaagaagaggttgaggaagtagttgaattcctaaaagatccaaaaaagtttagccgtcttggtggaaaaataccgagaggatgtttattagtaggccctcctggtactggaaaaactcttttagctagagcaatcgcaggtgaagctggagttcctttttttacaatctcaggatctgattttgttgaaatgtttgttggtgtaggggcatctagagtaagagatatgtttgagcaaggtaaaaaacattcaccttgtattatttttattgatgaaattgacgccgtaggaagaagcagaggtgctggacttggaggaggaaacgacgagcgagaacaaacgcttaatcagctgttagttgagatggatggtttcgatacaaatgagggcgtaataataattgcagctactaataggccagacgttttggaccctgcattgttaagacctggtagatttgatagacaagtagttgtatctaatccagatattattggaagggaaaaaattttaaaagtacatgtcaaaaaagttaagatggctccagatgtgaatttaaggactatagccagaggaacgccaggtttttcaggtgctgatttggcgaatttagttaatgaagcagctctattagctgcaagaaaaaataaacgaatagttacttatcaggaat

SEQ ID NO: 275391 - DNA, 805 bp, Unknown
  Bacterial polypeptide expressing nucleotide sequence isolated from the Sargasso Sea
atttttatctgaggtagaaaatggtcgtgtagttcaagtagaaatacaaggtaacaatgtaaatggtgtattttctaacggagaaaagttctccacatatgttcctaatgatcctaatttaattgaaaaattatcagacaaaggagtaagtatttcagcatcacctttagaagaaaagatgccatctcttttaggtgttttgttatcatggtttccaatgcttcttttaattgcagtttggatcttctttatgagacaaatgcaaggaggaaaaggtggagcaatgggttttggaagatctaaagcaaaattaatgaatgagctaaaaggaaaagttacatttaaggatgttgctggtgtagaagaagcaaaagaagaagttgaggaagtagtcgaatttttaaaagatcctaaaaaatttagcaggctcggtggaaaaattccaagaggatgtttattggttggtcctccgggtacaggaaaaactttattagctagggcaattgcaggagaagctggagttccgttttttacaatatctggttctgactttgttgaaatgtttgttggtgttggagcttcaagagttagagatatgttcgagcagggcaaaaaacattcgccatgtattatatttatagatgaaattgatgcagttggaagaagtagaggagctggccttggcggaggtaacgatgaaagagaacaaactttaaatcagttattagtggaaatggatggttttgatactaatgaaggggttataattattgccgcaacaaacagacctgacgtgttagatccg

SEQ ID NO: 275392 - DNA, 922 bp, Unknown
  Bacterial polypeptide expressing nucleotide sequence isolated from the Sargasso Sea
cttggagataaagtagaagtaaagaaagctcaagttaagccagcacaaaaggtggttcttgcaccaatgatggatcaatctggacgtgtacaatttggaccaggtattgaagaagtaattcttagaggattaaatcgaaggcctttaacaaaaggagatgtggttattgtacctggattaacattgatgggtgggagattaccattcgctgttactgtagtgcaaccaaaagggataatacaaattcaagctgatactgtaattcaagttcacgaagatccagttaaggaagaagagttgacaacgacaggtgtcgtttacgaggatattggtggattgaaagaagaaatcaagaaggtacgagagatgattgaattgcctctcaaacatcctgaattgttcgaagcattaggaatagacccgccaaaaggagttttgctttatggacctcctggaactggaaaaactttattagctaaagctgtagcaaatgaatctggagctaatttcctatcaattcaaggtccggagataatgaacaaatactatggagaatctgaagctcacttaaggcaaaaatttgaagaagctgaaacaaattcgccatctattatatttattgatgaaatagattctattgcatcaaaaagagatgaaacacagggagaagtagaaaggcgtgttgttgcccaattactaacattgatggatggattgcaagcaagaggacaagtaattgtaattgctgcaacaaatagacctgatgctattgatcaagcactaagaagacctggtagatttgaccgcgaaatagaaattggaattccagatcgtgaaggtcgaagagaagtattacaagttcacactagaggaatgcctatcaaaagagataaagaaggccactggaaagaattggatcatt

SEQ ID NO: 275393 - DNA, 856 bp, Unknown
  Bacterial polypeptide expressing nucleotide sequence isolated from the Sargasso Sea
aatattaacggtactttatcagatggatcaaagttcaaaacttattcaccaaattacccagatttagtaaacaaactttctgataaaaatgtcagtataaatgctgctcccgttgaggataagatgccttctttattaggtgttctattgtcttggtttccaatgttgctcttaattggtgtttggatattttttatgcgtcaaatgcaaggtggtagaggtggtgcaatgggatttggaaaatcaaaagcaaaattattaaatgaggcccagggtaaagttacttttaatgatgttgcaggtattgaagaagcaaaagaagaagtagaagaaatagttgattttttaaaagatccaagaaaatttagaaaacttggaggaaaaattcctaaaggagctttattaataggaccaccaggtacaggtaaaacacttttagcaaaagctatagcaggtgaggctaacgtacctttctttacaatttcaggttctgattttgtggaaatgtttgttggagttggagcttcaagagttagagatatgtttgagcaaggaaaaaaacatgctccatgtattattttcattgatgagatcgatgcggttggaagaagcagaggtgcaggtctaggtggtggtaacgatgaaagagaacaaactttaaaccaacttttggttgagatggatggttttgatacaaatgagggaattattttaatagcagcaacaaatagacctgatgttttagatcccgctctattaagaccaggtaggtttgatagacaagttgtagtgcctaatcctgatattttaggaagagaagctattttaaaagttcatgttaaaaaaataaatactg

SEQ ID NO: 275394 - DNA, 856 bp, Unknown
  Bacterial polypeptide expressing nucleotide sequence isolated from the Sargasso Sea
gatcaattcaccacttatgctcctgaagatccaaacttaatccagaaactaagtgataaaggtgtaagtatctcagcaagtccattagaggaaaaaatgccttcattattaggaatacttctttcttggtttccaatgcttttattaattgctgtttggatattctttatgagacaaatgcaaggtggaaaaggcggagcaatgggctttggaagatcgaaagcaaaaatgatgaatgaagtaaaaggaaaagttacttttaatgacgttgccggggttgaagaggctaaagaagaggtagaggaagttgtagaatttttaaaagatccaagaaagtttagcagactaggtggtaaaattccaagaggatgtttattagtcggccccccaggtactggtaaaacattactagctagagcaattgcgggtgaagcaggtgttccattttttacaatctctggatcagattttgttgaaatgtttgttggagttggagcttcaagagttagagatatgtttgaacaaggtaaaaaacattctccatgtataattttcatagacgagattgatgccgtaggaagaagtaggggagcaggtcttggtggtggaaatgacgaaagagagcaaactcttaatcagctcttagttgagatggatggttttgatacaaatgaaggtgtaattattattgccgctactaatagaccagatgttttagatccagctcttttaagaccaggaagatttgataggcaagttgttgtttcaaatccagatctaattggtagagaaaagattttaaaagtccacgcaaagaaaatatcaatggcacctgatgttaatttaagaacagttg

SEQ ID NO: 275395 - DNA, 922 bp, Unknown
  Bacterial polypeptide expressing nucleotide sequence isolated from the Sargasso Sea
tctgaaaaagccagaaaaatttacttctgtaggagcaaggattcccaaaggagttcttttggtaggacctcctggtactggtaaaactcttttagctaaagcaattgcaggtgaagccggtgtcccattcttctcattatcaggttctgaatttgttgaaatgtttgtaggtgttggtgctagtagagtgagagaccttttcaaaagagctaaagagaatagtccttgtttaatttttattgatgaaatcgatgctgtcggaaggcaaagaggtgcaggtattggtggaggtaatgacgagagagaacaaactctcaatcaattacttactgaaatggatggcttcgaaggtaatagtggcataataataattgcagccacaaacaggccggatgttctagactcagcattaatgagaccaggaagatttgatagacaggtaactgtagacgcacctgatatcaagggcagactatctatattggaggttcattctaggaataagaaacttcaagaggatttaacacttgaaagcattgcgagaagaacacctggatttacaggagcagatttagctaatttattaaatgaggctgctatattaaccgcaagaaggagaaaagactcaataagcatttcagaaattgacgactctgtagataggattgtcgcaggaatggaaggttcaccattaacagatggtagaagcaagagattaattgcttatcacgaagttggccatgctctcataggttcacttgttaaagcccatgatcctgttcaaaaagtgactgttattccaagaggtcaagctaaaggattaacatggtttaccccagacgatgaacaaaccctcgttagtagggcgcaattaaaagcgaggataatgggtgctttaggaggaagagctgctgaagatgta

SEQ ID NO: 275396 - DNA, 844 bp, Unknown
  Bacterial polypeptide expressing nucleotide sequence isolated from the Sargasso Sea
tcagataagggagttagcatttctgcatctcctttagaagaaaaaatgccttcacttttgggagttctgctttcatggtttccaatgctgctactaatagctgtttggatattttttatgagacagatgcaaggaggaaaaggtggagcaatgggttttggtagatctaaagcaaaaatgatgaatgaattaaaaggaaaagtaacttttaatgatgttgctggagttgaggaggcaaaagaagaagtggaagaagtggtagaatttttaagagatccaaaaaaatttagcaggcttggaggaaaaattcctcgagggtgcctattagttggtcctccaggaacaggaaaaactttattagctagagctatagcaggcgaagctggagttccattttttacaatatctggctcagattttgttgaaatgtttgtgggagttggagcttcaagagttagagatatgtttgaacaaggaaagaaacattctccatgtataatatttatagatgaaattgatgcagttggaagaagtagaggagccggtttaggtggtggaaatgatgaaagagaacaaactttaaatcagcttctagtagagatggatggatttgatactaacgaaggtgtaattattatagcagcaacaaacagacctgacgttttggatccagcacttttaagaccaggaagatttgatagacaggtagttgtttcaaacccagatattcttggaagagagaaaattcttaaagtacatgctaagaaaatttcaatggcaccagatgtaaatctaagaactgttgcaagaggaacgccaggtttttcaggtgcagatttagcaa

SEQ ID NO: 275397 - DNA, 751 bp, Unknown
  Bacterial polypeptide expressing nucleotide sequence isolated from the Sargasso Sea
tttgttagtaggacctccaggaacaggaaaaacattacttgccagagctatagctggagaagctggtgttccattttttactatttcaggatcagattttgtagaaatgtttgtaggggttggagcttctagagttagagatatgtttgagcaaggaaaaaaaaattctccttgtataatttttattgatgaaattgatgctgttggaagaagtaggggtgcaggtctaggtggtggaaatgatgaaagagagcagactttaaatcagcttttagttgagatggatggttttgatacaaacgaaggagttataataattgcagcaacaaatagaccagatgttttagatcctgctttattaagaccaggtcgatttgatagacaagtagtagtttcaaatcctgatataattggtagagagaaaattttgaaagttcatgttaaaaaaattaaaatggctccagatgtaaatttaagaacaattgccagaggaaccccaggattttcaggtgcagaccttgcaaatttggttaatgagtcagctttgttagcagcaagaaaaaataaaagaattgttactttaaatgaatttgaagaagccaaggacaaagtaatgatgggagccgagagacgttcaatggttatgacggaagatgaaaaaaaattaacagcatatcatgaaggtggacatgccttggtatcttttaatatgccaagttatgatccaatacataaagctacaattattcca

SEQ ID NO: 275398 - DNA, 910 bp, Unknown
  Bacterial polypeptide expressing nucleotide sequence isolated from the Sargasso Sea
ccatcattattttggtgtcctactctcatggtttccgatgttgttattaatagcagtttggattttctttatgagacaaatgcaaggtggaaaaggtggagcaatgggctttggaagatctaaagcaaaaatgatgaatgaaatgaaaggtaaagtaacctttaacgatgttgcaggtgtagaagaagccaaagaggaagtcgaagagattgttgagttcttaaaagatccaaaaaaatttagtaggctaggtggaaaaatacctagaggtgcacttcttgtaggtcctccaggaacaggaaaaactttattagctagagcaattgctggtgaggcaggtgttcctttcttcactatatctggatcagattttgtagagatgttcgttggcgtaggagcatcaagagtgagagatatgtttgagcaaggaaaaaaaaattcaccatgtataatatttattgatgaaatcgatgctgtaggtagaagtcggggtgctggtttaggaggtggaaacgacgagagggaacaaactcttaatcagcttcttgtcgagatggatggttttgatacaaacgaaggtgtcattataattgcggcaacaaatagacctgatgttcttgatcctgcattattaagaccaggaagatttgatagacaagttgtagtttctaatccagatataattggaagagaaaaaattttaaaagttcatgttaaaaaaattaagatggcccctgatgtaaatttgagaactatagcaagaggaactccaggattctcaggtgctgatttagcaaatttagtaaatgaatcagcattattagctgctagaaaaaataaaagaattgtaactttaaatgaatttgaagaagctaaggataaagtgatgatgggagctgagagacgctca

SEQ ID NO: 275399 - DNA, 916 bp, Unknown
  Bacterial polypeptide expressing nucleotide sequence isolated from the Sargasso Sea
gggttttggaaaatcaaaagccaaaatgatgaatgaattaaagggtaaggttacatttaatgatgtagctggggtagaagaagccaaagaagaagttgaggaagtagtagaatttttaaaagaccctaaaaaatttagtagactaggtggaaaaatacctcgtgggtgtcttttagtcggaccccctggaacaggtaaaactttattagcaagggcgatagctggcgaagcgggagtaccattctttacaatttcgggttcagactttgtagaaatgtttgttggtgttggagcatcaagagttcgagatatgtttgagcaaggtaaaaagcactcaccatgtataatatttattgacgagattgatgctgtaggaagaagtagaggtgcaggtttaggtggaggtaacgatgaaagagaacaaacacttaatcaattacttgtagagatggatggctttgatacaaatgaaggtgtaataataattgcagcaaccaacagaccagatgtacttgatccagctttattaagaccgggaagatttgacagacaggtagtagtttctaatcctgacttacttggaagagaaaaaatattaaaagtgcatgctaagaaaatatcaatggcaccagatgttaatttaagaactattgcaagaggaactccagggttttctggtgcagacttggcgaatttagttaacgaagctgcattattagcagcaagaaaaaacaagagaatagttacttatatggaattcgaagaggcaaaagataaagtaatgatgggatctgaaagaagatcaatggtaatgagtgaggaagagaagaaattgactgcatatcatgaagctggccatgccattgttactataaacgaaaaggcagcatatcctatacataaagcaacaatcatt

SEQ ID NO: 275400 - DNA, 343 bp, Unknown
  Bacterial polypeptide expressing nucleotide sequence isolated from the Sargasso Sea
ttaagagacccaagaaaatttagcagacttggaggaaaaattccaagaggatgtttattagttggtcccccaggaactggtaagactttattagccagagcaatagctggagaggcaggggtgcctttttttactatttctggatctgattttgttgaaatgtttgttggagttggtgcatcaagagttagagatatgtttgagcaaggtaaaaagcattctccatgtattatttttatcgatgaaattgatgctgtaggaagaagtagaggtgctggtttaggtggtggaaatgatgaaagagagcaaactttaaaccaattattagtggagatggatggat

SEQ ID NO: 275401 - DNA, 877 bp, Unknown
  Bacterial polypeptide expressing nucleotide sequence isolated from the Sargasso Sea
cctgatgatccaaatttaattcaaaaattaagtgataaaggcgtcagtatctcagcaagtccattagaggaaaaaatgccttcattatttggagtacttttatcatggtttccaatgttacttttaatagctgtttggatattctttatgagacagatgcaaggtggcaaaggtggagcaatgggttttggaaaatcaaaggccaaaatgatgaacgaattaaaaggcaaagttacatttaatgatgtggctggggtagaagaggctaaagaagaagttgaagaagtagtagaatttttaaaagatcctaaaaaatttagtagactaggaggtaaaatacctcgtgggtgtcttttagttggacctccaggaacaggtaaaactttgttagctagggcaattgctggagaggcaggtgtaccgttttttacaatatcaggttcagacttcgttgaaatgtttgtaggagttggagcatcaagagtcagagatatgtttgaacaaggaaaaaaacattcgccatgcataatatttattgatgagatagatgctgttgggagaagtagaggagctggtttaggtggtggtaatgatgagagagaacaaacattaaatcaattattagtagagatggacggttttgatacaaatgaaggtgtgataataatcgcagcaaccaatagaccagatgtacttgatcctgctcttttaagaccgggtagatttgacagacaagtagttgtttccaatcctgatataattgggagggaaaaaattttaaaagtccatgcaaaaaaaattacaatggctcctgacgtaaagctaagaactattgcaagaggtacacctggattttctggagcagatttagcaaatt

SEQ ID NO: 275402 - DNA, 887 bp, Unknown
  Bacterial polypeptide expressing nucleotide sequence isolated from the Sargasso Sea
cgtgggtgtcttttggttggacctccaggcacaggtaaaactttattagcaagagcgatagcaggtgaagcaggagtaccgttctttacgatatcaggttcagattttgtggaaatgtttgtaggtgttggagcttcaagagttcgagatatgtttgaacagggtaagaaacattcaccatgtataatatttatcgatgagattgatgctgtaggaagaagtagaggggctggtttaggcggtggtaacgatgagagagagcagacacttaatcagttacttgttgagatggatggttttgatacaaatgaaggtgttataataattgctgcaacaaatagaccagatgtgcttgatccggctttattaagaccaggcagatttgatagacaagtagttgtgtcaaatcctgacttaattggaagagaaaaaatattaaaagtgcatgctaagaaaatatcaatggcacctgatgtaaatttaagaacaatagcaagaggaactcctggattttctggtgctgatctagcaaatttagtaaatgaagctgcattactagctgcaaggaaaaataagagaatagttacttatatggaatttgaagaagcaaaggataaagtaatgatggggtctgagagaagatcaatggtaatgagtgaggaagaaaaaaaactgactgcttatcatgaagctgggcatgccattgttacaataaatgaaaaggcagcatatcctatacataaggcaacgattatcccaaggggaagagcattgggaatggtaatgcaacttcctgaaagagacgaagtatctcaaacaagagagcaattacatgctcaaatggctatagcaatgggtggaagagttgctgaagaaattatctttgg

SEQ ID NO: 275403 - DNA, 975 bp, Unknown
  Bacterial polypeptide expressing nucleotide sequence isolated from the Sargasso Sea
taaagcaaagatgatgaatgaagttaaaggtaaagtaacttttaatgatgttgcgggtgtagaagaggcaaaggaagaagttgaggaagtagttgaatttttaagggatccaaaaaaatttagcagactaggaggaaaaatacctagaggatgtcttttagtaggacccccagggacaggtaaaactcttcttgcaagagcaattgctggagaagcaggtgtgccgttttttacaatatctggatcagattttgttgaaatgttcgttggagtaggagcatcaagagtaagagatatgtttgaacaaggtaaaaaacactctccttgtattatttttatagatgagattgatgcggtcggtagaagtcgaggagctggtttaggtggtggtaatgatgaaagagaacaaacacttaaccaattgctagttgagatggatgggtttgatacaaatgagggagtaataattattgcagctactaatagacctgacgttttggatccagccttactgagacctggaagatttgatagacaagtcgttgtttctaacccagatatcataggaagagaaaaaatactcaaagtgcatgcaaaaaaaatatctatgtctccagatgtaaatttaagaactgttgcaagaggaaccccaggtttttctggcgccgatctagcaaatcttgtaaatgaagcagctttgttagcggcaagaaaaaataaaagaattgtaacttcacaagagttcgaagaggcaaaagacaaggttatgatgggcgctgagagacggtcaatggtaatgacagaagatgagaaaaaattaactgcttaccatgaagcgggacatgcaatcgtcactcttaatgaaaaagcagcatatcctattcacaaggcaacaataattccaagaggaagagctttaggaatggtaatgcaactaccagagagggatgaagtatctcaaacaagagagcaact

SEQ ID NO: 275404 - DNA, 865 bp, Unknown
  Bacterial polypeptide expressing nucleotide sequence isolated from the Sargasso Sea
atgaatttaaaaaatctagcaatgtggggaataatagttttcttaactattggtctctataatatgtttaaaaatcctcaatcaaatataagaggaggaaatcaaataattttttcagattttttaacttcagttgaaaatggagaagttctaaaggttgagattcagggaaacaacatcaagggtgtttactcgaatggaaactcattttcaacttattccccaaacgaccctaacttaattgaaaaattatcagacaaaggagtaagcatttcagcagctccgttagaagaaaaaatgccatcattatttggtgtattactttcttggttccctatgcttttattaattgctgtatggatattttttatgagacagatgcaaggtggaaaaggtggagcaatgggatttggtaagtcaaaagccaagatgatgaatgagcttaaaggcaaagtaacattcaatgatgttgctggagtagaagaagcaaaagaagaagtagaagaaattgtagaatttttaaaagatcctaaaaaatttagtagacttggcggaaagataccaagaggtgctttgctggtaggaccgccaggtacaggaaaaactttattagctagagcgattgcaggtgaggcaggagttcctttctttactatctcaggttcagattttgttgaaatgtttgttggtgttggtgcatcaagagtaagagatatgtttgaacaaggtaaaaaaaattctccttgtattatatttatcgatgaaatagatgcagtaggaagaagtagaggtgcaggcttaggtggaggtaatgatgaaagagagcaaactttaaaccaattattagttgagatggatggttttg

SEQ ID NO: 275405 - DNA, 797 bp, Unknown
  Bacterial polypeptide expressing nucleotide sequence isolated from the Sargasso Sea
aatgggttttgggaaatcaaaagcaaaaatgatgaacgaactaaaaggtaaagtcacgtttaacgatgttgctggtgtagaggaagctaaagaggaagtagaagaaatagtagaatttttaaaagatccaaaaaaatttagtaggttaggtggaaaaattccaagaggcgctttgcttgttggtcctccaggaactggtaaaactttattggcaagagcaattgcaggtgaagcgggtgttccgttcttcactatttcaggttctgattttgtggaaatgttcgttggtgtaggagcatctagagtaagagatatgtttgaacaaggtaagaaaaattctccatgtataatttttattgatgaaattgatgctgttggaagaagcagaggagctggtttaggtggtggaaatgatgaaagagaacaaacattaaatcagttattagttgaaatggatggttttgatactaatgaaggtgttattataattgcagcaacaaacagaccagatgtgcttgatccagctttattgcgaccgggaagatttgatcgacaggtagtagtctcaaacccagatattattggaagagaaaagattttaaaagttcacgtaaaaaaaataaaaatggcaccagatgtcaatttaagaacaatagcacgaggaacaccaggtttttcaggagcagatcttgcaaatcttgttaatgaagcagcgttattagcagcaagaaaaaacaaaagaattgtaacattattagaatttgaagaagccaaagataaagtaatgatgggagctg

SEQ ID NO: 275406 - DNA, 691 bp, Unknown
  Bacterial polypeptide expressing nucleotide sequence isolated from the Sargasso Sea
gatgggatttgggcgctcgaaagctaagatgatgaaccaacttaaaggtaaagtaacttttaatgatgttgcaggagttgaagaagctaaagaagaagttgaagaggttgtagaattcttaaaagacccaaaaaaatttagtagactaggcgggaagatcccacgtggttgtttactagttggaccaccaggtactggaaagactttattagctagagcgatagctggtgaagctggagttcctttctttacaatatcaggttcagacttcgtagaaatgtttgttggtgttggagcatccagagtaagagatatgtttgagcaaggtaaaaaacactcgccatgtataatttttatagatgaaatagatgcggtaggcagaagtagaggagcaggacttggcggaggtaatgatgagcgtgagcaaactttaaatcagcttcttgttgaaatggatggttttgaaacaaacgagggagttataattattgcggcaaccaatagaccagatgttttagatccagcattgctgagaccaggtagatttgacagacaggtcgttgtttcacttccagatattattggtagagagaaaatattaaaagttcatgcgaaaaaaatatcaatgaccccagatatcaatttaagaactgttgcaagaggaacccctggattttcaggagcagacctt

SEQ ID NO: 275407 - DNA, 903 bp, Unknown
  Bacterial polypeptide expressing nucleotide sequence isolated from the Sargasso Sea
accgaggtggtcgacttcctcaagaaccctgaccgatttacggccgtgggcgccaagattcccaagggttgtttattagttggccctccaggtacaggtaaaacccttctcgccaaggccgttgctggtgaagcaggtgtgcccttcttctcgatttccggttctgaattcgttgagatgttcgtcggggttggcgcaagccgtgtccgcgatctcttcgagcaggccaagaagaatgctccctgcatcatcttcatagacgaaatcgatgccgttggccgtcagcgtggtgcaggcctcggcggtggaaatgacgagcgcgagcagaccctcaaccagctgctcactgaaatggatggtttcgagggcaacaccggcatcatcatcattgcggccaccaacaggcccgatgtcctcgacgccgctctgttgcgtcccggccgtttcgaccgtcaggtgaccgtcgaccgtcctgactacgccggtcgtttgcagattctcggcgttcacgcccgcggcaagactctggccaaggatgttgatctcgacaaggtggcccgccggacgcctggctacaccggtgctgatctcgccaacctcctcaatgaggcggcgatccttgcggcacgtcgtgaactcactgaggtgagcaacgacgagatcagtgatgcaattgagcggatcatggtcggccctgagaaaaaggacgccgtaatcagtgagcgcaagaagcggcttgtggcttatcacgaggctggtcatgccttagttggtgccttgatgcccgactacgaccccgtccagaagatctcgatcattcctcgcggtaacgccggtggtctcaccttcttcactcccagtgaggagaggatggaatcaggcctttattcacgcgcttacctg

SEQ ID NO: 275408 - DNA, 827 bp, Unknown
  Bacterial polypeptide expressing nucleotide sequence isolated from the Sargasso Sea
caaagcaaaattgctatcagaagcccgaggaaaagttacatttaatgatgttgctggaatagatgaggcaaaagaagaagtagaagaaatagttgaatttttaaaagatccaagaaaatttagaagacttgggggtaaaattccaaaaggagctttattaataggtccaccaggaactggaaaaactttattagcaagagcaatagcaggagaagcgaacgttccttttttcactatatcaggatctgatttcgtggaaatgtttgttggcgtaggagcttcaagagtaagagatatgatggagcaaggaaaaaaaaatgcaccatgcataatttttattgatgaaatagatgctgttggaagaagcagaggcgctggccttggaggtggaaatgatgaaagagagcaaactttaaaccagttattggtagaaatggatggttttgatactaacgagggtgttattataattgctgcaacaaatagaccagacgttttagatccagctttacttagaccaggaagatttgacagacaagtagttgttcctaatcctgatattgtaggaagagaagcaattttaaaagttcatattaaaaatattactataggaccagatgttaaattaagaacaatagcaaggggaacacctggtttctctggtgctgatcttgcaaacttagttaacgaatctgctttgctagcagctagaaaaaataaaagaattgtaaccatgatagatattgaagaagctaaagacaaggtaatgatgggtgctgaaagaagatctatggttatgacagaagacgacaaaaaattaaccgctt

SEQ ID NO: 275409 - DNA, 847 bp, Unknown
  Bacterial polypeptide expressing nucleotide sequence isolated from the Sargasso Sea
attgtatgttgctctaggattgttaatctttattggcgttcagcaatacaatcaaactataaatgaacccgaagtgtcaacattttctgaatttaaagaattaataaacaatagagaggtggttgaggccactataaaagaacagtcaaacactgttcactttaaaacaaaaaataatgataaagtttttcaaaccgagtatccggaaggattcgaaggagaggtttttcaaatattagttgatcagaatatagttttaacaacagatacagagccagcaggcttccaggagtattttatagcatttctgccttggttatttcttgcaggttttatgttttttatgttttctcaagttagatcaaatgggaatcaagttatgcaatttggtaagtctaaggcaaaagaagtagatgaacaattacctaaagttacttttaaagatgttgctggagcagaggaagcaaaagaagagctagaagaaattaaggagtttcttaaatccccagaaaagtttaataagcttggtgcaaaaattccaaaaggtgttcttttagttgggccaccaggaacaggcaaaactttgctagcgagagcagttgccggagaatcagaagttcctttttacagtatttctggttcagactttgtagagatgttcgtcggagttggagctagtagagttagagatttatttaagaaagcaaaagaatcgtctccttcaatcatttttattgatgaaatagatgctgtgggaagaatgaggggggctggactagggggaggccacgatgaaagagagcaaactttaaatcaacttcttgtagaaatggatgggttcgagtca

SEQ ID NO: 275410 - DNA, 803 bp, Unknown
  Bacterial polypeptide expressing nucleotide sequence isolated from the Sargasso Sea
aaatacatttaatacttatgcacctgatgatccaaacttaattcaaaagttaagcgataaaggtgttagcatttcagcaagtcctctagaagaaaaaatgccatcattgttaggaattttactttcatggtttccaatgttattgctaattgcggtctggatattttttatgagacaaatgcaaggtggcaaaggtggagccatgggatttggaagatcaaaagcaaaaatgatgaatgaacttaagggtaaagttacctttaacgacgttgcgggcgtagaggaggctaaagaagaagtagaagaagttgttgaatttttaaaagatccaagaaaatttagtagactgggaggaaaaatcccaagaggttgcctcttagttggtccaccaggcacaggtaaaactttattggctagagctattgcaggtgaagctggggttcctttttttacaatatcaggttctgattttgttgaaatgtttgttggagttggtgcttcaagagttagagatatgtttgaacaaggaaaaaaacattcgccatgtataatatttatagatgaaatagatgctgttggtagaagtagaggagctggactaggaggtggaaacgatgaaagagaacaaactttaaaccaactattggttgaaatggatggttttgatacaaatgaaggagtcataataatagctgcaacaaatagacccgatgtacttgatccagcattattaagaccaggaagatttgacagacaggttgttgtttcaaacccagacataattggaagagaaaaaatataaa

SEQ ID NO: 275411 - DNA, 928 bp, Unknown
  Bacterial polypeptide expressing nucleotide sequence isolated from the Sargasso Sea
cagggaggaaagggcggtgcaatgggttttggaagatccaaggcaaaaatgatgaatgaagttaaaggtaaagtaacttttaatgatgttgcaggtgtagaggaggctaaagaagaagtagaggaagtagtagaatttttaaaagatccaaaaaaatttagtagacttggaggaaaaataccaagaggatgcttattagtaggaccaccaggtactggtaaaacattgttagctagagcaatagctggcgaagcgggagttcctttttttacaatttctggatctgatttcgtagaaatgtttgttggagttggtgcatcaagagttagagatatgtttgaacaaggaaaaaaacattcgccttgtataatatttatagatgaaatagatgcggtaggaagaagtagaggtgctggcttaggaggcggaaacgacgagagagagcaaactttaaaccagttacttgttgaaatggatggctttgataccaatgaaggtgtaattataatagcagccacaaatagaccagatgttttagacccagcattattgagaccaggaaggtttgatagacaagttgttgtttctcttccagatatcattggtagagaaaaaatattaaaagttcatagtaaaaaaatctcaatgacaccggacatcaatttaagaacaattgcaagaggtacacctggattttctggagcagatcttgctaatcttgttaatgaagcagcattgctagcagcaagaaaaaataaaagaatagttacatattcagaatttgaagaggcaaaagataaagtaatgatgggtgctgaaagaagatctatggtcatgactgaggatgaaaaaaaacttactgcttatcatgaggcaggacatgctatagttaccattaatgaaaaagctgcctatccgatacataaag

SEQ ID NO: 275412 - DNA, 826 bp, Unknown
  Bacterial polypeptide expressing nucleotide sequence isolated from the Sargasso Sea
tactacattttcacctcaaggcgctaacatagtctcattacttgaaaatagtggagtacgtattattgggaaacctgttgaacgagaagtttcttggatactttccacactcctttcttggtttcctatgctattattaataggtgtctggatctttttcatgcgacaaatgcaatcaggatctggtaaggcaatgggttttggaaaatcaaaagctaaacttcttactgagaaacaaggcaaagttacttttgaagatgtagcaggtatagacgaagctaagactgagcttgaagaaatagttgaatttttaaaggatccaggaaaatttcaaaggttaggtggaaaaatacctaagggttgtctattagttggtcctcctggaactggaaaaacacttctagctagggccatagctggtgaagccggggtgccttttttcactatatcagggtcagattttgttgaaatgtttgtaggagttggtgctagtagagttagagacatgtttgagcaaggcaaaaagaatgcaccttgtataatttttatagatgagattgacgctgttggtagacacagaggagctggtcttggtggaggcaatgatgaaagagagcaaacacttaaccaattattagttgaaatggatggttttgaggctaatgaaggggtaattttaattgcagccactaacagaccagatgttcttgacccagctctgttaaggcctggtagatttgatagacaagtagtagttccaaatccagatatacttggcagagaaaagatcttgaaagtccatatgaaaaaagtgcctttgtcagat

SEQ ID NO: 275413 - DNA, 817 bp, Unknown
  Bacterial polypeptide expressing nucleotide sequence isolated from the Sargasso Sea
tttggtatttcttatagttgatttttataatgcgaataatacgcaagttaaaactcaaaatatttcttactccagttttttagatgacgtaaaaaatggtaacgtttcaagcgttcaaatcagaggtaataatatatttggcaaatataatgatgggtcaagtttcactacctattcacccaatgatttaggattaattgataaacttgaaaaaaataacattgaaataatagcacaaccacttgaaaaaagttcacccggattactagacgtcttaatatcttggtttccaatgcttctgctaataggagtttggatattcttcatgaggcaaatgcagtctggaaccggaagagctatgggttttggaaaatccagagctaaattgcttaacgaaaataaagacaaagttactttcaaggatgttgcgggcatcgatgaagcaaaagcggaacttgaagaaatagtagaatttttgaaagaccccaccaagtttcaaagattaggtggtaaaatccctaaaggcgcccttttggttggtcctcctggaaccggtaaaactcttctagctagagcaattgctggagaagctaatgttccttttttttcaatttccggttcagattttgttgaaatgtttgttggcgtcggtgcgagcagggtcagagatatgtttgagcaaggtaaaaaaaatgcaccttgtataatttttatagatgaaattgacgctgttggtaggcacagaggtgcaggactcggaggtggaaaagatgagagagaacaaacacttaatcaacttttggtagaaatggatggc

SEQ ID NO: 275414 - DNA, 754 bp, Unknown
  Bacterial polypeptide expressing nucleotide sequence isolated from the Sargasso Sea
atctcagcagcaccattagatgagaaaatgccatctttatttggtgttctgctatcgtggtttccaatgctacttttaattgcagtatggatattttttatgagacaaatgcaaggtggtaaaggtggggcgatgggatttgggagatccaaagctaagatgatgaatgaattaaaaggaaaagttacttttaacgatgttgcgggtgtcgaagaagctaaagaagaagttgaagagatagtcgagtttttaaaagatccaaaaaaatttagtagacttgggggtaaaattccaagaggtgctttattagttggtccaccaggcacaggtaaaactttgctagcaagagcaattgctggtgaagcaggagttccattctttacaatttctggatcagattttgtggaaatgttcgtaggtgttggtgcatctagagtaagagatatgtttgaacaagggaaaaaaaattccccatgtattatatttattgacgaaatagatgctgttggaagaagtaggggtgcaggtttaggtggcggaaatgatgaaagagaacaaacactaaatcaattattagtagaaatggatggttttgatactaatgaaggagtgataataattgcagcaactaatagacccgatgtccttgacccagctttattaagacccggaagatttgatagacaagttgtagtatctaatccagatataatcggaagagaaaaaattttaaaagttcacgttaagaaaataa

SEQ ID NO: 275415 - DNA, 920 bp, Unknown
  Bacterial polypeptide expressing nucleotide sequence isolated from the Sargasso Sea
aatgcttttattaattgccgtatggattttctttatgagacaaatgcaaggaggaaaaggtggagccatgggctttggaagatcaaaagcaaaaatgatgaatgaagtaaaaggtaaagtgacttttaatgatgttgctggtgttgaagaggctaaagaagaagtagaagaagtagtagaatttttaaaagatccaagaaaattcagtaggctaggtggaaagatacctagaggatgtttattagtgggtcccccaggtacaggaaaaacattattagcaagagcaattgctggagaggccggagttccattctttacgatttctggatcagattttgttgaaatgtttgtcggtgttggagcttcaagagtcagagatatgtttgaacaaggtaaaaaacattctccatgtataatcttcattgacgaaattgatgctgtagggagaagtaggggtgcaggtcttggtggcggaaatgacgaaagagagcaaactcttaatcagctattagttgagatggatggttttgatactaatgaaggtgtaattattattgctgctactaatagaccggatgtgttagatccagcccttttaagaccaggaagatttgatagacaagttgttgtttcaaatccagatctaatagggagagaaaagattttaaaggtccacgcaaagaaaatatcaatggcacccgacgttaatttaagaacagtagcaagaggaacacctggattttctggagcagatttagcaaacctcgtaaatgaggctgcattgttggctgcaagaaaaaataaaaggattgtgacatatcaagaatttgaggaagccaaagataaagtaatgatgggatctgaaagaagatctatggttatgtcagaagaagagaaaaaattaactgcttatcatgagg

SEQ ID NO: 275416 - DNA, 872 bp, Unknown
  Bacterial polypeptide expressing nucleotide sequence isolated from the Sargasso Sea
agcatttctgcatctcctttagaagaaaaaatgccttcacttttgggagttcttctttcgtggtttccaatgctactactaatagctgtttggatattttttatgagacagatgcaaggaggaaaaggtggggcaatgggttttggaagatctaaagcaaaaatgatgaatgaattaaaaggaaaagtaactttcaatgacgtagctggagtcgaggaggcaaaagaagaagtggaagaagttgtggaatttttaaaggatccaaaaaaatttagcagacttgggggaaaaattcctagaggatgtttgttggttggtcctccaggaacaggaaaaacattattggctagagccatagcgggtgaagctggagttccattttttaccatatcgggttcagattttgttgaaatgtttgtgggagttggtgcttcaagagtgagagatatgtttgaacaaggaaagaaacattctccttgtataatatttatagatgaaattgatgcagttggaagaagtagaggagctggcttaggtggtggtaacgatgaaagagaacaaactttaaaccaacttctagtagaaatggatgggtttgatactaatgaaggtgtaattattattgcggcaacaaatagaccagatgttttagatccagcacttttaagaccaggaagatttgatagacaggtagttgtttcaaatccagatattcttggaagagaaaaaattcttaaagtacatgctaaaaaaatttcaatggcaccagatgtaaatttaagaacagtttgcagaggtactccaggtttttcaagtgcggatttagcgaatttagttaatgagtctgctttattagcagcaagaaaaaataa

SEQ ID NO: 275417 - DNA, 834 bp, Unknown
  Bacterial polypeptide expressing nucleotide sequence isolated from the Sargasso Sea
tgctaattcgtttgcttcaatcagtcttttcctgatttttatattagctatagttttaatcttgaggagtacatctaaattagcttcaagagcctttggttttagcaaaaatcaggctaaatttttaactatcgatgatgtagatacgagattcgatgatgtggctggtgtccctgaagcagcagaggaattaaaagaagttataacttttttaaacgaaccaaaaaagtttgaaaatcttggagcaaaagttcctaaaggagttctcttaattggcccaccaggaacaggaaaaacattattggctaaagcaattgccggagaatcaggagtgccttttctctcaatagcggcatcagagtttgtagaactttttgttggtgttggtgcaagtcgagtccgagatctattcgctaaggccaaggaaaaatctccttgtataatatttattgatgaaattgattctattggaaggcaaagaggatcagggatcggaggtgggaatgatgaaagagagcaaactcttaatcagcttttaactgaattagatggttttgctgataattcaggaattattgttttagcagcaacaaatagaccagatattttggattcagcattattaagaccaggaagatttgatagaaaaatagaagtaatgcttccagatttagatggaagaaaaaaaattctttctgttcactctctttcaaaaccactatcaagcaatgttgatttaggatattgggcttcaagaacaattggattttctggagcagatcttgccaatttgatgaacgagagtgctatacactgtgcaagagatgaatcaaa

SEQ ID NO: 275418 - DNA, 856 bp, Unknown
  Bacterial polypeptide expressing nucleotide sequence isolated from the Sargasso Sea
actagaagataaaatgccctctcttttaggaatattgctttcttggtttccaatgttattgttaataggtgtttggattttctttatgcgtcaaatgcaaggaggcaaaggcggagctatgggttttggaagatctaaggcaaaacttttaaatgaagctcaaggtaaagtaactttcaatgatgtagcaggagtagaagaggcaaaagaggaagttgaagagatagttgaatttttaaaagatcctaaaaaatttagtagactgggaggcaaaattcctaaaggggcattattaatcggccctccaggaacaggaaaaactttattagctaaggcaattgcaggtgaagcaaatgtaccttttttttctatttcaggatctgattttgttgagatgtttgttggagttggagcatcaagagttagagatatgtttgaacaaggaaaaaaacattcaccatgtataatatttattgacgagattgatgctgtaggaagaagtagaggagcaggactcggtggaggcaatgatgaaagagaacaaactctaaaccaacttttagtagagatggatggttttgatactaatgagggaataattttaattgcagctactaatagaccagatgttttagatccagctttattaagacccggtagatttgatagacaggtagttgttgctaaccctgatattattggaagagaagcaattttaaaagttcatataaaaaaaataagtattggaccagatgtaaaattaagaaccattgcaagaggaactcctggattttccggagcggatttagcaaatctaattaacgagtctgctttattagcagcgagaaaaaacaaa

SEQ ID NO: 275419 - DNA, 799 bp, Unknown
  Bacterial polypeptide expressing nucleotide sequence isolated from the Sargasso Sea
tatgaattttaaaaatttagtgatgtgggcaattatagtcttactttcagtagggttatttaatatgtttcaagatcctaaaaggataaactctgaaaaaaacaaacttcctttctctacttttatggctgaagtagaagcgggaagggtagttgaagttcaaattcaaggaaataatatttctggagttttatctgatggaaaaaattttaatacttattctccaaattaccccaacttagttgagaaattatctgaacaaaacatcagcatagttgctactcctcttgaagataaaatgccttctcttttaggaatcttactttcttggtttccaatgttattattaattggagtttggattttctttatgcgtcaaatgcaagggggcaaaggtggagccatgggttttggtagatcaaaagcaaaactattaaatgaagcacaaggaaaagttacttttaacgatgttgctggagttgaagaagcaaaagaggaagttgaagaaattgttgaatttttaaaagatccaaaaaaatttagtagacttggtggaaagatacctaaaggagctttattgattggtcctccaggaactggaaaaactttattagcaaaagcgattgccggtgaagcaaatgttccattcttttctatttctggctcagattttgtagaaatgtttgtaggtgtaggagcttctagagttcgagatatgtttgagcaaggaaaaaaacattcaccttgtataatttttatagatgaaatcgatgcagtgggaagaagtagaggagccggt

SEQ ID NO: 275420 - DNA, 844 bp, Unknown
  Bacterial polypeptide expressing nucleotide sequence isolated from the Sargasso Sea
attatgaatttcaaaaatctagcaatgtggggaataatagtggttctaactattggcctatataatatgtttaaaaatccccaaggatcagtaagtcaaaaaaataatatcatattttcagaatttttaacccaagtagataatggtagagttgttcaagttgaaattcagggaaaaaatataaaaggagtaatgtcaaatggagagctatttaatacgtatgctcctgacgatccaaatttaattcaaaaattaaatgataaaggtgtaagcatctcagctagcccaattgaggaaaaaatgccctcattatttggtgtacttttatcatggtttccaatgttacttctaatagctgtatggatttttttcatgagacaaatgcagggtggaaaaggtggagcaatgggtttcggaaaatctaaagctaaaatgatgaatgaagtaaaaggaaaagttacatttaacgatgtagccggagttgaggaagcaaaagaagatgtagaggaggttgtagaatttttaaaagatcctaagaaatttagtagacttggtggaaaaatacctcgtggttgtcttttagtcggacctccaggaacaggtaaaacattattggcaagagctatagctggagaagctggagttccattttttactatatctggttcagactttgttgaaatgtttgttggtgttggtgcttcaagagtaagagatatgtttgaacagggaaaaaaacattctccatgcattatatttattgatgaaatagatgctgttgggagaagtagaggagcaggtctaggaggtggaaatgatgagagagaacaaacacttaatcagt

SEQ ID NO: 275421 - DNA, 951 bp, Unknown
  Bacterial polypeptide expressing nucleotide sequence isolated from the Sargasso Sea
aatgttgctattaattgctgtatggattttctttatgagacaaatgcagggtggaaaaggtggcgcaatgggttttggaagatccaaagctaaaatgatgaatgaacttaaaggaaaagttacttttaatgacgtcgctggtgttgaggaagcaaaagaagaagttgaagaaatagtagagtttttaaaagatccaaaaaaatttagcagacttggtggcaaaattccgagaggagctttactagttggtcctccaggaactggtaaaactttgcttgcaagagctatagcaggtgaagccggtgtcccgttttttacaatttcaggttctgattttgtagaaatgtttgttggagtaggagcatcaagagtaagagacatgttcgagcaaggaaaaaaaaattcgccatgtattatttttatagatgaaatagatgcagttggaagaagtagaggggcaggcctaggaggaggaaatgacgagagagaacaaactcttaaccaattattagttgagatggatggctttgatacaaatgaaggtgttattataattgctgcaactaatagacctgacgtgttagatccagctctattaagaccaggtagatttgacagacaagtagtagtttctaatccagatattattggaagagaaaaaattttaaaggtccacgttaaaaagattaaaatggcgcctgatgtaaatcttagaacaatagcaagaggaacacctggtttttcaggtgcagatttagcaaatcttgtaaatgaagcagctttattagcagctagaaaaaataaaagaattgtaacattaatggaatttgaagaagctaaagataaggtaatgatgggtgcagagagaagatcaatgggtatgactgaagatgaaaaaaaactcacagcctaccatgaaggcggacatgcgttagtatcatttaatatgcc

SEQ ID NO: 275422 - DNA, 801 bp, Unknown
  Bacterial polypeptide expressing nucleotide sequence isolated from the Sargasso Sea
cgcaacgccgtgatcgaagccgtcgatcccgacctcgacaaccgcgttcaacgcctgcgcgttgaccttcctggtctggcccctgagctgatcaacacgctgaagaccgaaggcatcagctttgatattcatccgccccgcacggcacctccggccctcggcgtgctgggcaatctggccttcccgctgctgctgatcggtgccctgatcttcctggcccgtcgcaacagcaacatgcctggcggccctggacaggccatgcagttcggcaagagcaaagcccgcttcatgatggaagcggagaccggcgtcatgtttgatgacgtggccggcgtcaccgaagccaagcaggaactccaggaagtggtcaccttcctgaagcagcccgagcgattcacctcagtgggtgctcagattccccgcggcctcctgctggtcggccctcccggcaccggcaaaacccttctggccaaggccattgccggtgaggcgggcgttcccttcttttccctttctggttctgagttcgttgagatgttcgttggcgtgggtgccagccgcgtccgcgatctgttcaagaaggccaaggagaacagcccttgcttgatcttcatcgacgaaattgatgccgtcggccgccagcgcggtgccggtatcggtggaggcaacgacgaacgcgaacagacgctcaaccaactcctgacggagatggatggcttcgaaggcaacagcggcatcatcatcattgccgccaccaaccgccccgacgttctggactcagctctgatgcgtcccggccgt

SEQ ID NO: 275423 - DNA, 823 bp, Unknown
  Bacterial polypeptide expressing nucleotide sequence isolated from the Sargasso Sea
ggttttagaaatatagttatatggctgtcattggatttattaatgatggctttatacaatgtattccagtcttctaatgaaacaagaggcgtgagcgaagtaagctacaccactctgatttcagaagtctccggtggaaatgttagggatgtagagatatctggtgatgaaattactgggactttcaatgatggctcaaggttccattcctattcacctgaagaccctcagttcatagagagattaaatgaacaaggcgtaataataaatgtcaagccggtaaggcaaagtgcgctattctccatttttgtctcatggttcccaatgttattacttattgcagtttggatatttttcttaaagcaaatgcaaggtggtggacgtggcgctatgggtttcggaaaatcgaaggcaaaactacttaacgagaagaaaggtaaggtcacctttagtgatgtcgcaggcatcgatgaggcaaaggaagatctcgaagaaattgttgaatttttaaaagatccgcgtaagtttcaatatttgggtggtaaaatcccaaaaggcgcattacttgtcggacctcctggtactggtaaaacactattagctagggctatagctggtgaagctggtgtacctttttttacaatttctggttcagattttgttgaaatgttcgttggtgttggagccagtagagtgcgtgatatgtttgaacaagcaaaaagaagcgcgccatgcatcatattcatagatgagatagatgctgttggaagacacagaggcgcaggactgggcgggggtaatgatgaaagagagcaaacattaa

SEQ ID NO: 275424 - DNA, 871 bp, Unknown
  Bacterial polypeptide expressing nucleotide sequence isolated from the Sargasso Sea
ccgagaggagcattattgggttggacctccaggaacaggtaaaacattattagctagagctattgcaggtgaggcaggtgttccttttttcacaatttcaggctctgattttgtcgaaatgtttgttggggttggcgcttctagagtaagagatatgttcgagcaaggtaagaagaattcaccatgcattatatttattgatgagattgatgctgtaggaaggagtagaggtgctggtttaggtggaggaaatgatgaaagagaacaaacattaaatcaacttcttgtagagatggatggtttcgatactaatgaaggtgtgataatcatagcagccacaaacagaccagatgttttagatccagctttattaagaccaggaagatttgacagacaagtagttgtctcaaatccagatataattggaagagaaaaaatattaaaagtacatgttaaaaaaattaagatggctccagatgtaaatttgagaactattgctcgaggaactccaggtttttctggtgctgacttagcaaacttagtaaacgagtctgccttgctggctgcacgaaaaaataaaagaattgtaactttaaatgagttcgaagaggctaaagataaagtcatgatgggagcagaaagacgttcaatggtgatgactgaggatgaaaaaaaattaacagcatatcatgagggtggacacgctttagtttcatttaacatgcctagttatgatccaatacataaagccacaattatacctagaggccgagctttaggtatggtaatgaacttgccggaaagagataaacatggtcactcaattaaatatttaaaagcgcgattagcagtatgctttggtggcagggtg

SEQ ID NO: 275425 - DNA, 616 bp, Unknown
  Bacterial polypeptide expressing nucleotide sequence isolated from the Sargasso Sea
aatgttactgctaattggagtgtgggtattttttatgcgtcaaatgcaaggcggcaaaggtggtgctatgggttttggtaaatctaaggctaaactaatgacggaaatgaaaaataaaattacatttaatgatgtagcaggaatagatgaagccaaagaagaagttgaagaagtagttgaatttttaaaagaccctaaaaaatttagaagattgggagggaagattccaaagggagttttggttattggacctccaggaacaggtaaaactttattggctagagctatagctggtgaagcaagtgttcccttttttaccatttcaggttcagactttgtagaaatgtttgtgggagtaggagcttctagagttagagatatgtttgaaacaggtaaaaaaaatgcaccatgcataatttttattgatgaaatcgatgccgtcggaagaagtagaggagcaggacttggtggtggtaacgatgaaagggaacaaacattaaaccaaatgttagttgaaatggatggatttgatacaaatgaaggagtgataattattgcagcaacaaatagacccgatgttttagatccccgctttaatgagaccaggaagatttga

SEQ ID NO: 275426 - DNA, 926 bp, Unknown
  Bacterial polypeptide expressing nucleotide sequence isolated from the Sargasso Sea
caaaagattagatttttctacactgaaacctgggacaagagtagcactgaatcaagatactctttctgtagttgaggtactctcagattcttgggaccccttggtaagcaacgcagagatagttgaaacccctaaaatcgaatattcacacatcggtggtctggacaaccaaattagagaattaagagaggcaatagagctcccatttgaaaacccggatgccttctcaaatttaggcatagaaccgccaaaaggtgttctcctaacaggtccaccaggaactggaaaaaccatgctcgcaaaggccgtagctaactcaactaatgcaacatttttggggttagtgggagctgaattagcccagaaatacattggagaaggaggcaggatggtcagggagctatttgaaatggcaagacagaaagctccagcaattattttcatagatgaaatagactcaatcggctcaaaaagactcgacacagctacttctggtgatagggaggttcagaggactttgatgcagctcctttcagagatagacggattcgagagcttggacaatgtgaaggtaatagcagcgactaacaggccagaactattggacgccgctctattgaggcctggccgttttgataggattattgagattccaatccccgacttagaagctaggaaaacaatattctcggtgcacacaaagtcaatgccactggcaaagaatgtaggggtaaaaacactggcttcgttgactgatgggtttagcggggctgaaataaagtcagccgtggtggaagcagggatttctgctatttctagcggaagaaaatcagtaagaaagtctgattttatttctgccataaagaaggttgaagcgaatcgcaagcaatccaaagatagtaattccgaagggctatattcctaag

SEQ ID NO: 275427 - DNA, 397 bp, Unknown
  Bacterial polypeptide expressing nucleotide sequence isolated from the Sargasso Sea
gatgaatgaattaaaaggcaaagtaacttttaatgatgtagctggagttgaggaagcaaaagaagaagttgaagaagttgtagaatttttaaaagatccaaaaaaatttagtagattgggtggcaaaattccaagaggatgtttattagttgggccaccgggtacaggaaaaacattattagccagagctattgctggagaagcaggagttcctttttttacaatttcgggatctgattttgttgagatgtttgttggagtaggcgcttcaagagtaagagacatgtttgaacaaggtaaaaaacattctccttgtataatttttatagatgagattgatgcagtgggtagaagtagaggagcaggactggaggaggaaacgatgaaagagagcaaa

SEQ ID NO: 275428 - DNA, 835 bp, Unknown
  Bacterial polypeptide expressing nucleotide sequence isolated from the Sargasso Sea
ggtctatataatatgtttaaaaatccacagaacgcagtgggacaaagtaataatataatattttcagaatttttatcagaagtagacaatggaagagttgttcaagttgaaatccagggaaataaaattagaggaataatgtctaatggtgaaaagttttcaacttattcacctaacgatcccaacttaattgaaaaactttcaaataaaggagttagcatttcagcatctcccatagaagaaaaaatgccttcactacttggtgttcttctatcttggtttccaatgttattgttaatagcggtttggatattttttatgagacaaatgcaaggtggaaaaggtggagccatgggatttggaaaatccaaagcaaaaatgatgaacgaattaaaaggcaaagtgactttcaatgatgttgctggagttgaagaagcaaaagaagaagtggaagaagttgtagaatttttaaaagatccaaaaaaatttagtagacttggaggaaaaatacctagagggtgtttattagtaggcccgcctggaacaggaaaaactttgttagcaagggctatcgcaggagaagcagctgtaccattttttacaatatcaggttcagattttgttgaaatgtttgtaggagtcggcgcttcaagagttagagatatgtttgaacaaggaaaaaaaaattccccatgcataatatttattgatgaaattgatgcagttggaagaagtagaggggcaggacttggtggtggaaatgatgaaagagaacaaactcttaatcagttacttgttgaaatggatggttttgacacaaatgaaggggtgtaat

SEQ ID NO: 275429 - DNA, 967 bp, Unknown
  Bacterial polypeptide expressing nucleotide sequence isolated from the Sargasso Sea
tagtataaatgcatctcctgttgaagataaaatgccttctttgttgggagttcttttgtcatggtttccaatgttacttctaataggtgtatggatatttttcatgcgtcaaatgcagggtggcagaggcggcgccatgggatttgggaaatctaaagctaaacttttaaacgaagctcaagggaaagtaacttttaatgatgttgccggtattgaagaggcaaaagaagaagtagaagaaattgtagattttttaaaagacccgagaaaatttagaaaattaggaggaaaaattccaaaaggagcgttactcattgggcctcctggtacaggtaaaacgcttcttgcaaaagcgattgcaggagaggcgaatgtaccgttttttacaatttcaggatctgattttgtagaaatgtttgtaggagttggagcttcaagagttagagatatgtttgagcaaggaaagaaacatgcaccatgtattatttttattgatgaaatagatgcagttggaagaagtagaggcgcaggtttaggtggaggtaatgatgagagggaacaaacattaaaccagcttttagtcgaaatggatggttttgatactaatgaaggtatcatattaatagctgcaacaaatagaccagacgttttagatccagctttattaagaccaggtagatttgatagacaggtggtagtgcctaatcctgatatcttaggaagagaagcgattttaaaagttcatgttaaaaaaataaatacaggtccagatgtaaaacttagaactattgcaaggggaacacctggtttttctggagcagaccttgcaaatttaataaatgaatctgcattattagctgcaagaaaaaacaaaagagttgtaacaatgactgatattgaagaagcaaaagacaaagtaatgatgggcgctgaaagaagatcaatggttatgacagaagaagaaaag

SEQ ID NO: 275430 - DNA, 835 bp, Unknown
  Bacterial polypeptide expressing nucleotide sequence isolated from the Sargasso Sea
atgcaaggaggaagaggcggagcaatggggtttggaagatcaaaagctaaacttttatctgaagctagaggaaaaataacatttaatgatgttgctggaattgatgaagctaaagaggaagttgaagaaatagttgaatttttaagagatcctagaaaatttagaagattaggaggaaagattccaaaaggtgcacttttaataggaccaccaggaacaggaaaaactttgttggctagagctatagcgggtgaagcagatgtacctttctttacaatctctggttcagactttgtagaaatgtttgttggagttggagcttcaagagttagagatatgtttgatcaaggaaagaaaaatgcgccatgtataatttttatagatgaaatcgatgctgttggaagaagtagaggtgcaggtctcggcggtggtaatgatgaaagagaacaaacattaaaccaacttcttgtagagatggatgggtttgataccaatgaaggagtaattttaattgcagcaacaaacagacctgacgttttggatccggcccttttaagaccaggaagatttgataggcaggtagtcgtaccaaatccagatattattggccgagaagcaattttaaaagttcatattaaaaaaattgttattggtcccgatgtaaagttgagaacaatagccagaggtactccaggtttttctggagcagacctagcaaatttagtaaatgaatctgcattgttagcagcaagaaaaaataaaagaattgtaaccatgtcagatattgaagaagcgaaagacaaagtaatgatgggagcagagagaagatcaatgg

SEQ ID NO: 275431 - DNA, 924 bp, Unknown
  Bacterial polypeptide expressing nucleotide sequence isolated from the Sargasso Sea
aatgttgttattaatagcagtttggatattttttatgaggcaaatgcaaggaggaaaaggtggagcaatgggatttggaagatccaaagccaaaatgatgaatgagttaaagggtaaggtgacttttaatgatgttgcgggcgttgaagaggcaaaagaagaagtagaggaggttgtagaatttttaaaagatccaagaaaatttagtagattgggaggaaagataccaagaggttgtttattagttggtccaccaggaacaggtaaaaccttattagctagagcaattgctggagaagctggagttcctttttttactatatctggatctgattttgttgaaatgtttgttggagtaggtgcgtcaagagttagagatatgtttgaacaaggaaaaaaacatgcaccttgtataatttttattgatgagatagatgcagtagggagaagtaggggcgctggcttaggaggtggaaatgatgagagagaacaaactttaaaccagctattagttgaaatggatggttttgatacaaatgaaggagttataataattgcagcaacaaatagacccgacgtattagatccagctttattaagacctggaagatttgatagacaagtagttgtttcaaatccagatataataggaagagaaaaaatattaaaagttcatgcaaaaaaaatatcaatgtcatcagatgtaaatttaagaactgttgctcgtggtaccccaggtttttcaggagcagatttggcaaatttagttaatgaagcagctttactagcagcaagaaaaaataaaagaattgtaacaaatgatgaatttgaagaagctaaagacaaagtaatgatgggcgctgaaagaagatctatggttatgtctgaagaagaaaaaaagttaacagcttatcacgaggctgg

SEQ ID NO: 275432 - DNA, 804 bp, Unknown
  Bacterial polypeptide expressing nucleotide sequence isolated from the Sargasso Sea
taatgaagctcatggtaaagtcacttttaatgatgttgctggcgttgaagaagctaaagaagaagtagaggagattgtagagtttcttaaagacccaaaaaaatttagtagactcgggggaaaaattcctaagggagcgcttttgataggacccccaggaacaggtaaaactttattagcaaaagcgatagcaggtgaagctaatgtaccttttttctctatttcaggatctgactttgtagaaatgtttgttggagttggtgcatccagagttagagatatgtttgagcaaggaaaaaaacattctccgtgcattatatttatagatgagatcgatgcagttggcagaagcagaggagcaggcttaggtggaggtaacgatgaaagagagcaaactttaaatcagttacttgtagaaatggatggctttgatactaatgaaggaattatattaattgctgctacaaacagacctgatgttttagatccggcattattaagaccaggaagatttgacagacaagtagttgttggaaatccagatattgttggaagagaggcaattttaaaagtacatgtaaaaaaaattagcactggtccagatgtaaaattgagaacaatagcaaggggaacgccaggtttctccggagctgatctagccaacttaataaatgagtcggcattacttgctgcgagaaaaaataaaagagttgtaacaatgtctgatattgaagaagctaaagataaagtcatgatgggtgctgaaagaagatctatggttatgtctgaagatgaaaaaaaatt

SEQ ID NO: 275433 - DNA, 796 bp, Unknown
  Bacterial polypeptide expressing nucleotide sequence isolated from the Sargasso Sea
atgaatttaaaaaatttagctatgtgggcaataatagttgtattgaccgtaggtctatataacatgttcaaaaatccacagggatcaattggtcaaaataataataatattatcttctcagaatttttatcagaagttgataatggaagagttgtgcaagttgaaattcagggaaaaaatataaaaggtattatgtccaatggcgagaagtttattacttatgcgcctgatgatccaaacttaatacaaaaactgagcgataaaggcgttagtatttcagcaagtcctttagaagaaaaaatgccttcattgttgggaattttactttcttggtttccaatgcttttactaattgcagtttggatattttttatgagacaaatgcaaggtggaaaaggtggcgcaatgggttttggtagatctaaagcgaaaatgatgaatgaaataaagggcaaggttacttttaatgatgttgcaggagtcgaagaagctaaagaggaagttgaagaagttgtagaatttttaaaagatccaagaaagtttagtagattaggaggaaagataccaagaggatgtttgttagtagggcctcctggaactggaaaaactttattagcaagagcaattgcaggagaggcaggagtgccattctttactatttctggttctgatttcgtcgaaatgtttgtcggtgttggagcatctagagtacgagatatgtttgagcaaggaaaaaaacattcaccgtgtattatttttattgatgaaatagatgcggtggaagaagcagaggagc

SEQ ID NO: 275434 - DNA, 883 bp, Unknown
  Bacterial polypeptide expressing nucleotide sequence isolated from the Sargasso Sea
agttgtgaaagttgaaattcaaggtaacaatataaaaggagttttatctgatggttctgtgtttaccacatattctccaaatgatcctaatcttatcgagaaactttcaaatagtggggtaagtatatcagctttgccgatagatgaaaaaatgccatcgctttttggagttcttttgtcatggtttcctatgcttctactgattgcggtttggattttttttatgagacaaatgcagggtggcaaaggtggagctatgggttttggtcgctcaaaagcaaaaatgatgaatcaacttaaaggaaaagtgactttcaatgatgttgcgggaattgaagaagcaaaagaagaagttgaggaagttgtcgaatttttaagagacccaaaaaaatttagtagacttggaggaaaaataccaagaggctgtttgcttgtaggacctccgggaactggaaagacattattagcacgagcaattgctggagaagcagatgtacctttttttacgatttcaggatctgatttcgttgaaatgtttgttggagttggcgcatctagagttagggatatgtttgaacaaggaaaaaaacattcaccttgtattatttttatagacgaaattgatgctgtaggaagaagtagaggagctggtcttggtggaggtaatgacgaaagagaacaaactttaaatcagttattagttgaaatggatggttttgatactaatgaaggtgtaataattattgcagctacaaatagaccagatgttttagatccagcgcttttaagaccaggaagatttgatagacaagtagtagtttcaaatcctgatattattggaagagaaaaaattttgaaagttcatgtcaaaaaaatttcaatg

SEQ ID NO: 275435 - DNA, 874 bp, Unknown
  Bacterial polypeptide expressing nucleotide sequence isolated from the Sargasso Sea
caatgatgttgctggagtagaagaggcaaaagaagaggtagaagaaattgttgaatttttaaaagatcctaaaaaatttagtagacttggtggaaagataccaagaggtgctttgcttgtaggacctccgggtacaggaaaaactttattagcaagagctattgcaggtgaagcaggagttcctttctttactatatcaggttcagattttgttgaaatgtttgtaggtgttggtgcatcaagagtaagggatatgtttgaacaaggtaaaaaaaattctccttgtattatatttattgacgagattgatgcagttggaagaagtagaggtgcaggcttaggtggtggtaatgatgaaagagagcaaacattaaaccaattattagtagaaatggatggcttcgataccaatgaaggagttatcataattgcagcaacaaataggccagatgtacttgatcctgcattattgcgacctggaagatttgacagacaggtagttgtttccaatccagatattatcggaagagaaaaaattctaaaagttcatgtgaaaaaaattaaaatggcaccagatgttaatttaagaactatcgcaagaggaactccaggcttctctggagcagatttagctaacttagtaaatgaagctgctttattggctgctagaaaaaataaaagaattgtaactttattagagtttgaagaggcaaaagataaagtaatgatgggtgctgaaagaagatcaatggttatgactgaagatgaaaaaaaacttactgcttatcatgaaggtggccatgctttagtctcatttaatatgcctagttatgatccaattcataaagccacaattataccaagaggaagagcg

SEQ ID NO: 275436 - DNA, 926 bp, Unknown
  Bacterial polypeptide expressing nucleotide sequence isolated from the Sargasso Sea
ctctgctgctaattcatttgcatcaataagccttttcctgattttcatattatctatagttttaatcttgaggagtacatcaaaattggcttctagagccttcggttttacaaaaaatcaggctaaatttgtaacaattgatgatgtagaaacgagattcgatgatgtagctggtgtccctgaagccgctgaagaattaaaagaggtaataacttttttaaaagaaccaaagaaatttgaaaatcttggagcaaaagttcctaagggtgttcttttaattggcccaccaggaacaggtaaaacgttattggctaaagcaattgctggtgaatcaggagtgccttttctctcaatatcggcttcagagtttgtagaactttttgttggtgttggagcaagccgagttcgggatctgttctctaaggctaaggaaaaatctccttgtattattttcattgatgaaattgattccattggtaggcaaagaggttctgggataggaggtggaaatgatgaaagagaacaaacccttaatcagcttctaactgaattagatggttttgctgataattctgggattattgttttagcagctacaaatcgaccagatattttggatgcagcattattaagaccaggtagatttgatagaaaaattgaagtaatgcttccagatttagatggaagaaaaaaaattctttcagttcactcactttctaaaccactttcaagcgaagttgacttaggatattgggcctctagaacagttggattttcgggagcagatcttgctaatttgatgaacgagagtgctattcactgtgcaagagacgaatctaaattaatcagtgatcttcatatagaaaatgctcttgataaaattaccattggcctgagaagctcattaataacttctcctaatatga

SEQ ID NO: 275437 - DNA, 874 bp, Unknown
  Bacterial polypeptide expressing nucleotide sequence isolated from the Sargasso Sea
ccccggtccaccccgccggtgcttggaattctgggcaacctgctcttccccctgctgctcataggatctctgatcttcctggctcgccggtccaacaacatgcctggtggtcccggtcaggccatgcagttcggcaagagcaaagctcgtttctcgatggaagctgagaccggcgtgaaatttgacgatgtcgccggtgtggaggaagccaagcaggacctcgaggaggtggtgacattcctcaagcaacctgagcgcttctcagcgctgggtgcttccatcccccgcggtgtgctcctggtgggccctcctggcacgggtaaaaccttgcttgccaaggccatcgccggtgaggcggatgttcccttcttctccctctccggatctgaattcgttgagatgtttgttggcgtcggtgcaagccgggtgcgcgatttgttcaagcgagccaaagagaatgcgccctgcctgatcttcattgatgaaatcgatgcggtcggtcgtcagcgcggtgccggcattggcggtggcaatgatgagcgtgagcagaccctcaaccagctgctgaccgaaatggacggctttgagggcaacagcggcatcatcattctcgcggccaccaaccgtcctgatgtgctggattcggccctgatgcgtcctggtcgctttgaccgtcaggtgaccgtggatgctcctgacatcaaaggtcgcctttcgatcctcaaagtccactcccgcaacaagaagctggccgatgatgtcagcctcgaggtgattgcccgccgcactcctggctttaccggtgctgatctggccaatctgttgaacgaggctgccattctcacggcacgccgccgcaaggatgccaccactt

SEQ ID NO: 275438 - DNA, 767 bp, Unknown
  Bacterial polypeptide expressing nucleotide sequence isolated from the Sargasso Sea
attggaggaaatcgtcgagttcctcaaggaccctcagaaatttcaacgcctgggcggcaaaattccaaagggatgcttgcttgttgggccaccaggtaccggtaaaaccctactcgcccgcgccatcgccggagaggccaatgtgcccttcttcaccatttccggctccgacttcgtggaaatgttcgtcggtgtcggcgcgtcgcgtgttagagacatgttcgagcaggggaagaagaacgcaccctgcattatcttcattgacgaaatagacgctgtcggccggcaccgaggtgcgggcctggggggcgggaatgatgagcgggaacagacgctcaaccagttgctggtagaaatggatggattcgaatcgaacgagggcgtaatcttgatcgccgctaccaaccgtccagatgttctcgaccctgcgctgctgcgtccgggacgttttgaccgccaggtcacggtgcctaatccggatattctggggcgagagaagattctcaaggtgcacatgaagaaggtgcctctggcgcctgacgtagacgcccgagtgattgctcgcggcactcccggcttctctggtgctgatttagccaacctcgtaaacgaggcggcgctattagcggcccgcgttggcaagcgggtcgtcactatgacggaattcgaggatgccaaggacaaggtcctgatgggtaccgaacgccggtctatggtgatgagcgaggacgaaaagaaactgacagcttatcatgaagctggccacg

SEQ ID NO: 275439 - DNA, 793 bp, Unknown
  Bacterial polypeptide expressing nucleotide sequence isolated from the Sargasso Sea
gaaaaaaatgtgaatatagttgcaacaccagttgaagataaaatgccatcactattaggagttttattatcctggttcccaatgcttttattaattggagtatggatattttttatgaggcaaatgcaaggtggcagaggtggtgctatgggttttgggagatcgaaagcaaaattacttactgaagcacaaggaaaagtaacattcaatgatgttgcaggtattgaagaggcaaaagaagaagttgaagaaatagtagaatttttaaaagatccaaaaaaatttagaagacttggcggaaagattccaaaaggcgcattacttattggtccgccaggaacaggaaaaactttattagcaaaagcgattgctggtgaagcaaatgttcctttttttacgatctcaggatctgactttgttgaaatgttcgtgggcgttggtgcatctagagttagagatatgttcgaacaaggcaagaaacacgctccttgtataatatttatagatgaaattgatgctgttggcagaagtaggggagctggtttaggtggcggaaacgatgaaagagaacaaactttaaatcagttattagttgaaatggatggttttgacactaacgaaggaattattttaattgccgcaacaaatagaccagatgtattggatccagctttattaagaccaggaaggtttgatagacaagttgttgttccaaatccagacattatcggaagagaagcaattcttaaggtacatgttaaaaaaattagcactggacccgatgtaaaaacta

SEQ ID NO: 275440 - DNA, 890 bp, Unknown
  Bacterial polypeptide expressing nucleotide sequence isolated from the Sargasso Sea
atgggctttggaagatcaaaagcaaaattattatctgaagccagaggtaaagtaacctttaatgatgtagcaggaatagatgaagcaaaagaagaagtagaagaaatagtagattttttaaaagatccaagaaagtttaaaaggcttggaggagagattccaagaggtgcacttttaatagggccaccaggaacaggaaaaactttactagcgagagcaattgctggtgaagctgatgtacctttttttactatttctggatcagattttgttgaaatgtttgttggcgtcggagcatcaagagttagagatatgtttgaacaaggaaaaaaaaatgcgccgtgcataatttttattgatgagattgatgctgttggtagaagtagaggagctggacttggtggcggtaatgacgaaagagaacaaactctgaatcaactacttgtggagatggatggctttgatactaacgaaggagtcatattaatagcagcaacgaatagaccagatgttctagatcccgctttggtaagacctggaagatttgatagacaagttgttatacctaaccctgatatagtaggaagagaagcaattttaaaaattcacatcaaaaaggttagtataggacccgatgttaaattaagaactattgctagaggtaccccaggtttttctggtgcagacttggcaaatttaacaaatgaagcagcattattggctgccagaaaaaataaaagaattgttacaatgtcagatattgaagaagctaaagataaggtaatgatgggagctgaaagaagatcaatggttatgaccgaagatgacaaaaaattgactgcatatcacgaaggaggacacgcaattgttgctatgaatgaaaaggcatc

SEQ ID NO: 275441 - DNA, 836 bp, Unknown
  Bacterial polypeptide expressing nucleotide sequence isolated from the Sargasso Sea
ttttttatatattttgccttaggacttctaatcttctttggagttcagcagtacaactctacagttaacgcacctgaaagcaagtcttttacaatgttcaaaaatgaaattaactctgggtctgtagtagaagcgacaataaaagagcaatcaaatatggttgaatttaaaatagcaaatgatgaaaccctgtatcaaacagaatatccagagggttttgaaggtgaagtatttcaacttttggtagatcaagatatagtcttaaatactgatacagagcctgcaggaatccaggattatatttttgcatttttaccttggctgtttcttgtggcatttatgttttatatgttttcacaagttagatcaaatggtaatcagattatgcaatttggtaaatctaaggcaaaggagcttgatgaagaagcaccacaggtaacatttcaagatgtcgcaggtgttgaggaagccaaagaggagcttgaagagataaaggagtttttaaaatttcctgaaaaatttaatatactaggtgcaaaaattcctaaaggagttttacttgttggtcctccaggaacaggtaagacactacttgcaaaagcagtcgctggtgaagctggcgttccattttttagcatttcaggatctgattttgttgagatgtttgtaggagttggagcaagtagggttagagacttatttaaaaaagccaaagaatcatctccagcaatcatcttcatagatgaaattgatgcagttggaagaatgaggggtgctggtcttggaggtggacatgatgagagagaacaaaccttaaaccaactactagttgaaat

SEQ ID NO: 275442 - DNA, 942 bp, Unknown
  Bacterial polypeptide expressing nucleotide sequence isolated from the Sargasso Sea
gatgtcggtgttcaatagcttcagccccagcgataccaccagtcgccagctggactattccagcttcgttaaagaagtgacccaagagcagatccgtgaagtgcggatggatggcaaggtcattaatggcgtcaagcgcaccggtgaacgcttcaccaccatcatcccggcgccggatccccagctgctcaacgacatgctcaatcacaatgtcaaagtgatgggcgagaagccggaagagccgtctctgctgacgtccatcttcatctcctggttcccgatgctgttgctgatcggtgtctgggtcttcttcatgcgtcaaatgcagggcggtggtggcaagggtgccatgtcgttcggcaagagcaaggctcgcctgatgagtgaagatcagatcaagaccacctttgccgacgtggctggctgtgacgaggccaaggaagaggtgaaggagctggtcgactatctgcgcgatccgagcaagttccagaaactgggcggcaagatcccgaccggcgtgctgctggttggtcctcccggtaccggtaagaccctgctggccaaggccattgcgggcgaggccaaggtccccttctttaccatttccggttcagatttcgtcgaaatgttcgtgggtgtcggtgcctcccgggtgcgtgacatgttcgagcaggccaagaagtcttctccctgcatcatcttcattgacgagattgacgcggtcggccgccagcgtggcgccggtctgggcggtggtcatgacgagcgtgagcagacgctgaaccagatgctggtcgaaatggatggctttgaaggcaatgaaggcatcatcgtcatcgccgccaccaaccgtcctgacgtactggacccggccttgctgcgtccgggtcgtttcgaccgccaggtcgtggtcggtctgccggatgtgcgtggtcgcgaaca

SEQ ID NO: 275443 - DNA, 808 bp, Unknown
  Bacterial polypeptide expressing nucleotide sequence isolated from the Sargasso Sea
aataaagttacttttaatgatgtggctggaattgatgaggcaaaagaggagcttgttgaaattgttgagtttttaaaagatcctagaaagtttcaaaaacttggcggtagaattccaaaaggcgccctactaattggccctccaggaacgggaaagaccttattagccagagcagtagcaggtgaggccggtgtacctttctttacaatctcgggttctgattttgttgaaatgtttgttggtgttggagcatctcgagttagggatatgttcgagcagggaagaagaaacgcgccatgtataattttcattgatgaaattgatgccgttggcagaagtcgtggagcaggtcttggtggtggtaatgatgaaagagaacagacactgaatcagattctagttgagatggacggatttgatactcaggaaggtattattttggttgccgcaactaacagaccagatgttcttgatccagctctattaagaccaggtcgttttgacaggcaggttgttgttcctaatccagacatcttaggcagagaagcaattctgaaagttcatattaaaaaaatctctgtcgcgcccgatgtagatattagaacaatagcacggggaacacctggcttttctggtgcagatctagctaacattgtaaatgaagcagcactgttggcagcgagaaaaaataagaaaattgttactatggtagattttgaggaagcaaaagataaagtaatgatggggtcagaaagaagatctcttgttatgagccaagaagaaaaagaacttaccgcttaccacgaag

SEQ ID NO: 275444 - DNA, 800 bp, Unknown
  Bacterial polypeptide expressing nucleotide sequence isolated from the Sargasso Sea
agtaaaccaagttcccttttcgagttttttaaaaaatcttgatgatggcagaattgtccaagtagaaattaaaggaaatgtaattgatggagtgttatccgatggaagcacttttagtacttacgcaccaaatgatcctaatctagtagaaaagctaacctcaaaaggtgtgagcataacggcaactccagtcgaagataaaatgccgtctcttttaggaattcttttatcctggtttccaatgcttttgcttataggggtttgggtattttttatgcgccaaatgcaaggaggcaaaggtggagccatgggctttggcagatcaaaagcaaaacttttatctgaagcaagaggaaaagtaacttttaacgatgttgcaggaatagatgaagcaaaagaagaagttgaagaaatagtagaatttttaaaagatccgagaaagttcagaaggcttggagggaaaatacctaagggagcacttttaataggacctcctggaactggaaaaactttacttgctcgagcaatagctggggaagccaatgtaccgttttttacaatttcaggctcagattttgtagaaatgtttgtaggagttggagcctcaagagttagagacatgatggaacaaggaaaaaaaaatgctccatgtataatttttattgatgaaatagatgccgtcggaagaagtagaggagcaggtctaggcggtggtaacgatgaaagagaacaaacattaaaccaacttcttgtagaaatggatggctttgacacaaatgaaggagttataattatagcag

SEQ ID NO: 275445 - DNA, 859 bp, Unknown
  Bacterial polypeptide expressing nucleotide sequence isolated from the Sargasso Sea
ccactagaggaaaaaatgccttcacttttaggaatacttctatcatggtttccaatgttacttctaatcgcagtttggattttcttcatgagacaaatgcaaggcggtaaaggtggagcaatgggatttggaaggtcaaaagcaaagttaatgaacgaactgaaaggtaaagttacatttaaagatgttgcaggtgtagaagaagccaaagaagaagttgaagaagtggtagaatttctaaaagatccaagaaaatttagtagactcggaggaaaaattccaagaggatgtttattagttggtcctccaggaacaggtaaaactttattagcaagagcaatagcaggtgaagcaggagtgcctttttttacgatctctggttcagattttgtggaaatgttcgttggagttggtgcatcgagagtaagagatatgtttgagcaaggaaaaaaacattcaccatgtattatatttattgatgagattgatgcagttggtaggagcagaggcgcaggtcttggtggaggtaacgatgagagagagcaaactttaaaccaacttttagttgaaatggacggctttgatacaaatgaaggagtcataataattgcagcaacaaatagacccgatgttcttgatcctgctcttttaagaccaggaaggttcgatagacaagtagttgtatcaaacccagatataataggtagagaaaagatattaaaagtacacgcaaaaaaaattaatatgtcacctgatgtaaatctaagaacagtagcaagaggtacgccaggtttctcaggtgcagatcttgcaaacctagtaaatgaagcagcgttattagctgctagaaaaaataaaa

SEQ ID NO: 275446 - DNA, 849 bp, Unknown
  Bacterial polypeptide expressing nucleotide sequence isolated from the Sargasso Sea
agagcttgaggaaataaaagaatttttaaaatctccagaaaaatttaataagttaggagcaaaaattcctaaaggtgttctacttgttggtccacctggaacaggtaagactctattagcaaaagcggttgctggtgagtcaaatgtacctttttttagtatctcgggatctgattttgtagaaatgtttgttggtgttggtgcaagcagagtaagagatttattcaaaaaagcaaaagaatcttccccagcaataatatttattgatgaaatagatgcagtaggaagaatgagaggtgccggattgggcggtggtcatgacgaaagagaacaaacattaaatcaactacttgttgaaatggatggttttgaggcaaaccaaggtgtaattttgatggcagcaacaaacagacccgatgtattagatccagcattactaaggcctggtcgatttgatagacaagtgattgtagatagaccagacctaaaagggagaaaacaaattttaaaagttcactctgttggtaaacctattgcaaaaaacgtaaatttagaaactgttgctaagcaaacaccaggatttacaggtgcagatttagcaaacctactaaatgaagcagctctgcttgcagctcgaaaaagtaaaaaaacaatttctaatttagatatagaaaactcgatcgatagagttttagctggaccagaaaagaaaagccaaatattaactaaagaagagaagctaataattgcttatcatgaaacgggtcatgctcttgtaggttgggcacttctaaacgctgatccgatccataaagttacatttattcctagaggacgagctcttggcta

SEQ ID NO: 275447 - DNA, 934 bp, Unknown
  Bacterial polypeptide expressing nucleotide sequence isolated from the Sargasso Sea
tattaacggtactttatcagatggatcaaagttcaaaacttattcaccaaattacccagatttagtaaacaaactttctgataaaaatgtcagtataaatgctgctcccgttgaggataagatgccttctttattaggtgttctattgtcttggtttccaatgttgctcttaattggtgtttggatattttttatgcgtcaaatgcaaggtggtagaggtggtgcaatgggatttggaaaatcaaaagcaaaattattaaatgaggcccagggtaaagttacttttaatgatgttgcaggtattgaagaagcaaaagaagaagtagaagaaatagttgattttttaaaagatccaagaaaatttagaaaacttggaggaaaaattcctaaaggagctttattaataggaccaccaggtacaggtaaaacacttttagcaaaagctatagcaggtgaggctaacgtacctttctttacaatttcaggttctgattttgtggaaatgtttgttggagttggagcttcaagagttagagatatgtttgagcaaggaaaaaaacatgctccatgtattattttcattgatgagatcgatgcggttggaagaagcagaggtgcaggtctaggtggtggtaacgatgaaagagaacaaactttaaaccaacttttggttgagatggatggttttgatacaaatgagggaattattttaatagcagcaacaaatagacctgatgttttagatcccgctctattaagaccaggtaggtttgatagacaagttgtagtgcctaatcctgatattttaggaagagaagctattttaaaagttcatgttaaaaaaataaatactggtccagatgtaaaacttagaaccatagctagaggaactcctggtttttctggagccgatttagcaaatctaattaacgag

SEQ ID NO: 275448 - DNA, 678 bp, Unknown
  Bacterial polypeptide expressing nucleotide sequence isolated from the Sargasso Sea
ggaaaaattcctaagggtgcgttattagttggacctccagggactggaaaaactctcttagctagagcaattgcaggtgaagcaaatgttcctttctttacaatatcaggttctgattttgtcgaaatgtttgttggtgttggagcaagtcgagttagagatatgtttgagcaggctaaaaagaatgctccatgtataatttttattgatgaaattgatgctgttggtcgtcatacaggcgctggtttaggtggtggcaatgatgagagagagcaaactcttaatcagcttcttgttgaaatggacggctttgaaactaatgaaggtattattttaatagcagcaacaaatagacctgatgttttacatccagctttattaagacccggtaggattgatagacaagttgttgttccaaatccagatataattggcagagaaaagattttaaaagtacacactataaaagtaccaatgtcttctgatgttgatattagaactgttgctcgtggtacaccaggtttctcaagagctgacttagccaatattgttaatgaggctgctcttcttgctgcaagaagaggaaagagaatggtaacacatactgaatttgaagacgcaaaagataaagtaatgatgggtcctgaaagaagatccatggttatgactgatgatgac

SEQ ID NO: 275449 - DNA, 822 bp, Unknown
  Bacterial polypeptide expressing nucleotide sequence isolated from the Sargasso Sea
accacatttaaggatgttgcaggtgttgatgaagccaaagaagaacttcacgaaataattgaatttttaaaagagcctcaaaagtttagcaaactaggaggaaaaattcctaaaggagttcttttaataggtcctcccggaactgggaaaactttacttgctagagctatttcaggagaagcaaatgtcccgttctttagcataagcggctcggactttgtagaaatgtttgtgggtgtaggcgcgtccagagttcgtgacctttttgaacaaggcaagaaaaatagtccctgtattatttttattgatgaaatagatgcggtgggaagacatcgtggagctggcctaggaggtgggcatgatgaaagagagcaaactctgaatcagcttttagttgaaatggatggttttgaaaataatgaaggagttattcttattgcagctactaaccgtccagatgttttggaccctgctttgttgagaccaggacgttttgaccggcaggttacagtggggcgccctgacgttaaagggcgtgaaggtattttgaaagttcatacttcaacagtacctttgttagatggagtggatttaaaaattattgcacggggaacaccgggttttactggggcagatttagcaaaccttgtcaacgaagcagctttattggccgccagggatgataaaaaagctgttgcaatgaatgattttgaagaagcgaaagataaggtgatgatgggtgttgaaaggcgcagtatggttatttctgaaaaagagaaaaaaactactgcttatcatgaggcaagacacgcaatggttgct

SEQ ID NO: 275450 - DNA, 844 bp, Unknown
  Bacterial polypeptide expressing nucleotide sequence isolated from the Sargasso Sea
gataatggtgaaattttaaaagtagaaatacaaggaaacaatattaaaggtacttattctaatggtaatagtttttctacatatgctccaaatgatcctaacttaatagaaaaactttcaaacaaaggtgtaagtatttcagcagcgcctattgatgaaaaaatgccttcattatttggtgtccttctttcgtggtttcctatgttgttattaattgctgtgtggatcttttttatgagacaaatgcaaggaggcaagggtggagcaatgggttttggaagatctaaagctaaaatgatgaatgagctaaaaggtaaagtaacttttaatgatgttgctggagttgaagaagctaaagaagaagttgaagaaattgttgaatttttaaaagatccaaaaaaatttagtagattaggaggaaaaattccaagaggggcattattagtcggtcccccaggcactggtaaaacactattagcgagagcgattgctggagaagctggcgttcctttttttactatatcaggatcagactttgttgaaatgtttgtaggtgtaggtgcctcaagagtaagagatatgtttgaacaaggtaaaaagaattcaccatgtataatttttatcgatgagatagatgcagttggaagaagtaggggtgctggtctaggtggtggaaatgatgaaagagaacagactctaaatcagcttttggtagaaatggatggctttgatacaaatgaaggtgtaattataattgcagcaacaaatagacctgatgtacttgatcctgcattattaagacccaggaaagatttgatagaccaagttgttgtttcaaatccag

SEQ ID NO: 275451 - DNA, 844 bp, Unknown
  Bacterial polypeptide expressing nucleotide sequence isolated from the Sargasso Sea
gagtggcagagcaatgggctttggaaaatcaagagctaaacttctaaatgaaaataaagataaagttacatttctcgacgtggcgggtatcgacgaagctaaatctgaattagaggaaatagtcgaatttttaaaagaccctacaaaatttcaaagattgggaggaaaaattccaaaaggtgcacttttagttggtcctcctggtactggtaaaactttgttagctagagccatagcgggagaagcaaatgttccttttttctcgatctctggttctgattttgttgaaatgtttgtcggagttggagcaagtagagttcgagatatgtttgaacaaggtcgtaaaagtgctccgtgcatcatatttattgatgagattgatgcagttgggaggcacagaggtgctggacttggtggtggtaatgacgaaagagaacaaactcttaaccaacttttagttgagatggacggctttgactctacgcaaggtgtcatattaatagcggcaacaaacagaccagatgttctcgatccagccttactaagacctggaagatttgatagacaggttgttgtacctaatccagatattgtcggcaggacaaaaattctcgaagttcatactagaaagttagctcttgctccagacgttgatataaaggtaatagctagaggtacacctggattttccggtgctgatctcgccaacctatcaaatgaagcagcacttttagctgctagaagaaacaaaagattagtaacaatgctagattttgaagatgctaaagacaaggttatgatgggagcagaaagaaggtcaatggttatgaccctgaaagaaaaa

SEQ ID NO: 275452 - DNA, 925 bp, Unknown
  Bacterial polypeptide expressing nucleotide sequence isolated from the Sargasso Sea
agtacaaagattaagagtagacttgcctggtcttacacctgaattaataactaatctaaaaaatgaaggaataagttttgatgttcaccctgttaaaactacaccaccagcattaggtattttcggtaatcttcttttccctgcaattctgataggaggtttaattcttttagctaggagatcaaatggtatgcctggagggccaggtcaagctatgcaattcgggaaatcaaaagctagatttgctatggatgctgatactggagttgtatttgacgatgttgcaggagtaaatgaggcaaaagaggatttagaagaggtagttacatttttaaaaaaacctgaaaaatttacttctgttggtgctcgtatacccaaaggagttttacttgtaggtcctccaggaactggtaaaacacttttagcaaaagcaattgcaggagaagcaggagttccattcttctcgcttgcaggctcagaatttgtagaaatgtttgttggagtaggtgctagtagagttagggatcttttcaaaaaagccaaagagaatagtccatgcttaatatttattgatgaaattgatgcagtaggaaggcaaagaggagctggcatcggtggtggaaatgacgaaagggaacaaactctaaatcaacttttaactgaaatggatggatttgaaggtaatagtgggattattattattgctgcaactaaccgtccagatgttttggattccgctttaatgaggccaggaagattcgacagacaagttacagttgatgctcctgatattaaagggagattatcgattcttgaagttcactcaaaaaataaaactcttcaggaagacttaactttagaaagtattgcaagaaggactcctggttttactggagcggatttagcaaatctcttaaatgaagcg

SEQ ID NO: 275453 - DNA, 832 bp, Unknown
  Bacterial polypeptide expressing nucleotide sequence isolated from the Sargasso Sea
ctcgggggtaaaattccacgaggtgcattactcgtgggaccccctggaacaggaaaaactcttttagctaaagcggtagcaggcgaagctcaagtgcctttcttttcgttatcaggatcagattttgttgaaatgtttgtaggagttggtgcctctagagttagagatttatttaaaaaagcaaaatataaagcacctgccatcatctttatcgatgaaattgatgctattggaagggctcgtggtaaaaatcaaatgacaggatctaatgacgagcgagaaaacacactaaatcagcttctcacagaaatggatggttttgggactaatgatcatgttattgttgtagcagctacaaacagagctgacattttagacagagccctggttcgagcaggacggtttgatcgacaaatttatgttgatttaccagaacttaacgagcgaaaagaaatctttgaagtccacctcaaacctttaaaaatagataaagaattagaccttaacttcttagcgaaacaaacaccggggttctctggagcagacatcgcaaacatgtgtaacgaagcagcacttattgcagctcgaaacgataaaaagtttgttgaaaaacaagactttctcgacgcagtagatcgtattattggaggactagaaaagaaaaataaaatcatttcaaaaaatgaacgtgaagtcatcgcttttcacgaagctggtcatgccacggtaagttggatgctcgaacacgctgcacctttagtaaaagttactattgttcctcgaggaaaatcacttggtgccgcatggtatcttccagaagaacggcaaatta

SEQ ID NO: 275454 - DNA, 863 bp, Unknown
  Bacterial polypeptide expressing nucleotide sequence isolated from the Sargasso Sea
aaattttttaaacgaagttgatgctggtagagttgtagaagtaaagattcaaggtaataatatatctggaactttagcagacggtaaaaatttcacaacttactcccctaattatccagacctagtagataaactttcatcaaaaggtgtaggtataattgcttctcctcaagaagataaaatgccttctttattaggaattctattatcttggtttcctatgcttcttttaataggagtatggatatttttcatgcgtcaaatgcaaggaggaaaaggtggcgcgatgggatttggaagatcaaaagcaaaacttcttaatgaagctcaaggcaaagttacctttaacgatgtagctggtgttgaagaagcgaaagaagaagtggaagaaatagttgaatttttaaaagatccaaaaaaatttagtagactaggaggaaagattcctaaaggagcccttttaattggacctccaggaactggtaaaactttacttgctaaagcgatagctggcgaagctaatgttccatttttttcaatttctggttctgattttgtagagatgtttgttggtgttggtgcttcaagagttagagatatgtttgaacaaggaaaaaagcattctccatgtataatttttattgacgaaatagacgctgtaggcagaagcagaggagctggtttaggtggcggaaacgatgagagagagcaaactcttaaccaactgttagtggaaatggatggttttgacacgaatgaaggtataatattaattgcagctacaaatagacctgatgtgttagatcctgctttgttaagacctggtagatttgatagacaagtagttgttggaaatctctgat

SEQ ID NO: 275455 - DNA, 821 bp, Unknown
  Bacterial polypeptide expressing nucleotide sequence isolated from the Sargasso Sea
ttcttaagcagcctgaaagatttacattctgttggagctcaaattccaagaggagtcctcttggttggacctccaggaacaggcaaaacacttttagcaaaagcaattgctggggaagctggtgttccttttttctcactttcaggatcggaatttgtagaaatgtttgttggtgttggagctagtagagtaagagatttatttaaaagagccaaagaaaacagtccttgcttaatttttatcgatgaaatcgatgcagttggaagacagaggggtgccggaattggaggaggcaatgatgaaagagagcaaacactcaatcaactcttaactgaaatggatgggtttgaagggaatagtggaattattattattgctgctactaacagacctgatgttcttgattcagctttgatgaggccaggaagatttgatcgacaggtaactgttgacgccccagacatctcaggaagattatcaattttaaaagtccactctagaaataaaaaattagaaaaagacttaactttagaaagtattgcaaggagaacgcctggctttaccggtgctgatttagcaaatttattaaatgaagccgcaatactgacagcaagaagaagaaagaatcatataggactctcagaaattgatgatgcagttgatagaatcattgctggaatggaagggacacctcttgttgatggaagaagcaaaagactaattgcatatcacgaggttggccatgcattaataggatcgctagtcaaagatcatgatcccgttcagaaagttactgttattccaagggggcaggcacaagg

SEQ ID NO: 275456 - DNA, 841 bp, Unknown
  Bacterial polypeptide expressing nucleotide sequence isolated from the Sargasso Sea
ctgatgaatttccttccggtgatcctgatcatcggcttctggctgttcatcatgcgccagatgcagggcggtggcggcggggccaagggcgcgatgtccttcggcaagtcgcgcgccaagttgcagggcgaggaccagatcaaggtcaccttcgccgacgtcgccgggtgcgacgaagccaaggaagaagtcggcgaactggtcgacttcctgcgcgatcccaccaagttcaccaagctgggcggcaagatcccgcgcggcgtgctgatggtcggcccgccgggtaccggcaagaccctgctggcccgcgccatcgccggcgaggccaaggtgccgttcttctcgatctccggttctgacttcgtggaaatgttcgtcggcgtcggcgccagccgcgtccgcgacatgttcgaacaggccaagaagcaggccccgtgcatcatcttcatcgacgaaatcgacgctgtcggccgccaccgtggcgccggcctgggcggcggtcatgacgagcgcgagcagaccctgaaccagctgctggtcgaaatggacggcttcgagggaggcgagggcgtgatcgtcattgccgccaccaaccgtcccgacgtgctggacccggcgctgctgcgcccgggccgcttcgaccgccaggtcgtggtcgggctggccgacgtcaagggccgcgagcagatcctcaaggtgcacatgcgcaagctgccgctggccgacgacgtcgagccgatggtcattgcccgtggtacccccggcttctccggcgccgacctggccaacctgtgcaacgaagcggcgctgttcgccgcacgcggcaacgaaaaggaagtgc

SEQ ID NO: 275457 - DNA, 760 bp, Unknown
  Bacterial polypeptide expressing nucleotide sequence isolated from the Sargasso Sea
aataaacaaaaagttacttttaatgatgttgctggaattgatgaagctaaacaagaattagaagaagttgtttcatttttaaaagatcctcataaatttcaaagattaggtgctaaaattcctaaaggggcactgttggttggacctcctggtactggtaagaccctccttgctcgtgctattgccggagaagcaggtgttccatttttctcaatatctggttcagactttgtagaaatgtttgttggtgttggagctagtagagttagagatatgtttgaacaaggaaagaaaaacgcaccatgtataatatttattgatgagattgacgcagttggaaggcatagaggtgctggattaggtggtggtaatgatgaaagagaacaaactttaaaccaacttttggttgaaatggacggatttgaagctaatgaaggcgtaatcatcgtcgcggcaactaacagacccgatgtgcttgaccctgccttactacgacctggaagatttgatagacaagttgttgttcctgctcccgatattattggtagagataaaatattaaaagttcatacgcgaaaaattaaaatggacaaatctgttaaaaccattgctatcgcaagatcaactcctggtttctcaggagcagatctagctaacattgtaaatgaagctgcacttatagcagctagaaagaataaaaaaattgtaacaatggatgattttgaagatgctaaagataaagtcatgcttgaaccccaaa

SEQ ID NO: 275458 - DNA, 784 bp, Unknown
  Bacterial polypeptide expressing nucleotide sequence isolated from the Sargasso Sea
tatgaactttaaaaatttagtgatgtgggcagttatagtcttactttcagtagggctatttaatatgtttcaagatcctaaaaaaataaactcagaaaaaaataagcttcctttctcaactttcatgagtgaagtagatgcaggaagagtagttgaagttcaaattcagggaaataatatttctggagtattatctgatggagaaacttttaatacttattctccaaattatccaaacttagttgagaaattatcagaacaaaacattagtatagttgctactccgctagaagataaaatgccatcacttttaggtatcttactttcttggtttccaatgctattactaattggagtttggattttctttatgcgtcaaatgcaaggtggaaaaggtggagcaatgggttttggcagatcaaaggcaaaactattaaacgaagcgcaaggaaaagttacttttaatgatgttgcgggagttgaagaggcaaaagaagaagttgaagaaattgtagaatttttaaaagatccaaaaaaatttagtagactaggaggaaaaatacctaaaggagctttattgataggccctccaggaacaggaaaaactttattagctaaagctatcgctggagaagcaaacgttccgttcttttctatttcaggatcagattttgttgaaatgtttgttggagtaggagcatccagagttagagatatgtttgagcagggaaaaaaacattctccatgtataatttttattgatgaaatcgacgcagtaggaaga

SEQ ID NO: 275459 - DNA, 872 bp, Unknown
  Bacterial polypeptide expressing nucleotide sequence isolated from the Sargasso Sea
gtagtggaaattactattcaagggaataacatttttggagttttgtcaaatggctcctcttttaatacttattctccaaattatcctaacttggtagaaaaattatctgaaaaaggagtaagcatagttgcaacaccaacagaggataaaatgccttcgttactgggcatactcttgtcatggttccctatgttattattaataggtgtttggatattctttatgcgacagatgcaaggaggaaaaggtggtgcgatggggttcggaagatctaaagcaaaattattaaacgaagctcatggaaaagttacttttaacgacgttgccggtgttgaagaagcaaaagaggaagtagaagaaatagtagaatttttaaaagatccaaaaaaatttagcagacttggtggaaaaattcctaaaggtgctttacttattggccctccaggcactggtaaaactcttttagccaaagctatcgctggtgaagctaatgttccatttttttctatctctggttcagatttcgtagaaatgtttgttggagttggagcttccagagtaagagatatgtttgaacaagggaaaaaacattctccatgcataatttttatagatgaaatagatgcagttggtagaagtagaggtgctggacttggaggcggaaacgatgaaagagaacaaactttaaatcagttgcttgtagaaatggatggctttgacactaatgaaggaattattttaattgctgctactaacaggcctgacgtattagatccggcattgttacgacctggaagatttgatagacaagtggtagttagtaatcctgatataattggaagagaagctatattaaaagttcacgtaaaaaa

SEQ ID NO: 275460 - DNA, 878 bp, Unknown
  Bacterial polypeptide expressing nucleotide sequence isolated from the Sargasso Sea
ctatcctgatcttgtgaataaacttagtgagtcaggtattaaaataatcgctgaacctgcggaaagatctatgcaccctatattaagtgttttactttcttggttcccaatgcttttacttattggagtatggatattttttatgagacaaatgcagtctggaggtggcaaagcaatgggctttggcaagtccaaagcaaaactcttaaatgaagctgtaggaaaagtaacatttgatgacgttgccggaattgatgaagctaaacaagaattagaagaagtagttgagtttttaaaagatccaaaaaaattttcaagattagggggtaaaataccaactggagctctattagttggccctccgggaacaggtaaaacccttctggctagagcaatcgccggtgaggccaacgttccattcttttcaatttctggttctgattttgtagaaatgtttgttggtgttggcgcaagtagagttagggacatgtttgagcaaggtaaaaaaaatgcaccatgcattatatttattgacgaaattgatgcagtgggaagacacagaggcgctggtttaggtggaggtaatgacgagagagagcagactttgaatcaactactagttgaaatggatggttttgaagcaaatgcaggtgttatcattgttgcagcaactaacagacccgatgttcttgatcctgcacttttaagacctggtagatttgataggcaagtaacggtttcaaaccctgatattattggaagggaaaaaatattaaaggttcatattaaaaaaattaaagtttcacccaaatttgatgctaaaataattgctagaggaactcctggtttttctggtgctgatttggcaaatttagtta

SEQ ID NO: 275461 - DNA, 937 bp, Unknown
  Bacterial polypeptide expressing nucleotide sequence isolated from the Sargasso Sea
ttactttcatggttccctatgttactactaattggtgtttggatatttttcatgcgtcaaatgcagggtggtaaaggtggtgcaatgggatttggaagatcaaaagctaaacttcttaatgaggcgcaaggaaaagtaacttttaatgatgtagctggtgttgaggaggcaaaagaagaagttgaagaaatagtagaatttttaaaggatcctaaaaaatttagtcgtttgggtggtaaaattccaaaaggagccttacttattggaccaccaggaactggtaaaacattactagcaaaagcgattgcaggtgaagctaatgttcctttcttttcaatatcaggttcagactttgttgaaatgtttgtaggagttggagcttcaagagttagagacatgtttgaacaaggaaaaaaacattcaccatgtattatttttatagatgaaattgatgcagtaggaagaagtagaggtgctggactaggtggaggaaatgacgagagagaacaaactttaaaccaattacttgtcgaaatggacgggtttgatactaatgagggaataatattaatcgcagccacaaacaggccagatgtcttagatcctgctttgttaagacctggaagatttgataggcaggtagttgttggtaatccagatattattggaagagaacaaattcttaaagttcatgtaaaaaaaattaacactggtccggatgtaaaacttagaactattgctagaggaactccagggttttctggtgcagatcttgcaaatctaataaatgagtcagcgcttcttgctgctagaaaaaataaaagagttgtaacgatgtcagatatcgaagaagccaaagataaagttatgatgggtgcagagagaagatcaatggtaatgtctgaagatgaaaaaaaacttacagcttatcatgagg

SEQ ID NO: 275462 - DNA, 922 bp, Unknown
  Bacterial polypeptide expressing nucleotide sequence isolated from the Sargasso Sea
gctattcaacatgtttcaagacccagagagaatgaaagctgataacaccaaactgcctttttcaaattttcttaatgaagtagatgaaggaagagtagttgaagttaaaattcaaggaaataatatttcaggggtactatctaacggcgaaaagttttcaacatactccccaaattatccagaactggtaaataaactatctgataaaggtgtaagtattattgcatctcctcaagaggataaaatgccttctttattaggaattctactttcatggtttccaatgttactgttaattggtgtttggatattttttatgcgtcaaatgcaaggaggtaaaggcggagcgatgggatttggtagatccaaagcaaaattgttaaatgaagctcaaggaaaagtgactttcaacgatgttgcaggagtagaagaggcaaaagaagaggtagaagaaattgtagaatttttgaaagacccaaaaaaatttagtcgtttgggaggaaaaattccaaaaggagctcttttaattggacctcctggaacaggaaaaactcttttagctaaagctattgctggtgaagcaaacgtgccatttttctcaatctctggatctgactttgtagaaatgtttgtcggtgtgggggcttcaagagtaagagacatgtttgaacaaggaaaaaaacattctccatgtataatttttatagacgaaatagacgctgtaggcagaagtagaggagcgggattaggcggggggaatgatgaaagagaacaaacgttaaaccaattattagttgagatggatggttttgatacaaacgaaggaataatattaatagccgctacaaacagaccagatgttttggacccagcacttctgagaccaggaagatttgatagacaggtagtagtcggtaatccc

SEQ ID NO: 275463 - DNA, 902 bp, Unknown
  Bacterial polypeptide expressing nucleotide sequence isolated from the Sargasso Sea
tgaagaagcaaagcaggaactcgaagaagtcgttgaattcctccgtgacccgcaaaaatttcagcgtctgggcggcaaaataccgaagggcgtgctgctggtgggtcctcccggaacgggtaagaccctgctcgcccgcgccattgccggtgaagccaatgtgccgttttttacgatttccggctctgacttcgttgaaatgtttgtcggcgtgggcgctagccgtgtccgcgatatgttcgaacagggcaagaagaacgctccctgtatcatcttcatcgatgaaatcgatgctgtaggccggcatcgtggcgccggcctcggcggcggcaacgacgaacgcgagcagacgctcaatcagcttctcgtcgaaatggatggcttcgaagccaatgaaggcgtcatccttattgccgcgaccaaccgtcctgacgttctggatccggcgctgctacgtcccgggcgtttcgatcgccaggttgtggtgccgaaccctgacgtcctgggccgggaacagatcctaaaggtccacatgcgcaaggtaccgcttgcccctgatgtggatgcgaaaatcattgcgcgtggaacgcccgggttttcgggtgctgatctcgcgaatctagtgaacgaggcggcgcttctagcggcccgcaagaataaacgccttgtcaccatggctgaattcgaagacgcgaaagacaaggttatgatgggggccgaaaggcggtcgatggttatgaccgaggacgaaaaggcgctgacagcttatcacgaggcaggccatgcgctagtgggtctatccatgccccagcatgatccgctgcataaagtgacaataatcccgcgcgggcgggcgttgggtgtgacgatgtcgctgccggagcgagacaagtatggctatt

SEQ ID NO: 275464 - DNA, 886 bp, Unknown
  Bacterial polypeptide expressing nucleotide sequence isolated from the Sargasso Sea
ctcttatcttggtttcccatgttattactgattgcagtatggattttcttcatgagacaaatgcagggtggtaaaggtggagcgatgggatttggaaaatcaaaagctaaaatgatgaatgaattgaaaggtaaggttacttttaatgatgttgctggtgtagaggaagctaaagaagaagtagaagagatggtagaattcttaaaagatccaaaaaaatttagtaggttgggtggtaaaattccaagaggagctttacttgttggtccaccaggtactggtaaaactttattagcaagggcaattgcgggtgaagcaggtgttccgtttttcactatttcaggttctgattttgttgagatgttcgttggagtaggagcgtctagagtaagagacatgtttgaacaaggcaaaaaaaattctccatgtattatttttatagatgagatagatgctgttggaagaagtagaggggcaggtctagggggtggaaatgatgagagagaacaaaccttaaaccagttgttagttgaaatggacggttttgatacaaatgaaggcgtcataattatagctgcaacaaacagaccagatgtgctagatccagctttattaagaccaggaaggtttgatagacaggtagtcgtttcaaacccagatattattggaagagaaaaaattttaaaagttcatgtaaaaaaaataaaaatggcgccagatgttaatttaagaacaattgcaagaggcactccgggattttcaggagccgatcttgcaaatatagttaatgaagcagctctgttagcagcgagaaaaaataagaggatagtcacattactagaatttgaggaagcaaaagataaagttatgatgggtgctgaaagac

SEQ ID NO: 275465 - DNA, 898 bp, Unknown
  Bacterial polypeptide expressing nucleotide sequence isolated from the Sargasso Sea
cagggatcaattggtgtaaaaaataatattattttctccgaatttttatcagaagtagaaaatggaagagttgttcaagtagaaatacagggtaaaaatataaaaggagttttctctaatggaaaaacatttattacctatgctcctgatgatccaaacctaattcaaaaattaagtgacaaaggtgttagtatttcagcaagtcctatcgaagaaaaaatgccatcacttttaggtatcctattgtcatggtttccaatgttgttactaattgcggtttggatattttttatgagacaaatgcaaggtggaaaaggtggagctatgggctttggaaaatccaaagctaaaatgatgaatgaattaaaaggtaaggttacattcaatgatgttgctggagtagaggaagctaaagaagaagtagaagaagttgtagaatttttaagagatccaagaaaatttagtagacttggaggaaagataccaagaggttgtttgctagttggtccacctggaacaggtaaaactttattagctcgagcaattgctggtgaagcaggagtccctttcttcactatatctggatcagattttgttgagatgtttgtaggagttggagcatctagagtaagggacatgtttgaacaaggaaaaaaacattcaccttgtataatttttattgacgaaatagatgcagtaggaagaagcagaggagctggcctaggcggcggaaatgatgaaagagaacaaactttgaatcagctattagttgagatggatggctttgatacaaatgaaggagtaataattattgcagcaacaaatagacctgatgtattagaccctagctttgttaagacccaggaagatttggacagaccaagtagttgttcaaacc

SEQ ID NO: 275466 - DNA, 902 bp, Unknown
  Bacterial polypeptide expressing nucleotide sequence isolated from the Sargasso Sea
  misc_feature (864)..(864): n is a, c, g, or t
gagtagtattgtagctgcacctcaagaagataagatgccttcactacttggtattttattatcttggtttcctatgcttttacttattggtgtttggatattcttcatgcgccaaatgcaaggtggcaaaggaggagcaatgggatttggaaggtcaaaagcgaaacttttaaacgaagcacaaggcaaagttactttcaacgatgttgcaggtgtagaagaggctaaagaagaagttgaggagattgttgagtttttaaaagaccctaaaaaatttagtcgtcttggtggaaaaattcctaaaggtgctcttttaatcggacctccaggtacaggtaaaactttattagccaaagctattgcaggtgaagccaatgttccttttttttctatttcgggttcagactttgtagagatgtttgtaggtgtgggcgcatctagagttagagatatgtttgaacaaggaaaaaaacactcaccatgtattatttttatagatgaaatagatgcagtcggaagaagcagaggagcaggtttagggggaggaaatgatgaaagagaacaaactcttaaccaactacttgtggagatggatggctttgatactaatgaagggattattcttatcgctgcgactaacaggcctgacgttttagatcctgctttgttaagacctggaagatttgatagacaggtcgtggttggaaatccagatataatcggtagagaagcaattttaaaagttcatgttaaaaaaattagtactggaccagatgtaaaactaagaacaattgcaagaggaactccaggcttttctggagctgatttagctaatttgataaatgagtctgcgttgcttgctgncagaaaaaataaaagagtagttacaatgtctgatattg

SEQ ID NO: 275467 - DNA, 448 bp, Unknown
  Bacterial polypeptide expressing nucleotide sequence isolated from the Sargasso Sea
tgttgctgggtgtgaccagtccaagctcgaactggaagaagtggtcgagttcctgcggagcccggacaagttcgaggcggtcggcgcgcagtgcccgagaggggtcatcctggaggggcctcccgggaccggcaaaactttattagcgagagcagtagctggagaagcgggcgtgcccttcatctcgacgtccggcagcgagttcgtcgagatgttcgtcggcgtcggcgcgagtcgcatccggtccatgtttggggacgccaaaaaaaacgcgccgtgcatcatttttatagatgagatcgacgcgatcgggcgccaacgagcgagtggcggcggcttccagggcgggaatgatgaaagggagcagacgctgaatcaaattctgacggagatggacggttttaaggggaactcgggcgtggtgcgctcccggcgtcccgttgtgtag

SEQ ID NO: 275468 - DNA, 855 bp, Unknown
  Bacterial polypeptide expressing nucleotide sequence isolated from the Sargasso Sea
tttactaatgaaataggatcattaagtgttgaaacaaatgaacaaacattaatttacgattacattaaaaataaggatgttgaaaaaattgaaattatccaaaataaaaacattgcacgaatctttatcaaagaagaatctctgtctgaacatcgacatgaagctgttaggaaacctatttttggagaaggcttaaacaagggtccacactattttcttaaaatcggaacatcacaagaatttagagatcgacttgatgaagcacaagaaaactttcattttaccaaaaatgaatgggctcaaatattttataataacgagcaaagtatttgggatagtttttgggcatggatgcccttcatattcttaatttttatatggattttctttatgcgaagaatgagtggtggtagtactggtggtggtcctggttcacaaattttcaatatcggaaaatcacaggcacaactcttcgacaaagaatctgaagttaaaaccaccttttgtgacgttgctggtctagaaggtgctaaagaagaggttcaagagatagtaaacttcctaaagaacccagaaaaatacacaaaactaggtggtaaaattcctcgaggtgcgttacttgttggacctcctgggacaggaaaaacccttttagctaaagcggtagcaggcgaagctcaagtacccttcttttctctttcaggatcagattttgttgaaatgtttgtaggagtaggtgcctctagagttagagatttatttaaaaaagcaaaagataaagcaccggccatcatctttatcgatgaaattgatgctattggaagggctcgtggtaaaaatcaaatgacgggatct

SEQ ID NO: 275469 - DNA, 963 bp, Unknown
  Bacterial polypeptide expressing nucleotide sequence isolated from the Sargasso Sea
gccttcacttttaggcatcctattgtcttggtttccaatgcttttacttattggagtttggattttctttatgcgtcaaatgcaaggaggaaaaggcggagctatgggttttggaagatctaaagcaaaattattaaatgaagctcaaggcaaagttacttttaatgatgtagctggtgtagaggaagcaaaagaagaagtagaagaaatagtggaattcttaaaagacccaaaaaaatttagtagattaggtggaaaaattccaaaaggtgccttattaattggccctccagggactggaaaaactttactagcaaaagctattgctggtgaagcaaacgttcctttcttctctatttctggatcagattttgttgagatgtttgttggtgtaggagcatctagagttagagatatgtttgagcaaggaaaaaaacattctccatgtataatttttattgatgagatcgatgcagtaggaagaagcagaggcgcaggtttaggcggaggaaatgatgagagagaacaaactcttaaccagcttttagtagaaatggacggttttgatacaaatgaaggaattattttaattgctgccacaaacagacctgatgttttagatccagctttattaaggccaggcaggtttgacagacaggtagtagtagcaaatccagatattattggaagagaagcgattttaaaagtacatgtcaaaaaaataagcactggtcctgatgtaaaattaagaactatagctaggggaacaccaggattttctggagcagacttagctaacttgataaatgaatccgctttgttggcagcaagaaaaaataaaagagtagttacaatgtctgatgtagaagaggcgaaagataaagtgatgatgggagcagaaagaagatctatggtaatgtctgaagatgagaagaaattaactgcttatcatgaaggtggaca

SEQ ID NO: 275470 - DNA, 785 bp, Unknown
  Bacterial polypeptide expressing nucleotide sequence isolated from the Sargasso Sea
tgtcgctggtgttgaagaagctaaagaagaggtagaagaagtagtagagttcttaaaagatccaaaaaaatttagtaggttaggtggaaaaattccgagaggttgtctattagttggacctccaggaacaggaaaaactttattggcaagagctattgctggagaagcaggagtgcctttttttactatttcgggttcagactttgttgaaatgtttgttggagttggagcttcaagagtaagagacatgtttgaacaaggtaaaaaacattcaccatgcattatatttatagatgaaatagacgcagtaggaagaagcagaggagctggccttggaggtggaaacgatgaaagagagcaaacattaaatcagttgttggttgaaatggatggttttgacactaatgagggcgtaataattattgctgcaaccaatagacctgacgttctagaccctgcattattaagaccaggaagatttgataggcaagtagttgtttctcttcctgatattattggtagagaaaaaattttaaaagttcatgctaagaagatttctatgaccccagatattaatttaagaactgttgcaagagggactccaggtttttcaggagctgatctagcaaatttagttaatgaggctgctttattagccgctagaaagaataaaagggtggtaacccatacagaatttgaagaagcaaaagataaagttatgatgggagcagaaagaagatctatggtaatgactgaagaagaaaaaaaattaactgcataccatg

SEQ ID NO: 275471 - DNA, 868 bp, Unknown
  Bacterial polypeptide expressing nucleotide sequence isolated from the Sargasso Sea
tatagaaggtattttatcagacggaactgcttttagtacttatgcacctaacgatcctaacttagtagaaaaactaacttcaaaaggagttagtattaccgcatcacctgttgaagataaaatgccttcaattttaggagtgcttctttcatggtttccaatgcttttgcttattggcgtttggatattctttatgcgccaaatgcaaggtggtagaggaggcgctatgggttttggaaagtctaaagcaaaattactttcagaagctagagggaaaataacttttaatgatgttgccggcatagatgaagccaaagaagaagttgaagagattatagaatttttaaaagatcctagaaaatttagaagattgggaggaaagattccaaaaggtgctcttttaattgggcctccaggaacaggaaaaactttacttgctagagcgattgcaggagaggcaaatgtgccattctttacaatatcagggtctgactttgtcgaaatgtttgtcggcgttggagcttctagagttagagacatgatggatcaaggtaaaaaaaatgcaccttgtataatttttatagacgagattgatgcagttggaagaagcagaggagctggacttggcggaggcaatgatgagagagaacaaactttaaaccaattattagttgaaatggacggtttcgatacaaatgaaggtgtaattataatagctgccacgaatagacctgatgttttagatcctgctttattaagaccaggaagatttgatagacaagtagtagttccaaatcctgatattgttggaagagaggcaatcttaaaagttcatattaaaaaaataaatattggaccagatggtaaa

SEQ ID NO: 275472 - DNA, 931 bp, Unknown
  Bacterial polypeptide expressing nucleotide sequence isolated from the Sargasso Sea
atgaatttaaagaatctagtaatgtgggtcatcattgttctgctttcagtagggctgtttaacatgtttcaggaccctaaaaaaattaatgctgaaaagaacaaaattcctttctctagttttttaagtgaagttgaagctggaagagttattgaggttcaaatacaaggaaacaacattactggggttttagctgatggcaaaacttttaatacttattctccaaattatcccgagctcgttgaaaaactttcatctcaaaatataaatatagttgcaactccactagaggataaaatgccatctcttttaggtattttattatcttggttcccaatgcttttgttaattggtgtttggattttttttatgagacaaatgcaaggaggaaaaggcggagcgatgggttttggaagatcaaaagcaaaattattaaatgaggctcaaggtaaagtaacttttaatgatgttgctggagtggaagaagcaaaagaagaagtggaggaaatagtagagttcttaaaagatccaaaaaaattcagcaggctaggtggtaaaattccaaaaggtgctttattaattggacctcctggaacaggaaaaactttacttgctaaagctatagcaggtgaagcgaatgtaccttttttttccatttcaggatcagattttgttgagatgtttgttggagttggagcttctagagtaagagacatgtttgaacaaggaaaaaaacattcaccgtgtattatttttattgatgagatagatgcagttggaagaagtagaggagcaggtcttggcggaggtaatgatgaaagagaacaaaccctcaaccaattacttgttgaaatggatggatttgatacaaatgaaggtataatcttaatcgctgctactaacagacctgatgtttggacccagcctacta

SEQ ID NO: 275473 - DNA, 775 bp, Unknown
  Bacterial polypeptide expressing nucleotide sequence isolated from the Sargasso Sea
caatctggagttaaaataatagctgagccatctgatagatctatgcacccaattttaagtgttcttctttcttggtttccaatgcttttattaattggtgtgtggatcttttttatgaggcaaatgcagtctggtggtggaaaggcaatgggttttggcaaatctaaagctaaacttttaaatgaagcaattggaaaaattacttttgatgatgttgcaggaattgatgaggcaaaacaagaacttgaagaagttgtagagtttttaaaagatccaaaaaaattctcaagattaggtggaaagataccaactggagcgcttcttgttggacctccaggtactggaaaaacacttttagcaagagcaattgctggtgaggcaaatgttccatttttctcaatttctggttctgattttgttgaaatgtttgttggtgttggagccagtagagtaagagatatgtttgagcaggggaaaaaaaatgcgccgtgtattatttttattgatgaaattgacgctgttggtagacataggggagctggattaggtgggggcaatgatgaaagagagcaaactttaaaccaattacttgtagaaatggatggttttgaagccaatgctggagttataattgttgctgcaactaacagacctgatgtcctcgatcctgctttattaagacctggtagatttgatagacagattactgtttctaaccctgatataattggaagagataaaatattaaaagtgcatattaaaaaaattaaagttt

SEQ ID NO: 275474 - DNA, 925 bp, Unknown
  Bacterial polypeptide expressing nucleotide sequence isolated from the Sargasso Sea
gccttcattacttggagtgcttctttcttggtttcctatgttgctgctaatagcggtatggatattttttatgagacaaatgcaaggaggaaaaggtggggcaatgggatttggtaaatccaaagcaaaaatgatgaatgaattaaaaggaaaagtaacatttaatgacgttgctggagttgaagaagcaaaagaagaagttgaagaagtagtagaatttctaaaagacccaaaaaaatttagtagacttggaggaaagattccaagaggttgtttattggtaggtcctcctggaacaggaaaaactttattggctagagcgatagcaggggaagcagccgttcctttttttacaatatcaggttcagattttgttgaaatgtttgtaggtgttggtgcatctagagttagggatatgtttgaacaaggaaaaaaaaattccccatgtataatatttattgatgaaattgatgctgttggaagaagcagaggcgcaggacttggaggagggaatgatgagagagaacaaacactaaaccagctattagtggaaatggatggttttgatacaaatgagggtgtaataataattgcagcaactaatagaccagatgtattggatccagcacttttaagaccaggaagatttgatagacaggtagttgtttctaatccagatattatagggagagaaaaaatacttaaggtgcatgctaaaaaaatttcaatggcaccagatgttaatttaagaacagttgctagaggaactccagggttttcaggagcagatcttgctaacttagttaatgaatctgctttattagctgcaagaaaaaacaaaagaatagttacaaatcaagaattcgaagaagccaaagataaagttatgatgggagcagaaagaagaatcatggtaatgacagaa

SEQ ID NO: 275475 - DNA, 850 bp, Unknown
  Bacterial polypeptide expressing nucleotide sequence isolated from the Sargasso Sea
gtataatatgtttaaaaaccctcaaggatcaattggtgtaaaaaacaatattatcttttctgaatttttatccgaagtagacaatggaagagtagtgcaagtagaaattcaaggaaaaaacattaaaggagttttttctaatggaaaatcttttacaacttatgcccctgatgatccaaatttaattcaaaagctaagtgataaaggtgtgagtatttcagctagtcctctagaggaaaaaatgccatcacttttaggaatattactgtcttggttcccaatgttattattaattgcggtttggatattttttatgaggcaaatgcaaggaggaaaaggcggagcaatgggttttggaaaatctaaagctaaaatgatgaatgagttaaaaggaaaagtgacttttaatgatgttgcgggagtagaagaggcaaaagaagaggtagaagaagttgtagaatttttgaaagatccaagaaagtttagtagacttggagggaaaatcccaagaggctgtttattagttggaccaccaggaacaggtaagactttactagcaagggcaattgcaggagaagccggagttcctttttttactatttctggatctgattttgttgaaatgtttgtaggagtaggtgcttcaagagttagagatatgtttgaacaaggaaaaaaacacgctccatgtattatttttattgatgaaattgatgcagtaggaagaagtagaggtgctggtctaggcgggggaaatgatgagagagaacaaacattgaatcagttattagttgagatggacggctttgatacaaatgaaggagtaataattattgcagctacaaataga

SEQ ID NO: 275476 - DNA, 856 bp, Unknown
  Bacterial polypeptide expressing nucleotide sequence isolated from the Sargasso Sea
tggatttttattatgaggcgaatgcaaggtggtgttggtggaaacagtctttttaattttggaaggagtcgtgctcgactttgggtagaagataagccaaaaattaattttgacagagtcgctggttgtcaagaagctaaacaagaattgagcgagataattacatttttgaaaaatcctgagcaataccaaaagctaggagggcgcattcccaaaggagttttacttttgggacctcctgggactggaaaaacattgcttgcaagagcggttgcaggcgaggctggcgttccattttttagtcttagtggagctgattttgttgaaatgtttgtaggggttggagcttctagagttcgagatctctttgaacaaggaaaaaagaatgctccttcaattatttttattgatgagattgatgctgtaggtcgccatagaggcgctggcttaggtggtggtcatgatgaaagagaacaaacacttaatgctttactagtggaaatggatggatttgaatctactacgaatattatccttattgcggctacaaatcgtcccgacgtacttgatagtgctcttctcaggcctgggaggtttgatcgccaagtagttgttgatatacctgatttaaggggaaggaaaggaatatttaaagttcatactcaagatattccacttgctaaagatgttaatattgagatacttgcgaaaggtactccaggtcttgtaggcgctgatatcgaaaatcttgttaacgaagcgtctcttcttgctgcacgtgatggaaaatcaaaagtttctatggaagattttgaagctgcaaaagataaggtaatgatgggggtggagcgaaaaa

SEQ ID NO: 275477 - DNA, 901 bp, Unknown
  Bacterial polypeptide expressing nucleotide sequence isolated from the Sargasso Sea
ttaaaagatccaaaaaaatttagcagacttggaggaaaaattcctaaaggagcactattaattggtcctccaggcacaggaaaaactttattagcgaaagcaatagctggagaagcaaacgtgccatttttctctatttcaggatcggacttcgtggaaatgtttgtaggagtaggagcatcaagagttagagatatgtttgaacaaggaaaaaaacattctccatgtataatttttatagatgagattgatgcagtgggaagaagtagaggagctggacttgggggaggaaatgatgaaagagaacaaacccttaatcaacttttagtggagatggacggttttgatactaacgaaggaattattttaattgcagctacaaacagaccagacgtattagatccagcactgttgagacctggtagatttgataggcaagtggtagtttctaatcctgatattataggaagagaagcaatacttaaggttcatgtaaaaaaaataagtactggaccagatgtaaaattaagaaccatagctaggggaacacctggattttcaggagcagatttagctaatttaattaacgaatctgctttgttagcagctagaaaaaacaaaagagtagttacaatgtcagatgttgaagaggcaaaagacaaggttatgatgggcgctgaaagaagatccatggttatgtctgaagatgaaaaaagattaaccgcatatcatgaaggaggtcacgcaatagtagctttaaacgagaaggcgtcagatcctatacataaagctacaattattccaagaggaagagctcttggtatggtaatgagattgccagaaaaaaatcaactttctgtttcaagagaaaaaatgcattccgaatatagcagtcgcaatg

SEQ ID NO: 275478 - DNA, 922 bp, Unknown
  Bacterial polypeptide expressing nucleotide sequence isolated from the Sargasso Sea
ttaaaagatccaaaaaaatttagtagattgggtgggaaaatacctcgtggatgtcttttagttggacctcctggaacaggtaaaactttactagcaagagctatagcaggagaagcaggggtaccattctttactatttcaggttcagacttcgtagaaatgtttgttggtgttggagcttcaagagttagagatatgtttgaacaaggtaaaaaacactcaccatgcattatattcattgatgaaattgatgctgttggaaggagtagaggtgcaggtttaggtggaggtaacgatgagagagagcaaacgctaaatcaattacttgtagaaatggacggcttcgatacaaatgaaggtgtaataataattgcagcaactaatagacctgatgtgcttgaccctgctttattaagaccaggtagatttgacagacaggtagtagtttctaatcctgacttacttggaagagaaaaaatattgaaagtgcatgctaagaaaatatcaatggcaccagatgtcaacttaagaactattgcaagaggaactccaggattttccggtgctgatctggcgaacttagtaaacgaagctgcattattggcagcaagaaaaaataaaagaatagttacctatatggaattcgaagaagcaaaagataaagtaatgatgggctccgagagaagatcaatggtaatgagtgaagaagaaaaaaaacttactgcttatcatgaagctggccatgctattgttactattaatgaaaaagcggcataccctattcataaggcaacaattattccaagaggaagagcattagggatggtaatgcaacttcctgaaagagatgaggtatctcaaacaagagaacaactacatgctcaaatggctatagcaatgggtggacgagttgcagaggaaa

SEQ ID NO: 275479 - DNA, 965 bp, Unknown
  Bacterial polypeptide expressing nucleotide sequence isolated from the Sargasso Sea
aatgaatcaaaaatttaaaacattaattttatgggctttacctatccttttagtaatagcactttcctaccaatttttatcttcaagcaacgttgactcgcttaaatctaatggcactactgttgcaccaagaaattcagcggttgcaagagttagttacggcagatttttagattacattaattcgggaagggttacatctgttgatatttttgagggaggcagaaatgcagttatagagacaatagattcggatttagataataaagttcaaaggttgcgtgtagatcttcctggattaacaccagaacttataaatattttaaaaaatgagggaattagttttgatgttcatccaataaaaacagctcctcctgcattaggaattttaggtaatttactcttcccagcaatcttaattggaggtttaattttgttagcgaggaggtcaaatggtatgcctggaggtccaggccaagcaatgcagtttgggaaaactaaagcaagatttgcaatggaggccgaaacaggagttgtattcgatgatgttgcaggagttaatgaagctaaacaagatttgcaagaagttgttacttttctaaaaaaaccagaaaaatttacttctgtaggagcaagaattcccaaaggggttctattagttggacctcctggtactggtaaaacccttttagctaaagcaattgcaggtgaagctggtgtaccattcttctcattatcaggttctgaatttgttgaaatgtttgttggtgttggcgctagtagggttagagaccttttcaaaagagctaaagagaatagtccttgtttaatttttattgatgaaatagatgcagtcggaaggcaaagaggtgcaggtattggtggaggtaatgatgagagagaacaaactctcaatcaattacttactgaaatggatggtttcgaaggtaatagtggcataataa

SEQ ID NO: 275480 - DNA, 1705 bp, Unknown
  Bacterial polypeptide expressing nucleotide sequence isolated from the Sargasso Sea
cttgaccgtaaaggcatcaccatgaaaggccaagaagccgaagagtcgggtttcttaacccagatctttatttcttggttcccgatgttgttgctgattggggtatggattttctttatgcgccagatgcagggcggcggtggcaaaggcgctatgtcctttggcaagagcaaagccaagctgatgagcgaagaccaaatcaagaccacttttgctgacgttgcaggctgtgatgaagccaaagaagaagtgaaagagctggtcgattatctgcgtgatccaaccaaattccaaaaactgggtggccgtattccaacgggcgtgctcatggttggcccaccaggtacaggtaaaaccttactggctaaagcgattgcgggcgagtcaaaggtacctttctttaccatttcgggttctgacttcgtagaaatgttcgtcggtgttggtgcatctcgggtgcgtgacatgttcgaacaggcgaaaaaatcagccccttgtattatcttcatcgacgaaatcgatgccgtaggtcgccaacgtggcgctggcttaggtggcggtcacgatgagcgtgagcaaacccttaaccaaatgctggttgagatggacggcttcgaaggtaacgaagggattatcgtgattgcggcgaccaaccgccctgacgtattggactctgcgctgctgcgtccaggtcgtttcgaccgtcaagtggttgtgggtctaccggacgttcgcggtcgtgagcaaatccttaaagtgcatatgcgtaaagtaccactttctgaagatgtgaaagcaagcgtaattgcccgcggtactccaggtttctccggtgccgatttagctaacttagttaacgaagcggctctgtttgcggcgcgcggtaaccgccgtgttgtcggtatggaagaattcgagcgtgcaaaagacaagatcatgatgggtgctgagcgccgctctatggtgatgtcagaagccgagaaagaaatgactgcataccacgaagcgggtcacgcgattgtgggctgcttagtgccagagcatgatcctgtgcacaaagttaccattatcccgcgtggtcgtgcgctgggtgtgaccttcttcttacctgaggccgatgcgattagccaaagccgtcgtaagttagaaagccagatttcggttgcctacggtggtcgtttagccgaagagctgatctacggcagcgacaaagtgtctacaggcgcttcgcaagacattaaatatgcgacgtcgattgcccgtaacatggtgactcagtggggcttctccgacaaactcggtccattactctatgccgaggaagaaggtgaagtgttcttaggtcgtagcatgggtaaagccaaggcgatgtccgatgaaaccgcgacggttatcgatgccgaggtgaaagcctttatcgataaaaactatggccgtgctaagcaaatcctgctggataacatcgatattctacattcgatgaaagacgcgctgatgaagtatgaaaccattgattcactgcaaattgacgatttaatgaaccgtcgcgaagtgcgtcaacctgccgattggcaagcggatgacaatggttcaaacgacaaaggcaatggcaaaggtgaacctgccgttaaagtcgacgaagtggtaaaaaacgctcccgctgaggcagagctgaaagatgccgatgagtcacccgttaagtagc

SEQ ID NO: 275481 - DNA, 1518 bp, Unknown
  Bacterial polypeptide expressing nucleotide sequence isolated from the Sargasso Sea
tatgaatcagcgctggcgcctccttgttctctggctcctgccgatcgccgtggtcctgctgatcggttggcaggtcgtgagcaacggaggcgtcaacggagtgggccccagcggcccgaccgtggcaccccggaatgccgccgtcgcgaggatgagctacggacgcttccttgactacgtcgaggcaggccgcgtcacagccgtcgacatctacgacggaggtcgcaatgccgtggttgaagccgtcgatcccgatctcgacaatcgcgtccaacggctgagagtggatcttcccgggctggccccagaactgatcaacaccctaaagagcgagggcatcagcttcgacattcatccaccccgcaccgcacctccggctctcggtctgctgggcaacctgctgttcccactgctcctgatcggctctctcatcttcctggcccgacgcaacagcggcatgcccggtggccccggtcaggcgatgcagttcggcaaaagcaaggcccgcttcatgatggaggccgaaaccggagtgatgttcgacgacgtcgccggtgtgaatgaggcaaaacaggaacttgaagaggtcgtcaccttcctcaagcagccggaacgtttcacgtccgtcggtgcacagattccccgcggcatgctgctggtcggacctccgggaaccggcaagacgcttctggccaaagcgatcgcaggtgaggccggtgtgccgttcttctctctgtcaggttccgaattcgtcgagatgttcgtcggagtcggtgccagtcgtgtcagggatctgttcaagaaagccaaggaaaacagcccctgcctgatcttcatcgatgagatcgatgccgtcggccgtcagcggggtgccggcatcggcggcggcaacgatgagcgcgagcagaccctcaatcagctgctcaccgaaatggatggtttcgagggcaacagcggcatcatcatcatcgcggccaccaaccgtccggatgttctggattccgctctgatgcgtcctggccgcttcgatcgccaggtgaccgtcgatgcaccggatatcaagggccggctttcgatcctcgaagtgcactgccggaacaagaaactcaaagaagagctgtctctcgagagcattgcgcgtcgcacccccggcttcacaggggctgatctggccaacctgatgaacgaagccgcgattctcacggcccgtcgccgcaaggaagcgatcggcctcagcgaaatcgatgatgccgtggatcggatcatcgccggcatggaaggtcggcctctcaccgatggacgcagcaagcgtctgatcgcgtaccacgaagtcggtcacgccctgatcggaaccctcgtcaaagatcacgatccggttcagaaggtcacgctgattccccgggggcaggcacagggcctcacatggttctcccccgacgaggagcagtcacttgtgacgcagagctcaactcaaggcacgcatcatgggagctctcggggacgcgcagcggaagatgt

SEQ ID NO: 275482 - DNA, 1135 bp, Unknown
  Bacterial polypeptide expressing nucleotide sequence isolated from the Sargasso Sea
atgaattttagaaacttagctatgtgggcggtcatagtgatcttgactataggcctgtacaatatgttcaagaatccacagggatcggttaaccaaaaaaataacattatattttcagaatttttaacacaagttgacaatggaagagttgttcaagtagaaattcaagggaaaaacatcaaaggtgtaatgtctaacggagaaatgtttaatacgtatgcgcctgatgatccaaatttaattcaaaaattaagtgataaaggggttagtatttcagctagtccattagaggaaaaaatgccttcattatttggagtacttttatcatggtttcctatgctacttttaattgctgtatggatattcttcatgagacagatgcaaggtggcaaaggtggagcaatgggttttggaaaatcaaaagccaaaatgatgaatgaattaaaaggtaaggttaccttcaatgatgttgctggggttgaggaagctaaagaagaagtagaagaggtagtagaatttttaaaagatcctaaaaaatttagtagactaggcgggaaaatacctcgtggatgtctattagtcggacctcctggaacaggtaaaactttattggcaagagcaatagcaggtgaggctggagtgcctttctttacaatatcagggtcagactttgtagaaatgtttgtgggtgttggagcttcaagagttcgagatatgttcgagcaaggtaaaaagcattctccatgtataatatttattgacgagattgatgctgtaggaagaagtagaggcgcaggtttaggtggtggtaacgatgagagagaacagacacttaatcaattacttgtggagatggatggtttcgatacaaacgaaggtgtaataataattgcagcaactaacagaccagatgtacttgatccagctttattaagaccgggaagatttgacagacaggtagtagtttctaatcctgacttacttggaagagaaaaaatattaaaagtgcatgctaagaaaatatcaatggcaccagatgttaatttaagaactattgcaagaggaactccaggattttctggtgcagatttagcgaatttagtaaacgaagctgcattattagcagcaagaaaaa

SEQ ID NO: 275483 - DNA, 1078 bp, Unknown
  Bacterial polypeptide expressing nucleotide sequence isolated from the Sargasso Sea
aatgaatcaaaaatttaaaacattaattttatgggctttacctatacttttagtaatcgcactttcctaccaatttttatcttcaagcaataatgattcgcttaaatctaatggcactactgttgcaccaagaaattcagcggtagcaagagttagttacggaagatttttagattacattaattcgggaagggttacatctgttgatatttttgagggaggcagaaatgcagttatagaaacaatagattcggatttagataataaagttcaaaggttacgtgtagatcttccaggcttaacaccagaacttataaatattttaaaaaatgagggaattagttttgatgttcatccaataaaaacagctcctcctgcattaggaattttaggtaatttactcttcccggcaattttaattggaggtttaattttgctagcgaggaggtcaaatggtatgcctggtggtcctggccaagcaatgcagtttggaaaaaccaaagcaagatttgcaatggaagctgaaacaggagttgtattcgatgatgttgcaggcgttaatgaagctaaacaggatttgcaagaagttgtcacttttctgaaaaaaccagaaaaatttacttctgtaggagcaagaattcccaaaggagttctattggtaggacctcctggtacaggtaaaactcttttagctaaagcaattgcaggtgaagctggtgtaccatttttctcattatcaggttctgaatttgttgaaatgtttgttggtgttggcgctagtagagttagagaccttttcaaaagagctaaagagaatagtccctgtttaatttttattgatgaaatcgatgcagttggaaggcaaagaggtgcaggtattggtggaggtaatgatgagagagaacaaactctcaatcaattacttactgaaatggatggtttcgaaggtaatagtggcataataataattgcagccacaaacaggcccgatgttctagactcagcgctaatgagaccaggcagatttgatagacaggtaaatggagatgcacctgatatcaagggcagactatcaata

SEQ ID NO: 275484 - DNA, 1009 bp, Unknown
  Bacterial polypeptide expressing nucleotide sequence isolated from the Sargasso Sea
atgaatttaaaaaatctagttatgtgggccgtgatagtttttttaactataggtctatataatatgtttaagaatccacaaggtacgattacacaaaaaaataatattatattttcagaatttttatcagaagttgataatggtcgagtagtacaagtcgagattcaaggtaacaatattaaaggcataatgtctaatggagaaaaatttactacttattctccaaatgatccaaacttaatcgaaaaattatcagataagggagttagcatttctgcatctcctttagaagaaaaaatgccttcacttttgggagttcttctttcatggtttccaatgctgctactaatagctgtttggatattttttatgagacagatgcaaggaggaaaaggtggggcaatgggttttggtagatctaaagcaaaaatgatgaatgaattaaaaggaaaagtaactttcaatgatgttgctggagtcgaagaggcaaaagaagaagtggaagaagttgtagaatttttaaaggatccaaaaaaatttagtagacttggaggaaaaatacctagaggttgtttattagttggtccccctggaacaggaaaaactttattagcaagagctatagcaggtgaagctgcagttcctttttttacaatatcaggttcagattttgttgaaatgtttgtgggtgttggcgcctcaagagttagagacatgtttgaacaaggaaaaaaacattccccatgtataatattcattgatgaaatcgatgctgttggaagaagtagaggtgctggacttggtggtggaaacgatgaaagagaacaaacgcttaatcagctgttagttgaaatggatggttttgatacaaatgaaggtgtaataataattgcagcaactaatagacctgatgttttagacccagcgcttttgagacctggaagattcgatagacaggttgttgtttcaaatccagatattattggaagagaaaaaattctaaaagttc

SEQ ID NO: 275485 - DNA, 1198 bp, Unknown
  Bacterial polypeptide expressing nucleotide sequence isolated from the Sargasso Sea
caaggtgaggtattaaaagtagaaattcaaggaaataatataaatggtgtatatgcaaacggaaaaagttttaaaacatattcaccaaatgatcctaatttaatagaaaaactttcagaaaagggtgtaagtatttctgcagcacctatagaagaaaagatgccttctttatttggagttctactttcatggtttccgatgttgttattaatagcagtttggattttctttatgagacaaatgcaaggtggaaaaggtggagcaatgggctttggaagatctaaagcaaaaatgatgaatgaaatgaaaggtaaagtaacctttaacgatgttgcaggtgtagaagaagctaaagaggaagtcgaagagattgttgagttcttaaaagatccaaaaaaatttagtaggctaggtggaaaaatacctagaggtgcacttcttgtaggccctccaggaacaggaaaaactttattagctagggcaattgctggtgaagcaggtgttcctttcttcactatctctggatcagattttgtagagatgtttgttggtgtgggagcatcaagagtgagagacatgtttgagcagggaaaaaaaaattcgccctgtataatatttattgatgaaattgatgctgtaggaagaagtcgaggcgcaggtttgggaggtggaaatgacgaaagggaacaaactcttaatcagcttcttgttgagatggatggttttgatacaaatgaaggggttattataatcgcagcaacaaacagacccgatgttcttgaccccgcattattaagaccaggtagatttgatagacaagttgtagtttctaatccagatataattggaagagaaaaaattttaaaagttcatgttaaaaaaattaaaatggctcctgatgtaaatttaagaactatagcaagaggaactccaggattctcaggcgctgatttagctaatttagtaaatgagtctgcattattagctgctagaaaaaataaaagaattgttactttaaatgaattcgaagaagcaaaggataaagtgatgatgggagctgagagacgctcaatggttatgactgaagatgaaaaaaaattaacggcgtaccatgagggtggacatgctttagtttcttttaatatgcctagttacgatccaattcataaagcaacaattataccaagaggtagggctt

SEQ ID NO: 275486 - DNA, 1258 bp, Unknown
  Bacterial polypeptide expressing nucleotide sequence isolated from the Sargasso Sea
tatgaaaaacttctccaaaaatatatttgtctggattattatcagccttattttacttggcttatttaatgtatttaagaattcccaaagagattactcctctgtcaattacacctactcaactttattagataaagctcaaaatggtgagataaaatcagttgaaattcaaggaaataatatttttggtcaaactatggatggtgttgatttcacaacctatgccccaagagaccctaatcttattgaaacccttagtgataatgaggtagctataaacgcaaaacctgaacaatccggaatgcacccattactaagtatatttgtttcgtggtttcctatgctgttgcttattggtgtttggatattttttatgcgccaaatgcaatcaggtaaaggaggcggtgcattaggatttggaagatcaaaagctaaattattaaatgaaaataaacaaaaagttactttcaatgatgtggcaggcattgacgaggctaaacaagaactagaggaggttgtctcatttttaaaagaccctcataaatttcagagattaggtgccaaaattcctaaaggtgctctgttagttggacctccaggaactggtaagactcttctagcaagagcaatagccggtgaagcaggtgttccttttttctcaatatctggttctgattttgttgagatgtttgttggtgtcggtgctagtagagttagagatatgtttgaacaaggaaagaaaaatgcaccctgtatcatatttatcgatgagatagacgcagttggaaggcatagaggagctggattaggtggtggtaatgatgaaagagagcaaactttaaatcaactcttggttgaaatggatggttttgaagctaatgaaggtgtaattattgtagcagcaaccaatagacctgatgtacttgatcctgctttacttcgacctggaagatttgatagacaagttgtggttccagccccagatatcattggtagagacaaaattttaaaggttcatacaagaaaaattaagatggataaatctgtcaagactatagctattgcaagatcaaccccaggtttttcaggtgctgatttggctaacatagtaaatgaagctgctcttatagctgccagaaagaataaaaaaattgtaacaatggatgactttgaagatgctaaagataaagttatgcttggtacccaaaataaatcaaaaatcatatctgatggtgagaaagaggtaattgcttatcat

SEQ ID NO: 275487 - DNA, 1324 bp, Unknown
  Bacterial polypeptide expressing nucleotide sequence isolated from the Sargasso Sea
tggtcctccaggaacaggtaaaactttattagctagagcaattgccggggaagctggtgttcctttttttactatatctggttctgattttgttgaaatgtttgttggagtaggtgcgtcacgagtaagagatatgtttgagcaaggaaaaaaacattcaccgtgtataatttttatagatgagattgatgctgttggaagaagtagaggagcaggtttaggaggtggaaacgatgaaagagaacaaactttgaaccaattgctagttgagatggatggatttgatactaacgaaggagtaataataattgcagctacaaatagaccagatgtgttggatcccgcacttctaagacctggaagatttgacagacaagttgtagtttcaaatccagatataattggaagagaaaaaatattaaaagttcacgctaaaaaaattactatgtcacctgatgtaaatttaagaactgttgcaagaggaactcctggtttctcaggtgcagatttagcaaatttagtgaatgaagctgcattgttagcagctaggaaaaataaaagaattgttacctaccaggaattcgaggaagcaaaagacaaagtaatgatgggagctgagagaagatcaatggtaatgacggaagatgagaaaaaattaactgcttatcatgagggtggccacgctcttgtttcatttaatatgcctaattatgatccaattcataaagcaacaattattcctagaggaagagcattaggaatggtaatgaatttacctgaaagagataaacacggtcattctataaagtatttaaaagcaagactagcagtttgctttggagggagagttgctgaagaaattatttttggaaaagataatatatctactggagctggaggcggaagtggatctgatattaatcaagcaactcaattagctagagcaatggtaacaaaatatggtatgagtgaagaattaggtccagtcgagtatggagaaaatcaagaggaagtgtttttaggaagatcagtaacccaaactcaaagtgtttcagaggcagttgctcaaaaaattgataaagaaataagaaaattggttgatgaaggatacaatcaagcaagaaaaatacttactgaaaaaattgatgatttacataaagtcgcaaaggctttgcttacttacgaaactctaacaggggaagaaattgaaaatattataaataaaaatatatatcccacaaataaagaagatgctaaatcagatgacagcgatcaaagctctgcattaggctcaatagggctaaaacctaaaatcgttcattaa

SEQ ID NO: 275488 - DNA, 1354 bp, Unknown
  Bacterial polypeptide expressing nucleotide sequence isolated from the Sargasso Sea
agtagacttggaggaaaaataccaagaggttgtttgttagttggtccaccaggaactggaaaaacattgttagctagagcaattgcgggtgaagcgggagttcctttttttacaatttccggttctgactttgtagaaatgttcgttggagttggagcatctagagtaagagatatgtttgagcaaggaaaaaaacattcgccttgtattatttttattgatgaaattgatgcagttggaagaagtagaggtgctggacttggtggcggaaatgacgaaagagagcaaacattgaaccagttattagttgagatggatggtttcgacactaatgaaggagtgattattatagcggcaacaaatagacctgatgtgcttgacccagctctattgagaccgggaagatttgatagacaagtagttgtctctctgccagatattataggaagagaaaaaatacttaaggtccatgcaaaaaaaatatcaatggcgcctgacgtaaatttaagaacagttgcaagaggaacacctggtttttcgggagcagatcttgcaaatctagtcaatgaagcagctttattggctgctagaaaaaataaaagaatagttacttttaatgaatttgaggaagcaaaagataaagttatgatgggagctgaaagaagatctatggtaatgactgaggaagaaaaaagattaacagcttaccatgaagcgggtcatgcaatcgttaccctaaatgaaaaagctgcatatccaattcataaagctactattattccaagaggaagagctttaggtatggtaatgcaattacctgaaagagatgaattatctcagacaagagagcaattacatgcacaaatggcaatagcaatgggcggaagagttgcagaagaaataatttttggagatgataaagtaaccacaggagcttcaagcgatattgaacaagcaactaaaagagctagagcaatggtgatgagggcaggtttgagtaaagagcttgggccagtagcgtacggagaaaatgaagaagaagtatttttaggacgttctgttgcaagacaacaaaacatgtctgaagagacagcaagaaaagtagatatagaaattagaaaatttgttgacaaaggatacgaaagagcaaaaaaagttttaaatgaaaaaatagaggatttacataaactagctaaagctcttttaacttatgagactttaactggaaccgaaatcgaggatttaatcaataaaaatgtttatccgacaaacaaggaagagttaagatcaaaagaagaagattcgggctcagcactaggatctattggattaaaacctaaaattgttcattaaa

SEQ ID NO: 275489 - DNA, 1546 bp, Unknown
  Bacterial polypeptide expressing nucleotide sequence isolated from the Sargasso Sea
tcattatttggtgtgttgttgtcttggtttcctatgttgcttttaatagcagtctggatattttttatgcgtcagatgcaaggtggtaaaggcggcgcaatgggctttggaagatccaaagcaaaaatgatgaatgaggttaaaggtaaagtaacttttaatgatgttgcgggtgttgaggaagcaaaagaagaggttgaagaagtagtagaatttttaaaagatccaagaaagtttagtagattaggtggcaaaatacctagaggatgcttgttggttggtccaccaggaacaggtaaaactttattagctcgagcaattgctggggaagctggtgttcctttttttactatatctggttctgattttgttgaaatgtttgttggagtaggtgcgtcaagagtaagagatatgtttgagcaaggaaaaaaacattcgccttgtattattttcatagatgagattgatgctgttggaagaagtagaggagcaggtttaggaggtggaaacgacgaaagagaacaaactttgaaccaattgctagttgagatggatggatttgatactaacgaaggagtaataataattgcagctacaaatagaccagatgttttggatcccgcacttttaagacctggaagatttgacagacaagttgtggtttcaaatccagatataattggaagagaaaaaatattaaaagtccatgctaaaaaaattactatgtcacctgatgtaaacttacgaactgttgcgagaggaaccccaggtttttcgggtgcagatttagctaatttagtgaatgaagctgcattgttagcggctagaaaaaataaaagaattgttacctaccaggaatttgaggaggcaaaagataaagtaatgatgggagctgaaagaagatcaatggtaatgacagaggatgagaaaaaattaactgcttatcatgagggtggtcatgctcttgtttcatttaatatgcctaactatgatccaatacataaagcaacaattattcctagaggaagagcattaggaatggtaatgaatttacctgaaagggacaaacacggtcattctataaagtatttgaaagcaagactagcagtttgttttggagggagagtcgctgaagaaattatttttggaaaagacaatatatctacaggggctgggggtggaagtggatcagacattaatcaagcaactcaattagctagagcaatggtaaccaaatatggtatgagcgaggaattaggtccagtcgagtatggagaaaatcaggaagaagtttttttaggaaggtcagttacccaaactcaaagtgtttcagaagcagttgctcagaaaattgataaagaaataagaaagttggttgatgaaggatataatcaagcaagaaaaattcttactgaaaaaattgatgatttacacaaagttgccaaggctctacttacttacgaaactctaacaggggaagaaattgaaaatattattaataaaaatatatatcctacaaataaggacgatgctaaatcagatgata

SEQ ID NO: 275490 - DNA, 1579 bp, Unknown
  Bacterial polypeptide expressing nucleotide sequence isolated from the Sargasso Sea
atgcttttacttattggtgtatggatttttttcatgcgtcagatgcagggcggaagaggcggagcaatgggatttggaaggtccaaggccaaattactaactgaaaataaaaataaagttacttttaatgatgtggctggaatagatgaagcaaaagaggagcttgttgaaattgttgagtttttaaaagatcctagaaaatttcaaaaacttggcggtagaattccaaaaggcgccctactaattggccctccaggaacgggaaagacattgcttgccagagctgtagcgggagaggccggtgtacctttctttacaatctcgggttctgattttgttgaaatgtttgttggtgttggagcatctcgagttagggatatgttcgagcagggaagaagaaatgcgccatgtataattttcattgatgaaatcgatgctgttggtagaagccgtggagcaggccttggtggcggtaatgatgagagagaacagacactgaatcagattttagttgagatggacggatttgatactcaggaaggtattattttggttgccgcgactaacagaccagatgtacttgatccggctctattaagaccaggtcgttttgacaggcaggttgttgtacctaatccagatatcttaggcagagaagctattctgaaagttcatattaaaaaaatctctgtcgcgcctgatgtagatatcagaacaatagcaaggggaacacccggtttttctggtgcagatctagctaacattgtaaatgaagcagcattgttggcagcaagaaaaaataagaaaattgttactatggtagattttgaggaagcaaaagataaagtaatgatggggtcagaaagaagatctcttgttatgagtcaagaagaaaaagaacttaccgcttaccacgaaggaggtcacgctgttgttgcattaaaccaatccgcttctgatccaatacataaagctacaataataccaagaggcagagcacttggaatggtaatgaggttgcccgaaagagaccaattatctttacctagagaaaaaatgttagctgatatcacagttgctatgggcggcagagtcgctgaagaaataatatttggtgacaaaaaagttacttctggtgcttcatcagatatcgaaatggcaactaagatggccagaaatatggtgactaaatttggaatgagcgaaaaattaggaccattacaatatggtgaaaatgaggaagaggtatttttaggaagatcagtacaaagacatcaaaatgtttctgaagaaacagcaaaacttatagactcagagatcaggcaaattgttgatagttgttatgatttagcaaagaaaatcttaaatgaaaaaatagacgatttgcatgctcttgcaaaaggcttaattgaatatgaaactttaaatggagatgaaataactacattgttaaaagaaggtaagattgacagatccaatcctgaagaagagattaataatgcaggaccatctgttcctaaaagtggtaagtcagctcccgttggtcctagtttcaagccaaaacctcaaacaagttaac

SEQ ID NO: 275491 - DNA, 1492 bp, Unknown
  Bacterial polypeptide expressing nucleotide sequence isolated from the Sargasso Sea
aatgaatttaaaaaacttagtaatgtgggtcataatagtcttactttctgtaggcctattcaacatgtttcaagatccaaataaaattaactcggagaaaaactctttgcctttctcaagttttttgagtgaggtagatgcaggtagagtggttgaagtacagattcaaggtaacaatatctctggagttttagcagatggaaaaacatttaaaactttctctccaaactatccagaattagttgataaactttcatcgaacggagtaagtattaacgcgacacctctagaagataaaatgccttcacttttaggaatattgctctcatggttccctatgcttttattaataggtgtatggatattttttatgagacaaatgcaaggtggtaaaggaggagcaatgggcttcggcagatcaaaagcaaaattgttaaatgaagctcagggcaaggtaactttcaatgatgttgctggagttgaagaagctaaagaggaagtagaggaaattgttgaatttttaaaagacccaaaaaaatttagtagattaggaggaaaaattcctaagggagctttattaataggtcctcctggtactggaaaaactttactagctaaagctatcgctggagaagctaatgttcctttcttttcaatttcaggatctgactttgtagagatgtttgttggtgttggagcttctagagtgagagatatgtttgaacaaggaaaaaaacactcgccttgtattatttttatcgatgaaattgatgcagttggtagaagcagaggagctggcttaggcggaggcaacgatgaaagagaacaaactttaaatcagctattggtagaaatggatggtttcgatacaaatgaaggaataattttgattgcggctacaaatagacctgacgttttagacccagctttattaagaccgggaagatttgatagacaagtagtagtcggtaatccagatataattggaagagaagctattttaaaagtacatgttaaaaaaataaacattggtcctgacgtcaaattaagaacaattgcaagaggaacacctgggttctctggtgccgatttggcaaatctaataaatgagtctgctttacttgctgcaagaaaaaataaaagagttgtgaccatgtcagatgttgaggaagctaaagacaaggtaatgatgggggctgaaagaagatcaatggtaatgtccgaagatgaaaaaaaattaactgcttatcatgagggaggtcacgcaatcgtcgctttaaatgaaaaagcatcagaccctattcacaaagcaactataattccaagaggcagagccttaggaatggtaatgagattacctgagagagatcaattatcagttacaagagaaaaaatgcatgcagatatctcagtagcaatgggaggcagaatagcagaggaaataattttcggtcacgataaagtcacttctggtgcatcttcagatatagac

SEQ ID NO: 275492 - DNA, 934 bp, Unknown
  Bacterial polypeptide expressing nucleotide sequence isolated from the Sargasso Sea
atgaatttaagaaatttactaatgtggggtctaatagtccttttatccgtgggcctatttaacttgtttcaaaacccaaataaaacgaacgatcaagctaacaatatagcattttcaaaatttttaaaagaagtggacaatggcagagttgttcaagttaaaatacaggggaacaacatatcgggcgttctatcagatggttcaaaatttattacttactcacctaattacccgggtctagtagaaaaactatccgaaaaaaatgttaatatagttgcaacaccagttgaagataaaatgccatcactattaggagttttattatcctggtttccaatgcttttattaattggagtgtggatattttttatgagacaaatgcaaggtggcagaggtggtgccatgggttttgggagatcaaaagcaaaattacttactgaagcacaagggaaagtaacattcaatgacgttgcaggtatcgaagaagcaaaagaagaagtagaggaaatagtagaatttttaaaagatccaaaaaaatttagaagacttggtggaaaaattcctaaaggcgcattgcttattggccctccaggaacaggaaaaactttattagcaaaagcgattgccggtgaagcaaacgttcctttttttacaatctcaggatcagactttgttgaaatgtttgtgggcgtaggtgcatcaagagttagagacatgttcgaacaaggcaagaagcacgctccttgtataatttttatagatgaaattgatgctgttggtagaagtagaggagctggtttaggtggtggaaacgatgaaagagaacaaactttaaatcagttattagttgaaatggatggttttgataccaacgaaggaattattttaattgcagcaacaaatagaccagatgtattggatccagctttattaa

SEQ ID NO: 275493 - DNA, 1873 bp, Unknown
  Bacterial polypeptide expressing nucleotide sequence isolated from the Sargasso Sea
atgtggggaataatagttttcttaactataggtctctacaatatgtttaaaagccctcaatcaaatccaagaggaggcaatcaaataattttttctgattttttaacatcagttgataatggagaagttgtaaaggttgagatacaaggcaaaaatatcaagggtgtttactctaacggtaattcattctctacttattctcctaatgatccaaatttaattgaaaaactatctgaaaaaggggtgagtatctcagctgctcctttagaggaaaaaatgccatctttatttggtgtattactttcatggttccccatgctgttattgattgctgtttggattttctttatgagacagatgcaaggtggaagaggtggagcaatggggtttggaaaatcaaaagcaaaaatgatgaatgagcttaaaggaaaagttacattcaacgatgttgcaggggtagaagaagctaaagaagaagttgaggagattgtagaatttttaaaagatccaaaaaaattcagtaggcttggaggtaaaataccaagaggtgcattattagtgggacctcctggtacaggaaaaactcttttagctagagcgatagcaggtgaagccgcagttcccttttttactatttcaggctcagattttgtcgagatgtttgttggtgttggtgcatcaagagtaagagatatgtttgagcagggaaagaaaaattccccatgcataatttttattgacgagatcgatgctgttggaagaagtcgtggcgcaggcctaggaggtggcaatgatgagagagaacaaacattaaaccaattattagttgaaatggatggtttcgatactaacgaaggagttattataattgctgcgactaacagacctgatgttttagatcctgcactgttaagaccaggtagatttgatagacaagtagttgtctcaaatccagatataattggaagagaaaaaattctaaaagtccatgttaaaaaaattaagatggctccagatgtaaatttaagaacagttgcaagaggtacaccgggtttttcaggagcagatctagcaaatcttgttaatgaggcagctttattagctgctagaaaaaataaacgtattgttactttggtagagtttgaggaagcaaaagataaagtaatgatggggtctgaaagaagatcaatggtaatgactgaagaggaaaaaactttaacagcttatcatgaggctggacacgcaattgtaactattaatgagagtgcagcatatccaattcataaagctactattatcccaagaggtagagctcttggtatggttatgcaattacctgaaagagatgaattatcacaaacacgtgagcagctacacgcccaacttgctattgcaatgggtggaagggttgctgaagaaataatatttggtgaagataaagtcactactggagcatcgagtgatatcgaacaagcaactaaaagagcaagagcaatggtcatgagagcaggattaagcaaggaacttggaccagttgcatatggagaaaacgaggaagaagttttcttgggtagatctgttgcaagacaacaaaatatgtcagaggaaacggcacaaaaagttgattccgaaataagaaaaatagttgataaaggttatgaaagagcaagaaaagtactaactgaaaaaattgatgatttgcacaagttagctaaagcactcttaacctatgaaactctttcaggagaggaaatagaaaatttgataaataaaaatgtttatccaaaagacaaagaagatattaaggttgaggataatgataagggttctgcattaagttcattaggacttaaaccaaagatagttcactaaa

SEQ ID NO: 275494 - DNA, 1597 bp, Unknown
  Bacterial polypeptide expressing nucleotide sequence isolated from the Sargasso Sea
atgaatctaaaaaatcttgcaatgtggggaataatagttttcttaactataggtctttataacatgtttaaaaatccacagtctaatgttaggggtggaaatcaaataatattttcagattttttaagttcagttgatgacggcgaagttctaaaagttgagattcagggaaataacatcaaaggcacttattcgaatggaaattctttttctacctatgctccaaatgatccaaatcttatagaaaaattatcagaaaaaggtgtgagtatttcagcagcacctttagatgaaaaaatgccttcattgtttggtgtactcttatcatggtttcctatgttactgcttattgcagtatggattttctttatgagacaaatgcaaggtggcaaaggtggagcaatgggatttggaaaatcaaaagctaaaatgatgaatgaattaaaaggaaaggttacttttaatgatgttgctggtgtagaggaagctaaagaagaagtagaagaaatggtagagttcttaaaagatccaaaaaaatttagtaggttgggtggtaaaattccaagaggagctttacttgttggacccccaggaactggtaaaactttattagcaagggcaattgcgggtgaagcaggtgttccgtttttcactatttcaggttctgattttgttgagatgttcgttggagtaggagcatctagagtaagagacatgtttgaacaaggtaaaaaaaattctccatgtattatttttatagatgagatagatgctgttggaagaagtagaggggcaggtctagggggtggaaatgatgagagagaacaaaccttaaaccagttattagttgaaatggatggttttgatacaaatgaaggtgtcataattatagctgcaacaaacagaccagatgtgctcgatccagctttattaagaccaggaaggtttgatagacaggtagtggtttcaaacccagatattataggaagagaaaaaattttaaaagttcatgtaaaaaaaataaaaatggcgccagatgttaatttaagaacaattgcaagaggcacgccaggattttcaggagctgatcttgcaaatatagttaatgaagcagctttgttagcagcgagaaaaaataagaggatagtcacattactagaatttgaggaagcaaaagataaagttatgatgggtgctgaaagacgttcaatggtcatgacagaagatgagaaaaaactaactgcataccatgaaggtggacatgctctagtgtcgtttaatatgccaagttatgatccaattcataaagctactattataccaagaggaagagctcttggaatggtaatgaacttacctgaaagagacaaacacggttactcaataaaatatctcaaagcgagattagctgtttgttttggaggaagagttgctgaagaattaatttttgggaaagataatatatctacaggagcaggtggaggaaatgggtctgatattaaccaggctacacagttagcaagagcaatggtaacaaaatacggaatgagtgaagaaatgggtccagttgaatatggagaaaatcaagaggaaggtt

SEQ ID NO: 275495 - DNA, 1894 bp, Unknown
  Bacterial polypeptide expressing nucleotide sequence isolated from the Sargasso Sea
tatgaattttaaaaatttagctatgtgggcagtaatagtctttttgactattggcttatacaatatgtttaaaggtccgcaaaactcggccaagggttctgatacaataatattttctcagtttctgacagaagttgataatggaagagtaactcaagttcaaattcaaggaaataatataaagggcacactttcaaatggtaaggattttataacctatgctccaaatgatccaaatttaattgaaaaacttacgagcaaaggtgtaagtatttctgcttcaccgctagatgaaaaaatgccgtcactatttggtgttttattatcttggtttcctatgttgttgttaattgcggtttggatcttttttatgagacaaatgcaaggcggcaaaggtggagccatgggatttggaaaatcaaaagcaaaaatgatgaatgagttaaagggaaaagtaacctttaatgatgtagcgggcgtagaagaagctaaagaagaagtagaggaagtagttgaatttttaaaggatccaaaaaaatttagcagacttggtggaaaaattcctagaggatgtctattagttggacctccaggaactggtaaaactcttttagctagagcgattgcaggagaggcaggagtgccattcttcacaatatcagggtcggactttgttgaaatgtttgttggtgttggtgcatcaagagtcagggatatgtttgaacagggaaaaaaacattcaccatgtataatttttatagatgaaattgatgctgtaggaagaagtagaggagcaggtttaggtggaggaaatgacgaacgagaacaaacccttaatcaattattagtagaaatggatggtttcgatactaatgaaggtgtaattataattgcagcaactaacagacctgatgttcttgatccagctttattaagaccaggacgttttgatagacaagtagtagtttctaatccagatataattggtagagaaaagatattaaaagtacacgttaagaaaatttcaatggcgccagatgtgaatttaagaacaatagcaagaggaactccgggtttttctggtgcagatttagcaaatttagtaaatgaagcagcccttttagctgctagaaaaaataaaagaattgttacttataatgaatttgaggaagccaaagataaggttatgatgggagctgaaagaagatcaatggttatgactgaggaagagaaaaaactaacagcatatcatgaggctggacatgctattgtaacaattaatgagaaagcggcacaccctatccataaggcgactataataccaagaggaagagctttaggtatggttatgcaattacctgaaagagatgagttatcgcaaacaagagaacaattgcatgcccaaatggctattgctatgggtggtagagttgcagaggagataatttttggtgatgacaaagttactactggagcttcaagtgatattgaacaagctacaaaaagagctagagcaatggttatgaaagcaggattaagtaaagaactaggtcctgttgcgtatggtgagaatgaagaagaagtttttcttggtagatctgttgcaagacaacaaaacatgtcagaggaaacagcaagaaaagttgattctgagattaggctaattgtagacaaaggatacgatagagcaaagaagatattaacagaaaagatagacgatttgcacaaattagcaaaggcacttttaacttatgagaccttaacaggcgatgaaattgagaatttagtgaacaaaaatatttacccttcaaataaagaagatctaaaaacagatgatgataaacaagattcggctttaggttctattggtttaaaaccaaaaatagttcattaa

SEQ ID NO: 275496 - DNA, 1609 bp, Unknown
  Bacterial polypeptide expressing nucleotide sequence isolated from the Sargasso Sea
aatgaatttcaaaaatttagcaatgtggggaataatagttctattaacaataggtctatataatatgtttaaaaatccccaaagatcaattggtacaaagaataatattattttttctgaatttttatcagaagtagaaaatggaagagtagttcaagtagagatacaaggtaaaaatatcaaaggagttttatctaatggaaacatgtttaatacttatgctccagatgatccaaacctaattcaaaaattaagtgataaaggtgttagtatttctgcaagtcctttagaagaaaaaatgccatcactgttaggaatactattatcatggttcccaatgttgctgttaattgctgtgtggatattttttatgagacaaatgcaaggcggcaaaggtggtgcgatggggttcggaaaatccaaagccaaaatgatgaatgagttaaaaggcaagataacttttaacgatgttgctggagtagaagaggccaaggaagaagttgaggaagttgtagaatttttaaaagatccaagaaaatttagtagacttggaggcaaaattccaagaggatgtttgttagtaggaccccctggaactggtaaaactttattagctagagcgatagctggagaagcgggagttccttttttcacaatttcaggatctgattttgttgaaatgtttgtaggagtaggggcatcaagggttagagacatgttcgaacaaggaaagaaacattcaccatgtattatttttattgacgagatagatgcggttggaagaagtagaggcgcaggtttaggaggaggaaatgatgaaagagaacaaactttaaatcagttattagttgagatggatggctttgatacaaatgagggagtgataattatcgcagcaacaaatagacctgatgtattagacccagcattattaagaccgggaagatttgataggcaggtagttgtttcaaatcccgatataataggaagagaaaagatattaaaagttcatgcaaaaaaaatatcaatggcggcagatgtaaatttaagaactgttgcaagaggaacgccaggtttttccggtgcagatttagctaatttagttaatgaagctgctttactagcggctagaaaaaataaaaggattgtaaccaatcaagaatttgaagaagcaaaagataaagtcatgatgggtgcggaaagaagatctatggttatgactgaagaagaaaaaaaattaaccgcttatcatgaagcaggacatgctatagtaacaattaatgagaaggcagcttatccaattcataaagctacaataattccaagaggaagggcacttggaatggttatgcaattaccagaaagggatgaagtttcacaaactagagaacaactacatgctcagatggcaatagctatgggaggaagagttgctgaggaaataatatttggtgaggacaaggtaaccactggagcggctagcgatatagagcaggctacaaaaagagcaagagctatggttatgagagctggtttaagcaaagagctaggccctgttgcttatggtgaaaacgaagaagaagtatttttgggcagatctgttgcgaga

SEQ ID NO: 275497 - DNA, 1816 bp, Unknown
  Bacterial polypeptide expressing nucleotide sequence isolated from the Sargasso Sea
actgtatgttgctctagggttgttaatatttattggcgttcagcaatacaatcaaactataaatgaacccgaagcgtcaacattttctgaatttaaggaattaataaacaatggagaagtggttgaggccactataaaagaacagtcaaacactgttcactttaaaacaaagaatgatgataaagtatttcaaacagagtatccagaaggatttgaaggagagatttttcaaatattagttgatcagaatatagtcttgacaacagatacagaaccagcaggttttcaggaatattttattgcatttcttccctggttatttattgcaggttttatgttttttatgttttctcaagttagatctaacggaaatcaagtaatgcaatttggaaagtctaaggcaaaagaagtagatgaacaattacctaaagttacttttaaagatgttgctggggctgaggaagcaaaagaagagctcgaggaaataaaagagtttttaaaatctccagaaaagtttaacaacctcggtgcaaaaattcctaaaggagttctcttggttggacctccgggaacaggaaaaactttactagcaagagcagttgccggcgagtctgaggtgcctttttatagtatctctggttcagacttcgtagagatgttcgtcggagttggtgcaagtagagtgagagacctgttcaaaaaagcaaaagagtctgcaccatcaataatatttattgatgaaattgatgcagttggaagaatgagaggagctggtttaggaggtggtcatgatgaaagggagcaaactttaaaccaacttcttgtagaaatggatgggtttgaatcaaaccaaggtgttatattaatggctgctacaaataggcctgatgttttagacccagcacttcttaggccaggtaggtttgatagacaagtaatagttgatagaccggatctaaacggcagaactgaaatcttaaaagttcacgctaaagacaaacctttagctaagaatataaatttaaaaactgttgccaaacaaaccccaggttttacaggtgcagatttggcaaacttattaaatgaggctgcattacttactgcaagaaaaaataaaaaaaaggtttctattcaagatatagaaaattcaatagacagagtgttagctggtccagaaaagaaaagccgtctaatgagtgatcaagaaaaattaattattgcttatcacgaaacaggacatgccttagttggttgggctttgccaaatgcagacccaatacataaagtaaccataatacctagaggaagagcattgggatatactcaggcacttccagaaggtgaaaaatatcttacttctaaagctgaactgaaagacaggctagcaatgttaatgggaggaagggtagcagaagagattatatttgctgatccgacaacaggagcttcaaatgatatagagaaagcaactgaaatagcaagaaagatggtcatggagtttggaatgagtgaaaaattaggccctatgctttatggaaaagggtctaatgaagtttttctaggaagagactacggtagacaacaggattactcagatgaggtagcctcatctatcgatgatgaagtcaagagtcttttaagtgatgcacatataattgctggaaaaattttaaaaaagtttaaaaaacagatggagataatggtgaaagtattaattgaaaaagaaactattgacagagatgaagttgccaagatatttaagtcagtaaataaagtcaaaattaaaggaactggacctacccttaagcttgcatag

SEQ ID NO: 275498 - DNA, 1387 bp, Unknown
  Bacterial polypeptide expressing nucleotide sequence isolated from the Sargasso Sea
taatatattcaatggagcttttgaagatggtagatcttttaaaacctatgccgctaatgacccaacactcgttgatagactgaatgatagaggtgtaaacatctcagccgcaccgctagatgatggctatccgtcacttcttggagttttaatttcctggttcccaatgctcttacttattggtgtatggatttttttcatgcgtcagatgcaaggcggaagaggcggagcaatgggatttggaagatccaaggccaaattactaactgaaaataaaaataaagttacttttaatgatgttgctggaatagatgaagcaaaagaggagcttgttgaaattgttgagtttttaaaagatcctagaaaatttcaaaaacttggcggtagaattccaaaaggcgccttattaattggccctcctggaacaggaaaaacattgcttgccagagcagtagcgggggaggccggtgtgcctttctttacaatctcgggttctgattttgttgaaatgtttgttggtgttggagcatctagagttagagatatgttcgaacagggaagaagaaatgcgccatgtataattttcattgatgaaattgatgctgttggtagaagccgtggagcaggtcttggcggtggtaatgatgaaagagaacagacactgaatcagattttagttgagatggatggatttgatactcaggaaggtattattttggttgccgctactaacagaccagatgtacttgatccggctctcttaagaccaggtcgttttgacaggcaggttgttgttcctaatccagacattttaggcagagaagcaattctgaaagttcatattaaaaaaatctctgtcgcgccagatgttgatattagaacaatagcaaggggcacacccggtttttctggggcagatctagctaacatagtaaatgaagcagcattgttggcagcaagaaaaaataagaaaattgttactatggtagattttgaggaagcaaaagataaagtgatgatggggtcagaaagaagatctcttgttatgagccaagaagaaaaagagcttaccgcttaccacgaaggaggtcacgctgttgttgcattaaatcaatccgcttcagacccaatacataaagcaacaattataccaagaggcagagcccttggaatggtaatgaggttgcctgaaagagaccaattatctttacctagggaaaaaatgttagcagatatcacagttgctatgggcggtagagttgctgaagaaataatttttggtgacaaaaaagttacttctggtgcttcatcagacatcgaaatggcaactaagatggccagaaatatggtgactaaatttggaatgagcgaaaaattaggaccatta

SEQ ID NO: 275499 - DNA, 1444 bp, Unknown
  Bacterial polypeptide expressing nucleotide sequence isolated from the Sargasso Sea
tgcaggagttgaagaggcaaaggacgatttacaagaaattgttgagtttttaaaagatccatctaaatttcaaagattaggtggaaaaattcctaagggtgcgttattagttggacctccagggactggaaaaacccttttagctagagcaattgcaggtgaagcaaatgttcctttctttacaatatcaggttctgattttgtcgaaatgtttgttggtgttggcgcaagtcgagttagagatatgtttgagcaggctaaaaagaatgctccatgtataatttttattgatgaaattgatgctgttggccgtcatagaggcgctggtttaggtggtggcaatgatgagagagagcaaactcttaatcagcttcttgttgaaatggatggctttgaaacaaatgaaggcattattttaatagcagcaacaaatagacctgatgttttagatccagctttattaagacccggtaggtttgatagacaagttgttgttccaaatccagatataattggcagagaaaagattttaaaagtacacactagaaaagtaccaatgtcttctgatgttgatattagaactgttgctcgtggtacaccaggtttctcaggagctgacttagccaatattgttaatgaggctgctcttcttgctgcaagaagaggaaagagaatggtaacacatactgaatttgaagacgcaaaagataaagtaatgatgggtcctgagagaagatccatggttatgactgatgatgataaaaagttaacagcttatcatgaagctggacatgcccttgtatctataaatatagaatcttctgatcctattcataaggctactataatcccaagaggtagagcactaggaatggttatgcgtttaccagaaagagatcaaatttcaattacacgtgagaaaatgtatgcaaaccttgcagttgcgatgggcggaagaatcgccgaagaaataatctttggtcatgataaagttacatctggtgcatcttcagatattcaacaggcaacgcaattagctcgagcaatggttatgcaatacggcatgtctgataaattaggtttcttaacttatggtgataatgaggacgaggtctttttaggtagatcagttgctcgacaacaaaatatgtcagaagaaattcataaattagttgattcagaagtaagaactattgttgatgaatcttatgcaaaagccgaaaaaattcttaaagataaagaaaaagatcttcacacaattgctcaaggtctacttgagtatgaaacactaactggtgatgaaataaatgctttattaggtggcgtaaagccatcacgtaacgatgactcagataaaagtgattctgagaacctttccggatctgtaccaaaaacgggtaagaaaactgatagcaattctaaacctggccttcaaggcgcatag

SEQ ID NO: 275500 - DNA, 1101 bp, Unknown
  Bacterial polypeptide expressing nucleotide sequence isolated from the Sargasso Sea
aatgaatttcagaaatattacactatggttttttattgcccttatcgttttcggtctatttaatcttttcagcaacaccagtggcgaaagaaatgtaattgatcttacatattctcaatttcttgatgaagtagaagctgggtccgtcaaagatgtagttataagaggcagcaatattaatggcgcatttgatgatgggcgttcatttaaaacatatgctgcaaacgaccctacgcttgtagacagattaaatgaaagaggtgtaaatatctctgctgctcctcttgacgatggctatccttcactattgggagtgcttatttcatggttccctatgctattgcttataggtgtatggattttctttatgaggcaaatgcaaggtggtagaggtggagcaatgggttttggaagatcaaaagcaaaacttttaactgaaaacaaaaataaagtaacttttaatgatgtagcaggaatagatgaagcaaaggaagaacttgtagagattgtagactttttaaaggatccaagaaaattccaaaagcttggcggaagaattccaaaaggagcattgttaattggtcccccaggaacaggtaaaacacttttagcaagagctgttgcgggtgaagctggcgtcccattttttacaatttcgggttctgactttgtagaaatgtttgttggcgtgggagcttcaagagttagagacatgtttgagcaaggaagaagaaattctccatgtataatatttattgatgaaattgatgctgttggaagaagccgtggagcaggtcttggtggcggtaatgatgaaagagagcaaacattaaaccaaattcttgtagaaatggatggttttgatacccaagagggtattatattggttgctgcaacaaacagaccagatgtattagacccagctttattaagacccggcaggtttgatagacaagtggtagttccaaatccagatattatgggcagagaagcaattctaaaagttcatattaaaaaaatatcagttgcccccgatgtagatattagaacaattgcaagaggaacacctggtttttcaggagccgatctagctaatattgt

SEQ ID NO: 275501 - DNA, 1128 bp, Unknown
  Bacterial polypeptide expressing nucleotide sequence isolated from the Sargasso Sea
tttgactatcggcctgtacaatatgttcaagaatccacaaggttcagtcaatcaaaaaaataacattatattttcagaatttttaacacaagtagataatgggagagttgttcaagtagaaattcaaggcaaaaatattaagggagtaatgtctaatggagaaatgtttaatacttatgctcctgatgacccaaatctaattcaaaaattgagtgataaaggcgtaagtatctcagcaagtccattagaagaaaaaatgccttcattatttggagtacttttatcatggtttcctatgctacttttaattgctgtatggatattcttcatgagacagatgcaaggtggcaaaggtggagctatgggctttggaaaatcaaaagccaaaatgatgaatgagttaaaaggtaaagttacatttaacgatgtagctggagtagaagaagcaaaggaagaagttgaagaagtagtcgaatttttaaaagatccaaagaaatttagtagattgggtggaaaaatacctcgtggatgtcttttagttggacctcctggaacaggtaaaactttactagcaagagctatagcaggagaagcaggggtaccattctttactatttcaggttcagactttgtagaaatgtttgttggtgttggagcttcaagagttagagatatgtttgatcaaggtaaaaaacactcaccatgtattatattcattgatgaaattgatgcagttggaaggagtagaggtgcaggtttaggtggtggtaacgatgagagagagcaaacgctaaatcaattacttgtagaaatggacggcttcgatacaaatgaaggtgtaataataattgcagcaactaatagacctgatgtgcttgatcctgctttattaagaccaggtagatttgacagacaggtagtagtttctaatcctgacttactcggaagagaaaaaatattaaaagtgcatgccaagaaaatatcaatggcaccagacgtcaatttgagaactgttgcaagaggaactccagggttttctggtgctgatctggcaaatttagtaaacgaagcagcattattagcagcaagaaaaaataaaagaatagttacctatatggaattgaagaa

SEQ ID NO: 275502 - DNA, 898 bp, Unknown
  Bacterial polypeptide expressing nucleotide sequence isolated from the Sargasso Sea
attgaataatggtaacttaaaaaactttttagtttgggcaattttagctttttcactattggggttatataatttggttcaaggaccaatgacaggaccaatacaatcagaaataagtttttcccagttacttgcagaagttgataatggtaatgtaacagatgttgagatatctggtgactcgatatcaggtcatttttctgatggaagaggcttttctacttttgcaccttctgatccaactttaatacaaagactatatgacaaaggtgtcgtaataaacgcaaaaccaactaaagaaggcggtccaaccttattgggggttcttatttcatggttcccaatgcttcttttaattgcggtatggatattctttatgagacaaatgcaaggtggtggcggaaaagcgatgggctttggaaaatcaaaggcaaaattacttaatgaaaaaaatggtattgtcacttttgatgatgttgcaggagttgaagaggcaaaggacgatttacaagaaattgttgagtttttaaaagatccttctaaatttcaaagactaggcggaaaaattcctaagggtgcgttattagttggacctccagggactggaaaaactcttttagctagagcaattgcaggtgaagcaaatgttcctttctttacaatatcaggttctgattttgttgaaatgtttgttggtgttggagcaagtcgagttagagatatgtttgagcaggctaaaaagaatgctccatgtataatttttattgatgaaattgatgctgttggtcgtcatagaggcgctggtttaggtggtggaaatgatgaaagagagcaaactcttaatcagcttcttgttgaaatggatggctttgaaacaaatgaaggcccattattttaa

SEQ ID NO: 275503 - DNA, 880 bp, Unknown
  Bacterial polypeptide expressing nucleotide sequence isolated from the Sargasso Sea
atgaatgaaataaaaggtaaagttacatttaacgatgtagctggggtagaggaagcaaaggaagaagtagaagaagttgtagaatttctgaaagatcctaaaaaatttagtagacttggtggtaaaatacctcgtggatgtcttctagttggacctccaggaactggtaaaactttacttgcaagagcaattgcaggcgaagctggagttcccttttttacaatatcaggatctgactttgttgaaatgtttgttggtgttggtgcctcaagagttcgagatatgtttgaacaaggaaaaaagcattctccatgcatcatatttattgatgagatcgacgcagtagggagaagtagaggtgcaggcttgggcggaggtaatgatgagagagaacaaacacttaaccaattacttgtagagatggatggctttgataccaatgaaggtgtgataataattgcagctactaacagaccagatgtacttgatccagctctattaagaccaggtagattcgatagacaagtagtagtatctaatccagacttgcttggaagagaaaaaatattaaaagtccatgctaagaaaatatcaatggcaccagatgtaaatttaagaacgatagcaagaggaacaccaggcttctctggtgctgatcttgcaaatttagtaaacgaagctgcattactagctgcaagaaaaaataaaagaatagttacatatatggaatttgaagaagcaaaagataaagtaatgatggggtcagagagaagatcgatggtaatgaccgaggaggaaaaaaaactcactgcttaccatgaagctggccatgccattgttaccataaacgagaaggcagcatatccaattcataaagcaa

SEQ ID NO: 275504 - DNA, 999 bp, Unknown
  Bacterial polypeptide expressing nucleotide sequence isolated from the Sargasso Sea
tatggataaaaaatggaaagttatagcactatgggtgctacccataacgatagtaatactaattacttggcaaattcttggctcttcaacaaatacccaagttaatcaaacaaatacatctaatccatcaagaaatgctccggttgcaaagatcagttatggaagatttcttgattatgtaaaagctggaagagtaacttctgttgacatttacgatggtggtaggaatgcaatcgtcgaatcagttgatcccgaaattgataacagaattcaacgtttaagagttgatctaccaggattggctcctgaattagtttcctcactaaaagatgagggaatcagttttgacattcatccacctaaaactgcaccagcgggagttggaattcttggcaaccttctctttccaattattttaataggaggtctgatcttactttcaagaagatcaaactcaatgccaggcggtccagggcaagcaatgcaatttggtaaaacaaaagcaagatttgcaatggaagctgagactggtgtcaaattcgatgatgtagcaggagtaaatgaagcgaaacaagatttagaagaggtagtcacatttttaaaacaacctgaaagatttacatctgtaggggctcaaataccaagaggtgttttactagttggtcctccaggaacaggtaaaaccctattagccaaggctattgctggagaagctggagttcccttcttctctctttcaggttcagaatttgtagaaatgtttgtgggtgtaggtgcaagtcgtgtcagagatttatttaaaagagccaaagaaaacagtccttgcttgatttttattgatgaaattgatgcagtcggaagacagaggggtgctggaattggaggaggtaatgacgaaagagagcaaacactcaatcaacttctgactgagatggatggatttgaaggtaatagtggaatcatcattattgcagctacaaatagacctgacgttcttga

SEQ ID NO: 275505 - DNA, 904 bp, Unknown
  Bacterial polypeptide expressing nucleotide sequence isolated from the Sargasso Sea
catggcaaaaaatctaatactctgggttgtcatcgccgttgtgctgatgtcagtgtttcagggttactccccctcttcttcgtcatcgcagaagatggattattctactttcctagacaatgttcgtgatggacaagtcgccagcgttgaagtgaaaagtgaccaacgtactatcgaaggttctaagcgcactggcgaaaaattcacgaccatcatgccactgtatgaccaagatttaattaatgatcttgaccgtaaaggcatcaccatgaaaggccaagaagccgaagaatcggggttcttaacccagatctttatttcttggttcccgatgttgctgctgattggggtatggattttctttatgcgccagatgcagggcggcggtggcaaaggcgctatgtcctttggcaagagcaaagccaagctgatgagcgaagatcaaatcaagaccacttttgctgacgttgccggctgtgatgaagccaaagaagaagtgaaagagctggtcgattatctgcgtgatccaaccaaattccaaaaactgggtggccgtattccaacgggtgtgctcatggttggcccgccaggtacaggtaaaaccttactggctaaagcgattgcgggcgagtcaaaggtacctttctttaccatttcaggttctgacttcgtagaaatgttcgtcggtgtcggtgcatctcgtgtgcgtgatatgtttgaacaagcgaagaaatcagccccttgtatcatcttcatcgacgaaatcgatgccgtaggtcgccaacgtggcgcaggcttaggtggtggtcacgatgagcgtgagcaaacccttaaccagatgctggttgagatggatggcttcgaaggtaacgaagggattatcgtgattgcggcgaccaaccgc

SEQ ID NO: 275506 - DNA, 1900 bp, Unknown
  Bacterial polypeptide expressing nucleotide sequence isolated from the Sargasso Sea
atgaattttagaaatttattaatgtggggtctgataatcttattatccgtaggattatttaatctttttcaaaatcctgacagaactaacacaaataacaatcaaattgcattttcgaaatttttacaagaagtagataatggaagagtggttgaagttgaaattcaaggcaataatatcaatggaactttatccgacgggtcaaaattcaaaacatattcacctaactatccagatttagttggtaagctttctgaaaaaaatgttagtataatcgcatcccctgttgaagataaaatgccttctttgttaggcgttcttttatcatggtttccaatgctactcttgatcggtgtatggatatttttcatgcgtcagatgcaagggggaagaggcggagctatgggatttggaaaatctaaagccaaactgttaaatgaagctcaagggaaagttacattcaatgatgttgcaggtattgaagaagccaaagaagaagtagaagagattgtagactttttaaaagatccaagaaaatttagaaaattaggtggaaaaattccaaaaggagctttacttataggacctcctggaacgggaaaaacacttcttgctaaagctattgccggcgaagcaaacgttcctttttttacaatttcaggttctgactttgttgaaatgtttgtaggagttggagcttcaagagttagagatatgtttgaacaaggaaagaaacatgcgccatgtataattttcattgatgaaattgatgcggttggaagaagtagaggcgcaggtttaggaggtggtaacgatgagagagagcaaacattaaaccagcttttagttgagatggatggtttcgatacaaatgagggtattatactaattgctgctacaaacagacctgacgttctagatcctgctttattaagaccaggtagattcgacagacaggtagtagtacctaatccagatattttaggaagagaagcaattttaaaagttcacgttaaaaaaataaatactggaccagatgtgaaacttagaactattgcaagaggaacccctggtttttctggagcggatctagcaaatttaattaacgagtcagcactattggctgcaagaaaaaataaaagagtagttacaatggtcgatatagaagaagctaaggataaagtaatgatgggtgccgaaagaagatcaatggtaatgacagaagaggaaaagaaattaactgcatatcatgaaggaggacacgctattgttgctttgaatgaaaaagcatctgaccccatacataaagcaactattatacctagaggaagagctttaggaatggttatgagattgccggagagagatcaactctctgttacaagagaaaaaatgtactcagatattgctgtggcaatgggaggaaggattgccgaagagattatattgggttatgaaaaaataacatctggtgcttcatctgatattgatatggccactaaaatggcaaaaaatatggtgacaagatatggcatgagtaaaagtttaggaaccatagcttacggagaaaatgaagacgaggtgtttttgggaagatcaattactagacagcaaaatatgtctgaagatactgcaaaaaaagtagactctgaagttaaaaaaattgtagatactggatacgagagagccagaacagttttaactgaaaaaatagacgatcttcacaaaatagccaaggctttattaatttacgaaactctaacaggcgatgaaattagagatcttatacttaaaaatattcaaccaaccaaactttctaaaaaacaggaagaagaagctgatgataaagcatcctcagcaatagattctattggtctaaaaccaaaaccagcactataat

SEQ ID NO: 275507 - DNA, 1070 bp, Unknown
  Bacterial polypeptide expressing nucleotide sequence isolated from the Sargasso Sea
agttgataagctttcctctaaaggtgtgagtatagtagctgcaccgcaagaagataaaatgccttcacttctcggaatattattatcatggtttccaatgcttttgcttattggtgtgtggatattttttatgcgtcaaatgcaaggcggtaaaggtggagcgatggggtttggaagatcaaaagcaaaacttttaaatgaagcgcaaggtaaagttacatttaatgatgttgcaggtgttgaagaagctaaagaagaagtagaagagatagttgaatttttaaaagacccaagaaaatttagtcgtctaggaggaaagataccaaaaggtgctcttttaattggtcctccaggcactggtaaaactttattagcaaaagcaattgcaggcgaagcaaacgttccattcttttcaatttctggttcagattttgttgaaatgtttgtaggagttggagcatcaagagttagagatatgtttgagcaaggaaaaaaacattcaccatgtattatttttatagatgaaattgatgcagttggaagaagtagaggtgcaggtttaggtggtggaaatgatgaaagagaacaaactcttaaccaattgctagttgagatggatggttttgatactaacgaaggtattattttgattgccgcaaccaacagaccagatgtcttagatcctgctttgttaagacctggaagatttgacagacaagttgttgtaggaaatccagatataattggaagagaggcgattttaaaagtacatgtgagaaaaataagtactggacctgatgtaaaactaagaactattgcaagaggtactccaggtttctcaggagcagatctagcgaatttaataaatgaatctgctttgcttgctgctagaaaaaataaaagagttgtaactatgtcggatatagaagaagcaaaagacaaagtaatgatgggtgctgaaagaagatcaatggttatgtcggaagatgaaaagaaacttactgcatatcacgaaggtggtcacgctattgtagcacttaatgagaaagcttctgacccccatacataaa

SEQ ID NO: 275508 - DNA, 1156 bp, Unknown
  Bacterial polypeptide expressing nucleotide sequence isolated from the Sargasso Sea
tttgaataatggtaactttaaaaatttcttagtttgggcaattttagctttttctttactgggactttacaatttagttcaaggacctattacgggccctgtgcaatcagagattagcttttcacaactgcttgctgaagttgataatggtaatgttacagatgtagagatttctggagattcaatatcaggccattttgctgatggaagaggttttaatacatttgcgccttctgatccaactttaattcaaagattatatgataaaggtgtggtaattaatgcaaagccaagtaaagagggtggccctacattattaggagttttgatttcttggttccctatgcttcttttaatagccgtttggattttctttatgagacaaatgcaaggtggtggtggcaaagctatgggttttggtaaatctaaagcaaaacttttaaatgaaaaaaatggtattgttacttttgatgatgttgctggtgtagaagaggcaaaggatgacttacaggaaatcgttgaatttttgaaggatccatcaaaatttcaaagattaggtggaaaaataccaaaaggagctctgttggttggtcctccaggaacaggtaaaacacttttagcaagagcaattgctggtgaagcgagtgttccatttttcactatttcaggatccgattttgttgaaatgtttgttggtgttggtgcaagcagagttagagatatgtttgatcaggccaagaaaaatgccccttgtattatatttattgatgaaattgatgctgttgggcgtcacagaggagctggtctaggcggtggtaacgacgaacgtgagcaaacgcttaatcaacttcttgtagaaatggatggctttgaaacaaatgaaggaattattttgatagcagcaacaaatagacctgatgttttagatccggccctattaaggccaggaagatttgataggcaagttgttgttcctaacccagatataattggtagagagaagattcttaaagttcacacaagaaaagttccgatgtcgtctgatgttgatattagaacagttgctcgtggaactcctggtttttctggagctgatttagctaatattgttaatgaagctgcacttctcgcggcgagaagaggaaagcgaatggta

SEQ ID NO: 275509 - DNA, 1516 bp, Unknown
  Bacterial polypeptide expressing nucleotide sequence isolated from the Sargasso Sea
ggtggtgcgatgggatttggcaagtcaaaagctaatatgatgaatgaacttaaaggcaaagtaacattcaatgatgttgctggagtagaagaggcaaaagaagaagtagaagaaattgtcgaatttttaaaagatcctaaaaaatttagtagacttggcggaaagataccaagaggtgctctacttgtaggaccgccgggtacgggaaaaactttattagcaagagctattgcaggtgaagcaggggttcctttctttactatatcaggttcagattttgttgaaatgtttgtaggtgttggtgcatcaagagtaagggatatgtttgaacaaggtaaaaaaaattctccttgtattatatttattgacgagattgatgcagttggaagaagtagaggtgcaggcttaggtggtggtaacgatgaaagagagcaaacattaaaccaattattagtagaaatggatggtttcgataccaatgaaggagttatcataattgcagcaacaaataggcctgatgtacttgatcctgcattattgagacctggaagatttgacagacaggtagttgtttccaatccagatattattggaagagaaaaaattctaaaagtccatgtgaaaaaaattaagatggcaccagatgttaatctaagaactattgcaagaggaacacctggcttctctggagcagacttagctaacttagtcaatgaagctgccttattagcggctcgaaagaataaaagaattgtaactttattagaatttgaagaagctaaagataaggtaatgatgggtgctgaaagaagatcaatggttatgactgaagatgaaaaaaaacttactgcttaccacgaaggtggtcatgctttagtctcatttaatatgcctagttatgatccaattcataaagccacaattattccaagaggaagagcgcttggaatggttatgaatttaccagaaagagataagcatggatattcaatcaaatatctaaaagcaagactggcagtctgcttcgggggaagagttgcagaagaattaatttttggaaaagacaacatttctacaggagcaggtggaggaagtggttcagatatcaatcaagcaactcaacttgcaagagcaatggtaactaaatatggcatgagtgaagaaatgggcccagttgaatacggagaaaatcaagaggaggtttttttgggtagatcggttactcaaacacaatcagtttcagaggaaattgctcaaaaaattgataaggaaattagaaagcttgtggacgaaggatataatcaagccaagaaaattttgactgagaaaatagatgatttacataaaattgctaaagctttaattacttacgaaactttaacaggtgaagaaattgaaaatataattaataaaaacttgtatccaaaagataaaatcttagaaaatcaagactcaaaagatgatcatgactcagctttaggtgctatgggtctaaaaccaaaaattgttcattaat

SEQ ID NO: 275510 - DNA, 1897 bp, Unknown
  Bacterial polypeptide expressing nucleotide sequence isolated from the Sargasso Sea
atgaaaaacattgcaatgtgggctatcatagtttttttaactattggtctttataatatgtttaaaaatccccaaacaaatattagaggtggggacaaggttatattctcagaattcttgacatctgttgaaaatggagaagtattaaaagtagaaatccaaggtaacaacattaaaggtgtgtattcaaatggaaactcatttacaacttattctcctaacgatccaaatttaattgaaaaactttctgaaaaaggagtgagtatttcagctgcacctattgaagaaaaaatgccatcattatttggtgtcctgctttcatggtttcctatgttgttattaattgctgtttggatttttttcatgagacaaatgcaaggtggtaaaggtggagccatgggttttggaagatcaaaagcaaaaatgatgaatgaacttaagggtaaagttacatttaatgacgttgcaggtgtagaagaagcaaaggaagaagttgaagaaattgtagaatttttaaaagatccaagaaaatttagtagacttggaggaaaaataccaagaggtgctttattggtcggtccaccaggcactggaaaaactttattagctagagcgatagcaggtgaagctggagtaccattttttacgatctcaggttcagatttcgttgaaatgtttgtaggagttggtgcttctagagtgagagatatgtttgaacaaggaaaaaaaaattccccttgtataattttcatagatgaaattgatgctgttggaagaagtaggggtgctggtttaggtggtggaaacgatgagcgagaacaaactcttaaccagcttttagttgagatggatggttttgatactaatgaaggagtaataattattgctgcaacaaacagaccagatgtattagatcccgctttattaagaccaggtaggtttgatagacaagtagttgtatctaatcctgacataattggacgagaaaaaattttaaaggttcatgttaaaaaaataaaaatggcaccagatgttaatttaagaacaattgcaagaggtacaccgggtttttctggtgcagatctagctaatttagtaaatgagtcggctttattggctgctagaaaaaataagagaattgttacactaaatgagtttgaggaggcaaaggataaagtaatgatgggagctgagagacgttcgatggtgatgacagaggatgaaaaaaaattaacagcttatcatgaagggggtcatgcgctggtatctttcaacatgccaagttatgatcctatacataaagcaactataattcctcggggcagagcattaggtatggtaatgaatttgccagaaagagataaacatggtcattctataaaatatttaaaagcgagattagcagtttgcttcggaggacgagttgctgaagaagtgatttttggaaaagataatatatcaactggagcaggtggaggtagtggatcagatataaatcaagctacgcaacttgccagagccatggttactaagtatggaatgagcgaagcaatggggcccgttgaatatggcgaaaatcaagaagaggtttttttaggaagatcagtaacacaaactcagtcagtctctgaggaagtagcacaaaaaatagataaagaaatcagaaagcttatagatgagggttataatactgcaaagaaaattttgactgaaaaagttgaagatttacacaaaattgctaaagctcttatgacttatgagacattaactggtgaagaaattgaaaatataatcaataaaaatatatacccagcagacaaacaagacttaaaagtagaagatgataaagggtcagcaatgggtgctctaggcctaaaaccaaaaattgttcattaga

SEQ ID NO: 275511 - DNA, 1096 bp, Unknown
  Bacterial polypeptide expressing nucleotide sequence isolated from the Sargasso Sea
tttgaatacatttaccaaaaatctttttttatggattacaattatacttgttgttctattactctttaatttattccaaaatggaaattcagggcgagtttctactgaattagcgtattctgattttgttgaatctgtaaaagcaggaaatattcgtgaggtaacaatatcgggtaactccatttcagctgctacgacaagtggaagaacaattactactttttcacctcaaggcgctaacatagtctcattacttgaaaatagtggtgtacgtattattgggaaacctgttgaacgagaagtttcttggatactttccactctcctttcttggtttcctatgctattattaataggtgtctggatctttttcatgcgacaaatgcaatcaggatctggcaaggcaatgggttttggtaaatcaaaagctaaacttcttactgaaaaacaaggtaaagtaacatttgaagatgttgcaggtatagacgaagcaaaaactgagcttgaagagatagttgaatttttaaaagatccaggaaagtttcaaagattaggtggaaaaatacctaaagggtgtctgttagttggccctcctggtactggaaaaacgcttttagccagggctatagctggtgaagctggagtaccttttttcactatttcagggtcagactttgttgagatgtttgttggtgttggtgcgagtagagttagagacatgtttgaacaaggcaaaaagaacgcaccatgtataatttttattgatgagattgacgcagttggaagacacagaggtgctggacttggtggtggaaatgatgaaagagagcagactcttaaccaattgctagttgaaatggatggttttgaagctaatgaaggagtaattttgattgcagctactaacagaccagatgttcttgatccagctttgttaaggcctggtagatttgataggcaagttgtagttcctaatccagatattcttggaagagaaaagattttaaaagttcatatgaaaaaagtacctttggcagatgatgtccaaccaagaacaattgcaagaggtacaccaggattttcggagctgatctag

SEQ ID NO: 275512 - DNA, 1348 bp, Unknown
  Bacterial polypeptide expressing nucleotide sequence isolated from the Sargasso Sea
atgaatttaaaaaatctagctatgtgggtgatcattgttgttttgactataggtctttacaacatgttcaagaatccacaaaatcttcaaaacaaaaataatactacaattattttctcccaatttttaacagaggttgataatggaagggttgtagaagttcagatacaaggtaacaatattaaaggtgttatggccgatggatcagttttttcaacatactcaccaaacgatccaaatttaatagaaaaattaactgataaaggtgttagtatatctgcagctccacttgatgagaaaatgccatctttgtttggagttcttttatcgtggttcccaatgttacttttaattgctgtttggatattctttatgagacaaatgcaaggtggtaaaggtggtgccatgggatttggaagatcaaaagcaaagatgatgaatgaggttaaagggaaagttacttttaacgatgttgctggagttgaggaagcaaaagaggaagttcaagaagtggtagagtttttgagagatccaaaaaaatttagtagattgggtggtaagataccaagaggttgtttgttagtaggacctccaggtacaggaaaaactttacttgctagagctattgctggtgaagcaggtgttcctttcttcacgatttctggatcagactttgttgaaatgtttgttggagttggtgcttcaagagtaagggatatgtttgaacaaggtaaaaaacattcaccatgcataattttcattgatgagatagatgctgttggaagaagtagaggagcaggtttaggtggaggcaatgatgaaagagaacaaacattaaaccaattactggttgagatggatggatttgatacaaatgagggtgtaataattattgctgcaactaacagacctgacgttttagatccggcgcttttaagaccaggaagatttgatagacaagttgtagtttcaaatccagatattataggtcgagaaaagattttaaaagttcatgctaaaaaaatttctatgtctccggatgtaaatttaagaactatcgcaaggggaacacctggattttcaggagcagatcttgctaatttagttaacgaggctgcattgttagcagcgagaaagaataaaagaattgtaacatctcaagagttcgaagatgccaaagataaagtaatgatgggcgctgaaagaagatctatggttatgacagaagatgaaaagaaattaacagcttaccacgagggtggtcatgcaatagtttcttttaatttgccaaattatgatccaatacataaagcgacaatcattcctagaggaagggcattaggaatgg

SEQ ID NO: 275513 - DNA, 1231 bp, Unknown
  Bacterial polypeptide expressing nucleotide sequence isolated from the Sargasso Sea
agaaataagtttttcccagttacttgcagaagttgataatggtaatgtaacagatgttgagatatctggtgactcgatatcaggtcatttttctgatggaagaggcttttctacttttgcaccttctgatccaactttaatacaaagactatatgacaaaggtgtcgtaataaacgcaaaaccaactaaagaaggcggtccaaccttattgggagttcttatttcatggttcccaatgcttcttttaattgcggtatggatattctttatgagacaaatgcaaggtggtggcggaaaagcgatgggctttggaaaatcaaaggcaaaattacttaatgaaaaaaatggtattgtcacttttgatgatgttgcaggagttgaagaggcaaaggatgatttacaagaaattgttgagtttttaaaagatccatctaaatttcaaagactaggcggaaaaattcctaagggtgcgttattagttggacctccagggactggaaaaactctcttagctagagcaattgcaggtgaagcaaatgttcctttctttacaatatcaggttctgattttgtcgaaatgtttgttggtgttggagcaagtcgagttagagatatgtttgagcaggctaaaaagaatgctccatgtataatttttattgatgaaattgatgctgttggtcgtcatagaggcgctggtttaggtggtggcaatgatgagagagagcaaactcttaatcagcttcttgttgaaatggacggctttgaaacaaatgaaggtattattttaatagcagcaacaaatagacctgatgttttagatccagctttattaagacccggtaggtttgatagacaagttgttgttccaaatccagatataattggcagagaaaagattttaaaagtacatactagaaaagtaccaatgtcttctgatgttgatattagaactgttgctcgtggtacaccaggtttctcaggagctgacttagccaatattgttaatgaggctgctcttcttgctgcaagaagaggaaagagaatggtaacacatactgaatttgaagacgcaaaagataaagtaatgatgggtcctgaaagaagatccatggttatgactgatgatgataaaaagttaacagcttatcatgaagctggacatgctcttgtatctataaatatagaatcttctgatcctattcataaggctactataatccccaagaggtag

SEQ ID NO: 275514 - DNA, 1906 bp, Unknown
  Bacterial polypeptide expressing nucleotide sequence isolated from the Sargasso Sea
atgaattttaaaaatctagcaatgtgggctgtaatagtttttttgactattggtctttacaatatgtttaaaaatccacaaggttcaattgcgcaaaaaaacaatattatattttcagaatttttatcagaagtagataatggaagagtagtgcaggttgagatacaaggcaataacatcagaggagtactttctaatggagaaaaatttataacatattctccaaacgatcctaatttaattgaaaaattatcaaacaaaggagttagtatatctgcatctccaatagaagaaaagatgccttcgcttttaggcgtacttctttcatggtttccaatgttattgcttatagctgtgtggatattttttatgagacaaatgcaaggaggaaaaggtggagcaatgggttttggtagatccaaagcaaaaatgatgaacgaattaaaaggaaaagtaacttttaatgatgttgcgggaattgaagaggcaaaggaagaagttgaagaagtagtagaatttttaaaagatccaaaaaaatttagtagactgggtggaaaaataccaagaggctgtttattagttggtcctcctggtactggaaaaactttattagctagagctattgctggagaagctggagttcctttttttacaatttctggttcagattttgttgaaatgtttgtaggagttggagcatcaagagtaagagacatgtttgaacaaggcaaaaaacattctccatgtataatttttatagatgaaatagatgcagtgggaagaagtagaggtgccggtcttggtggtggaaatgacgaaagagagcaaactttaaatcagttattagttgagatggatggttttgatactaatgaaggtgtgataataattgctgcaacgaatagaccagatgttttagatcctgcgcttttaagaccgggaagattcgatagacaagttgttgtttcaaaccctgatattctaggaagagaaaaaattcttaaagtacatgcaaagaaaatttcaatggcaccagatgtaaatctaagaactgttgctagaggtacgcctggattttcaggagcagatttagcaaacttagttaacgaatctgctttattagcagcaagaaaaaacaaaaggattgttacaaatcaagaattcgaagaagctaaagacaaagtcatgatgggtgcagaaagaagatcaatggttatgacagaggatgaaaaaaaactaactgcatatcacgaaggtggacatgctttagtttcttttaacatgccaagctatgatccaattcataaagctacaattatacctagaggaagagcccttgggatggtaatgaatcttccagaaagagataaacacggtcactctattaaatatctcaaagctagattggcagtttgttttggaggtagagttgctgaagaacttatatttggtaaagataatatatcaactggcgctggaggcggaagtggttcagatataaaccaagctacccaacttgcaagagcaatggtaacgaagtatgggatgagcgaagaattaggtcctgtagaatatggagaaaatcaagaagaagtatttttaggaagatcagtaacacaaactcaaagtgtttcagaggcagtagcacaaaaaatagataaagaaataagaaaattagttgacgaaggttacaatcaagcaaagcaaattttatcaagcaagatagatgatttacataaaatagctaaagctttactaacatacgaaactttaactggtgaagaaattgaaaatataatcaataaaaataaatatccaacaaacaaagaagatttaaaagttgaagaagacacggattcctcagctcttggttcgataggattaaaaccaaaaatagttcactaga

SEQ ID NO: 275515 - DNA, 1388 bp, Unknown
  Bacterial polypeptide expressing nucleotide sequence isolated from the Sargasso Sea
tttgagagaagcagaacagggaaatattcgagaagttcgcatcaataatagtggcgaaattcgaggtactaagcgttcaggcgaaactttccaaacattcgtaccttacttcgatgacaagttagtatctgacttggttaagaacgacgtaagagtgtacggtgaaccaccagaagagcagtctcttctgacgtctattttcatctcatggttccccatgttactgcttattggtgtatggattttcttcatgcgtcaaatgcagggtggcggcggccgtggcgctatgtcattcggtaaaagcaaagctcgcttgcttggtgaagaccaaatcaagacaacatttgctgacgtagcaggctgtgacgaagcgaaagaagatgtatctgaattggtagacttcctacgcgacccgtctaagttccaaaagctaggtggtaaaattccgaagggcgtacttatggtaggtcctcctggtacaggtaaaacgttgcttgcaaaagccattgccggtgaagcgaaagtaccattctttactatctctggttctgacttcgttgaaatgttcgtgggtgtaggtgcatctcgtgtgcgtgacatgttcgagcaagcgaaaaaagcggcgccttgtatcatctttatcgatgaaatcgatgcggtaggccgtcaacgtggtgctggtctaggtggtggtcacgacgaacgtgagcaaacccttaaccagatgcttgttgaaatggacggctttgaaggtcatgaaggtattatcgttattgcggcaactaaccgtcctgacgtactagaccctgcgcttcttcgtcctggtcgttttgaccgtcaagtagtggttggtcttcctgacatccgcggccgtgaacaaattcttaaggttcatattcgcaaagtgccagtggctgataacgtagaaccgtcagttattgctcgcggtacaccaggtttctcaggtgctgaccttgctaacctagtaaacgaagctgcgttattcgctgctcgcggcaacaagcgccttgtttctatggaagagtttgagaaagcgaaagacaaaatcatgatgggctctgagcgtaagtctatggtgatgtctgagcctgaaaaagaaatgacagcgtatcacgaagcgggtcacgctatcgtaggtcgcttagtgccagagcacgatccggtatacaaagtgtcaatcattccacgcggtcgcgcgctgggtgtgaccatgtacttaccagagcaagaccgagtgagccactctaaacagcacttagaaagtatgatttctagcttgtttggtgggcgtattgctgaagccatttattatggtgacgacaaggtaacaacgggtgcatctaacgacatcgaacgcgcaactgaaa

SEQ ID NO: 275516 - DNA, 1270 bp, Unknown
  Bacterial polypeptide expressing nucleotide sequence isolated from the Sargasso Sea
atgaatttaaaaaatctagcaatgtggggaatcatagtttttttaactataggtctttataacatgtttaaaaatcctcagtctaatatcagaggtggaaatcaaataatattttcagattttttaaattcagttgaaaacggtgaggttctaaaagttgagatccaaggaaataacattaaaggtgtttattcaaatggaaattctttttcaacctatgctcctaatgatccaaatctaatagaaaaattatcagagaaaggtgtaagtatttcagcagctcctctagaggaaaaaatgccttcattatttggtgtgcttttatcatggtttcctatgttactgcttattgcagtatggattttctttatgagacaaatgcaaggtggaaaaggtggagcgatgggttttgggaaatcaaaagcaaaaatgatgaacgaactcaaaggtaaagttacgttcaacgatgttgctggcgtagaggaagctaaagaggaagtagaagaaatagtagaatttttaaaagatccaaaaaaatttagtaggttaggtggaaaaattccaagaggtgctttgcttgttggtcctccaggaactggtaagaccttattagctagagcgattgcaggtgaagcgggtgttccgttcttcacaatttcaggttctgattttgtagagatgttcgttggagtaggggcatctagagtcagagatatgtttgaacagggtaaaaaaaattcaccatgtataatttttattgatgaaattgatgctgttggaagaagtagaggagctggtttaggtggtggaaatgatgaaagagaacaaacattaaatcagttattagttgaaatggatggttttgacactaacgaaggcgttatcattattgctgcaactaatagaccagatgtgcttgatccagctttgttgcgaccaggaagatttgatagacaggtagtggtttcaaacccagatattattggcagagaaaaaattttaaaagttcatgtgaaaaaaataaaaatggcaccagatgtcaatttaagaacaatagcaagaggtacaccaggtttttcaggagctgatcttgcaaatctggttaatgaagcagctttgttagcagcaaggaaaaataaaagaattgtaacattattagaatttgaagaggccaaagataaagtaatgatgggtgctgaaagacgctcaatggttatgactgaagacgagaaaaacttacagcataccatgaaggaggtcatgctttagt

SEQ ID NO: 275517 - DNA, 1288 bp, Unknown
  Bacterial polypeptide expressing nucleotide sequence isolated from the Sargasso Sea
tttgaataattttaccaaaaatttattactatggacgactatagtactggtagtcatcttgttatttaatatctttcaaggtggcaataaacaatctgtttcatctgaattggcatattctgattttgttgcttcagttaagtctgggaatataagagaagcaactatttcaggagagtcaattttagcatcaactaccaatggaagagtcatcacaacatatgcccctcaaggtgcaaatatagtgaatttgcttgaggaaaatagtgttagaattattggcaagccagttgaaagggaagtttcttggattctttctacattattatcttggtttcctatgttattactaataggtgtttggattttctttatgagacagatgcaatccggctcaggtaaagcgcttggatttggtaaatcaaaggccagactattaaatgagcaacaaggaaaagtaacttttgaagacgttgcaggcattgatgaggctaaaactgaacttgaggagatagtagagtttttaaaagaccctgctaaatttcaacgtcttggaggaaaaattcccaaaggttgtttgttggtaggacctcctggaactggaaagactctattggctagagcaatagccggagaagcagacgttcccttttttacaatttcagggtcagactttgtggaaatgtttgttggtgttggtgccagcagggttcgagatatgtttgaacaaggaaagaaaaatgctccatgcattatttttattgatgaaattgacgcagttggaaggcatagaggtgctggtttaggcggaggtaatgatgaaagagagcaaacattgaaccaactattagttgaaatggatggttttgaagccaatgaaggagtgattttaattgcagctacaaatcgtccagatgttttagatccagcattattacgtcctgggaggtttgataggcaagttgttgtccctaaccctgatattttaggtagagagaaaatattaaaagtgcatatgagaaaagttccattgtcagatgatgttcaacctagaacaatagctcgaggtacacctggtttttcaggggctgatcttgctaaccttgttaatgaagcagctcttttagcggccagaaagggtaggagaacagtttcaaatcttgaatttgaagaatcaaaagataaagttatgatgggatctgaaagaagatctatggttatgactgatgatgaaaaaaaacttaccgcttatcatgaagctgggcacgcaatagttgcgcttaattgt

SEQ ID NO: 275518 - DNA, 1220 bp, Unknown
  Bacterial polypeptide expressing nucleotide sequence isolated from the Sargasso Sea
tactacttactctcctaatgatccaaatttaattcaaactttaactgataaaggtgtaagtatttctgcttctccaattgatgaaaaaatgccctctctatttggagtgttactctcttggtttcctatgcttttactaatcgctgtatggatattttttatgagacaaatgcagggtggacgtggtggtgctatgggttttggaaaatcaaaagcaaagttaatgaacgaaattaagggcaaagttacttttaatgatgttgctggagttgaagaagcaaaagaagaagttgaggaagtcgtagagtttttaaaagatccgagaaaatttagtcgtcttggtggaaaaattccaagaggctgtcttttagttggacctccgggcacaggaaaaacattgttagctagagctattgcaggcgaagcaggtgttcctttctttacaatttcaggttcggattttgttgaaatgtttgtaggtgtaggagcttcacgagtaagagacatgtttgaacaaggtaaaaaaaattcaccatgtatcatatttattgacgagatagatgctgtaggaagaagtagaggcgcaggtttaggcggaggtaatgacgaaagagagcagactttaaaccaacttcttgtagagatggatggttttgatactaatgaaggtgtaatcattatagctgcaactaacagacctgacgtgttagacccagcattattaagaccaggaagatttgatagacaagtggttgtatcgttgccagacattattggtcgtgaaaaaattttaaaggttcatagtaaaaaaatttctatggctccagatgtaaacttaagaactatagcaagaggtactccaggattttcaggggcagatttagcaaatttagtaaatgaggctgctcttttagctgctagaaaaaacaaaagaatagttacatacttagaatttgaagaggcaaaagataaagtgatgatgggagctgagagaaggtcaatggtaatgacggaagacgagaaaaaattaacagcttatcacgaagcaggtcatgcaatagtcacaataaatgaaaaagcagcttatcctattcataaagcaactataattccaagaggaagagcattaggtatggtgatgcaacttccagagaaagatgaggtttcccaaacaagagaacaacttcatgctcaaatggctatagcaatgggtggaagag

SEQ ID NO: 275519 - DNA, 1021 bp, Unknown
  Bacterial polypeptide expressing nucleotide sequence isolated from the Sargasso Sea
tatgaattttaaaaatctattaatgtgggcaataataattttcctatctataggattatttaacatgtttcaggatcccaagaaaatcagttctaacaataatgagatggctttttcaagatttttgacagaagtagactctggtagagttgttgaggtacagattcaaggaaacaatatttcaggcgtattagcagatggaaataattttaccactttctcaccaaattacccaaacctagttgaaaaattatctgacaaaggagtgagtataactgcttcaccgaaagaggataagatgccatctttattaggaatacttttatcatggttcccaatgctattattaattggagtgtggatttttttcatgcgtcagatgcaaggtggaaaaggtggagctatgggatttggaagatcaaaagctaagttgttaaatgaagcaactggcaaagttactttcaatgacgttgcaggcgttgaggaagccaaagaggaagtagaggagatagttgaatttttaagagatccgaaaaaatttagcaggcttggtggaaaaattccgaagggtgctttattgattggacctcctgggacaggaaaaactttactagccaaagctatagcaggtgaagcaaacgttccatttttttctatatcaggttctgactttgttgaaatgtttgtaggtgttggcgcgtctagagtcagagatatgtttgaacaaggaaaaaaaaattcaccatgcattatatttatagatgagattgatgctgttggaagaagcagaggtgcaggacttggtggaggaaatgatgaaagagaacaaactttaaatcagttattagttgaaatggatggctttgatacaaacgaaggtataattttgattgctgctacaaatagaccagatgttcttgatcctgcgctattaagaccaggaagattcgacagacaagtagtagtcggcaatccagacattataggtagagaagctattttaaaagttcacattaaaaaa

SEQ ID NO: 275520 - DNA, 885 bp, Unknown
  Bacterial polypeptide expressing nucleotide sequence isolated from the Sargasso Sea
tatgaatttaagaaatatcatcctctggatttttatagcacttattgtattcggcttatttaatttatttaataatgctacggaaaataataaaagtgttcagttaacatactctcaatttttagatgaagttgaggtaggttcgataaaagatgttgttattaaaggtaataatataactggatcttatgaagatgggcgaagtttcaaaacctatgccgctaacgaccctacacttgtagatagattaaatgaaagaggggttaatatttctgcagcgcctctggatgatggttatccatcaattttaggtattcttatttcttggttcccgatgcttctacttataggcgtatggatattttttatgcgacagatgcaaggtggaaaaggtggagcaatggggtttggtcgctcaaaagcaaagctattaactgaaaataaaaacaaagttacatttaatgacgttgcaggaattgatgaagcaaaagaggaactggttgaaatagtggagttcttaaaagatcccagaaagtttcaaaaactcggtggtagaattcctaaaggtgcattattaatcggtcctccgggcacaggtaaaacccttttggcaagagcagtagctggagaggcaggtgtgccattctttactatttcaggttcagattttgttgagatgtttgtcggagtaggtgcgtcaagagtaagagatatgtttgagcagggaagaagaaatgctccttgtataatctttatagatgaaatagatgcagttggcagaagtagaggagcaggtcttggtgggggtaatgatgaaagagaacaaactttaaatcaaattttagttgaaatggatggctttgatactcaagaaggtattatttt

SEQ ID NO: 275521 - DNA, 934 bp, Unknown
  Bacterial polypeptide expressing nucleotide sequence isolated from the Sargasso Sea
atgaatttaaaaaatttagctatgtgggcaataatagtcttactgacactagggctgtataatatgtttaaaaatccacaaggttcatttaatcaaaaaaataatattattttttcagaatttttatctgaagttgaaaatggtcgtgtggtacaagtagaaatacaaggtaacaatgtaaatggtgttttctctaacggacaaaaattttctacatatgtccctaatgatcctaatttaattgaaaaattatcagataaaggcgtaagtatttcggcatcacccctagaagaaaagatgccgtctcttttaggtgttttgctatcatggtttccaatgcttcttttaattgcagtttggatattttttatgagacaaatgcaaggaggaaaaggtggcgcgatgggattcggtagatcaaaagcaaaacttatgaatgaattaaaaggaaaagttacttttaatgatgttgccggtatagaagaagccaaagaagaagtagaagaagtagtagaatttttaaaagatccacgaaaatttagtagacttggaggaaaaattccaagaggttgtttattagtaggacctcctggaacaggtaaaactttattagcaagagctatagcaggcgaagcgggtgttcctttttttacaatatcaggatcagattttgttgaaatgtttgtaggagtaggcgcttctagggttagagatatgtttgagcaaggaaaaaaacatgcgccatgtattatttttattgatgaaattgatgcagtaggaagaagcagaggagcaggtcttggtggcggaaatgatgagagagagcaaactttaaatcagcttttagtagaaatggatggctttgatacaaatgaaggagtgataatcattgcagcaacaaatagaccagatgttcttgatccagctctttaag

SEQ ID NO: 275522 - DNA, 1040 bp, Unknown
  Bacterial polypeptide expressing nucleotide sequence isolated from the Sargasso Sea
gttgagcggaatcggggcgttgttagaggatcggggtgggatgagtaaggcgatcttgggcggcgacagcgtcaaaccgcagcaagacgcgcattccaagacgacgttcgacgacgtcaagggcgtcgacgaggccaaggcggagttggttgaaatcgtcgagtatttgaaggcaccggaaaagtttacgaaattaggcggcaaattacccaaagggttgttgctcgtcggtcctccggggacggggaagacaatgttagcgaaggctgtcgccggggaagctcgggtaccctttttctactcgagtgggagcgaattcgaggaaatgttcgtcggcgtcggcgcgagacgcgtgcgagatttgttcaaagcggcgaagcagcacgcgccgtgtatcatcttcatcgacgaaatcgacgccgtcggcgcggcgcggaacccgaaggatcaacaaaacacgcgcatgacgttgaatcaactgctcacggaaatggacgggttcaaggcgagcgaaggtgtcatcgtgctcgcggcgacgaacacgccggggatgctcgacaaggcgctcattcgtccgggacgtttcgatagaaccgtctctgtgccgaatccagacgtcggtggacggcgcgagattttgaagacccacgcgaaagacgtcaagatggagcgaaacgtcgatttcgacgtcatcgcccgcgggacccctggttttagcggcgccgatttggccaatttgatcaacatcgccgcgctcaaggcggcgctcgacggcgtcgcggaagtgggcgcgaaacatttagactttgcaaaggatcgcatcttgatgggggcggagcgcaagagcgcggtgatgactccagaaaatcgcaagctcaccgcgtaccacgagggcggacacgcgttggtcgcgcttcgcacggcgggggcgaggcccgtgcacaaggcgaccatcgtgcctcgcggccaagcgctcggcatggtcatgcagctgcccgaaaaggatgaattacagatgacgagacgccagctgttggcga

SEQ ID NO: 275523 - DNA, 1045 bp, Unknown
  Bacterial polypeptide expressing nucleotide sequence isolated from the Sargasso Sea
atgaattttaaaaacttagtaatgtgggcaattatagtcttactttcagtagggctattcaatatgttccaggaccccaaaaaaattaattccgaaaaaaacaagctcgcattttctagtttcatgagcgaagtagaggcaggaagagtagttgaagttcaaattcaaggcaataatatttctggcgttttagcagatggaaaaacatttagtacttattctccaaattatccaaatttggtagaaaaattatctgaacaaaacatcagtatagtcgctactccattggaagataaaatgccttcacttttaggtattctgctttcatggtttccaatgttgttattaattggagtttggattttctttatgcgtcaaatgcaaggggggaaaggcggagctatgggttttgggagatctaaagcaaaattattaaatgaagcccaaggaaaagttacttttaatgatgtcgccggagttgaagaagcaaaagaagaagttgaggaaattgtagaatttttaaaagatccaaaaaaatttagtagactgggaggaaaaatacctaaaggagccttattgataggtcctcctggtaccggaaaaactttattagctaaagctattgcaggggaagcaaacgtgccttttttttctatttcaggatctgattttgtggaaatgtttgttggagttggagcttctagagttagggacatgtttgagcaaggaaaaaaacattccccatgtataattttcatagatgagattgatgctgtgggaagaagcagaggagcgggtctaggtggaggcaatgacgaaagagaacaaacccttaaccaacttcttgttgaaatggatggttttgatactaatgaaggaataatattaattgcagctacaaacaggccagatgtattggatcctgctctgttaaggcctggtagatttgatagacaagttgtagtttcaaatccagatattataggtagagaggcaattttaaaagttcatgtaaaaaaaataaatactggcccaagatgttaaa

SEQ ID NO: 275524 - DNA, 1539 bp, Unknown
  Bacterial polypeptide expressing nucleotide sequence isolated from the Sargasso Sea
tgactgggctgttggtcaatggcttactcgccgtcatggtgcttgggctgctggtgcttctcttccgccgctccgccaacgtcgctcaaaaggctttgggttttggccgcagtcaggctcgcgtgcaacccgagggggccgtggccgtgcgcttcgacgatgtcgctggcatcgatgaagccaaaaccgaactccaggaggtggtcaccttcctcaaagagccggagcgctttacggccttgggagccaagattccccgcggcgtgctcctggtcggccctcctggaacaggaaaaacgcttctcgccagagccattgccggtgaagccgaggtgccttttttcaccctctcggcctctgaattcgttgagatgttcgtgggcgtgggcgcgagccgagttcgcgatctcttccgtcaggccaaagcgaaggcgccttgcatcatcttcatcgacgaaatcgatgcggttggccgtcagcgcggcgctggtattggcggtggcaatgatgagcgcgagcagaccctcaaccagctgctcactgaaatggatgggttcgaggagaactccggcatcatcatgttggccgccaccaaccgagccgatgtgctcgatacggcactgctacggcctggccgcttcgatcgtcagatcctggtggagttacctgatcgccgcggccgcgaagcaattcttggtgtgcatgcccgtagccggcctttaagtgaggaggtatcgatggaactctgggcccgcaggacgccgggattctctggagctgatctggccaacctgatcaacgaagccgcgatcctcaccgctcgccgcgatcgcaacttcatcgatgagcaagccatgcatgatgcgcttgagcgcatcaccctcgggatgggcgcaagaccgctccaagacagcgccaaaaagcgtttgattgcctaccacgaagttggccacgccctgatcacaacgctgctgccagcagcggatgccctcgacaaactcaccatcctgcccagagctggaggcattggcgggtttgcacgcaccacacccgatgaggagatcctcgatagcggcctaatcagccgcgcctacctgcaggcgcgattggtggtagcgatgggtggccgagccgcagagctggttgtctttggaccttccgaagtcacccaaggtgccagcagcgatttgcaaatggtgacccgcatctcccgcgagatggtgacccgctacggcttctcggtcttggggccggtggcctttgaacgtgacggtggcgaggtcttcttaggtcgcgactggatgcgcactgaacatgaatactcagccagcactggacaggccatcgatcagcaggtgcagcaactggcgcggcaagccttggaccaggcagttgcgttactcgaaccacgccgtcaactgatggatgagctggtcacgaatctgattgagatggaatcgctcagcggcgatgaattccgagaacgggtcgagagctttgaagcagcacgtctcaacccgaccgcagttgtcagctgat

SEQ ID NO: 275525 - DNA, 1044 bp, Unknown
  Bacterial polypeptide expressing nucleotide sequence isolated from the Sargasso Sea
aatgccatcattgtttggcgttttactttcatggtttcctatgttgctattaattgctgtttggattttctttatgagacaaatgcaaggcggcaaaggtggcgcaatgggatttggaaaatcaaaagcaaaaatgatgaacgaactaaaaggtaaaattacttttaacgatgttgcgggagtagaagaggctaaagaagaagtagaagaaattgtagagttcttgaaagatcctaaaaaatttagcagacttggaggaaaaattcctagaggagctttgttggttggacctccaggaactggaaaaactttattagcaagagcaattgcaggtgaagcagatgttccattctttacaatatcaggctcagactttgtggagatgttcgttggtgttggtgcgtcaagagtaagggatatgtttgagcaaggtaaaaaaaattcaccttgcataatttttattgatgaaatagatgccgtaggtagaagtagaggagcaggcttaggtggagggaatgatgaaagagagcaaacgctaaaccaattattagtagagatggatggatttgatactaatgagggtgtaattataattgcagcaactaacaggccagatgtacttgaccctgctttgttaagaccaggcagatttgatagacaagtagttgtatctaacccagacataattggaagagaaaaaattttaaaagtccatgttaaaaaaattaaaatggcaccagatgtaaatttaagaactatagcaagaggaacaccaggtttttcaggagcagacttagcaaatctagtaaatgaatctgctttattagctgcaagaaaaaataagagaatcgtgactttgtcagaatttgaagaagctaaagataaagtaatgatgggagcagaaagacgttcaatggtaatgacagaagatgaaaaaaaattgacagcatatcatgaaggaggtcacgctttggtctcttttaatatgcctagttatgatccaatacacaaagcaacaattattccaagaggtagagcattagg

SEQ ID NO: 275526 - DNA, 1395 bp, Unknown
  Bacterial polypeptide expressing nucleotide sequence isolated from the Sargasso Sea
ttgaagaagtagtcgagtttttaaaagatcctaaaaaatttagtagacttggtggaaaaataccaagaggatgtttgttagtgggtcctcctggaacgggaaaaactttacttgcgagagcaatagctggagaggccgatgtacctttctttacaatatcaggatcagatttcgttgaaatgtttgtaggtgttggtgcatctagagtaagagacatgtttgaacaaggaaagaaacactcaccgtgtattatctttatagatgaaattgatgcagttggaaggagtaggggtgcaggactaggaggaggaaatgatgaaagagagcaaactttaaatcaacttttagtcgaaatggatggatttgacacaaatgaaggagtgataattattgcagcaacaaatagaccagatgttttagaccctgcacttttaagaccagggagatttgatagacaagttgtggtttcactacccgatataattggaagagagaaaatattaaaagttcattcaaaaaaaatatcgatgtcaccagatattaatttaagaacaattgctcgaggaacacctgggttttcaggagctgatctagctaacttagtaaatgagtcagcgcttcttgcggctcgaaaaaataaaagaatagttacaaatgcagaatttgaagaagcaaaagataaagttatgatgggtgctgaaagaagatcaatgattatgactgaagaggagaaaaaactgacagcatatcatgaggcaggtcatgcaatagtaacaattaatgaaaaagcagcttacccaattcataaggcaactataattccaagaggaagagcattagggatggtaatgcagttacctgaaaaagatgaagtgtcacaaactagagaacagctacatgcgcaaatggcaattgccatgggaggaagggttgcagaggaaattatttttggagatgaaaaagtaaccacaggtgccacaagtgatattgaacaagcaacaaaaagagccagagcaatggtaatgagagcaggacttagcaaagaattgggcccaatagcatacggtgaaaatgaagaagaagtatttttaggtcgttcagtagctagaacacaaaatatgtcagaagaaactgcaaaaaaagttgatgcagaaataaaaaagtttgttgagaaaggctatgaaagagcaaagaaagtacttactgaaaaaatggatgatttacataaactagcaaaagcacttcttacttatgagacgttatcaggtgaagaaatagaaaatttaataaacaaaaatatttatccagataaaaaagaagatctaaaaagtgatgagggcgaacaaagttcggctcttggatctattggactaaaacctaaagtagttcattaat

SEQ ID NO: 275527 - DNA, 1213 bp, Unknown
  Bacterial polypeptide expressing nucleotide sequence isolated from the Sargasso Sea
aaaatgatgaatcaagttaaaggaaaggtgacttttaacgatgtagctggagtagaagaagcaaaggaagaagttgaagaagttgtagaatttttaagagatccaagaaaatttagcagactaggaggtaagattcctagaggttgtttattagtaggtcctccaggaacaggtaaaactttattagctagagcaatagcaggagaggctggagtgcctttttttactatttcaggatcagattttgttgaaatgtttgttggagttggtgcttcaagagtgagagatatgtttgaacaaggaaaaaaacattcaccatgtataatatttattgatgaaatagatgcagtaggaagaagcagaggagcaggcttaggtggaggcaacgatgaaagagagcaaactttaaatcaattgttagtagagatggacgggtttgataccaatgaaggtgttatcataattgcagctacaaataggccagacgttttagatccagcattattaagaccaggtagatttgatagacaagtagtagtgtcattacctgatataattggaagagaaaaaattctaaaagttcatgcaaagaaaatttctatggcacctgatgtaaatttaagaaccatagcaagaggcacgcctggtttttcaggggcagatcttgcaaacttagtaaatgaagcagcattgttagctgcaagaaagaataaaagaatagtgactacttctgaatttgaggaagcaaaagataaagttatgatgggtgctgaaagaagatccatggtaatgactgaggaagaaaaaaaacttactgcatatcatgaagctggacatgctatagttacaattaatgagaaagcagcctaccctattcataaagcgactataattcctagaggtagagcattgggtatggttatgcaattacctgaaaaagatgaagtatctcaaacaagagaacagcttcacgcccaaatggcgatagcaatgggtggtagggttgcagaagaaataatatttggagatgacaaggtaacaactggtgcagcaagtgatattgaacaagcaactaagagagcgagagccatggttatgagagcaggtttaagtaaagaactaggaccaatattatatggagaaaatgaagaagaggtattcctaggcagatcagttgcaagacaacaaaatatgtctgagaaacagcaaaaaa

SEQ ID NO: 275528 - DNA, 1909 bp, Unknown
  Bacterial polypeptide expressing nucleotide sequence isolated from the Sargasso Sea
atgaatttaaaaaatctggctatgtgggtaatcattgttgttttgactataggtctttacaacatgttcaaaagtccacaaaatcttcaaaacaaaaataataaaacaattattttttcggaatttttaacagaggttgataatgggagggttgtagaagttcagatacaaggtaacaatatcaaaggcgtgatggctgacggatcagttttttcaacatactcaccgaacgatccaaacttaatagaaaaattaactgataaaggtgtaagtatatctgctgctccacttgatgagaaaatgccatctttgtttggagttcttttatcgtggtttccaatgttacttttaattgctgtttggatattctttatgagacaaatgcaaggtggcaaaggtggtgccatgggatttggaagatcaaaagcgaaaatgatgaatgagatcaaaggaaaagtcactttcaacgatgtagctggagttgaggaagcaaaagaggaagtacaagaagtagtggaatttttaagagatccaaaaaaatttagtagattaggtggcaagataccaagaggttgtttgctagtaggaccgccaggtacaggaaaaactttacttgctagagctattgctggagaagcaggtgtgcctttcttcacgatttctggatcagactttgttgaaatgtttgttggagttggtgcttcaagagtaagagatatgtttgaacaaggtaaaaaacattccccatgcataattttcattgatgagatagatgctgtaggaagaagtagaggcgcaggtttaggtgggggcaatgatgaaagagaacaaacattaaaccaattactagttgagatggatggatttgatacaaatgagggtgtaataattattgctgcaactaacagacctgacgttttagatccagcgcttttaagaccaggaagatttgatagacaagttgtagtttcaaatccagatattataggtcgagaaaagattttaaaagttcatgctaaaaaaatttccatgtctccggatgtaaatttaagaactatcgcaagaggaacacctggattttcaggagcagatcttgctaatttagttaacgaggctgcattgttagctgcgagaaaaaataagagaattgtaacatctcaagaatttgaagatgcaaaagataaggtgatgatgggtgccgaaagaagatcgatggtcatgacagaagatgagaagaaattaactgcttatcacgaaggtggacatgcaatagtttcttttaacttgccaaattacgatccaatacacaaagcaacaatcattcctagaggaagagcgttaggaatggtcatgaatctaccagaaagagataaacatggtcactctattaaatatttgaaagcaagattagccgtgtgctttggaggaagagttgctgaagaactaatatttggtaaagataatatatcaacaggtgcaggtgggggaaatggttcagatatcaatcaagcaactcaattagcaagagccatggttaccaagtatggaatgagtgaggaacttggtcctgttgaatatggtgaaaatcaagaggaagttttccttggaagatctgtaacacaaacacaaagcgtttcagaggctgttgctcaaaaaattgataaagaaataagaaaacttgttgacgaaggttataatcaagcaaaaactattttaacaagcaaaattgatgacttacataagatagcaaaagctcttttaacttacgaaactttgactggagaggatatagcaaaaataattaacaaaaacgaatatccgcctaataaggaagatttaaaagttgaggatgaaagttctgactctgctttaggatcaattggtttaaaaccaaaaattgttcattaat

SEQ ID NO: 275529 - DNA, 963 bp, Unknown
  Bacterial polypeptide expressing nucleotide sequence isolated from the Sargasso Sea
atgtgaagcagaactatgcggaagcatacaaacagtaccaggatgccctcgattattttatgatggccatgaaatatgagaaaaatgataagctcaaggaactcatccgcaagaaatttaccgaataccttgatcgagctgagaaactcaaggagcacattgccaaatctgaagagaaacggtcgaaagcgaaagtgtctgccaccggtgcagctggcggttctactgccggaggacctgacgttaagggtgacgacggtgatgacccggagatcaaaaaaatgaggcagggattgcagggggctattcttagtgagagtccgaatgttaaatgggaggacgttgcgggtttggcccaagcgaaggagtcgttgaaagaggccgtaatcttgccgatcaaattccctcagttattcactggtaagaggactccttggcgaggtattttgctatacggacctccgggaacgggtaagagttatttggcaaaggcggttgctacagaagcgaagagtacattcttctccgtgtcaagtagtgatctggtttctaagtggatgggtgaaagtgaacgtttagtcaagcagcttttccaaatggcacgtgaacaaaagccggccatcatcttcatcgacgaaattgattctctcacgggtgcaaggggcgaaggggaatctgaagcttcgagacgtatcaagacggagtttttggttcagatgaacggagtggggaatgaagaaacaggtgttcttgtgttgggtgctaccaacattccttggcagcttgatcctgcaatcaagcgaaggtttgagaagcgaatatacattcctctcccgacattcaggcccgtcgtaggatgttcgaaatcaatgtcggctccacacctcacggtttcacacccgccgacttcacccccctcgctgagcaaaccgaggggtactttggaagtgatattgctgtgat

SEQ ID NO: 275530 - DNA, 1021 bp, Unknown
  Bacterial polypeptide expressing nucleotide sequence isolated from the Sargasso Sea
agttacttttaatgatgttgctggtgttgaagaggctaaagaagaagttgaagaaatagttgagtttttaaaagatccaaaaaaatttagtagactaggaggaaaaattcctcgtggagctctattagttggaccaccaggtacaggaaaaacattattggctagagctattgctggagaagctagagttcctttttttacaatttcagggtctgactttgttgagatgtttgtaggagttggggcctctagagtaagagatatgttcgaacaaggaaaaaaaaattctccttgtataatttttattgatgaaatcgatgctgtgggaagaagcagaggcgcaggattaggagggggaaatgatgaaagagaacaaactttaaatcaacttttagtagagatggatggctttgataccaatgaaggtgttataattattgcagcaactaacagaccagatgtattagaccccgctttattaagaccaggaagatttgatagacaagttgtagtttctaacccagatataattggtagagaaaaaattttaaaagttcatgtcaaaaaaattaagatggctcccgacgttaatttaagaaccatagcaagaggaacaccaggattttcaggggcagatcttgctaatttagtaaatgagtctgcgttacttgccgcaagaaaaaataagaggattgttactttgagtgaatttgaagaagcaaaagataaagtaatgatgggcgcagaaagacgttcgatggttatgactgaggatgaaaaaaaattaactgcatatcatgagggaggccatgctttagtatcatttaatatgccgagttacgatccaatacataaagccacaattattcctagaggaagagcattaggaatggttatgaatttacctgaaagagacaaacacggtcattcaataaaatatcttaaagctagattagctgtatgttttggtggcagggttgctgaagaagtaatttttggtaaagataatatatcaacaggg

SEQ ID NO: 275531 - DNA, 1894 bp, Unknown
  Bacterial polypeptide expressing nucleotide sequence isolated from the Sargasso Sea
atgaattttaaaaacttagctatgtggggaataatcgtcattttgacgattgggctatacaatatgtttaaaaaccctcaagggtctatttcccaaaaaaataaaattattttctctgaatttttaactgaagtagacaatggaagagttgttaaagttgaaatacaaggaaaaaatataaaaggtgtattatcaaatggcaatcaatttactacctatgcacctgaagacccgaacttaattcagaagctaagtgataaaggtgttagcatttctgccagtccattagaggaaaaaatgccttcattattaggaatacttctctcatggttcccaatgcttttactaattgctgtttggatcttttttatgagacagatgcagggtggaaaaggtggagcaatgggatttggaagatcaaaagctaaaatgatgaatgaggtaaaaggcaaagttacctttaatgatgttgcaggtgttgaagaagcaaaagaagaggttgaggaagttgttgaatttttaaaagatcctagaaagtttagtagactaggtggtaaaataccaagaggttgtttattagttggtcctcctggaactggtaaaacactattagctagagcaattgctggagaagcaggagttcctttttttactatttccggatcagattttgttgaaatgtttgtaggtgttggagcctcaagagtacgagatatgtttgaacaaggaaaaaaacattctccgtgtattatatttattgatgaaattgatgcagtcggaagaagcagaggagcaggtcttggtggtggaaatgatgagagagagcaaacacttaatcagctattagttgagatggatggttttgataccaatgagggtgttattattattgctgcaactaatagaccagatgtattagacccagctcttttgaggcctgggagatttgacagacaagtagttgtttcaaatccagatttaattggaagagaaaaaattttaaaagtgcatgcgaagaaaatatcaatggcacccgatgttaacttaagaacagttgctagaggaacacctggattttctggtgcagatttagcaaatcttgtcaacgaagcagcattgctcgctgcaagaaagaataaaagaatagtaacctatcaagaatttgaagaagcaaaagataaagtgatgatggggtctgagagaagatcaatggtaatgtctgaagaagagaaaaaattaacagcttatcatgaggcaggtcacgctatagtaactataaatgagagagctgcatatcctatacataaagcaacaattataccgagagggagagctttagggatggtaatgcaattaccagagagagatgaggtttcacaaacaagagaacaactacatgcacaaatggcaatagccatgggaggtagagttgcagaggaattaatttttggagaagataaagtaactacaggagcttcaagtgatatcgaacaagcaactaaaagggcaagagctatggttatgagagccggattaagtaaagaaatgggtccagtggcatacggtgaaaatgaggaagaagtatttttaggaagatccgttgccagacagcaaaatatgtcagaagaaactgctagaaaagtagacagtgaaattagaaaatttgttgacatgggttacgagagagcaagaaaagtattaactgaaaaaattgatgatctgcataaactagcaaaagctttgcttacttacgaaactttaacaggtgcggaaattgaggatttaattagtaaaaatatttatcctaagaataaagaagatctaaaagttgaagatgatgatcaaagctcagcacttggttcaatgggcctaaaaccaaagatagtgcactaag

SEQ ID NO: 275532 - DNA, 1373 bp, Unknown
  Bacterial polypeptide expressing nucleotide sequence isolated from the Sargasso Sea
tggcccgccaggtacaggtaaaaccttactggctaaagcgattgcgggcgagtcaaaggtacctttctttaccatttcaggttctgacttcgtagaaatgttcgtcggtgtcggtgcatctcgtgtgcgtgatatgtttgaacaagcgaagaaatcagccccttgtatcatcttcatcgacgaaatcgatgccgtaggtcgccaacgtggcgcaggcttaggtggtggtcacgatgagcgtgagcaaacccttaaccagatgctggttgagatggatggcttcgaaggtaacgaagggattatcgtgattgcggcgaccaaccgccctgacgtattggactctgcgctgctgcgtccaggtcgtttcgaccgtcaagtggttgttggcttgccagatgttcgcggtcgtgagcaaattcttaaagtgcatatgcgtaaagtgccactttctgaagatgttaaagcgagcgtgattgcccgtggtaccccaggtttctccggtgccgatttagccaacttagttaacgaggctgcactgtttgcggcgcgcggtaaccgccgtgttgttggtatggaagaattcgagcgtgcaaaagacaagatcatgatgggtgctgagcgccgctctatggtgatgtcagaagccgagaaagaaatgacggcataccacgaagcgggccacgcgattgtgggctgtttagtgccagagcatgaccctgtgcacaaggtcaccattattccacgtggtcgtgcactcggcgtgaccttcttcttacctgaggccgatgcgattagccaaagccgtcgtaagttagaaagccagatttcggttgcctacggtggtcgtttagccgaagagctgatctacggtagcgaaaaagtgtctacaggtgcttcgcaagacattaaatacgcgacatcgattgcccgtaatatggtgacccaatggggcttctccgacaagcttggtccattactctatgccgaggaagaaggtgaagtattcttaggtcgtagcatgggtaaagccaaggcgatgtccgatgagactgcgacgcttatcgatgctgaagtgaaggcctttatcgacaaaaactacggtcgtgccaagcaaattctgctggataacatcgatattctgcattcgatgaaagacgcgctgatgaagtatgaaaccattgattcactgcaaattgacgatttgatgaaccgtcgtgaagtgcgtcagcctgctgattggcaagcagatgacaatggttcaaatgacaaaggcaatggcaaaggtgaacctgcggttaaagtcgacgaagtggttaagtcagcgcctgttgagtcagagctgaaagatgccgatgagtcacccgctaaataac

SEQ ID NO: 275533 - DNA, 1102 bp, Unknown
  Bacterial polypeptide expressing nucleotide sequence isolated from the Sargasso Sea
ttggattttctttatgagacaaatgcaaggtggtaagggaggtgctatgggatttggtcgctcgaaagctaaaatgatgaacgaactaaaaggcaaagtaacatttaatgatgtggcaggcgtagaagaagcaaaagaagaagtagaagaagttgttgaatttttaagagatccaaaaaaatttagtagacttggtggaaaaataccaagaggctgtttattagttggtccaccaggaactggaaaaacattattggctagagcaattgcaggcgaagcgggagttcctttttttacaatttctggttctgactttgtagaaatgtttgttggagttggagcttcaagagtaagagatatgtttgaacaaggaaaaaaacactcaccttgtataatttttattgatgaaattgatgcagttggaagaagtagaggtgctggactgggtggcggaaatgacgaaagagaacaaacattaaatcagttattagttgagatggatggatttgatactaatgaaggagtaattattattgccgcaacaaatagaccagatgtacttgatccagctcttttaagaccaggaagatttgatagacaagttgtcgtatctttaccagatattataggaagagaaaaaatacttaaagttcatgcaaaaaaaatatcaatggcaccagacgtaaatctaagaacagttgcaagaggaacgcctggtttttctggagcagaccttgcaaatttagtaaatgaagctgctttattggctgcgagaaaaaataaaagaatagttacttttaatgaatttgaggaagcaaaagataaagtgatgatgggagctgaaagaagatcaatggtaatgactgaagaagaaaaaagactaacagcctaccatgaagcaggccatgccatcgttaccctaaatgaaaaagccgcgtatccaattcataaggccactataatcccaagaggaagagctttaggaatggtaatgcaattacctgaaagagatgaattatctcagactagggaacaattacatgcacaaatggcaatagcaatgggaggaagagttgcagaagaaataatttttggggatgac

SEQ ID NO: 275534 - DNA, 985 bp, Unknown
  Bacterial polypeptide expressing nucleotide sequence isolated from the Sargasso Sea
atgaatttcaaaaatttagcaatgtggggaattatagttctattaacaatagggctttataatatgtttaaaaaccctcaaggatcagtaggtgtaaaaaataatattattttttctgaatttttatcagaagtagacaatgggagagtcgtccaggttgagatacaaggtaaaaatataaaaggagttttttctaacggaaaaatgtttaaaacttatgctccagatgatccaaatttaattcaaaagttaagcgacaaaggtgttagtatttctgccagtccattagaagaaaaaatgccttcacttttaggagttctactttcgtggtttccaatgctattactaattgctgtttggatattttttatgagacaaatgcagggaggaaaaggcggtgcgatgggttttggtaaatctaaagctaaaatgatgaatgaattaaaagggaaggtaacttttaatgatgtagcaggagtagaagaagccaaagaagaagttgaggaagtagtagaatttttaaaagacccaagaaaatttagcagacttggtggaaaaatcccaagaggatgtttgttagtgggtccaccgggcacaggcaaaactctattagctagagcaattgcaggagaagcaggagttcctttcttcactatatctggatcagattttgtagaaatgtttgtaggagtaggagcttcgagggttagagacatgtttgaacaaggaaagaagcatgctccgtgtataatctttattgacgagatagatgctgttggaagaagtagaggagcaggtctaggcggaggaaacgatgaaagagaacaaaccttaaatcagttattagttgaaatggatggtttcgacactaacgaaggagtgataattattgctgcaactaatagacccgatgtattagatcctgcacttctaagaccagaaagatttgatagacaagtagtcgtttctaatcctgatataatag

SEQ ID NO: 275535 - DNA, 880 bp, Unknown
  Bacterial polypeptide expressing nucleotide sequence isolated from the Sargasso Sea
tatgaattttaaaaacttagcaatgtggggtataatcgtaattttgacgattggtctatacaatatgtttaagaacccacaaggttcgatttctcaaaaaaataaaattatattctcagaatttttgactgaagtagataatggaagagttgttaaagttgagatacaaggaaaaaatataaagggtgtattatcaaatggaaatcaattcaccacctatgctcctgaagacccaaatttaattcagaagttaagtgataaaggtgttagcatttccgccagtccattagaggaaaaaatgccttcattattagggatacttctttcatggttcccaatgcttttattaatcgcggtttggattttctttatgaggcaaatgcaaggaggaaaaggcggagcaatgggctttggaagatcgaaagcgaaaatgatgaatgaagtaaaaggaaaagttacttttaacgatgttgctggtgtagaggaggctaaagaagaagtagaggaagttgtagagtttctaaaagatcctaggaagtttagcagattaggtggaaaaattccaagaggatgtttattagtaggtcccccgggtacaggtaaaacattattagctagagctattgctggagaagcaggagtaccattcttcacaatttctggatcagatttcgttgaaatgtttgttggtgttggagcttcaagagttagagatatgtttgaacaaggaaaaaaacattctccttgtattatatttattgatgaaattgatgctgtaggaagaagtaggggagcaggtctcggcggaggaaatgacgaaagagagcaaacacttaatcagctattagttgagatggatggttttgatactaatgaaggt

SEQ ID NO: 275536 - DNA, 1570 bp, Unknown
  Bacterial polypeptide expressing nucleotide sequence isolated from the Sargasso Sea
gctgttactaatcgctgtatggatattctttatgagacaaatgcaaggtggaaaaggtggcgctatgggttttggaaaatcaaaagccaaaatgatgaatgaacttaaggggaaagttacttttaatgatgttgcaggagttgaagaagcaaaagaagaagttgaagaaatagttgaatttttaaaagatccaaaaaaatttagtaggctaggtggaaagatacctagaggtgcattattagttggacctccaggaactggtaaaacactattagctcgagcaattgctggggaagcgggtgtaccttttttcacaatatctgggtcagactttgtagaaatgtttgttggtgttggggcatcaagagtaagagatatgtttgaacaaggtaaaaaaaattcaccatgcataatatttattgatgaaattgatgcagtgggaagaagtagaggtgctggtttaggtggtggaaatgatgaaagagaacaaacacttaaccaattgttagttgaaatggatggttttgatactaatgaaggtgtaattataatagctgcaactaaccgaccggacgttcttgatccagctctattaagaccaggtagatttgatagacaagtagttgtttctaatccagatataattggaagagaaaaaattttaaaagttcatgttaaaaaaatcaaaatggctccagatgtaaatttaagaactatagccagaggtacgccgggattttcaggagctgatcttgcaaatttagttaatgaagcagctttattagcagcaagaaaaaataaaagaattgtgactttaacagaatttgaagaagccaaagataaagtaatgatgggtgccgaaagacgttcaatggtaatgactgaagatgaaaaaaaacttacagcataccatgaaggtggccatgctttagtatcgtttaatatgcctagttatgacccaattcacaaagctacgattattccaagaggtagagcgcttggaatggttatgaatttaccagaaagagacaagcatggatattcaattaaatatttaaaagctaggatggcagtttgttttggtggtagagttgccgaggaaataatttttggaaaagatgacatatccacaggagctggtggaggaagtggatcagacataaatcaagcaactcaacttgctagagcaatggtaacaaagtatggtatgagtgaggtgatgggaccagtggaatatggtgaaaatcaagaggaaatattcttgggcaggtctgttactcaaacacaatcagtttcagaggagacttctcagaaaatagacaaagaaataagaaaactaattgacgaaggttataatcaagcaaagaaaatattaactgaaaaaatagatgatttacacaagatagccaaagcgctaatgacatatgaaacattaacaggtgaagaaatagaaaatataatcagtaaaaatttatatccaaaagataagataattgagaaacctgaggaaaatgatgatcaaaattcagccctaggtgcgatgggcttgaaaccaaaaatagttcattaa

SEQ ID NO: 275537 - DNA, 1183 bp, Unknown
  Bacterial polypeptide expressing nucleotide sequence isolated from the Sargasso Sea
aggcttggaggtaaaataccaagaggtgcattattagtgggacctcctggtacaggaaaaactcttttagcaagagcgatagcaggtgaagcagcagttcccttttttactatttcaggctcagattttgtcgagatgtttgttggtgttggtgcatcaagagtaagagatatgtttgagcagggaaagaaaaattccccatgcataatttttattgacgagatcgatgctgttggaagaagccgtggtgcaggtctaggtgggggcaatgacgagagagaacaaacattaaaccaattattagttgaaatggatggtttcgatactaacgaaggagttattataattgctgcaactaacagacccgatgttttagatcctgcattattaagaccaggtagatttgatagacaagtagttgtctcaaatccagatataattggaagagaaaaaattctaaaagttcatgttaagaaaattaagatggctccagatgtaaatttaagaacagttgcaagaggtacaccaggtttttcaggtgcagatctagcaaatcttgttaacgaggcagctttattagctgctagaaaaaataaacgtattgttactttggtagaatttgaggacgcaaaagataaagtaatgatggggtctgaaagaagatcaatggtaatgactgaagaggagaaaactttaacagcttatcatgaggctggacacgcaattgtaactattaatgagagtgcagcatatccaattcataaagctactattatcccaagaggaagagctcttggtatggttatgcaattacctgaaagagatgaattatcacaaacacgtgagcagctacatgcccaacttgctattgcaatgggtggaagggttgctgaagaaataatatttggtgaagataaagttactacaggagcatcgagtgatatcgaacaagcaactaaaagagcaagagcaatggtcatgagagcaggattaagcaaggaacttggacctgttgcatatggagaaaacgaggaagaagttttcttgggtagatctgttgcaagacaacaaaatatgtcagaggaaactgcacagaaagttgactctgaaataagaaaaatagttgaaaaaggttatgaaagagcaagaaaagttctaactgaaaaaattgatgattgcacaa

SEQ ID NO: 275538 - DNA, 1829 bp, Unknown
  Bacterial polypeptide expressing nucleotide sequence isolated from the Sargasso Sea
tatgaatttaagaaatttagctatgtggggcattatagttcttttaaccattggactatacaacatgttcaaaaatccccaagcttctttaaacaagagcgatacaatcattttttcacagttcttaaaagaagttgagaatggaagagttgtagaagttcaaatacaaggtaacaacataaatggattgatgtcggatggaaaacaattcaaaacttactctccaaattatcctaatcttgtggaaaaattatcagatactggcgttagtatttctgctgctccaatagatgaaaaaatgccatcactacttggtgtgcttttatcttggtttcctatgttgctattgatcgctgtatggatattttttatgagacaaatgcaaggtggaaaaggtggagcaatgggctttggaaggtcaaaagcaaagatgatgaatgaggttaaaggtaaagttacgtttaatgatgttgctggggttgaagaagctaaagaagaggttgaagaagttgttgaatttttaagagatccgagaaaatttagcagactaggtggaaaaattcctagaggctgtttattagtaggtcctccaggaactggtaaaactttattagctagagctatcgcaggagaagcaggagttccattcttcactatatcaggatcagattttgttgagatgttcgttggtgttggagcgtcaagagttagagatatgtttgaacaaggcaaaaaacattctccttgtattatttttattgacgaaatagatgctgtcggaagaagtagaggagctggtttaggtggtggtaacgatgaaagagaacaaaccttaaaccaacttttagtagagatggatggatttgatacaaatgaaggtgtaataattatagcggcaactaatagaccagatgttttggatccagcacttctaagaccaggaagatttgatagacaggtagtagtttcaaaccctgatatacttggaagagaaaaaattttaaaagttcatgcaaaaaaaataactatggcttcagatattaatttaagaacaattgctagaggaactcctggattctctggcgctgacctagccaatttagttaatgaatcagcattgttagctgcaagaaaaaataaaagagttgtaacaaaccaagaatttgaggaagcaaaagataaagttatgatgggtgcagagagaagatccatggtaatgacggaagatgaaaaaaaattaacagcttaccatgagggtggtcatgcattagtatcatttaatatgccaagttacgatcctatacataaagctacgattataccacgtggtagagcactaggaatggtaatgaatttaccagaaagagataaacatggtcattcaattaaatatcttaaagcacgtctagctgtatgtttcggtggcagagttgctgaagaattaatttttggaaaagataatatttccacaggtgcgggtggtggatcaggctcagatattaaccaagcgacacaattagcaagagctatggttacaaaatacggtatgagtgaggaattaggacctgtagaatacggcgaaaatcaagaagaagtatttttaggaaggtccgtaactcaaacacagagtgtttctgaagcagtagcacaaaaaattgataaagaaattagaaaacttgttgatgagggttataaccaagcaaaggaaatacttacaactaaaatagatgatctacataaaattgccaaagctttaataacctatgaaactttaactggtgatgaaataaaggatttaataaataaaaatattttccaacaaataaaga

SEQ ID NO: 275539 - DNA, 1295 bp, Unknown
  Bacterial polypeptide expressing nucleotide sequence isolated from the Sargasso Sea
ttctgtaggagcaagaattcccaaaggggttctattggtaggacctcctggtactggtaaaacccttttagctaaagcaattgcaggtgaagctggtgtaccattcttttcattatcaggttctgaatttgttgagatgtttgttggtgttggagctagtagagttagagatcttttcaaaagagctaaagaaaatagtccctgtttaatttttattgatgaaatcgatgcagtcggaaggcaaagaggtgcaggtattggtggaggtaatgatgagagagaacaaactctcaatcaattacttactgaaatggatggtttcgaaggtaatagcggcataataataattgcagccacaaacaggcccgatgttttagactcagctctaatgagaccaggcagatttgatagacaggtaactgtagatgcacccgatatcaagggcagattatcaatattggaagttcatgcaaggaataagaaacttcaagaggatttaacacttgaaagcattgcgagaagaacaccaggttttactggagcagatttagcaaatttattaaatgaggctgctatattaactgccaggaggagaaaagactctataagtatctcagaaattgatgactctgtagataggattgttgcaggaatggaaggttctccattaacagatggtagaagcaagagattaattgcttatcatgaagttggccatgctctcataggttcacttgtcaaagcccatgatcctgttcaaaaagtgactgtcattccaagaggtcaagccaaaggattaacttggttcaccccagatgatgaacaaacccttgttagcagggcgcaattaaaagctaggataatgggtgctttaggaggaagagctgctgaagatgtagtttttggagaaggtgagattacaacaggagctggaggtgatttccaacaagttgcttcaatggcccgccaaatggttactagatttggaatgagtaagttaggtccgatagctttagaaagtggtaatcaagaagtctttgttggtagagatttaatgactagaagtgaaatttctgattcaatctctaaacaaatagatgaaagcgtaagaataatggttaaagaatgttataaagaaacctacgatatagtaagcaaaaatagagaagctatggataaaatagttgacttattaatcgaaaaagaaacattagatggtgatgaatttttaagtattctctccaaattcactaaaattcctgagaaagaaagaacaccccaactattgaactaaa

SEQ ID NO: 275540 - DNA, 1474 bp, Unknown
  Bacterial polypeptide expressing nucleotide sequence isolated from the Sargasso Sea
aaagcaaaaatgatgaaccaattaaaaggacaagtaactttcaacgatgttgctggagttgaagaagcaaaagaagaagtagaagaagttgtagaatttttgaaagatcctaaaaagtttagtagacttggtggaaaaataccgagaggatgtttattagttggtccgccaggaactggaaagacattactagctagagcaatagccggagaagctggagttcctttttttacaatttcaggttctgactttgttgaaatgtttgtaggtgtaggcgcatcaagagttagggatatgttcgaacaaggaaaaaaaaatgcaccttgtataatttttatagatgaaattgatgcagttggaagaagtagaggagccggtttaggtggaggaaacgatgaaagagaacaaactttaaaccagttgcttgtagaaatggatggctttgaaactaatgaaggtgtaataatcattgccgcaactaatagacctgatgtgttggatccagcacttttaagaccaggtagatttgatagacaggtggtcgtctcacttccagatattataggaagagagaaaattttaaaagttcatgcaaaaaaaatatcaatggcacctgatatcaatttaagaactgtcgcaagaggtactccaggtttttccggagccgatcttgctaatcttgtaaacgagtcggcattattagcggcgagaaaaaataaaagaattgtaacaaatctggaatttgaagaagctaaagataaagtaatgatgggtgctgaaagaagatctatggtaatgactgaagatgagaaaagattaacagcataccatgaagccggtcacgcaatagtaaccatgaatgaaaaagcagcttatcctatacataaagctacaataattccaagaggaagagcattaggtatggtaatgcagttgccagaaaaggatgaagtttctcaaactagagaacagttacatgcacaaatggcaatagcaatgggaggaagagttgcggaagaattgatttttggagatgataaagtaactaccggagctgccagcgatattgaacaagcaactaaaagagcaagagcaatggttatgagagcaggccttagcaaagaactaggtccagttgcttatggtgaaaatgaagaagaagtatttttaggtcgttcagtagcaagacaacaaaacatgtcggaagaaactgctaaaaaggtagattctgaaattagaaaatttgttgaaaaaggatatgatagagcaaaaaaagtattaactgaaaaaattgatgatctacataaattggccaaagctcttttgacttatgagacattaacaggtcgtgaaattgaagatttaattaacaagaatgtatatccatccaataaagaagatctaaaaagcagtgataaagatgataattcggctcttggaactattggattaaaaccaaaaattgttcactaat

SEQ ID NO: 275541 - DNA, 737 bp, Unknown
  Bacterial polypeptide expressing nucleotide sequence isolated from the Sargasso Sea
gatgacgggtgtgaaagctgtgagctcgaagcagattagattgacgattcgttcgcccaacgtgttaacgatgacgttggtggatcttccgggcatcacgcgcgtcgccgtcggagaccaaccagaggatatcgaacagcagattcgtaacatgatcctgagctacataaaaaaggagacctgcttgatattggccgtgacgccggcgaactctgacttggcgaacagcgatgccttgacgttgtccaagcaggtggatcccgaggggaagcgcacgctcggcgtgatcacgaagctcgatatcatggaccgcggcacgaacgcgctcagatatttgaagggagaggttgttcctttgcaattgggctacgtcggcgtcgtgaaccgatgtcaagcggacattgaagatcgtcgcaccatgcgacacgcgcgtcaaagcgaggctgatttcttcgcatccaaaccagagtacaaagaggtcatcgaaagctgtggcgtcgcagctttgggtaagcgcgtcagcaatttactcactgagcacattggtaacatgttgccggatcttcaagttcgaattatgcgggctcgatcggaagcggaaaaggagttggaacttctcggacccgacgcccctgagacggagtctgaccgcgcggctctcgtattgtcgaaacttgagtcgtacgccgcaggtctgcaggcatcggtggaaggtcgcagtaacaacctgagcattg

SEQ ID NO: 275542 - DNA, 962 bp, Unknown
  Bacterial polypeptide expressing nucleotide sequence isolated from the Sargasso Sea
ctgagggtttgcgcacccatcggggttctcactaagcttgacctgatggacgaagggacggatgccagagacatcattgacaacaaggtctatgcgctccgcagaggatacgttccagtggtgaaccgaagccagaaggacatcaccggcaagaaggacatcaaggcagccgtggccgcagagcgcaagttcttcttgacccaccctgcttaccgtaacatcgcggacaagtgcggcacccctttcctgcagaaacagctgaacgcgcagctgaccaaccacatcagggacacccttccaagtctcagggacaagctacagaagcagatgctgggacttgagaaggaggtggagcagttcaagcactggcgccccgacgacccaagcatcaagacaaaggctcttctccagagcgtcaccggcctccagcaggactttgagcgcgccattgagggcagcggagagggtgacgtcaactgcgccgagttgagtggcggagccaagatcaaccggatcttccatgagcgcttcccctacgagattgttaaggtggagtttgacgagaaggaacttcgacgtgagatcgcttttgcgatccgcaatgtccacggtatccgagtcgggcttttcaccccggacatggccttcgaagccatcgccaagaaacagatcgagaggatgcgcgaaccgggtctgaagtgctgtgaccttgttattcaggagctgaccaacgtggtgaggctggtgactgagaagatcaaatcatatccacggctcagagaggagattgagaggatcctcaccacgtacatcagggagaaggagaggaagtgcaaggaccaggtcatggctctgatcgactttgagttggcttacatgaacacaaaccacgaggactttgtaggattcggtaacgcccaggcggccacagagaaggctgcttccacaggaggcaacggtgc

SEQ ID NO: 275543 - DNA, 906 bp, Unknown
  Bacterial polypeptide expressing nucleotide sequence isolated from the Sargasso Sea
gttcggttgttctctcgaggagcgcaagtttgcggagatgatggacgaggcggacccaataaaaactttgcgcgccgacttccactaccccacgatgggcgagatcccgacgagtgatgcggcgctcgtcactagcggcgaagactgcctctacttttgcgggaactcgctcggtctgcagcctgcggcggcaaagaggtacattaatgaggatctcgacaagtgggcgaagatgggcgtacacggccacttcgagaaaccgaggccgtgggcgctgtgtgacgagtgcttgcaggagcagagcgccaaagttgtgggcgccaagcctgaggaagtcggcatcatgaatggcttgacggtcaatttgcacctgctcatgatctccttctacaagcccaccgcgtcgcggcacaagattttcctcgaggccaaggcgtttccgtcggaccactacgccgttgagagccagctgaagcttcgtggttacgacccggcaacgagcatggttcttgctgagccgcgcgagggggaggtgctgttgcgcacagaagacatcctggagacgatcgaaaaggagggcgacagcatcgcaattgtcctcttcccgggagtgcagtactacacgggccagctgtttgacatggaggccatcaccaaggctgcccatgccaagggatgcatcgtgggcttcgacctggcgcacgcggtcggcaacgtggagatgcacctgcacgactggggggtggactttgcatgctggtgcagctacaagtacctcaacgccggtgctggtgggctcgcaggcgcattcatccacgagaagtgcgctgccaagacgccccccgctcttgtaggctggtgggggcacaagtacaagactcgcttcgacatgaccaacgagatcga

SEQ ID NO: 275544 - DNA, 614 bp, Unknown
  Bacterial polypeptide expressing nucleotide sequence isolated from the Sargasso Sea
gttgagatagacggcaaaaagatggccttccatcaaactggagagggtcgtccggttgtttttcttcatggcaatcccacttcatcctatttatggagaaacattatcccacttgtttcaggaaatgctagatgcattgcacctgacttgataggaatgggagactcagaaaaactggaagaaatagatgaggattcataccgattttttcagcaccgccattacctggatggttttcttgatgctcttgaattgggtagtaaagttattttagtagtacatgactggggatctgcccttggttttgactgggcaaaaaggaaccgcgaccgtattgcaggaatagtttatatggaagcaattgtccgacctgtctcatggaaagaatggcctgatgcatctgcatcaatcttcaagggaattcgatcgtcttcgggagaggaaatgataatgaaaaaaaaccttttcgttgaagttgtcctgccaggatcagttctgcgaaaactaactgaagaagaaatggaagagtaccggcgtccttttatactccctgagcaccgccttccaacactgaaatggcctagagagattccaattgatggttaccctgagga

SEQ ID NO: 275545 - DNA, 835 bp, Unknown
  Bacterial polypeptide expressing nucleotide sequence isolated from the Sargasso Sea
aagagaatatataatcattccaattgcagatgatgtgactgcacgaatgcactatgtagatgaaaattctgaaagctcagacgttgtcttattgcttcatggtgaacctacctggtcttacttataccgccatatgataccaattcttgccaaagcaggtaaacgagtaattgcaccagatctaattgggtttggtaagtctgataagctttctgagcgaactgattatacatatgaacgtcatgtggcctggaccagaaacattattgaacaattaaatttatctaatattaccttctttggtcaagattggggtggcttaattggcctgagactaattgctgatatgcctgatgcattcaatggaatggtgttatccaatacaggattaccaattggaaaaggctcatctgaaggatttgagtcatggaaaaatttttgtcaaacagtagaaaaatttaatagtggtagagttgtatttggtggttgtgtcagtaagattgatgaggacgaaacagctgcttacaatgctccttttccagatgacagctatacggcgtgtgcgagatattttccaacattagtacctgtcaatcctgataacgttgccgttcaagataatattgatgcatgggagaagcttaaaaaatttgataaaccaactctgacattatttgggtcagaagataagatctttcttggtggtgagaaaattcttcaaaaacttattcccggcgctcagaacatggatcacaaattaatcaacgcaggtcacttttcgcaagaagatcaaccagaagagctctcacaagggattatcagtataaatagttga

SEQ ID NO: 275546 - DNA, 604 bp, Unknown
  Bacterial polypeptide expressing nucleotide sequence isolated from the Sargasso Sea
atgaataatttagcggctactcaatttagcaaagattttttagatataaacggtataaagatggcctttcatcaatccggggagggaagccctgttatatttcttcatggcaatccaacttcctcatatttgtggagaaacattattccacttgtttcactaaatgccagatgcatagcacctgacttaatcggcatgggagactctgaaaaattaaaagaaattgatgatgactcataccgtttttttcagcaccgtcattacctaaatggttttattgaatctcttaaattaaacaatgatttatttttagtagtgcatgattggggctctgctcttggttttgactgggcaaagaggaaccaataccgtataaagggtattgtttatatggaagcaattgttcgtccagtttcatggcaagaatggcctgacgatgctaagaaaattttcaaaggttttagatcgtctgcaggagaggaaatgatcctaaaaaaaaacctttttgttgaaactgtactaccaggatcaattctacgaaatttaactgaagaagaaatggaagaatatcggcgtcctttcgtaataccagagcatcgacttc

SEQ ID NO: 275547 - DNA, 829 bp, Unknown
  Bacterial polypeptide expressing nucleotide sequence isolated from the Sargasso Sea
gatgcgttatgcgaaaaaacgagcgagcgtaaatggcctcgaaatggcctatatcgatgaaggtgagggtgatccaattgtatttttgcatgggaacccggtgtcttcctatctttggcgcaatgtcatgccttaccttgaaggcaaaggccgcttgatagcacctgacctaattggcatgggcgattcagaacgcctgccgataagtggccctgggcaataccgtttcgtccatcaccgcgaatatttagatgcgttactcgaacaaattggtgtgcgtgaaaatgtaacgctggtcatccatgattggggctcggcgctcgggtttcactgggctcaccgtcaccctgacgcagttaaaggtattgcgtacatggaggcgatcgtgcgtccgttgccttgggaggattggccagatcaaagccgcaatgcatttaaggggttgcgatcggaaggtggtgaggcaatggtgttggagaaaaatttctttgttgaaaagcttttgccaaatgcgatccttcgcaccctggaagatggggagatggaagaataccgacgcccgtttgtcgagccgggcgagagccgtcgtccgacactaacctggccgcgtgaaataccaatcgacggagagccggtggatgttgttaagatcgtcggtgactatgcggattggctagcaaaaggcgaggtgcctaaactttttatagatgctgatcctggtgccatactcgttggaaagcagcgggagttctgccaagcctggccaaaccagaccaacgtgactgtcaaaggccatcactttgttcaggaagattcgccggatgaaatt

SEQ ID NO: 275548 - DNA, 489 bp, Unknown
  Bacterial polypeptide expressing nucleotide sequence isolated from the Sargasso Sea
tatgaatgtaaaagaacatcccaaatttaagatattagtaaataacaaaaatatgtcctatgtagaaatgggttctggagaaacaatgttatttcttcatggtaatccaacttcttcatatttatggagaaacataatgccatatatctccaatactaaaaggtgtattgctccagatttaataggtatgggagattccgaaaaattagattctaatgaagttggtaaatataacttttttgagcatcgtaaatggttaaataatttattagatttattagatataggaaacaaagtaattctagttcttcatgactggggaagtgcacttggttttgattgggcatataataatattaatagagtagctggcatagtttatatggaaggtatagtctgtccattaaattgggatgactgggatgaaaaatctgcgccattatttaaagcatttagatcagatgctggtgaaggcatgattatagaaaa

SEQ ID NO: 275549 - DNA, 417 bp, Unknown
  Bacterial polypeptide expressing nucleotide sequence isolated from the Sargasso Sea
aatgagcgctgatatctctgtcgaagaacaccccaagaaatccgtgaccgttaaaggcaagaaaatgacttatgtggagatgggcgaaggtgatcccattgtctttctccacggcaatccgacgtcttcatatctctggcggaacatcatgccacatctaaaagatcagggcagatgcatcgcgcctgacctcatcggcatgggcgacagtgagaagctggataatcccggacccgatagctaccgctttgttgaacaccggaactatctggacggcatcctcgaggcgcttggtgtcacagagaatgtcactctcatcattcacgattggggctctgcccttggctttgattgggccaaccgccatcgctcagcagtcaaaggcatcgcctatatggagggcattgttcggccgat

SEQ ID NO: 275550 - DNA, 877 bp, Unknown
  Bacterial polypeptide expressing nucleotide sequence isolated from the Sargasso Sea
tatgaatgtaaaagagcactccaaatctaagatattagtaaataataaaaacatgtcctatgtagaaatgggctcgggagaaactatgttatttctacatggaaatccaacctcttcatatttatggagaaatataatgccttatatatctgatagtaaaagatgtatcgctcctgatttaattggaatgggagattctgataaattagattctaatgatgttggtgtatataatttttttgagcatcgtaaatggttgaatgatttactggatttattaaatattggtaataaagtaattttggtgcttcatgattggggaagtgcgcttggttttgattgggcatataataatattaatcgggtctcaggtatagtttatatggaaggcatagtttgccccttaaattgggaagattgggatgaaaaatcggcacccctatttaaagcgtttagatctgatgctggtgagagcatgattatagaaaaaaatatatttgttgagagagttcttccaggttctgttttaagaggtttaactgatccggaaatggaggtttatagacgtccttttattaaaaaagaagaccgacgtcctactttggattggcctaatcaaattcctatagaaggtagtcctaaagatgttgttgaagttgtagataattattccaagttctttatgagtgataatactccaaaattatttattaatgctgatcctggagctattttaataggtaaacaaagggatttttgtagatcttggcctaatcaatctgaaattacagtcccaggtagccattttattcaagaggactctcctgatttaattggagagggaatacttaattggttaaaaacaaaaaatatataa

SEQ ID NO: 275551 - DNA, 475 bp, Unknown
  Bacterial polypeptide expressing nucleotide sequence isolated from the Sargasso Sea
catggattacttgcgcaccccagattcccgcttcgagcgattgctcgactaccctttcgagccaaactacgtaaccgtggacgggctgcgcatgcattacgtggatgaggggccagccgacggcaagcccattctgatgctgcatggggagccaacgtggtcctatctatatcggcacatgattccgatttgtgcggcggcgggccaccgggtgatcgccccggacttgatcggtttcggtaaatccgacaagccaacggccatcaatgcttatagttaccaaaaccacatggactgggttaagtccttactcgaccagctagagctcaccgaaatcaccttagtgtgccaggactggggctcactgattgggctgcggatggccgcggagaacgaatcccgattccgcgccattgtggtgggtaacggcatgctgcccaccggagacgagcaggccccaaaggcgttccatatt

SEQ ID NO: 275552 - DNA, 621 bp, Unknown
  Bacterial polypeptide expressing nucleotide sequence isolated from the Sargasso Sea
tatggaagaaaaaaaatacctagaaatcaataataagaaaatggcatttatagatgaaggtgaaggagatccaatcctatttctccatggcaatcctacatcttcatacctttggagaaacataatcccccatatgcaaggcatgggaagaataatagctccagacctaattggaatgggagattcagaaaaactcgatgaagtagattcttctagttatacctttttagagcatgctgattatctatatagattaatagaacaattaggattagacaaagtaactttagttattcacgattggggctcagctttagggtttaactgggctagattaaatccagaaaagatcaaatcagtaatatacatggaagcaataataggtcccatagatagttgggaagactggcctgaaaatgctaggaatatttttcaagcatttaggtctgaagcaggcgaagaattagttttagaaaaaaatatatttgttgaaagaatattaggtggtgatgggaagctcaaagaagaagatatgaatgtttacttaaaacccttttctaaccctggagaagacagaagaccaactctgacttggcctaggcaaataccaattgcaggcga

SEQ ID NO: 275553 - DNA, 367 bp, Unknown
  Bacterial polypeptide expressing nucleotide sequence isolated from the Sargasso Sea
aatggattgggatgagtatattaaatggggtgaagaagtagtccattggggctctaattataggaaaaatattcgaaatttccctgtaaggtctcaaaataatcctggagatacttataatttaataccagcttcaccacctgaaaaacctgaaccaattcaaaatatttttgatgattttaataatcttataatgcctggcataactcattggcaacatccaaggttttttgcatattttccaagtaatgctgcccctgcttcagttttagcagaaatgttagcaaatactattggttcccaatgtatgttatggcagacatcaccagcagcaactgaactagaagaaaaattattgactggttga

SEQ ID NO: 275554 - DNA, 772 bp, Unknown
  Bacterial polypeptide expressing nucleotide sequence isolated from the Sargasso Sea
ttttaaaaaaattattttacctggtgtaactcactggcaacatccaagattttttgcttacttccctgcaaatgctgccccagcttctgtgtttgcagaaattttaacaaatacaatgggtttacaatgtatgctttggcaaacttcaccatccgctactgaactagaagaaaaagttattgaatggcttagaatttctctagacattcctaaagggtttgggggcattattcaagacacagcttcttctgcaaccctaacagctatattaacaatgagagaaaaggcattaaactggcaaggtaataaagttggtttgtcgggccaagggaagcttcgaatttatgcatcaactgaaaaccatagctctttggataaagcaatttggttttctggcataggcgaagataatttagtcagagttcccgtttatggtgcatatagatctatggatccagtggctttgtctgatgcaatacacaatgatagaaaaaaaggatttattcccgctggaattgtgggagtgacatgcggcacttcaacggggtcatatgataatctagatgaaattggtaaaatagctaacaatgaaaatttatattttcatgttgatgccgcatgggctggctcagcgattatatgtgacgaatataaatacttatggcaaggaattggtaaggcagactctattgtatttaatcctcacaagtggttaggtgctcagtttgattgttcagtacattttttaaaagatatgaatgttcagaaaaat

SEQ ID NO: 275555 - DNA, 889 bp, Unknown
  Bacterial polypeptide expressing nucleotide sequence isolated from the Sargasso Sea
ctgatcttcctcggcgtcggcgccatgaccgacttcggtccgatgctggccaacccgaagacgctgctgcttggcgccgccgcgcagttcggcatcttcggcaccttgctcggcgcactggcgatcaccgcgctgggcattcccggcatggagttcaccctcaaggaggcggcgtccatcgccatcatcggcggggcagacgggccgacctcgatcttcgtcacctccaagctggcgcctgatctgctcggccccattgccgtggcggcctatgcctacatggcgctggtaccgctgctgcagccgccgatcatgcgcgcgctgaccaccaaggaagagcgcgccatcgtcatgcagcaactgcgtccggtggggcagaccgagaagatcatcttccccatcgtgctgtgcattctgatcggtatgctgctgcctgacgccgcgccgttgatcggcatgttcgccctcggcaatctgctgcgcgaggccggtgtggtcgagcgtctggccgatacctcgcgcaacgcgctgatcaatatcgtcaccatcttcctcggcctgaccgtgggttcgaagctgtcggccgaggccttcctgcaactcaagaccctgggcattctcatgctgggcatggtggcgttttgcgcgggcaccgcggccggtgtgctgatggccaagctgatgaatgtgttcagcacgcacaaggtcaatccgctgatcggttcggctggcgtgtcggcagtgccgatggcggctcgggtatcgaacaaggtcggcctggaggccaatccgcagaacttcctgctgatgcatgccatggggccgaacgtggccggggtgatcggctcggccgtggcggcgggggtgttgctcagtttcgttggctgat

SEQ ID NO: 275556 - DNA, 844 bp, Unknown
  Bacterial polypeptide expressing nucleotide sequence isolated from the Sargasso Sea
gataagtatggttttcatttgcactatgcggtaaaagcgaattttaatgcgccaattttaaatctcatttcagaaaaggggtttggagcagattgtgttagtggaagagaggtagaggttgctgttgagaatggttttagctcttcggatattgtttttgcgggtgttggaaaaagcgacgctgaaataaattctgcgcttgatttgaatatcttttgcttcaattgcgagagcattatggagattgaggtaattaacgaattggctaaggcaaagggtaaaacagctcaaatagctttaagaataaatcctaatgtaaatgccaatacccacaaatacattactacaggtttgtcggaaaacaaatttggtattaatatgtgggagctggatgatgttctctctgcacttcaaaagtctgaaaatattgaacttattgggttgcattttcacattggttcccaaataacggatttaacttccttcaaaaatttgacgtcaaaaattaataagattcaggaatggttttactcacggcaaattatagttaaggttattaatgctggtggtggactagggattgactaccataatccagacaatcaaattcctgattttgccgagtattttagaatttttaatgagtttttagaattgaggtcgggacaaaaagttcattttgaattggggcgttctcttgtaggacaatgtggatcactgatatcgagagtgctctacataaaaaatggcctgaaaaagaattttgccattcttgatgcgggtatgactgagttgatacgacccaatgttgtacaacggcgcacccatgagatagaaaatttat

SEQ ID NO: 275557 - DNA, 853 bp, Unknown
  Bacterial polypeptide expressing nucleotide sequence isolated from the Sargasso Sea
atgaatctggaagccatattctcaaatttagggatttttagcttaacatcaggccaatcaattatgctggtagtagggttggtgatactttatttggccatcagtaaaaaatttgaacctttattattattgccgattggttttggagcaattcttactaatattcctgaaattggtctagctcttagcccaatagaaaaattgatttatttctcaaaccctaacgaattagctggagccctgtctttaattgctatgggcgaggctgagtctttatcttcattcttaaaaacagcttcccactctcagttatggctgctaaacgaatatgcagctgagttaggatataaggctggtattttaaatactttttattctgtagcaataggctcaggggtagcgcctttagtaatttttatgggcgttggcgccatgacagattttggaccaatgttagccaatcccaaaacattaatattaggagctgctgctcaatttggtatttttgcaacagttatcggagcgttaattttaaataagtttggagtagtttcatttacgcttaaacaagcagcagcaactggtattatcggtggagcagatggaccaactgcaatttatgtttcttctattttagctcccgaacttcttggtgcaattgctgtagctgcatattcttacatggcattagttcctttaattcagcccccaatcatgaggctgcttacttctcggagagaaagagtcattcgtatggttcaattaagagaggtttcacaaaaagaaaaaataatttttccaaataattttggtctttcttgttggtatgatgcttcccaagtgcagccccttt

SEQ ID NO: 275558 - DNA, 838 bp, Unknown
  Bacterial polypeptide expressing nucleotide sequence isolated from the Sargasso Sea
tttaatcagacatggggtcgagcaattatgataataattgctttttgtcttttctacctggctattgctaaaaattttgaaccacttcttttaataccaattggctttggaggtttattggcaaatatcccaattgctgaaattgctggaccaaatggttttgttggaattctgtatacaatgggagttgaaacaggtctttttccaatattaatttttatgggtgttggagctatgacggattttgggccactaatagcaaatcctaaaactgcattattaggagctgcagcacaatttggaatttttgggacactagtaggtgctgtatttcttacgcaaaataccaatattatcaatttttctctccaagattctgctgcgattagtattataggtggtgcagatggtcccacagcaatattcatagcttcaagattagctcctgacctactaggagctatagcagtagcagcgtattcatatatggctttagttccaataattcagcctccaataatgaaagccttaacaacagaaaaagaaaggcaaataaaaatggttcaattgagaaatgtaaaaaaagtggaaaaaataatttttcctcttactgtattgtttttatgtatattggcacttcctgatgcaacaccacttgttggggcactatgttttggtaattttgtaaaagaatcaggtgttgttgaaaggctatccgaaactttacaaaatgctttgataaatattgtaacaatattccttggtttagcagttggctctaaacttgcagctgataagtttttagtgcctgagacccttggaataatctttttaggac

SEQ ID NO: 275559 - DNA, 820 bp, Unknown
  Bacterial polypeptide expressing nucleotide sequence isolated from the Sargasso Sea
atggattgggatgagtatataaaatggggcaaagaggctgtggtttgggggtctgaatacagaaaaaatcttcgtaattatcctgttagatcccaaaataaaccgggagaaacatttaattcaataccaacaaatcctcctgaaaatccggagtccatagaacaaatttttgacgattttaaaaaaattattttacccggtgtaactcactggcaacatccaagattttttgcttacttccctgcaaatgctgcaccagcttctgtgtttgctgaaattttaacaaatacaatgggtttacagtgtatgctttggcaaacttcaccatccgctactgaactagaagaaaaagttattgaatggctaagaatttctctagatatccctaaagggtttgggggcattattcaagacacagcatcttctgccaccttaacagctatattaacaatgagagaaaaggcattaaactggaaaggtaataaagttggtttgtcgggtcaagggaagcttagaatttatgcttcaactgaaaatcatagctctttggataaagcaatttggttttctggcataggtgaagacaatttagtaagagtccctgtttatggtgcatatagatctatggatccagtagctttgtctgatgcaattcacaatgatagaaaaaaaggatttattcccgctggaattgtgggagtgacatgtggcacttcaaccgggtcatatgataacctagatgaaattggtacaatagctaacaatgaaaatttatattttcatgttgatgcagcatgggctggctcagcgattatatgtg

SEQ ID NO: 275560 - DNA, 655 bp, Unknown
  Bacterial polypeptide expressing nucleotide sequence isolated from the Sargasso Sea
gcccctgatttattaggtgctatagccgtcgcggcatattcatatatggcattagtaccaataatccaacctccgataatgagagctttaacaactgaaaaagaaagacaaataaaaatggttcagcttcgtaaagtcaacaagcttgaaaaaatagtatttcctataaccgttctttttctatgtatccttgccctacccgatgcaactccacttgttggggcattgtgttttggtaattttattaaagaatctggagtcgttgaaagattatctgaaactttacagaactcattgataaatattgttacaatattcctagggcttgcagtaggatcaaagcttgctgcagataaatttttagttccagaaacattagggattatttttctaggtttagctgcattttctgttgggacagttgctggactattaatggctaaagtaatgaataaattctcaaaagaccctattaatccgctaattgggtcagcaggtgtatctgctgttccgatggctgcaagagtatcaaatagagttggagctgaggcaaacccatcaaatgtattgttaatgcatgcaatgggaccaaatgtagcaggggtaattggatccgctgtggctgctggagtcctaatttcaatatttggttaga

SEQ ID NO: 275561 - DNA, 2281 bp, Unknown
  Bacterial polypeptide expressing nucleotide sequence isolated from the Sargasso Sea
atgttgacgattataattattgccctgattgcgattattgcgctatttgcagtaaaaagccttcggatgcaatttatcacccagcctgtttttcacttctttaaaaaagtattaccgccattatccgataccgagcgcgaagcgatggaagcgggcgatgtgtggtgggaaggtgagttattccgcggtaacccaaactggaataccctgcacagctacggtaaagcaaccctgacggctgaagagaaagactttatcgataatcaggtgatgaccgccctgaaaatgatcgatgatttcgacatcgtgcataaccgcaaggatttgccaccagaactgtgggactactttaagaaagaaggcttctttgcgctgatcatccctaaaaagtttggtggtcgtgcgttttccgcctacgccaactcgacaattgtgagtaaattagccagccgcagcgtgagtgccgcggtcactgtgatggtgccaaactcattaggccctggcgagcttttgactcactatggcactaaagagcaaaaggagcgctggttacctgcattagctaagggtgatgagatcccatgctttgcattaacgggcccagaagcgggcagtgatgcgggcgctatccccgatgtgggtattgtttgccgtggtgagtttaacggcgaagaagttttaggccttaaattaacctgggacaagcgttatatcaccctcgcaccagtggcaaccgtattaggtttagccttccagatgcgcgaccctgatggtctgctgggcgataaaaagaatttaggcattacctgcgccctgatcccaaccgatcaccctggtgtggtgattggccgtcgtcataatccgctgaacatggcgtttatgaacggaaccactaagggcgaagaagtctttattccgctggattggatcatcggtggtcctgagtttgcgggtagaggctggcgcatgctggttgaatgtttatcggcgggtcgcggtatttctctgccagcattggcgacggcttctggccatatggcgaccaaaaccaccacggcttacagctatgtgcgtcaccaatttggtatggcgattggtaattttgaaggtgtgcaggaagcgctggcgcgcattatcgccaatacctatcaattggaagcggcgcgccgtttaaccaccacgggtatcgatcttaaagttaaaccttcagtagtgacggcgattgccaaattccacatgactgaacttggccgcgctgtgatgaacgatgcgatggatattcagtcgggtaagggcatccaattaggacctaaaaactacttaggccacccttatatgtcgaatccaatttcgattaccgttgaaggggcgaacattttgacgcgttccttgatgatctttggtcaaggtgcgacccgttgccatccttatgtgttggccgaaatggaagccgcggcgatggaaaacgagcatgatgcgctcgagcgtttcgactcgctgttaatgggccatatgggttacgccactcgtaacgcgtttagcgcgttattcaacgccttgactgccagccgtttcggcagtgcgccggtgagcggcgaaaccaagcaatattataaagacatgtcccgcatttcatcggcattagccttgatgacagatatttcgatgctgatcatgggcggcgatttgaagcgcaaggaaatgttgtcggcacgtatgggggatgtgctaagccagctgtacttaggctcagccaccttaaaactgttcgaagacaatggccgtcaacaggacgatttacctgcagtgcgttatgtaatggccaatcgcttgtacttagcggctaaagcgctcgaagaagtgatccgtaacttcccgaaccgcccatttgcctggttgctacgtgcactgattttccccatcggcaaccatttcaatgcgcctagcgataaaatggccaccgaattagtctctggcatgctaaaaccgagtcctgcccgtgaacgtattactttcctatgccctgagttcgaaggcgatgtcggtggtattgctgaggttgaacaggccttcgtggcgcaatatgcctgtaaagagatttacaagaagctcaagaaagcacaacgcgccggtgagttaccagccaaagtgcctaatttggtgttatttgctaaagcgttggagcagggcactgtgactgaagatgagcatcaaaagctgttacatgccgataagctacgtttagcggccatcaatgtgaatgattttgaagccttataat

SEQ ID NO: 275562 - DNA, 2281 bp, Unknown
  Bacterial polypeptide expressing nucleotide sequence isolated from the Sargasso Sea
tatgttgacgattataattattgccctgatagctgttattgcgctgtttgcagtaaaaagcctcagaatgcaatttatcacccagccagttttccattttttcaaaaaagtgttaccgccattatccgatactgagcgcgaagcgatggaagcgggcgatgtatggtgggaaggggaattattccgcggtaatccgaactggaacacgctgcacagctacggcaagccaacgctgacggcagaagagaaggactttattgataatcaggtcatgacggccctgacaatgatcgatgattttgacattgtccataatcgtaaagatttgccgccagagctgtgggattatttcaaaaaagaaggcttctttgcgctgatcattccgaaaaaatttggtggtaaagcgttttcggcttatgccaattcgacgattgtgagcaagttagctagtcgtagcgtgagtgttgcggtaactgtgatggtacctaactcattaggccctggtgaattattaactcactatggcactgaagagcaaaaggaacgttggttacctgcattagcgaaaggcgatgaaataccttgctttgcgttaacaggcccagaagcaggcagtgacgcgggcgcaatcccagatgtgggcattgtgtgccgtggtgagtttaacggtgaagaggttttaggccttaaattaacctggaataagcgttatatcaccttagcacctgttgcaacggtattgggtttagccttccagatgcgcgatcctgacggtctattaggtgataaaaagaatcttggtattacctgcgcgttgatcccaacggatcaccctggcgtggtgattggtcgccgtcataatccacttaatatggcgtttatgaatggtacaacccagggcgatgaagtgtttattccgctcgattggatcattggcggtccagaatttgcgggcagaggctggcgcatgctggttgaatgtttatcagcgggtcgcggtatttctctgccagcgctggcaactgcttcaggccatatggcaaccaaaaccaccactgcatacagttatgtgcgccaccaatttggtatggcgattggtcagtttgaaggggtgcaagaagcccttgctcgtattattgccaatacctaccagttagaagctgcacgtcgtttaaccaccacaggcattgaccttaaagtcaaaccctcagtggtgacagctattgcgaagttccacatgaccgaacttggccgagctgttatgaatgatgcgatggatattcagtcgggtaaggggatccaattaggacctaaaaactacctcggccatccttatatgtcgaatccaatttcgatcaccgtagaaggcgcgaatattcttacccgctcgttaatgatctttggtcaaggcgcaacccgttgtcatccttacgttctggccgaaatggaagcggcagctatggaaaatcagcacgaggcgcttgcgcgttttgactcgttgctaatgggtcatatggggtatgcgacgcgtaacgcgttcagtgcattatttagtgccttaactgcgagtcgttttggtagcgcccccgtaagtggcgaaaccaaacagtactacaaagatatgtctcgtttgtcttcggcgctggcctttatgacggacatttcaatgttgattatgggcggcgatttaaaacgcaaggaaatgttgtctgcacggatgggcgatgtattgagtcagttgtacttaggctctgcaacgctaaaactatttgaagacaatggtcgccaacaggatgatttacctgcggtacgttatgtaatggctaatcgcttgcacttagcggcgaaagcactagaggatgtgatccgcaacttccccaatcgtccagttgcttggttattgcgagcactcattttcccgatcggcaatcattttaatgcgccgagcgataaaatggcgactgagcttgtctctggcatgttaaaaccgagtcctgcccgcgagcgcattaccttcctttgtcctgagtttgaaggcgatgtgggtggtattgctgaagtagaacaagcgtttgtagcacagtatgcctgtaaagagatttacaaaaagcttaaaaaagcacagcgcagcggtgagttacccgcaaaagtaccaaacttggttctatttgctaaagcgctagagcggggcacgattaatagcgaagaacatcaaacactattgcatgcggataagttacgtttagccgccatcaatgtgaatgattttgaagccttataa

SEQ ID NO: 275563 - DNA, 1072 bp, Unknown
  Bacterial polypeptide expressing nucleotide sequence isolated from the Sargasso Sea
atggaatttgatctatcagatctattaacttcatttggtatttattcaatcaccttaagtcagattcttatgattggtgtagggtttttacttttatttcttgctataaataataaattcgaaccattattactattaccaattggctttggagcaatacttaccaatattcctgaaattggactaagttatagtggtctagaaaaattaatattagttaatgatcaactcgaagtagagggtttgcttgcattattaggactcagtgagattaatctgtactcaatatctgatttaacatctcatcaattatttatgggtgagaattttgcatatgatcagggttatcgatccggtattttgtataaattttatcaagtatcaattggatcaggtattgctccgttgcttatttttatgggtgtaggtgcaatgacagattttggtcctatgttagcaaatcccaaaacattaatccttggtgcagctgctcaatttggaatttttgctactgtaattggtgctttatttctaaataattttgatacttttagttttacccttaaacaagctgctgcaactggaatcattggtggtgccgatggccctacagccatatatgttgcatcaattttagcaccagaacttcttggtgctattgcggttgctgcatattcttacatggcactagtgcctttgatccaaccaccaattatgaaagcacttaccactcaaaaagaaaaagctatcgtaatgaatcaattaagaaatgtaagtcaaaaagaaaaaatattttttccaataatattgttgttactagtagcattgtttttgccatctgcagctccacttttaggcatgttttgttttggcaacctgttgaaagagtctcaggtagttgaaaggttaagtgaagttgtacaaaactctttaattaatattgttacaatttttttaggtctaagcgttgggtctcaactgctagcagaaaaatttcttacagctgaaactttaggaattttagtattgggtgttatagcgtttgcaattggtacagcctcaggtgtatgag

SEQ ID NO: 275564 - DNA, 2281 bp, Unknown
  Bacterial polypeptide expressing nucleotide sequence isolated from the Sargasso Sea
catgaagtttcgtttccccgtcgtcatcatcgacgaagatttccgctccgagaacatctcgggctccggcatccgggcgttggccgaagcgatcgagaaggagggcgtcgaagtcctcggcctcacgagctacggcgatctgacgtcgttcgcgcagcagtcgagccgcgcgtcgtgtttcatcctgtcgatcgacgacgacgaactcatgctcggcgagaccggccaggacggcgatctgcccgaactcgcgaccgcgatcatcgagctgcgcgcgttcgtcaccgaagtgcgccgccgcaacgcggacatcccgatcttcctgtacggcgagacgcgcacgtcgcgccacctgccgaacgacatcctgcgcgagctgcacggcttcatccacatgttcgaggacacgccggagttcgtcgcgcgccacatcatccgcgaggcgaaggtctatctcgactcgctcgcgccgccgttcttcaaggagctcgtgaagtacgcggacgaaggctcgtactcgtggcactgcccgggccactcgggcggcgtcgcgttcctgaagaacccgctcggccagatgttccaccagttcttcggcgagaacatgctgcgcgcggacgtctgcaacgcggtggacgaactcggccagctgctcgaccacacgggcccggtcgcggcgtccgagcgcaacgcggcgcgcatcttcagcgcggatcacctgttcttcgtgaccaacggcacgtcgacgtcgaacaagatcgtctggcacgcgacggtcgcacccggcgacatcgtgctggtcgaccgcaactgccacaagtcgatcctgcacgcgatcacgatgacgggcgcgattcccgtgttcctcacgccgacgcgcaaccatttcggcatcatcgggccgatcccgcgcgacgaattcaagccggagaacatccgcaagaagatcgaggcgaacccgttcgcacgtgaagcgatgcgcgagaacccggacatgaagccgcgcatcctgacgatcacgcagagcacgtacgacggcgtcgtgtacaacgtcgagatgatcaaggacctgctcggcgacctgctcgacacgctgcacttcgacgaagcatggctgccgcatgcgacgttccacgacttctaccgcgacatgcacgcgatcggcgacggccgtccgcgcaccggcgcgctcgtgttcgcgacgcactcgacgcacaagctgctcgcgggcatctcgcaggcatcgcagatcgtcgtgcaggattcggagaaccgcacgttcgacaagcaccgcttcaatgaggcgtacctgatgcacacgtcgacgagcccgcagtacgcgatcatcgcgtcgtgcgacgtcgcggccgcgatgatggagccgccgggcggcaccgcgctcgtcgaggaatcgatcgccgaggcgatcgacttccgccgcgcgatgcgcaaggtcgacgccgaatacggcgacgactggttcttcagcgtgtggggcccggacaacctgtcggaagagggcatcggctcgcgcgaggactggatgctgaagccgaacgaccactggcacggcttcggcccgctggcggaaggcttcaacatgctcgacccgatcaaggcgacgatcatcacgccggggctcgacgtcgacggcgagttcggcgaaaccggcattccggccgcgatcgtcacgaagtacctcgccgagcacgggatcatcgtcgagaagaccggcctgtactcgttcttcatcatgttcacgatcggcatcacgaagggccgctggaactcgatggtgaccgagctgcagcagttcaaggacgactacgacaacaaccagccgctgtggcgcgtgctgccggaattcgtcgcgcagcatccgcgctacgagcgtgtcggcctgcgcgacctgtgcacgcagatccacgacgtgtaccgcgcgaacgacatcgcccgcctgacgaccgagatgtacctgtcggacatggagccggcgatgaagccgtcggacgcgttcgcgaagctcgcgcaccgcaagatcgaccgcgtgccgctcgacgagctcgaaggccgcgtgacgagcatcctgctcacgccgtacccgccgggcattccgctgctgatcccgggcgagcgcttcaacaagacgatcgtgaactacctgcggttcgcgcgcgacttcaacgaacgcttcccgggcttccacaccgacatccacggcctcgtcgcggaagaggtgaacggccgcgtcgagtacttcgtcgactgcgtgcgcgactga

SEQ ID NO: 275565 - DNA, 1013 bp, Unknown
  Bacterial polypeptide expressing nucleotide sequence isolated from the Sargasso Sea
gttggttgaaatcttaataaatgaagaagaaaagcacccagttgcaaatcgcatagattccaaaaaactttatgaaacaatagatctatctcttcaacctcatggaattattgatgaagaatttaaatctattttaaaagatgttattaaatcaactccaaaaaccgctacaaatcttttctttaatcagttatttggcggaaggcaaagcaaggctgttttaggagatttacttgctgttattttaaacaatagtatgtacacctacaaagtagctggacctcaagttggaattgaacaagaaatcattaaaaaatcctgtgaaataattggctatggtaaagaaagtaacggaacatttccaacgggaggttccatgagcaattatatggctttagtgatggcaagggactcaaaagatccaaacagtaggtatgatggcatgtcaaaacccatggtgatttatacttctgaagcatctcattattcaattgataaaaatgcaagtttctgcggtatcggaagaaataatattcgatatatcaaagccgactcaaaaggaagaatgatcagtcaagaattggaaaaaagaatcaaagctgatatcactgaaggctatattcctacatttatcaatgcaacggcaggcacaactgtactaggtgcttttgatccaattaatgaaattgctgatatttctcataaatataatatttggcttcatgttgatggcgcatactctggtggggttatttttagcaataattacaaacaccttgtttcaggagttgaacgatctgattcatttagctacaatgcacataaaatgctcggaacgccattgacatgctctattattttagtaaataataaaaaacaattgcatgattcatttagcaacgaagctgattacctttatcaaacagacaatgatgattttaatttaggaaaacatcatttcagtgtggaagaagaaatgatgccctcaagttctggactttatggaaatccct

SEQ ID NO: 275566 - DNA, 703 bp, Unknown
  Bacterial polypeptide expressing nucleotide sequence isolated from the Sargasso Sea
atcggtggtgccgatggacctacagcaatttatgtttcttcaatattagcacctgaacttttgggtgccattgctgttgctgcctattcctacatggcattagttccattaattcagcctcctattatgcgactattaacaacaaattctgaaagaacaataagaatggttcaattaagagaggtttctcagaaagaaaaaattgtatttccaatcatattagtttttcttgttggtatgatgctgccaagtgctgctcctctaattggcatgttctgtctcggaaatttaatgagagaatctttggttgttgaaagattaagtgaagtagttcaaaactcactcatcaacatagttacaatttttttaggattggcggttggatctaaacttgcagcggatcagtttctcactcctgaaacgcttggaattctatctttaggaataattgctttttcaataggcacagcttccggtattttgatggctaaattaatgaatgctctcagcaaaaacaaaataaatcctttgattggagctgctggagtttctgcagtgcctatggctgcaagagttgtaaataaagttggattagaaaatgattcccaaaactttttattgatgcatgccatgggacctaatgtagctggagtaattggatctgcagttgccgcaggagtaatgattcaacttttagcctgat

SEQ ID NO: 275567 - DNA, 846 bp, Unknown
  Bacterial polypeptide expressing nucleotide sequence isolated from the Sargasso Sea
aatgtataaagatctcaagtttcccgtcctaatcgtgcatcgcgacatcaaggccgacaccgtggccggtgatcgcgtgcgcgctattgctcaggagcttacccaggacggtttcagcattctgcccacggcgagcgccggtgaggggcgcattgtcgcgtccacccaccacggcctggcctgcatcctggtggccgccgagggagcgggggagaacagccgcctgttgcaggacatggtcgagctgatccgcgtggcgcgagtgcgtgcaccgcagttgccgatcttcgccctgggcgagcaggtcaccatcgagaacgcgccggccgaagccatggccgatctcaaccacctgcgcggcatcctctatctctacgaagacactgtgtcgttcctcgccaggcaggtggcgcgtgcggcacacaactatcttgacggcctgctaccgccgttcttcaaggcgctggtgcagcacactgcgcaatccaactattcctggcacacacccggtcacggcggtggcgtagcctatcgcaagagtccggtgggccaggccttccaccagttcttcggtgaaaacacactgcgttcggatttgtcggtgtcggtgccggagctgggctcgctgcttgaccacactggcccgctggccgaggccgaggcgcgtgcggcgcgtaacttcggcgccgaccacacctttttcgtgatcaacggcacctcgacggcgaacaagatcgtttggcattcgatggtcggccgcgatgacctggtgctggtggatcgcaactgccacaagtcgatcctgcactcaatcatcatgaccggcgcgatcccgctgtatctctg

SEQ ID NO: 275568 - DNA, 871 bp, Unknown
  Bacterial polypeptide expressing nucleotide sequence isolated from the Sargasso Sea
cttggatacacttcaggtattttgtataaattttattctgtttctattggttcaggcattgcaccactgttgatattcatgggtgttggtgcgatgactgattttggtccaatgctcgccaatcctaaaaccctaatacttggtgcagcagctcagtttggaatctttgcaactgtcataggagctctttatctcaataattttgaagcatttgatttcactctacagcaagcagctgccactggaattatcgggggagctgatggcccaacagccatttatgtagcatcaattctggcaccagaattattaggagccattgcagtagcagcatactcatatatggcattggttccgttaatccaaccacctattatgcgaatgcttacctcaaaagaggaaagggtgattgagatggttcaaatgcgttctgtttctcaaagagaaaaaatattctttcctttaatactattgctattggttggcttattgcttccatctgcagcaccactattgggaatgttttgttttggtaatcttttaaaggaatccctagttgtggaaagattaagtgaagttgtccaaaactcactcattaatatagtgactatagttctaggtttaagcgttggttcaaagctagttgcagagaaattcttaacagctgagactttaggaattttagttttaggtataattgcatttggtattggaactgcagcgggcgtaatcatggctaaaattatgaatctatttgtcaaagataaaattaaccccctgattggagctgctggtgtctcagccgttcctatggcagcaagagttgctaacaaagtaggtcttcaatacaactcacaaaactttttactga

SEQ ID NO: 275569 - DNA, 916 bp, Unknown
  Bacterial polypeptide expressing nucleotide sequence isolated from the Sargasso Sea
aagaatggatacaaggctatagattggatagttgattatctccagtcagtagacaactatcctgtattatcggaagtatcaccaggccagattaggaatacccttccaaagaaagctcctctcgagggggagacgtttgatgctatgttaaaagatattaatgaattaataatgcctggaattactcactggcaatctcctaatttctttgcatattttcccgccaatagctcaccttcatccatactgggtgaattgatttcagctggtctaggcgtccaagggatgtcttggattaccagtccctcatgtacggaattagagacacacgttatggattggttggtggatatacttggattgccgatgaaatttagcagtgcagacaagggtggaggggtgatacagcattccgcatcagactctacgctgtgcgcgctgttagctgcaagagagcgagtgggtgacgtaagtatcaatgagcggggttctaatagacagttgactgcctatgcgtctactcaagctcattcttcaatagaaaagagttgtatgatttctggaattggcagagatcagcttcgattgataaacgtagacgaaaatttctctatggacgctggtgtactggaggcgaagattgttgaagacaaggaaaaagggctaacgcctttttttatttgtgcaaatgttgggactacttcaactttagctattgacccagtgggagcgattgctgatatcgcacagagacataatttgtggttgcatgtcgatgcagcttatgcgggaacggcagcgatttgcgaagaatttcgatatgttaacgatggagcagaaaaagctgatagttatacttttaatccacacaaatggatgtttactaattttgactgtaatgcattctttgtatctg

SEQ ID NO: 275570 - DNA, 1429 bp, Unknown
  Bacterial polypeptide expressing nucleotide sequence isolated from the Sargasso Sea
atgtctatcaaaaaattcaaagaaaatggatataaagtaatagactggatagcagattattacgaaaatattgaatcgtatcctgttctatcaaaaataaaacctggtgaattacgtaaaggtcttcctaaaaacccaccaaaagagggtgaaaattttattaatattttaagtgatatgaatgacaagattattccaggagtaacacactggcaatcacctaatttctttgcatattttccatgtaattccactgggccagctattctaggtgatctattatctagcggattaggaattcaaggaatgttatgggcttcaagcccatcatgcactgaactagaaagccatgtattagactggcttgtagatatgcttcatcttccaaaaaagtttaaatctgatactttgggaggaagtgtaatccaggacacagcttctagtgcaactctttgtgctcttatagctgcaagagaaaaaatatctaatggaaaaattaacgaaaatggatttgataattctatcagggtgtatacttccacagaggcacattcttcgatagagaaagctgtaaagatagcaggaattggaagtaataatattagacttattgaagtggatcaagatttttctatggatcctgtcaaattacgtaaagcaattaatatggatattaaaaatggaaaaacacctgcttttgtttgtgctactattggcacgacatcaagtacagcaattgacccattagaagaaattggaaaaatatgtgatgaatttgggatatggcttcatgtggatgctgctatggcaggatctgtatcaatatgtccggaatatcggtttattcatgatggtattgaatatgctgatagttattgctttaacccacacaagtttttactaacaaattttgactgtagttgtttatttgtttctgatagagaggcattaattaagtctctcactattaatccagaatatttaaaaactgaggtaagtgattcagatactgtatttgattatagagattggcaagtacccctaggcagaagatttagagctttaaaactatggagtgttattagatattatggaattaatggaatacagtcacatattagaggacatattacatcagcgaagctcttatcagatctgattgcagaagataacagatttgagataatggcaccaactatacttaatttagtctgttttagatacaaagcatctgaccagtttaatattctgcttttaaacgaattaaataaaagtggattcttatatttagttcatacaaaactaaataataaatacaccataagattttcaattggacaaacaaataccactgaggaacatgtattaaatgcttggaaatttattttgaaaaaaactgaagaactggaaaaaactggagttaagtagc

SEQ ID NO: 275571 - DNA, 1132 bp, Unknown
  Bacterial polypeptide expressing nucleotide sequence isolated from the Sargasso Sea
atgaatcagctctggactttttggcaaagtactggattatatctgcttaccttagatcagttaataatgattctaatagggttgcttcttctatacctcgcaatcattaaacagtttgagccattacttcttattccgattggattcgggggtatcttgtccaacatacccggagttgatatagcggtcggtaatggtgtgcttgcgcaattttcagccatgggtttggacactggtattttcccacttttggtatttatgggaattggggccatgactgactttggccctcttctagcaaatcctaagacaatgttattgggtgccgcagcacaatttggaattttttcgaccctacttggcgctattgctatgaatgaaatagggatgttcgattttagccttgctcaagccgccgcaataggcatcatagggggtgcggatggtccaacagcaatttatgtctctagtgttctggcgcctgaattgcttggtgcaattgcggtggctgcttattcctatatggccctagtgcctttaattcaaccaccaattatgcgagctctgacctctcggcgtgaaagaaagattcgcatgcaatccatccgggaagtatctcaaactgagaaggtgctttttcctctcgtgttgttattgcttgtggcattgatagttcctggtgctgcacctctgcttggaatgttctgttttggcaacttaatgaaagagtgtcgggtagtcgctcgcctatcagatacggcacagaatgccttaatcaacactgcgaccatattcctgggtttatcagtaggttccaagttagtcgcggaagaatttttagttggcgagactctcggtatattgggcttgggaatcgttgcatttgggataggcacgatgactggggtgctgatggcaaaacttatgaatctgttttccaaaaataaaatcaatcctttgattggcgcagcaggtgtctccgcagtgcctatggcagcgcgggttgctaacaaagttggtatagaatcagatccagataattttttgataatgcatgcaatggggccgaacgtagcaggtgttattggatcaacaatagctgctggtgtattaatacagtttgccgcgtgat

SEQ ID NO: 275572 - DNA, 1144 bp, Unknown
  Bacterial polypeptide expressing nucleotide sequence isolated from the Sargasso Sea
atgtctatcaaacaattcaaagaaaatggatataaggtaatagattggatagcagattattacgaaaatattgaatcgtatcctgttctatcaaatataaaacctggtgaattacgtaaaggtcttcctaaaaacccaccaaaagagggtgaaaattttaataatattttaagtgatatgaatgacaagattattccaggggtaacacattggcaatcacctaatttctttgcatattttccatgtaattccacagggccagctattctaggtgatctattatctagcggactaggaattcaaggaatgttatgggcttcaagcccatcatgcactgaactagaaagccatgtattagactggcttgtagacatgcttcatcttccaaaaaagtttaagtctaatactttgggaggaagtgtaatccaagacacagcttctagtgcaactctttgtgctattatagctgcaagagaaaaaatatctaatggacaaattaacaaaaatggatttgataattctatcagagtatatacttccatagaggcacattcttcgattgagaaagcagtaaagatagcaggaattggaagtaataatattagacttattgaagtggatcaagattttgctatggatcctgtcaaattacgtaaagcaattaatatggatattgaaaatggaaaaacacctgcttttgtttgtgctactattggcaccacatcaagtacagcaattgacccattagaagaaattggaaaaatatgtgatgaatttggaatatggcttcatgtggatgctgctatggcaggatctgtatcaatatgtcctgaatatcggtttattcatgatggcattgaatatgctgatagctattgctttaacccacacaaatttttactaacaaattttgactgtagttgtttattcgtttctgatagagaggcgttaattaagtcactcacaattaatccagaatatttaaaaactgaggtaagtgattcagatacggtatttgattatagagattggcaagtacccctaggcagaagatttagagctttaaaactatggagtgttattagatattatggaataaatggaatacagtcacatattagaggacacattacatcagcgaagc

SEQ ID NO: 275573 - DNA, 1132 bp, Unknown
  Bacterial polypeptide expressing nucleotide sequence isolated from the Sargasso Sea
tatggatggtttactggctttctgggccgaaacgggcatagcccattttactgcagggcaagcactcatgatggctgtaggcgccttgctgttataccttgcgatagtgcgtggctttgagcctctactgctgttacccattggttttggcgccgtactggcaaatattcccaacgcgggttttaccgatgagggcggtatgctgtattacgcctaccatgttgggattgaaaccggggtgtttccactgctgatctttatgggggtcggagcgctaacagattttagtgcactgattgccaatccaaagaccttgctgctcggcgcagcggcgcagtttgggatttttgcaaccttaattggggcgatagcgctgaatctggtgccaggctttgaatttaccatgcaggacgccgcagccattgccattattggcggcgcggatggacctacggcgattttccttgcctctaagctcgcgcctgaactgttgggagcgattgccgtggcagcctattcctatatggcgttggtgccgattattcagccgcccatcatgcgcttacttaccacacaagccgagcgtgagataaagatggagcagctcagggaggtgagtaaaaaggagaagattattttcccgctgatggtattgggcttaacgattttattcttacccgcagcgacccctctggttggcatgttttgccttggcaacctaatgcgcgagtcgggtgtagtagatagattatcgaaaacggcgcaaaacgagctgattaatatcgtcaccattttcttaggtttggccgtcggttctaaactttctgcggagcaattcttgcgcgtcgaaaccttggggatcttggttctgggggcgttggcattcgggattggtaccgcagcaggggtgctgatggcaaaactgatgtgtaaattaactggcggtaaggtcaacccgttaattggcgcggcgggcgtatcggcagtgccaatggcggcaagggtggtgaataaggtggggttagaggctaatcaccataactttttgttgatgcacgccatggggccaaacgttgctggggtattaggctctgcggtggcggctgggattttactggctgtgcttggctag

SEQ ID NO: 275574 - DNA, 1132 bp, Unknown
  Bacterial polypeptide expressing nucleotide sequence isolated from the Sargasso Sea
tatggatggtttactggcgttttgggccgaaacgggcatagcccattttaccgcagggcaagtcttaatgatggccgttggcatgttgctgttatacctcgctatcgtgcgtggatttgagcctttgttgctgttgcctattggctttggtgcagtgctggcgaatattcccaacgcgggctttaccgaagaggggggaatactctactacgcctatcatgtggggattgaaaccggcgtttttccactgctgatctttatgggggtcggagcactgacagattttagtgcactgatcgccaacccaaaaaccttattactcggcgcggcggcgcagtttgggattttcgcgaccttaattggcgctatcgccctaaatctggtgccaggctttgaatttaccatgcaggatgccgcagccattgccattatcggtggcgcggatggaccaacggctattttccttgcctctaagcttgcgcctgagttactgggagcgattgctgtggcggcttattcctatatggcgttggtgccgattattcagccgccgatcatgcgtttactcacaacccaagcggaacgtgagataaaaatggagcagctacgggaagtcagtaaaaaggagcggattatttttccgctgatggtattaggcttaaccattctgtttttacccgcggcaacgccactggtagggatgttttgccttggtaacttaatgcgcgaatcgggcgtggtggatcggctctcaaaaacagcacaaaacgagctgattaatatcgtgacgatttttttgggcttagctgtcggctctaaattatcggccgagcagtttttgcgggtagaaaccttggggatcttagtacttggtgcccttgcttttggtataggtactgccgcaggagtgttgatggcaaaactgatgtgtaagttatccggcggtaaggttaatccgctgattggggcggcaggagtatcggctgtgcctatggctgcaagggtagtgaataaagtgggattagaggctaatcagcataactttctattaatgcatgctatgggaccgaacgttgctggcgtgctaggttctgcggtcgctgcggggatactacttgccgtactcggctaa

SEQ ID NO: 275575 - DNA, 382 bp, Unknown
  Bacterial polypeptide expressing nucleotide sequence isolated from the Sargasso Sea
tttgaatcaattttttttaaaatcaaaaatacatggcgctatagttactcattctgaaaaagactacgacgggtcgtgtgctattgatgtagaaattcttaatcaagcctcaataaaagagtatgaaaaaattgatatttacaatattacaaacggcgaaagactatctacatataccattctcgcaaagcctggtagtagaatcatttctgtaaatggtgccgctgcacataaggcaaagcctggagataaacttgtaatttgttcatatgcatctctagaaaaatcagaaataagttctcataaaccagaaatggtatatctagatgagaataataatgttatcaaaaaaactggctcgataagtatgcaagcaatttaa

SEQ ID NO: 275576 - DNA, 217 bp, Unknown
  Bacterial polypeptide expressing nucleotide sequence isolated from the Sargasso Sea
catgaccatttgcttactcaagtcaaaaattcatcgagccgctgtcaccggtgcatcagttgattacgaaggtagcctcgctgttgatcgtgatttagcagagcgagttggactcagggcctatgaaaaaatactagtgggcaaccttgaaaatggagagcgatttgagacctactgcatctatggcgccgctggcagcggagtgatagaactcaac

SEQ ID NO: 275577 - DNA, 370 bp, Unknown
  Bacterial polypeptide expressing nucleotide sequence isolated from the Sargasso Sea
atgcgctgggtaattcgttcaaaaattcataaggcgacagtcacgcaggccgatgttgattatgtcggaagcataactattgatgaagatttgttgcaagctgctggcctttggccaggggagaaggtcttagttgtaagcaatactagtggagctcgactggagacatatacgatcgccacagagggagggaccggcgaaatctgcatgaatggagcggctgcccaccttatcagtaaaggggaagaaataatcatcatgggttttgaacttactgaaactcccgtaagccctaaggtcattttaattaaggataaactgaatcagacctttgagcccctccaagaagagccaatgtctaaattatagg

SEQ ID NO: 275578 - DNA, 328 bp, Unknown
  Bacterial polypeptide expressing nucleotide sequence isolated from the Sargasso Sea
tatgaaaataacagttctaaaatcaaaaattcatagggcaatcgttactgatactcaattggaatatgatggttcttgcgctatagattctaattatttaaaagaggctaacattagcccttttgaacaaattcatatttataatttaacaaatggcgaacgcttaataacttatgcaattgaagctgaggctggttcaaaaattatttcaatgatgggagctgcagcacataaagcttctaaaggtgattctataattatcgttgcttacggaagcattgaagaaactgaagcaaaatcattcgaacctaaaattgtgagactttaa

SEQ ID NO: 275579 - DNA, 328 bp, Unknown
  Bacterial polypeptide expressing nucleotide sequence isolated from the Sargasso Sea
atgaaaataacagttttaaaatcaaaaattcacagagcaaccgttaccgatactcaattggaatacgatggctcttgcgctatagattctaattatttaaaagaggcaaatattagcccttttgaacaaattcatatttacaatataacgaatggcgaacgcttaataacttatgccattgaagccgaggctggttcaaaaattatttcaatgatgggagctgcagcgcataaagcttccaaaggtgattcgataattatcgttgcttacggaagcattgaagaaacagaatcaaaatcattcgaacctaaaattgtgagactttaat

SEQ ID NO: 275580 - DNA, 352 bp, Unknown
  Bacterial polypeptide expressing nucleotide sequence isolated from the Sargasso Sea
catgaaaatagagcttttaaaatcaaaaattcaccgagcaacagtaactgatgcaaatcttgattatattggatctttaaccctagaccctgtgttgatggaaggggctaatttaaatgaatatgaaaaaattcatgttttaaatattacaaatggaaatcgattgattacatatattataaagggggagcgcggttcaggcgaggtttgtataaatggtgcggccgcacaccttgtttcaaaaggagatcttgttattattgcatcctactgtgttctttcagaaaatgatgctaaagcttttaagccaacaattgttcatgtagataatcaaaacaatataattagctga

SEQ ID NO: 275581 - DNA, 149 bp, Unknown
  Bacterial polypeptide expressing nucleotide sequence isolated from the Sargasso Sea
aatgttaatcaaattattaaaatcaaaaattcatagagccgtggttacagacgcaaatgttgattatgaaggttctattgcaatcgattctgatttaatgaaatcagcaaaaatacaaaactacgaaaaagttcatgttttagacatta

SEQ ID NO: 275582 - DNA, 391 bp, Unknown
  Bacterial polypeptide expressing nucleotide sequence isolated from the Sargasso Sea
atgaatttaacactactaaaatctaaaattcatcgtgctaccgtaacagaagcaaatctctattatgagggtagtatcactattgacaaagaccttatggatgcagctgatttacttccctacgagcaagttcacatatttaatcttacaaatggagaaagatttatcacttatgtaattgaaggtgatcgtggatctggtgttatatgcacaaatggtgcggctgctcactgtgccagaaaaggtgattgtttaataattgttgcttttctaagtattgaaaatgaaaaagtaaatacttataagcccaaattagtttatgttgatcaggataataaaagagttgatgctgaactgattgataaaaagctagttaaaatattgggttaaa

SEQ ID NO: 275583 - DNA, 388 bp, Unknown
  Bacterial polypeptide expressing nucleotide sequence isolated from the Sargasso Sea
atgcagcgccacatgctcaaatcgaagatccaccgtgcggccgtcacgcactgcgagctgcattacgaaggctcgtgcgcgatcgacgaagacctgctcgaagcatcgggcatcatcgagaacgaacggatcgacatctggaacatcaacaacggcgagcgcttctcgacgtacgcgatcaagggtgagcgcggcagcgggatgatctcgctgaacggctcggccgcgcgtcgtgcgcaactgggcgacctcgtgatcatcgcagccttcgcgatggtcgacgaagccgagctgcaggccggctggaagccgaagctcgtgttcatcgacgacggcaacaagatcaagggccaccgcgatcacgtgccgacgcagaactggacctgac

SEQ ID NO: 275584 - DNA, 388 bp, Unknown
  Bacterial polypeptide expressing nucleotide sequence isolated from the Sargasso Sea
atgcaacgcaacatgctgaagtcgaaaatccaccgcgtcgcggtcacgcactgcgaactgcactacgagggttcgtgcgcgatcgacgaggacttgctggaagccgcgaacatcgtcgaaaacgagcggatcgacatctggaacatcaacaacggcgagcggttctcgacgtacgcgatcaagggcgaacggggcagcggcatgatttcgctgaacggttcggccgcgcggcgcgcgcagctaggcgatctggtgatcatcgccgcgttcgcggtggtcgacgaagcggaactgaaggcaggctggaaaccggatctggtattcgtcgacgacaacaacaagatcaaaggcagccgggatcacgtgccgacccagaactggacctgag

SEQ ID NO: 275585 - DNA, 907 bp, Unknown
  Bacterial polypeptide expressing nucleotide sequence isolated from the Sargasso Sea
aacgccaacaaaattatggcggcttccgctgacaagaacatgatcgacaaagacgagtatccagcaagcgccgcaatcgagtcacgctgcgcaacgatgatggcgaccctgtggaacgctcccagtccaacgacgacgatcggggtttcaacaatcggatcaagcgaggcctgcatgctcggaggattggcactcaagaggaggtggaagcaggcccgcacggcagccggcaaggatacgaacacgcccaacctggtgatgagctcaggcgtacaagtggtctgggagaagttttgcaactactgggatgttgagccgcgatacgtccccgttaccgaggaacatccaaccctggacggggccacagtcacggactacatcgacgagaacaccatcggagtcgtggcgattatgggcgttacgtacaccggctcttacgagccggtcgcagagattgccaaagctctcgatgaccatcaggcggcaacgggcttggatgttccgattcatgtcgatgctgcctctggcggatttatcgcgccgtttctccagccggatatcgtctgggattttcgtctccctcgagtcaagtcaatcaacacctctggccacaagtacgggttggtgtatccgggtcttgggtgggtcgtctggagagagaaaggtgatctgccggaagacctcatcttcaatgtcagttacttgggggggaatatgcctaccctcgccatcaacttttctcgacctgggtcgcaggttctcctccagtactacatgttcctcagactgggtttcgcggggtaccgccgagtccaggcagaaagtcaggatgtcgcgcgcttcctagctgatgaaatcgcgaaaatcccagcattcacgttatggagcgatggttcagacatccccg

SEQ ID NO: 275586 - DNA, 891 bp, Unknown
  Bacterial polypeptide expressing nucleotide sequence isolated from the Sargasso Sea
ctttggcgaaaacgtctttcgcgccgatatgtgcaatgctgatgtgaagcttggggatctgctgatccacgaaggctcggcgaagcatgcgcagaagttcgcggcgaaggttttcaatgccgacaaaacctattttgtcctcaacggcacctcggcggcgaataaagtggtcagcaacgcgctgctgacgcgcggtgacctggtgttgttcgaccgcaataaccataaatccaaccaccacggcgcgctgattcaggcgggggccacgccggtctatctcgaagcgtcgcgaaatccgtttggctttatcggcggcatcgatgaccactgctttgatgaacactacctgtgtaatctgattcgggaagtggcgccggaaaaagccgacgcgccacgtccgttccgtctggcggtcattcagctgggcacctacgacgggacggtctacaacgcccgtcaggtggtggataaaatcggcggcctgtgcgactacattctgtttgattccgcgtgggtaggctatgaacagtttattccgatgatggccgactgctccccgctgctgctggaattgaatgaaaacgatccgggcatttttgtgacccaatcggtgcataagcagcaggcggggttctcgcaaacgtcgcagatccacaaaaaagataaccacctgcgcggccaggcgcgattctgcccgcataagcggctgaataacgcctttatgctacatgcctccaccagtccgttttacccgctgtttgcggcgctggatgtgaacgccaaaatccatgaaggagagagcggtcgccggctgtgggcagagtgcgtggtgcagggcattgaagcgcgcaaggcgattatcgcccgctgcaaaatgatacagccgtttat

SEQ ID NO: 275587 - DNA, 2173 bp, Unknown
  Bacterial polypeptide expressing nucleotide sequence isolated from the Sargasso Sea
gttgaaaatcgcagtcgagccggcgctgatcggcgccttcgtcaccacgcacgaacaggtcgacgtattccagaccgatttcacgaatatcgcggccatcgtcgtcggaatcgaatcggcgcaacaggtgcttgaaacggtcgaaagaaccgggttcgcgattccgttcttcgtcgccgtcgagcccggccaggaagtgccgccgtcgatcctgccgagcgcgaacggcgtgatccagctccgccacggagggcgccactactacggccggcagatctcggccgccgccgacatctacagcgaaaacctgctgccgccgttcttcaaggtgatgcgcgaatacgtgcagcgcggctatgtcgaattcgactgccccggccaccagggcggccagttcttctcgaatcacccgctcggccggatgttcttcgacttcttcggcgagacgatctttcgcgccgacctctgcaacgccgatgtccggctcggcgacctgctgatccacgaaggccccgcactggaagcgcagcgcaatgccgcgcggatctacaacgcggacaagacgtacttcgtgctgaacggcacgtcgacgtcgaacaaggtcgtcaccagcgcgctgctcgcgcccgacgatctcgtgctgttcgaccgcaacaaccacaagtcggtacacctcggcgcgctcgtgctgtcgggcgcgcggccggtctacctcgagaccgcgcgcaacgcgtggggcctcatcggcggcgtcgacagcgcggcactcgacgaaacgcgcatccgcgacgcgatccgcgacgtcgcaccggagcgcgccggcctgccgcgcccgttccggctcgcggtgatccagctcggcacctatgacggcacgatctacaacgcacgcgagatcgtcgaccggatcgggcacctgtgcgactacatcctgttcgattcggcgtgggtcggctacgagcagttcatcccgatgatgcaggactgctcgccgctgatgctcacgctcggccccgacgatcccggcatcttcgtcacgcagtcggtgcacaagcagcaggccggcttctcgcaaacttcgcagatccacaagaaggacagccacatcgaaggccagaagcgcttctgcgatcaccggcgcttcaacaacgcgtacatgatccatgcgtcgacgagcccgttctacccgatgttcgccgcgctcgacgtcaatgcgcagatgcatgcggggccggccggcaagcgcctgtggcgcgactgcgtcgcgcacggcgtcgatgcgcgcaagctgctgctgaagacctgccgccagatccggccgttcgttccgcagagcatcgacggccgcccgtgggccgactacccgaccgagcagatcgtcgacgacctgcgcttcttccgctttcatccggccgacacgtggcacggcttcgaaggctatgccgacgatcagtatttcgtcgacccgtgcaagctgctgctgacgacgcccggcatcgatcgcgacacgcacgagtacgcggcgttcggcgcgccggcgccgatcctggcgcgctacctgcgcgagcacggcgtcgtgcccgagaaggccgacctgtacacgatcctgttcctgctcacgccttccgaaagtttcggcaagctgcagcatctggtcgcgcatctcgcgcagttcgagcgccacctcgaccaggacacgccgctgcgcgaagcgattccatcgctgtgcgaagcgtatccggagctgtacggcaacatgcgcctgcggcagctgtgccagcggatgcacgacttctaccgcagccacgacatgaagcatctgcagaagcagatgttccggcgtgcgcagttcccgaagcaggcgatgctgccgcaggccgcgaataccgagctgatccgcaacaacgtcgagctcgtcacgctcgatcgcatcgaaggccggatcgcgacggaaggtgcgctgccctatccgcccggcatcttctgcgtggtgcccggcgaagcatggggcggtccggcgctcgactacttccgtgcgctcgaagccgggatcaacgcgctgccgggtttcgagccggaaatccagggcgtctatctgcaagcgcggccggacggcacgaagcaggcttcggcatacgtggtggcagccggcgccgacgcgtcgagcgcatag

SEQ ID NO: 275588 - DNA, 2164 bp, Unknown
  Bacterial polypeptide expressing nucleotide sequence isolated from the Sargasso Sea
gatgaaatcattaaaagttgccgccagcttatctgttagatcatgttttgaaatagacagagaagttgtcaatgtattaaccacagatttttgcgatgtgggcgcggctgtagtctctgttgatgatgttagaaatggtattgttgaaaaaattaaaaataccggattaaaactacctattttcgtatccgtttgctgtgaagaaaccttcccagatgatatttgctcttctattaccggggtatttgagctctgcggtagtaataccgatttctatggaaaacaggtcgaaaccgccgtccaaaaatatgaacaagccctattaccgccgttctttggcacactgaaaaaatacgtggaaatgggtaactccaccttcgcctgtccaggccatcagggtggtcaattcttccgtaaacatcctgtgggtcgccaatttttcgatttctttggcgaaaccattttccgctcagatatgtgtaatgccgacgttaaactcggcgatctattaatccacgaaggcgcgccgctggatgcacaaaaatacgcggctaaggtctttaacgccgataaaacctactttgtgctcaacggcacttcttcttcaaacaaagtggcgaccaacgcactgctggcgaagggcgacctagtattattcgaccgtaacaaccataaatccaaccaccatggcgcgttaattcaagccggtgcaacaccgatttatttagaaaccgcccgtaaccccttcggctttattggcggtatcgacgcccactgcttccaagagtcttatttaagggaacaaatccgcgccgttgcgcctgagcgtgccgatgaacaacgtccattccgtttagccattatccagctaggtacctacgacggcactatctacaacgctcgccaagtcgttgatcgtattggtcatctatgtgattacatcctgtttgactcagcttgggttggttatgagcagtttattcctatgatgaatgactgctcgcctctgctgctcgaactgacacctgaagatcccggtatcatcgtgactcagtcagtgcataaacagcaggcaggcttctcacaaacctcgcaaattcacaaaaaagactcacatatcaaaggccaagccagatattgcaaccataaacgcttcaacaacgcctttatgatgcatgcctctaccagccccttctatccgctgtttgccgcactggatgtgaatgctaagatgcacgaaggcgctagcggccgttatctgtggcgcgaagcggttaaagccggtatcgaagctcgcaagttactgctgaaaaaatgtaaatatatcaagccatttatcccaagcatgatcgaaggacgcccatggcaggattatcaaactgaacaaatggccgatgatttacgtttctttgagtttgagcccggacaaaaatggcactccttcgacggttacgaaaaaggccaatatttcattgacccttgtaagttcctattaaccacacctggtatcgatgccgaaaccggtaaatatactgagtttggtattccagcgactattttggctaacttcttacgtgaaaataatattattccagagaagtgcgacttaaattcgattttattcctgatgacgcctgcggaagatatggcaaagatgcaacacttagtgtcgcaaatatctcgcttcgaaaaattagtcgacgaagatgcgcccttatctgaagtattacctaacgtctataacgccaataaagcccgttataaagactataccatccgtcaattgtgccaagaaatgcacaacctttatgtcagccatgacgtaaaacaactgcaaaaagaaatgttccgtcaggcgcatttcccaaccaaagtgatggatccacaggaagccaacctcgagtttatccgtggcaaagtggagttagtgccactgtcacaaattgagggacgcattgccgcagaaggtgcattgccttacccacctggggtgttatgtgtggtcccaggtgaaatatggggcggcgcggtacaacgttatttcttagcccttgaagaaggcatcaacttattacccggattctctcctgaattacaaggtgtttacctcgaaaacaccccagacggaaaaatccaagccctaggttatgtattaaataaataa

SEQ ID NO: 275589 - DNA, 2164 bp, Unknown
  Bacterial polypeptide expressing nucleotide sequence isolated from the Sargasso Sea
gatgaaatcattaaaagttgccgccagcttatctgttagatcatgttttgaaatagacagagaagttgtcaatgtattaaccacagatttttgcgatgtgggcgcggctgtagtttctgttgatgatgttaaaaatggtattgttgaaaaaattaaaaataccggattaaaactgcctattttcgtatccgtttgctgtgaagaaaccttcccagatgatatttgctcctcgattaccggggtatttgaactctgcggtaacaataccgatttctatggaaaacaggtcgaaaccgccgtccaaaaatatgagcaagccctactaccacctttctttggcacactgaaaaaatacgtggaaatgggtaactctacctttgcttgcccaggacatcagggtggtcaatttttccgtaaacatcctgtgggtcgtcaatttttcgatttctttggcgaaaccattttccgctcagatatgtgtaatgccgacgttaaactcggcgatctgttaatccacgaaggtgcgccgctggatgcacaaaaatacgcggcgaaggtatttaacgccgataaaacctactttgtgcttaacggcacttcttcttcaaacaaagtggcgaccaacgcactgctggcgaagggtgacttggtattattcgaccgtaacaaccataaatccaaccaccatggcgcgttaattcaagcgggcgcaacaccgatttatttggaaaccgcccgtaaccccttcggttttattggcggtatcgacgcccactgtttccaagagtcttatttaagggagcagatccgcgccgttgcgcctgagcgtgccgatgaacaacgtccattccgtttagccattatccagctgggcacctacgatggcactatctacaacgctcgccaagtggttgatcgtataggtcatctatgtgattacatcctgtttgactcggcttgggttggctatgaacagtttattcctatgatgaacgactgctcgccactgctgctggaactgacacctgacgatcccggtattatcgtgactcagtcagtacataaacagcaagcaggtttctcacaaacctcgcaaattcacaaaaaagataaacatatcaaaggccaagccagatattgcaaccataaacgtttcaacaacgcctttatgatgcatgcctctaccagccccttctacccgctgtttgcggcattggatgtgaacgctaagatgcacgaaggcgccagcggccgttatctgtggcgtgaagcggtaaaagccggtatcgaagcgcgcaagttactgctgaaaaaatgtaaatatatcaagccatttatcccaagtatgatcgaggggcgcccatggcaggattatcaaactgaactaatggccgatgatttacgtttctttgagtttgaacccggacaaaaatggcactccttcgagggctatgaaaaaggccaatatttcgttgatccttgtaaattcctattaactacgccaggtattgatgccgaaaccggtaaatatactgagtttggtattcccgcgacgattttggctaacttcttacgtgaaaataatattattcccgagaagtgcgacttaaattcgattttattcttgatgacacctgcagaagatatggcaaaaatgcagcacttagtgtcgcaaatatctcgcttcgagaaattagtcgatgaagatgcgccattatcggaagtattgccaaacgtctataacgccaataaagctcgttataaagactataccattcgtcaactctgccaagaaatgcacaacctttatgtcagccatgacgtaaaacaattgcaaaaagaaatgttccgccatgctcacttcccaacaaaagtaatggacccacaggaagctaacctcgagtttattcgcggcaatgttgaattagtgccactgtcacaaatcgaagggcgaattgccgcagaaggcgccctgccatatccaccaggggtattatgtatggtgccaggtgaaatatggggtggcgcagtacaacgttatttcctagcccttgaagaaggcatcaatttattacccggattctctccagaattacaaggtgtttacctcgaaagcaccccagacggaaaaatccaagccctaggttatgtattaaataaataa

SEQ ID NO: 275590 - DNA, 889 bp, Unknown
  Bacterial polypeptide expressing nucleotide sequence isolated from the Sargasso Sea
gacctctcggtgtcggtaccggaactgggctcgctgctcgatcacaccgggccgctggccgaggccgaagcacgggctgcgcgcaatttcggcgccgatcacaccttcttcgtgatcaacggcacctccacggcgaacaagatcgtctggcattcgatggtcggccgtgacgacctggtgctggtcgaccgcaactgccacaagtcgatcctgcattcgatcatcatgaccggggcgattcccctgtatctctgccccgagcgcaacgagctgggcatcatcggccccattccgctgagcgagttcagccgggagtcgatccaggccaagatcgacgccagcccgctggcgcgcggtcgggcgccgaaggtcaagctggccgtggtgaccaactccacctacgacgggctctgctacaacgccgagatggtcaagcaggccctgggcgattcggtcgaggtgctgcacttcgacgaggcctggtacgcctacgccgccttccacgacttctacgccgggcgctttggcatgggcacccaatgcgacgagcactcgccgctggtgttcaccacgcattcgacgcacaagctgctggcggccttcagccaggcgtcgatgatccatgtgcaggatggcgggcagcgccagctcgaccgtgatcgcttcaacgaggcgttcatgatgcacatctcgacctcgccgcagtacggcatcatcgcctcgctggatgtggcctcggcgatgatggaggggccggccggtcgttcgctgatccaggaaaccttcgacgaggcgctgagcttccgccgcgccctggccaacgtgcgccgcaacctcagtgctgacgactggtggttcagcatctggcagccgggggcggtcgacggcg

SEQ ID NO: 275591 - DNA, 277 bp, Unknown
  Bacterial polypeptide expressing nucleotide sequence isolated from the Sargasso Sea
ccagaaagagctgcacggtcagaccgaagaggtgtatctcgaagagatggtgggccgcgtcaacgccaatatgatcctgccgtatcctccgggagtgccgctggtcatgccgggtgaaatgatcaccgaagagagccgtccggtgctggagttcctgcagatgctgtgcgaaatcggcgcccactatccgggcttcgaaaccgatatccacggcgcctatcgtcaggcggatggtcgttacaccgttaaagtgctgaaagaagaaaataacaaataa

SEQ ID NO: 275592 - DNA, 814 bp, Unknown
  Bacterial polypeptide expressing nucleotide sequence isolated from the Sargasso Sea
ttcggcgccgaccacacgttcttcgtcaccaatggcacctctaccgcgaacaagatcgtctggcacggtaccgttggccggggcgacgtggtgttcgtggaccgcaactgccacaagtcgttgctgcactcgctgatcatgaccggtggcatcccggtctatttcacccccagccgcaatgcgcacggcatcatcgggccgatcagcctggaccagttcacgcctgaagcgctgcagcagtcgattgccgccaacccgctggcgagcaaggcctacaaggccggctccaagccgcgcatcgcggtggttaccaattccacctacgacgggctgtgctacaacgccgagaagattgccgaggagatcggcagcgcggtggacttcctgcatttcgatgaggcctggtacgcctatgcggcgttccatccgttctacgagaaccattacggcatggccaagggcaagccgcgcgagcaggatgcgatcattttcaccacgcattccacgcacaagctgctggctgccttctcacaggcgtcaatgatccatgtccgcaatgcggccagccgcgaactcgacgccgagcgcttcaacgaagcgttcatgatgcacaccaccaccagcccgcattacggggtgattgccgcatgcgacgtggcctcgaagatgatggaaggggcggccggcgagtccctggtgcaggaaatgcacgatgaggccatcgccttccggcgcgccatgctgcacgtgcgagaagacctcggtcgcgacgactggtggttcagtgtgtggcagccggacaagctggagcgtt

SEQ ID NO: 275593 - DNA, 2299 bp, Unknown
  Bacterial polypeptide expressing nucleotide sequence isolated from the Sargasso Sea
atgaaggcgctgctcgtgcagcacgacatcgatgaacgcacggccaccgggcgcgccgcgacggcgcttgccgaggaactgcgcacgcgactcgtcgacgtcgtgatcgcgacgtccgccgacgatgcctgcgcggtggtcgccgccgatccggcaatccagtgcctgctgctcaactgggaactcggcaacgacgccggccatgcgcccgcgcaagccgtgctcgacgcaatgcgcgcacgcaacgcgaccgtgcccgtgttcctgctcgcgagccgcgcgagtgcgtccgcgattccggtcgacgcgatgcgcaaggccgacgacttcatctggctgctggaggacaccaccgcgttcatcggcgggcgcatcgtcgccgcgatcgaacgctatcgcgagaccgtgctgccgccgatgtttcgcgcactcgcgaaattctcgcgcgtgtacgaatactcgtggcatacgcccggccacacgggcggcaccgcgttcctgaaatcgccggtcggccgcgcgtatttcgaattcttcggcgaatcgctgttccgctccgacctgtcgatctcggtcggcgaactcggctcgctgctcgatcactcgggcccgatcggcgaaagcgaacgctatgcggcgcgcgtgttcggcgcgcatcgcacgtaccacgtgacgaacggctcgtcgatgtcgaaccgcgtgatcctgatggcgagcgtcacgcgcaaccaggtcgcgctgtgcgaccgcaactgccacaagtcggccgagcacgcgatgacgatgtccggcgcgattccgacctacctgattccgtcgcgcaaccactacgggatcatcgggccgatcatgcccgagcggctgacggccgccgccgtgcggctcgcaatcgacgcgaacccgctcgtgcgcggccgcgacggcatcgatccgacgcccgtccatgcgctgatcacgaactcgacgtacgacggcctctgctacaacgtcgcgcgtgtcgaggcactgctcggccagagcgtcgatcgattgcacttcgacgaggcatggtacggctacgcgcgcttcaacccgatctaccgcgaccgttacgcgatgcacggcgatccgtcgcagcacgacgccagcaagccgaccgtgttcgccacgcaatcgacgcacaagctgctcgccgcgctgtcgcaggcatcgttcattcacgttcgcgacggccgcaacccgatcgagcacgcacgcttcaacgaggcgtacatgatgcatgcgtcgacgtcgccgaactacgcgatcatcgcgtcgaacgacgtgagcgccgcgatgatggatggccccggcggcgaggcgctgacgaccgacgcgatccgcgaggccgtcgcgttccgccagatgctggcgcgcctgcatacggaatgcgcggagaacaacgactggttcttcaacggctggcagcccgacagcgtcgtcgatcgcaagacgggccggcgcgtgcgcttccacgaagcggacgagacgctgctcgccaccgatccgtcgtgctgggtgctgcatccgggcgacacgtggcacggcttcggcgatatcgaggacgactactgcatgctcgacccgatcaaggtgtctatcgtcacgccgggcgtcgcatcgcacggcgggctgatgccggtcggcattccggcgtcggtcgtcaccgcgtatctcgaccggcacgggatcgtcgtcgagaagacgaccgacttcacgatcctgttcctgttctcgctcggcgtgacgaagggcaagtggggcacgctcgtcaacacgctgctcgacttcaagcgcgactacgatgcgaatgcaccgctcgaacaggcgctgcccgagctcgtcgcgcgctatccggaacgctacggcaagctcggcctgcgcgacctgtgcgacctgatgttcagcgcgatgagcgacctgaagacgaccgagatgatgtcgcgcggcttctcgacgctgccgaagcccgattacagcccggccgaggcgttcgagcatctggtgcacaacgacatcgaaatgctggagctcgcggagatggaaggccgcaccgtcgcgacgggcgtcgtgccctatccgcccggcattccgctgctgatgcccggcgagaacgcggggccggccgacggcccgctgctcggctacctgaaagcgctcgagcagtacgacctgcgcttcccgggcttcacgcacgacacgcacggcgtcgaagtcgaggatggcgtgtatcgcatcgcgtgcatcaggcagaaggcgcgcgataccgacacgcgctgag

SEQ ID NO: 275594 - DNA, 2266 bp, Unknown
  Bacterial polypeptide expressing nucleotide sequence isolated from the Sargasso Sea
atgcgcgcgctgctcgtcgacgacgagatcacgcaggaaaccgcgaccgggcgtgcggtccgcacgctgagcgcggagctcgtgcagcgcgacatcgacgtgctcacggccacgtcggccgacgatgcgatcatgctgatccgctccgatccgtcgatccagtgcgtgctcctcgactgggatctcggcgtggacggccatgggccgtccgaggccgtggtcgacgcgatccggcatcgcaacgccaacgtgccgatcttcctgctggccgaccgcagcgtcgcatcgtcggtgccgtccaaggtgatgggccaggtcgacgatttcgtgtggctgctcgaggatacggccgacttcatcggcgggcgcattcacgcggcgatcgaacgctatcgcgcgacggtgctgccgccgatgttcggcgcgctcgcgaaattctcgcgcgtctacgaatactcgtggcatacgcccggccacaccggcggcacgggcttcctgaaatcgccggtcggccgcgcgttcttcgagtacttcggcgaagcgctgtttcgttccgacctgtcgatctcggtcggcgagctgggctcgctgctcgaccactcgggcccgatcggcgaaagcgagcgctacgcggcccgcgtgttcggcgcgcatcgcacatatcacgtgacgaacggctcgtcgacgtcgaaccgcatcatcctgatggcgagcgtgagccgcgaccagatcgcgctgtgcgaccgcaactgccacaagtcggccgagcacgcgatgacgatgtcgggcgcgatcccgacctacctcgtgccgacgcgcaaccgctacgggatcatcgggccgatcgcgtccgagcgtctcacgcaaacggcgatccgcgaggcgatcgcgtcgaacccgctcacggccgggctggccgatcgccagccgaagcacgcgatcgtcaccaactcgacgtacgacggcctgtgctacaacgtcgcgcgcgtcgaggaactgctcggcgcgagcgtcgaccggctgcatttcgacgaagcgtggtacggctatgcgcgtttcaacccgatctaccgcgatcgccatgcgatgcacggcgacccgcgcgaccatcatgcggatcgcccgacggtgttcgcgacgcagtcgacgcacaagctgctgaccgcgctgtcgcaggcgtcgtacatccacgtgcgcgacggccgcaacccgattccgcatggccagttcaacgaaacattcatgatgcacgcgtcgacgtcgccgaactacgcgatcatcgcgtcgaacgacgtcgcggccgcgatgatggacggccccggcggcgcggcgctcacgcacgagtcgatcgaggaagccgtcgcattccggcagatgatcgcgcggatgaacagcgagttcggcgcgaagggcgactggttcttcgagtgctggcagcccgacaccgtgctcgagacgcgcaccggccgcacgctgccgttccacgatgtatcgcccgagctgctcgcgagcgacccgtcgtgctgggtgctgcgtcccggcgcgcaatggcacggcttcggcaatatcgaggacggctactgcatgctcgatccgatcaaggtgtcgatcgtcacgccgggcgtcgcgccggccggcgggctgatgccggtcggcattccggcgagcgtcgtgaccgcgtatctcgatgcccgcgggatcgtcgtcgagaagaccaccgacttcacgatcctgttcctgttctcgatcggcatcacgaaaggcaagtggggctcgctcgtcagcgcgctgtgcgacttcaagcgcgactacgacgcgaacctgccgctcgacatggcgattccgtcgctcgcgaaggagcacggctcgcgctatgcgggcatggggctgaaggacctggccgacacgatgttcgcggcgatggagcagctcggcacgacgcggctgatgtcggaggcgttctcgatcctgccgaagccggagatgagcccggtgcgcgcgtacgagcatctggtgcagggccgcgtcgagcaagtcacgctcgaggagctggccgggcgcacggtcgctaccggcgtcgtgccgtatccgccgggcattccgctcctgatgccgggcgagagcgcggggccggcgggcggcccggtgctcggctacctgaaggcgctcgaagcgtacgaccggcgcttcccgggcttcgcgcacgatacgcacggcgtggaagtcgaggacggcacgtaccgcgtgtattgcctgacggcctgaa

SEQ ID NO: 275595 - DNA, 2134 bp, Unknown
  Bacterial polypeptide expressing nucleotide sequence isolated from the Sargasso Sea
atgaacatcattgccatcctcaaccacctgggcgttttcttcaaagaagaacccattcgccagctgcaagcctccctcgagcgcaagggtttcgaggtcgtttatccggtcgacgtggccgatctgctgaagctgattgagaagaacccccgcgtttgcggcgccatcttcgactgggacaaatactccctgggcctgtgcaaggagatccatgatcgcaacgagaagctgccgatcttcgccttcgccaacgaccagtccaccctggacattcacctgaccgacctgcgtctgaacgtgcacttcttcgagtaccgtctcggcatggccgacgacatcgccctcaagatgggtcaggccacccaggagtatcaggatgccatcctgccgccgttcaccaaggcactgttcaagtacgtggaagagggtaaatacaccttctgtactccgggccacatgggcggtaccgccttccagatgagcccggccggcagcatcttctatgacttctatggcccgaacgccttcaaggccgacgtctccatctccatgccggagctgggttccctgctggaccactcaggcccgcacaaggaagcggaagagtacatcgcccgtaccttcaacgccgatcgctcctacatcgtcaccaacggcacctccactgccaacaagatcgtcggcatgtactcggcgccagccggcagcactgtgctggtggatcgcaactgccacaagtcgctcactcacctgatgatgatgaacgacgtgaccccgctctacttccgtccgacccgcaacgcctacggcattctgggcggcatcccgcagagcgaattcagccgcgaaaccatcgccgccaaggttgccgcgacgccgggtgccctggcgccgcgctacgccgtgatcaccaactccacctatgacggcctgctctacaacaccggcttcatcaaggaggcgctggacaccccttacatccacttcgacagtgcctgggtgccctacaccaacttcagcccgatctacgaaggcaagtgcggcatgagcggtgaagccatgccgggcaaggtgttctatgaaacccagtccacccacaagctgctggcggccttctcccaggcctcgatgatccacatcaagggcgacgtggaggaagagaccttcaacgaagccttcatgatgcacacctccacctcgccgcagtacggcatcgtggcctccaccgagatctccgcagccatgatgcgtggcaacaccggcaagcggctgatcaaggactccatcgatcgcgccatctccttccgcaaagagatcaagcgtctgcgcgagcagagcgaaggctggttcttcgacgtatggcagccggacgacatcgacaccgttgagtgctggaagctggatccgaaagatgactggcacggtttcaaggacatcgacgatgatcacatgtacttggatcccatcaaggtcaccctgctgaccccgggcatgggccgcaatggtcaactgctggacaacggcatcccggcttcgctggtttccaagttcctggacgagcgcggcatcgtggtggagaagaccggtccctacaacctgctgttcctgttctccatcggcatcgatcagtccaaggcgatgcaactgctgcgcgccctgaccgagttcaaacgtggctatgacctgaacctgaccatcaagagcatactgccgagcctctatcgcgaagacccgagcttctacgaagggatgcgcatccaggagctggcccagcgcattcacgagctgaccagcaagtaccgtctgccggagctgatgttcaaggcgttcgacgtactgccggagatgaagatgaccccgcacgccgcctggcagcaagagctggccggcaacgtggtggaagtgccgctgcgcgacatggtggaccgcatcagcgccaacatgatcctgccgtacccgccgggagtgccgctggtgctgccgggcgagatggtgacccaggattctctgccggtgctcgagttcctcgagatgctgtgcgagatcggggcccactacccgggcttcgagaccgacatccacggcctctatcgtcaggccgatggcagctacaccgtcaaggtgctgcgctaag

SEQ ID NO: 275596 - DNA, 1933 bp, Unknown
  Bacterial polypeptide expressing nucleotide sequence isolated from the Sargasso Sea
atcaaccagctcaacgagtatctcccgctctacgcctttattaatacccattcgacgatggatgtcagtgcgcacgacctgcgcatggcgctgtggttttttgagtatgcgctgggtcagtctgaagacattgccacccgtatccgccagtacaccagcgaatacctcgataacatcacgcctccttttaccaaagcgctgtttacctatgtgaaggaagggaagtataccttctgcacgcctgggcacatggcgggaacggcgtaccagaaaagtccggtcggctgcctgttctatgatttctttggcggcaatacgctgaaagccgacgtgtccatttccgtaaccgaactgggctcattgcttgatcataccggtccgcacctggaagcggaggagtatatcgcgcgtacttttggtgccgagcagagctatatggtgaccaacggcacctcgacatcgaacaagattgtcggtatgtatgctgcacctgcaggcagtacgctcctgattgaccgcaactgccataagtcactggcgcatttgctgatgatgagtgatgtggtgccaatctggctgaagcctacgcgtaacgcgctggggatcctcggcggtataccccgtcgggaatttacccacgcaagcattgaacgcaaagttgaggaaaccaatcaggcgcaatggccggtccacgcggtgatcaccaactccacctatgatggcctgttgtataacaccaactggatcaaacaaacgctggatgtgccctccatccattttgattcagcctgggtgccgtatacccattttcatccgatctatcaggggaaaagcgggatgagcggcgaacgggtaccgggaaaggtgatttttgaaacccagtctacccacaagatgctggcggcgttgtcacaggcttcgctgatccacattaagggcgactatgatgaagacacgttcaacgaagcctttatgatgcacacctctacgtctccgagctatccgatagtggcgtcgatagaaacggcggcggcaatgctgcgtggcaattcaggcaagcggttaatcaatcgttcggtggaacgggcgctgcatttccgtaaagaagtgcaacgtctgcgtgaggagtcggatggttggttctttgatatctggcagccggaaaaggtagatgaagcagagtgctggccggtagcgccaggtgaagactggcacggatttgttgatgctgatgccgaccacatgttccttgacccggtgaaggtcacgattttgacgccgggaatggatgaacagggaaatatgagcgaagaggggatccccgcggcgctggtggcgaaattccttgatgaacgcggtgtcgtagtcgagaagacgggaccgtataacctgttgttcctgttcagcattggtattgataaaacccgggcgatggggctgctacgtggcctgacggaatttaagcgctcgtacgatctgaatttacgtgtgaaaaatatgctgccggatctatatgctgaagatcccgatttctatcgcaatatgcgtattcaggatctggcgcaagggatccatcagttgatccgccagcatgatctctccgggttgatgctgcgggcatttgataccttgccggaaatgaaaatgacgccgcaccaggcctggcagcggcagatcaaaggtgaggtcgaaacggtagcacttgatcaactggtggggcgcgtttctgccaatatgatcctgccttatcctcccggtgtgccgcttttgatgcccggggaaatgatcactgccaaaagccgggctgtcctcgattttcttctgatgctgtgctcggtagggcagcgctaccctggatttgaaaccgatatccatggcgctaaactgggtgaggatggcctgtatcgcgtgagagtcttaaaaatggcataac

SEQ ID NO: 275597 - DNA, 850 bp, Unknown
  Bacterial polypeptide expressing nucleotide sequence isolated from the Sargasso Sea
aacagtgaaaaagaaagagtgcttatttcattaagccccgaatatgatgtgcctgaagagggttatgtccttgtgattggagagggtcaaacaattgatttaagagcctcttccgcttctggtttattttatggctttcaatctttccgacaactttgtgacccagggctagaggctggctccaaacctgaaaatacaactatcccaatatgtactatcgaagactctccagtatttggatatcgaggcatgcaccttgatgtatcaagacactttttcaatgtagaatttgtaaaaacgtacatagatatgatcgcacttcataaaatgaatgtgttccattggcacttgaccgatgataacggttggcggatcgaaatagataaatatccactgttaacagaaaaatcagcttggcgcgttgatagaagacatgagccctggaaagaacagtcccctcctttagataatgaaaccgccacatatggtgggtattataccaaggaccaaatacgagaggtcgttgaatatgcgtccaaaagaaacattgtagttattccagaaattgaaatgccaggacacacctctgaggtgtttgccgcatatccagagctttcatgcaaaggagattacattcctgtaaatcctggttcatactggcccaacactgatattttttgtgccgggaacgacaaagtttttacctttcttgaaaatgtgctagaagaagtaattgatctttttcctgggcgatatattcatattgggggtgatgaggcagataaaatgaattgggaaaaatgtcccaagtgtcaagctcgaatagaatctgaaaacctcaagaatgaac

SEQ ID NO: 275598 - DNA, 763 bp, Unknown
  Bacterial polypeptide expressing nucleotide sequence isolated from the Sargasso Sea
ttcaaaaaaattaaaaattttacctctgttagggttgagaataaaacttacaaacacaattagtggaaaatggtctcaatcaagtggtgatagaagtgctttcggactacctgttgaaaaaattactgaagtgatttcaatattaaagaaaaatcagcttttagaatgtttaatacttcaacattcacatttgggtagtcaagttccagacattatagaaattagaaagtttacccaagaagcttgcaggtttttttgtgagattactaaagagggtgcacctcttaagtatttagatttaggtggtggcttaggaatagattataccggtcagaacaagtctatatctcattcaattaattattcattagaagaatattgttttaatattgtagaaacagtcaaacttcagctagacaaagaaaaaattgaccacccagttattataacagagtcaggtagagcatgtgttgcagcaagttcaattttgatttttaatatcttagacacaacaatatttgattcaaaaaaatgtcctgaaataactcaaaaggaccatatttatttatcttacatgaagcaaatacttaattacttagaaaaagaaagattacaagaatgttttaatgatttaaattactatcgtgatgaattaaggattttatttagaaacaatcaaattaatttaaaagatatggcaaaaatagaaaaaacatatctttttattcttaataaaatgaaaatcacttttactcgaaactaa

SEQ ID NO: 275599 - DNA, 445 bp, Unknown
  Bacterial polypeptide expressing nucleotide sequence isolated from the Sargasso Sea
cagcgtgttgcgattctaagtgacattacctgtgattcagatggcaagatctataaatttgttctgggtgatggcgtttctgataccttgccggttcatgatctcaaagctgatgaggactattttctgggcgtgtttttcatcggcgcatatcaggaaacacttggtgatttacataatctgtttggtgataccaatgtggtcacgatcggtctggatgacgctggcggatttgaaatccttaaagaacaggatggggatacaatttatgaagtgctgtcctatgttgagtatgagccaaaacgattattatcgtcattcaaagcgattgtcgaaacagccgtgaaaaagggtaaggtcagtccggcagataggcgccagatgataaaagcttatacagatagtttgaatggctatacctatttcgaacattcagatcactaag

SEQ ID NO: 275600 - DNA, 877 bp, Unknown
  Bacterial polypeptide expressing nucleotide sequence isolated from the Sargasso Sea
aatggcaatataggacttaaaaatccattttatccatctaatccttctatcgacctaattaaaattatagaaagtcttaatgaaagaggtattagctgcccagtattattaagagttacagattacttagcatttagaataaaacaaattaatgaatctttttttaaagctataaaagaagttggatataaaggttattataagggtgtttttccagttaaagttaatcaacaggcacaggtaattgacagaatagttgattttggaaaagaatttgattttggtttagaagttggttctaaacctgaattattaatagctttagcacacgatctctctagtgaatctgccattatatgcaatggaattaaggatagagaatttattaatttggcaatcttatcacttaaaattggttttaaaactattttagttttagaaagtccacgtgaacttgatctaatcattgaagtttctcaagaactaaatgtaagaccaatacttggaataagagtaaaattaacaaacaaagttagtggtaattggtctcaatctagtggagatcgaagtgcatttggaatgtctgttgaacaagtaatgaaagttattaaaaaattaaaatcatataactatcttgattgcttggttttacaacattcacatcttggtagccagatccctgatatcattgaaattagaaaagcaacacaagaggcttgtagattttactcagaaatgtgcaaacaaggagcaccactggaatatttagatcttggaggtggcttaggtgtggattatacaggagaacaaaagtcttctcttaactcaataaattattcattagacgaatactgtataaatattgtgaaactgttaa

SEQ ID NO: 275601 - DNA, 748 bp, Unknown
  Bacterial polypeptide expressing nucleotide sequence isolated from the Sargasso Sea
aatttatctcaaataattgaactatggaatgatgcaaaaaagtttaaagaagattgcttagttgcctttagattaggatttttaagtttagcagaacgagcttatgccgaagaacttacttgggcttgcgcaaaagaaatttctaataacctgaataatgatgaaatcaatcaccctgatttatctgaaattacagaaactcttgcatcaacttattatgcaaatttatctatctttaaatctattcccgatacctgggcaataaatcagatatttccaatagtaccaatacataggcacttagaagagccgttctgcaaaggcaactttgcagatttaacttgcgattcagatgggaaactaaataattttattgatgatggaaaaattaaatcattactaaatctacataagccagaggaagataaagattatctaattggaatttttatgactggagcctatcaagaagcattaggaaatttgcacaatttatttggcagtacaaacgttgttcatatagacataaatcaaaatgattcatataagatcaaaaatattattaaagaggacagtaaatctgaaattttacaattattagattacagttcagcttctttagttgaatctataagaattaatactgaatcagcaattgatcaaaaaaaattaactattgaagaagcaaggaaattaatggatcaaatcgaaattagtctcagaaaaagtagttatttatcagaatgac

SEQ ID NO: 275602 - DNA, 789 bp, Unknown
  Bacterial polypeptide expressing nucleotide sequence isolated from the Sargasso Sea
tccattttatccatataatcctcctacagacctaattaaaattatagaaagtcttaatgaaagaggtattagctgcccagtactattgagagttacagattacttggcatttagaataaagcaaattaatgaaactttttttaacgctataaaagaagttggatataagggttattataagggcgtttttccagttaaagtaaatcaacaggcacaagtaattgatagaatagtcgattttggaaaagaatttgattttggtttggaagttggttctaaacctgaattattaatagctttagcacacgacctttccagtgaatctaccattatatgtaatggaattaaggacaaagaatttattagtttggcaatcctatcacttaaaataggttttaagactattttagttctagaaagtcctagggagcttgatctaatcattgaaatttctaatgaacttaatgtaaggccattacttggaataagaataaaactaacaaataaaataagtggtaaatggtctcaatctagcggagatcggagtgcatttggtatgtcagttgaacaagtgatgaaagttattacaaaattaaaagttaataactatcttgattgcttggttttacaacattcacatcttggaagccaaattcctgatatcattgaaattagaaaagcaacacaagaggcttgtagatttttctcagaaatgtgcaaacaaggtgcacctctacaatatctagatcttggaggaggtttaggagtagattatacaggagaacaaaa

SEQ ID NO: 275603 - DNA, 148 bp, Unknown
  Bacterial polypeptide expressing nucleotide sequence isolated from the Sargasso Sea
aatgatatcttgaaagatcgaataaatgcattacatgactcttttttaaaagcaataaaaacatataattataagaacttttatcaaggagtttttcctgtcaaatgtaatcaacaaaaaaatgtccttgaaaagataatagagtttg

SEQ ID NO: 275604 - DNA, 772 bp, Unknown
  Bacterial polypeptide expressing nucleotide sequence isolated from the Sargasso Sea
agtatccgataacaaagaacaatcattaatcatcacaaatctgatagaaacccttaatcagctaaagagtcttagagataaaaaagaagatttatctgaaataatagagttatggaatgacgctaaaaaatttaaagaggattgcctagtcgcttttagattaggatttgtttgtttggaagaacgtgcgtatgcagaagaacttgcatgggcttgtgcaaaggagattgcaaatcaattggagagtgatgaaattaaccatccagatttatctgaaataaccgacacgcttgcatcaacatattacgcaaatttatcagtttttaaatctattcctgatacctgggcaattaatcaagtttttccaattattccaattcatagacacttagaagagccctgttgtaagggaaactttgcggatttaacttgtgattctgatggcaagctgaatagttttattgacaatggaaagattaaatcacttttaaatttacatcctccagaaaaaagtaatgattatctaataggaatctttttggcaggagcatatcaagaagcattagggaatttccataatttatttggaaatacaaatgttattcatattgatataaatgaagataattcttataaaattaaaaacattattaaagaaaatagcaaatcagaaattttagagttattggattacagctcagataatttagttgaaacaataagagtcaatacagaatctgctatcaataataaaactttgactattaaagaa

SEQ ID NO: 275605 - DNA, 385 bp, Unknown
  Bacterial polypeptide expressing nucleotide sequence isolated from the Sargasso Sea
atggataaaacctatgacgctcttcttttagtctcttttggtggacctgaaagcctcaaagaaatacgaccttttctggaaagaatcacggaaggtaaaaatattccctccgatcgccttgaggaaatagttcagcgttatgaaacagtaggtggcatatcgcctctaaacgccaatatacgcgacataagggaaagactagagattgaaattaagagtcgagatatcgatatcccaattttcattggacatagaaatgtcgaacctcttattgtaaacacggtaaatgaaatgaaagtgtctggcgttgctaaatctttagcatggcttgcatctccctatagttcctatagttcctgtaggcagtacacggaaaatatagaaa

SEQ ID NO: 275606 - DNA, 925 bp, Unknown
  Bacterial polypeptide expressing nucleotide sequence isolated from the Sargasso Sea
gatgagtctgacccctcccgcgaacgacgcccagaccggtgtgcccagcgaccgcctgtggttgcgctcagagctgatgggaacgcaggtgatcacccgcgacacaggccggcgactgggggtcgtcggcgaggtgatcgtcgacatcgaccgccgcgaagtagtggccgtcggactgcgtgacaaccctttgacccgcttcctgccgggtctgccccgctggatgccgctggaccgcatccgtcaggtgggggatgtgatcctggtggattcggccgattccctcagcgacggcttcaatcctgagcgctacagccgggtgatcaactgccaggtgatcaccgaatccggccggcagctcggccgggtgctcggcttcgccttcgacatcgaaaccggtgaactcaccaccctggtgatgggtgccctgggggtgcccctgctgggggaaggcgttctcagcacctgggaaatgccggtggaggagatcgtcagcagcggcccggatcggatcattgtttacgagggcgccgaagacaaactcaagcaactcaacagcggtgttctggagaagcttggggtcggtggaccgagctgggaggagcaggagcgggagcgctatcgcgtcaatctggtgccggtggagaaccagttgagctccggccaaccggtggaggaggaacaacggcggctgaccgcttcagagaccgcccgcttcgagccggaggaggacatggaatacgtggagctggaggagcggcgccgcgacgagatgcctcagcgccgttatctcgatcaggagcctgaggatccgtatccgctgccacgccgctcgatgccggtgtcgcgccgcgccatgccaccagagcgtgagccgatggatgtggaacccatggatgttgaacccatggatagagaaccttga

SEQ ID NO: 275607 - DNA, 1009 bp, Unknown
  Bacterial polypeptide expressing nucleotide sequence isolated from the Sargasso Sea
atgagtctgacccctcccgcgaacgacgcccagaccggggtgcctagcgaccgcctctggttgcgctcggagctgatgggaacccaggtgatcacccgcgacacgggccggcgactgggggtcgtcggcgaggtgatcgttgatatcgaccgccgcgaagtggtggccgtcggactgcgcgacaaccccttgacccgcttcctgccgggcctgccccgctggatgccgctggaccggatccgccaggtgggtgatgtgatcctggtggattcggccgattccctcagcgacggcttcaaccctgagcgctacagccgggtgatcaactgccaggtgatcaccgaatccggccggcagctcggtcgggtgctcggttttgccttcgacatcgaaaccggtgaactcaccaccctggtgatgggtgcccttggcgtccccctgctgggggagggcgtgctcagcacctgggagatgccggtggaggagatcgtcagcagcggcccggatcgaatcattgtttacgagggcgctgaagacaagctcaagcagctcaacagcggcgtgctggagaagctgggggtcggcggaccgagctgggaggagcaggagcgggagcgctaccgcgtcaatcttgtgccggtggagaaccagttgagctccggccaacccgtggaagaggaacaacggcggctgaccgctgccgacagcgcccgcttcgagccggaggaggacatggaatatgtcgagctcgaggagcgacgccgcgacgcgatccctcagcgccggtatctcgatgaggaaccggaggatccgtatcccctgccacgccgctcgatgccggtgtcgcgccgggccatgccaccccaacgggaacccatggatgtcgaacccatggatgtcgaacccatggatgtcgaacccatggatgttgaaccgatggagcgcgaacaaccgccacgccgcagccgaccggcagccgctgaagacgacctcgacgacccctggtgag

SEQ ID NO: 275608 - DNA, 632 bp, Unknown
  Bacterial polypeptide expressing nucleotide sequence isolated from the Sargasso Sea
tatgaagaatgctgtttgtttaacgttagtactgcttattttagcttccggattaaactgtgtttccaatgcgtctatcaataaaaaccctatcacgaacatgaaaagtattaatataattccaaaaccatcatctattgcggcccaagaaggctttgtaagtataagcaacataaaaagaataattgttgataataacttaagcgatgaaaaatatattgctgaactatttcggtcgttcttaacacctatcaaagaaattgaaatttctttaacagaaaacaatgaaaaagaaagagtatttgtttctttaagccctgattatgatatacctgaagagggttatgtcctagtgattggagagagtcaaacaattgatttaaaagcctcttccgcttctggtttattttatggttttcaatctttccgacaactttgtgacccaggactagaggctggctccaaacctgaaaatacaactatcccaatatgtactatcgaagactctcctgtatttggatatcgaggcatgcaccttgatgtatcaagacactttttcaatgtagaatttgtaaaaacgtacatagatatgatcgcacttcataaaatgaatggttccattggcactgacc

SEQ ID NO: 275609 - DNA, 829 bp, Unknown
  Bacterial polypeptide expressing nucleotide sequence isolated from the Sargasso Sea
attgaccaattttgagccgaaaaaattaaagaatatttggactattgaagatagtatttcgacttataacatagacaaatggggagataaatatttttctataaattccaaaggaaatatatcagtaactaaagatataaaatctgaaaataagattgatctttttaagcttgtcgaagaacttaagagtagagaaataaatcctccattaattataagatttaatgatatcttgaaagatcgaataaatgcattacatgactcttttttaaaagcaataaaaacctataattataagaacttttatcaaggagtttttcctgtcaaatgtaatcaacagaaaaatgtccttgaaaagataatagagtttggtagccaatggaattttggtttagaagtaggaagtaaatcagaactattaattggcctttcacttcttgaaaaccaaaattcattattaatatgcaacggatataaagataaaaaatatattgagattgctactttggccagaaaactcggcaaaaatccaataatagttattgaacaacgagatgaggtaaaaagaattattcaagcagttcaagaacttaacgcaactccattgataggaattagagcaaaattatcaagtaaaagtagtggtagatggggtaaatctattggagataattccaaatttggattatcaatcccagaaattatgtcgacaataagagaactaaaagaagcaaatcttatcaacgaaatgaaattgctccattttcatataggcagtcaaatcagtgatattgctgtgatcaaagacgcattacaagaagcgagtcaa

SEQ ID NO: 275610 - DNA, 837 bp, Unknown
  Bacterial polypeptide expressing nucleotide sequence isolated from the Sargasso Sea
attgaccaattttgagccaaaaaaattcaagaatatttggactattgaagatagtatttcgacttataacattgacaaatggggagataaatatttttctataaattccaaaggaaatatatcagtaactaaagatataaaatctgaaaataagattgatctttttaaccttgtcaaagaacttaagagtagagaaataaatcctccattaatcataagatttaatgatatcttgaaagaccgcataaatgcattacatgactctttttcaaaagcaataaaaacctataaatataagaacatttatcaaggcgtttttcctgtcaaatgtaatcaacagaagaatgtcctagaaaagataattgagtttggtagccaatggaattttggtttagaagtaggaagtaaatcagaactattaattggccttgcacttcttgaaaaccaaaattcattattaatatgcaacggatataaagataaaaaatatattgagattgctactttggccagaaaactcggcaaaaatccaataatagttattgaacaacgagatgaggtaaaaagaattattcaagcagttcaagaacttaacgcgactccattgataggaattagagcaaagttatcaagtaaaagtagtggtaggtggggtaaatctattggagataattctaaatttggattatcaatcccagaaattatgttgacaataaaagaactaaaagaagcaaatctcatcaacgaaatgaaattactccattttcatataggcagtcaaataagtgatattgttgtgatcaaagacgcattacaagaagcgagtcaaatatatgt

SEQ ID NO: 275611 - DNA, 973 bp, Unknown
  Bacterial polypeptide expressing nucleotide sequence isolated from the Sargasso Sea
aatgcaatatatcgacgttgggggtggattaggaatattttttgatggaactaaaacctcctccaacacttctactaattattctctccaaaattatgctaacgatgtaattgcaacaattaaggattcatgtgaattaaataatataaagcatccaaccataatctcagaaagtggaagagcaataattagtcattgttcagttttaatttttaatgtcctaggaacaagtcatgtcagttccaaactacaaatttttgataaaaaaaatcaacaattaataatttcaaatttacttgatactttctatgctttaaaaaaacttaaaaataaaaaaataaatttatctcaaataattgaactatggaatgatgcaaaaaagtttaaagaagattgcttagtcgcttttagattaggatttttaagcttggcagaaagagcttatgccgaagaacttacttgggcttgcgcaaaagaaatttctaataacctgaataatgatgaaatcaatcaccctgatttaactgaaattacagaaactcttgcatcaacttattatgcaaatttatctatatttaaatctattcctgatagctgggcaataaatcagattttcccaatagtaccaatacataggcacttagaggagccgttctgcaaaggcaactttgcagatttaacttgtgattcagatgggaaactaaataattttattgataatggaaaaattaaatcactactaaatttgcataagccagaagaagataaagattacctaattggaatttttatgactggagcctatcaagaagcattaggaaacttgcacaatttatttggcagtaccaacgttgttcatatagacataaatcaagataattcatataaggtcagaaatattattaaagaggacagtaaatctgaaattttacaattattagattacagttcagcttctttggtgaatctataa

SEQ ID NO: 275612 - DNA, 925 bp, Unknown
  Bacterial polypeptide expressing nucleotide sequence isolated from the Sargasso Sea
tggactattgaagatagtatttcgacttataacatagacaaatggggagataaatatttttctataaattccaaaggaaatatatcagtaactaaagatgtaaaatctgaaaataagattgatctttttaagcttgtcgaagaacttaagagtagagaaataaatcctccattaattataagatttaatgatatcttgaaagatcgaataaatgcattacatgactcttttttaaaagcaataaaaacctataattataagaacttttatcaaggagtttttcctgtcaaatgtaatcaacagaaaaatgtccttgaaaagataatagagtttggtagccaatggaattttggtttagaagtaggaagtaaatcagaactattaattggcctttcacttcttgaaaaccaaaattcattattaatatgcaacggatataaagataaaaaatatattgagattgctactttggccagaaaactcggcaaaaatccaataatagttattgaacaacgagatgaggtaaaaagaattattcaagcagttcaagaacttaacgcaactccattgataggaattagagcaaaattatcaagtaaaagtagtggtagatggggtaaatctattggagataattccaaatttggattatcaatcccagaaattatgtcgacaataagagaactaaaagaagcaaatcttatcaacgaaatgaaattgctccattttcatataggcagtcaaatcagtgatattgctgtgatcaaagacgcattacaagaagcgagtcaaatatatgttgaactatgcaaactaggagccccaatgcaatatatcgacgttgggggaggattaggaatagattttgatggaacaaaaacctcctccaacacctctactaattattctcttcaaaattatgcta

SEQ ID NO: 275613 - DNA, 887 bp, Unknown
  Bacterial polypeptide expressing nucleotide sequence isolated from the Sargasso Sea
cggccccgactcttcaagaaattattcaacagaaatttatgcttcagatattgtttacggaatccagcaggtttgcgatttagctggagttaagcatcctcacattgtaacagaaagtggaagggccatgactgcccaccacagctttgtgctcgttgaagttgtcgacaagattggaccgatgacgacagactttaaagaaggcccttacgacaatttagaaaagccacatattcttgtgacgaatattaaagaaattctaacaggagtccatgagacaccttttcaggaagtctttaacgacgcccttgctgttaagacagatgctgaaaatgctttccgtcttggtattttatctctaggtgaaaaggccattattgagaaccatttttgggaaatttgccgtgttttaagaggcaaaataaagcaccttgatttcatttcagaagattttgaaagctttgccgataatcttgctctccaatacctttgcaatttttcagtctttcaatcccttccagatagttgggcgattgatcagctcttccctgttgttcctatcacaagacttaaggaacttccgacagagcattgtattctcgttgatattacttgtgatagtgatgggaaaattgataaatttatcaaccttggaaaatataaaaacactcttcagctgcacaccttaaaagaagatgagccttattacctaggcttttttctaacgggagcttaccaggatgttatgggtgacactcataatttatttggccgtttaaatgaagttcatattttttctgatgtcgatgacgaccatggcttttatgtagaagaagttatccgaggggcctctgccaaaaaggttctaaatacaatgcagtataatg

SEQ ID NO: 275614 - DNA, 886 bp, Unknown
  Bacterial polypeptide expressing nucleotide sequence isolated from the Sargasso Sea
aatatgcaacggatataaagataaaaaatatattgagattgctactttggccagaaaactcggcaagaatccaataatagttattgaacaacgagatgaggtaaaaagaattattcaagcagttcaagaacttaacgcgactccattgataggaattagagcaaagttatcaagtaaaagtagtggtaggtggggtaaatctattggagataattccaaatttggattatcaatcccagaaattatgttgacaatgaaagaactaaaagaagcaaatcttatcaacgaaatgaaattgctccattttcatataggcagtcaaataagtgatattgctgtgatcaaagacgcattacaagaagcgagtcaaatatatgttgaactatgcaaactgggagccccaatgcaatatatcgacgttgggggtggattaggaatagattttgatggaactaaaacttcttccaacacttctactaattattctctccaaaattatgctaacgatgtaattgcaactattaaggattcatgtgaattaaataatatcaagcatccaaccataatctcagaaagtggaagagcaataattagtcattgttcagttttaatttttaatgtcttaggaacaagtcatgtcagttccaaactacaaatttttgataaaaaaaatcaacaattaataatttcaaatttactcgatactttctatgaattaaaaaaacttaaaaataaaaaaataaatttatctcaaataattgaactatggaatgatgcaaaaaagtttaaagaagattgcttagttgcttttagattaggatttttaagtttggcagaaagagcttatgccgaagaacttacttgggcttgcgcaaaagaaatttct

SEQ ID NO: 275615 - DNA, 751 bp, Unknown
  Bacterial polypeptide expressing nucleotide sequence isolated from the Sargasso Sea
taagagtagagaaataaatcctccattaatcataagatttaatgatatcttgaaagatcgcataaatgcattacatgactctttttttaaagcaataaaaacctataaatataagaacatttatcaaggcgtttttcctgtcaaatgtaatcaacagaaaaatgtacttgaaaagataatagagtttggcagcccatggaattttggtttagaagtaggaagtaaatcagaactattaattggccttgcacttcttgaaaaccataattcattgttaatatgcaacggatataaagataaaaaatatattgagattgctactttggccagaaaactcggcaaaaatccaataatagttattgaacaaagagatgaagtaaaaagaattattcaagcagtacaggaccttaatgcgactccgttgatagggattagagcaaagttatcaagtaaaagtagtggtaggtggggtaaatctattggagataattccaaatttggattatcaatcccagaaattatgttgacaataaaagaactaaaagaagcaaatcttatcaacgaaatgaaattgctccattttcatataggcagtcaaataagtgatattgctgtgatcaaagacgcattacaagaagcgagtcaaatatatgttgaactatgcaaactaggagccccaatgcaatatatcgacgtttggggaggattaggaatagattttgatggaactaaaaccctcctccaacacctc

SEQ ID NO: 275616 - DNA, 770 bp, Unknown
  Bacterial polypeptide expressing nucleotide sequence isolated from the Sargasso Sea
attggccttgcacttcattgaaaaccaaaaatcattattaatatgcaacggatataaagataaaaaatatattgaggttgctactttggccagaaaactcggcaaaaatccaataatagttattgaacaacgagatgaagtaaaaagaattattcaagcagttcatgaacttaacgcgactccattgatagggattagagcaaagttatcaagtaaaagtagtggcaggtggggtaaatctattggagataattccaaatttggattatcaatcccagaaattatgttgacaataaaagaactaaaagaagcaaatcttattaacgaaatgaaattgctccattttcatataggcagtcaaataagtgatattgctgtgatcaaagacgcattacaagaagcgagtcaaatatatgttgaactatgcaaactaggagccccaatgcaatatatcgacgttgggggaggattaggaatagattttgatggaactaaaacctcctccaacacctctactaattattctcttcaaaattatgctaacgatgtaattgcaactattaaagattcatgtgaattaaataatatcaagcatccaagaataatctcagaaagtggaagagcaataattagtcattgttcagttttaatttttaatgtcttaggaacaagtcatgtgagttccaaactacaaatttttgataaaaaaaatcaacaattaataatttcaaatttacttgaaactttctatgaattaaaaaaacttaaaa

SEQ ID NO: 275617 - DNA, 929 bp, Unknown
  Bacterial polypeptide expressing nucleotide sequence isolated from the Sargasso Sea
gacaataaaagaactaaaagaagcaaatcttatcaacgaaatgaaattgctccattttcatataggcagtcaaataagtgatattgctgtgatcaaagacgcattacaagaagcgagtcaaatatatgttgaactatgcaaactaggagccccaatgcaatatatcgacgttgggggaggattaggaatagattttgatggaactaaaacctcctccaacacctctactaattattctattcaaaattatgctaacgatgtaattgcaactattaaggattcatgtgaattaaataatatcaagcatccaaccataatctcagaaagtggaagagcaataattagtcattgttcagttttaatttttaatgtcttaggaacaagccatgtcagttccacactacaaatttttgataaaaaaaatcaacaattaataatttcaaatttacttgaaactttctatgaattaaaaaaactaaaaaataaaaaaataaatttatctcaaataattgaactatggaatgatgcaaaaaagtttaaagaagattgcttagctgctttcagattaggatttttaagtttggcagaaagagcttatgccgaagaacttacttgggcttgcgcaaaagaaatttctaataacctgaataatgatgaaattaatcaccctgatttatctgaaattacagaaactcttgcatcaacttattatgcaaatttatctatctttaaatctattcccgatagctgggcaataaatcagatttttccaatagtaccaatacataggcacttagaggagcctttctgcaaaggcaactttgcagatttaacttgtgattcagatgggaaactaaataattttattgatgatggaaaaattaaatcactactaaatttacataagccagaggaagataagattatct

SEQ ID NO: 275618 - DNA, 1033 bp, Unknown
  Bacterial polypeptide expressing nucleotide sequence isolated from the Sargasso Sea
cagaaaaatgtcctagaaaagataatagaatttggtagccaatggaattttggtttagaagttagaagtaaatcagaactattaattggtcttgcacttcttgaaaaccataattcattattaatatgcaacggatataaagataaaaaatatattgagattgccactttggccagaaaactcggcaaaaaaccaataatagttattgaacaaagagatgaagtaaaaagaattattcaagcagttgaagaacttaacgcgacgccattgataggaattagagcaaagttatcaagtaaaagtagtggtaggtggggtaaatctattggagataattccaaatttggattatcaatcccagaaattatgttgacaataaaagaactaaaagaagcaaatcttatcaacgaaatgaaattgcttcattttcatataggcagtcaaataagtgatattgctgtgatcaaagacgcattacaagaagcgagtcaaatatatgttgaactatgcaaactaggcgccccaatgcaatatatcgacgttggaggaggattaggaatagattttgatgggactaaaacctcctcctccacctctactaattattctcttcaaaattatgctaacgatgtaattgcaactattaaggattcatgtgaattaaataatatcaagcatccaaccataatttcagaaagtggaagagcaataattagtcattgttcagttttaatttttaatgtcttaggaacaagtcatgtcagttccaaattacaaatttttgataaaaaaaatcaacaattaataatttcaaatttacttgaaactttctatgaattaaaaaaacttaaaaataaaaaaataaatttatctcaaataattgaattatggaatgatgcaaaaaagtttaaagaagattgcttagtcgcttttagattaggattcttaagtttagcagaaagagcttatgccgaagaacttacttgggcttgcgcaaaagaaatttctaataacctgaataatgatgaaatta

SEQ ID NO: 275619 - DNA, 834 bp, Unknown
  Bacterial polypeptide expressing nucleotide sequence isolated from the Sargasso Sea
aatgaattttaaaggttttcattataaaaataataatttattctgtgaacatgtttcattagaagatattagctttgaatttggcactccattatatgtttactctggagcatcaattgaagacgcttatagtcaattaagttcatcaatttccgatacaaatacagaaataaacttcgctcttaaagcaaattcaacattagggattttatctttactatctaagttaggagctggagcagatattgtctcaggtggagagttagtaaaagctttacatgttaaaataaatcctcagaaaattgttttttcaggagttggaaaaacaactgaagaaattaagctagcatccaaaaatcgaattaaacaaattaatgcagaatcctattcagaaattgaaaatattataagtattgcaaatgaattaaatactaaagttccagtggctataagagttaatccaaatattagtgtaaaaacgcatgagaaaattgctacaggatcaaatgatactaaatttggtatgcccattgaggaaacagcaaatatatacaaaagactttctagtgagaaaaatattaaaacaatgggcttagcaattcatataggaagtcaaatttttgatatgaatgaattcaaactcgcatatctaaatattttgtctgtagctaatagccttcgtcaagaaggttttaaagtgcctaatcttgatttaggtggaggtttaggcgttgattataaaattgcaaaaataaatttttttgattacggaaaaacaataagtgatgttttcaaaggacatgactataaccttttcatagaaccaggaaggtc

SEQ ID NO: 275620 - DNA, 778 bp, Unknown
  Bacterial polypeptide expressing nucleotide sequence isolated from the Sargasso Sea
gaagatagtatttcgacttataacatagacaaatggggagataaatatttttctataaattccaaaggaaatatatcagtaactaaagatataaaatctgaaaataagattgatcttttaaagcttgtcaaagaacttaagagtagagaaataaatcctccattaatcataagatttaatgatatcttgaaagatcgaataaatgcattacataactcttttttaaaagcaataaaaacctataaatataagaacatttatcaaggcgtttttcctgtcaaatgtaatcaacagaaaaatgtcctagaaaagataatagaatttggtagccaatggaattttggtttagaagtaggaagtaaatcagaactattaattggtcttgcacttcttgaaaaccataattcattattaatatgcaacggatataaagataaaaaatatattgagattgccactttggccagaaaactcggcaaaaaaccaataatagttattgaacaaagagatgaagtaaaaagaattattcaagcagttgaagaacttaacgcgacgccattgataggaattagagcaaagttatcaagtaaaagtagtggtaggtggggtaaatctattggagataattccaaatttggattatcaatcccagaaattatgttgacaataaaagaactaaaagaagcaaatcttatcaacgaaatgaaattgcttcattttcatataggcagtcaaataagtgatattgctgtgatcaaagacgcattacaagaagcga

SEQ ID NO: 275621 - DNA, 556 bp, Unknown
  Bacterial polypeptide expressing nucleotide sequence isolated from the Sargasso Sea
ttgagttcttttcaaaaacatatatcaatcactaaacataaagtgaccaattttgagccgaaaaaattaaaaaatatttggactattaaggatagtatttcgacttacaacatagacaaatggggggataaatatttttctataaattccaaaggaaatatatcagtaactaaagatataaaatctgagaataagattgatcttttcaagcttgtcaaagaactgaaaagtagagaaatcaatcctccattaatcataagatttaacgatatcttaaaagatcgaataaatgcactacatgatgctttttcaaaagcaataaaaacctacaaatatgaaaatatctatcaaggcgtttttcctgtcaagtgtaatcaacaaaaaaatttattggaaaagataatagagtttggcagtaaatggaattttggtttagaagtaggaagtaaatcagaattattaattggacttgcacttcttgaaaaccaaaattcattattgatatgcaacggatataaagataaaaaatatattgagattgctacttggcaagaaa

SEQ ID NO: 275622 - DNA, 817 bp, Unknown
  Bacterial polypeptide expressing nucleotide sequence isolated from the Sargasso Sea
ttgcttgcggttgtcgcgttggcagacaacgagactccaatcatctgcaatggctttaaagacgcagagttcattgagatggttatgcttgcacaaaaaattggccggaacatcattcctgtagtggagaggttctctgaacttccgcagctcttggattgtgcggaaagaattggtgtccggccaaatatcgggatgcgaatgaagttggcgaccagagggagtggtcgatggcatgcatcggctggttttcggagcaaatttggattaagtgtctctgaacttatgaagggagtcgatctcttggctggccgtgatatgagtgactgttttcagttgttacatttccatcaaggcagccaaataacaaatatacgacacattaaagcagcgctgaatgaatcagctcgcgtgtatgtagagcttgtaaaacgtggcgcaggcttaaagtttctcgatgtcggtggcggcttaggcgttgattacgacggatcgcaaacaaattttgagtcgagcgtaaactacagtcttcaagagtacgcaaacgacgttgtctctcatgttcagaatgtttgtgatgatgcaggtgttgagcatccaaccataatgtcggaaagtggtcgggccgtggttgcataccatagcatgctggtattcagcgttctgggggtttcagaacaagcgagtcaccaaaacattgaccagccatcgccgaatgtagaacagccagttcaggatctgcttgagacttttgaaggtcttagtgtcaggaatttgcttgagtcgtatcatgatgcacagcagtcgcttgatactg

SEQ ID NO: 275623 - DNA, 877 bp, Unknown
  Bacterial polypeptide expressing nucleotide sequence isolated from the Sargasso Sea
cgagccatcgccagccatttctccgttctggtgtttgacgtgctgggttgtggtcggacacccgacgacgagccgtccaaccaagacaacgaacccttacccgtgcgcaatctgcgcgaaacgctgacccacatccgcagcgtggagaagcaaacagaccccgagatgcggctgctccaggaagcgtggaacgatgcgatcaaattcagggatgacgcgctggctgccttccggctcgggtacatccgcctgaacgaacgggccatggctgagcagctcacctggagctgcgcccgcgccatcaacgaacgtctcccgaccaatgcccctatccatgacgacctgaagggactacagcgggccctggcctgcacgtattacgtgaacctctcggttttccgctcagcacctgacacttgggccatcgaccagctgttcccgctgatgccgattcatcgcctggaacaacaaccgacagaacttggcgactttgcagatctcacctgtgactccgatggaaaacttgcacgattcatccactcaggacaaagcaaatccctgctggaactccacccacttgtcgacggtgagccctattggatcggcatgttcctcggcggtgcctatcaggaagtgatgggcaacctgcacaacctgttcggcagtaccagcgccgtgcacgtgaggctcaatcacagaggcagtggctacctgctggatcacgtggtgaagggagataccaacgctgacgttctcgaggaaatgcaacacaacccagagctgatgctggagcggctgcgccaggcttcagaggctgccattcaacggggaacgttgcagatcgaagacgcccgcctgttgatgagccatctcaaag

SEQ ID NO: 275624 - DNA, 840 bp, Unknown
  Bacterial polypeptide expressing nucleotide sequence isolated from the Sargasso Sea
aattattcgattggccaaagagtctaaaacacgccccatgattggtattcgaagtaaattaagttttaaaggctcaggaaaatgggaaaactcggcaggagataaagctaagtttggtttaagtacaactgaaattattcaggccgtaaataaattaaaaaaagagcattttattgattgcttaaaactttttcactttcatataggtagccagattccagtaataggaactattcaagatgctatctctgaaggtgctcggttctatgctcaattagttaaaatgggagcccctatagagttttttgatgttggaggaggcttaggagtggactacgacggaagtcagtctacaaacgaatcttctataaattattctttagaggaatatgcaaaagatgtcgttcaaagcttaatgcaaatttgtgatcaagaggaagtcaaccatcctacgattgttagcgagtcgggcagggcaattacagctcatcatagttgtgttgttacaaaagtaataggggaaataagtccccgcagttcaaactatgaatatgacttaagcgatgatgagcatttgtttgttcaaaatatgcgacaactcgtaagtgatgtttgtgaagataattttatagcaacttataataatgcaagtaaaattaaagaggactcggtcaatgcatttaaacttggagtgttaagtttagaagaccgtgcgaaggttgaggatttatattggaagacattagaacttgttcttgccctcgcaaaaaatattgaagctgagtcggaaattgtctgggagttaagggaaaccttatcctcgcaatacctttgtatttt

SEQ ID NO: 275625 - DNA, 868 bp, Unknown
  Bacterial polypeptide expressing nucleotide sequence isolated from the Sargasso Sea
ctcgataatccaaaagccctactcgtttgcaacggatacaaagatgaggcttttatccgactggccttaatgagtcagaaattagggaaaaaagtttttatcgttgtagaaaaattagacgaactaaatcttatagaaaaagtagctaaagaattatgtgtgcaacccaatattggactgcgcatcaagttattaagcaccggtcagggacgctggtcttcttcagcaggagaacactcaaaattcggattgaattcaatcgaattgatggaagccctgaaaatatccaaggaaaaaaatattctcgatagcatcaagttaatccatttccatttaggtagccagatcaccaatatccgtcgcatcaaaaatagtttgcaggaagtgggacggttttattcagaattgatgcgattcggatgtggtattgaatatattgatgtcggtggtggtttgggagttgattacgatggctcccgttcgacatttgcatccagtactaattatacggtacaagaatatgctaatgatgtcgtttatcacctgttggaaatttgtaataaagaaaagctgccgcatccgaacatcatttctgaatcaggacgagccatgactgcgcaccactcgatacttgtggtcaacgtgctaggtgttacaagctttcccgaatggagtgataaggttaaaattgatgaagatgcaccagaagttgtaaaagaaattttcaatattctcgactctacttcaaacaagaatttaaacgaatcctggcacgatgcggtgcacttaaaagatgaagcacaaaaccagtttcttatgggaatgatctcccttgaaagtcgagctatttcggaaaaaattttctggg

SEQ ID NO: 275626 - DNA, 925 bp, Unknown
  Bacterial polypeptide expressing nucleotide sequence isolated from the Sargasso Sea
tatttttcaattaattcagatggcaatatatcgataagcccaaatagaaaatccaaaaaaaaagtcgatctttttaaacttgttaaggaatttaaaagtagagaaatcaatactcccttaataataagattcaacgacattttaaaagaccgaattacggaattaaataatgccttctgccaagctatagaaacttataactacaaaaatatttatcaaggagtttttcctattaaatgtaatcagcaaaaaaatgtcttggaaaaaatcattgaatatggggatccttggaattttggtttagaagtaggaagtaaatccgaattattaattggattatcaatcctagaaaatcaaaaatcacttttaatttgtaatggatataaagataaaaagtatattgagagtgcaatattagctagaaaacttggtaaacagccaattatagttattgaacaaagagatgaagttaaaagaattatagaagctgtaaaaaatctcaaagcaacccccatacttggaattagatcaaaattatcatgtaagagtagtgggaggtggggtaaatcagtgggagataattccaaatttggattatcaattccagaaataatgctaacaataaaagagctcaaagaagcaaatctaataaatgaaatgaaattgctgcatttccatgttggaagccaaatcagtgatatatcagtaataaaagatgcattacaagaagctagtcaaatatttgttgaattatctaagttaggtgcgccaatgaaatatatagatgttggaggcggcttaggaatagacttcgatggaactaaaacatcttccaatacttcgacaaattattctcttcaaaactacgcaaatgacgttatttgcacagtaaaagattcatgtgaagtaaataatattcaacatc

SEQ ID NO: 275627 - DNA, 814 bp, Unknown
  Bacterial polypeptide expressing nucleotide sequence isolated from the Sargasso Sea
gaaaaaattaaagaatatttggactattgaagatagtatttcgacttataacatagacaaatggggagataaatatttttctataaattccaaaggaaatatatcagtaactaaagatttaaaatctgaaaataagattgatctttttaagcttgtcaaagaacttaagagtagagaaataaatcctccattaattataagatttaatgatatcttgaaagatcgaataaatgcattacatgactcttttttaaaagcaataaaaacctataaatataagaacatttatcaaggagtttttcctgtcaaatgtaatcaacagaaaaatgtccttgaaaagataatagagtttggtagccaatggaattttggtttagaagtaggaagtaaatcagaactattaattggccttgcacttcttgaaaaccaaaattcattattaatatgcaacggatataaagataaaaaatatattgagattgctactttggcgagaaaactcggcaaaaatccaataatagttattgaacaacgagatgaggtaaaaagaattattcaagcagttcaagaacttaacgcgactccattgataggaattagagcaaagttatcaagtaaaagtagtggtaggtggggtaaatctattggagataattccaaatttggattatcaatccccgaaattatgttgacaataagagaactaaaagaagcaaatcttatcaacgaaatgaaattgctccattttcatataggcagtcaaataagtgatattgctgtgatcaaagacgcattacaagaagcgagtcaaata

SEQ ID NO: 275628 - DNA, 961 bp, Unknown
  Bacterial polypeptide expressing nucleotide sequence isolated from the Sargasso Sea
aggcagtcaaatcaagtgatattggctgtgatcaaagacgcattacaagaagcgagtcaaatatatgttgaactatgcaaactaggagccccaatgcaatatatcgacgttgggggaggattaggaatagattttgatggaactaaaacctcctccaacacctctactaattattctcttcaaaattatgctaacgatgtaattgcaactattaaggattcatgtgaattaaataatatcaagcatccaaccataatctcagaaagtggaagagcaataattagtcattgttcagttttaatttttaatgtcttaggaacaagtcatgtcagttccaaactacaaatttttgataaaaaaaatcaacaattaataatttcaaatttacttgaaactttctatgaattaaaaaaacttaaaaataaaaaaataaatttatctcaaataattgaactatggaatgatgcaaaaaagtttaaagaggattgcttagttgcttttagattaggatttttaagtttagaagaaagagcttatgccgaagaacttacttgggcttgcgcaaaagaaatttctaataacctgaataatgatgaaatcaatcaccctgatttatctgaaattacagaaactcttgcatcaacttattatgcaaatttatctatctttaaatctattcccgatagctgggcaataaatcagatttttccaatagtaccaatacataggcatttagaggagccgttctgcaaaggcaactttgcagatttaacttgtgattcagatgggaaactaaataatttttttgataatggaaaaattaaatcattactaaatttacataagcctgagaaaaataaagattatctgattggaatttttatgactggagccctatcagaagcattaggaaacttgcacaatttatttggtagtacaaacgttgttcatatagacataa

SEQ ID NO: 275629 - DNA, 493 bp, Unknown
  Bacterial polypeptide expressing nucleotide sequence isolated from the Sargasso Sea
gccggatgcctggggtatcggtcaggtgttcccggtgatgccgctggccggtctcgagcgtccgctcacccgccgtggcatcctgatggacatcacctgcgactccgacggccaggtcgagcactacgtcgacggtctgggggtcgagagcaccctgccgatgccggtctacggcgagaacgaagagtgccacgtcggcttcttcctggtcggtgcctaccaggagatcctgggggatctgcacaacctgttcggtgacacccactgcgcggaagtgtggctcgatgacgaaggcaagatggacattcgcaacgtggtgcgcggcgacaccgtcgaccagctgctgcgttacgtcaacatcgacccgtcggtcatccgcgagaactaccagcgcatcgtctcccacccggcgctggacgacgcgacccgcaaggccctgctcgacgagctggagctgggtctgcaaggctacgcctacctggaagacgaataa

SEQ ID NO: 275630 - DNA, 1186 bp, Unknown
  Bacterial polypeptide expressing nucleotide sequence isolated from the Sargasso Sea
ttgtcagattggagcatcgaagaagcggagcgcgtctatggcgtgtctcaatggggtggcggctattttcaaattggtgaaaacggcaacgtccatattacccctgttcctgaagatcctagcattcgaatcgactttaattcggtaattgaagatatccgcaaagaaggcgtacagtttcctgttgttgtgcgcttccacgatattctgcgctcgcaagttgcaggcttgaacaaagcatttagaagctccatcgaagaagccgaataccaaggccaataccaaggtgtgtatccggtaaaagtaaaccaaatgcgcgaagtcgttgaggaaattgtcgatgcgggcaagccatttaactatggcttagaagcggggtcaaaagccgagcttctgactgtgcttgccatgaataccaacgaagagtctctgactatcctaaatggttataaagacgacgaagttatgcgtctagcactgctaggcagaaagctgggtcgccgcgttgtggtagtagttgaaaaatacaccgagcttcttcttctggtaaaaatagccaaagagctggatatcgatcctatcattggtgtgcgctcaaaaatgactgtgaaaggtcgtggtaagtgggaaagctctggtggtgaacgtgcgaaattcggtttaaccattactgagatcattaacgcagcccgctaccttgaagagcaaggcatggcgcactgcttaaagctgctgcatttccatattggtagccaattaacagacattcgtgcggttaaagaagcggtaaccgaaggcgcgcgtatttacgcagaccttcacaaaatgggcttcgagctagattatgttgatgtaggtggtggccttggtatcgattacgacggcagtaattcaactaatgaatcgtcgcgtaactacagcatgcaagagtatgttgctgacgttgtctatggcatgaaggaaatgtgcgaccttgaaggcgtaccgcatccgcatctggttagtgaaagtggacgtgcaatcactgcgcatcacagctgtgttatcacggaaattgtgggcgaaattaagtcgaatgcgtcgcaaatggatacatcagcaaaagcgggtgaacacttcttccttaagaatatgcgcgaacttgcagacacgtttgatgaaacaacgaacatgcatgaaatttaca

SEQ ID NO: 275631 - DNA, 422 bp, Unknown
  Bacterial polypeptide expressing nucleotide sequence isolated from the Sargasso Sea
attggcagtctccaccgtgccgcagggcggaaccgatcacccctggtctgtcgcccgcagcgccgatctttatggtctgaaccgctggggtgatccctacttctcgatcaatgcccgcggccacgtcgtggtgcaaccgcgcggtgatcacggtggctcgatcgatctgatggaactgctcagcggcctggaagcacgcgacctctccaccccgctgctgattcgcttcgacgacatcctcgacgatcggctcgaacgcctgcacgccgccttcgagcgggcgattgcccactacgactacaacggtagttatcagggggtgttcccgatcaagtgcaaccaacagcgccacgtggtggagcacctggtggacagcggccggcgctgggacttcggcctggaggccggaagcaaagcggagc

SEQ ID NO: 275632 - DNA, 858 bp, Unknown
  Bacterial polypeptide expressing nucleotide sequence isolated from the Sargasso Sea
gctaagacttaagagtagagaaataaatcctccattaatcataagatttaatgatatattgaaagatcgaataaatgcattacatgactctttttttaatgcaataaaaacctataaatataagaatatttatcaaggcgtttttcctgtcaaatgtaatcaacagaaaaatgtcctagaaaagataatagagtttggtagccaatggaattttggtttagaagtaggaagtaaatcagaactattaattggccttgcacttcttgaaaaccaaaattcattattaatatgcaacggatataaagataaaaaatatattcaaattgctactttggccagaaaactcggcaaaaatccaataatagttattgaacaaagagacgaggtaaaaagaattattcaagcagttcaagaacttaacgcgactccattaataggaattagagcaaagttgtcaagtaaaagtagtggtaggtggggtaaatctattggggataattccaaatttggattatcaatcccagaaattatgttgacaataaaagaactaaaagaagcgaatcttatcaacgaaatgaaattgctccattttcatataggcagccaaataagtgatattgctgttatcaaagacgcattacaagaagcgagtcaaatatatgttgaactatgcaaactaggagccccaatgcaatatatcgacgttgggggaggattaggaatagattttgatggaactaaaacctcctcaaacacctctactaattattctcttcaaaattatgctaacgatgtaattgcaactattaaggattcatgtgaattaaataatatcaagcatccaaccataatctcaga

SEQ ID NO: 275633 - DNA, 937 bp, Unknown
  Bacterial polypeptide expressing nucleotide sequence isolated from the Sargasso Sea
tgcacttcccttaggttcacaaatcgccaacatccgtgatattcgtcaaggtgtgagcgaagcggcgcgtttctactgtgaattacgtgagttaggcgccagcattaactgcttcgacgtcggcggtggtttagcggtggattacgatggtacccgtagccaaagtaacaactcgatgaactatggcttaagcgaatacgcgaacaacatcgtcaacgtgcttaccgatatctgtaatgaatacgagcaaccaatgccacgtattatttcagaatctggccgtcacttaacggcgcaccacgctgtgttgatcaccgatgtgattggtactgaagcttatcaggtagaagaaatccagccgcctgcggaagagtcgccacagctgctgcacaacatgtggcaatcttggactgagatcagcggccgcgccgatcaacgtgcactgattgagatttaccacgacagccaaagtgacctgcaagaagcgcaatcgctgtttgccttgggtcaattaagcttggcagaacgtgcctgggctgagcaggctaacctgcgtgtatgccacgaagtgcaaggtttgttaagcaccaaaaaccgttatcacagaccgattatcgatgagttaaacgaaaagttagccgataagttcttcgtaaacttctcattattccaatcgttaccggatgcttggggtatcgatcaggtgttccctgtgctgccactgtcaggtttagacaaggcgccagagcgccgcgccgtgatgctggacatcacctgtgactctgacggtattgttgaccaatacgtagacggtcaagggattgaaaccacactgccagtaccggcttggagcgctgaaagtccttatctgatgggcttctttatggttggcgcctatcaagagatcttaggtgatatgcacaacctatttgggtga

SEQ ID NO: 275634 - DNA, 590 bp, Unknown
  Bacterial polypeptide expressing nucleotide sequence isolated from the Sargasso Sea
cgaagacgaattgcccgatgagctcaaaggcctcaaggctgcctttgccagcacctactacgccaacctctcggtcttccgttcggcccctgacacctgggccattgaccaactgttcccggtgatgccgattcaccggttggaggagcagccgcgcgagctcggaagcttcgccgacctcacctgcgactccgacggcaagctggcgcgcttcattgccagcggcagcgccaagccgttgctcgaactccatgagctcaaagacggcgagccctactggattggtttgtttcttggcggcgcctatcaggaggtcatgggcaacctgcacaacctctttggcagcaccaatgccgtctccatacgcctcagcccgggcgggccttaccgggtcgagcatgtggtgcgcggccaaaccaactccgatgtgctcgaggccatggagcatgaccctgaagctctgctggaacgactgcggcaagccagcgaagaagccatcggtagcggtgatctttccatcagtgccgctaggcgcttgatgcagcacttggaaggcagcctgcggcaaaccacctacctcgaggaataac

SEQ ID NO: 275635 - DNA, 870 bp, Unknown
  Bacterial polypeptide expressing nucleotide sequence isolated from the Sargasso Sea
ctgtgttgatcaccgatgtgattggtactgaagcttatcaggtagaagaaatccagccgccagcggaagagtcgccacaactgctgcacaacatgtggcaatcttggaccgagatcagcggccgcgccgatcaacgtgctttgattgagatttaccacgatagccaaagtgacctgcaagaagcgcaatcgctgtttgctttaggtcaattaagcttggcggaacgtgcgtgggctgagcaggctaacctgcgtgtatgtcacgaagttcaaggtttgttaagcactaaaaaccgttaccacagaccgattatcgatgagttaaacgaaaagttagccgataagttcttcgttaacttctctttattccaatcgttaccggatgcttggggtatcgatcaggtgttccctgtgctgccattgtctggtttagacaaagcgccagagcgccgcgcagtgatgctggacatcacctgtgactctgacggtattgttgaccaatacgtagatggccaagggattgaaaccacgctgcccgttccggcttggagcgctgaaagcccttatctgatgggcttctttatggttggtgcctatcaagagattttaggtgatatgcacaacctgtttggtgataccaactctgcggtggtgagcatcgaagagaacggtatgaccaacattgagtcggtccttgccggtgatacggttgctgacgtactgcgctatgttaacttagatgccgttgactttatgcgtacttacgaagagttagtgaaccagcacattgccgaagacgaacgtgcccagattttagaagaactgcaagtgggcctaaaaggttacacttatttagaagatttttcttaat

SEQ ID NO: 275636 - DNA, 775 bp, Unknown
  Bacterial polypeptide expressing nucleotide sequence isolated from the Sargasso Sea
tatgtgggcatcgtttgtgcagttaaccgatttaacagatgaccgcgcactgattgaaatttatcacgacagccaaggggatttagcagaggcacataaccagtttgcacttgggcttttagatttaacgcagcgtgcgtgggcagagcaagttaacttacgtatttgttatgagcttaacaaacacatggataacaaaaaccgttttcatcgtccaattattgatgagttaaatgcgcgtttagccgataagttttttgtaaacttttcgctttttcaatcattgcctgatgcgtgggggattgatcaagtgtttccggtattgccattaagtggcttaaccgaagcaccaaaaaaacgtgctgtattacttgatataacctgtgattcagacggtgcacttgagcactatgttgatggccaaggcattgaaagcactttaccggtgcctgagtacagtgcagataagccttacttaatgggctttttcttagtgggtgcgtaccaagaaattttaggtgatatgcacaatttatttggcgatacgcacagtgccattatcaatatggatgatcaaggcgttgccagtattagcgaaataaaccagggcgatactgtagccgatatgatgcgatatgtgcatttagatgttgagagctttcagcagtcgtacgcgcagttagtgtctgcaaaaatagataaaaatgaacagcaaagcgttttagacgagttgcaaaacggccttaatggctacacttatttagaagagttataa

SEQ ID NO: 275637 - DNA, 890 bp, Unknown
  Bacterial polypeptide expressing nucleotide sequence isolated from the Sargasso Sea
catggggcacagcgtaaaaatagtggtcgaaaagctatcagagctaaccaccttacttgaagaaatagataacttaggcatagagcctgcaattggcattcgtatacgcttaaattcggtgggtaaaggtaagtggcaaaatacgggtggcgaaaaaggtaagtttggtttaactgcagggcaagtattaagcgcagtagaagtgcttaaaaaacacaataaattacacttaatgcaaatggtacattttcatattggctctcaaattgccaatattcgtgatatacaccgcgcacttcgtgagtgtgcgcgtcactttgcagagttaacgcaactaggcgtaccactgaatacggttgatgtaggtggcggtttaggcgttgattatgaaggctcgggctctcgcagtgcgtgctcaatgaactacacagtggaagaatacgcccgcaacgtagtcaatgcgtttgcggaagtgtgcgaccaacacgatttaacccatccagctattattaccgagtcaggccgcgctttaacagcccatcatgcggtactcattaccgacgtaattgacgttgaaaaagcacccaatcatttaaatcctgaaccaccgcttgaaaacagcgtgttagtgcttgatgaaatgtggcaatgtttacagcgtttgaatccgcgtatggcgctcgaaatttatcacgatgcgatgcacttatttagcgaagcacacgatcagtacgtacacggtttagtaagcatgctagagtgggcgaaaatagagcagctttactttactattttgcatcgcgtgcgtgcgtcgcttagcaataacgcgcgagctcaccgagaagtactcgacgatttaaatgaaaaattagccgataaactgttttgtt

SEQ ID NO: 275638 - DNA, 922 bp, Unknown
  Bacterial polypeptide expressing nucleotide sequence isolated from the Sargasso Sea
agcccttgatcaggcaggactgctcaacgacctacgcctgttgcactttcatatcggcagtcagatcaatgacattgccgtcctcaaggatgccctccaggaagctggccagatctacgtcgaactgacgcgacttggagcagcgatggggttcctcgatgtcggtggtggtcttgggattgactacgacggcagccgaacagcaacagcagcatccacgaattactccttgcagaactacgccaacgatgtcgtggccaccgtgcgtgagtgctgtctcccccatggcgttccagtccccactctggtgagtgaaagcggccgtgccatcgccagccacttctccgttttggtgttcaacgtgctcggatgtggacgcccaccggccaaagctccccccatcgagaaggacgaacctttaccggtggccaatctgcgcgagaccttggagcggatccgtcacatcaacggcggcgacagcagtggcgatagcagtggcgatagcaacgacatgatcctgctccaggaagcctggaacgatgcgatcaaattcagagatgacgctttagcggctttccggctgggttacatccgcctgcaacaacgggccatggccgagcaattgacctggatctgcgccaaagaaatcagccaacggctcccagattccgaacccatccatgacgatctgcgtgggttgcaacgggctctggcttgcacgtattacgccaatctttcagtctttcgctccgctcccgacacatgggccatcgaccagttgtttccattgatgccgattcaccgtttggacgaacggccaacagagttggggcattttgctgatctcacctgcgactctgatggcaaattggctcggttcattcatttccgggcaaacaaaatcactgctttgactgcatcc

SEQ ID NO: 275639 - DNA, 908 bp, Unknown
  Bacterial polypeptide expressing nucleotide sequence isolated from the Sargasso Sea
aactacacgctgcagaactacgccaatgacgtggtggccacagttcgggaatgctgtgaaccccacaacgttcctgtacccgtcctagtgagcgaaagcggccgggccattgccagccacttctccgttctggtgtttgacgtgctgggttgtggtcgaacccccgacgacgaaccgcccagccaagacaacgaacccttgcccgtgcgcaatctgcgcgacacgctgacccacatccgcagcgtggagaaggaaacagaccccgagttgcggctgctccaggaagcgtggaacgatgccatcaaattcagggatgacgcgctggctgccttccggctcgggtacatccgcctggaggaacgggccatggctgaacagctcacctggagttgcgcccgcgccatcaacgaacgtctgccaaccaacacccccatccatgacgacctgaagggactacggcgtgccctggcctgcacgtattacgtgaatctctccgtgttccgctcagcacccgacacctgggccattgaccagctgttcccactgatgccgattcatcgcctggatcaacaaccgaccgaactgggcgactttgcagatctcacctgtgactccgatggaaagcttgcacgattcatccactcaggacagagcaaatccctgctggagctccacccgctccttgacggtgagccgtattggatcggcatgttcctcgggggtgcctatcaggaagtgatgggcaacctgcacaacctgttcggcagcaccagcgccgtgcacgtgaggcttaaccccaaaggcagtggctacctgctggatcacgtggtgaagggagacaccaacgctgacgttctcgaggaaatgcaacacaacccagacctgatgctggagcggctgcgccaggc

SEQ ID NO: 275640 - DNA, 907 bp, Unknown
  Bacterial polypeptide expressing nucleotide sequence isolated from the Sargasso Sea
gcccgcgggccacgtgctggtgcagccccgcggagaccgcgggggatcgctggatctggtggagctggtggagggattgcagaaccgcgatctgcaactgccgctgctgatccgctttgacgacatcctcgaagaccgtcttgagcggctgcatggggcctttgagcgggccatcgcccaatacggctacggcggccactaccaaggcgtgtttccggtcaagtgcaatcagcagcggcacgtggtggagcagctggtcgagagcggccgccgctggcactttggcctcgaggcgggcagcaaagccgaactactgattgccctgtcgctgctagaggaccccaaagcgctgctgatctgcaacggctacaaagaccagcgctacatcgaaaccgcgatcctggctcgccaactcgggcgccagcccgtggtggtgatcgagcaagccgatgaggtgccgcgcatcatcgaggccagccgcaaccttggggcagcccccttgatcggcgtgcgggcgaaattgtcgacccgcagcaccggccgctggggcagttcggtgggcgagaaggccaaatttggcctctcaattcctgatcttttggccacggtggaggccctgcgggaagccgatctactcactgatctgcgcctgctgcactttcacatcggcagccagatctgcgacatcgccgtgctgaaagacgccttgcaagaggccggtcagctgtatgtgcaactggcttccctcggcgcaccgatgggctttctggatgtgggcggcggcttgggtgtcgactacgacggcagccgcagcgccacagcggcatcaacgaactattcgctgcagaactacgccaacgacgtggtcgccaccatccgcgagtgctgcgaaccccagggaatcgcc

SEQ ID NO: 275641 - DNA, 786 bp, Unknown
  Bacterial polypeptide expressing nucleotide sequence isolated from the Sargasso Sea
gctccacgccgcctttgaacgcgccattgcgcagtacagctaccccggccgataccagggcgtcttcccggtgaaatgcaaccagcaacgccacgtggtggaagagttggtgagctgtggcaaacgctggaacttcgggctcgaagcaggcagcaaagcggaactgctgatcgccctctcgctgctggacgaccccgaggcgttgttgatctgcaacggctacaaggatcggctctacatcgagaccgccatcctggcgcgacgcctgggacgccagccggtggtggtgatcgaacagccggacgaagttgaccggatcattgaagccagcaagagcctgggagcggcgccctacatcggtgtgcgggccaagctctccagccgcagcacggggcgctggagcacttccgttggcgacaaggccaaattcggcctctcgattcccgagttgctggcaacggtggaacggctacgggagaacaacctgctccccgatctgcgcctgctgcacttccacatcggcagccagatcaatgacattgctgtgctcaaggacgctctccaggaggcggggcagatctatgtggagctcaaccgactaggggctccgatgggattcctcgatgtgggcggtggactcggcatcgactacgacggcagccgcactgcgtcagcagcatccacgaactactcgctgcagaactacgccaacgacgttgtggcaacggtgcgggaatgctgcgaacccaatggtgttgtggtgccgacgctggtgagcgaaagcgg

SEQ ID NO: 275642 - DNA, 748 bp, Unknown
  Bacterial polypeptide expressing nucleotide sequence isolated from the Sargasso Sea
gaaggctcgccccgctcactgggcggaaatctatcacgacatcctgcacgccatggccgatgtccacgcccagtttgcccacggtttgctgtccctgcaggagcgggcccaggccgaaaccctgtacgtgcgctgctgccggatgctccgggccgagctggacagcgccaaccgggcgcaccgggaaatcatcgacgagctgaacgagaagcttgcggagaaactgttcgtgaacttttccctgttccagtccctgcccgatgtctggggcatcgatcagattttcccggtgatgccgatcaacgggcttaaccggtcactgaaccggcgggccgtgatccaggatatcacctgtgactcggacggccggattgatcagtacgtggacggccagggcatcgaaaccaccttgccactgcccgaacacgacccggagtcccctttgctgatgggcttcttcatgaccggcgcctatcaggaaatccttggcgatatgcacaacctgttcggggatacccactcggtggacgtgaagctggaccaacaggggcaatatcaggtgggggaacccattaccggggacaccgtggcgaaagtactgcgttatgtgaatttcgagcccgccaacctgcttgaggcctaccggcagaagttccggcacagcggcctggctgcagagctgcagcaaacgctgctggccgagctgtcctccgggcttgagggctatacctacctggaggaaggataa

SEQ ID NO: 275643 - DNA, 775 bp, Unknown
  Bacterial polypeptide expressing nucleotide sequence isolated from the Sargasso Sea
cttcgacgttggcggtggtttagcggtggattacgacggcacccgtagccaaagtaacaactcaatgaactatggcttaagtgaatacgcgaacaacatcgtgaacgtgcttaccgatatctgtaatgaatacgagcaaccaatgccacgtattatttcagaatctggccgccacttaacggcgcaccacgctgtgttgatcaccgatgtgattggtactgaagcttatcaggtagaagaaatccagccgccagcggaagagtcgccacaactgctgcacaacatgtggcaatcttggaccgagatcagcggccgcgccgatcaacgtgctttgattgagatttaccacgatagccaaagtgacctgcaagaagcgcaatcgctgtttgctttaggtcaattaagcttggcggaacgtgcgtgggctgagcaggctaacctgcgtgtatgtcacgaagttcaaggtttgttaagcactaaaaaccgttaccacagaccgattatcgatgagttaaacgaaaagttagccgataagttcttcgttaacttctctttattccaatcgttaccggatgcttggggtatcgatcaggtgttccctgtgctgccattgtctggtttagacaaagcgccagagcgccgcgcagtgatgctggacatcacctgtgactctgacggtattgttgaccaatacgtagatggccaagggattgaaaccacgctgcccgttccggcttggagcgctgaaagcccttatctgatgggcttctttatg

SEQ ID NO: 275644 - DNA, 864 bp, Unknown
  Bacterial polypeptide expressing nucleotide sequence isolated from the Sargasso Sea
gctcggagcccccatgggcttcctggacgtcggcggtggattgggcatcgactacgacggcagccgaaccgccacggcggcttcgacgaactactccctgcagaactacgccaacgacgtggtggccacggtgcgggaatgctgcgaacccaacggcgttgaggtgcccacgttggtgagtgaaagcgggcgcgccatcgccagtcacttctcgctgctggtgttcgacgtgctgggtagcaacgccctgccggcctccattcccgatcctgctgctgaagaaccgctcaccgtccgcaacctgagggaaaccctggccacgattcaggggctgccggacaccacggatgcacggctcgtccctctgcaggaagcctggaatgacgccctgaagttcaagcaggacgccctcgcggccttccggctcggttatatgggtctccccgaccgtgccacagccgaacaactcacctgggcctgcgccgatgccatcgccaggcagttaccggagcagggagccatacccgaggaactctcagccctccacagtgctctcgctggcacgtactacgccaacctctccatcttccgttccgcgccggacacctgggccatcgatcagatcttcccggtcttgccgattcagaggctcgaccagcgtccgacccggctagccaatctggctgatctgacctgtgattccgatgggcgcctggatcggttcatcggtgacggccaacccaagccgctgctggaactccacgatctgacgcctggtgagccttatctgatcgcgctcttcctcagcggcgcctaccaggaggtgatgggcaatctgcacaacctgttcgggaccacgaacgc

SEQ ID NO: 275645 - DNA, 526 bp, Unknown
  Bacterial polypeptide expressing nucleotide sequence isolated from the Sargasso Sea
atgggatctgttcgacgttcgcgcaaagaagacgcatcggcctggaccgtggcagacagccgcagtgtctatggcattcgccattggggcgcggggtatttcaacgtcaatgaacagggccatgtcgaggtcatgccgcgcggcccggaggcaggcagtatcgacctgcacgagctggtagggcagctgcgcgagagcgggctggatctgcctttgctggtgcgttttccggacattctgcaggcgcgggtacgccagttgaccggcgcctttgatcgcaatatcgaggcactggagtacggcgccggctataccgcgctttatccgatcaaggtcaaccagcaggaagcggtggtggagaacgtcatcgccaccgagaacgtctccatcggcctagaggccggctccaagcccgaactcatggcggtgctggcgctggcgcccaagggcggcaccattgtctgcaatggctacaaggatcgcgagttcatccacctggcactgatcggccagaagctcggccaca

SEQ ID NO: 275646 - DNA, 692 bp, Unknown
  Bacterial polypeptide expressing nucleotide sequence isolated from the Sargasso Sea
gttgactgcggccgaacggccctggtccgctgcccagagcgcggcgatctatggcttagagcgctggggagacccctatttctccatcaacgccaaaggacatgtcgtggtgcaaccacggggtgatcgaggtggcaccctcgatctggtggagttactgcaaggactcgcagcacgggatctgcaaacaccactcctgatccgtttcgacgacatccttgaagatcgtctggaacggctgcatgcggcgttcgagcgagccattgcccactacgcctacgacggtgtttatcagggggtgttccccatcaaatgcaaccagcagcgccatgtggtggaacatctggtggatcggggcagccgctggaatttcggacttgaggcaggaagcaaagcggaacttctgatcgcgctctcgctcacctccaatcctgaagctctgctgatctgcaacggctacaaagacagtcgctatatcgaaaccgccatcctggcccgacaacttggccatcagccaatggtggtgatcgagcaggccgatgaggtgggacggatcatcgaggccagcaggaatcttggagcctccccctttcttggcattcgatccaagctgtccagccgcagcacaggacgctggggcagctctgttggggaacgagccaagtttggtcttgacctcacggaaatgctgc

SEQ ID NO: 275647 - DNA, 931 bp, Unknown
  Bacterial polypeptide expressing nucleotide sequence isolated from the Sargasso Sea
ggcagcctggatctggtggatctggtgtcggagctgaaaagccgcaacctggcgctgccgttgctgattcgcttcgacgacatcctcgaagaccgcttggagcggcttcatgccgcctttgaacgcgccatcgcgcaatacagctacccaggccggtaccagggcgtcttcccagtgaagtgcaaccagcaacgccacgtggtggaagagttggtgagctgcggaaagcgctggaacttcgggctggaagcgggcagcaaggcggagttgctgatcgctctctcgctgctggacgaccccgaagccctgctgatctgcaacggctacaaggatcggctctacatcgagaccgcgatcctggcgcgacggctgggacggcagccggtggtggtgatcgaacagccggacgaagttgaccggatcattgaagccagcaagagcctgggggcagcgccctacatcggtgtaagggccaagctctccagccgcagcacagggcgctggggcagctccgtcggcgacaaggccaaattcggcctttcgattcccgagttgctggccacagtggagcggctgcgggagaacaacctgctccccgatctgcgcctgctgcacttccacatcggcagccagatcaacgacatcgccgtgctcaaagacgccctccaggaggcggggcagatctatgtggagctcacccgactgggggctccgatggggttcctggatgtgggtggtggactcggcatcgactacgacggcagccgcaccgcatcagccgcctccacgaactactcgctgcagaactacgccaacgacgttgtggccacggtgcgggaatgctgcgaacccaatggtgtggccgtacccacgctggtaagcgaaagcggccgcgccattgccagtcatttctccctgctggtgttcgacg

SEQ ID NO: 275648 - DNA, 858 bp, Unknown
  Bacterial polypeptide expressing nucleotide sequence isolated from the Sargasso Sea
ttacgacggcagccacacggcaacggcagcctcgaccaactacacgctgcagaactacgccaatgacgtggtggccacagttcgggaatgctgtgaaccccacaacgttcctgttccgatcctggtgagcgaaagcggccgggccatcgccagccacttctccgttctcgtgtttgacgtgctgggttgtggtcgaacccccgacgacgaaccgcccagccaagacaacgaacccttgcccgtgcgcaatctgcgcgacacgctgacccacatccgcagcgtggagaaggaaacagaccccgagttgcggctgctccaggaagcgtggaacgatgcgatcaaattcagggatgacgcgctggctgccttccggctcgggtacatccgcctggaggaacgggccatggctgagcagctcacctggagctgctcccgcgccatcaacgaacgtttgccaaccaacacccccatccatgacgacctgaagggtctgcaaagggccctggcctgcacgtactacgtgaacctctccgtgttccgctcagcacctgacacctgggccatcgaccagctgttcccactgatgccgattcatcgcctggatcaacaaccaaccgaactgggcgactttgcagatctcacctgtgactccgatggaaagcttgcacgattcatccactcaggacaaagcaaatccctgctggaactccacccgcttgtagacggtgagccctattggatcggcatgttcctcggcggtgcctatcaggaagtgatgggcaacctgcacaacctgttcggcagcaccagcgccgtgcatgtgaggctcaaccccaaaggcagtggctacctgctgga

SEQ ID NO: 275649 - DNA, 735 bp, Unknown
  Bacterial polypeptide expressing nucleotide sequence isolated from the Sargasso Sea
aacgtgccattattgagatttatcacgatactcaaagtgatatcgctgaagcacattcgttatttgccgttggccaatttagcctagcgcaccgtgcatgggctgaacaaacacacttgcgtgtctgtcatgaagtgaaaggtttgctgagcaataataaccgttaccatcgtcctattattgatgaattaaacgaaaagttagcggataagttttttgttaacttctctttgttccagtcattaccagatgcatggggtattgatcaggtgttccctgttttaccattgtctggcctagataaagcgcctgagcgccgtgccgtaatgctagacattacctgtgactcagacggtattgttgaccaatacgttgacggacagggtattgaaacaacattacctgtgccagcgtggagcgaagaaagcccttacttaatcggcttctttatggtgggtgcataccaggaaatcttgggtgatatgcataacctatttggtgacactaactcggctgttgtgcgtcttgatgccgatggtgctgccaatattgagtcggtattgcaaggtgacactgttgctgatgtattacgttatgttaacttagatgctcaagagtttatgcgcacctttgaagagctagtgacgcaacatattgttgaagacgaaagagcgagcattttagaagagctacaagtgggtcttgatggctacacttacctagaagatttttaat

SEQ ID NO: 275650 - DNA, 847 bp, Unknown
  Bacterial polypeptide expressing nucleotide sequence isolated from the Sargasso Sea
tcaaggtgtgagcgaagcggcgcgtttttactgtgaattacgtgagttaggcgccagcattaactgcttcgacgttggcggtggtttagcggtggattacgacggcacccgtagccaaagtaacaactcaatgaactatggcttaagtgaatacgcgaacaacatcgtgaacgtgcttaccgatatctgtaatgaatacgagcaaccaatgccacgtattatttcagaatctggccgccacttaacggcgcaccacgctgtgttgatcaccgatgtgattggtactgaagcttatcaggtagaagaaatccagccgccagcggaagagtcgccacaactgctgcacaacatgtggcaatcttggaccgagatcagcggccgcgccgatcaacgtgctttgattgagatttaccacgatagccaaagtgacctgcaagaagcgcaatcgctgtttgctttaggtcaattaagcttggcggaacgtgcgtgggctgagcaggctaacctgcgtgtatgtcacgaagttcaaggtttgttaagcactaaaaaccgttaccacagaccgattatcgatgagttaaacgaaaagttagccgataagttcttcgttaacttctctttattccaatcgttaccggatgcttggggtatcgatcaggtgttccctgtgctgccattgtctggtttagacaaagcgccagagcgccgcgcagtgatgctggacatcacctgtgactctgacggtattgttgaccaatacgtagatggccaagggattgaaaccacgctgcccgttccggcttggagcgctgaaagcccttatctgatgggcttctttatggttggt

SEQ ID NO: 275651 - DNA, 869 bp, Unknown
  Bacterial polypeptide expressing nucleotide sequence isolated from the Sargasso Sea
cagccttggagctgcaccactaatcggtatccgagccaagttgtcgacccgcagcaccggccgctggggcagctcggtaggagagaaggccaagttcggcctctccatccctgatctgttggcgacggtggaagccctccgtgaagctgacctactgggtgatctgcgcctcctgcacttccatatcggcagccagatctgcgacatcgccgtcttgaaagacgccctacaggaggctggtcagctgtatgtgcaactggcctccctgggcgccccgatgggtttccttgatgtgggcggcggcctgggcgtcgattacgacggcagccgcagtgctacctcagcctccaccaattactcgctgcagaactacgccaatgatgtggtagccaccatccgggagtgctgtgaaccgcaaggtgtaacggtaccgaccctggtcagcgagagcggcagggccatcgccagccacttctcagtcctcgttttcaacgtgctgggccaaagcggcgtcagccaacccacgatccctgaaccgattgatggtgaagcgttgatcgtgcgcaacctgcgcgaaaccctcgctggtatcagcccggaaaacctacaagaagcctggaacgacgcgctcaaattcaaagacgatgcccttgctgccttccgcctggggtacctgagcctgcctgaacgcggcaaggctgagcagctctactgggcctgttgcagcgccattgccgagctgcttcctggcgaagaagagctccctgatgagctcaaaggcctcaaagccgcctttgccagtacctattacgccaatctctcggtgttccgatcggcccccgacacctgggccattgaccaactcttcc

SEQ ID NO: 275652 - DNA, 974 bp, Unknown
  Bacterial polypeptide expressing nucleotide sequence isolated from the Sargasso Sea
cccgcaaattctgcaccacagagtgaacagtttgtgccaagcattcgaccaagcgatacaaaaatatgagtatcaggcggactatttgctggtttaccccattaaagtaaaccaacaaaaaactgtggtagaagagatccttgcgagccaagcatcaaaagaagttccacaattaggcctagaagccggcagtaagccagaattaatggccgtgttggccatggcgcaaaaagccagttcagtgatcgtatgtaacggttacaaagataacgaatacattcgtttagccttaattggtgaaaagttaggccataaggtctacatcgttttagaaaaactgtctgagttgaagatggtgttggccgagtctaagcgtctaggggtgaaacctcgcttaggtctacgtgctcgccttgctttccaaggtaaaggcaagtggcaagccagcggcggtgaaaagtctaagtttggtttatcagcagcgcaaattctgaccgtggttgatcagttaaaacaagaggatatgttagattctctgcagttactgcacttccacttaggttcacaaatcgccaacatccgtgatattcgtcaaggtgtgagcgaagcggcgcgtttctactgtgaattacgtgagttaggcgccagcattaactgcttcgacgtcggcggtggtttagcggtggattacgatggtacccgtagccaaagtaacaactcgatgaactatggcttaagcgaatacgcgaacaacatcgtcaacgtgcttaccgatatctgtaatgaatacgagcaaccaatgccacgtattatttcagaatctggccgtcacttaacggcgcaccacgctgtgttgatcaccgatgtgattggtactgaagcttatcaggtagaagaaatccagccgcctgcggaagagtcgccacagctgctgcacaacatgtggcaatcttggactgagatcagcggccgcg

SEQ ID NO: 275653 - DNA, 569 bp, Unknown
  Bacterial polypeptide expressing nucleotide sequence isolated from the Sargasso Sea
cgcgatctgcagttgccgctgctgtatccgctttgaagacatcctcgaagaccgcctagagcggctgcatggcgcctttgagcgggccattgcccagtacggctacggcggccactaccaaggcgttttcccggtgaaatgcaaccagcagcgccacgtggtggagcagctggttgaaagcggccgccgctggcacttcggcctggaggccggcagcaaagcagaactactgattgcgctctcgctgctggatgaccccaaggcgctactgatctgcaatggctacaaagaccagcgctacatcgaaacggcgatcctggcgcgtcaactcgggcgtcagcccgtggtcgtcatcgagcaagccgatgaggtgccgcgcatcatcgaagccagccgcaaccttggggcagcgcctttgatcggcgtaagggccaagttgtcgacccgcagcaccggtcgctggggcagttcggtgggcgagaaagccaaatttggcctttcgattcccgatctattggcgacggtggaagcactgcgtgacgccgatctactcggtgacctgcgtctgc

SEQ ID NO: 275654 - DNA, 568 bp, Unknown
  Bacterial polypeptide expressing nucleotide sequence isolated from the Sargasso Sea
cttgcccgccagcgacatctataacgtggatcgctggggcgacagttacttccgtatcgacgaccagggccagctgtgtgtgcgtcccaatggcgagcagggcggccaggccacgctggaagcggtgctggaaagttgccgggcggccgggttgcgggcgccggtgctggcgcgcttttccggaattttgcgccagcgggtgaaactgcttgccggggcgttccgggaggccatcgagggcaatgattaccagggcggctatacgccggtgtacccgatcaaggtgaaccagcagcgccgggtggtgcacgagattctgcgcgcccgtgaagatggcgagcgtatcggcctggaggcgggctccaagccggagctgctggctgtgctggccctgtccaatcccggcgataccatcgtctgcaacggctacaaggacgcggaatacctgcgtctggcgctgatgggcgagaagctgggcttccgcgtgcatatcgtggtggagaagatgtccgagttgccggcgctgctggcgctggcggatgagttgggtgtgtcgccgcgtatcggc

SEQ ID NO: 275655 - DNA, 1545 bp, Unknown
  Bacterial polypeptide expressing nucleotide sequence isolated from the Sargasso Sea
attgaccaattttgagccgaaaaaattaaagaatatttggactattgaagatagtatttcgacttataacatagacaaatggggagataaatatttttctataaattccaaaggaaatatatcagtaactaaagatataaaatctgaaaataagattgatctttttaagcttgtcaaagaacttaagagtagagaaataaatcctccattaatcataagatttaatgatatcttgaaagatcgaataaatgcattacatgactcttttttaaaagcaataaaaacctataaatataagaacatttatcaaggcgtttttcctgtcaaatgtaatcaacagaaaaatgtcctagaaaagataatagagtttggtagccaatggaattttggtttagaagtaggaagtaaatcagaactattaattggccttgcacttcttgaaaaccaaaattcattattaatatgcaacggatataaagataaaaaatatattgagattgctactttggccagaaaactcggcaaaaatccaataatagttattgaacaacgagatgaggtaaaaagaattattcaagcagttcaagaacttaacgcgactccattgataggaattagagcaaagttatcaagtaaaagtagtggtaggtggggtaaatctattggagataattccaaatttggattatcaatcccagaaattatgttgacaataaaagaactaaaagaagcaaatcttatcaacgaaatgaaattgctccattttcatataggcagtcaaataagtgatattgctgtgatcaaagacgcattacaagaagcgagtcaaatatatgttgaactatgcaaactaggagccccaatgcaatatatcgacgttgggggaggattaggaatagattttgatggaactaaaacctcctccaacacctctactaattattctcttcaaaattatgctaacgatgtaattgcaactattaaggattcatgtgaattaaataatatcaagcatccaaccataatctcagaaagtggaagagcaataattagtcattgttcagttttaatttttaatgtcttaggaacaagccatgtcagttccaaactacaaatttttgataaaaaaaatcaacaattaataatttcaaatttacttgaaactttctatgaattaaaaaaacttaaaaataaaaaaataaatttatctcaaataattgaactatggaatgatgcaaaaaagtttaaagaagattgcttagtcgcttttagattaggatttttaagtttggcagaaagagcttatgccgaagaacttacttgggcttgcgcaaaagaaatttctaataacctgaataatgatgaaatcaatcaccctgatttatctgaaattacagaaactcttgcatcaacttattatgcaaatttatctatctttaaatctattcccgatagctgggcaataaatcagatttttccaatagtaccaatacataggcacttagaggagcccttctgcaaaggcaactttgcagatttaacttg

SEQ ID NO: 275656 - DNA, 1222 bp, Unknown
  Bacterial polypeptide expressing nucleotide sequence isolated from the Sargasso Sea
tttaacgacatcttgaaagatcggataaatgcattacatgatgcttttttaaaagcaataaaaacatacaaatatgaaaatatttatcaaggagtttttcctgtcaaatgtaatcaacaaaaaaatgtattggaaaagataatagattttggtgatcaatggaattttggtttagaagtaggaagtaaatcagaactattaattggccttgcacttcttgaaaatcaaaaatcattattgatatgcaacggatataaagataaaaaatatattgagattgctactttggccagaaaattaggcaaaaatccaataatcgttattgagcaaagagatgaggtaaaaagaattattcatgcagttaaagaacttaacgcaacgccattgataggaattagagcaaagttatccagtaaaagtagtggtaggtggggtaaatctattggagataaatccaaatttggattatcaatcccagaaattatgtcgacaataaaagaacttaaagaagcaaatcttataaacgaaatgaaattgctccattttcatataggaagtcaaataagtgatatttctgtgatcaaagatgcattacaagaagccagtcaaatatatgttgaactatgcaagctgggggccccaatgcaatatatcgatgttgggggaggattggggatagattttgatggaactaaaacctcctccagtacctctactaattattctcttcaaaattatgctaatgatgtaattgcaaccattaaagattcctgtgaattaaataatatcaagcatccaacaataatctcagaaagtggaagagcaataattagtcattgttcagttttaatttttaatgtcttaggaacaagccatgtcagttcaaaactacaaatttttgataaaaaagatcaacaattaatcatttcaaatttacttgaaactttctatgaactaaaaaaacttaacaataaaaaaataaatttatctcaaataattgagctatggaatgatgcaaaaaaatttaaagaagattgcttagttgcctttagattgggatttttaagcctagcagaacgagcttatgccgaagaactgacctgggcttgcgcaaaagaaatatctaataacctgaataatgatgaaatcaatcaccctgatttatctgaaattacagaaactcttgcatcaacttattatgcaaatttatctatctttaaat

SEQ ID NO: 275657 - DNA, 1183 bp, Unknown
  Bacterial polypeptide expressing nucleotide sequence isolated from the Sargasso Sea
tttcatctagggagtcaaattaacgatataggtgttttaaaagatgccttacaagaggcaggacaaatttatgccgaattaattaatcttggggcacctatgggatacttagatgttggaggtggcttaggaattgattacgatggaagtcaaaccgcctcaatagcatctactaactattcacttcaaaattatgcaaatgatgtagtagcaacaattaaagaatgttgtgaatcaaaaaagataccactacccactttaattacagagagtggaagagctattgctagtcacttttcgattttaatcttcaatattctaggtaaaaattccttgccttctgacattcctaaagaagacgaaaaagaatgtctctctgtcagaaatttacgtgaaacattagtccatataaattctctagaacttaagcaagaagaagacttagccaaactacaagaagcatggaatgattctcttaaatttaaagcagatgcactggcggcttttcgacttggttatatagatttagttgaacgtgcaaaagctgaacagttgacatgggcctgtgcaaaaacaatagttaatcagttaccaaaaaacattcttctacctaaagaactaaagaaattaagtgaaagcttagccgtaacgtattacgcaaatctttccgtatttagatcagctccagacacttgggccattgatcaagtctttccaattatgccaatccatcggcttaacaaagaaccgaaaaaacttggtcactttgcagatttaacatgtgattcagatggaaagcttgatcaatttattgataatggaaaaattaaaaatttgctacctcttcatgaatttaatcaagacgaaaaatatctaattggacttttcttgggtggcgcctatcaagaagtaatgggaaatctacataatttatttgggagtactaatgcagtccatataagatttacagaaaaagggaactataaagttgagcatgtcattcgtgggaatacaaaatcaaatgttcttgaatatttggaacatgatccagaaatattattagaacgattacgaaaatcaagcgaattagctatttcagacgggcatctaaaaatccatgatgcacaaaaactaatagagcacgtagaagcaagcctccgtcaaagtacttatctacagagct

SEQ ID NO: 275658 - DNA, 1266 bp, Unknown
  Bacterial polypeptide expressing nucleotide sequence isolated from the Sargasso Sea
ttggattaactgtctccgaactcatgaaaggagtcgacctcttagccagtcaagatatgggtgactgttttcagttgttgcattttcatcagggtagtcagataacaaatattcgacatatcaaggcagcgctgaatgaggcagctcgtgtgtatgttgaacttgtgaagcaaggtgcaggactgaagtttcttgatgttggtggtgggttaggcgttgattatgatggttcgcagactaactttgaatcgagtgtgaactatagtcttcaagagtatgcgaacgatgttgtctatcatgttcaaagtgtttgtgatgacgcgggtgttgaccatccaaccataatgtcagagagtggtcgggctgtggttgcgtaccacagcatgctggtattcagtgttctgggtgtctcagagcaagccagtcatgaacccatcaaccagccgtcgcatgatgtccagcagcctgttcaggatttatttgagacgcttgaaggtctcaacgtcaggaatttactcgagtcgtaccatgatgcccagcaatcacttgatactgcaatgaatctgtttgcgagcggctatttgccacttgatcagcgagcaattatagagcaggtgtattggtcaatatgtcagaggattagcaaactagcgaaacaactcgaatacgttccagaagaaatcgaagcgatctcaccgggcctttgtgatacgtatttttgcaatttctcgttattccagtcgattcctgattcgtgggcaataaagcaactttttccactgatgccgattcatcgattagatgaacgccccgactgttcggctgtacttggagatgtgacgtgtgattctgatggcaaaattgaacagtttattgatcgtcgtgatgtgaagaggtctcttcctttgcactcactcaaaaatgagccctattatcttggtgcatttcttgttggtgcgtaccaagagatcctcggtgaccttcacaacctcttcggagatacccatgctgttcatataagctcagatgaacatggcagagtcgttgtggatacagtagtgaagggagatactgtcagccaggtgctccagtacgttgaatttaatcctgatgaactggcaaaaaatcttcgatgttcaattgaagaggctattggtaacggattaataagtgatgggcaggcaggtcgttttattcgattttatgaagatggcctaggtggctatacctatctggaggagtcaactgtatcagagagcagttgag

SEQ ID NO: 275659 - DNA, 1327 bp, Unknown
  Bacterial polypeptide expressing nucleotide sequence isolated from the Sargasso Sea
aagctctccagccgcagcacggggcgttggggtagttccgttggcgacaaagccaaatttggcctttcgattcccgagttgctggcaacggtggaacggctgcgggagaacaacctgctccccgatctgcgcctgctgcacttccacatcggcagccagatcaatgacattgccgtgctcaaggacgctctccaggaggcggggcagatctatggggagctcacccgactgggggctccaatggggttcctcgatgtgggtggtggactcggcatcgactacgacggcagccgcaccgcatcagctgcatccaccaactactcgctgcagaactacgccaacgacgttgtggccacggtgcgggaatgctgcgaacccaatggtgttgcggtgccgacgctggttagcgaaagcggccgtgccattgccagtcatttctccctgctggtgttcgacgtgctgggatgtagcgcactgccggcatcggttcccaaggccagcggagatgaacctctgaccgttcgcaacctgcgggacaccctcgccaccattcaggagttatcggtgacagcggatgcgcaactggtgcgtctgcaggaagcctggaatgacgccttgaagttcaagcaggatgcgctcgccgcattccggctcgggtacatggggctgcccgaccgcgccagcgctgaacaactgacttgggcctgtgccgacgcgattgcgcagcgactgcccaaggatcaagccatcccggaagagctcgcagccctcaacaaagctttagcgggaacgtattacgccaacctgtcaatcttccgatcagcacccgacacctgggccatcgaccagctgtttccagtggtgcctatccagcagctggatcaacgaccgacccgactggccaacctcgccgatctcacctgtgattccgatggtcgtctggaacgcttcatcggagatggacaacccaaacagctgctggagctgcacgaactcgacggcaacaacccctatctgatcggcctgttcctgagcggtgcttatcaggaggtgatgggcaatctgcacaacctgttcggcaccaccaacgccgtgcacattcgcctcagccccggcggtagctatcgcattgaccatgtcgtgcgaggtgacaccaatgccgatgtgctggaggccatggagcacgacccccgtgccttgctggagcggctgcgggtggcagcggaagcggccatcaacaacggccagctgcgcatcgacgagtcacgcaggctgctggatcacctcgaaagcagcctgcgacagaccacctaccttcaggactaag

SEQ ID NO: 275660 - DNA, 1093 bp, Unknown
  Bacterial polypeptide expressing nucleotide sequence isolated from the Sargasso Sea
ctggggcagctctgtaggagagcgagccaagtttggtcttgatctcaccgaaatgctgcagaccgtccgtgccctggaggccgccgggttgctgcaggacctccgcctgctccacttccacatcggcagccagattaacgacatcgctgttttgaaagatgctttgcaagaagccggtcagatctatgtggagctgacccgtctcggtgccccgatggggtacctcgatgtaggaggaggcctgggcatcgactacgacggcagtcgcaccgcctcggcggcatccaccaattactcgctgcagaactacgccaacgacgtggtggccaccgtgcgggaatgctgcgaagcccatcaggtgcaggttccaaccctggtcagtgaaagcggtcgggccattgccagccacttttcagtgctggtgttcgacattcttggctgcagccaaaccccgaccgaagaaccttcagcggcggtcgatgaacccctcaccgttcgcaacctgagggagacccttcacaggattcgtgaggtcaagggggagtccgatcccgagatgcaactgctgcaggaaagctggaatgacgccgtgaaattccgcgatgacgccctgtcggcgttccgtctcggctacatccgcctggagcagcgcgccatggccgagcaactcacctggtgctgtgcccgagagatcaaccgcaggctgccaaccaaggccccgatccacgaggatcttcgcggcctgcaacgggcgctggcctgcacgtattacgcaaatttgtccgttttcaggtcagcaccggacacctgggccatcgatcagctcttccctctcatgccggttcatcgtctcgatgaacagccaacggagcttggtcacttcgccgatctcacctgcgattccgacggcaaactcgccaacttcatcgacgccggccagagcaaaagccttttggaactgcaccctctcaaagatggagagcagtactggatcggactcttcctcgggggtgcctaccaagaggtcatgggcaatctccacaatctgttcggcagcaccagtgccgttcatgttcgattaaaccctcggggc

SEQ ID NO: 275661 - DNA, 1915 bp, Unknown
  Bacterial polypeptide expressing nucleotide sequence isolated from the Sargasso Sea
aatgaatgattggtctattgatgctgctcgtgctgggtacaacgttacccactggagccaagggttttatgggatcagcgaccaaggtgaggtgactgtgtcgccggatcctaagaatcctgatcacaagattggcttaaatgagctagcaaaagacatggttaaagcaggggtcgctttacctgtattagttcgtttcccgcaaattctgcaccacagagtgaacagtttgtgccaagcattcgaccaagcgatacaaaaatatgagtatcaggcggactatttgctggtttaccccattaaagtaaaccaacaaaaaactgtggtagaagagatccttgcgagccaagcatcaaaagaagttccacaattaggcctagaagctggtagtaagccagaattaatggccgtattggccatggcgcaaaaagccagttcagtgatcgtttgtaatggttacaaagataacgaatacattcgtttagccttaattggtgaaaagttaggccataaggtctacatcgttttagaaaaactgtctgagctgaagatggtgttggccgagtctaagcgtttaggggtgaaacctcgcttaggtctgcgtgctcgccttgcattccaaggtaaaggcaagtggcaagccagcggcggtgaaaaatcgaaattcggtttatcagcagcgcaaattctgaccgtggttgatcagttaaagcaagaggatatgttagattcgctgcagttattgcacttccatttaggttcgcaaatcgccaacatccgcgatattcgtcaaggtgtgagcgaagcggcgcgtttttactgtgaattacgtgagttaggcgccagcattaactgcttcgacgttggcggtggtttagcggtggattacgacggcacccgtagccaaagtaacaactcaatgaactatggcttaagtgaatacgcgaacaacatcgtgaacgtgcttaccgatatctgtaatgaatacgagcaaccaatgccacgtattatttcagaatctggccgccacttaacggcgcaccacgctgtgttgatcaccgatgtgattggtactgaagcttatcaggtagaagaaatccagccgccagcggaagagtcgccacaactgctgcacaacatgtggcaatcttggaccgagatcagcggccgcgccgatcaacgtgctttgattgagatttaccacgatagccaaagtgacctgcaagaagcgcaatcgctgtttgctttaggtcaattaagcttggcggaacgtgcgtgggctgagcaggctaacctgcgtgtatgtcacgaagttcaaggtttgttaagcactaaaaaccgttaccacagaccgattatcgatgagttaaacgaaaagttagccgataagttcttcgttaacttctctttattccaatcgttaccggatgcttggggtatcgatcaggtgttccctgtgctgccattgtctggtttagacaaagcgccagagcgccgcgcagtgatgctggacatcacctgtgactctgacggtattgttgaccaatacgtagatggccaagggattgaaaccacgctgcccgttccggcttggagcgctgaaagcccttatctgatgggcttctttatggttggtgcctatcaagagattttaggtgatatgcacaacctgtttggtgataccaactctgcggtggtgagcatcgaagagaacggtatgaccaacattgagtcggtccttgccggtgatacggttgctgacgtactgcgctatgttaacttagatgccgttgactttatgcgtacttacgaagagttagtgaaccagcacattgccgaagacgaacgtgcccagattttagaagaactgcaagtgggcctaaaaggttacacttatttagaagatttttcttaa

SEQ ID NO: 275662 - DNA, 1087 bp, Unknown
  Bacterial polypeptide expressing nucleotide sequence isolated from the Sargasso Sea
gatggggttcctggatgtgggcggtggactcggcatcgattacgacggcagccgtaccgcatcggcggcctccacgaactattcgctgcagaactacgccaacgacgtggtggccacagtgcgggaatgctgtgagcccaatggtgttgccgtgcccacgctggtgagcgaaagcggccgcgccattgccagccatttctccttgctggtgttcgacgtcctaggcagcagcgcactcccagcatcaattcccaacgccagtgaagacgagccactcaccgttcgcaacctgcgggacaccctctccacaatccaagagctatcggggacggcagacgcacagttggtgcggctgcaggaagcctggaacgatgccttgaagttcaagcaggatgcgctcgccgcattccggctcgggtacatgggtctccccgaccgcgccacagcagaacaactgacgtgggcctgtgcagatgcgattgcacagcggctcccgaaggatcaagccatcccggaggagctggcagcgctgaacaaggcgttggctgggacctattacgccaacttgtcgatctttcgctcagcacccgacacctgggccatcgatcaggtgtttccggtggtgcccatccagcagctggatcaacgcccaacccgactggccaacctcgccgacctcacctgcgattccgatggacgcttggatcgcttcatcggggatggccagcccaaacagctgctggaactgcacgagctcgacgacgacaacccctatctgatcggtctgttcctcagcggggcgtatcaagaggtgatgggcaatctgcacaacctgttcggcaccaccaatgccgtgcacattcgcctcagcccgggcggtagctatcgcattgaccacgtcgtgcggggagacaccaatgccgatgtgctggaggccatggagcacgacccccgggctttgttggagcggttgcgggtggcggcggaggcggccatcaacaacggtcagctgcgcatcaacgaatcacgacggctgctggaccacctcgaaagcagcctacgccaaaccacttaccttcaagactga

SEQ ID NO: 275663 - DNA, 601 bp, Unknown
  Bacterial polypeptide expressing nucleotide sequence isolated from the Sargasso Sea
atggcagattggggtatcgaaaaagcacgatccatatataacgtagcagtctggagtgaaggctattttgatgttaacaataatggcgacctggtagcttatccggaccaggaccataaaaaacccggtattaatttcccggaactgactgcccgttttaaagaggaaggcttaaccctgcccgtattggtacgttttaccgatattctgcagcaccgtgttggcaccttaattaattcttttgctcaggcgaaacaagagcgtgagtaccaaggtgaatacactgccgtttaccctatcaaagtaaaccagcaattttctgtagtgaaaaagctggtgagccatgacagcggtaaagtaggtttagaagccggttccaaacctgagctgatggctattttaggtgtcaccgacaaacctttgcgtatcgtttgtaacggctataaagattctgagttcctgcgtttagccaccattggccagatgatgggccatcaggtttatgtcgtggttgagaaaatcacagaattaaaaaccttaatccgtgaaatcgacagcttaggtcaggcgcctatgattggtatccgtatcaagctgaact

SEQ ID NO: 275664 - DNA, 591 bp, Unknown
  Bacterial polypeptide expressing nucleotide sequence isolated from the Sargasso Sea
aactggatttatcttcgcgttcacaccgtgatattcacgatgagttaaacgagaaattagccgacaagctgtttgttaacttctctttgttccagtctatgccggatgcctggggtattgaccagttattccctgtgatgccactggaacggatgaatgagtcgctggaacaccgcgctattattcaggacattacctgtgactcagacggcgtactgaaaagttatgccgacggtaacggtattgaatccagcttgccattgccttcttacaaagaagactcacagttcctgctgggtatgtttatggtcggtgcttaccaggaaattctgggcgacttacacaacctgtttggcgacaccgactcagtgcacgttgaactggacgacgaaggcggttaccgtctgaccaatgcgattaaaggcgacacagtggctgacgtattacgttatgttcagtttgacgcgaagaagctgcttgcctcttaccagaagcaattagcacggatggactttacccctgaaatgcaggcgtcttatttagatgaacttaaatccggggtttatggttacacctacttcgaagattaag

SEQ ID NO: 275665 - DNA, 1948 bp, Unknown
  Bacterial polypeptide expressing nucleotide sequence isolated from the Sargasso Sea
attgaccgattttgatacagaaaaattaaataaaaattggactatagaagatagtatttctacatatggcattgataaatggggagaaaaatatttttcaattaattcagatggcaatatatcgataagcccaaatagaaaatccaaaaaaaaagtagatctttttaaacttgttaaagaatttaaaagtagagaaattaatactcctttaataataagattcaacgacattttaaaagaccgaattacggaattaaataatgccttctgccaagctatagaaaattataagtataaaaatatttatcaaggagtttttcctattaaatgtaatcagcaaaaaaatgtcttggaaaaaattattgaatatggggatccttggcattttggtttagaagtaggaagtaaatcagaattattaattggattatcaatcctagaaaatcaaaaatcacttttaatttgtaatggatataaagataaaaattatattgagagtgcaatattagccagaaaacttggtaaacagccaattatagttattgaacaaagagatgaagttaaaagaattatagaagctgtaaaaaatctcaaagcaaccccaatacttggaattagatcaaaattgtcaagtaaaagtagtgggaggtggggtaaatcagtgggagataattccaaatttggattatcaattccagaaataatgctaacaataaaagagctcaaagaagcgaatctaataaatgaaatgaagttgctgcatttccacgttggaagccaaatcagtgatatatcagtaataaaagatgcattacaagaagccagtcaaatatttgttgaattatctaagttaggcgcaccaatgaaatatatagatgttggaggaggcttaggaatagacttcgatggaactaaaacgtcttccaatacttcgacaaattattctcttcaaaactatgcaaatgatgttgttgcaacagtaaaagattcatgtgaagtaaataatattcaacatccaatcataatctcagaaagtggtagagcgataatcagtcattgttcagttttaatttttaatattttagggacaagtcatgtcagctctcaagtcaaagtgccctatcaaaaaaaacaatcattaattatcacaaatctgatagaaacccttaatcagctaaagaatcttagagataaaaaagaatatttatctgaaataatagaattatggaatgacgctaaaaaatttaaagatgattgcttagtcgcttttagattaggatttgtttgtttggaagaacgtgcgtatgccgaagaacttgcatgggcttgtgcaaaggagattgcaaatcaattggagagtgatgaaattaaccatccagatttatctgaaataacccacacgcttgcatcaacatattacgcaaatttatcagtttttaaatctattcctgatacctgggcaattaatcaagtttttccaattattccaattcatagacacttagaagagccctgttgtaagggaaactttgcggatttaacttgtgattctgatggcaagctgaatagtttcattgacaatggaaagattaaatcacttttaaatttacatcctccagaaaaaaataatgattatctaataggaatctttttggcaggagcatatcaagaagcattagggaatttccataatttatttggaaatacaaatgttattcatattgatataaatgaagataattcttataaaattaaaaacattattaaagaaaatagcaaatcagaaattttagagttattggattacagctcagataatttagttgaaacaataagagtcaatactgaatctgctatcaataataaaactttgactattaaagaagcacgaaagttaattgaacaaatagaaaccagtttaagaaaaagtagttacttgtcagaataa

SEQ ID NO: 275666 - DNA, 1903 bp, Unknown
  Bacterial polypeptide expressing nucleotide sequence isolated from the Sargasso Sea
atgactaactggtccagcaaggactccttgaaggtctacaacgttccctactggggtgcgggttttttcaacatcaatgacgccggtcacgtgaccgtcgctcccgacaaatcacgccctgatgcacagatcgtgctctccgacgccatcgaacagttgcgtcaatccgggctgaccactccggtactgctgcgtttccccgacatcctcaagagtcgggtcgatgcgctgttcaacgccttcggtcaggccatcgagaagtcaggctatgaaggggactacctgtgcgtttacccgatcaaggtaaaccagcagcgtcgcgtcatcgagaccatcagccagtcctacagcgacaagccccggcttggcctggaagctggttccaaaccggaactgctggccgtgctgtcccatcaccatgagcaaggctcggtgatcgtctgtaacggctacaaagaccgcgaatatatccgccacgccctcttgggcaacctgatgggccacaaggtctacatcgtggtggagaagccctccgagctggaaatggtgctggacgagtcagctcgtctcaacatcaagcccaacatcggggtgcgtgccaagctcgcttccaccggctccggcatgtgggaatcgagcggcggctccatgtccaaattcggtctgtccgcctcccagatcctggcgctgatcgagcgtctgcgcgggctgggcaaactggactgcctgcaactgctgcacttccacctgggttcccagatcgccaacatccgcgacatccagggcggcatccgcgagtgcggccgtttctacgccgaactgcgtcgcctcggtgccaacatcgaagtggttgacgtcggcggcggcctgggggtggactacgagggaacccgttcccagagccactgctccgccaactacagcctctccgagtacgccaacaacgtggtgtggggcatcggcgatgtctgccgcgagttcgacctgccgcacccgaccatcatcagcgagtccggccgtgccctgaccgctcaccacgccgtgctggttaccaacatcattggtgccgaaggggtggagatgaacgacatcagcgcaccggacgaggatgcgcccaccattctgcagaacatgtggaaaggctggctggacctgcgcagcgaagatccctctctgctggagatcttccacgactcggtggctgacctgggcgacgtcaacacccagtacaccatgggtctgctcaatcttgaacagcgcgcctgggccgagatgctgcaccagaacacctgtctggcgctcaaagagctgctcaacccggtcaaccgcaaccaccgtgcgctggctgacgagctctccgagaaactggctgacaagtgctttgccaacttctccctgttccagtccctgccggatgcctggggtatcggtcaggtgttcccggtgatgccgctggccggtctcgagcgtccgctcacccgccgcggcatcctgatggacatcacctgtgactccgacggtcaggtcgagcactacgttgacggtctgggggtcgagagcaccctgccgatgccggtgtatggcgagaacgaagagtgccacgtcggcttcttcctggtcggtgcctatcaggagatcctgggggatctgcacaacctgttcggtgacacccactgcgcggaagtgtggctcgatgacgaaggcaagatggacattcgcaacgtggtgcgcggcgacaccgtcgaccagctgctgcgttacgtcaacatcgacccgtccgtcatccgcgagaactaccagcgcatcgtctcccacccggcgctggacgacgcgacccgcaaggccctgctcgacgagctggagctgggtctgcaaggctacgcctacctggaagacgaataag

SEQ ID NO: 275667 - DNA, 1780 bp, Unknown
  Bacterial polypeptide expressing nucleotide sequence isolated from the Sargasso Sea
attgaccaattttgagccaaaaaaattaaaaaatatttggactattgaagatagtatttcgacttacaacatagacaaatgggggaataaatatttttctataaattccaaaggaaatatatcagtaactaaagatataaaatctgacaataagattgatcttttcaagcttgtcaaagaacttaaaagtagagaaatcaatcctccattaatcataagatttaacgatatcttaaaagatcgaataaatgcactacatgatgctttttcaaaagcaataaaaacctacaaatataaaaatatctatcaaggcgtttttcctgtcaaatgtaatcaacaaaaaaatgtattggaaaagataatagagtttggtagtcaatggaattttggtttagaagtaggaagtaaatcagaactattaattggccttgcacttcttgaaaaccaaaattcattattgatatgcaacggatataaagataaaaaatatattgagattgctactttggccagaaaactaggcaaaaatccaataatagttattgaacaacgagatgaggtaaaaagaattattcaagcagttcaagaacttaacgcgactccattgattggaattagagcaaagttatcaagtaaaagtagtggtaggtggggaaaatctattggagataattccaaatttggattatcaatcccagaaattatgttgacaataaaagaacttaaagaagcaaatcttataaacgaaatgaaattgctccattttcatataggaagtcaaataagtgacattgctgtgatcaaagacgcattacaagaagcgagtcaaatatatgttgaactatgtaaactaggtgccccaatgcaatatatcgacgtagggggaggattagggatagattttgatggaactaaaacctcctccaacacctctactaattattctcttcaaaattatgctaacgatgtaattgcaaccattaaagattcatgtgaattaaataatatcaagcatccaaccataatctcagaaagtggaagagcaataattagtcattgttcagttttaatttttaatgtcttaggaacaagccatgtcagttccaaactacaaattattgataaaaaagatcaacaattaatcatttcaaatttacttgaaactttctatgaattaaaaaaacttaaaaataaaaaaataaatttatctcaaataattgaactatggaatgatgcaaaaaagtttaaagaagattgcttagttgcctttagattaggatttttaagtttagcagaacgagcttatgccgaagaacttacctgggcttgcgcaaaagaaatttctaataacctgaataatgatgaaatcaatcaccctgatttatctgaaattacagaaactcttgcgtcaacttattatgcaaatatatcaatctttaaatctattcccgatagctgggcaatcaatcagatttttccaatagtaccaatacataggcacttagaagagcctttctgcaaaggcaactttgcagatttaacttgtgattcagatgggaaactaaataattttattgatgatggaaaaattaaatcattactaaatttacacaagccagagcaagataaagattatctaattggaatttttatgactggagcctatcaagaaacattaggaaacttgcacaatttatttggcagtacaaacgttgttcatatagatataaatgaagataattcatataaggtcaaaaatattattaaagaagaacagtaa

SEQ ID NO: 275668 - DNA, 1915 bp, Unknown
  Bacterial polypeptide expressing nucleotide sequence isolated from the Sargasso Sea
atgaatgattggtctattgatgctgctcgtgctgggtacaacgttacccactggagccaagggttttatgggatcagcgaccaaggtgaggtgacagtgtcgccggatcctaagaatcctgatcacaagattggcttaaatgagctagcaaaagacatggttaaagcaggggtcgctttacctgtattagttcgtttcccgcaaattctgcaccacagagtgaacagtttgtgccaagcattcgaccaagcgatacaaaaatatgagtatcaggcggactatttgctggtttaccccattaaagtaaaccaacaaaaaactgtggtagaagagatccttgcgagccaagcatcaaaagaagttccacaattaggcctagaagccggcagtaagcctgaattaatggccgtacttgccatggcgcaaaaagccagttcagtgatcgtatgtaacggttacaaagataacgaatacattcgtttagccttaattggtgaaaagttaggccataaggtctatatcgttttagaaaaactgtctgagcttaagatggtactagccgagtctgagcgtttaggggtgaaacctcgcttagggttacgtgctcgccttgcattccaaggaaaaggcaagtggcaagccagcggtggcgaaaagtctaagtttggtttatctgcggcgcagattttgactgtagttgaccagttaaaacaaagcgatatgttggattcgctgcaattattgcactttcacttaggttcgcaaattgccaacatccgcgatattcgtcaaggtgtgagcgaagcggcacgtttctactgtgaattacgtgagttaggtgccagcatcaattgcttcgacgtcggcggtggtttagcggtggattacgacggcacacgtagccaaagtaataactcaatgaactatggtttaagcgagtacgcgaacaacatcgttaatgtgcttaccgatatctgtaatgaatacgagcaacctatgccacgtattatttcagaatctggccgtcacttaacggcgcaccatgcggtactgatcaccgatgtgattggcacagaagcttatcaggttgaagatatccagccgccagcggaagaatcgccgcagctgctgcacaatatgtggcaatcttggactgagctgagtggccgtgccgatcaacgtgccttgattgagatttatcatgatagccaaagtgacctgcaagaagcgcaatcgctgtttgccttgggtcaattaagcttggcagaacgtgcgtgggctgagcaggctaacctacgtgtatgtcacgaagttcaaggtttgttaagtaccaaaaaccgttaccacagaccgattattgatgagttaaacgaaaagttagccgataagttcttcgttaacttctcattattccaatccttaccggatgcttggggtatcgatcaggtgttccctgtgctgccattgtctggtttagacaaagcgccagagcgtcgcgctgtgatgctggacattacctgtgactccgacggtattgtggatcaatatgtagatggccaagggattgaaactacgctaccagtaccagcgtggagtgctgaaagcccttatttgatcggcttctttatggtgggggcatatcaagagattttaggggatatgcacaacttgtttggcgacactaactcagccgttgtcagcattgaagaaaatggtatgaccaatattgaatcggtacttgccggtgacacagtcgctgacgtattacgctatgttaacttagatgccgttgactttatgcggacttacgaagagttagtcaaccagcatattgttgaggatgaacgcgcacaaattttagaagaattacaagtgggcctaaaaggttacacttatttagaagatttttcttaat

SEQ ID NO: 275669 - DNA, 1486 bp, Unknown
  Bacterial polypeptide expressing nucleotide sequence isolated from the Sargasso Sea
acccgtagcgtgatcgtgtgtaacggttataaagaccgcgaatatatccgtctggcactgattggcgagaagatgggccataaggtctatctggtcatcgaaaagatgtctgaaatcgctatcgtgctggatgaagctgaacgcctgaatgtcgttccgcgtctgggcgtgcgtgcgcgtctggcgtcgcagggctctggcaagtggcagtcctccggcggtgagaaatcaaaattcggcctggcggcaaaccaggtgctgcaactggtagaaattctgcgcgagcgtggtcgtctggacagcatccagttgctgcacttccatctcggctcccaaatggcgaacattcgtgatatcgccaccggcgtacgtgaatcggcgcgtttctacgttgagctgcacaagcttggcgtcaatatccagtgcttcgacgtgggcggtggtctgggcgtggattacgaaggtacccgttcgcagtctgactgttccgtaaactacggtttgaacgaatacgccaacaacatcatctgggctattggcgacgcctgtgaagaacacggtctgccgcatccgacggtaatcaccgagtctggccgtgcggttaccgcgcaccataccgtgctggtatctaacatcattggcgttgagcgtagcgaaatcaccgaagcgacgcctccggcagacaacgcgccacgttccctgcaaagcatgtgggaaacctggcaagagatgcatgaaccgggaacccgtcgttcgctgcgtgaatggctgcacgacagccagatggatctgcacgatattcacgttgggtactcttcaggcacctttagcctgcaggagcgtgcgtgggcagagcagctgtatctgaacatgtgccatgaagtgcagaaacaactcgacccgagcaaccgtgcgcaccgtccgattatcgacgagctgcaggaacgtatggcggataagatttacgtcaacttctcgctgttccagtcgatgccggatgcgtgggggatcgatcagctgttcccggtaatgccgctggaagggttgaatcaggtgcctgaacgccgcgcggtgctgttggatatcacctgtgactctgatggcgctatcgaccactacgttgacggtgatggcattgcgaccaccatgccgatgccggaatacgaccctgagaacccgccgatgctgggcttctttatggtgggtgcgtaccaggagatcctcggcaacatgcacaacttgtttggtgataccgaagcggttgacgtgttcgtcttccctgacggcagcgtagaagttgagctgtccgacgaaggggataccgtggcggatatgctgcaatacgtgcagctggatccgaacaccctgctgacgcagttccgtgaccaggtgaaaaacaccgatctggacgctgagctgcaacagcagttcctcgaagagtttgaagccggtctgtacggttatacttatctggaagatgagtaac

SEQ ID NO: 275670 - DNA, 923 bp, Unknown
  Bacterial polypeptide expressing nucleotide sequence isolated from the Sargasso Sea
ccccatatatgcttctaaggcaaatagttccattttcatgagtagtcttgtttcctcggaaggtttaggtcttgatgcggtttcagaaggagaactattaactgctattaaaggtggggttccaaatgaaaaaattgtttttcatggtaacaacaaatcagacaaagaattagaattcgcagttagaaataatattaaggttattgtagataatgattatgacttagaaagattagatgagatctcaaattcatttaatcatgatttagatataatgattcgctttactcctgggatagaatgccatacacatgaatacattagaactggatcatttgatagcaaatttggtttcggaatagaatatttaaatattctatttaaaaggatcagcgatacaaagcgcctaaaattaaaaggtttacatgctcatattggttcacagatttttgaactagaccctcataaggatctgggagaaataatggtaaaggttatcttagacgccaaaaagtttggtcataatattgaggaactaaatgttggcgggggtttaggtatcagttatacacaaagtgatgatcccccttcaattgatgaatgggtaaaaacaatttcttcttctgttgttgaagcttgtaaaaaaaacaacttagattttcctaccttaatgtgcgaacctggtagatctatcgtatctacagcaggtataactatttacaaaattggggcttttaaagaaattcccggtatcagaacatatttatctgttgatggtggtatgagtgataatccaagacctattacatatcaatcaaattattctgcatgtttagtaagtaatccatttaatattaattccacaaataaatatactattgcaggtaagcactgcgaatcgggagatgtattgttaaagaaat

SEQ ID NO: 275671 - DNA, 670 bp, Unknown
  Bacterial polypeptide expressing nucleotide sequence isolated from the Sargasso Sea
catgagtagttttatatacaaagataatattcttttttgtgaaaatgttgctgtgaccgacattgttaaagaggttggtactccggcatatgtatattcaaagaagactttattggataattttcattcctattctaatgccttcaaaaaaaatgatggattggtttgtttttctgttaagtctctaagtaatatttctgtgctcaaattattaaaagatgaaggaagtggttttgatatcgtctctggaggtgaattggagagagtcttggctgctggcgtagatccaaaaaaaataatatttacaggaattgcaaaatccaatgaagaaattatccaaggcataagaaaaaatattttgtcttttaacattgaatctgaggcagaaatgttaagaatagaaaaattagctactgatgaaaataaaattgttgatgttgcaataagattcaatcctgaaattgattcaggtggacacgaatatattaaaaccggaagaaaaaaagataaatttggtgttttgttagagggggttattaatttatctaaatatattttgaattctagttcactaaaccttattggcttgtcgtgccatattggctctcaaatatttgaattaaatgattttgaagaatctgcaaaatatataaaaaaacttgctaaggaa

SEQ ID NO: 275672 - DNA, 343 bp, Unknown
  Bacterial polypeptide expressing nucleotide sequence isolated from the Sargasso Sea
catgcgcccgtccatgtacggcagctaccacgccatgagcgtgctgcgccgcgatggctccacggccgccgagcagcccacggtggtggcaggcccgctgtgcgagtcgggcgacgtgttcacccagggcgacggcggcgtggtgctgccgcgcgacctgcccgcggcgcaggtgggcgacctgctggtgatccatgacacgggtgcgtacggcgccagcatgtcctccaactacaacacgcggcctttgattgccgaggtgctcgtggatggcggccaagcccgcctgatccgccgccgccagacggtggacgagctgctggcgctggaactggggctgtaa

SEQ ID NO: 275673 - DNA, 709 bp, Unknown
  Bacterial polypeptide expressing nucleotide sequence isolated from the Sargasso Sea
ggtaaatagcaaaactttttacgaacttgtaaactactgtaaaaactcaaaaaatatcaatctacagtgcttaagtgttcatataggtagtcaaatattagactacaagccatatgaaagaatgctcaaagctgtaagtaatataattattaaaacaaaacacaaatttaaatttgtcgatttaggtggaggaatgggaatttcttacagtgataaaattaaaaagcttaattataaaaagtacaacttagcaattaaaaattttttaaaaaagcatgatacaaaaattatttttgaaccgggtagatcaataattggtaatacaggaactttagtgtctaaaataatttatattaaagatggtggggttaaaaaatttattattttagatgctgcaatgaatgatcttatgagaccggctttatatggagcagttcataaaatcttacccgttaataaatctaacagtgtttcaacaaatgcttatgaatttgtaggtcctatttgtgagagcacagataaatttgtaactttaaaaaaatttcaaaaactaaaagaaaaagatttggtagctatatgtgatgttggtgcctacggtatgtctctaagctctaattataaccttaggccaaaagctgttgaattactgataaaaggaagaaaaattaaaattattaaaaataggcaaaagcatacagatttaatttag

SEQ ID NO: 275674 - DNA, 877 bp, Unknown
  Bacterial polypeptide expressing nucleotide sequence isolated from the Sargasso Sea
aaatattacccaggggaatcactccctatatatgcctccaaggcaaatagctcaatattcatgagtaatcttgtttcctctgagggtttaggacttgatgcagtttcagagggagaattattaactgctctaaagggtggggtgccaaatgaaaaaattgtttttcatgggaacaataaatctgacaaagaaatagatttcgcgattagaaataacataaaaataattgtagataatgactatgacttaaaaagattagaggtaatatcagattcattaaatcgtgacttagaaataatgattcgctttactcctggaatagaatgccatacacatgaatacataagaacaggttcatttgatagcaaatttggttttggaatcgaatatttgaataatttatttgcaagcataagcgacaccaaacaccttaagttaaatgggttacatgctcatattggttcccagatttttgaactagaccctcataaagatctcggcgaaataatggtaaaagtcattatggacgccaaaaaatttggccataatattcaggcactaaatgttggtggaggcttaggtattaaatatacacaaaatgacgacccaccttctattgaagaatgggtaaaaacgatttccaactctgttgttaaagcttgtaaaaaacagaatttagatttacctaaattgatgtgtgaacctggtagatccatagtatccacagcaggcataacaatttacaaaattggatcttttaaagaaattcctggaataagaacttatttgtctgttgatggcgggatgagtgataatccaagaccaataacatatcaatcaaattattctgcatgtttggtaaaaaacccctttaata

SEQ ID NO: 275675 - DNA, 888 bp, Unknown
  Bacterial polypeptide expressing nucleotide sequence isolated from the Sargasso Sea
ggaacacctttttattgttattcatattcaaaattaaaagaaaatataaataaatttaaaaaaaattttagatctttttcacctttaatttgttttgcagttaaatcgaatactaatgttaatttaattagagaaattaaaaaatttggtttaggggctgatgtagtttctttaggtgagctcatgatagccataaaagcaggaataaaaccaaataaaatagtattttctggagttggaaaaacttctagtgaattgaattttgcaataaataaaaaaatactactcattaatgctgagtcattaagtgaaataatagaaataaatagacttgcaaaattaagaaacaaaaaagtgagggttggagttagacttaatcctaatacagatgcaaaaacactaaatcaaatttctacaggaaaaaaagagaataaatttggagtaaataaagatacatttcataaaattgtggatttttgtaaaaattcaaaaaatatagacttaaaatgtttgagtgttcacataggtagtcaaattttagattataaaccctatagaaaaatgcttgaagctgttagccatatcttagataagactaatcatcaatttgaatttattgatttaggtggaggtatgggaattaattattctaataaagacaaaacacttaattataaaaagtataatactgcaataaataattttctcaaaaaacataacgtaaaaattatttttgaacctggaagatctataattggcaatactggtatgttaattagtagagttatttatattaaagacagtggcagaaaaaaatttataattttagatgctgctatgaatgatcttatgagacccgcattatatggggcatttcataggacattg

SEQ ID NO: 275676 - DNA, 825 bp, Unknown
  Bacterial polypeptide expressing nucleotide sequence isolated from the Sargasso Sea
gttgtttcagtgggaagaattaaaaagagcattaagagctaaagttagtcccagcaaaattatttgtgaaggagtgggcaaaagtgaaaaagatatagaatttgcaataacaaaaaacataagacaaattaatgttgaatcaatagaagaattaattttgattgaagaaatttcaaaaaaattaaacaacataacatcaataggtataagaattaatccagatatagatgccagaagtcttgataaaatttcaacgggaagaagaacagataagtttggaattggttttagagaattatcaaatgtttgtgatataataaaaaattctgaaaaaataaagtttgaaggtctttcatgtcatattggaagtcaaatttttgaattatcaacttttgaaaaattttttttaaaaatgaaagatgctataaacatatttaaagagcacaatttaaatattaaacatctagatcttggtggtggttttggggttagttattcttctgataatagagaattagatttttctaaattagcactattggttgaaaaaatatttccggatccaggatttgagatatcatttgaaccaggaagatatttagttgcaacatcaggttttctgctaacaaagattttaattaataaaaaaaattctgataataattttttaataacagacgcaggaatgcaaacatttttacgtacagcaatatataattcatttcataaaattatttctttaaaaaaagaaccaggagaaattaaatataatatagcagggcctatatgtgaaagttcagatattttaggtaaagatgttttgtt

SEQ ID NO: 275677 - DNA, 792 bp, Unknown
  Bacterial polypeptide expressing nucleotide sequence isolated from the Sargasso Sea
gatggacttttttaactacaataataatcagctgttcgctgaagacatcgctgtcaaagagctggcagaacaatacggtacaccgtgttatatctattcgcgtaaaacatttgagcgccattaccgtgcctttgctgatgcagcaaagtcacataaaagcttggtatgttatgccgtaaaagccaactcaaatattgccgtgctcaatattttagcccgtcttggctctggctttgacatcgtgtcgaaaggtgagcttgcacgcgttatcgaagcaggtggagatgccagtaaagtggtattttctggcgttgcaaaaaccgctgatgaaataacgtatgcacttaaattggggatcaagtgttttaacgttgaatctgtcgcagagcttgagcgtatttcagaggtggcgacgtcactaaaccttgtggcacctatttcgattcgtgttaaccctgatattgatgctaaaacgcatccttatatctcaacaggtttaaaagagaataaatttggtattgatattcaaactgcagtgacagtttaccaacatgcggcatcattaccgggtttaaaaattaccggtgtcgattgccacattggttcacagctaacagaaattaaaccttttttagctgcacttgaaaaagtactaactcttatcgaagaattaaaagccgttggcataacactttcacaccttgatattggtggcgggatgggtgtgcctttatacggtgaaactccacctcacccaagtgaatatgtagacaaaatcaccgcacgcttagc

SEQ ID NO: 275678 - DNA, 784 bp, Unknown
  Bacterial polypeptide expressing nucleotide sequence isolated from the Sargasso Sea
gatactaataaaaaaatctcacccggcagaaaatcagataaatttggtataagttttgaaaaaattgaagaagtaataaatataattaaaaaatctgattatttaagattgaaagggataagttgtcatattggaagtcaaattaataaaactgaaatatatgaaaaagttttcataaaaatgaaaaaggctgaaaaaataattagtaaacataatattattattgattgtttagatctgggcggtggttttggaataacatataataatgaaaaaaaattagatataaaaaaattatcaaatcttattaaaaataattttaaaaacgaaaattattcgatatcaattgaaccgggaagatatttggttgcaaatgccggtatactaattacaaaagttttatataccaaaaaaaatggaaatataaattttctaattacagatgcaggcatgcaatcatttatgcgcccagcaatgtataattcttttcacaaagtaatttctttgtctaaaaataacctcaatgaaaagtatacaattgctggacctatttgtgaaagtactgatatacttgctaaagacatcgaactaccaactcaaaaacagggaaattttctatcaatttgtgatacaggagcttatggatttgtaatggcctcaaattataatactcatacaaaaccatcagaaattttaatttatgaaaatcaatatgcagttattagaaaaaaagaagaaatttcagatcttataaataaagatattattgcaaaatggttataaa

SEQ ID NO: 275679 - DNA, 873 bp, Unknown
  Bacterial polypeptide expressing nucleotide sequence isolated from the Sargasso Sea
tgtttttcatggtaacaacaaatcagacaaagaattagaattagcagttagaaataatattaaggttattgtagataatgattacgacttagaaagattagatgagatctcaaattcatttaatcatgatttagaaataatgattcgctttactcctgggatagaatgtcatacacatgaatatattagaactggatcatttgatagcaaatttggtttcggaatagaatatttaaatatattattcaacagaatcagcaatacaaaacacctaaaattaaaaggtttacatgctcatattggttcacagatttttgaactagaccctcataaggatctgggagaaataatggtaaaggttatcttagacgccaaaaaatttggtcataatattgaggaactaaatgttggagggggtttaggtatcaggtatacagaaagtgatgatcccccttcaatagatgaatgggttaaaacaatttcttcttccgttgttgaagcttgtaaaaaatacaacttagattttcccacattaatgtgcgaacctggtagatctattgtatctacagcaggtataaccatttacaaaattggagcatttaaagaaattcccggtatcagaacatatttatctgttgatggaggtatgagtgataatccaagaccaattacatatcaatcaaattattctgcatgtttagtaagtaatccattaaatattaattccaaaaataaatacactattgctggtaagcactgcgaatccggtgatgttttgtttaaggaaattgaactcgcaaaatgtaaaaccggagatcttatatgtgtttttggtactggtgcatataataactcaatgagttctaactacaa

SEQ ID NO: 275680 - DNA, 731 bp, Unknown
  Bacterial polypeptide expressing nucleotide sequence isolated from the Sargasso Sea
atttaaattaaaagggttacatgctcatattggttcccagatttttgagttagaccctcataaggatctgggtgaaataatggttaaagttattgtagaagctaaaaagtttggccataatattgaagaacttaacgttggtggtggtttaggtattaaatacacagaaaatgatgatcccccatcaattgatgaatgggtaaagacaatttcctcttctgttgtgaaagcctgtgacaaaaacaacctagacttacctacattaatgtgtgagccgggtagatctattgtctctactgcaggtataactgtttacaaaattggggcttttaaagacattcctggtataagaacatatttatcagtggatggtggaatgagtgataatcctagacccataacatatcaatcaaattattctgcgtgcttggtaagtaatccatttaatcttaattccaaaaaaaaatttaccattgcaggcaagcattgcgaatcgggagatgtattgttcaaggaaatagaactagcagattgtaaaacaggagatctaatatgtgtttttggtactggggcatacaatcattcaatgagttctaattacaacagaattccaaggcctgcagctctagtagtttttgacggggaagcagagattattcaaaagagagaaactccttttgatcttttaaaacatgatgtattgcctgatcgctttattagacaaaattagg

SEQ ID NO: 275681 - DNA, 820 bp, Unknown
  Bacterial polypeptide expressing nucleotide sequence isolated from the Sargasso Sea
aagtgaaataaaagaaataaatcgaatagcaaaatctaaaaataaaagaataaaaattggtgtaagactaaacccaaatacagatgcaaaaacattaagtcaaatatcaactgggaaaaaagaaaataaatttggtgtaaataaaaatacattctatgaaattataaattattgtaagaattcaaaaaatattgatttaaaatgtctaagcgttcatattggtagtcaaattttagatcatagaccttatgaaaaaatgcttaaagcggttagtgaagttctcaataaaacaaatcataaatttgaattcatagatttaggcggaggtatgggcattacttacactgataaaaataaaaaacttaattataaaaaatacaacacagctattcttaaatttttaagaaaacataaagttaaaattatatttgagccaggtagatcaattattggcgatactgggacattagtgtcaaaaataatctatataaaagatagcggaagtaaaaaatttataattttagatgccgcaatgaacgatttaattagacccgctttatatggtgcttttcataaaaccttaccagttacaaaatctaacaaaacatcaaaaaaaacatatgaatttgtaggtcctatttgtgaaagtacagataaatttgttacattaaaaaaatttcaaatgttgagtgaaagagatttaatagcaatatgtgacgtaggagcttacggaatgtcacttagctcaaattataatttaagacctaaaccaatagagttattaataaaaggatcaaaaattaaagtaataagaaaaaga

SEQ ID NO: 275682 - DNA, 779 bp, Unknown
  Bacterial polypeptide expressing nucleotide sequence isolated from the Sargasso Sea
ttgtagagcgtataaaaaagcattagaaaaatattttccaggagaatctctccctatatatgcttccaaggcaaatagctctatattcatgagtaatcttatttcctcagaaggtttaggacttgatgcagtgtcagagggagaattattaactgccctaaagggtggggttccaaatgaaaaaattgtctttcatggtaataacaaatcagacaaggaattagaattcgcagttagaaataacattaaagtcattgtagataatgattatgacttagaaagattagatgaaatctcaaattcattaaatcgtgaattagatataatgattcgttttacgcctgggatagaatgccatacacatgaatacattagaactggatcatttgatagcaaatttggtttcggaaaagaatatttaaatattttatttaataaaatcagagttacaaaacaccttaaattaaaaggtatacatgctcatattggttcacagatttttgaactagaccctcataaggatcttggagaaataatggtaaaggttattatagatgccaaaaaatttggccattatatcgatgaacttaatgttggcggaggtttaggtattaaatataccgaaagtgatgatccccccgcaattgaagaatgggtaaaaacaatttgctcttctgttgttaaagcttgtaaaaaaaacaacttagattttcctacactaatgtgcgaaccaggcaggtctattgtatctacagcaggtataaccatttacaaaattg

SEQ ID NO: 275683 - DNA, 823 bp, Unknown
  Bacterial polypeptide expressing nucleotide sequence isolated from the Sargasso Sea
cttgatgcagtttcagaaggagaaatgttaactgctctaaaggggggggtcccaaatgagaaaattgtttttcatggaaataataaatcggacaaagaaatagagtttgcagtaagaaataatattaaagtgattgtagataatgattatgacttagaaagattagaaaaaatatcaaatttatttaaacgtgacttggaaataatgattcgctttactcctggtatagaatgccacacacatgaatacataaggacaggatcatttgatagcaaatttggtttcggaattgaatatttaaatattttatttgaccgaataagcaagactaaatatctgaaattaaatggattacatgctcatattggttcccagatttttgaactagatcctcataatgatctgggggaaataatggtaaatgttattttagacgctagaaaatctggccatgatattaagaaattgaatgtaggtggtgggttaggcattaaatataccgaaaatgacgatcccccttcaattgatgaatggataaaaacaatttccacctcaattattaaagcgtgtaaaaaacacaatttagatttacctatattgatgtgtgagcctggaagatctattgtatctacagcaggaataacaatttacaaaattggagcttttaaagaaattcctggaatcagaacatatttatctgttgatggtgggatgagtgataatccaagaccaataacatatcaatcaaattattctgcatgtttggtaagtaatccctttaatactaattccaaaaataaatatactattgctggtaagcatt

SEQ ID NO: 275684 - DNA, 505 bp, Unknown
  Bacterial polypeptide expressing nucleotide sequence isolated from the Sargasso Sea
cagtataacggcgaagaaacaaagacacctgatgaattgcttaccgtatatgcaaaaatttttaaagatagagatgaagaaatatacatagagccgggtagagctatcgccgcaaatgctggcatgctagttactgaagtggagtattgtaaaaataactttttgattgttgatgcagccatgaatgatctaatcagaccggctttatatcaggcaaaacataaagttcgtgaagttgttaataataaagtcaataaaaaaacctttgatatcgttggaccaatttgtgaaactggagattacttagctaaaggagttgaattgtcatgcaaaactggagatctagttgcaattggaactgcaggagcctatggtttttctatgagctcaaattacaatactaggccaagatcagcagagattcttgttgatggtgataagtttaccctgattagaaaaagagaaactttgagtgaattgattgcaaatgaggttgagtcttgac

SEQ ID NO: 275685 - DNA, 871 bp, Unknown
  Bacterial polypeptide expressing nucleotide sequence isolated from the Sargasso Sea
aaataagttttatgctattgataaaaaaatatttttaatcaatgctgagtctaaaagcgaaataatagaaattaatagaatagcaaaattaaaaagaaaaaaaatacaaattggtattagattaaatcctaatacagatgcaaaaactttaaatcaaatttcaactggaaaaaaagaaaataagtttggtgttaataaaaaaacattttttgaattaataaataactttaaaaattataaaaatattgaactgaaatgtcttagtgttcatattggaagccaaattttagatcacaaaccatatgagaaaatgttaaatgtagtaagcaaaattctaaatcaaactaatcataaatttgaatttattgatctaggaggtggtatgggtatttcttacgatgataattataaaaaacttaattataaaaaatataatatcgcaatcaaaaaatttttaaaaaactataaatcaaaaataatatttgaaccaggtagatcaatagtgggaaatataggtattttgatttcaaaaataatttatattaaagaaagtgaaaaaaagaattttattattctagatgcagctatgaacgatttaatgagacctgctttatacggaactaatcataaaatattaccatcaataaaaacaaatagaaattctaataaaacttatgaatttgttggtccaatttgtgaaagtacagataaatttacaacattaaaaaattttcaaaaattaaaagaaaaagattttattataatatgtgatgttggcgcatatggaatgtcactaagctctaactacaatctaagaccaaaagctatagaattattaattaaaaaatcaaaaattaaagttattaaaaaa

SEQ ID NO: 275686 - DNA, 871 bp, Unknown
  Bacterial polypeptide expressing nucleotide sequence isolated from the Sargasso Sea
attaaagaaataaagaaatttggattaggtgctgatgttgtatcaataggagaattaatgactgcaattaaagctggaattaatcccaaaaaaatagttttttcaggagttggcaaaacttcaaatgaaataatttatgctattgaaaaaaaaatactgcttataaatgcagagtctaaaagtgaaattaaagaaataaatagaattgcaaaactgaaaaaaaagaaaattaaaataggtattcggttaaatccaaatactgacgcaaaaactttaagccaaatatctactggaaaaaaagaaaataagtttggtgttgatgaaaaaacatttatagatcttgtaaaatattgtaaaaattcaagaaatattctgttaagttgcctaagtgttcacattggaagccaaattttaaatcacaaaccatatgaaagaatgctgaaagtaattgacaaaattatcaataaaacaaattataaatttgaatttattgatttgggtggaggcatgggtatttcttataatggcaaaaacaaaaaactaaattacaaaaaatataactttgcaataaatagatttctaaaaaaacataaatcaaaaataatttttgaaccgggaagatctattataggaaatactggaacattgatctctaaaattatttacataaaagaaacaaaaaacaaaaattttatcatattggatgcagcaatgaacgatttgatgagaccagctttatatggtgctactcataaaattttaccttcgaaaaaaaaaggtaaacaaaccaaaaaaatttatgaatttgttggaccaatttgtgaaagcactgacaaatttataaccttaaaaaaatttcaaaaattaaaag

SEQ ID NO: 275687 - DNA, 874 bp, Unknown
  Bacterial polypeptide expressing nucleotide sequence isolated from the Sargasso Sea
ttagttctattaatcccattgttatgcttttcggtaaaatcaaatagtaatctccaaattttaaaagaagtaaaaaaaatgggaatgggagctgatgtcgtttcaaaaggagaaatgatgcaagctcttaaagctggaatatcaccaaaaaaaattgttttctcaggagttggaaaaaaaacagatgaattaaagtttgctattgaaaaaaaaattttacttataaacgcagaaacagaaagcgaaatctttgagattgaaagattagcgaaattaaaaaaaactgtcgtacatattggtattagactaaatcctaatattgatgcaaaaacattaagaaaaatttcaaccggtaagcgcgaggataaatttggtttaactgaaaaaccttttttagatattttaaataattttaaattttcaaggtttgttaaagtgaaatgcttaagtgtgcatataggtagccaaattacagattataagccatattcgaaaatgataaatgttttagacaaaattattaaaaaatctcaacatgtatttgattatatagatttaggtggtggaatgggtgtccaataccaaaaaaaaaccaagtcttttaattaccaaaaatatagtgcaatcataaaaaagtttttaaaaaggcatgatgtaaaaattatttttgagcctggtagatcaataattgcaaattgtgcagtcttatttgctcaaataatttatataaagaatactgaaaaaaaacgatttataatcttagatgcagcaatgaatgacttaatgaggccagctctgtatggttcgtatcataatattattcctctaattaaaaggagtaaaaaaaataaaactatacatgatttcgtaggtc

SEQ ID NO: 275688 - DNA, 730 bp, Unknown
  Bacterial polypeptide expressing nucleotide sequence isolated from the Sargasso Sea
ctgaaatttatcaaaaatactccttatatagaggatacatctttggatgatatttgcaaagtatgcgaaacccctttctatgtatattctcaagaagtaattcaaaataaagtaaaaatgattaaaaaaatattaggaaaaaatatttttttctcagttaagtctaactctaatcaagcaattttgaaattaatgaaaaatctagaaattggagctgatgttgtttcaattggagaacttaaaagagcattatccgcgggttttagtaaggataaaataatttttgaaggagttggcaaatcaaaagatgatttattatatgcaatccaaaaaaatattcgattaataaatactgagtcattagaggaaattaaattgttagaaaaattagggaatgagaaaaatataaaaattaatattggtgtaagattgaatccagacatagacggtaataccattaataaaatttctacaggaaaaaaaactgataaatttggaatagagattgatgatattgaaaaaattataaatctcattaaaaactctaattatcttaatttaattggtataagttgccatattggaagtcaaataagtaaaattgatatttataaaaaaacatttaaagaaatgaaaaatgctgctgatcaatttgttagtgctggaataaaaattaaacatgttgatttagggggaggctttcatgttagatacaaagatgatgatccaa

SEQ ID NO: 275689 - DNA, 845 bp, Unknown
  Bacterial polypeptide expressing nucleotide sequence isolated from the Sargasso Sea
aagatctttaagtgcaggttttcatccaagtaaaattatttttgaaggtgtaggtaaatcgaaagaagacttaatttatgcaatacaaaagaacataaggttaataaatacggaatcaatagaagaaattaaattacttcaaaaattagctttagaaaaaaataaaatcattgatattggtgtgagattaaatccaaatattgatggtggaacaattaacaaaatttcaactggaaaaaaaactgataagtttggaatagaaattcacgaaattgaaaatattgttaatttgatatctaattgcaataatttaaatttaataggcattagttgtcatataggcagtcaaatcagcaatattgaagcttatagcaatacttttagtgaaatgagaaaagctgcagataaatttatatccttaggtatcaatattaaacatgtagatttaggaggtggatttcatgttagatataataatgaggatcctgagttcaaaattgaaaatgtaaggaaagaattagataaatattttagtaaaacaagttacgaattatcatttgagcccggtagatatttaattgcagaggcaggaattttagttacctcagttataaataccaaacaaaatggaggtataaattatttgatcgttgatgctggtatgaatactcttgttcgtcctgcaatgtataatgcttatcatgaaattgaatcgataagaaaaaatgaaaataataccctccattatactattgcaggacctatatgcgaaagctccgatatatttattaaaaatatattactctcaaaacaaagtatgggtgatattttaattattaaaaatg

SEQ ID NO: 275690 - DNA, 826 bp, Unknown
  Bacterial polypeptide expressing nucleotide sequence isolated from the Sargasso Sea
aaaaacgatattgagtttgctcttcatcaaaaaattaaacaaataaatgtggagtcagttgaagaattaaaattaattaataatattgcaggttctctaaaagtaattgctaacattggtataagattaaatcccgatattgatgcattaactcttgataaaatatcaactggtagaaaaaaagataaatttgggataagttttgataaaataaataccatttgttcattaataccaaattatcaaaatttaaatatcaaaggaattagttgccatattggtagtcaaataaacgattcgagtatttatgaaaaagttttcttaaaaatgaaaaaagcatcagaaataatggaggctcaaggtttgaatatcaatcatatagatcttggaggaggatttggagtaacctatgaacaagaaaaagagcttgatttaaaaattatatcaaatcttataaaaaagatatttaatcaaaaatatgaaatttcctttgagcctggtcggtatttggttgctaacgcaggtacgttaataaccaaaatattgattgcaaaagaagatggtctagttaattatttaatcacagacgctggtatgcagacttttttacgtcctgctctttatagtgtaaatcataatattgttccttttaagaaaaataaaaaaaataaaaaatataccgtagcagggccaatttgtgaaagtacagacaattttgttaaagattttgatttgcctgaacaatcaataggcaattttttagctatttgtgatactggagcttatgggttcgttatggcctctaattataatactagaaaccttt

SEQ ID NO: 275691 - DNA, 400 bp, Unknown
  Bacterial polypeptide expressing nucleotide sequence isolated from the Sargasso Sea
ggaaatgctggtgtgctattgactaaagttgaatatatcaaagatgatttcttaatagtcgatgctgcaatgaacgatttattaaggccttctttatataaagcaagacatgacgtctggaatgtcagtcaagctcaaaaggaagaaaaaaactggactatagttggtcctgtttgtgaatcatctgacgtaatcataaaagatcacaaaattcatgcctcagaaaatgattttttggcaattaaaacagcaggtgcttatggatttgttatgtcatcaaactataactctagaatgagatgtgctgaagttttagtaaatgggaataaacattatgagattcggaaaagagaatcatttggtgatctcattaaaaatgaaatcataaataatgattaat

SEQ ID NO: 275692 - DNA, 647 bp, Unknown
  Bacterial polypeptide expressing nucleotide sequence isolated from the Sargasso Sea
tcataaaatagcaaaattaaaaaatagaaaaatacaagttggagtaagactaaatcctaacacagatgcaaaaactctaagccagatttcaactggaaaaaaagagaataaatttggtgttaataaaaatacttttttcaaaattattgaattttgtaaaaactctgattatgttgatttgaaatgtttaagtgttcatataggtagtcaaattttagactatagaccttatgaaaaaatgcttaaagcggttagtcaaattttaaacaaaacaagtcataaatttgaatttattgatttaggtggcggtatgggtatcaaatactcactgaagagtaaaaaacttgattataaaaaatataatttagcaataattaaatttctaaaaagtcataaagtaaaaattatttttgaaccagggagatcaataattggtgatacaggtattctagtttctaaagtaatttatgtgaaggacagtgggagaaaaatatttataattttagatgcggcaatgaacgatttaatgagaccagctttgtatggtgcaattcatagaactttacctgtagccaaatcgaacaaaacttcaaaaaaaccatacgaatttgtaggtcctatttgtgaaagtacggataaatttatta

SEQ ID NO: 275693 - DNA, 853 bp, Unknown
  Bacterial polypeptide expressing nucleotide sequence isolated from the Sargasso Sea
catgagtagttttatatacaaagataatattcttttttgtgaaaatgttgctgtgaccgacattgttaaagaggttggtactccggcatatgtatattcaaagaagactttattggataattttcattcctattctaatgccttcaaaagaaatgatggattggtttgtttttctgttaagtctctaagtaatatttctgtgctcaaattattaaaagatgagggaagtggttttgatatcgtctctggaggtgaattggagagagtcttggctgctggcgtagatccaaaaaaaataatatttacaggaattgcaaaatccaatgaagaaattatccaaggcataagaaaaaatattttgtcttttaacattgaatctgaggcagaaatgttaagaatagaaaaattagctactgatgaaaataaaattgttgatgttgcaataagattcaatcctgaaattgattcaggtggacacgaatatattaaaaccggaagaaaaaaagataaatttggtgttttgttagagggggttattaatttatctaaatatattttgaattctagttcactaaaccttattggcttgtcgtgccatattggctctcaaatatttgaattaaatgattttgaagaatctgcaaaatatataaaaaaacttgctaaggaaattaataaacttggtattgagcttaaatttctagacgttggaggaggtttaggtatctcctatgctgactcaaactttccttctccctcagatttgataaaaaatcttgagaatatcttaagtgatagaaatgaaaaaattattttagagcctggaagaagcgtttctggagatgctgggatt

SEQ ID NO: 275694 - DNA, 857 bp, Unknown
  Bacterial polypeptide expressing nucleotide sequence isolated from the Sargasso Sea
cttactaaaagaaatcggaagaatgggcttaggcgctgatgttgtttctattggagaactaagtcttgccttaaaagctggtatcaaaccaaacaaaattgtattttctggagttggtaaatcttcaagtgaaataatttttgcaattaaaaagaaaatattactaatcaatacagaatctagaagtgaaattttgaaaatagagaaaatagcaaaaaaaagaaataaaaaagtaaatatcggtataagattcaacccaaatactgacgcaaaaacattgagtcaaatatcaactggaaaaaaagaaaataagtttggcgtcacagagaaagtttttttagatttggttgaatattcaaaaaattcaaaaaacctcaaacttaaatgtttgagtgttcatataggaagtcaaattcttgataacaagccatacgaaaaaatgttgaatgttttagaaagagtcttaaaaaaagcaaaatttcatttcgaatatatagatttgggaggtgggatgggaattgactacagccaaaattctaaaaagctaaatttaaaaagatactcttcaaaaattgaaaaatttaataaaaaacatcaatctaaaattatttttgagccggggagatcaatagttggtaattcaggtgttttaatatcgaaaattatttacattaaagagggtcataagaaagattttataatccttgatgcagctatgaatgatttaatcagaccagctttgtatggtgcaaatcacagaattattcccgtttcaaaaaataataaaaaatctaacaaagtttatgaattcgtagggccagtttgtgaaagtactgataaattttctacaattaaaa

SEQ ID NO: 275695 - DNA, 873 bp, Unknown
  Bacterial polypeptide expressing nucleotide sequence isolated from the Sargasso Sea
tttggaacaccttcttattgttattctttaaataaattaaaatcaaatataaaaaattttaaaaagctttttaagtcaataaacccaataatatgtttttctgtaaaatcaaattcaaatctccaaattttaagagaaattaaaaaaatgggaatgggcgcacatgtaatatctaaaggtgaaatgattatggctttaaaagctggaataagtccaaaaaaaatagttttttcaggtgtgggaaaaacttatgaagagcttaaatttgcaattgataaaaagattttattaattaattcagaatctgaaagtgaaataaatgaaatagagaaaatttcaaaaataaaaaaaaaaaaaatagacattggaataagacttaatccaaatatagattctggaactttaaaaaaaatttctactggaaaaaaagaaaataagtttggtttaacaaaatatagtttcttaaaaattattaaaaaatacaaaaattcaaaaaatttaaacttaaaatgcttaagtgttcatattggaagtcagattactaatcacataccttatataaaaatgttaaaagtaatagaatcaattataaaaaagtccaactataattttgattttattgatctgggtggtggtatgggaattaaatacaacgaaaaaactaaaaaacttgattataaaaaatattatatagcgataaaaaaatttttaaaaaaatataaaacaaaaattatttttgaacctggaagatcaataattgctgattgtgctatgcttctaacaaaaattttatatattaaaaaagccaataatataaattttataattttagacgctgcaatgaatgacttgattagaccagctctatatgga

SEQ ID NO: 275696 - DNA, 895 bp, Unknown
  Bacterial polypeptide expressing nucleotide sequence isolated from the Sargasso Sea
gctgacgtagtatcaatgggagagttaatgatggctattaaagctggaattagccctaaaaaaattgttttttctggagtgggaaaaacttttgaagaactattgtatgctataaataagaatatatttttaattaacgctgagtccgaaaatgaaattaaacaaattgagaaaattgcaaaatcaaaaaaaaagaaaatagaaataggtattagattaaatcctaatactgatgcaaaaaccttaagtcaaatctctacaggaaaaaaagaaaataaatttggagtcaacagcaaaacttttgttagacttgtgcataattatagaaactccagaaatattaaattaaaatgtttaagtgttcacattggtagtcaaattattgaccacaaaccttacgaaaaaatgttaaaatcaatcaccaaaatattgaaaaaaattaattatgaatttgaattcattgatcttggtggtggtatggggatttcatataatgattacgagaaaaaattagattataggaaatattgcatagctattaaaaaatttttgaataaaaataaatcaaaaattatttttgaacctggtagatctattgttggaaatactggaactttaataagtaaagtaatttacataaaaaaaagcgaaagaaaaaactttattattttagatgcagcaatgaatgatttgatgagaccagctttatacggagcaacccatagactaatacctgcattaaaaaaaaataaaattttaagagaaaatcatgaattcgttggaccaatttgcgagagcacagatagttttttgactttaaaaaagtttcaaaaattgagagaaaacgaaataattgtaatgtgcgatgtaggagcatatggaatgtctttaagct

SEQ ID NO: 275697 - DNA, 928 bp, Unknown
  Bacterial polypeptide expressing nucleotide sequence isolated from the Sargasso Sea
tatgttatgctgtaaggcttcatcaaatcaggctattttaaaaacattggcaaaatttggtgctggaatggacgttgtttctggtggtgaatataaacgagcgagagacgctggtgtagacggaagccgtatcgttttttcgggagttggaaaaactggtgctgagatgaaactcgccttgcatgagggggtgcgacagttcaatgttgagtctgaggaggaactattagtattatcaggcgtggcccatgatatgaaccgagtagcgccaataagtataagagtaaatccagacgtcgacgccaaaactcatgaaaaaattgccacaggtaaggctgagaacaaatttggaataccaatatcaagggcaagagaagtttatgcaacagctgcttcgctacccggtatacagattgtgggaatagatctccacataggtagtcaacttactcaacttttaccttttgagaaagcatataagaaaatcgctgatctcactgatgtcttgaggtctgatgggcatgaaatcaaacgacttgatttgggtggtggtttgggtattccatatggattggaagatggcagccctccgacaccaaaagaatatggtgaaatggttaagagggtattgggccacctaaattgtgaaatagaaatcgagcctggaagactattggtcggtaacgctggtttgctcgtttcagaggtaatttacgttaaaaaaggtcacgacagggactttttaattttggatgcagcaatgaatgatttattacgtccagctctctacgaagcatatcatgatatagttccagtaaaaaaatcttcttcaaaccaagagagcgcgatttatgatgtagttggtccagtttgcgagactggggacacttttgctaaatcccgtaccataaaaaaatgtagctcgggc

SEQ ID NO: 275698 - DNA, 709 bp, Unknown
  Bacterial polypeptide expressing nucleotide sequence isolated from the Sargasso Sea
tttgattacaaattgtaataatataaatttaataggtattagttgtcatataggtagtcaaattagtaatattgatgcttataaaaatacttttactgaaatgaaaagagctgcaaataaattttcatctgcaggtattaatattaaacatgttgatttagggggtggttttcatgttaaatataataaagatgatcctgagtttaaaattgaaaatgtaaagaaagagttggatgagtgttttagtaaatcaaattatgaattatcatttgaacctggtagatatttaattgcagaagcaggaattttagttacttcaattataaatactaaacagaatggaggtataaattatttgatagttgatgcaggtatgaatactttagtccgtcccgcaatgtataatgcttatcatgatatagaaacaataaataaaaaaaacgataatttgataaaatatactgttgcaggacctatctgtgaaagctctgatatttttatcagaaatatattactatcagggcaaagtatgggtgatattttgattataaaaaatactggggcatatggaaaagtcatgtcctcaacatataatactagatctcttccatctgaaatccttgttaatgcagaaaattttgcaataatttactccccagataaaatagaaaaaaatattgatgaagacattattccaagttggttataa

SEQ ID NO: 275699 - DNA, 799 bp, Unknown
  Bacterial polypeptide expressing nucleotide sequence isolated from the Sargasso Sea
agaaataaaaaaacttggacttggagcagatgtagtttcaaagggcgaattatatgcatcacttaaagctggtattaataaaaacaagatagttttctctggagttggtaaaactaaagatgaaatagagtacgcaattaaacaagaaatacttttaataaattccgagtctttgagtgaagttttggcaattgaaaaggctgcaaaaaaattaaataaagttgttagtatagggcttagattaaatccagatacagatgcaggaacactaaaacaaatttctactggtaaaagtgaaaataaatttggtgtagataaaaagacatttataaaaattattaatttgatgaaagactcagaatttttaaatattaaatgtttaagtgttcatattggtagtcaaatattaaatcacaagccatatgaaaaaatgttgaatgtgcttgataaacttttaagaaatctagattacaaatttgattttattgacttaggtggtgggatgggaattaattatgacgataaaacaaaaaaacttaattatttaaaatataaaaaatcaataattaaatttaaaaataaatacaattgtaaaataatttttgaacctggaagatctataattggaaatgttggaatacttgcaactaaagtaatttatttaaaacgtaataagacaaaaacatttgtgatattggatgcagcaatgaatgatttgataagaccagccttgtataatgcaaaacatagaataataccatccctaagaaataagtcgcgatcaaataaaatattagaa

SEQ ID NO: 275700 - DNA, 636 bp, Unknown
  Bacterial polypeptide expressing nucleotide sequence isolated from the Sargasso Sea
catgagtagttttatatacaaagataatattcttttttgtgaaaatgttgctgtgaccgacattgttaaagaggttggtactccggcatatgtatattcaaagaagactttattggacaattttcattcctattctaatgccttcaaaaaaaatgatggattggtttgtttttctgttaagtctctaagtaatatttctgtgctcaaattattaaaagatgagggaagtggttttgatatcgtctctggaggtgaattggagagagtcttggctgctgatgtagatccaaaaaaaataatatttacaggaattgcaaaatccaacgaagaaattatccaaggcataagaaaaaatattttgtcttttaacattgaatctgaagcagaaatgttaagaatagaaaaattagctactgatgaaaataaaattgttgatgttgcaataagattcaatcctgaaattgattcaggtggacacgaatatattaaaaccggaagaaaaaaagataaatttggtgttttgttagagggggttattaatttatctaaatatattttgaattctagttcgctaaaccttattggcttgtcatgccatattggctctcaaatatttgaattaaatgattttgaaga

SEQ ID NO: 275701 - DNA, 835 bp, Unknown
  Bacterial polypeptide expressing nucleotide sequence isolated from the Sargasso Sea
atttgcaatagaaaaaaaaattttacttataaatacagaatccgagagtgaaatatttgaaattgagagattagccaaactaaaaaaaaaaattgtaaatattggaataaggttaaacccaaacattgatgctaaaactttaaaaaaaatttctactggcaaacacgaggataaatttggtctaacagaaaaagctttcttaaacatattaaataaattcgaaaattccaagtatgtaaaagtaaaatgcttaagtgttcatattggtagtcaaataactgactacaagccatatcttaaaatgctcaatgttttagatctaattattaaaaaatctaaatatttttttgaatacgtggatttaggtgggggaatgggtattcaatatgacaaaaaaacgaaagtatttaattataaaaaatataacaaaataataaaaaaatttttaaaaagacataatgttaaaattatttttgaacctggaagatctttaattgcaaacacagcagttttatttacacaaattatttatataaaaaatacaaacaaaaaaaaatttattattttagatgcagcaatgaatgatctaatgaggcctgctttatatggatcatatcacagtattattcctttattaaaaacaaataaaaaaaataaaaggatacatgatttcgttggtccggtatgtgaaaccactgacaaatttttatctgtgaaaagttttcaggatctaaaagaaaaggaatttgtagcaatttcagatgttggtgcatatggaatgtctttatcctcaaattataatttaagacctaaacctttagaaataatgataaat

SEQ ID NO: 275702 - DNA, 642 bp, Unknown
  Bacterial polypeptide expressing nucleotide sequence isolated from the Sargasso Sea
catggattattttaattataaaaaaggcaagctttttgcagaagaagtttctatagaagaaatcgcaaataaatttggcacgccctcttatatctatagtaaagcaacccttgagaggcatgcaaaagcttacatagattcctttcagtcgatgaaaggtctcatttgtttttcagtcaaagctttatcgaacatatcgattttaaaaatattaaaaaaaacagggtgtggatttgatattgtttcaggtggagagcttcaccgagtaattttagctggagcagatccaaaaaaaattattttctcaggggttggaaagtcaagagccgaaatggcagctgggattaatcataatattctttcattcaatattgaatctgaaccagaacttgatcggctaaacagcgtagctaaagaaatgaataaaattgcaccaattgccattagatttaatccaaacgttgatgctggagcacatgaatttactaaaacaggaagaaaaacagataaatttggcgtcagcattgagacaacaaaaaatctagttaaaaaatgcaatgattcagataaccttaatcttgttggcctaacatgccatattggatcacaaataatggagttaggtggctttgaagatgcagc

SEQ ID NO: 275703 - DNA, 714 bp, Unknown
  Bacterial polypeptide expressing nucleotide sequence isolated from the Sargasso Sea
ctggattttggtatatgttttttcaatgttgagtcatttgatgaacttgtagcaattaatagggtttcaaaggatgttggagttaatgcaaaaatctcaatacgcgttaatccagacattgaccctaagacccacccatatatatcaactggattaaaaacaagtaaatttggaattgctattgaagattcatatgatgcatacattgaagcatctaaaatgaagaatattgatgtagtgggaattgatgcgcatataggttctcagatttttgatttacaaccctttgaagattcgcttctaaggctagaagatctgtaccacaaactgaatgatttgggtattaatattagatttatagatataggtggaggattaggaattaaatataaagatgatgacattccaccaactaagaaggaatttgcagaaaaaataattaaaactatgaaaaaaattaattgtagtttaattttagagcctggtaggtcattagttggaaatgcagggtacttaatttctaaagttctatataaaaagaaaagtaatcagaagaattttttgataatagatgccggaatgaacgatatattgagaccttctttatataatgcttaccacaaggtttctaaatctatacaagcgtctgacaactcagaaatttttgacattgtagggccaatttgtgaaacaggtgatgttatttcttatgac

SEQ ID NO: 275704 - DNA, 915 bp, Unknown
  Bacterial polypeptide expressing nucleotide sequence isolated from the Sargasso Sea
aggggcaatgagtttttatttgatggtgtaaaagtaaaaaaattagctaaaaaattttcaactccaatttattgttactcattaaaaagaattaaaaaaaatgttgaggattttaaaaatgcttttaaaaaatttaatccaatcatatgctattctgttaaagcaaatccaaataaaatattgttacgagaaattggaaaactaggtctaggtgctgacgttgtatctttaggagagctaatgaaagcattaaaatctggtattaaaccaagtaaaattgttttttcgggagttggtaagacagcaaatgagataagttttgcaataaacaagaaaatccttttaatcaatgctgaatcaaaaagtgaaattttagttatcgaaaaaattgcaaaaaataaaagaaaaaaggttgatattggtataaggctgaatccaaatacagacgcaaagacattaaaacaaatatcgactggaaaaaaagatgataaatttggagtttcagaaaaaagttttttagaattagtaaaatacgttagaaattcaaaaaacttaaatcttaaatgtctaagtgttcatataggcagtcaaattttagataataaaccatatgaaaaaatgttaaagacaataattaatgtaattaaaaaaaccaatttctcttttgagtatattgatcttggaggtgggatgggaattgattatgaaaataaaaatagattacttaactttaaaagatacagctcagatattaaaagattaataaatttagtagactcgaagattatatttgaacctggtagatcaataattggcaatgtaggaattttaatatctaaaattatttatataaaaaaaggctttaaaaaagatttcataatattagatgctgctatgaatgatttaatgagaccc

SEQ ID NO: 275705 - DNA, 868 bp, Unknown
  Bacterial polypeptide expressing nucleotide sequence isolated from the Sargasso Sea
ttaataataaatgcagagtcagaaagcgaaattaaagaaatggaaagaattgcaaaattaaataaaaagaaagttgaaattggaataagactaaatcctaataccgacgctaagactttaagtcaaatttcaacagggaaaaaaggaaataaatttggtgtggatagtaaaacttttttaagtcttacaaaatactgtaaaaaatcaaaaaatataaatctgagatgtctaagtgtacatattggtagtcaaatattagatcataaaccttatgaaaaaatgttaaaagtgctgttaaatattattaaaaaatccaattataagtttgactttattgatcttggtggcggtatggggatcccatatgacaacattgaggaaaaacttaattttaaaaaatataatttggcaattaaaaagtttttaaaaataaataattctacaattatatttgaaccaggtagatcaataattggaaatacaggaattttagtatctaaagtaatctatattaaaaaaaatcctaaaaaagattttattattctggacgctgctatgaatgatttaattagacctgctttatatggtgcttttcatagaatattaccagctaaaaaaaggaataagaaaataaaaaagaaatatgaatttgttggtccaatttgtgaaagtactgataagttttctagtataaaatattctcaggaactaaatgaaaaagatctggttataattcatgatgttggtgcatatggaatgtcattaggttctaattataatttaaggcttaagcctgttgaacttcttattaaaaattctaaaattacaattattagaaaaagacaaacatataaagatataatttaat

SEQ ID NO: 275706 - DNA, 910 bp, Unknown
  Bacterial polypeptide expressing nucleotide sequence isolated from the Sargasso Sea
atggaagaaaaaaaatcatttttaaaacaaaatattgactttgaaagtcccaataaaaatattgtacctatcactacatctattggaagtaatgggaaattatctattggtggatgttccattgaagaattagttgaaaaatatgattctccgctctatattttggatgaaattaccttaaggaactcttgcagagcttataaaagagcattagaaaaatattacccaggggattcacttcctatttatgcatctaaggcaaacagttctatttttatgagtaatcttgtatcctcagaaggatttgggcttgatgcagtttcggaaggagaactattaacggctcttaaaggtggtgttccaaatgagaaaattgtttttcatgggaacaataaatctgacaaagaaatagagtttgcagttagaaataatatcaaggtaattgttgataatgattatgacttagaaagattagagcgactctcaaattcatttaatcatgatttagaaataatgattcgcttcactcctgggatagaatgccatacacatgaatacattagaactggatcatttgatagcaaatttggtttcgggaaagaatatttaaatgttctttttggaagaatcagaaatacaaaacatttaaaattaaaaggattacatgctcatattggttcacaaatttttgaactcgaccctcataaggatctgggagaaataatggtaaaggttattttagaagccaaaaaatttggtcataatatcgaggaactaaatgttggtgggggtttaggtatcaaatataccgaaagtgatgatcccccttcaatcgatgaatgggttaaaacaatttcttcttctgttattaaagcttgtgaaaaaaacaacctaggtttcctacgctaat

SEQ ID NO: 275707 - DNA, 883 bp, Unknown
  Bacterial polypeptide expressing nucleotide sequence isolated from the Sargasso Sea
tcattagaagaaattaaattactgcaaaaatttgcattagaaaaaaataaaattgtagatattggtgttagactaaatccaaatattgatggtggcactataagtaaaatttcaacaggaaaaaaaactgataagtttggtattgaaattaatgaaattgaaaatattgttagtttagtctcaaattgtagtaacttaaatctcattggaataagttgtcatataggtagtcaaattagtaatattgatgcttataaaaatacttttattgaaatgaaaaaagctgcagataagtttttggcctcaggaattaatattaaacatgttgatctagggggtggatttcacgtccaatataataaaaatgatcctaagtttaaaatagaagatttaaagaatgaattagactcatgctttagttcctctatttatgaattgtcatttgagccaggtagatatttaattgctgatgcaggaattttagtaacatcaattataaataccaaaaagaatggaggaataaattatttgatagttgatgcaggtatgaatactttagttcgtcctgcaatgtataatgctcatcatgatattgaggcaataagtaaaaaaattgaaaatactactacatatacagtcgcaggacctatttgtgagagtactgatatttttatcaaaaatatattgctatctaaacaaactataggcgatattctgattattaaaaatactggagcatatggaaaagtaatgtcatccacatataatacacgatctcttccagctgaagttcttgttaataaagaaaattttgcaatgatttatactccagaaaaaattgaaaaaaatattgaagaagatatcattccaaattggttatagt

SEQ ID NO: 275708 - DNA, 772 bp, Unknown
  Bacterial polypeptide expressing nucleotide sequence isolated from the Sargasso Sea
aaggttaaatcctgatattgatcctttaactaacagtaaaatttcaacaggaagaaaagaagataaatttggaatttcaaaaaaacaatttgttaaaattgtaaaaaaaattaaatcgtcaaaaaatttaaatttaaaatgtttaagtgttcatattggcagtcaaattacaaattataaaccttactcaaaaatgcttaatgtaattgaaaatttaattaaaaaaactaaacataattttaattatgtagatttaggtggaggtatgggtattaaatatgaaaaaaattctaaagaattaaattatcaaaaatacagtagtttaataggtagatttttaaagaaaaataaaacaaaaattatatttgaacctggaagatcaataataggtgatgcgggtgtactcataagtaaaataatttatattaaagacgcaattaaaatcaaatttgtaattatggatgcggctatgaatgatttaattagaccagctttatatggcgcaaaacatgaaattaaagctgttaaaaaaaataatattaaaattaataaattacatgaatttgttggtccagtttgtgaaactagtgacaaattttcttcattaaaaaaataccagaaactaaatgaaaatgattttctagcaatttatgatgttggagcatatggtatggctttatcttcaaattataatttaagaaccaaaccagctgagatattggtagatcgatcaaaagtaaaggtaattacaaaacgtcagcttattaaaaat

SEQ ID NO: 275709 - DNA, 700 bp, Unknown
  Bacterial polypeptide expressing nucleotide sequence isolated from the Sargasso Sea
atgaaaacaattgacggacaactatttgttgaaaatattccagttattgaattggctaaggagtatggctcaccattgtttatatattcttccaaagagattgagaataattttctaaattataaaaatgaaataagggatcaagaccttgtctgttacgcagtaaaagccaactcaaatatacatatcttaaagctactctctgatcttggctctggattcgatgtcgtatctggaaacgagctacagagatgccttttagctggagcagatagaaagaaaattgttttttcaggtgtagcaaaatcccatgaagaaattaagctagcaatagaaagtgatattttgtctatcaatatagaatcggttggtgaatttgaaagaatcgcagcaatagcgaaagaattaaataaaacagtaaactgtgcgctcaggataaatccagatattaagataggttctcataaatacatagaaacaggatctaaaacatcaaaatttggtttggataaagagtctgttagcaagatttcagaactttcaaagagcaatgagcacattaatattaaagctgtagcttgtcatataggttctcagatttctaatgagaatttaattctcaaaagccttatatatataaaagaaattgctgatcaactcaaaggagaaggtcatgaacttaactttctggacatagggg

SEQ ID NO: 275710 - DNA, 842 bp, Unknown
  Bacterial polypeptide expressing nucleotide sequence isolated from the Sargasso Sea
taataaccttgagattctaaaattaattaagaaaaataatattggtgctgatgttgtgtcaataggagagttattaattgccttgaaggctggaatatcaccaaataaaattgttttttcaggtgttggaaaaacaaaagaggaaatttcaattgcgataaataaaaaaatccttttaattaatgcagaatcggagagtgaaatagattctattgaaaatatcgcaagaaagaaaaaaaaagttgtaaatattggtataagactgaacccaaatatagatgcaaaaactaataataaaatttcaactggaagaaatgttgataaatttggtgtcgaccgaataagtttttcaaaaatagtaaataaatacaaatcctctaggtacattaagataaaatgtttaagtgtacacattggtagccaaataacaaattttaggccttacacaaaaatggttaaagtaatagataaatttatatcaaaattaaattataaatttgattatattgattttggtggtggaatgggtattcaatatgatttgaaatctaaaaaattagattataaaaaatatcttcatagtattaagatttttctaaaaaaaaataaagtaaaaataatttttgaacctggaagatctataataggcgacacagcagtgcttctcacaaaaataatttacattaaaaaaacaaataaaaaaaattttgttatcttagatgctgcaatgaatgacctaatgagacctgcattatatggatcatttcataagattattcctgttgaaagaagcaaaaaaattataaaaaaaactcacacttttgtaggaccgattctgtgaa

SEQ ID NO: 275711 - DNA, 913 bp, Unknown
  Bacterial polypeptide expressing nucleotide sequence isolated from the Sargasso Sea
actttactgttattcatataaaaaattaaaacaaaacatagatgactttaaattaaattttaaatcattttctccattaatatgttttgcaactaaagctaattctaatttaaaaatattaaaagaaattaaaaaaaatggtttaggtgctgatgttgtttctaaaggagaattaatgaaagcgcttaaagcaggaataagttccaaaaaaattgttttttcaggtgtgggtaaaacttcatctgaattaagttatgcaatagataaaaaaattttattaataaattctgagtctaaaagtgaagttttggaaattgaaagaatagcaaaatctaaaaataaaattgttgatgtaggaattagacttaaccctaatactgatgctaatacgctaaaacaaatatcaacaggcaaaaaagaaaataaatttggtgttaacgaaaaaacttttatagaaatatataaaattataaaaaaatctagaagcataaatttaaaatgtttaagtgttcatattggaagtcagattctagatcataaaccatatgaaaaaatgcttaaagttattgataaattaatagaaaaaatcaaatttaaatttgaatttattgatctaggtggaggcatgggtatttcttatcaaaatgaaaataaaaaacttaattataaaaaatataacctagcaatcaaaaaatttttaaaaaaacataaaagtaaaatcatttttgagcctggaagatctattgtaggaaatgctggaatacttctttcaaaaattatttatataaaagaaaatccaaaaaaaaattttattattcttgatgccgcaatgaatgacttaatgagaccagcgctttatggagcaaaacatagaataattccaattataaaaagaaatataatttctaacaaa

SEQ ID NO: 275712 - DNA, 833 bp, Unknown
  Bacterial polypeptide expressing nucleotide sequence isolated from the Sargasso Sea
ctcagcagccccaaccgcaatcttgccccgctcagcaccgacatggaccccgaaggtcgcctgcgcgttggcgagtgcgtgttgagcgagctggcccagcgctttggaacaccgctttacgtgatcgatgagcgcagcttgcgccaggcctgcagcgcctaccgcgaggccttggaacgtcactacccaggtccttcgttggctgtctacgcctccaaggcgaacagcagcttggcgatcaccgccgtggtggcatcggaagggttggggcttgatgcggtctcagccggtgagttgttgacggcactcgaggggggcatgccgcctgagcggatcgtgctgcatggcaacaacaaatccagcgaggaattggccctggctgtgcaaaacggcgtgacggtggtggtcgataactggcacgacatcaccctgctgcaggagttggcccagggccgcaccgaaccggtggcgctgatgttgcgcttcacccctggcattgagtgccacacgcacgaatacatccgcaccggccatctcgatagcaagttcggctttgatcccgatcagctggagcaggtgctgacccatctggctggctgccgttgggcccgggttcagggtctgcatgcccatatcggctctcaaatttttgaagtggagccccaccgcgacctggcggctgtcctggccgatgccttggtgttggctcgccacttgggtcatgaccccagtgatctgaatgtgggtggtggtttgggcatccgttatgtggcctccgacgatccaccgagcatcgatggctgggttcaggtggtcgccgaagcgatggtggc

SEQ ID NO: 275713 - DNA, 510 bp, Unknown
  Bacterial polypeptide expressing nucleotide sequence isolated from the Sargasso Sea
atgaagtaccaccaactccacatgaatatgtaaatgctattactgatattactcgggaatgtgatcttgagataattattgagcctggcagatctattataggtaatgcaggtgttttacttacaaaagttgaatatcttaataaaacacctcttaaaaattttgctgtcgttgatgcagcaatgaacgatttgattcgtccatctctttatgatggttggcatgaaattaaaagggtaacagaagagtcgagtgaaggagttaaggcatatgatgttgttggccctatttgtgaaactggtgattttcttggtagaaaccgaaaactatcgttaaacgaaggcgatttacttgctattcaatcagcaggcgcatacggttttagcatgtcatctaactataattcaagaccacgtgcatccgaagtactggttgatggtactaaagttcatgagattcgacgaagggaaacatttgaagatttaattaatggtgaatacttagtttaga

SEQ ID NO: 275714 - DNA, 893 bp, Unknown
  Bacterial polypeptide expressing nucleotide sequence isolated from the Sargasso Sea
caaattcgcaattgaaaaaaaaatattacttataaatgctgaatcaaaaagtgagatacaagagattaataaaattgcaaaacaaaaaagaaaaatagtaaaaattggtattagactaaacccaaatactgacgcaaaaacgcttaaacagatttctactggtaaaagcgaaaataaatttggtgtaaacagtaaaacgttttacgaactagtaaattactgcaaaaactcaaaaaatatcagcctagagtgtttaagtgttcatataggtagtcaaatattagactacaagccatatgaaagaatgctcaaagttataagtaatataattaataaaactaaatacaaatttaaatttgtcgatttaggtggaggaatgggtatttcttacagtgataaaattaaaaagcttaattataaaaagtataacttagcaattaaattttttttaaaaaaacacgacacaaaaattatttttgaaccaggtagatcaataatcggtaatacaggaactttaatatctaaaattatttatatcaaagatggtggggaaaaaaaatttattattttagatgctgcaatgaatgatcttatgagaccagctttatatggagcaattcataaaatattacctattaataaatcgaacaggatttcaaggtgtatttatgaatttgtaggtcctatttgtgaaagtacagataaatttgtaactttaaaaaaatttcaaaaactaaaagaaaaagattatgtagctatatgtgatgtgggtgcctacggtatgtctctaagctctaactataatcttagaccaaaagccgttgaattattggtaaaaggaagaaaaattaaaataattaaaaatagacaaaagcataaagatttaatttagc

SEQ ID NO: 275715 - DNA, 664 bp, Unknown
  Bacterial polypeptide expressing nucleotide sequence isolated from the Sargasso Sea
atgttaagtagagaagagaatcaacttttttttgataaaatctcaatgaaagaattggcggaaaaatatgggacgccttcgttcgtttattctgaaggaagaatcattgaaaattttcttactattaagcgtgctttctcctcgacaacaactgatatttgtttcgcggtgaaagcaaattcaaacataggaattctccaagttttagctcgacaaggcgcggggtttgacatcgtatcggggggagagctagcaagagttttgaaagcaggaggagatccagaaaaaatagttttttcaggtgtgggaaaacaggactgggaaatcatagaaggattaaaaaataagattcgttgttttaatgtagaatcagccgctgaactagagaaaatagctcagatcgcaagctcttacggccaaattgcacccgtttcactcagagtaaatccgaatatagacgcgaaaacacacccatatatatctacaggcttagccgagagtaaattcggtataaaaatagagagtgcggaacatctctttcaacgtgctgacgaagaccctcatctgaatttagtaggaattgactgtcacattggatctcaaataaccgaaattgagccttttctggccgctctaaatatcctaattaacttagtccaaaggc

SEQ ID NO: 275716 - DNA, 886 bp, Unknown
  Bacterial polypeptide expressing nucleotide sequence isolated from the Sargasso Sea
atggaagaaaaacaatcttttttaaaacaggaacttgacttggaaagtcctaataaaaatatcgctcctattactacatccattggagaagatgggaaattgtcagttggtggatgttctattgaagaattagttaaaaaatatgattctcctctatatattttggatgaacttactttaagaaagtcttgtagagcttataaaaaagcattagaaaaatactacccaggggaatcactcccgatatatgcctccaaggcgaatagctctatattcatgagtaaccttgtcgcctcagaaggtttaggactcgatgcagtttcggaaggagaattaataactgcactaaagggtggggtaccaaatgaaaaaattgtttttcatgggaacaataaatctgataaagaaatagatttcgcaattagaaataacataaaaataattgtagataatgactatgacttaaaaagattagaggaaatatcaaattcattaaatcatgacctagaaataatgattcgatttactcctggaatagaatgccatacacatgaatacataagaacaggttcatttgatagcaaatttggttttggaatcgaatatttgaataatttatttgcaactataagtgataccaaacatcttaagttaaaaggacttcatgctcatattggttcccagatttttgaactagaccctcataaggatctaggtgaaataatggtaaaggttattttggactccaaaaaatttggccataatattgaagaactaaatgttggtggtggcttaggtattaaatacacaaaaaatgatgatccaccttctattgatgaatgggtaaaaacaatttccaactctgttgttaaagcttgtagaaaac

SEQ ID NO: 275717 - DNA, 868 bp, Unknown
  Bacterial polypeptide expressing nucleotide sequence isolated from the Sargasso Sea
attgctgctgaaatgaatgttttagcgcctgtagctttgcgtgtgaatgtagatgtgaccccaggcacacatgcaaagatttcaacaggccagcgtgacacaaaatttggcattccagccgatcagcgtgaaacgaaaacgctttatgaacagatagtaaacgatccttttatggcacctgctggactggcggttcatataggctcacagatccatgacttggcgccatttgagcgcgcctattcatcccttttgaaattagccactgattttcgtgattcaggattaccagttccaaacctcgatcttggtggtggctttggagttgattataacactgctgacacagctgattttagcaaatatggaacacttgttacgcggatcttcgagggtcaagggttcgagcttggattcgagcccggccgatcaatcgttgcaaataacggtgcacttttaacacgtgtgatttatatcaagcatggaggcaataaacggtttgttatcgttgatgcggcaatgaatgatcttttacggcctaccttgtatgatgcacatcatgcaatcttgacacttgccgagccccaaagtccaacaggcaaagctgatattgttggtccaatttgtgaaactggtgattaccttggactgaatcgtgacatgcctaacctcgaagcagacgatggactggctgttttgtccgcaggtgcgtatggtgcaacaatggcttccaactataacagccgatctcctgccgccgaagtgatggtggttgatggtgttacgcacctgcttcgcgctgcccgtcctattgatgattttataaaagaggaaaatattcctgactttaccaaattgccggattaat

SEQ ID NO: 275718 - DNA, 800 bp, Unknown
  Bacterial polypeptide expressing nucleotide sequence isolated from the Sargasso Sea
aattaaaaaatttggtttaggagctgatgtagtttctttaggtgaacttatgatggccctaaaagcaggaattaaaccaaataaaatagtattttctggagttggaaaaacttctagtgagttgaattttgcaataaataagcaaatactgctgattaatgctgagtcattgagtgaaataatggaaataaatagacttgcaaaattaagaaacaaaaaagttagagttggggttagacttaaccctaatacagacgcaaaaacactaaatcaaatttctacaggaaaaaaagagaataaatttggagtaaataaaaatacatttcataaaattgttaatttttgtaaaaattcaaaaaatatagacttaaaatgtttgagtgttcacataggcagccaaatattagatcataaaccctatggaaaaatgcttaaagctgtaagccatatattggacaagactaatcatcaatttgaatttattgatttaggtggaggtatgggaattaattattctgataaaaacaaaacgcttaattataaacagtataacactgcaattaataattttctcaaaaaacataaagtaaaaattatttttgaacctggtagatctataataggcaatactggtatgttaattagtaaagtcatttacattaaagacagtggtaggaaaaaatttataattttagatgctgctatgaatgatcttatgagacccgcattatatggggcatttcataggactttgccagtgataaaatctaataaaatatcaaataaaccttatgaattcg

SEQ ID NO: 275719 - DNA, 742 bp, Unknown
  Bacterial polypeptide expressing nucleotide sequence isolated from the Sargasso Sea
ttctactgggtaaaagtgaaaataaattttggggtaaatagtaaaacattttatgaacttgtaaactactgcaaaaactcaaaaaatatcagtctacagtgtttaagtgttcatataggtagtcaaatattagaccacaagccgtatgaaaaaatgcttaaagctgtaagtaatataattaataaaaccaatcacaaatttaaatttgttgatttgggtggaggaatgggaatttcttacagtaataaaattaaaaagcttaattataaaaaatacaacttagcaattaaaaattttttaaaaaagcatgatacaaaaattatttttgaaccaggtaggtcaataattggtaatgcaggaactttgatatctaaaataatttatattaaagatggtggagccaaaaaatttattattttagatgctgcaatgaatgatcttatgagaccagctttatatggagcagttcataaaatcttacccgttgataaatctaacagtgtttcaacaaatgcttatgaatttgtaggtcctatttgtgagagcacagataaatttgtaactttaaaaaaatttcaaaaactaaaagaaaaagatttggtagctatatgtgatgttggtgcctacggtatgtctctaagctctaattataaccttaggccaaaagctgttgaattactgataaaaggaagaaaaattaaaattattaaaaataggcaaaagcatacagatttaatttagc

SEQ ID NO: 275720 - DNA, 662 bp, Unknown
  Bacterial polypeptide expressing nucleotide sequence isolated from the Sargasso Sea
actggggaaaaaagataataaatttggagtagatgataaaactcttatgaaaataattggatattgcaaaaattcaaaatacttaagtctaaaatgtctaagtgttcatattggaagtcaaatattaaattacaagccatatatcaaaatgttaaaagttttaactaaaaccttaaatcaaatcgattataaatttgattttatcgatttaggtggtggtatgggtatcacttataataagaataataaaaaacttaattacaaaaaatataactatgcaataaaaaaatttttgaaaaattataaatcaaaaataatatttgaacctggtagatctataataggaaatactggaactttaatttctaaagtaatttacatcaaaaaaaatggaaaaaaaaaatttataataatagatgcagcaatgaacgatctaatgcgaccagcattgtatggtgctgatcataagatattaccattgtcaaagattaatatgttttccaatatggttacagagtttgtgggtcctatatgtgaaagtactgataaattctctactttaaaaggatttcaaaaattagaagaaaaagatttaattgctatttgcgatgttggtgcgtatggaatgtctctcagttcaaattataatatgaggcccaaac

SEQ ID NO: 275721 - DNA, 933 bp, Unknown
  Bacterial polypeptide expressing nucleotide sequence isolated from the Sargasso Sea
aatgcaatacaaaaatcaaatttttcatgttgataaagtttcaactgacaaactagcaaaaaaatatgggacaccattatattgctactcatatttgcaattaaaaaataatattattaattttaaaaaaaattttgagaaaactaaccctttagtttgtttttctcttaagtccaattcaaatataaaaatattgaatgagattaaaagattaaattgtggagctgatgtagtatctaaaggagaaatgatgcgtgcaattaaatctggaataaataataaaaaaattgttttttcgggagtaggaaaaacatattcagaattagaatatgcaataaataaaaatattttattaatcaatgtggaatctgaaagtgaaattttaacaattgaaaaaatagcaaaaattaaaaaaaaaaaggttaatataggtattagactaaatccaaatattgatgcaaaaactttaaaacaaatttctacaggaagagaacaagataaatttggattgatagaaaaagattttattaaattagcaaattactcaaaaaaatctaattttttgagattgatgtgcattagtgttcacattggtagccaaatactaagtcataaaccttatgaaaaaatgcttaaaacaattgatagaataattaaaaaagttgatcataaatttgattatattgatttaggcggtggaatgggaattacatatgaaaaaaaaaataaaagacttaattatcaagcgtataattacttgttacaaaaatttctaaaaaataaaacttgtagaataatttttgaacctgggagatctattataggcaatgcaggtatttttatttctaaaattatttatattaaaaaaaataaaaataaaaattttattatattagatgctgctatgaacgatttaatgagaccagctctcta

SEQ ID NO: 275722 - DNA, 855 bp, Unknown
  Bacterial polypeptide expressing nucleotide sequence isolated from the Sargasso Sea
aacgctaacttggccgtactgaatgtgctggcacgtttaggcagtggttttgatattgtgtctggcggtgagttggcaagggttatcgaagcaggaggctcccccgctaaagtggtgttttctggtgtgggaaaaaccgttgtcgagatggagcaagcgcttaatctgggtatttactgttttaacgttgaatcaagcgccgagcttgagcagttaaatctggttgcgggtcgtttaggtaaagtagcacccgtttcattgcggattaatcccgatgtggatgcaggaacccatccctatatttcgaccggccttaaggaaaacaaatttggcattgctatggatgaggctgaaattgttttcgcccgtgcccatgcgttaccacatctaaaagtgaaaggtgtcgattgtcatatcgggtcacaactcactgagatccaaccatttcttgatgcaatggatcgtatgctggcgctcatagatcgtctggctgagcaaggaattgttatcgaacatttcgatgtaggcggtggtttaggagtgacctatgatgatgaaacgccaccacatcccgatgtatatgcggctgcgttactcaagcgtttaggcaaccgtaaacttaaactgattttcgagcctggccgtgcgattgcagctaatgcggggatttttgtcactcaggtgctttatctgaaagaaaacagcgacaagcgttttgcgattgtcgatggcgcgatgaatgacctaattcgccccgcactttatagtgcatggcaaaatattatcccagtagcgccaagagactctgaggcctatgaatttgatattgtaggccctgtgtgtgaaacaggcgat

SEQ ID NO: 275723 - DNA, 631 bp, Unknown
  Bacterial polypeptide expressing nucleotide sequence isolated from the Sargasso Sea
ccacataggaagccaaatattagatcataaaccctatggaaaaatgcttaaagctgttagccatattttagacaagactaatcatcaattcgaatttattgatttaggtggtggtatgggaattaattattctgataaaaacaaaacgcttaattataaacagtataacactgcaattaataattttctcaaaaaacataaagtaaaaattatttttgaacctggaagatctataattggtaatattggtattttaattagtaaagtcatttacattaaagacagtggtaggaaaaaatttataattttagatgctgctatgaatgatcttatgagacccgcattatatggagcatttcataggactttgccagtgataaaatctaataaaatatcaaataaaccttatgaatttgttggtccaatttgtgaaagtaccgataaatttataactttaaaaaaatttcaaaaattaaaggaaaaagatttaatagctatatgcgatgttggcgcctacggtatgtctttaagctcaaattataatttaagacctaaaccaatagaattattaattaaaggttcaaagattaatgtaattagaaaaagacaaaagtacacggaaataatctag

SEQ ID NO: 275724 - DNA, 843 bp, Unknown
  Bacterial polypeptide expressing nucleotide sequence isolated from the Sargasso Sea
agggagatgggaaattgtcagttggtggatgctctatcgaagaactagttaaaaaatatgattctcctctctatattttagatgaaatcactttaagaaattcttgtagagcgtacaaaaaagcattagaaaaatattacccagggaaatccttgcccatatatgcttctaaggcaaatagttccattttcatgagtagtcttgtttcctcggaaggtttaggacttgatgcggtttcagaaggagaactattaactgctattaaaggtggggttccaaatgaaaaaattgtttttcatggtaacaacaaatcagacaaagaattagaattcgcagttagaaataacattaaggttattgtagataatgattatgacttagaaagattagatgagatctcaaattcatttaatcatgatttagaaataatgattcgctttactccggggatagaatgccatacacatgaatacattagaactggatcatttgatagcaaatttggtttcggaatagaatatttaaatactctatttaacaaaatcagcaatacaaagcacctaaaattaaaaggtttacatgctcatattggttcacagatttttgaactagaacctcataaggatctgggagaaataatggtaaaggttatcttaaacgccaaaaagtttggacataatattgaggaaataaatgttggagggggtttaggtatcaggtatacagaaagtgatgatcccccttcaattaatgaatgggtaaaaacaatttcctcttccgttgttgaagcttgtaaaaaaaacaacttagattttcccacattaatgtgcgaacctgggtaga

SEQ ID NO: 275725 - DNA, 805 bp, Unknown
  Bacterial polypeptide expressing nucleotide sequence isolated from the Sargasso Sea
caaccccgatgtggatcccaacacccacccctatatcgccaccggtcttcgagagaacaagttcggggtgccggcagcggatgcgccggcgctttaccgaaaagccaatgcaatggcggggattgaggtcgtcggcatcggctgccatatcggctcgcaactgaccgagattgcccctttttgcgatgccgtggaaagagtcctcgacgtggtcgatacccttgcccaggacgacattgagttatcacacctggacctggggggtggcgtgggtatccggtactccgatgagacgccgccggatccgaaagactatgtgcaggcgattctcgccatcctaaagcgtcgaaactgcgatcttgccgtgaccctggagccgggccgcgcgattgcaggaaatgcgggcgtgctgctgagttctgtggaatacatcaagtcgggacccgagaaagattttgtgatcgtcgatgccgcaatgaacgatctgctgcgtccggctttgtatcaggcctggcatgaggtcgtccgggcagatcgtggcccggaccgcgagatgcatacatgcgatgttgtgggaccggtgtgcgagacgggtgatttcatcgcccgcgaccgccagttagcggtcgcgccgggcgatctggttgcggtccgttcggtgggagcttacggtttcgtcatggcatccaactacaacacccggccgcgcccggctgaggtgatggtggatggtgatcaactttacgtggtccgcgagcgtgagcagaccgccgatcttttctcggcggaaacgctgctgccgtga

SEQ ID NO: 275726 - DNA, 913 bp, Unknown
  Bacterial polypeptide expressing nucleotide sequence isolated from the Sargasso Sea
tggaaaaactttttcggaattacaatatgcaattaataaaaatattttattaattaatgtggaaactaaaagtgaacttttaattatcgaaaagatagcaaaacaaaaaaaaaagaaagttgatataggaataagactaaaccctaatatagatgctaaaacattaaaacaaatttccacaggtaaagaaggagataaattcggattaactgaaaaagaatttattaaaataacaaaatatgcccaaatatcaaaatttttaagtttaaaatgtattagtgtacatataggtagccaaatacttagtcataaaccttatgaaaaaatgctgaaaacaatagatcacttaataaaaaaaactaatcataaatttgattttattgatctaggaggagggatgggaattgattatgaaaaaaataataaaatgcttaattacaaaatttatagctcattgataactaagtttctaaaaaaaagaaaatctaaaattattttagaaccaggcagagctattattggtaatgcaggaattttaatttcaaaaattttatatattaaaaaaaataaaaataaaaattttgttatactggatgctgcaatgaacgatttgatgaggcctgctttatatggaacaaaacatcaaattattccatctgtgaaaaacaataaaattacaaataaaatctttgaatttgttgggcctatatgtgaaagtactgataaatttttaacaactaaaaaataccaaaaccttaaagaaggtgattttattataatttgtgacgtaggtgcttatggaatgtctttaagttctaattataatgtaagaccaaatcccgctgagatccttataaaaaactctaaaatacaaattataaaaaaaaggcaaaaacttaacgatatcaattag

SEQ ID NO: 275727 - DNA, 826 bp, Unknown
  Bacterial polypeptide expressing nucleotide sequence isolated from the Sargasso Sea
ggtcttagtgctcggatcggcgtccgtgtgaacccgaacgtactggcttcaacacctcatgagtacactgcgacggggcattctgatacgaaatttggagtgccgtgggaggaggcccgcgctctctatcgttgggcgctcgaacgagactcactagacccgatcgggatcgacgtgcatatcggctcgcaaatcgttgaaatcgaaccctatgtgcttgctctcgagcgtgttcttggggttgtgaaagatcttgtggcggagggcgtacccctaaaatatctcgacattgggggaggctttgggatcagctatggtcaagggtctggtctcgatattggagccctggcgaaagaaattgtgcccagagtgctagactctggcttgcgtctgattctagagcccggacgctcgcttgtggcggaagccggcgtgtttgtgactgaagtacaatacgtgaaaaattgtggtcagaagaccttcgtaattgtagatggtggtatgagtgaactgattcgtccgagccactacgggggttatcatcaaatcgagcctgtagggccaatcgacggtcgtgctgaggcggtcgttgacgtggttgggccgatttgtgagaccggggattttctcgcgctcgatcggtcaatgcctttaccgatggagggtgaactcctagcggtgagaactgcgggtgcatacggcttcacgatggcttccaattataatggacgaccacggccagctgaggtgctagtagacggcatcgacgtacggcttgttcggcgccgtgagacatacgaggaccttatcagtggggaagtatgac

SEQ ID NO: 275728 - DNA, 802 bp, Unknown
  Bacterial polypeptide expressing nucleotide sequence isolated from the Sargasso Sea
atggattactttctatataaaaacagtgaacttttctgtgaagacattaatcttcaagaaatagcgaaagagtttggtactcctgcatatgtttattcaaaaaaaactatagaaaggcatatcgatgtttataaaaatgcctttcaaaaaaaagataacttaatatgtttttcagtaaagtctcttagcaacatttctatcttaaatatcctaaaagaaaaagattgtggttttgatattgtttcaggaggagagcttcaaagagcgcttcatattaaaacaaatccaaaaaaaataattttttcaggtgtcggaaagtcaaatgaagaaatattagaaggtataaataatgaaatactttcttttaatattgagtcagagtctgaattatttagaattgaaaaaatagcttcagagaataataaagttgttgacgttgctattagatttaatcccgaggttgactctgggggacatgaatatattaaaacaggaaggaaaggagataagtttggtatatcaccgaataatcttgttctaaaattaggtaagtatatctatggctcaaaacatttaaggcttattggtttagcgtgtcatattggctctcaaataggagatcttgagagttacaaatcaacggccataagtattaggcagcttgctgaggaaatagataaaacaggaaatgaattaaaatttttagacctgggtggaggacttggcatcccttataacaatgacaaaactccatcacctgatgatttagtatctacaattgaagaagaattaaaagaataga

SEQ ID NO: 275729 - DNA, 976 bp, Unknown
  Bacterial polypeptide expressing nucleotide sequence isolated from the Sargasso Sea
ttgaagcttgcattaaaatcaaatattaaaccaaataaaatagttttttcgggagttggaaaaacagttgaagagctaagatatgcaatctcaaagaagatttttttgataaactgtgagtcatttagtgaggtgaaattgattaattctttatcaaaaaaaatgaaattaaaaacaaaaattggtctcaggctaaatccaaatattaatgcaaagactcatagtaaaatatctactggtaacgataaagataagtttggattatcaaaattagagttcaaaaaagtgattatgaattttaaaaatagcgattttattgaaatatcagctttaactgttcatattggtagtcaaattaaggaagtttttccatttaataattgtcttaattttttaaacaaaactatagctgatttaaagaaagttaatatcaaaattaaatacgttgatttaggaggaggtatgagtattccatatgactttaaggaaaccaaatttcctctgaaaaagtatgcaagtaatgtttataattttaagaaaaaaaacaatgtaaaaataatatttgaacctggacgttttttaagtggtaatgttggcattattatatcgaaaattatttacataaaagaaggagccaaaaagaagtttatagtaacagatgcagcaatgaatgatttaattagaactgctttatatgatgcaaatcatacaatattgcctattaatcgtaggaaagaaattaagtctaggatagagtttgttgggccaatttgtgaaagtagtgataaatttggcgaatataaaacgttctccaaactagaagaaagtgactatatatgcattactaatactggcgcttacggtagaagcctctcatcgaattataatatgagacctttaattgcagaattgcttattaaaaataacaaaattttaattataagaaaaagacaaaatataaatcaaataccgtaaa

SEQ ID NO: 275730 - DNA, 1216 bp, Unknown
  Bacterial polypeptide expressing nucleotide sequence isolated from the Sargasso Sea
aatgaaatacataaataaaatactaacaatagaaaaaattaatctccaaaaaattgcaaataaatttggaactccattttattcttactcctattctaaattaaaagaaaatattaataattttaaaaaaaacttcagatctttttcaccacttatctgctttgcggttaaatccaacacaaatattaatataattagagaaattaaaaaatttggattaggtgctgatgttgtttcagtaggagaacttatgatggcactaaaagcaggaattaatccaagcaaaatagtattttctggtgttggtaaaacaacaagtgaaatcagctttgctattgataaaaaaattttgcttattaacgctgagtctttaagtgaaataaaagaaataaatcgaatagcaaaatcaaaaaataaaagaataaaaattggtgtaagattaaacccaaatacagatgcaaaaacattaagtcaaatatcaactgggaaaaaagaaaataaatttggcgtaaataaaaatacattctataaaattataaattattgcaaaaattcaaaaaatattgatttaaaatgtctaagcgttcatataggtagtcaaattttagaccatagaccttatgaaaaaatgcttaaagcggtcagtcaaattcttaataaaacaaatcacaaatttgaatttatagatttaggtggaggtatgggcattacttacactgataaaaataaaaaacttaattataaaaaatacaacacagctattcttaaatttttaagaaaacataaagttaaaattatatttgagccaggtagatcgattattggtgatactggtacattagtgtcaaaaataatctatataaaagatagtggaagtaaaaaatttatcattttagatgcagcgatgaacgatttaatgagacctgctttgtatggtgcgtttcataaaaccttgcctgtttctaaatctaacaaaacatctaaaaaagcatatgaatttgtaggtcctatttgtgaaagtacagataaatttgttacattaaaaaaatttcaagtgttgaaagaaaaagatttaatagcaatatgtgatgtgggagcttatggaatgtcactaagctcaaattataatttaagacctaaaccagtagaattattaataaagggatcaaaaattaaagtaataagaaaaagacaaaagcataaagatataatttag

SEQ ID NO: 275731 - DNA, 1231 bp, Unknown
  Bacterial polypeptide expressing nucleotide sequence isolated from the Sargasso Sea
atgatcaagaaactaatagatgataataaaattcatgattttgcgcagaaagtaactactccattttatatttattcttctgataaaatcattgagaattacaattcttatgcacgccctttgactgagattgattctctcatatgttattcagtaaaagctaattcgaatctttcaatactgaaaatgctctctaacaacaattcaggttttgatgtagtttcaaaaggcgaaattgagagagtacttcttgcaggtggcgatgctgaaaaaattgttttctctggtgttggcaaaaccatggatgaaatagagtttggtatcgctaagaacattctatgctttaatgttgaatcattagatgagcttaagtcaatatctgaggtcgcgtcttctctaaacaagagggctaatatatcaattcgtgttaatccctccattgatcccaaaactcacccttatattacgacaggcttgagtgagaataaatttggtatccatgaaaatgagatttttgacgcatacaagatggccaaagatttagataatcttaacatcgtcggcatagattatcatattggttcacaaattactgatttacaacctttcgttgattctgcaactaaggtacttgaaatagttcatgcgctgaaagagatgaaaataaatttatcacacattgatgttggaggtggtttaggaatcacgtataaagatgaaaaatctattaagagagaatcatttttagataaattaatagaaattatctccccgacagatctaaaactcattgttgagcctggaaggtctattgttggtgatgctgggctgcttgttacaaaaattttaaatattaagaattctggagacaaaaattttgcaattgttgatgctgcaatgaatgatttattaagaccccctctgtacaatgcacatcataggattaaaaacattagcaaaccttctaattccaaagaagctatatatgatgttgtcgggccagtctgcgaaacggctgactatctaggcaaagatagaaaattatcaattcaaaagggtgattacttgatcgtggaggatgttggtgcatatggcttttcactctcatctaactacaattctaggccaagaattgcagagtatattctgttagaagatgaaattaaactaatacgaagcagggaagatttctcgaatctaattttagacgagagtgatctcatgatttaaa

SEQ ID NO: 275732 - DNA, 1216 bp, Unknown
  Bacterial polypeptide expressing nucleotide sequence isolated from the Sargasso Sea
atgagatatataaacaataaattttttattgaaggaaaaaaagttgagagtctgacaaaacaatttaatacacctctatactgctactcttataaaaatttaagagaaaatgtagagaattttaaaaaagcttttgaggaaataagacctttaatttgtttttctgtaaaatctaattctaatatttcactattaaaagaaataaaaaaactcggccttggggcagatgtagtttcaaagggcgaattatatgcatcacttaaagctggtattgataaaaataagatagttttctctggagttggtaaaacaagagatgaaattgagtacgcaattaagcaaaaaatattattaataaattctgagtcattgagtgaagttttgacgattgaagcggttgcaaaaaaactaaataaagttgttgatataggactaagattaaatccagatacagatgctgaaacattgaaacaaatttcaactggtaaaagtgaaaataaatttggtgtagataaaaagacttttgtaaaaattattaatttgatgaaacaatcaaaatttataaatattaaatgcttgagcgttcatatcggcagtcaaatcttaaaccacaaaccctacgaaaaaatgctaaatgttcttgataaacttttaaaaaatttagattataaatttgagatcattgatttaggtggcgggatggggataaactatgataataaaactaaaaaacttaattatacaaaatataaaaaatcaataattaaatttaaaaataaatacaattgtaaaataatttttgaacctggaagatctataattggaaatgttggtatacttgcatcaaaagtaatttatttaaaacataacaaaacaaaaacatttgtaatattagatgcggcaatgaatgatttgataagaccagctttatataatgcaaaacataggataattccatccctaagaaatatgtcacgatcaaagaaaatattagaatttgtaggcccagtatgtgaaacaactgataaatttttaacagaaaggaaatttcagaatataaaagaaaatgatattatgattatttgcgatacaggtgcctatggttattcattatcatctaattataatcttagattaaggcctgctgaaattttgattaaaggaaataaagtaaagattataagaaaaagacaaaaaataacagatattatctaac

SEQ ID NO: 275733 - DNA, 1216 bp, Unknown
  Bacterial polypeptide expressing nucleotide sequence isolated from the Sargasso Sea
atgagatacgttaacaaaagactaacggtggaaaaagttaatttcctgagaatagctaaaaagtttggaactcctttttattgctattcatattcaaaactaaaagaaaatataaataaatttaaagaaagttttaaatcttttgcacctttaatttgttttgcagttaaatctaataccaatgttaatttaattagagaaattaaaaaatttggtttgggggctgatgtggtttctttaggtgaacttatgatagccttaaaagcaggaataaaaccaaataaaatagtattttctggagtcggaaaaacttctagcgaattaaattttgcaataaataaaaaaatactacttattaatgctgagtcattgagcgagataatggaaataaacaggattgcaaaattaaaaaacaaaaaagttagagttggagttagacttaatcctaacacagatgcaaaaacacttaatcaaatttctactggaaaaaaggagaataaatttggagtgaataaaaatacatttcatgaaattgtagaattttgcaatagttcaaaaaatatagacttaaaatgtttgagtgttcatataggtagtcaaatattagaccataagccatatggaaagatgcttaaagctgttagccatatcttagaaaaaactaatcatcagttcgaatttattgatttaggtggaggtatgggaattaaatattctcaaacaaataaaaaacttaattataaaaagtacaatactgcaattaataattttcttaaaaaacataaagtaaaaattatatttgaacctggcagatctataattggtaataccggtatattaattagtaaagtaatttatattaaagatagtggtagaaaagaatttataattttagatgctgccatgaatgatcttatgagacctgcgctttatggggcaactcatcgaacattgccagtaataaaatctaataaaatattaaataaaacttacgaatttgtcggtcccatatgcgaaagtacagataaatttataacgttaaaaaaatttcaaaaattagaggaaaaagatttgatagctatttgcgatgttggtgcttatggcatgtctttaagctctaattacaatttaagacctaaaccaatagaattattaattaaaggttcaaaaattagcgtaattagaaaaagacaaaagtacgctgaaataatctagc

SEQ ID NO: 275734 - DNA, 466 bp, Unknown
  Bacterial polypeptide expressing nucleotide sequence isolated from the Sargasso Sea
ctggcggcatatccacagctgtcactgatttttgaaccgggtcgcgccattatggccaatgccggcgtgctgctgaccaaagtggaatatttaaagccgggtcaggaaaagcatttcgctattgttgatgctgctatgaatgacttaattcgccctgcgctgtacagtgcatggcaatctattattgctgtgcagcaaaaacctgaaattccagccgtcacttacgatgtggtaggtccggtctgtgaaaccggtgatttcctcggtaaagaccgtgctttagccctggaaccaggcgatttactggtggtgcgctcagccggcgcttatggttttaccatgagttccaactacaacagcagacccagagccgcagaagtgctggtggatggtgaccgtagctatttagtccgccagcgcgagcaatggcaggatctgtggcacggtgaacagttggtaccctgaa

SEQ ID NO: 275735 - DNA, 743 bp, Unknown
  Bacterial polypeptide expressing nucleotide sequence isolated from the Sargasso Sea
aatttcaactggtaagaaagaaaataaatttggtgtaaatgaaaaaacattttatgaaataattgaatattgcaaaggttcacaaaatatagatcttaattgcctaagtgttcatattggaagccaaattttagatcataaaccatatgaaaaaatgcttaaggtggttgataatattctgaaaaaaacatctcatgaatttgaatatatcgatttaggcggtggtatgggaatttcttactcagagaaaaataaaaaacttaattataaaaaatataatttagccattaagaaatttttaaaaaataaaaaatgtaaaataatatttgaacctgggcggtctataataggaaatgctggaatattaattacaaaagttatttatataaaagatagtgaaagtaaaaaattcattatattagatgctgcaatgaatgatttaatgagaccagcattatatggtgcaattcataaaactttacctgttattaaatctggaaaaatttctaaaaaaacttatgaatttgtaggacctatatgtgaaagtacagacaagtttgtaactattaaaaattttcaagaacttcaagaaaaggactatattgcaatttgtgatgtaggtgcttacggaatgtcactaagctcaaattataacttaagaacaaaaccattagaaatattaattaaaaacaacaaaataaaaataattagaaaaagacaaaagcataaagatttgatttagc

SEQ ID NO: 275736 - DNA, 1161 bp, Unknown
  Bacterial polypeptide expressing nucleotide sequence isolated from the Sargasso Sea
gaagaaaaaaaattcatttctaaaacaaaagattgatctagaaagtcctaatagaaatatcgtacctattactacaaccattggaggagatggaaaattgtcagttggtggatgttctatagaagaattagttaaaaaatatgattctcctctttatatcttagatgaaatcactctaagaaattcttgtagagcatataaaaaagcactagaaaaatattaccctgggaattcaatgcccatatatgcctctaaggcaaatagttctatttttatgagtagtcttgtatcctcagaaggtttaggagttgatgcggtttcagaaggagaactattaactgctattaaaggtggggttccaaatgaaaagattgtttttcatggcaataacaaatcagacaaagaattagaattcgcagttagaaataacattaaggtaattgtagataatgattatgacttagaaagattagatgaaatctcaaattcattaaatcgcgatttagaaataatgattcgctttactcctgggatagaatgccatacacatgaatacattagaactggatcatttgatagcaaatttggtttcggaatagaatatttgaatattttatttaacagaatcagcaatacaaaacatttaaaattaagaggattacatgctcatattggttcgcagatttttgaactagaccctcataaggatcttggagaaataatggtaaaggtcattttagacgctaaagaatttggtcataatatcaaggaacttaatgttggcgggggtttaggtattaaatataccgaaaatgatgatcccccttcaattgatgaatgggtagaaacaatttcttcttctgttgttaaagcttgtgaaaaaaataaccttgatttccctacattaatgtgcgagccaggtagatcaattgtatctacagcaggtataactatctacaaaattggggcttttaaagaaattcctggtatcagaacatatttatctgttgatggtgggatgagtgataatccaagacccattacatatcaatcaaattattctgcatgtttagtaaataatccatttaatcttaattccaaaaataaatatactattgctgataagcactgcgaatcgggagatgttttgtttaaggaaat

SEQ ID NO: 275737 - DNA, 1090 bp, Unknown
  Bacterial polypeptide expressing nucleotide sequence isolated from the Sargasso Sea
atgccacgctcgctttacgccaccgatactgacctgactgccgagaacctgcttcgcctgcctgccgaatttggctgcccggtgtgggtctatgacgcgcagattatccgccgccagatagcccagctcagccagttcgacgtggtgcgttttgcccagaaggcctgctccaatatccatattttgcgcctgatgcgtgaacagggcgttaaggtggactccgtctccctcggggagattgaacgtgcgctggcggcaggttatgacccgcagcagcatccggaagatatcgtttttaccgccgatctgattgacgaggcgacgctggagcgcgtcaaggccctgcagattccggtgaatgccggttcagtcgatatgctgagccagctgggggaagtctctccaggccatcgcgtctggctgcgcgtcaacccgggctttggtcacggccacagccaaaaaaccaacaccggtggagaaaacagcaaacacgggatctggtacagccatctgccggcggcgctggaagtgatgcgtcgctatcagctccagctggtggggatccacatgcacattggctccggagttgattatggccacctggaacaggtttgcggcgcgatggtgcgtcaggtggtggagtttgggcaggatctgcaggcgatctctgccggcggcgggctgtcgatcccgtatcgcgaaggtgaagaggcgatcgataccgatcactactacggcttgtggaacgccgcgcgcgagcagatcgcccgacatctcggccatccggtgaaactggaaatcgagccgggtcgcttcctggtggccgaatccggggtgctggtctctcaggtacgtagcgttaaagagatgggaagccgccactttgtcctgattgatgccggttttaacgatctgatgcgcccgtcaatgtacggcagctatcaccatattaccgccctggcggcggatggccgcaacctgagcgccgcgccgcttatcgacaccgtcgtggccgggccgctgtgtgaatcgggcgacgtctttactcagcaggaagggggcaaaggtggagacgcgtttgctgcctgaa

SEQ ID NO: 275738 - DNA, 821 bp, Unknown
  Bacterial polypeptide expressing nucleotide sequence isolated from the Sargasso Sea
catggaagaaaaacaatcttttttaaaacagaaaattgactttgaaagtcctaataaaaatatcgtaccaattactacatctattaaaggagatgggaaattatcagttggtggatgttctattgaagagttagttaaaaaatatgattctcctctttatatactagatgaaatcactttaagaaagtcttgtagagcttacaaaaaagcattagaaaaatattacccaggggaatcactccctatatatgcttccaaggcaaatagctctatatttatgagtaatcttgtttcctcagaaggtttaggacttgatgcagtgtcagagggagaattattaactgctctaaagggtggggtaccaaataaaaacattgtttttcatggcaacaacaaatctgacaaagaaattgatttcgcaattagaaataacatcaaaataattgtagataatgactatgacttaagaagattagaggaaatatcaaattcattaaatcatgatttagaaataatgattcgctttactcctgggatcgaatgtcatacacatgaatatataagaacaggttcatttgatagcaaatttggttttggaatcgaatatttaaataatttatttgcaagcataagcgaaactaaacatttaaaattaaaaggaatacatgctcatattggttcccagatctttgaactagatcctcataaggatctaggagaaataatggtaaaggttattttagatgccaaaaaatttggccataatattaaagaacttaatgttggtggaggtttaggtatcaaatatacaattaatgacg

SEQ ID NO: 275739 - DNA, 993 bp, Unknown
  Bacterial polypeptide expressing nucleotide sequence isolated from the Sargasso Sea
gcacctccccggttgcgacaagtcagttgccttgggcagctgggggagttgatctcagcagccccaaccgcaatcttgctccgcttacgaccgacattggtccggaaggtcgcctgcgtgtgggtgagtgcgtcctgagcgagttggctcagcgctttggtacgccgctgtatgtcattgatgagcgcagcttgcgtcaggcgtgcagcgcctatcgcaaggcgttgcaacgtcattacccaggcccctctttggcggtctacgcctccaaggccaacagcagtttggcaattacagccgttgtggcttcagaagggctaggcctcgatgcggtctcagccggcgaattgttgacagcactggaaggtggcatgccgcccgagcggatcgtgctgcatggcaacaacaagtccagtgaggagctggcgcttgcagttcagaacggcgtgaccgtggtggtggacaactggcatgacatcaccctgttgcaggaattagcccagggccgaaccgagccggtggcgctaatgctccgcttcacccctggcatcgaatgccacacgcacgaatacatccgcactggtcatctcgacagcaagttcggctttgatcccgatcagcttgagcaggttctgactcacttggctgaatgccgttgggccagggtgcaaggccttcatgctcatattggttcccaaatttttgaggttgaaccccaccgagacctagcggcagttttggctgatgccttggttttggcccgccgcttggggcatgacccaacagacctcaatgtgggaggaggcctagggatccgctatgtggcttccgatgatccgccgagcattgacggctggattcaggtggtagccgaagccatggtgagtgcctgtcgggagcgcaatcttgagcttcctcgtctgctctgtgagccgggggcgatccctagtggctcctgcaagcgtgacgttgtacacagttggcagccgtaag

SEQ ID NO: 275740 - DNA, 850 bp, Unknown
  Bacterial polypeptide expressing nucleotide sequence isolated from the Sargasso Sea
atgctaacttataaaaataatgacccgtatattgagggtacttctttatatgacttggtgaaagtttgtcaaacacctttttatgtgtattcacaagaaaaaattataaatcaagtaaataaaactaaagaaattttaggtaacaatattttttattcaattaagtctaattcaaatcaagctattttgaaattaatgaactcgttagatattggagcagatgtagtgtcagttggtgaattaaaaagggccttggaagctggtttcaatccaaataaaataatttttgaaggtgttggaaaatctgaacaagacttactctatgctatgcataaaaatatacgtttaattaatactgaatctttagaagaaataaaactactcgataatttagcaaatgaaaaaaataaaatcgttgatattggtgttagacttaatccagatgttgatggtgagactttaagtaaaatttcaacaggaaaaaaaactgataagtttggtattgaatttgaaaatttagataaaattatcaaattagttaaaagttgtaaaaatttaaatttaattggtattagttgtcatattggaagtcaaattagtaaaattgaggcatataaaaatacgttttctcaaatgaaaatggctgcaaataagtttattgaatcaggtattaatatcaagcatgtagatttgggtggaggttttcatgttaaatatgaagattctgatcctaactttaatattgagatggtaaaagaagaacttgataattgttttacgcaaacaaaatatgaattatcgtttgagcctggtcggtatttaattgctgaggctggagttacagttactt

SEQ ID NO: 275741 - DNA, 739 bp, Unknown
  Bacterial polypeptide expressing nucleotide sequence isolated from the Sargasso Sea
atgaataataaaacttttgatggatcagatatattcccaaataattcttttgttaatgaaaaaaataatatttccataaatgatgttgatcttaaagacctagctgaagaatttggaacaccattatatgtttatgacgaagaaactataattaatacaataaaagattttcaaaattcgtttaattctgaaattgaaaatagtgttatttcctactcaactaaagctttttctaacccctacattctaaatttattaaatgagaatgccatgagcatagatgttgtaactggaggtgaactggcagtagcaaaatacgtagatttttctgcagaaagaattaatttccatggaaacaataaatctgtggaagagctttctgaagcagtagattatggaataaatcatattacaattgattcatttaatgagattgaaaacctcaagagaatatgtgaatctaaatcaattgatcaagatattatgataagagtttcaccttcaatagatcctcatacccacttacttacaaccacaggaattttagattctaaatttgggttttctatagaaacaggagatgcagaaagagctatagaaaagataatgaaaattaaagccttgaatttgcaaggattacatttccatttaggttctccaatttttgaattagaaccgtattctgaagctatagattatgtatataaatttgcttctgaaatgaaaaaaaagtatggtt

SEQ ID NO: 275742 - DNA, 1246 bp, Unknown
  Bacterial polypeptide expressing nucleotide sequence isolated from the Sargasso Sea
tatttcgcctacagccaaggtcagcttcatgctgaacaagtggctgtttctgatatgcagccccagcatggaacgccggtttacatctattcacgtgcaacgttagagcgtcactggcacgcatttaatgatgccattggtgagcatccccaccttgtgtgttacgcggtaaaagccaattcgaacatcggtgtattaagcgttctagccaaattaggttcaggctttgatatcgtttcagcaggtgaactcgctcgcgtaatcgaggccggtggcgatgcaagtaaggtagtattttcaggcgttggtaaaaagcatgatgaaattcgctatgcgctagaacaaggcattatgtgtttcaacgtagaatcagagccagagcttcatcgaattaaccaggttgcgggcgaaatgggcgtgaaagcccctatttcactgcgcataaacccggatgtggatgccaaaactcacccttatatttctacaggcttgaaggcgaataaattcggtattgcccgtgagcgagcgcttgctacctatgaattggccgcatcgctacctcatttaaatgtagttggcatggactgccatatcggctcacagctaactgaaattggcccatttgtagacgccttggagcgcttgcttctgcttattgatgaattagctgaacgcaacattatcattgaacatttagatgtgggcggtggtcttggcgttacttataacaacgagcaaccacctcatcctaaagcctatgcacaagccatggctgaaaaaatggtgggccgtgaaaacctaaagcttattcttgagccaggccgcgctattgcagcaaacgccggtattttagttaccgaagttgaattcattaaagaaggtgaagaaaaaagcttcgccattgtcgacgctgcaatgaacgacttattacgccctgcactttactcagcatggcaaaaaattattcctgtaaaagaagaaactacggcaacaccacgtatttacgatgtagtaggcccagtgtgtgaaactggtgactttataggaaaagatcgtgaattagccattgaaccaacagacttacttgcagttcgcagcgccggtgcctatggttttgttatggcgtcaaactacaacagccgctgtcgtccagccgagattatggtagacggtgacgaagcaattgtggttcgtgaaagagaaaaacaaaaagatctctggcaaggtgagtacaaacttccgtaaa

SEQ ID NO: 275743 - DNA, 1240 bp, Unknown
  Bacterial polypeptide expressing nucleotide sequence isolated from the Sargasso Sea
atgtccctcgattcccgccagctcgcgacgctcgcgcagcaatacggcaccccgctgtgggtgtacgacgccgacgtcatccgcgaccgcatcgcccaactgcgccagttcgacttgatccgctacgcgcagaaggcgaattcgaacgtccatatccttaagctgatgcgcgaggaaggcgcgtgcgtcgacgcggtatcgctcggcgagatcgagcgcagcctcgccgccgggttcagccccgccggcgagccggaaggcgtcgtgttcacggccgacctgatcgaccgaccgacgctcgcggccgtgctgaagcacggcgtgaccgtgaacgccggttcgctcgacatgctcgcgcgcatcggcgagcacgcgccgggccaccgcgtgtggctgcgcgtcaaccccggtttcggccacggccacagcaacaagaccaacaccggcggcccgcagagcaagcacggcatctggatcgacgacgtgccgcgcgcgatcgagatcgtgcgccagtacgggctgaagctcgtcggcatccacatgcacatcggttcgggcgtcgactacggccacctgtcgcaggtgtgcgatgcgatggtcgatctcgtcacgtcgctcggccatgacatcgacgcgatctcggccggcggcggcctgtcgatcccgtatcgcgacggcgagccgcgcgtcgacgtcggtcattacttcagccagtgggacgccgcgcgcaagcggatcgagcgtcatctcggccacccggtgcgcatcgaaatcgagccgggccgcttcctcgtggccgaagccggcacgctcgtcaccgaagtgcaggccgtcaaccgccggccgaagcacgacttcgtgctgatcgacgcgggcttcaacgacctgatgcgcccgtcgatgtacggcagctaccacgcggtgtcggtgcacacgcacgatggcgcgctgcctgccggacggccgctcgtcgatctcgcgatcgcggggccgctgtgcgaatcgggcgacgtgttcacgcaggacgcgggcggcgtggtcacgcaccgcaagctggcgcagccgcaaatcggcgacctgctgttcctgcacgatgcgggagcgtacggcgcgtcgatgtcatcgaactacaacagccggccgctcgcgccggaagtgctcgtcgatcgcggcgcgccgcggctgatccgccgccggcagacgatcgacgaattgctcgcgctcgaaacgttcgagtaac

SEQ ID NO: 275744 - DNA, 1249 bp, Unknown
  Bacterial polypeptide expressing nucleotide sequence isolated from the Sargasso Sea
atgaaagacacaactcctgaaagaacttcacatattgatggcattcccgtaaaagaaattgcagagtcttttggaacaccctctatagtttattcatataataaaatatatgaaaactttaatgcaattaagcaatcttttgaatctgagaaaagaaaaatattttattctgttaaagctaactcaaatctttcaattttaaaaatatttaatgatttaggagcaggctttgatattgtttcattaggagagcttaaaagagttttatctgtcaatgtagacccaaaaaatattgtttactctggcgttggtaagtcatcaaatgagattctagaatgcatgaaaataaatattagatcatttaatgttgaatctattgctgagctagaaagaattattaaattatcaaatgagcataaatgtcttactagagtttcaataagagtgaatcctaatatcgatgcagatacacatgagtatatttcaactggagttgaggattcaaaatttggaatctcattaagtgatattaaagatgcagttaatttaacgcagaataattcttttgtggaattgataggaatagattatcacattggatcacaaatattagacattaaaccttttttgaaagcaatcgagtctgtagctcagctttataatgaattatgtgatttaggtttaaatataaatctcataaacatgggtggtggtttaggaattaattatactgatgagtctccgccatcattagaagaatttggtaaagaaatcacatctaagataaaagaatgtaatctggaaagcttagaattcataattgagcttggaagatcgttaatagggaataccggtatcttaataacaaaagttgagtatgtaaaaaaaggtgaccaaaaaaattttttaattgttgatgctggtatggataatcttattagaccatgtttatataattccaaacataagattcttaattcctcaagcagtaaagataatggacttaaatacgatattgttggaccagtttgcgaatgttctgactttcttggtaaagatgtagaaatatcagcgaagcaggatgatttaatatgtatatatggttgcggagcttatgtttcgtcaatgtctagtaattataattccagacttaaagctgctgagataataattattaatgataagtgtaaagagattagaaagagagacacatatgagcaactaactgaaaacgaaatattaatttagt

SEQ ID NO: 275745 - DNA, 1216 bp, Unknown
  Bacterial polypeptide expressing nucleotide sequence isolated from the Sargasso Sea
atgaaatataagaataaacaattaataacggaaaatatcaattttcaaagtttagcaaaaaaatttggcacaccagcttactgttattcatactcaaaattagaagaaaacataaataattttaaagaaaattttaaatccttttctccgttaatatgcttttcagtaaaatcgaataataatctaaatataattaaagaaattatgaaatttggtttaggagcagatgttgtttcaaaaggagagcttatgctggctttaaaagcaggagtaaatccaagcaaaatagtattttcaggagttggtaaaactagtgaagaaatcagttttgctattgaaaaaaagatactacttattaatgctgagtcaaaaggtgaaattgaagaaattaataaaattgcaaagcgaaaaaaaaaaatagtacaagttggtataagactaaacccaaatactgatgctaaaacccttaaacaaatttctactggtaaaagtgaaaataaatttggagttaacagtaaaagtttttacgaacttgtaaactactgtaaaaactcaagaaatgttaacttacaatgtttaagtgttcatataggtagtcaaatattagactataaaccatatgaaaggatgctcaaagctgtaagtaatataattaataaaaccaatcacaaatttaaatttgttgatttaggtgggggaatgggaatttcttacagtgataaaattaaaaagcttgattataaaaagtataactcagcgattaaaaattttttgagaaaacatgatacaaaaattatttttgaaccaggtagatcaataattggtaatacaggaactttgatatctaaaataatttacattaaggatggtgggactaaaaaatttattattttagatgctgcaatgaatgatcttatgagaccggctttatatggagcagttcataaaatcttacctgttaataaatcaaatagtatttcaagatatatttatgaatttgtaggtcctatttgtgaaagcacagataaatttgtaactttaaaaaaatttcaaaaactaaaagaagaagattttgtggccatatgtgatgttggagcctatggtatgtctctaagttctaattataatcttagaccaaaagctgttgaattacttgtaaaaggaagaaaaattaaaattattaaaaatagacaaaagcattcagatttaatttagc

SEQ ID NO: 275746 - DNA, 1213 bp, Unknown
  Bacterial polypeptide expressing nucleotide sequence isolated from the Sargasso Sea
atgagatttttaaatagtaaacttaagattgaaaatacaatcctgcaaaatattgctaaaaaatatggaacacctgcatattgttactcgtataaacaacttagagaaaatataaatgattttaaaaaaaattttaaatccatctcaccattaatttgttttgctattaaatctaatactaacttaaatttaataaaagaaataaaaaaatttggacttggagcagatgttgtatcaatgggtgaattaatgttggctcttaaggctggaattagtccaaagaagattgttttttcaggagttggtaagacttccaaagaaattaattttgcaattgataaaaatattttattaattaattcagagtccaaaagtgaaattatagaaattgataaaattgctaaaataaaaaaaaaacaagttaatattggtattagattaaacccaaataccgatgcgaaaactttgagtcaaatatcgacaggtaaaaaagataataaatttggagttaatgataaaacattttttgaacttgtaagatattgtaagaattctaaaaatattaatttgaaatgtttaagtgttcatattggaagtcaaattttagatcataaaccctatgaaaaaatgttaagaatattagataaaatcatcaaaaaaactcaatataaatttgattttattgaccttgggggaggtatgggcatcccatataataatgataaaaaactaaattataaaaaatatcattcagcaattaaaaaatttttaaagaataaaaaatctcagattatatttgagccaggtagatcaatagtcggcaatacaggagttttaatttcaaaagtaatttacataaaagagagttataaaaaaaattttgttattctagatgctgctatgaatgatttaatgagacccgcactttatggtgcagtacatcgcatcttacctttgttaaaaagaagtaaaaaatcaaagaaaatttatgaatttgttggcccaatttgcgaaagcactgataagtttacgtccataaaaaattttcaagaactaaaagagaaagattttatcgcaatttgcgatgtaggtgcctatggtatatcactcagttctaattataatcttagacctaaacctatagaaatattaattaatggatctaaaataagagtagttaaaaaaagacaaaagcaccatgagataatttagc

SEQ ID NO: 275747 - DNA, 829 bp, Unknown
  Bacterial polypeptide expressing nucleotide sequence isolated from the Sargasso Sea
atgcttaattacaaaaataatgacccatatattgagggtacttcattgcatgacttagtgaaagtttgtgagacccctttttatgtatattcacaagaaaaaattattaatcaagtaaataaaactaaagaaatattgggcaacaatattttttattcaattaagtccaattcaaatcaagctattttgaaattaatgaactcattagatcttggagcagatgtagtttcagttggtgagcttaaaagagctttagaggctggctttaatccaaataaaattatttttgaaggtgtaggaaaatctgaacaagacttactctatgctatgcataaaaatatacgattaattaatactgaatctttagaagagattaaattgcttgatagtttagcaacagaaaaaaatagggttgttgatattggtgtcaggcttaatccagatattgatggggaaactttgagtaagatttctacaggcaaaaaaacggataagtttggtatcgaaattgataaaatagacaaaattgttgaattagttaaaacttgtaaaagtctaaatttagttggtattagctgtcatattggaagtcaaattagtaaaattgaagcttttaaaaatacttttaatcaaatgaaaatggctgccaataagtttattgaatcaggtattaatataaaacatgttgatttgggtggaggattccatgttaaatataaggattctgatccagattttaatattgggatggtaaaagaggaactagatagttgttttacaaaaacaaactataaattatcttttgaacctggtaggtatttaattgctg

SEQ ID NO: 275748 - DNA, 666 bp, Unknown
  Bacterial polypeptide expressing nucleotide sequence isolated from the Sargasso Sea
aatcaaaaaatttaaatttaaaatgtttaagtgtgcatattggtagccaaatacttagtcacaaaccatataaagatatgctgaaagtagtgaataaagtaatcaaaaaatgtaattataattttgaatatattgatctggggggcggaatgggtatagattataatcataataattcaaagttagattttaaaaagtactctgaagaaatagaaaaatttttaaaaattaataattgtaaaattatttttgaaccaggaagatcaataataggtaattcaggtattttaattacaaaaattatatacattaaaaagggatttaaaaaagatttcattattttagacgcagcaatgaatgatttaatgagaccagctttatatggtgctactcataaaataatgcctctaaaaaaaataaagtcaaaatccaaaaaagtttatgaatttgtgggacctatatgtgaaagcactgatacatttttgacagttaaaaattatcaacaattaaatgaaaaagattatctaataatttgtgatgttggtgcttatggtatgtcattagcttctaattataatctaagacccaaacctctggaaatattaattaaaaactcaaaaattcaaattttaaataaaagacaaaaaatatctgaattaatgtaac

SEQ ID NO: 275749 - DNA, 1252 bp, Unknown
  Bacterial polypeptide expressing nucleotide sequence isolated from the Sargasso Sea
ttggatcactttaactacgacgccgacggccagcttcaggccgaacacacctcgctgcaacaacttgccgagcagtacggcaccccgctgtacgtctactcccgcgccacccttgaacgccactggcacgccttcgacaaggcggcgggcgacatcccccatctcatctgctatgcggtcaaggccaactccaacctggcgctgctcaacctgctggcacgccttggctctggctttgacatcgtctccggcggcgagctgtcgcgggtgctggcggcgggcggcgatccggccaaggtggtcttctccggggtggccaagagcgaagccgagatgcgcctcgcgctggataaagagatcctctgtttcaacctggagtcggaagccgagctggagcgtctgaaccgggtggcgggcggcatgggcaagaaggcccgggtgtcggtgcgggtcaacccggacatcgacgccggtacccacccctatatctccaccggcctcaagcagaacaagttcggcattcccatcgagcaggcgcccgccatctaccgcaaggcggcggccatggccaacatcgagatcgtcggggtggattgccatatcggctcccagctcaccgaactcaatccgttcatggaggcggccgacaagctgctgcggctgatcgacggcctggcggcggaaggcatccacattcaccacctggacgtgggtggcggcctgggggtcaactacggcgccgagcagccaccccacccgagcgaatatgccgaggcgctcaagcagaagctggcgggccgggatctgaccctgttgttcgaaccgggccgcgccatcgtcgccaacgccggcgtgctgctgacccgggtggagtacctcaagccgggcgagacccgcaacttcgcgctgatcgacgccggcatgaacgatctgctgcgtccctcgctctacggcgcctggatgaacatcatcgaggtggacagccgcacggcccacgagccggcgctgtacgacgtggtcggcccggtctgcgagactggtgacttcctcggcaaggagcgcaccctggcgatcgccgagggctccctgctggcggtgcgttccgccggtgcctacggctttaccatgtcctccaactacaacacccgtccccgcgccgccgaagtgctggtggacggagcgcagtcgttcctcatcagagagcgcgagcagttggccgatctctggcgcggtgagcatttactgccctgat

SEQ ID NO: 275750 - DNA, 1333 bp, Unknown
  Bacterial polypeptide expressing nucleotide sequence isolated from the Sargasso Sea
atgacaaaatattcagaattttcagggaatgagatatttcctaacaaatcccttatcaacagtaaaggaaatatatcaattgatagtgttgatctagaagacttagctaatgagtatggtacccctctctacgtttatgatgagagtacaattatttctaccatcaaagattttcaaaactcttttggagcagagctagataatgctgttatttcttactcaaccaaagctttttctaatccttatttgttaaaaatccttaaagaaaacgggatgagtattgatgtggttacaggaggagaacttgcagttgctaaacatatagactttcctccaaaaagaatgaatttccatgggaataataaatctccagatgaacttgaagatgcgataaattatggaattggtcatattacaattgattcttttaatgaaatagaaaacttgaaaaatatcacatcaaagttaggtgtaaatcaggacgttatgattagagtttctccatcagttgatcctgatacacatttattaacaactacaggaatccttgattctaagtttggattttcaattgaaacaggagatgctgaagaggcaataaaaagattagttcaaattaaatcattaagtttgatagggcttcattttcacctaggatctccgatttttgaattagaaccctactccgaagcaatagagtatgtatatgagtttgcttctgatatgagaaataaatatggaattgatgttaaggaatttagtcctggtggaggttttgcaattggctatttatcaaaaaagcaacctcctcctatttcagattatgcaaaaacaataggcgatgcagtaaaaaaagcctgcgatgttaatggttttgatataccaaaagttattttagaaccaggaagggctttagtaggtagatctggtgtaagcatttataaaattggttctataaaggaaattccaggtgttagaaattatatttcagttgatgggggtatgggagacaatataagacctgctctttatggttccgagtattcagttttttcagttaataaaattactgaaaataataatttaatgaaagctactatttcgggtaaattttgtgagtctggagattatttagctaaagatattgatcttccaaacccaacaattggagatttattagtactacctgcatcaggtgcttataatttagctatggcaagtaattataatatgcaaataagacctgctgtagtaatgattaaaaatggttcccattttcttataagaagaagggagagttatgaagatcttcttagtacttcagtattatgac

SEQ ID NO: 275751 - DNA, 1219 bp, Unknown
  Bacterial polypeptide expressing nucleotide sequence isolated from the Sargasso Sea
aatgaaatatagtaaaaataaacatttaacaatagaaaatatcaattttataaatttagcacaaaaatatggcacacctgcctattgttattcttactcaaagttaaaagaaaatataaataattttaaacaaaattttaaatccttttccccattaatctgcttttcagtaaaatcgaatactaatgtaaatataattaaagaaattaagaaatttggtttaggagctgacgttgtctcaaaaggagaactaatgttagctttaaaagcaggagtaagtccaagcaaaatagtattttcaggagttggtaaaactaatgaagaaatcaattttgctatagagaaaaaaatactacttattaatgctgagtcaaaaagtgaaattcaagagattaataaaattgcaaaacaaaaaagaaaaatagtacaagttggaataaggctaaacccaaatactgacgcaaaaacacttaaacaaatttctactggtaaaagtgaaaataaatttggggtaaatagtaaaacattttatgaacttgtaaactactgcaaaaactcaaaaaatatcagtctacagtgtttaagtgttcatataggtagtcaaatattagaccacaagccgtatgaaaaaatgcttaaagctgtaagtaatataattaataaaaccaatcacaaatttaaatttgttgatttgggtggaggaatgggaatttcttacagtaataaaattaaaaagcttaattataaaaaatacaacttagcaattaaaaattttttaaaaaagcatgatacaaaaattatttttgaaccaggtaggtcaataatcggtaatacaggaactttgatatctaaaataatttatattaaagatggtggagccaaaaaatttattattttagatgctgcaatgaatgatcttatgagaccagctttatatggagcagttcataaaatcttacccgttgataaatctaacagtgtctcaacaaatgcttatgaatttgtaggtccaatttgtgagagcacagataaatttgtaactttaaaaaaatttcaaaaactaaaagaaaaagatttggtagctatatgtgatgttggtgcctacggtatgtctctaagctctaattataaccttaggccaaaagctgttgaattactgataaaaggaagaaaaattaaaataattaaaaataggcaaaagcatacagatttaatttag

SEQ ID NO: 275752 - DNA, 628 bp, Unknown
  Bacterial polypeptide expressing nucleotide sequence isolated from the Sargasso Sea
atgctcacttataaaaataatgacccatatattgagagcacctctctatatgacttggtgaaagtttgtgaaacacctttttacgtgtattcacaagaaaaaattattaatcaagttaataaaactaaaaaaattttaagtaacaatattttttattcaattaagtctaattcaaatcaagctattttgaaattaatgaactcgttagatattggagcagatgtagtgtcagttggtgaattaaaaagagctttggaagctggttttgatccaaataaaataatttttgaaggtgttggaaaatctgatcaggacttactctatgctatacataaaaatatacgtttaattaatactgaatctttagaagagataaaacttctcgataatttagcaaatgaaaaaaataaaatcgttgatattggtgttagacttaatccagatgttgatggtgaaactttaagtaaaatttcaacaggaaaaaaaactgataagtttggtatagaattcgataacatagataaaataatcaaattagttaaaagttgcaaaagtttaaatttaattggtattagttgtcatattggaagtcaaattagtaaaaatgaggcctataaaaatacatttt

SEQ ID NO: 275753 - DNA, 796 bp, Unknown
  Bacterial polypeptide expressing nucleotide sequence isolated from the Sargasso Sea
gtgaatattggcttaagactaaatcctgatactaatgctcagacattaagcaaaatatcaacaggaaagaaagaagacaaatttggtgtaagtcaaaaaatctttaagaggattattaaaaattttaaaaactcgaaatatttgaagattaaatgtttaagtgttcatattggtagccaaattacttctaatagaccttacgaaaaaatgcttagagtaattaaaaatacaataaggaataataattacaattttgaatacgttgatttaggtggaggaatgggcattaaatataacttaaatcaaaaaaaactagatttaaatagttactcgtcccaaattaaaagttttttaaaaaaaactaatttaaaagttatttttgaaccaggtcgatttataattggtgatgctggaattttattatcaaaaataatatatataaaacaaacaaaacaaaaaaattttatcatattagatgcagcaatgaatgacttaattcgtccagctttatatgacgcaaaacataggatatctccatctgaaaaaaaaaattcgtttattaataaattacatgaatttgttggacctatttgtgaaacttcagataaattcttattaacaaaaaaatatcaaaaaatcgaacaaggagatatacttataattcatgatgttggtgcttatggtatggttttatcatctaattataatttgagaccaaaaccagcagaggtattaattaggggatcaaaaaatattattattaaaaaaagacaaagaattaatgacattgtttgaa

SEQ ID NO: 275754 - DNA, 870 bp, Unknown
  Bacterial polypeptide expressing nucleotide sequence isolated from the Sargasso Sea
cctggcgcgtcttggcgctggttttgacatcgtgtcccgtggcgagctggaacgcgtactggccgccggcggccaggctgacaaaatcgtcttctccggggtcggcaagagccgcgaagacatgcgccgcgccctggaagtcggcgtgcattgcttcaacgtcgaatccaccgacgagctggagcgcctgcaaatggtcgccgccgagatgggcgtgcgtgcgccgatctccctgcgcgtcaacccggacgtcgacgccggcacccacccgtacatctccaccggtctcaaagagaacaagttcggcattgccatcgccgacgccgaggacgtgtacatccgcgccgcccaactacccaacctggaagtgctgggtgtcgactgccatatcggctcgcaactgaccaccctgccaccgttcctggatgccctcgaccgcctgctggccttgatcgaccgcctgggcgagtgcggcatctacctgcaccacatcgacctcggtggtggcgtgggcgtgcgttatcgcgatgaagagccgccgctgattgccgactatatccaggccgtgcgcgaacgcatcgaaggccgcgacctgacgctgatgttcgagccaggccgctacatcgtcgccaacgcaggcgtgctgctgacccaggtcgagtacctcaagcacaccgagcacaaggatttcgccatcgtcgatgcggcgatgaacgacctgatccgcccggccctgtaccaggcctggatggatgtcaccgccgtgacgccgcgcacaagcgacgcccgcgcctatgacatcgtcgggcccatctgcgagaccggcgacttcctggccaaggatcgtgagttggcgcttgaagaaggtga

SEQ ID NO: 275755 - DNA, 859 bp, Unknown
  Bacterial polypeptide expressing nucleotide sequence isolated from the Sargasso Sea
gttgagtctcaagatgagctagaaaatattaatttattagcagccaaaattaataaagtagcaaatatttccttaagagttaatccagatatcgaccctaaaacccatccatatatttctactggtttaaaatcgagcaagtttggtattgctgttgaccaagctttagaaatttataaagtttcaaagaatttaaaaaatgtaaatccaattggaattgatgcacacattggttcacaaatattagattttcaaccttttagtgattcacttgataggcttgaggagctgttcaataaactgacagaattaaatataaatatagaatatatagatataggaggcggtttaggaattaaatattcagatgatgatataattccatccaaaaaagactttgcaaaaaaaattgtgaccaaaataaacaaacttaaatgtggactagttttagaacctgggagatcacttgttggtaattctggagtgcttcttacatctgttgtttatgagaaaaataattatggtaagaattttttgatcgtggatgcaggaatgaatgatattttaaggccttcactttacaatgcttatcataaaattgagaaagtatctgattctacagagaatgaaaagacatttgacattgtaggtccaatttgtgaaacaggtgatgttcttggacgtgatgttcaaataaataatgcaaagaaaggcgatattttagttattaattctgctggtgcatacggacatgttatgtcttcaaattataattctaaacctaaagctcctgaagttcttatacacgatggaaaggctaaagtaattaaaaaaagagaaactattgtgcaaattttag

SEQ ID NO: 275756 - DNA, 916 bp, Unknown
  Bacterial polypeptide expressing nucleotide sequence isolated from the Sargasso Sea
aaaagagctttagaagctggttttgatccaaataaaataatatttgaaggtgtaggaaaatctaaacaagacttactctatgcaatgcataaaaatatacgtttaattaatactgaatctttagaagaaataaaattactcgatagtttagcaaatgataaaaataaaattgttgatattggtgttagacttaatccagatattgacggggaaactttaagtaaaatttcaactggaaaaaaaactgacaaatttggtatcgaaataaataatttagataaaattattgaattagttaaaagttgtaaaagtttaaatttaattggtattagttgtcatattggaagtcaaataagtaaaattgaagcttataaaaatacttttaatcaaatgaaaaaagctgcagataagtttatgcagtctggaattaagattaagcatatagatttgggtggaggattccatgttaaatataaggactctgatcctgaatttaatattgagatgataaaagaagaactagataattgttttgcacaaacaaactatgaattatcttttgaacccggtcgatatttaattgctgaagctggagttatagttacttctattattacaattaaaaataatggaggtgttaactatttaattgttgacgctggtatgaatacattaatacgtccagccatgtatggtgcacatcatgaaatattagcgataaatttaaaatcagaagaatctttggaatatgctattgctggaccaatttgtgaaagctcagatattttttcaaaaaatgtaaaattagcaaaacaagaaattggcaatctcctagttataaaaaatacgggagcttatggaaaggtaatgtcatcaaattataactctaggccattaccttctgaaattttagtga

SEQ ID NO: 275757 - DNA, 886 bp, Unknown
  Bacterial polypeptide expressing nucleotide sequence isolated from the Sargasso Sea
ctacccgggagagtcgctgccggtctacgcctccaaggccaacagctctctgctcatgagcagcatcgctgcggccgaggggctgggactggacgccgtctccgccggtgagctgctcacggcgcttcaggggggcatgcccggtcggcggatggtgctgcatggcaacaacaagagcgatgaggaactgctgctcgcttacgacaacgacgtgacgatcgtggtggacaaccagcacgacctcgagcggctggagcagctggtgccagcaggcggcgaaccgtcacgtctgatgctgcgcttcaccccgggcatcgagtgccacacgcacgaatacatccgcaccggacatctggacagcaagttcggcttcgatccagacctgctggagtcggtgctgaagcaactggtcggacaaccctgggcgcgactgaccggtctgcatgcccacatcggatctcagatcttcgagcttgagccccatcgcgacctggccgcggtgatggcggatgccctcggcctggcccggcggctcggccacccggtgaccgatctcaacgtggggggtggccttggaatccgctatgtggaaaccgatgacccgccgagcatcgaccactgggtggaggtggtggcggagggcgttaccgcggcatgccgagaaagggatctggagcttccccgtctgatgtgcgaaccggggcggtctctggtcgccacggcaggcatcacgctttacagcgtggggtctcgcaagacgatcccgggagtgcgcacctacgtcgccatcgacggtggcatgagcgacaacccacggccgatcacctaccagtctctctacacctgctgcctggcggaccggcccctggcggaagccactgaaacg

SEQ ID NO: 275758 - DNA, 819 bp, Unknown
  Bacterial polypeptide expressing nucleotide sequence isolated from the Sargasso Sea
tccggggctgcacttcttgcagggataagatgtttcaacatcgaatctgagggagaaatgacttccctggcttccatcgcgttggatttgggcagagtcgctccaatttccattcgcgtgaatcccaacgtggataccgaaacccacccctatataaccacagggaccaagcaaaataaatttggtgtccccttagaacatgccgaacgactctataagctggcaaccgaatcgagggctctagatccggttggcatagattgccatatcgggagtcagatcatggatctcgatccattttcgcaatcattagcatgtttgctcagtctactggagcgacttacaagtcttggtatagacctcaaacacattgatattggaggcggattaggggtttcctataaagatgaactcagtccttctccgaaagaattgatcgataaagttgccccccaactatcgggttacgatttggaactgatcgtggaaccgggtcgctcagttgtagccaacgcaggcattttagcgacagaagtcgtctacctaaaatataatgattaccgtcagtttgccattgtagacgctgcaatgaatgatctaattagaccttccctctacgatgcttggcaagacatcgagccagtccagttgaagaaagaatccagacaactctgggacgttgtaggccctatctgcgaaacaggggattttttaggcaaggatcgacccttggccttgaaggagggtgatctattggcagtattgaatgctggagcctacggatactcaatggcctctaattacaatagtaggcctcga

SEQ ID NO: 275759 - DNA, 669 bp, Unknown
  Bacterial polypeptide expressing nucleotide sequence isolated from the Sargasso Sea
aaatttctggcatagcttgtcatattggatctcaaatctctgataatagcttaattataaaaagtctagagcatctactagatgcacaaaaactgctcattaaagatgaacataaattagaattcttggatattggaggaggcttaggtatcacttacaaagaagaaacccctggcaatcctgagtctttgattttagaaatattaaataaaatcagtgcattaaatctaaatattatcttagagccaggcagatcaattaccggcaccgccggtattcttgttacaaaagttgaatatttaaaattaactgaacataaaaattttgcgattatagatgctggtatgaatgatttaatgagaccagcactttacgatgcatggcatactgtgaaagaggtaaaaaaaagagatttagataaaaaaatatatgaattagtgggtcctgtttgtgaaagttcagatgtattggctaaagaaagagaattgtctatttcacaaggggattttattgcttttatggatgctggagcatatggatcagtgatgagctctaattacaattcaagattaaaagtacctgaaatactagtgaatggctcttccgctaaactaattaaaagaagggaaagttttgaagacttaattgcactcgaaactaacgtataaa

SEQ ID NO: 275760 - DNA, 898 bp, Unknown
  Bacterial polypeptide expressing nucleotide sequence isolated from the Sargasso Sea
cattaaatatgaaattctatcatttaacattgaatctgaatctgagataaaaagaattgaagaaatagcgtcttctgaaaataaagttgcaaatgttgccataaggtttaatccagaagttgattctggtggacatgaatatataaaaactgggagaaaaggagataaatttgggatatcctcagaggagtctgtcttaaaaatagctaaatatatttataaatcaaatcatctaaagcttgttggtttagcatgtcatattggatctcaaatattagatcttcagagttacaaactaacagcaaaaaatattaaagatctctcatttaaaattaaagatttaggtaacgagttagattttctagatctaggtggaggacttggaattccatatgaacaagatgatactccatcacctcaagacttaatttcaataattgaagaagaattaaaaggcatagaagaaagaattatccttgaaccaggtaggagtatttctggaaatgctggaatattgctaacaaaagttgaatacataaaagataacttccttatagtggatgctgctatgaatgatcttttaagacctgcattatataaagctaaacatgacgtatggagcttaaaagaagatgatagtaaatctaaagcctggataatagctggcccagtatgtgaatcgtcagatattattgcaaaagacatacatactaatgctggtgagggagatactcttgcaattaaaacagctggtgcttatgggtttgtaatgtcttcaaactataactcaagaatgcgttcagctgaggtgctcgtagatggaaaagaatttaatatagtacgaacaagagaaacgtttgaagatctaattaaaaatgagatagatctaaatgattga

SEQ ID NO: 275761 - DNA, 685 bp, Unknown
  Bacterial polypeptide expressing nucleotide sequence isolated from the Sargasso Sea
ttccggcgtggattacgctcaccttgaacaggtttgcggggctatggtgcgtcaggtggttgattttggccaggatcttgaggcgatctcggccggcggcgggctctcaattccttatcgcgaaggcgaggaggcgatcgataccgatcactattatggtctgtggagcgccgcgcgtgacaaaatcgcggcgcatctcggccacccggttaaactggagatcgagccgggccgtttcctggtcgcggaatccggggtgctggtggcgcaggtgcgcagcgttaaagagatgggatcgcgtcactttgtgctgattgacgccggttttaacgatttgatgcgcccgtcgatgtacggcagctatcatcacattagcgcgctggctggcgatggccgcgatctgacccatgcaccgggcgttgagacggtggtggcgggtccgctgtgtgaatcgggtgatgtctttacccagcaggaagggggaaaagtggagacccgcacgctgccggacgttaaacctggtgattacctggtgctgcacgacaccggcgcgtacggggcgtcgatgtcctccaactacaacagccgcccgctgctgccggaagtgctgttcgatcgcggcgtagcgcgtctgatccgccgccgccagaccattcaggagctgctggcgctggagctggtctga

SEQ ID NO: 275762 - DNA, 1270 bp, Unknown
  Bacterial polypeptide expressing nucleotide sequence isolated from the Sargasso Sea
ttgtcagttggtggctgttctattgaagagttagttaaaaaatatgattctcctctttatatattggatgaaatcactttaagaaagtcttgtagagcatataaaaaagcattagaaaaatattacccaggagaatctctccctatatatgcttccaaggcaaatagctctatattcatgagtaatcttgtctcatcagagggtttaggacttgatgcagtatcagagggagaattattaacagctctaaagggtggggtaccaaatgaaaaaattgtttttcatgggaataacaaatctgacaaagaaattgattttgcaattagaaataacatcaaaataattgtagataatgactatgacttaagaagattagaggaaatatcaaattcatcaaatcatgacttagaaataatgatacgctttactcctggaatcgaatgccatacacatgaatacataagaacaggttcatttgatagcaaatttggttttggaatcgaatatttgaataatttatttgcaagcatcagagaaactaaacatttaaaattaaaagggatacacgctcatattggatcccagatttttgaactagaccctcataaggatctaggtgaaataatggcaaaggtcattttagacgccaaaaaatttggccatgatattaaagaacttaatgttggtggaggtttaggcattaaatatacaactaatgacgatccaccttctatcgatgaatgggtaaaaacaatttccaactcagttgttaaagcttgtaaaaaacacaatttagatctgccaaaattgatgtgcgaacctggaagatctatcgtatctacagcaggcataacaatttacaaaattggggcttttaaagagattcccggcatcagaacttatttgtctgttgatggcgggatgagtgataatccaaggccaataacatatcaatcaaattactctgcatgtttggtaaaaaacccctttaacattaactcaaaaaataaatatacaattgctggcaaacactgcgaatcgggagatgtattgtttaaggagatagaactagcaaattgcgaaacaggagatctcatatgtgtgtttggtactggtgcttacaataattcaatgagttctaactacaacagaatcccaagacccgcagcccttttagtttgtaatggagaagcagagattattcaaaaaagagaaagtccaattgatcttttaaaatatgatgttttgcctgatcgctttattaaataaa

SEQ ID NO: 275763 - DNA, 1246 bp, Unknown
  Bacterial polypeptide expressing nucleotide sequence isolated from the Sargasso Sea
ttggatcactttctctaccaagacaataccctgtacgccgaaggctgtcgggtcaatgatttagcccagcagtatggcacgccactgtatatctattcccgtgcgacgctcgaacgtcactggcatgcgtttaacaatgcggtggccgaccatccacatttagtgtgttacgcggtgaaagccaactcgaacttagccgtactgaacgtcttggctcgtttaggcagtggttttgatattgtctcgggcggtgagttagcgcgggtgattgaagccggtggcgaccctgccaaagtggtgttttcgggcgtaggtaaaaccgttgccgaaatggaacaagcacttaaccttggaatttattgctttaacgtcgaatcgagcgccgagcttgaacaacttaacgacgttgcaggccgcttaggtaaagtggccccagtgtcactgcgggtgaatcccgatgtcgatgccggtacgcatccttatatctcaaccggccttaaagaaaacaaatttggtatcgccatggatgaggccgaagttgtattcgcccgtgctcatgcgctgccacatttgcaggtcaaaggggtcgattgtcatattggttcacagctgaccgagatccagcctttcctcgatgcgatggacagaatgttagcccttatcgaccgtctggccgagcaaggcattgtgattgaacacttcgatgtgggtggcggtttaggggtgacctatgatgatgaaaccccgccgcatcccgatgtttacgccgctgcactgctcgcgcgtttaggcaatcgtaagctcaagttaattttcgagccgggtcgcgccattgccgctaacgcggggattttcgtcactcaggtgctgtaccttaaagaaaacagtgataagcgttttgcgattgtggacggtgcgatgaacgacttaattcgccccgcactctatagcgcttggcaaaatatcattccggtaaatccaagggatgaacaggcgcaagtatttgatatcgtaggaccagtgtgtgaaaccggtgactttttaggtaaagacagagcactcgcgattgcggcgggggatttgctggttgtgcgctcgagtggtgcctacggttttgccatggcctcaaattataacactcgtccgcgtgcggccgaggtgatggtcgatggtgacaaggcttatctggtgcgtgaacgagaaaaattagcgcagctctggcaaggtgagcaactcctgccgtaaa

SEQ ID NO: 275764 - DNA, 1225 bp, Unknown
  Bacterial polypeptide expressing nucleotide sequence isolated from the Sargasso Sea
atgaaagaaattgaaggacaactttgtattgaaaatattcctgttattaacttagcaagagaatatggctctcccttatttatctattctgcagagctaattaaaaataactttgagaagtatcaaaatgaactaggcagcaatgatctgatttgttacgcagtaaaagcgaattctaatcttcacattctaaaattattgtctgaacttggttctgggtttgatgtagtttctggaaatgagctcaaacgttgtctgagggccggtgcagataagaataaaattgttttttctggcgtagcaaagtcaaatgaggaaataaaattagcaatagaaaacgatatcctctctatcaatatagagtcatatggtgaattcgagagaatagcaaaaatttctgaacaacttaaaaaatctgtaaattgtgctttaagagttaaccccgatatagccattggctctcataaatatattgaaacaggatcaaaaacttcaaaatttggtttagatagcgaagcagtcaataaaatatcagatgaagcgagagataataaactcgtaaatataacttctgtcgcatgtcacataggctctcagatttctgatgaaaatctaattctgaaaagcttggatgtaataagtgaaattgcaaataatctttcattaaatggtcatgccattaaatttttagatattggtggtggacttggtatccaatacaaagacgaagaagagggagatccaggaattttaatggcaggagtaaaaaatagattagaaggtaaggagtataagataatactagaacctggcagatctatcattggttctgcgggaattctggttacaaaaatagagtacataaaaaatgcaggtgggaaaaaatttgcaattattgatgctggtatgaatgatttaattaggccttcattatatgaagcctggcatgaggtaaaagaattagaaaataaagaaatatcatctgatacttacgatttagcaggtccagtttgtgagactggggatatacttgccaaagaccggaatctgaaaattttaccaaatgactttgttgctttcatggatgtaggtgcctatggctctgttatgagttcaaactataactctagacttaagcctatggagttgcttgtcatggatggtgaaattgaagtgataagaagaaaagaaacatttgaagatctcatagctttagaatcataat

SEQ ID NO: 275765 - DNA, 1240 bp, Unknown
  Bacterial polypeptide expressing nucleotide sequence isolated from the Sargasso Sea
catggaagggtttaacgaaaaagaagggcaactatacgtagatgatttgcctatctctgacattgcacataaatttggcacacctgcatttatctattctggttcagccataaagaataattacaataggtatgccaatgctttaaggaaaggtgatcagatttgttatgcagttaaagccaactctaatatccatatattgaaagaacttgtaaggctaggctcaggatttgatgtagtttctggtaatgaattaaagcgatgcatagaagcgggtgcagatcccagaaaaatagtcttttcaggagtagctaaatctacagaagatattgaactagcaataaatctaggaattctttcaattaatatagaatctgaagatgagtttgaccgtatagctaaaatatctaaagctataaaaaaagcggttcaatgctctatcagaattaatccagatatcccaactggctctcataaatatatagaaactgggcttaagacctcaaagtttggagtggataacgaaactcttctaaatatatctttaaaagctaaggatacacccttaatcaaaatttctggtatagcctgtcatattgggtctcaaatttctgataacagcttaataataaaaagtttggaattcttattagatgcccgccaactgttaatgaaaaatggacatgaaataaatttcttagacattggaggcggtctaggtattacttacaaggaagaaagccctggaaaccctgaatctttaatgtcagaaatctctaatgctctgaaaggatcaaatattaatattgttttagaacccggaaggtcaataactggtaacgcaggtattttaatttctaatgttgaatacttaaaattaactgaatataaaaattttgcgatcatagatgctggtatgaatgatttaatgcggccagcactttatgatgcttggcatgctgtaaaagcaataaaacgtaatgattctgcgaaaagaatttatgaattagtgggccctgtttgtgaaagtgcagatgtattagctaaagatagggagttagtccttgcacaaggcgatttaattgcgtttatggatgctggtgcttacggttctgtgatgagctcaaattacaattctagattaaaggcacctgaaatacttgttcatggttcttcttcaaaactcatcaaaagaagggaaagctacgaggactcaattgctctcgagaaagatttgtaa

SEQ ID NO: 275766 - DNA, 1270 bp, Unknown
  Bacterial polypeptide expressing nucleotide sequence isolated from the Sargasso Sea
atgctttcagatcaagagccgagcaccgtgactactttcaatccacaacagcttgtcgaactcgcgcgtcagtacggcacgcctctttgggtctacgacgctgacgtgattcgtcaacgtatcgctgaactgcgcagcttcgacgtgatccgctatgcgcagaaggcgtgttcgaatgtgcacatcctgaagctgatgcgcgacgaaggggcgatggtcgatgctgtgtcgctgggcgaaatcactcgcagtctcgcggcgggttttacgccggatggcgatcctgagggcgtggtgctgacggctgatctcgtcgatcacgcgacgctggctacggtgatcgaacatcgcattacggtcaacaccggatcgctcgatatgcttgaacgggtgggacagcatgcgcctgaagggcaccgggtgtggctgcggatcaatccgggtttcggtcacggccacagcaacaagaccaacactggcggtgaacatagcaagcatggcatctggctcgacgacgtgccgctggcgatagcgatggtgcggcgctacggcctgaagctggtcgggctgcacatgcatatcggctccggcgtcgactacacacatctagcgcgcgtgtgcaacgcgatggtcgaagcggtgcggagtctgggacacgatatcgaagcgatttcggcaggcggcggattgtccgtgccgtatagcgcaggcgagccgcggattgacgccggacactattttcgtctttgggacgatgcgcgcaagcagatcgaagcacacctcggacatcacgtgagactggagatcgaaccggggcgctttcttgtcgcggaagcgggtgtgctgatcgccgaggtgcacgcgctaaatcgccggccgaaccggcaattcgtcctggtcgatgcgggctttaacgacctggtgaggccgtcgttctacggcagtcgtcatgagatgacggtggtgaaaggcaacggcatgcggagtgaagcgacagttggcgccttcacggtggccggaccgttgtgcgaagcgggcgatgtgtttacgcaagaggcgggtggggtggtgacgaaccgcgccatggcgacgccggaagtgggagacttcattgtgtttcacgatgcgggcgcatatggtgcgtcgatgtcatcgaactacaacagccggccgctggcgcctgaagtactgctggagaagggcaagccgcgtttgatccggcgcaagcagaccatgcaggaactgattgcgctcgaaatgcccggctaat

SEQ ID NO: 275767 - DNA, 1216 bp, Unknown
  Bacterial polypeptide expressing nucleotide sequence isolated from the Sargasso Sea
attgacttggaaagtcctaacaaaaatatcagtgcctattaccacatccattgaaggagatgggaaattgtcagttggtggatgttctattgaagaactagttaaaaaatatgactctcccctttatatcctagatgaaatcactctaagaaattcttgtagagcgtacaaaaaagcattagaaaaatattacccaggaaaatcattgccaatatatgcttctaaggcaaatagttccatttttatgagtagtcttgtttcctcggaaggtttaggacttgatgctgtttctgaaggagaactattaactgctattaaaggtggcgttccaaatgaaaaaattgtttttcatggaaacaacaaatcagacaaagaattagaattcgcagttagaaataaaattaaggttattgtagataacgattatgacttagaaagattagatgagatctcaaattcatttgataatgatttagaaataatgattcgctttactcctgggatagaatgccatacacatgaatacattagaactggatcatttgatagcaaatttggtttcggaatagaatatttagatatcctatttaacagaatcagcaatacaaagcacctaaaattaaaaggtttacatgctcatattggttcacagatttttgaactagaccctcataaggatcttggagaaataatggtaaaggttatcttaaacgccaaaaaatatggtcataatattgaggaactaaatgttggcgggggcttaggtataaggtatacagaaagtgatgatcccccttcaattgatgaatgggtaaaaacaatttcttcttccgttgttgaagcttgtaaaaaaaacaacatagatcttcccacattaatgtgcgaacctggtagatctattgtatctacagccggtataaccatttacaaaattggtgcttttaaagaaattcccggtatcagaacatatttatctgttgatggtggtatgagtgataatccaagaccaattacatatcaatcaaattattctgcgtgtttagtaagtaatccatttaatattaattccaaaaataaatatactattgctggtaagcactgcgaatctggagatgtattgtttaaagaaattgaactagcagaatgtaaaacgggagatcttatatgtgtttttggtactggtgcatataataattcaatgagttctaactacaac

SEQ ID NO: 275768 - DNA, 1225 bp, Unknown
  Bacterial polypeptide expressing nucleotide sequence isolated from the Sargasso Sea
catgaaaacaattgacggacaactctttgttgaaaatattccagttattgaattggctaaggagtatggctctccgttgtttatatattcttccaaagagattgaggataattttctaaattataaaaatgaaataagggatcaagaccttgtctgttacgcagtaaaagccaactctaatatacatatcttaaagctactctctgatcttggctctggattcgatgtcgtatctggaaacgagctgcagagatgccttttagctggagcagatagaaagaaaattgttttttcaggtgtagcaaaatcccatgaagaaattaagctagcaatagaaagtgatattttgtctatcaatatagaatcggttggtgaatttgaaagaatcgcagcaatagcgaaagaattaaataaaacagtaaactgtgcgctcaggataaatccagatattaagataggttctcataaattcatagaaacaggatctaaaacatcaaaatttggtttggatagagagtctgtgagcaagatttcagaactctcaaagagcaatgagcacattaatattaaagctgtcgcttgtcatataggttctcagatttctgatgagaatttaattctcaaaagccttatatatataaaagaaattgctgatcaactcaaaggagaaggtcatgagcttaactatctggacatagggggaggtttaggaattcaatataaagatgaagaaaagggagatccaaaaattttaatttccgaagttaagactttactcaaagaaacggattatcaagtaatagttgaacctggaagatctatagtcggaacttctggaatacttcttacgaaagtagaatatataaaagaagctggtgagaagaaatttgccattatcgatgcaggaatgaatgatcttatcagaccttcattgtatgaagcctggcataaagtaagagaggttgaggaaggagatgtagaaagtgaaacttacgatctggctggcccagtatgcgaaacaggagatattcttgctagagatagaagcctaaaaatacaaccaaatgattatttagtatttatggatgtaggtgcttatggttcggttatgtcttccaattacaactctaggttgaagcctgcagaattgcttgtaactaaagatgtcgcgaaagtaataaaaagaaaagaaaacttcgaagaccttatcgctttggagtcttag

SEQ ID NO: 275769 - DNA, 1237 bp, Unknown
  Bacterial polypeptide expressing nucleotide sequence isolated from the Sargasso Sea
atgagttattttagttataaaaataatattctttattgcgaaaaagttaagataagtgatattgcggataaatatggtactcctgcatacatttattcaaaaaagacactttctgaaaattttgatgcttatgctaatgcatttgataaaaaaagtggcttgatatgtttttcagttaagtcattgagtaatttatcaattcttaaatttctaagtgaaaaaggttctggattcgatattgtatctggtggagaactcgagcgaactcttcttgctggagcagatccaaaaaaaatcatctttacaggaatagcaaaaactgatgaagaaattctttttggtatcgaaaaaaatattctgtctttcaatattgaatctaaatcagagatgatgagaattgaaaaaatagctagagataaaaaaaagcttgttgatgtggctatcagatttaatccagaaatagatgcgggtggtcatgagtacattaaaacaggaagaaagaaagataaatttggaattctcgtaagtgaaactttaaaactagcaaaatatatttctaattcagaacatctaaatttaattggattatcttgtcatattggttctcaaatatttgaactagatgactttaaagctgctgcaaactttacaaagaaacttgcagaagaagtcaataaaatgagtattgaactaaaatttcttgatgtaggtggtgggctaggtatttcatatacagattctaattttccttcaccaaaagatcttttaaaaataattgaaaacgaattacaagacagagatgaaaaaattatattagagcctgggagaagcatctcaggtaatgcaggtattatgatttcaaaaattgaatacatcaaagagaactatctaattattgatgctggaatgaatgatctcataagaccagctctttataatgcaaaacatagtgttataaatacaacaaaaggtgctggaaataatggaagctggacaatagttggccccatttgtgagtcttctgatgtattggcaaaagactatgaaatggaagctgccgaaggagacattattgcagttgaaactgccggcgcatatgggcacgtaatgtcctcaaattacaattcaagaagaaaaccgcctgaaattcttgtgagcaatgataagtatgaattaatacgaaagagagaaacctatgaagatctcttaaaaaatgaggttgacctcagtggttaat

SEQ ID NO: 275770 - DNA, 1246 bp, Unknown
  Bacterial polypeptide expressing nucleotide sequence isolated from the Sargasso Sea
attggatcactttctctaccaagataataccctgtacgcagaaggctgtcgggtcaatgatttagcccagcagtatggcacgccgctgtatatctattcccgtgcaacgctcgaacgtcactggcatgcgtttaacaatgcggtggccgaccatccacatttagtgtgttacgcagtaaaagccaactcgaacttagccgtactgaacgtattggctcgtttaggtagtggttttgatattgtctccggcggcgagttagcgcgggtgattgaagccggtggtgaccctgccaaagtggtgttttctggcgtgggtaaaaccgttgccgaaatggagcaggcattaaatcttggtatctactgctttaacgttgaatcgagtgctgagcttgaacaacttaacgatgttgccggccgcttaggtaaagttgctccagtgtcactgcgggtgaatcccgatgtcgatgccggtacgcatccttatatttcgacgggtcttaaagaaaataaattcggtatcgccatggatgaggccgaagttgtatttgctcgcgctcatgcgctgccgcatttgcaggtaaaaggggttgattgccatattggctcacagctcactgaaattcagccgtttctcgatgcaatggacagaatgctatcgctcattgaccgcctagccgagcaagggatagtgattgagcactttgatgtcggtggcggtttaggggtgacctatgatgatgaaacgccaccgcatcctgatgtgtacgccgctgcactgctcaagcgtttaggtcatcgcaagctcaaactgattttcgaaccgggccgtgcgattgctgccaatgcggggatttttgtgactgaggtgctgtacctcaaagaaaacagtgacaaacgttttgcgattgttgatggtgccatgaacgacttaattcggcccgcactctatagtgcatggcaaaatatcattccggtgaatccacgggatgaagaggcgcaagtatttgatattgtaggacctgtgtgcgaaaccggtgactttttaggtaaggacagacaactcgcgattgcggcaggggatttattggttgtgcgctcaagcggggcctacggttttgcgatggcgtcgaactacaatactcgtccgcgtgcggccgagttaatggtggatggcaataaggcttatttggtgcgagagcgagaaaaattagcgcagctctggcaaggtgagcagctcctgccgtaa

SEQ ID NO: 275771 - DNA, 1240 bp, Unknown
  Bacterial polypeptide expressing nucleotide sequence isolated from the Sargasso Sea
atggactattttgcatacaaaaataagaatctttattgtgaggacgttaatcttcaagaaatagttgaagaatatggaactccaacctatgtctattcaaaaaaaactatagagaggcatgtagatgtatataaaaatgcttttaaactgcataaaaaccttatttgtttttcagttaaatctttaagcaatatttcaatacttgatctaattaacaaaaaaggttgcggttttgatgttgtttcaggaggggagctgaaaagagcgttgcatgcgggagctgatcctaaaaaaataatttttagtggagttggtaaatcttatgatgaaattcttttgggcattaaatatgaaattctatcttttaacattgaatcagaatcagaagtaaacagaattgaagaaatagcttcatctcaaaataaaattgcaaatgttgccataaggtttaatccagaagttgattctggcggtcatgaatatataaaaactggaagaaaaggagataaatttggaatatcctcggaagagtctgtattaaaaatagctgaatatatttataaatcaaatcatctaaagcttgttggtttagcatgtcatattggatctcaaatattagatcttcagagttacaaacaaactgcaaaaaatattaaagacctctcatttaaaattaaagatttaggtaatgaattagattttctagatttaggtggaggacttggaattccatatgaacaagacgagactccgtcacctcaagatttaatttcaataattgaagaagaattaaaagacatggaagaaagaattatccttgaaccaggtagaagtatttctggaaatgctggaatattacttacaaaagttgaatacataaaagatgacttccttatagtggatgctgctatgaatgatcttttaaggcccgcattatataaagctaagcatgatgtatggagcttaaaaaaagatgatactaactctaaagctatgacaatagctggtccagtatgtgaatcatcagatattattgcaaaagacatacatactaatgctggagagggagatattcttgcaattaaaacagctggtgcttatggatttgtaatgtcttcgaactataactctagaatgcgttcagctgaggtgctcgtagatcgaaaagaatttaatatagtacgaacaagagaaacatttgaagatctaattaaaaatgagataggtctatatgattgat

SEQ ID NO: 275772 - DNA, 1015 bp, Unknown
  Bacterial polypeptide expressing nucleotide sequence isolated from the Sargasso Sea
atggattactttgcatacaaaaataatgaacttttctgtgaagatattaaccttcgagaaatagcagaagaattcggaacacctgcatatgtatattcaaaaaaaactatagaaaggcatattgatgtttataaaaatgctttcaaaaaaaaagataacttaatatgtttttcagtaaagtccttaagtaatattgcgattttaaatatcttaaaagaaaaagattgtggatttgatattgtttcaggaggagagcttcaaagagcgttatatgttaaaacaaatccaaaaaaaataattttttcaggtgtgggtaagtcaaacaatgagatattagaaggtataaataatgaaatactttcttttaacattgaatctgagtctgaattaatgagggttgaaagagtagcttcagaaaataataagatagttgatgttgctattagatttaatcctgaagttgattctggaggacatgaatatattaagactggtaggaaaggagataagttcggcatatcctcaaatgagcttattttaaaattaagtgcatatatttataactcagataatttaaggcttgtaggccttgcttgtcatataggatctcaaataggagatctagaaagttataaatctactgctatcagtattaaaaaccttgcagaagatatagataaaacaggtaatgaattgaagttcctagatttgggtggcggtcttggtgttccatataaagatgataaaactccttcgcctgaagaattggtatctgttattgaatgtgagctagaagataggaaagaaaaaataatattagagccaggaagaagtatcacgggtaatgctggagtgctgcttaccaaagttgaatatataaaagataattttctaatagtagatgcagctatgaatgatttaatgaggcctgctttatatgatgctaatcatgatgtatggaatgttaaaaaaaataatactggttctaaaaaatggactattgttggtcctatat

SEQ ID NO: 275773 - DNA, 1186 bp, Unknown
  Bacterial polypeptide expressing nucleotide sequence isolated from the Sargasso Sea
aagtacagtccgagagcgatgtaaaacctttattgaagaatttagatcaagatatccagaaacacatgtagcatatgcctccaaagcatttattaatcaaaaattaacttcaattctttcagaagaaggtatgggtatggatgttgtttctttaggggaatttattgctgcaaaacaaggcggtatggacactagtaaaatccatcttcatggtaataataaatcaccagaggaattagaatatgtaattagtaataatattggtcggataatcattgataattttgatgaaattgaaaatctttctaacattattaagagtaagaattgctcaattaaggctttgatccgaatatcacctggtgttgatccacatactcatagttatatatcaacaggtatattggatagtaaatttggtttcgctattgaaacaggagatgcagaaaaagctataaaacaatgtctcgaaatagatggtttggatcttgtcggaatacattgccatataggttctcaaatttttgaaatagaaccttacaacgacgcgatggatatttctgttaatttcgctgtaaatatggcaaataattataattttatattgtcagaaattagtattggtggcggttttgccattgcatacacacaaaatgaaaatccacccagcgtgaaagaatatgctgaaattattaccaatgctctaaaaaatgcatgtgcatctaataatattgaattgccaaaattaataatagaaccaggtagagctattgcaggcccttctggtgttgctatatatcgagtcggttcaataaaagatatacccaatattcgaaaatatgtgagtgtagatgggggtatgggggataatatcaggcctgctttatatgaatcagaatatgaagcagttgtcttgaataaaattgatcaagaaaatacagaaatagtaactatagcaggcaaatactgtgaatcaggagacatattgataaaagatattaatctaccacacattgagaaagatgatttaatttgtattcctgcaagcggcgcatactgtatccctatgtccagtaattacaatatgaatttgaagccagctgtgatcctcgttcatgatggaaagtcagaaattataagaaaacgtgaaacgtacgatgatatattatctttagaagttttttaa

SEQ ID NO: 275774 - DNA, 1240 bp, Unknown
  Bacterial polypeptide expressing nucleotide sequence isolated from the Sargasso Sea
atggattactttctatataaaaacagtgaacttttctgtgaagagattaatcttcaagaaatagcgaaagagtttggcactcctgcatatgtttattcaaaaaagactatagagagacatatcgatgtttataaaaatgcctttcaaaaaaaagatagcttaatatgtttttcagtaaagtctcttagcaacatttctatcttaaatatcctaaaagaaaaagattgtggttttgatattgtttcaggtggagaacttcaaagagcgctccatattaaaacaaatccaaaaaaaataattttttcaggtgtcggaaaatcaaatgaagaaatattaaaaggtataaataatgaaatactttcttttaatattgagtcagagtctgaattatttagaattgaaaaaatagcttcagagaataataaagttgttgacgttgctattagatttaatcccgaggttgattctgggggacatgaatatattaaaacaggaaggaaaggagataagttcggcatatcaccaaatgatcttgttttaaaattaagtcattatatctataactcaaagcatctaagacttattggcttagcatgtcatattggctctcaaataggagatcttgagagttataaattaacggccataaatattagacagcttgctgaagaaatagataaaacaggaaatgaattaaaatttttagaccttggtggaggacttggcatcccctataacagcgacaaaacaccatcacctaaggatttggtttctataattgaagaagagttaaaagatagaaatgaaaagataatattagaaccgggaagaagtattactggtaatgctggaatattgcttacaaaagttgaatacattaaagataacttcttagtagtagatgctgctatgaatgatctattaaggcctgccttatatgatgcaaaacatgatatctggaaccttaaacaaaatgattctgataataaaaaatggactattgtaggcccagtatgtgaatcatcagatattctagcgaaagaccatgaaatgaatgcttctgaaggagatatcctagctattaaaactgctggagcatatggttttgttatgtcatccaactataactctagggttagggccccagagatattagttgataataatcaatataccgttattagaaaaagagaatcttttaaggacttgattagaaatgaggttagtctaaatgattgaa

SEQ ID NO: 275775 - DNA, 1201 bp, Unknown
  Bacterial polypeptide expressing nucleotide sequence isolated from the Sargasso Sea
cactttaagaaattcttgtaaagcgtacaaaaaagcattagaaaaatattacccaggaaaatctctacccatatacgcgtctaaggcaaatagttccatttttatgagtagtcttgtttcttcggaaggtttaggactcgatgctgtttcagaaggagaactattgactgctataaaaggtggggttccaaatgaaaagattgtttttcatggtaacaacaaatcagacaaagaattagaattcgcagttagaaataacatcaaggttattgtagataatgattacgacttagaaagattagatgagatctcaaattcatttaatcatgatctagaaataatgattcgctttactcctgggatagaatgccatacacatgaatatattagaaccggatcatttgatagcaaatttggtttcggaatagaatacttaaatatcttatttaacaaaataagcaatacaaagcacctaaaattaaaaggtttgcatgctcatattggttcacagatttttgaactagaccctcataaggatctgggagaaataatggtaaaggttattttagaagccaaaaaatttgggcataatattaatgaactaaatgttggagggggtttaggtattagatatacagaaagtgatgatcccccttcaattgatgaatgggtaaaaacaatttcttcttccgttgttgaagcttgtaaaaaaaacaaattagattttccaatattaatgtgcgaacctggtagatctattgtatctactgcaggtataaccatatacaaaattggggcttttaaagaaattcccggtatcagaacatatttatctgttgatggtggtatgagtgataacccaagaccaattacatatcaatcaaattattctgcatgtttagtaagtaatccatttaatattaattccaaaaataaatatactattgctggtaagcactgcgaatcgggagatgtattgtttaaagaaattgaactagcagagtgtaaaacaggagatcttatatgtgtttttggtactggtgcatataataattcaatgagttctaactacaacagaattccaagacctgctgctctcttagttaaagatggagaggcagaaattattcaaaaaagagaaagcccattggatcttttaaaatatgacgtattacctgatcgctttatcaaacaaaattag

SEQ ID NO: 275776 - DNA, 1237 bp, Unknown
  Bacterial polypeptide expressing nucleotide sequence isolated from the Sargasso Sea
atgagtaaatttatatacaaagataatgttcttttttgtgaaaatgttgctgtgaccgacattgttaaagaggttggtactcccgcatatgtatattcaaagaagactttattggacaattttgagtcctattctaatgccttcgaaaaaaatgatggattggtttgtttttctgttaagtctctaagcaatatttctgtgctcagattattaaaatataagggaagtggttttgatatcgtctctggaggtgaattggagagggtcttggctgctggtgtagatccaaaaaaaataatatttacaggaattgcaaaatccaacgaagaaattatccaaggcataagaaaaaatattttgtcttttaacattgaatctgaggcagaaatgttaagaatagaaaaattagctactgatgaaaataaaattgttgatgttgcaataagattcaatcctgagatcgactcaggtggacacgaatatattaaaaccggaagaaaaaaagataaatttggtgttttgttagagggggttattaatttatctaaatatattttaagttctagttcactaaaccttattggcttgtcatgtcatattggctctcaaatatttgaattaaatgattttgaagaatctgcaaaatatataaaaaaacttgctaaagaaattaataaacttggtattgagcttaaatttctagatgttggagggggtttaggtatctcctataatgactcaaactttccttctccctcaaatttgataaaagatcttgagaatatcttaagtgacagaaatgaaaaaattattttagagcctggaagaagcatttctggagatgctgggattttattaacaagcgtagaatacgttaaagatgattatctcattattgatgctggaatgaatgacttaataaggccggccttatatgatgcaaaacatcaaataataaatgttgagaagaataaagtcccagcaaaagagtggacaatagttgggccaatatgtgaatcatctgatgtaatggctaaaaattatagcttgggtgcatcaggtggcagtattttggctataaaaacaacaggtgcatatgggcatgttatgtcatctaactataattctagacgtaaaccaccagagatattggtagacgatgataagtttgaaattattagaaaacgagaaacatacgaagacctgataagacatgaggtaaatcttgggtcttaat

SEQ ID NO: 275777 - DNA, 1225 bp, Unknown
  Bacterial polypeptide expressing nucleotide sequence isolated from the Sargasso Sea
tatgaaagaaattgaaggacaactttgtattgaaaatattcctgttattaacctagcaagagaatatggttctcccatatttatctattctgtagagcaaattaaaagcaactttgggaaatatcaaaatgaagttggcagcaatgatctgatttgttacgcagtaaaagcgaattctaatcttcacattataaaattattatctgaacttggctctggatttgatgttgtttctggaaatgagctcaaacgatgtctaaaggcaggtgcagataagaataaaattgtgttttctggcgtagcgaagtcaaatgaggaaataaaattagcggtagaaaacgaaatcctctctatcaatatagagtcatacggtgagtttgagagaatagcaaaaatttctgaacaacttaataaatctgtaaattgtgcattaagagttaaccccgatatagccattggctctcataaatatattgaaacgggatcaaaaacttcaaaatttggtttagatagtgaagcagttaataaaatatcagacgaagcgagagataataaactcgtaaatatagcttctgtcgcatgtcacataggctctcagatttctgatgaaaatctaattctgaaaagcttggatgtaatatgtgaaattgcagataatctttcattaaatgggcatgccattaaatttttagatattggtggtggccttggtatccaatacaaagacgaaaaagaaggagatccaggaattttaatggcaggagtaaaaaatagattagaaggtaaggagtataagataatactagagcctggtagatcaatcattggttctgctggaattcttgtcacaaggatagaatacataaaaaatgcaggtgggaaaaaatttgcaattattgatgcaggtatgaatgatttgattaggccttcgttatatgacgcatggcatgaggtaaaagaattagaaaatagagaaatatcatctgatacttacgatttagcgggtccagtttgtgagactggggatatacttgctaaaggccggaatctgaaaattttgccaaatgactatgttgctttcatggatgtaggtgcctatggttctgttatgagctcaaactataattctagacttaagcctatggagttacttgtcacgggcaatgaaattgaagtcataagaagaaaagaaacatttgaagatctcatagctttagaatcataa

SEQ ID NO: 275778 - DNA, 688 bp, Unknown
  Bacterial polypeptide expressing nucleotide sequence isolated from the Sargasso Sea
tatctcaaaaacgatagcattaaacttgttggtttaacttgtcatattggatcgcagattatggagcttaaaggctttgaggatgctgctaaacaagctttagagcttttaattgagctagataaactcaatattagtttggactttatagatatgggtggcggactaggtgttaattatattggagaggaaactattcagccgtttgaattaattcaaagctatgaaaaaatatttgctaacagaaatgaaagattgatacttgagccaggacgttcaatttctgccaatgctggcatcatgcttactagagttgaatataagaaagatggttttcttattgccgatgctgcgatgaatgatttattgcgcccagccctttatgaagctcatcacgatgtttggccagtgatagaaaataataatctttcaaatgtaaatcttgttggtcctatctgcgaaacaggtgattacttagcaaaaaatttaaatattggagcgtgcgaaggagatcttttggcggttagaacagttggtgcatatggttttgtgatgagttctaactataattccagacctagggcggctgaagtccttgtagacaaagatcagttttacttgatacgaaagagagaggatttttctgacctaactgttcttgaagagggactagatgatcaaatttaaa

SEQ ID NO: 275779 - DNA, 1255 bp, Unknown
  Bacterial polypeptide expressing nucleotide sequence isolated from the Sargasso Sea
atgaattttaaaggctttaagtataaaaataataatctattctgtgaacatgtttcattagaagacattagctatgaatttggcactccaatatatgtttactctggatcatcaattgaagacgcttacagtcaattaagttcatcaatttccaatacaaatacagaaataaacttcgctcttaaagcaaactcaacattagggattttatctttactatctaagttaggagctggtgcagatattgtctcaggtggagagttagtaaaagctttacatgttaaaataaatcctaagaaaattgttttttcaggagttgggaaaacaactgaagaaattaagttagcaatcaaaaatggaattaaacaaattaatgcagaatcctattcagaaattgaaaatattataagtattgcaaatgaattaaatactaaagttccagtggctatacgagttaatccaaatattagtgtgaaaacgcatgagaaaatagctacaggatcaaatgatactaaatttggtatgcccattgaggaaacagcaaatatatacaaaagactttctagtgagaaaaatattaaaacaatgggcttagcaattcatataggaagccaaatttttgatatgaatgaattcaaactcgcatacctaaatattttgtctgtagctaatagccttcgtcaagaaggttttaaagtgcctaatcttgatttaggtggaggtttaggcgttgattataaaattgcaaaaataaatttttttgattacggaaaaacaattagtgatgttttcaaaggatatgactatagcctttccatagaaccaggaaggtcattggttgcaaactcaggaattttacttactaaagttatttatttaaaaaaaacaaaaagcaaaaattttataatagtagacggtgcgatgaatgactttattaggccaactttgtacaacgcacatcataatgttgagcctgttaatttatcaaaaggtggattagaaaaatttgatattgttggtccaatttgtgaaactggagattattttgcgaaagatgcattgcttaataaccctacagaaggtcaattattagctatattttctactggtgcatatggatcagttatgtcatctatgtataattctagagttccagcaaatgaaatattagtttataatggcaaagtacataaacttaaagaaaaagaaagaattgaagaccaaataaataaagaaattctacctaaattctaaa

SEQ ID NO: 275780 - DNA, 1029 bp, Unknown
  Bacterial polypeptide expressing nucleotide sequence isolated from the Sargasso Sea
ctttccagggggggatgcccggtgagcggatggtgctgcacggcaacaacaagaacgacgaggagctcctgctcgcttacaacaacaacgtcacgatcgtcgttgacaaccagcacgatctggaacgcctggcggaactggtgcctgccggcggcccaccggcccggctgatgttgcgcttcacccccggcatcgagtgccacacccacgagtacatccaaaccggccacctggacagcaagttcggcttcgaccccgacctgctggagtcggtacttcggcagctggtggacaagccctgggccaagctcaccggtcttcatgcccacatcggctctcagatcttcgaactggagccgcatcgggacctggcagcggtgatggccgatgccctcaagctggcccgcagcctgggtcatcccgtggaggacctcaatgttggaggcggcctcgggatccgttacgtggcctcggatgatccgccaaccatcgagcaatgggtgaaggtggtggccgatgccgtcacggccgcctgccgggatcgtcaactggagctgccacggttgctctgcgagccgggccgttccctggtggccaccgccggagtgacgctgtatgccgtgggctcccgcaagaccattcctggtgttcgcacctacgtcgccgtcgacggcgggatgagcgacaaccccagaccgatcacctatcagtctctttacacctgctgcctggccgaccgaccgctggcccctgcggaagaaaccgtgaatctggtgggcaagcactgcgaatccggtgatgtgctgctcaaggatttgccactccccaccacccgaagcggagacatcgtcgccgtgttcgcaaccggtgcctacaacgcatcgatgagctccaactacaaccgaattccacggcccgctgccgtggtggtgcagagcggctcttcggagcttgtccagaagcgcgagcagccggatgatttgctgcgctacgacgtgctgccggagaggttcagagcgttaccttgat

SEQ ID NO: 275781 - DNA, 674 bp, Unknown
  Bacterial polypeptide expressing nucleotide sequence isolated from the Sargasso Sea
catcgactgccatatcggctcgcagatcaccgaagtcgcgccctatctggatgcggtcgacaaggtgctcgaactggtcgaacagatcgagcaggacggcgtgaagattcgccacatcgacgtaggtggcgggctcggtatcacgtacgacgacgaaaccccgccggagatcggcgagttcgtgcgcaccgtactggatcgcatcgaagcgcgtggccacgggcatcgcgaggtgtacttcgagccgggccgctcgctggtcggcaatgcaggcgtgctgctgacacgcgtcgagtttctgaagccaggcgcggaaaagaacttcgccatcgtcgacgcggcgatgaccgatcttgcccgccctgcgatgtacgaggcctatcacgcgatcgatgccgtcgttaagcgcgacgtgcctgcgcatgtgtacgacgtggtcggcccggtttgcgaaagcggcgactggctgggccgcgagcgtctgctcgcggtcgaaccgggcgatctgctggcgattcgctcggctggcgcatatggcttcgtgatgagctcgaactacaacacccgtccgcgtgcggccgaggtgatggttgatggtacacaggcgtatgttgttcgtgctcgcgaagaggtcaagcaactgtttgcgggtgaaacgattctgccggcgtaaa

SEQ ID NO: 275782 - DNA, 880 bp, Unknown
  Bacterial polypeptide expressing nucleotide sequence isolated from the Sargasso Sea
caatgtagaatcgagaagtgaattaacaaaattaagtaaagttgctaagaatatgaagctagttgcacccgtttcattaagggttaaccctgatgtcgatgctaagacacatccttatattgcaactggtttaaaggaaaataaatttggtatcgcttttgaatctgcaaaggatatttttaagcaggcggaaaatgacaatagtatcaaattaattggaattgattgtcatattggatcgcaaatttcgaaattaagtccttttcaagatgcattacgaaaaatttttgacttaataggcgaactcggagaattggaggttaaactaaaacacgttgatattggtggtggtttggggattagttataaagatgaagtaccaccaactccaaatgaatatgtaaatgccattactgatattactcgggaatatgatcttgagataattattgagcctggtagatctattataggtaatgcaggtgttttacttacaaaggtagaatatcttaatgaaacaccttttaaaaattttgctgttgttgatgcagcaatgaatgatttgattcgtccatctctctatgatagttggcatgaaattaaaagggtaacagaagatttgtgtgtggaaggtaaggcatatgatgttgttggtcctatttgcgaaaccggtgattttcttggtaagaaccggaaactatctttaagcgaaggtgatttacttgctattcaatcagcaggcgcatacggttttagcatgtcatctaactacaattcaagaccacgtgcccccgaagtactggttgatggtgctaaagttcatgagattcgtagaagggaaacgctcgaagatttaattaatggtgaatatttagtttag

SEQ ID NO: 275783 - DNA, 322 bp, Unknown
  Bacterial polypeptide expressing nucleotide sequence isolated from the Sargasso Sea
tgtgctgcaggaatggcggcgcacttggctggcgccgttgcagctcaaactacacgcccggttattggggtccctataagcagtgggtcgctccaaggtgtcgacgcgttgctgtcgacggtacaaatgccaggcggaatcccggttgccactgtagccattggtaaggctggagctaaaaatgcggcttatttggcgagccaaattctagcgacgagcgacgatagtttgtttgagcgtgttcgtgctgatagagagaagaacaaagaaaaggtaatttcccaaaatcaggcgttacaagaaatactaagtggcagttagt

SEQ ID NO: 275784 - DNA, 556 bp, Unknown
  Bacterial polypeptide expressing nucleotide sequence isolated from the Sargasso Sea
tggtgttttacagctgactatattttagaaaagaaagtaaaattgagtaaggaaatttcagttgtaattacaagatttggaaatggtgagatttatacatatgaacccattgaaaatattcataaagaccaaattttaaaatattcaaaaatacccgcagatattactgatgacatatttaaaaaagcccaagataaagcaaaattaattgcagaaaaattagattatgtagggactatgtgtgttgaatattttatcgatcaaaataatactttattagttaatgagattgcacctcgagttcataattcgggtcatctaaccattaatgcttttaatataagtcagtttgaaaatcatgttagagctgtatgtggttttaaaaaagagaaggttcaaaaaatttctaatgcagagatgactaatgttttaggtaaagaaatagaagagtatagatctaaatcttttagtgatgtcgaatttttttttgattataaaaagaaagttattaaagataaaagaaaaatgggtcatcttactattttaaaaaagtagt

SEQ ID NO: 275785 - DNA, 640 bp, Unknown
  Bacterial polypeptide expressing nucleotide sequence isolated from the Sargasso Sea
agatttggctacgatggcaaaggacaagctttagtaaaaaatactaaaaatttagaaagacaatggaaagagaatgactatcaggactgtattatagaaaggaagattaatcttaaacaagaagtttctgttatatgtgccagagacattaaacgaaatttttatttttatccaactttcgccaatgtacacaaaaaccatatactatgtgaaacaacatctcctagtagtatagatgcaaaaattgaaggtaaattattaaaaatgtcaaaaaaaattattacaaagcttaattatattggattattaacgattgaatttttcattgataaagaaaataatatttttgttaatgaaattgctccaagggttcataattctgggcatataacacttgataatgcaaatataagtcaatttgagttgcacataaaagccattacaggaaaaaaaatttttaaacccaaaatacttacaaaaggacttatgagaaatcttattggcaacgaaataaaaaaagtgaacagaataaaatccatgaggaagtataaaagcttcaaaaaaaatattaagtatgactatggtaaaaagatcataaaaggtggccgaaaaatgggtcacattaatttcatttcataat

SEQ ID NO: 275786 - DNA, 331 bp, Unknown
  Bacterial polypeptide expressing nucleotide sequence isolated from the Sargasso Sea
aaattctgcagatagaaataatattgctgttataattgctggtgctggaggatctgctcatcttccaggcatgatttcagctttaacatcaattccagttttaggcgttccaatcgagagtaaaaaactcaaaggtctagatagcctcttatctattgcacaaatgcctaaaggtatccctgtgggaactttggcaataggagaagatggagcaattaatgcagctttattagctgcttcaattctcgcaaataataatccggttattaagaaaaaattaaaaaattggcggttatctctaactaagtcagtaaagaaaaatccaaattaa

SEQ ID NO: 275787 - DNA, 635 bp, Unknown
  Bacterial polypeptide expressing nucleotide sequence isolated from the Sargasso Sea
ttctgaaaacactactatgggttatgatggaaagggacagtatccactcaagtcattaaatgaattgaatgaattgaatattgacttttcaaaagaatatattcttgaaaaattagtaagattaaaaaaagaaatttctgtaataatcacaagatttggtaataacaaatttgaaatttatgaagcaatagaaaacactcatgaaaatcaaattttaaaaaaatctaaaattcctgctgatatcagtgataaattggtagagcaatctagagaatggagtaaacaaatttctgaggaactaaaatatattggcacactttgtgtggaattttttattgatagaaatgataatctctatgtaaatgaaatcgcacctagagttcataattctggacatttaactattaatgcttttaatattagtcagtttgaaaaccatgtaagagctgtttgttctttagatcaagttcctttaaaaaaattacataatgcagaaatggttaatattattggtaatcaaattctaccttttagacaaaatcttaatctaaataataatgaatttttttttgattatcttaaaaaagatattaaagaaaaaagaaaaatgggtcatttaactaaaattttttgat

SEQ ID NO: 275788 - DNA, 496 bp, Unknown
  Bacterial polypeptide expressing nucleotide sequence isolated from the Sargasso Sea
aatgtctcagaaaaaaaatacatataaagtttcaattataatgggtagtcaatctgattattctactatgaaacactgtaagaaagttctggacattctaaaaatcaaaagcgaaacaaacataatatcagcacacagaactcctaaaagactgtttaaattcgcagaaaatgcagaaaaaaataagatttcagttattattgcaggagcaggtggttcagctcatttgccgggaatgattgcagccattacaaaaattcctgttattggggtaccaatagagagtaaaaagttaaaaggtctagatagtttactgtcaattgcacaaatgccaaaaggaattcctgttgggactgttgcaatcggaaaagatggagcaatcaattcagctttatatgcagcatcaataattgcattgaatgatattaaagtaagaagaaaactagctctttggagaaaaaaacaaacaaaatctgtaaaactaaaacctagataa

SEQ ID NO: 275789 - DNA, 241 bp, Unknown
  Bacterial polypeptide expressing nucleotide sequence isolated from the Sargasso Sea
ctgaataataaagtagcaattattatgggatctcaatcggatcattccataatgaaagaatgcgcgaaaattttaaagactctcaaaattaaatatcaaatttcaatagtaagtgcgcatagaacaccaaaaagaatgtttgaatttgcagagtcagcctcaaaaaacggttttggtgttattgtggctggagcaggaggttcagcacatttgcctggcatggtggcatctttatcttcct

SEQ ID NO: 275790 - DNA, 312 bp, Unknown
  Bacterial polypeptide expressing nucleotide sequence isolated from the Sargasso Sea
aatgaaaaagaaatctctcgtaagtataattatgggaagccaatccgattggcccataatgaaactcacttcaaaagtactaaaagaatttaaaattgcccacgaagttaaaattatttcagcgcacagaacaccaaaaaggatgtttgaatttgctgagaaagccgaagcgagaggtataaaaattattattgctggagctggtggtgctgcgcacttacctggtatgacagcatcaatatcaaatatacctgtacttggagtacctattgagtcaaaaaaattaaaagggttggatagtctgttgtcaat

SEQ ID NO: 275791 - DNA, 688 bp, Unknown
  Bacterial polypeptide expressing nucleotide sequence isolated from the Sargasso Sea
gtttcgattgaaaaaatctgaaatagatgtcttagaggacttcttgccaggaatattaaaaacaacaacacttggttatgatggcaaaggtcaatatccaattaaatcaagtaatgaacttaattcattgaacatagatttttcaaaaggatatattcttgaaaaacttgtaaagttaaaaaaagagatttcaattattatcacgaggtttagtaataataaatatgaaatttatgaaccaatagaaaatactcacgaagatcaaattttaaaatattcaaaaatacctgctgaaattaatgaaaagatttttaatcaatctaaagattgggcaatcttaattgctgaagaacttaaatatgtaggaactttatgtgtagaattttttattgatagaaatgataatctttatgttaatgagattgcacctagagtacataactcaggacatcttacaataaatgcttttaatgtgagtcaatttgaaaatcatgttagagctgtgtgtggtttagaacaaattcctttaaaaaaaatatctaatgctaaaatgatgaatttgcttggcgatcaaattacccattttagaaaaatgcaaaaatttaatgaaaatgagtttttctttgattatttaaaaaaagatataaaagaaaaaagaaaaatgggtcatatcacgactttaatataa

SEQ ID NO: 275792 - DNA, 463 bp, Unknown
  Bacterial polypeptide expressing nucleotide sequence isolated from the Sargasso Sea
gttgaaaaagaagcaaatcggatttctgcttgtcttgcggagggacttggatttggtcggagtgatgggagtggaaatgtttctgcttccggatgggagtctgttggtcaatgaaattgctccaagacctcacaactcgggacacttcaccatggattcatgtgaaacctctcaattccagcaacatcttctggccgtttctggatggcctctgggcccgacccaaattatgaaacctgcgttgatgctgaacctgatcggggatcagcaagataaacttcttcagaacctgaaacatcttccggaaggagcaaaattgcatctttatggaaagaaagaggttcgcccgggaagaaaaatgggacacctcaatctgagtatggagaatccaagtgagcttttggaaaccctgatcaaactccaggtctgggatcaagattctctggaaaggatgctgaattga

SEQ ID NO: 275793 - DNA, 247 bp, Unknown
  Bacterial polypeptide expressing nucleotide sequence isolated from the Sargasso Sea
atgacaaatcaaacaatacaagtagcaataattatgggatctgactcagatttacccattgtagaggcaattttcccaatcttagactcatttggggtgaaatttactaaaaacgttatgtctgcacatagaacaccacatgatgttatggagttaataaaaaactcagaagataatggttgcaaagtatttattgcagctgcaggcatggcagcccatttagctggtgctattgctgctcattcta

SEQ ID NO: 275794 - DNA, 322 bp, Unknown
  Bacterial polypeptide expressing nucleotide sequence isolated from the Sargasso Sea
catgaaaaagaaaagatatagtcacagagtatccattataatgggaagcaaatctgactattccacaatgaaattatgtgaaaaaactctgaaattacttaaagttaattatgaaactagtattgtttccgctcatagaacacctgaaagaatgttcaattatgcaaaatcagcagagtcaagaaacattaacgtaattattgcaggcgcaggaggatctgcacatttacctggcatgattgctgcattgacaagaataccagtaataggtgttcctattgaaagtaaaaaactaaaaggtctagatagtcttttatctata

SEQ ID NO: 275795 - DNA, 966 bp, Unknown
  Bacterial polypeptide expressing nucleotide sequence isolated from the Sargasso Sea
aaactatcattttaacaaatgatagtgatgccccagctcaaaatttttgtgatgagtttatttgttcaaattatacagcaaaagataatctagaaaaatttgcaaagacgtgcgatatcattacttttgagtttgaaaatattccttttgaaacgctaaacgacttgtcagctataaagccagtttttcctgatccaaatattaataaaatcgtacaaaatagattacttgaaaaaaactatgtcaatgaattaggtgtaaagactacaaagtatgctcacataaaaaataaaaaggatttaattaaaaactcatccttattgcctggctttttaaaaacaacaactttaggttacgatggcaaagggcagctttttctagaaaatattaataatttaaaaattaaagagattgattatttaaaagattacatactcgagaaaaaaataaattattcttttgagttttctattattttaacgaggtttcaaaataaaaatatacaaatgtatagcccattttttaatttgcataaaaatggaattttacgtatgtctacaacgaagattccagaaaaagtcataaaagatgatttggaaattgctaaagaatattcaaaaaaaattgcgcaaaaattaaactatattggaactatgtgcgttgaattttttttagacgaggatggtccaaaattaaacgaaatagctcctagggttcacaattcaggtcatttaactattgaagcgtacaacataagccaattcgaaaatcatgttagagcagtcatgaatttggaaaattctatcacaactttaaaacatgatgctgtaatgacgaatattttaggaagtgatattatagatgcaagaaaatcaaaatatttaaacaaacaattttttcatgattatttaaaaaccgacataaaagaaaatagaaaaatgggccatctaactgaattgctttaaa

SEQ ID NO: 275796 - DNA, 454 bp, Unknown
  Bacterial polypeptide expressing nucleotide sequence isolated from the Sargasso Sea
tatgggtagtaaatcagattggcccacaatgaagtatgctgcaaatatattaaagtctttaagaattaaatttgagacaaaaatagtctctgcacacagaacgccaaaaagaatgttcgagtattcaatgaatgcaaagaaaaataatattggtgttattattgcaggagccggtggttcagcacaccttccaggtatgattgcatctttaacaactgtaccggttattggagttcctattgaaagtaagaaattaaaagggttggatagtttgttgtctattgttcaaatgccaaaaggtattccagttggaacggttgcaattggaaaaggtggtgcaattaatgcagcgctattgtcagcatctattcttgccattaataatataaagattaataaccaaataaaaaaatatagaaatcgacaaacaaaatcggttaagctaagactttaa

SEQ ID NO: 275797 - DNA, 487 bp, Unknown
  Bacterial polypeptide expressing nucleotide sequence isolated from the Sargasso Sea
atgaaaaatccttcactggtaagcatcattatgggcagccaatctgattggccaacaatgaagcatgcttcaaaaattttaagtttatttaacgtaaaacacgaagtaaaaattatttctgcgcatagaacaccaaaaagaatgtttgaatatgctgaaagtgtagaacaaaggggaataaaaataataattgcaggcgctggtggagcagctcatttgcctggaatgacagcttctatttcaaatattcctgtacttggtgttccaattgaatcaaaaaaactgaaaggcttagatagtcttctatcgattgctcaaatgccaccaggtgttccggttggaacacttgctgttggggaagctggagcaaaaaatgcagctttacttgcagtatccattctaagtgacaataacacaaaactgaaaaaaaaatacgcctcgtggcgatcaaaacaaactaagtcaataaaaaatattcccaaataat

SEQ ID NO: 275798 - DNA, 754 bp, Unknown
  Bacterial polypeptide expressing nucleotide sequence isolated from the Sargasso Sea
agcaattaaatatgcaaataattatgctatcaaacaatatgatgattttgatgaaatagatactttcattcaagggtgcgattttattacttatgagtttgagaatattccatttaagacattgtcgtatatagaaaataaaataacggtatctcctagttcccaaattaataaaattattcaggaccgtttaactgaaaaaaattatgtaaatgaaattaatattcccacagttccatatattgaaattaaagatatagaagatttaaaatcagttaataccaatttctttccagcaatattaaagactcgcaagcttggatatgatggtaaaggacagtatatagttaatagttcaaaggaaatacctgaaatacctaaaaatgattatatcttagaaaagaaaatatatttacaacaagaaatttctataattgctgtgaggtatcaagatggaacaatttttacctatcaaccgattgaaaatgttcataaagatcaaattcttttcaaatcatattcaccagcaaattcaaatcaatcaattattgaggaggcaaaaaaccacgctgttaattttgccaaaaaaataagttatgttggtactttctgtttagagttttttattacagataaaaatgaattattattaaatgaaatagctcctagagtgcacaactcagggcatttaactattgagtcatataatgtaagtcagtttgaatcccacctcagatctgtatgcgatcttgaa

SEQ ID NO: 275799 - DNA, 559 bp, Unknown
  Bacterial polypeptide expressing nucleotide sequence isolated from the Sargasso Sea
taatgatagtgaatatatattagaaaaaatggttagtttaaaaaaagaaatctctgtaatagtcacaagatttaaaaaaaatgaatacgaaatttatgagccatttgaaaataaacatgaagaccaaatattaaaagtctcaaaaattccggctagcataagtaaagaacatttttctcaatctgttgaatacgcaaaaaaaattagtgaaaagttggattatgtaggaactttatgtgttgaattttttatagatgataaagacaatttgttagtaaatgaaatcgcacccagagtacataattccggtcacatgacaatcaactcacacaatatcagtcaattcgaaaaccatgttcgtgcagtttgtggtctcaaaaaggtaaaaacattaaaactttataatgcgaaaatgacaaatattctaggtaatgagattactaaatataaaggaaaaaaatttcaagataacgagttttttttcgattatttaaaaaaggagattaaaaaaaaaagaaaaatgggacattttacagaaatcaataagatcaatgattaa

SEQ ID NO: 275800 - DNA, 532 bp, Unknown
  Bacterial polypeptide expressing nucleotide sequence isolated from the Sargasso Sea
ttctcgaaaacttgttaaactcaaaaaagaaatttcaattatcattacaagatttagtaacaataaatatgaaatatatgaaccaattgaaaatacacatgaagatcaaattttaaaatattcaaaaatacccgcagaaattaatgaaaagatttttaatcaatctaaagattgggcaatgttaattgctgaagaacttaaatatgtaggaactttatgtgtagaattttttattgatagaaatgataatctttatgttaatgagattgcacctagggtacataattcaggacatttaacaataaatgcttttaatgtgagtcaatttgaaaatcatgtaagagccgtgtgtggtttagaacaaattcctttaaaaaaattatctaatgctaaaatgatgaatttacttgggggtcaaattactcattatcgaaacgtgcaaaaatttaatgataatgaatttttctttgattatttaaaaaaagatataaaagaaaaaagaaaaatgggtcatatcacaactttagtataa

SEQ ID NO: 275801 - DNA, 217 bp, Unknown
  Bacterial polypeptide expressing nucleotide sequence isolated from the Sargasso Sea
gaaagtaaaaaactaaaaggtctggatagtctattatcaattgtacagatgccaaaaggaatacctgtcgctacagttgctataggtaaggatggggcaataaatagtgctttgcttgctgcttcaattatttcaagctttgataaaaaaattaaaattagcttaaataaattgcgatctaaacaatcaaagtcagttaaaaaaaaaccaaaataaa

SEQ ID NO: 275802 - DNA, 547 bp, Unknown
  Bacterial polypeptide expressing nucleotide sequence isolated from the Sargasso Sea
aatgaatttattttagaaaaaataataaatttaaaaaaggaaatttcagtaattattacaagattcgataaatcaaaatatgaaatatatgaaccaattgaaaatgttcatgaagatcaaatattaaaatattcaaaaatacccgctgatataaatggaaaaattttagaaaaatcaaaggattgggcagtaagaatttcggaagaattaaattacataggaacgctatgtgttgaatattttgtggataaaaacaataatctttacgtcaatgaaatcgccccaagggttcataattcaggtcatttaacaattaacagtcataatattagtcagtttgaaaatcatataagagcaatttgtggcttagaacaaattaaaatcaaaaaaaaatttaatgccaaaatgatcaatttattgggtgacaatattacagcttatcgaggaaaaaaatttaaagataatgagtttttttttgattatttaaaaaaagatattaaaaaaaaaagaaaaatgggacacttaacaattacagaaaaatgttgaa

SEQ ID NO: 275803 - DNA, 454 bp, Unknown
  Bacterial polypeptide expressing nucleotide sequence isolated from the Sargasso Sea
gatgggtagcaaatctgattatgctaccatgaaaaattgtgaaaaaattttaaaattactgaaagttaaatttgaaaccaaaattgtttctgcacaccgcacaccagagagaatgtttaaatttgctaaagcggcagaagataataatttttctgtcattattgctggtgctggaggctctgcacatttaccaggaatgattgcatcattaacaactatacctgtgattggtgtacctgtagaaagtcgtaaattaaagggattggatagtttgttatctatagtacaaatgccaaaaggtattcctgttggcagtgtagcaatcggtgaggacggcgctatgaatgccggtttatatgcagcttccattattgctcttacgaataaagaaattaagaaaaatttaaaaaattatcgaactaaacaatcaaaagctgttaaacaaaaaccataa

SEQ ID NO: 275804 - DNA, 493 bp, Unknown
  Bacterial polypeptide expressing nucleotide sequence isolated from the Sargasso Sea
aatgtccaataaaaaaaatcataaagtagcaatagtaatgggtagtcagtcagactattcaactatgaaatattgcgtaaaagtcttaaagacattaaaaattaatcatgaatcaaaaattgtttcagcgcatagaactcctgatagaatgtataattttgcaaaaagtgctggaaaaaacagtatatctgtaattattgctggtgcaggaggatctgcacacttaccaggaatgatagctgcaataactactatcccagtaattggtgttccaatcgtaagtaaaaaattaaatggcttagatagtttgttatcaatatctcaaatgccaaaaggcatacctgtaggaacagtatcaattggtaaagatggagctattaatgcagcacttttatccgcttcaattatttctatctatgataaaaatgttaggaagaatttaaatctttggagaaataaacaaacccgatctgtaaaaaaaaaacctagataa

SEQ ID NO: 275805 - DNA, 776 bp, Unknown
  Bacterial polypeptide expressing nucleotide sequence isolated from the Sargasso Sea
aataactcaagatagaataaaagaaaaagaatttttgagcaaaaatgatataagtgttacaaattttcaagaaatatcaaatttatcagaacttaaatcaggcgctgaaaaaattctattcccggcaataattaaaactaatagatttggttatgatgggaaaggacaatttttagtaaatagttatgatgaacttatttcatcctggaataatctagaaaaacaaaaatgcatcttagaaaaaaaaataaattttcaaaatgagatctcagttatacttgctagaaaaaataataatgacataaaaatatatgatccgagcataaacgttcatgaaaacggaattttgagatctagtgaaatttcttcctttataaataaaaatataaaatcacaagctgaaaaaattgcaaaaaaaattgcaaatacaatggaacatgtaggcattatctgtgtagaaatgtttctgacacacgaaaataatatattagtaaatgaaattgctccaagggtacataattcaggccattggacgctagatggatcagttactgatcaatttgaacaacacattagaactatatgcaatttaccactaggagacccttatagacattcagatataattatgaaaaatattctaggtgaggaaattatatctgttgaaaaacatctaaataattcatttgtaaaattacatatttatggaaaaaaagaagtaaggaaaaatagaaaaatgggtcatttaaattttattacgaaaagaagagtttaat

SEQ ID NO: 275806 - DNA, 316 bp, Unknown
  Bacterial polypeptide expressing nucleotide sequence isolated from the Sargasso Sea
catgaaaaagaataaagctcttaaagtcgcaattgtgatgggtagtcaatctgactacaaaacaatgaaattagcagaaaaaacactcaagaatctgggagtaaaatatgaaactaaaatagtctcagctcatagaacgcccaaaagaatgtatgaatttgcgagttctgcaaagaaaaataatattggagctattattgcgggtgcaggtggatcagcacacttacctggtatgatttcagctttaacaactattcctgtattaggtgttcctattaaaagtaaaaaactcaaaggattagatagtttattatct

SEQ ID NO: 275807 - DNA, 493 bp, Unknown
  Bacterial polypeptide expressing nucleotide sequence isolated from the Sargasso Sea
atgagtcaagtagcaattataatgggcagtaagtcagattttgaagtaatgagcgaagctattgaaattctcaaatcatttgacataaatactgaatatgatatagtttcagctcataggacacctaataaaatggttgaatatgcttcgaatgctgaaaaaaaaggaataaaagttattattgccggagcaggaggagcagctcaccttcctggaatggtagcatcaattacaagcttgccagttatcggagttccaataaaatcaagaaattcaatagatggttgggactcaattttatctatacttcaaatgcctggaggagttccagttgcaacagtagctttaaatggttcaaaaaatgcaggtattcttgctgctcaaattattggatcctttgattctaaagttgctgataaagttaaggcctataaaaaagatttagaagataaggttattgaaagcagtaaagatttgaagaaaaatagctagt

SEQ ID NO: 275808 - DNA, 502 bp, Unknown
  Bacterial polypeptide expressing nucleotide sequence isolated from the Sargasso Sea
tatgtcaaattcaagtgtacaggttgccataattatgggttcggatagtgatttgcctgtcgtagaggcaagtttctctattcttgattcttttggcgttaaatatactaaaaatgtaatgtccgctcacagaaccccgcatgatgtaatggatcttataaaaagatctgaagagaatggctgtaaagtattcatagctgctgctggaatggcggcgcatttagctggagctgtagctgcacattcaacaaaaccagttattggaattccaattgaatcaggtggaatgggtggaattgattcattactttcaaccgctatgatgcctcctggtgttcctgttgcaacagttgctgttggtaaaagcggtgcaaagaatagtgctattttggctgttcaaattctagcaatatctgatgatgagcttgctcaaaaactaaaagattataagtcaaatatgagggaagaagttttagataaagataagaaacttaactcgtaa

SEQ ID NO: 275809 - DNA, 647 bp, Unknown
  Bacterial polypeptide expressing nucleotide sequence isolated from the Sargasso Sea
atttccaggaatactaaaaaccactacattaggatatgatggtaaaggacaatttaaaattaacgatgtaaaagatttagaaagattaaatatagattttagtaaagattatattctagaaaaattagtaaaattgaaacaagaaatttcagtaattatcacaagatttggacaccaaagattcgaaatttatgaacctatagaaaatcatcatgaggatcaaattctaagaacttcaaaaattccagctaacatcagcgaaaagatttcaaatttatctattgatcatgcaacgatagttgctgatgaacttgattatattggaactttatgtgtagaatattttatagataaaaatgataatctttatttaaatgaaattgctcctagagtgcataattcaggacatttaacaataaattctcataatattagtcaatttgaaaatcatataagagccatatgtggcttagaaaaaatcaaagttaaaaaaatgcacgacgcaaacatgaagaacttgataggtgatgaaatttcaaactatagaaacaaaaactttaaagacagtgagtttttcttcgattatttaaaaaaagaaataaaatacaataggaagatgggtcatttaactacaattaaattataaa

SEQ ID NO: 275810 - DNA, 568 bp, Unknown
  Bacterial polypeptide expressing nucleotide sequence isolated from the Sargasso Sea
tttaaattcaataaatttagatttcgaacaagattatattttagaaaaatttataaatttaaaaaaagaaatatctgttattattacaagatatggccctaacagctatgaaatatatgagccaattgaaaatttacatgaagatcaaattttaaaacattcaaaaatacctgcagatatagacgaaaaaaattttaatatttctagggaatgggccatgttaatttctgagaaattgagttatatcggaactttatgtgttgaatattttgttgataacaatgataatttatatgtaaatgaaattgctccacgtgtacataattctggtcatttaacaattaattcacataatgtaagtcaatttgaaaatcacattcgagcagtatgtaaattggaaaaaaaaaatactataaaactatttaatgctgaaatgtttaatttgattggagaagatattattaactatagaaataaaaaatttaataaaaatgagtatttctttgattatcttaaaaaagatattaagcctaaaagaaaaatgggtcatataacgaaaacttattaa

SEQ ID NO: 275811 - DNA, 457 bp, Unknown
  Bacterial polypeptide expressing nucleotide sequence isolated from the Sargasso Sea
tatgagcctatagaaaatattcataaagaccaaatcttaaataattcaaaaatccctgcagaaataagtaaagaaatttatgacgaagcacaaagtaaagcaaaacttatttcagcaaaattagattatgttggtacgatgtgtgtagaatatttcatcgatcaaggtgataatttgttagtcaatgaaattgctccaagagttcataattcaggtcacctaacaataaatgcgttttccgtaagtcaattttctggacatgttgcagctgtgtgtaatcttggtgtaaaaaaagctgaaaaaatttctaatgctgaaatgtttaatgtcttaggaaaagatattgaggcttatagatccaaaacattcagtaaaaatgaatttttttatgattacggaaaaaaatctattaaagataaaagaaaaatgggacaccttacgattttaaaaaaataat

SEQ ID NO: 275812 - DNA, 370 bp, Unknown
  Bacterial polypeptide expressing nucleotide sequence isolated from the Sargasso Sea
agatctgatagtcgcctctgcacatcgaaacccgaaaaaagttgaagagtatattatgacggctcaaaaagaaggggttgaagtatttgtcgccgcagcaggaggtgcagctgcacttccgggtgtggttgcttctcatacaacgctacccgttatcggagtacctattgcctcaagcgaaatgggagggggagtcgatgcgctttattctattgtgcagatgcctcctggcatcccagttgcaactgtagcgataggttcttggggtgcacgtaatgccgcattgcttgctgctgaaattttaggaataaaataccctgaaattcgagaagaagtggaacagtatcgcgagcgacttaggcagcgctaa

SEQ ID NO: 275813 - DNA, 691 bp, Unknown
  Bacterial polypeptide expressing nucleotide sequence isolated from the Sargasso Sea
taataataaagatgatttgatatcaaatgccgatcttttacctgcgatgttgaagacagctactcttggttatgatggaaagggacaatttaaattaaataatcttgaggattgtgaaaatattaacctttctaaagatattggctacatattagaaaaaatggtaaatttaaaaaaagaaatctctgtaatagtcacaagatttaaaaaaaatgaatacgaagtttatgagccatttgaaaataaacatgaagaccaaatattaaaagtctcaaaaattccagccagcataagtaaggaacatttttctcaatctattgaatatgccaaaaaaattagtgaaaagttggattatgtaggaactttatgtgtcgaattttttatagatgataaagacaatttgttagtaaatgaaatcgcacccagagtacataattccggtcacatgacaatcaactcacacaatatcagtcaattcgaaaaccatattcgtgcagtttgtggtctcaaaaaggtaaaaacattaaaactttacaatgcggaaatgacaaatattctaggcaatgaaataactaaatataaaggaaaaaaatttcaagataacgaattttttttcgattatttaaaaaaggaaattaaagaaaaaagaaaaatgggacattttacagaaatcaataagatcaatgattaa

SEQ ID NO: 275814 - DNA, 594 bp, Unknown
  Bacterial polypeptide expressing nucleotide sequence isolated from the Sargasso Sea
aatataaattaaatagtttaagtgacataaatgaaggcattgattttacaaaagaatatattttagaaaaatttattaatctcaaaaaagaaatttcaattgttatatgtagatttggtaatcaaaaatatgaaatatatgaaccaattgagaatgttcatgaagatcaaattttgaaacattcaaaaattcctgctgaaatttcagattcaataaaaatgaaatctaaagaatgggcaaaacaaattgttgaagaactagattatattggaacgttatgcgttgagttttttattgataaaaatgaaaacttatatgttaatgaaattgcacctagagttcataattctggtcatctaacaataaactcacacaatgtcagtcaatttgaaaatcatataagagctgtttgcggtttagaaaaaattgaaacaaaaaaaatatataatgctcaaatgattaatctaatcggtgatgatataacaatttatagaaataaaacttttaaagagaatgagtttttttatgactatttaaaaaaacaagtaaaagctaaaagaaaaatgggtcatctaacaataattgaaaaataat

SEQ ID NO: 275815 - DNA, 538 bp, Unknown
  Bacterial polypeptide expressing nucleotide sequence isolated from the Sargasso Sea
ttatattttagaaaaaaaggtaaatttaaaaaaagagatatcagttgtaataacaagatatttaaatggtgaaacttatatttatgagcctatagaaaatgttcataaagaccaaattttaaatcattcaaaaatccctgcaggtataaataaagaaatttttgttaaagcacaaagtaatgcaaaacttatttcagaaaaattagattatgttggcacgatgtgtgttgaatatttcatcgatcaagatgataatttgttagtcaatgaaatcgctccaagagtccataattcaggtcacctaacaataaatgcattttccataagtcaattttctggacatgttgcagctgtgtgtaatcttggcttaaaaaaagttgaaaaaatttctaacgcagaaatgtttaatgttttaggaaaagatatcgagacttatagatccaaaacatttaataaaaatgaatttttttatgattatgggaaaaaatctatcaaagataaaagaaaaatgggacaccttacggttttaaaaaaataa

SEQ ID NO: 275816 - DNA, 448 bp, Unknown
  Bacterial polypeptide expressing nucleotide sequence isolated from the Sargasso Sea
aatgccaaaagtattaattgtaatgggatcaaaatcagattgggacatcatgaagaaagcgcaagactttttagaggaacatgggatcgaggcagaaatgcatgtggcttctgcacaccgtaacccagaacgagtacatggtttagcaaaaaatgctgaagaaacctgccaagctgtgattgccggtgctgggatggcggctcatttaggaggtgtgatggcctcgcttgtaaccattcctgttattggcgtgccaattaatgcatcgttaaacgggctggattcattgttgtcgacatctcaaatgcctcccggtattcctgtagccacagttgctattaatggggcaaagaatgcagctattcttgctatgcaaattattgctacaagcgatgctgctgtaaagcaaacattgctaaaattcagaaaagaaatgaacgctgcatga

SEQ ID NO: 275817 - DNA, 451 bp, Unknown
  Bacterial polypeptide expressing nucleotide sequence isolated from the Sargasso Sea
aatgtccaagaaaaaaaaagttcctaaagtagcaatagtaatgggtagtaaatcggactattctactatgaaaaattgcgtcaaagtactaaaaattctaaatataaatttcgaaaaaaaaatagtttcagctcacagaactccagataggatgtatgcatttgcaaaaaatgctgaaaaaaacaatgtttcagtaataatagccggtgcaggtggatcggctcatcttcctggaatgatagcggcattaacaagtctacctgtaattggtgttcctattgaaagtaagaagttaaaaggtttagatagcttattatcaattgcgcagatgccaaaaggaattccggttgggacagttgcaattggcagcgatggtgcaataaatgcagccttactatctgcttcaatactttcaattagtgattttaaaattaaaaaaaaacttaattaa

SEQ ID NO: 275818 - DNA, 337 bp, Unknown
  Bacterial polypeptide expressing nucleotide sequence isolated from the Sargasso Sea
gctaaaatatattggaacactatgtgtagaattttttatagatagaaatgacaatttgttcgttaatgagatagctcccagagttcataactcaggacatttaactattaatgcttataatatcagtcaatttgaaaatcatatcagagctgtttgttctttagaaaaagttcaattaaaaaaaatttcaaatgcaaaaatggtaaacttaataggtaaccaaataaaaccttatagggaaaataaaaatttaactgataaagaatttttctatgattatttaaaaaaagaaataaaagataaaagaaaaatgggtcacataacaactttaatttaa

SEQ ID NO: 275819 - DNA, 499 bp, Unknown
  Bacterial polypeptide expressing nucleotide sequence isolated from the Sargasso Sea
atgcctcaaaaaaataaaaaacctttagtatcaataattatgggtagtcaatcagactattctacaatgaaatatgctgaggatactttaaaaagtttaaaaatacgatttgagacaaaaattatatcagctcacagaactccaaatagattatttgaattcgcaactaaagctgaaataaataatatttcagtaattatagctggagctggaggatcggctcatttgccaggtatggtggccgcaataactactattccagtgattggtattccaatagaaagtaaaaaacttaaaggtttggacagccttctatctattgtccaaatgcctaagggaataccagttggatcagttgcaataggaaaagatggtgcaataaacgctgctttatttgctgcttcaattttatctgttggagataaaaatataaaatctaaattaaagcaattaagaacaaaacaaactaagtctgttaaaaaaaaacctagcaaataat

SEQ ID NO: 275820 - DNA, 810 bp, Unknown
  Bacterial polypeptide expressing nucleotide sequence isolated from the Sargasso Sea
taaatgaaataaacaaatttaaacctgttttgcctaagccatcagttaacagattaattcaacatcgattggctgaaaaagattttgttaataaattaaatatcagaacaacaagatacgtttcaattgaaaaaaaatctgacattgatgctttagaggattttttaccaggcattctcaaaacaacaacgctaggatacgatggcaaaggtcaatatccaataaaatcaggtaatgaacttgattcattgaatattgatttttcaaaaggatatattctagaaaaactcgtaaaattaaaaaaagagatttcaattataattacaagatttagtaacaataaatatgaaatttatgaaccaatagaaaactctcatgaagaccaaattttaaaatattcaaaaatacctgctgaaattaatgaaaagatttttaatcaatctaaagattgggcaatgctaattgccgaagagcttaaatatgttggaactttatgtgtagaattttttattgatagaaatgataatctttatgttaatgaaattgcaccgagggtacataactcaggacatttaacaataaatgcttttaatgtaagtcaatttgaaaatcatgtaagagctgtatgtggtttagaacaaattcctttaaaaaaaatatctaatgcaaaaatgatgaatttgcttggcgatcaaattactcattatagaaatattcaaaagtttaatgaaaatgaatttttctttgattatttaaaaaaagatataaaagaaaaaagaaaaatgggtcatatcacaactttaatataaa

SEQ ID NO: 275821 - DNA, 496 bp, Unknown
  Bacterial polypeptide expressing nucleotide sequence isolated from the Sargasso Sea
aatgaaaaacagaaaaaataaccagaaagttgctattgttatgggtagtcaatcagactattcgacaatgcaattttgtgaaaaagttctaaaagttttaaaaataaaatttgaaaccaaaattgtatctgctcatagaacacccgatagaatgtaccaatttgcaagaatggcagaaaaaaatggaatttctgtaattgttgcaggagctggtggatctgctcatttacctggaatgatagctgcgttgacaagcataccagtaattggagtaccaatagaaagtaaaaaacttaaaggtttggatagcttgttgtcaattgctcaaatgcccaaaggtattccggttggaactgtagcaattggtaaagatggtgctattaatgctggtctatttgcggcttcaattcttgctagctcaaatattcaaataaaaaaaaatcttaataattggcgcacaaagcaatcaaagtctgtaacaaaaaaacctaaataa

SEQ ID NO: 275822 - DNA, 850 bp, Unknown
  Bacterial polypeptide expressing nucleotide sequence isolated from the Sargasso Sea
atgcttggtggtgggcaacttggcatgatgtttaccgaagctgcacatgaagaagatttaaaagttcttgccgttgatcaaaaagcagactgctctatttccatgatagcagacaaattcatcaagtcggaatatgttaataagtcaactcttgataaaattattgaaaattgtgaagtatgtactacagaatttgaaaatgtaccatgcgaagcactagagtatttagaaaaacaaattaaagtttttccttcttcaagaattatgaagattgttcaaaatagagacttggaaaaaaaattcttaaaggaaaataatatacctgtaacaaattttactaagtataattcgaaaaatgaccttcaggatcttcaaaaaatggagcaagatactatatttcctgcttttataaaaacctcctgttttggttacgacggtaaaggacaaatttctgtagagaatataagtgaaattgaaaaagcacataataaattaaataatgttcaatgtattatcgagaggaaggtaaaccttaaattagaggtttcacaagtggctgcatgtaattgggatggaaaagtggagtttctccctataagcgaaaatcatcatatcaataatattttacatacctcaaaagttcccgcaacgattagtaattcacaaaaaaaagaaatccaggatataacaaaaaaaattgttaagtcgctttcctatattggagtgatatgtgttgaattctttattagtttagatgaaaagattatggtgaacgagatagcaccaagaacacataacagcggacactattctattgaagcatgcgatatttcccaatttctatatcagg

SEQ ID NO: 275823 - DNA, 523 bp, Unknown
  Bacterial polypeptide expressing nucleotide sequence isolated from the Sargasso Sea
aaaaaagaattttcagttatagttacaagatttgccagtgaaaaatacgaaatatatgaacctatagaaaactatcatgaagaacaaatattaaaaaactcaaaaattccatctgatataagtgaagagataaaagaaaaatcaaaagtttggtcaaaaactattgctgaaaagctgaattatataggaactatgtgtgttgaattttttatagataagaatgaaaatctttatgtaaatgaaattgcacctagagtacataattcaggccatttaacaattaattctcataatgtaagccagtttgaaaatcacattagagctatatgtagtttagaaaaaatacctactaaaaagctatttaatgctgaaatgattaatttaattggaaatgaaatttcaaattataggaataaaaaatttaaagaaaatgaatttttctttgattatttaaaaaatgagataaaaaataaaagaaaaatgggacacttaacaattgtaaagaaactgaaaaataaatagt

SEQ ID NO: 275824 - DNA, 680 bp, Unknown
  Bacterial polypeptide expressing nucleotide sequence isolated from the Sargasso Sea
aaaaaaatctgacatagatgctttagaagattttttaccaggcattcttaaaacaacaacactgggatatgatggcaaaggtcaatatccaataaattctagcaatgcacttagttcattaaatatagatttttcaaaaggttatattcttgaaaaaattgttaaattaaaaaaagaaatttcaattatcatcacaagatttagcaacaacaaatacgagatatatgaaccgattgagaatactcatgaagatcaaattttaaaatattcaaaaattcctgctgaaataaatgaaaaaatttttaatcaatctaaagattgggctatgctaatagccgaggaactaaaatatgttggaactttgtgtgtagaattttttattgatagaaatgataatctttatgttaatgagattgctccgagagtacataactctggacatctaactataaatgcatttaatgttagtcaatttgaaaatcatataagagctgtgtgtggtctagagcaaattccattaaaaaaaatatctaatgctaaaatgatgaatttgcttggagatcaaattacacattatagaaatatacaaaagtttaatgataatgaatttttctttgattatctaaaaaaagatgtaaaagaaaaaagaaaaatgggccacatcacaactttagtataaa

SEQ ID NO: 275825 - DNA, 735 bp, Unknown
  Bacterial polypeptide expressing nucleotide sequence isolated from the Sargasso Sea
accaaaagaaaccctagaattgattgactctgaaaaactcagaccaggtataaaaagcttagaacaaactcaagatagactcacagagagaaaacttcttcaaaagcttgatattccatgtgcgccatatgttgaattaaaaaatgaagaagatttcaaatattcaatttcaaattttggagagtcaatcattaaaactagaagatttggatatgatggaaaaggacagattggcatcaatgaaaacaccaaacttaataatgatatttcagcattatttaatgaagcaataatagagaaaaaaataccttttgaatttgagttctcacaagttagttgtagagatatttatggtaatatatccaatttccctctaaccagaaatattcatgaaaatcatattcttaaacattcttacgctcctttaaagcttaatgataaccttgaaatatatgccaaagaaattactaaaaaaatattatccgatcttgaacatataggagttttaacagtggaattttttaaaacaaaagagaatattattgttaatgaaatagctccgagagttcataattctggacattggactattgaaggttgttcagatagtcaattccaaatgcatatgcaggctgtgtcaggaattaaaattaagcaacctgaattattgtataaatgtcatatggagaacctaattggtaatgagataaatgaatggataaataaaaaatcaga

SEQ ID NO: 275826 - DNA, 481 bp, Unknown
  Bacterial polypeptide expressing nucleotide sequence isolated from the Sargasso Sea
atgtctaaagttggaattataatgggaagtaaatcagattatcctgtaatgaaggaagctgaaaatattttgaaagattttggaatagattatgaaatagatatcgtttcagctcatagaacacccgaaaaaatgatggaatacagtaagaatgctcacaaaaatggtatttcagttataattgctggagcaggtggagctgctcacctgcctggaatggttgcctcaaatacaccattacctgttattggggtacctgtaaagtctagaaattcaatagatggatgggattcgatactgtcaattttacaaatgccagggggagtacctgttgcaacagtagctttagacggggcaaagaatgccggtatccttgctgctgaaattttagggtcaagtaatcctgagattttgcaaaaaattattgactataaaaaacaactagaaaacaaagtaaaatcttcatctttagatgattaat

SEQ ID NO: 275827 - DNA, 923 bp, Unknown
  Bacterial polypeptide expressing nucleotide sequence isolated from the Sargasso Sea
aggaagtctcttatcagatgctgcaaaaaaaatagatatacaaaccgtcatattgagtgatgatcctgatgcaccgggaaaacactttgcgactaaatttatttttggtcaatataatgatgatacaacaataaataattttattaatgaagttgatcttgttacatatgaatttgaaaatattcccttcgcaatattaaaaaagattaatgaaaagaaaaaagttttacccaaaccagaaattaatcaactcattcaacaccgagaaatagaaaaaaaatttttaaatgacaataatatagcaacaacaaaatatgtaactgtcaaaaatgaaaaggatttgagtgaaaatatagacttgcttcctggtttgttaaaaaccacaacgttaggatacgatggtaaaggtcaatatagattaaacactgtagatgatattaggaatgagattgattttacaaaagaatatattttagaaaaacttattcatcttaaaaaagaaatttcagtagtaattactcgttatgatcaaaatagttatgagatatatgatcctattgagaatgttcatgaagaacaaattttaaaatattcaacaataccaagcgatatttctaatgacatacgaataaaatcaattgagtgggcaaaacacgttgtagaaaaactagattatataggaacgttatgtgtagaattttttattgataatgatgataatttatatgctaacgaaattgctcctcgtgttcataattctggacatctaacaatgaactctcataatattagtcaatttgaaaatcatgtacgagcagtatgtggcttagaaaaaattgagacaaaaaaattgtataatgccaaaatgattaatttaattggtgatgagataaaaccatatcgtaataaaatatttaaagata

SEQ ID NO: 275828 - DNA, 454 bp, Unknown
  Bacterial polypeptide expressing nucleotide sequence isolated from the Sargasso Sea
tatgggaagtaaatctgattggaaaaccatgattcactgtagtgacatgttaaaaaaatttaatgtaaagcatgaagttaaagtaatatcagctcatagaactccaaaaagattgcacaaatttcttaaggaagcggaaaaaaataaaatagaaataataatcgccgcagctggaatgtcagctcacttagctggtgtaactgcatctttaacgatcttgccggtacttggagttccaacagaaagcaaattaaaaggtttagacagtttactttcaacagttcaaatgccaagtggaataccagttggaactttagcaatcggaaaggcaggagcaattaatgcagcattgttagctatttcaattttatcagtaaggtacaaaaaaattgcaaataaactcatagcgtatagaaacaattttgaaaaaagggttcctaaaaaacctttttaa

SEQ ID NO: 275829 - DNA, 502 bp, Unknown
  Bacterial polypeptide expressing nucleotide sequence isolated from the Sargasso Sea
atgacaaatgaaacatcacaagtagcaataattatgggttcggattctgatttaccaattgtagaggctgcttttcctattttagatagttttggtattaaatatacaaaaaatgttatgtcggctcatagaacacctcatgatgttatggaattaataaaaaactcagaaaaaaatggatgtaaggtatttattgcagctgcaggtatggcagcacacttagctggagctgtagcagcgcattcaacaaaacctgttattggtattccaatagaatctggtggtatgggcggaattgattcattattatcaacagcaatgatgcctccgggtgttccagttgcaactgttgctgttggaaaaagtggagctaaaaatagcgctatattagctgtacaaatactcgccacaagtaatgatgatttagcaagaaagctaaaagactacaaagaaaatatgagagctgaggttttagaaaaagacaaaaagctcaactcataat

SEQ ID NO: 275830 - DNA, 316 bp, Unknown
  Bacterial polypeptide expressing nucleotide sequence isolated from the Sargasso Sea
atgtgtagaatttttattgacagaaatgataatctttatgttaatgagattgccccaagagtacataactcaggacatttaacaataaatgcttttaatgtgagtcaatttgaaaatcacgtgagagctgtttgtggtttagaacaaattcctttaaaaaaattgtcaaatgctaaaatgatgaatttacttggcgatcaaatcactcattacagaaacatgcaaaagtttaatgataacgaatttttctttgattatttaaaaaaagatataaaagaaaaaagaaaaatgggtcatatcacaactttagtataaa

SEQ ID NO: 275831 - DNA, 832 bp, Unknown
  Bacterial polypeptide expressing nucleotide sequence isolated from the Sargasso Sea
gaaaatataccttatgaaacactaaatgagatgaataaattgaaaccagttttaccaaaaccttctattaacagacttattcagcacagaatagcagaaaaagattttataaataaactaaatattagaactacaagatatgtttcaattgaaaaaaaatctgatatagaaactttagaagattttcttccaggtattttaaaaacaacaaccatgggttacgatggaaagggtcaataccctttaaaaaaaatcgaagatattagttctcttaacattgatttttctaaaggatatgttcttgaaaaattagtaaaactaaaaaaagaagtttcagttattataactagatttgggaataatagttatgaagtctatgatcctatagagaatactcatcaagaccaaatcctaaaatattctataatacctgcagaaataagtgaaaaaatactgcatcaatcaaaagaatgggccacacaaattgcggaagaactaaaatatattggtactttatgtgtagaattttttatagataaaaatgaaaatttatatgtgaacgaaattgctcctagagttcataattctggtcatctgactataaatgcatataatgttagtcaatttgaaaatcatataagagcagtgtgctcaatggaaaaaatcccattaaaaaaattacacaatgctaaaatgatgaacttaataggagaccagattgaaccatatagaaaaaatttaattttaaatgataaagaatttttttttgattatcttaaaaaagaaataaaagaaaaaagaaaaatgggtcatataacaactttattataaa

SEQ ID NO: 275832 - DNA, 529 bp, Unknown
  Bacterial polypeptide expressing nucleotide sequence isolated from the Sargasso Sea
gaaaaaaaagtaaatttaaaaaaagagatatcagtagtcataacaagatttaaggatggaacactatctttttatgaaccaatagaaaacgagcatcgaaatcaaatcttatttaaatctaaaataccagcaaatattagtaagaaaatatatgagcaggctatttcaaacgcaaaaaaaatatccgaagaattaaattatataggtgttcttactgtagaatatttcatcacagaaaaagatgagcttttagtaaatgaacttgcaccacgttttcacaattcagggcatttgactatcgatgcattcaatatttctcagttccagaagcatgttctcagtgtaatggatctaggttcaaaaccaattggcaaaatatctaatgcagaaatgtataatattttgggttcagaaattcttgactacagaaaaaaaacttttaaaaaaaatgaatttttttatgattatttaaaaaaagaacctagaaaaggaagaaaaatgggtcatattacaattttaaaagattaat

SEQ ID NO: 275833 - DNA, 277 bp, Unknown
  Bacterial polypeptide expressing nucleotide sequence isolated from the Sargasso Sea
atggcacaaataggaataattatgggaagcaagtctgatatgccagtcttgaatgaagcaatagagataattaaagaatttaaaattgattatgaagttgatattgtctctgcacatagaacaccagaaaaaatgattgaatatggtaaaaaagctcatgaaagaggtataaaggtaattattgcaggagcaggaggagctgcccacctacctggaatgattgctgcatgtagtccactaccagtaattggtgttccagtaaaatcaaaaaattcaa

SEQ ID NO: 275834 - DNA, 496 bp, Unknown
  Bacterial polypeptide expressing nucleotide sequence isolated from the Sargasso Sea
aatgcctcaaaaaaataaacctttagtatcaataattatgggtagtcaatctgattattcaacaatgagatacacagaagaggtgcttaagaatttaagtattagatttgagacaaaaatcgtatctgcccatagaacaccaaaaagattatttgaatatgcaaatcaagcagaagtaaataaaatttctgtgattattgctggtgctggaggctctgcacacttaccaggaatggtggctgcaataacaaatattcctgtaatcggtgttccaattgaaagtaaaaaacttaaaggattagatagtttattatctatagtacaaatgccaaaaggaattcctgttggatcggtcgctataggtaaagatggtgctataaattcagctttatatgctgcttcaatcttagcagttagtgataaaaatattagatcaaaattaaaaaaattgagatctaagcaaaccaaatctgttagaaaaaaacctagaaagtaa

SEQ ID NO: 275835 - DNA, 424 bp, Unknown
  Bacterial polypeptide expressing nucleotide sequence isolated from the Sargasso Sea
catgaaaaacaaaaaatatagtcacaaggtatcaattgttatgggaagtaattctgattactcaaccatgaaattttgtgaaaaaattcttaaattgcttaaaattaattatgaaacaaatatagtttcagctcatagaactccagaacgtatgtttaaatatgcaaaatctgctgaaaaaaataatatttctgtgataattgctggagcaggaggatcagcccatttgccaggaatgattgcgtctctaacaagaattccagtaattggagtgccaattgaaagtaaaaaattaaaaggtctggacagtttactttcaatagctcaaatgccaaaaggtataccggttggaactgtagcaataggtacagatggagcaataaatgccgcattatatgcagcttcaattatctctacggtttga

SEQ ID NO: 275836 - DNA, 658 bp, Unknown
  Bacterial polypeptide expressing nucleotide sequence isolated from the Sargasso Sea
tttgcaagatttttttccaggaattttaaagacctctactatgggttatgatggtaaaggtcaatatccaattaaaaagatggaagatttagattcattagatattgatttttcaaaagaatatattcttgaaaaacttgtaaaacttaaaaaagaaatttcagtaattgttacaagatttggaaataataattatgagatatatgagccaatagaaaacactcatgaaaatcaaatactaaaacattctaaaattccagctgacatcagtccaaaaatattagatcaatctaaagagtgggcaactagaatttctgaagagttaaaatatattggtactctttgtgttgaattttttattgatagaaatgaaaatttatatgttaatgaaattgctcctagggttcacaattcaggtcatttaacaattaatgcttataatataagtcaatttgaaaatcatataagggcaatatgctctttggaaaaaattcagcttaaaaaactatctaatgctataatgattaatttaattggaaatcaaattaatccatatagacaaaatttaaaattaaaggataatgaatttttctttgattatcaaaaaaaagaaattaaagaaaaaagaaaaatgggtcatataacaaccttgatttaa

SEQ ID NO: 275837 - DNA, 490 bp, Unknown
  Bacterial polypeptide expressing nucleotide sequence isolated from the Sargasso Sea
tatgagcaaaatccaggtagggttaatcatgggaagccaatcagattggtcaaccatgaaagaggcagctgatattttatcagagcttggggtaacatatgaaacaaaaattgtttcagctcacagaactccagatcgtttatgggaatacggaaagtcagctgaaaaaagaggtcttaaagtaattatcgctggtgctggaggagcagctcatcttccaggaatgatagcatcaaaaactaatctacccgttgtcggtgtgcctgtcacgaccacaagtttaaatggcatagacagcctttattctattttgcaaatgcctagaggctatcccgttgctacaatggctataggagcacaaggtgccaaaaatggtggcttattggcggttcagataatagcactgtctgatgcaaaactaaacaaaaccttaagtgattggcggatagctttatcggcttcgatacctgatgagcctaaagatgaataa

SEQ ID NO: 275838 - DNA, 619 bp, Unknown
  Bacterial polypeptide expressing nucleotide sequence isolated from the Sargasso Sea
tttgattgcagaggagtttcagccttttgaacgagagctatcagttgtggtggcacgaagccgttcgggagagattcgatgctttcctgtctcagagaacctgcaccgccaaaatatactgacaatctgccgtattcctgcgaggatttcgggtctggttgaaaaagaagcaaatcggatttctgcttgtcttgcggagggactgggtttggtcggagtgatgggagtggaaatgtttctgcttccggatgggagtctgttggttaatgaaattgccccaaggcctcacaactccggacacttcaccatggattcatgtgaaacctctcaattccagcaacatcttctggccgtttctggatggcctctgggcccgacccatattatgaaacctgcgttgatgctgaacctgatcggggatcagcaagataaacttcttcagaacctgaaactccttccggaaggaacaaaattacatctttatggaaagaaagaggttcgtccgggaagaaaaatgggacatctcaatctgagtatggagaatccaagtgagcttctggaaaccctgatcaaactccaggtctgggaccaagattctctagaaaggatgctgaattga

SEQ ID NO: 275839 - DNA, 526 bp, Unknown
  Bacterial polypeptide expressing nucleotide sequence isolated from the Sargasso Sea
tcgactagaaatattctagatacagtattggctccagcctctgcaccgctggagatgcaaaaaagatgtcaagaaattgcggtgaaaattgccgagtcgtttcattacgtcggtattatggcaattgagttttttgtgtgtaaaagcggagtgttaagggttaatgaggtttctcctcgacctcataatagtggtcattacaccattgaggcatcggcgacgtcgcagtttgagcagcatgtaagagctgtgacggggcaaaagctaggcccttcagacttaaagtcctcagccgctacactgaatttattgggttcagattgctcttcaggtaagccggtttttaagggagtagaaaagtactccattaatgagagaatctatatccacaattaccgcaagcccattgtccgtcctggacgtaagatgggacatgtgactatattgggcgatgacagggagtatattttggagaaggccaaggaaattaagagtgagataaaagtggagggaacgaatggatgaa

SEQ ID NO: 275840 - DNA, 292 bp, Unknown
  Bacterial polypeptide expressing nucleotide sequence isolated from the Sargasso Sea
atgaaaaatattaaaaaactcaaagtctctattgttatgggtagtcaatctgactataaaactatgaaattagctgctaaaatccttaaaaacttaggtgttaaatttgaaacaaaaataatatcagctcaccgaaccccaaatagaatgtttgaatatgcaagttctgcagatagaaataatattggtgtaataattgctggtgcaggaggatctgctcatcttccaggaatgatttcagcgctaactacaattcctgttttaggtgttccaattgaaagtaaaaaactca

SEQ ID NO: 275841 - DNA, 493 bp, Unknown
  Bacterial polypeptide expressing nucleotide sequence isolated from the Sargasso Sea
atgtctcaaaataacaaatcaagagtatctatcgttatgggtagtcaatctgactataagacaatgaaattaagtgcaaaaatactgaaatctcttaaaatccaatatgaaattaaaataatatcagcacatcgaactccaaaaagaatgtacaggtttgcaaaaaacgctgaaaaaaataaaatttctgtaattattgctggtgcaggaggttctgcacatcttcctggaatgattgcttctttaacatccttgccagtaattggagttccaatacaaagtaaaaaacttaagggattagatagtttattatctatagttcagatgccaaaaggtatacctgttggaaccgtagctattggagaagatggcgctattaacgcagctttattagcagcatcaattattgcaatcagtaataaagaagtaagaaatagattaaataatctaagaaataaacaaacaaaatcagtcaaaaaaatacctagataat

SEQ ID NO: 275842 - DNA, 487 bp, Unknown
  Bacterial polypeptide expressing nucleotide sequence isolated from the Sargasso Sea
aaaaaggttaatcatattgtgtctattgttatgggaagtaagtcagattattctacaatgaaattctgcgaaaaagtgcttaaaatactgaagataagctatgaaactaatattgtatctgcacatagaacacctgacagaatgtttaaatatgcaaaatcttctgaaaatagaaatatttcagtaataattgctggcgcaggaggatctgcacatctaccgggcatgatagcatctttaacaagagtgcctgtaataggtgtgccaattgaaagtaaaaaacttaaaggcttagacagtttgctgtcaattgcccaaatgcctaaaggcataccagttggaacagtagctattggtaaagatggtgcaattaatgcaggattgtttgctgcatctattatttcaaattttgataataaaattaaaaataatttaattaagtggcgaactaagcaatctaaatctgtaaaaaaaaaaccaaagtaaa

SEQ ID NO: 275843 - DNA, 655 bp, Unknown
  Bacterial polypeptide expressing nucleotide sequence isolated from the Sargasso Sea
tgaagattttttaccaggtataataaaaacaactacattgggatacgatggtaaaggacagcaccctatttcatcagccgaagaattaaaaaatcttaaattagatttatcaagaggatatattttagaaaaattagtcaaacttaaaaaagaaatatctattattataactcggttcagtaataacaaatacgaaatatatgaacctatagaaaatacccatgaagatcagattttaaaacattctaagatacctgcggatataaatgaaaaaatatttaatcagtctaaagattgggcgattcttattgctgaagaacttaagtatgtgggtactctatgtgtagaattttttatagatagaaatgataatctttatgtaaatgaaattgctccaagagttcataattctggtcatttaacaattaatgcttttaatgtaagtcaatttgaaaatcatataagagctgtttgtggacttgaacaaatacctttaaaaaaattatctaatgcaaaaatgataaatctactaggagatcaaatatctcagtacagaaattctccaaaacttaaagataatgaattcttttttgattacttaaaaaaagaaatcaaagataaaagaaaaatgggtcatatcactattctggaataa

SEQ ID NO: 275844 - DNA, 880 bp, Unknown
  Bacterial polypeptide expressing nucleotide sequence isolated from the Sargasso Sea
catgaaaacaaaaaaaacaattggtatcctaggtggaggacaactaggcatgtttctttgtaattcagcaaaaaagcaagaagtgaaagtgtcaattttttctgaggttgataactgtagtgccaaaagttttgctgataagttttacctaggagatttttctaaattaaattcactcgataaatttataaattctgtggatttaataactgttgaaactgaaaatatacctttaaaaatacttcattacatagaaaaaaaaaaaaaactctttccaaattcaaatgtaatttcaattgcacaggacagaatgaaggaaaaaacgtttattaattcacttaataagattaaaacaacgaattttaatcctattaatacatttgaagaccttaaaatatctctaaataattttggtggtaaaattttaataaaatcttgtcaatttggttatgatggtaaaaatcaatatttaattaataataaaaatttgattgattttaaaaactttaatctatccaattttatagcaaaagaaattattgatttcaaaaaagagttttcagttattgttgcaagagacttttatggaaatattgtgaattatccaccagttgaaaatattcatagaaataatatacttcataaatcaatatatccagcgaaaattccagaagtaataaaaaaagaagcagtagatttttcaaagttttttgcaaataaaattgatttagttggtattttagctattgaaatgttcttgttaaaaaataataaaattctagtaaacgagatagctcctagaccacataattctggacactggactatggatggatgcaatgaaagtcaatttgattatttaataaatattcttttaaga

SEQ ID NO: 275845 - DNA, 346 bp, Unknown
  Bacterial polypeptide expressing nucleotide sequence isolated from the Sargasso Sea
atgtatgaatatgctgcaaaagttgagcaaaataatataggagtaattattgcgggtgccggaggatctgctcatcttccaggtatggtatcagcacttacacatgtgccagtacttggtgttcctgttgaaagtaaaaaacttaaaggtttggatagtttgttatcaattgcacaaatgcctaaaggaatacctgtaggcacccttgctataggagaggatggtgccattaatgctgctttattagctgcagcaataattgctaataataattcaaatgttcaaaaaaaacttaaaaattttagaacatcacaaactaaatctgtaaagaaatctccaaaataaa

SEQ ID NO: 275846 - DNA, 565 bp, Unknown
  Bacterial polypeptide expressing nucleotide sequence isolated from the Sargasso Sea
ttgggcggcggacagctcggacgcatgctcgccgtctcgggggcgcccatgggcgtgcgattgaaggctttggatcccacggagaacgcgccggcatcgatcgcggcgacgcaggtggtcggaagttttcgggacgaggcggcggtgaaggcgttcgcggagacgtgcgacgtggtgacggtggagattgagcacatcgacgtcgaggcgttgagacaattggcggcggctggcgtcgacgtgcaaccgacgccggagacgttagcgacgattcaagataaatacgcgcaaaaggtgcacttcacgaacgcgggcgttcctctcgggccgtacgcggattgcccggacgccgaagcgctcgagcgcgcggcaaacgagtttgggtttccactcatgctcaagtcgaagcgtttggcgtacgacggtcgcggtaacgccgtggcgaagacggcggacgatctgaacgatgcggtgtccaagttgggggggtttgaacagggtttatattgcgaaaagtgggtcccgtttgaaaaggagttggccgtgatggtggttcgcgcgagag

SEQ ID NO: 275847 - DNA, 724 bp, Unknown
  Bacterial polypeptide expressing nucleotide sequence isolated from the Sargasso Sea
tattaataagtgtaacattagcactactagatatgtctcaattaaagaaaaatctgatcttaatgcaaatgtaaaattaattcctggacttcttaaaacttgtaggcttggttatgatgggaaaggacaatacaagttaaataatccttcagatttagaaaatttgaatattgatttttctcaggaatatattctagagaaaatgattaatttaaaaaaagaattttcaattatattaactagatttggtcactctattcactcggtttatgaaccaattgaaaacgaacatgaaaaccaaatactaaaatattcaaaaattccagctgatattgatgataaaatcgtagcaaaagcaaaagattgggcatcaataattgcagatgatttagattacgtaggaacaatttgtgtagaatactttatagataaaaatgataatttatatgtcaatgaaattgcaccaagagttcataactctggccatttaacaataaattcatacaatgttagccaatttgaaaatcatataagagcgatctgtggcttagaaaaacaggaattaaaaaaaatatataatgcaaaaatgataaacattattggtgaagaaattgtctcatatcgatctaaaaaatatactgataatgaatttttttttgactatggaaaaaaagaaatcaaggcaaatagaaaaatgggtcatttaactgttattcaaaagtaa

SEQ ID NO: 275848 - DNA, 259 bp, Unknown
  Bacterial polypeptide expressing nucleotide sequence isolated from the Sargasso Sea
atgaaaaacaaaaaatatagtcacaaggtatcaattgttatgggaagtaattctgattactcaaccatgaaattttgtgaaaaaattcttaaattgcttaatattaattatgaaacaaatatagtttcagctcatagaactccagaacgtatgtttaaatatgcaaaatctgctgaaaaaaataatatttctgtgataattgctggagcaggaggatcagcccatttgccaggaatgattgcatctctaacaagaatcc

SEQ ID NO: 275849 - DNA, 493 bp, Unknown
  Bacterial polypeptide expressing nucleotide sequence isolated from the Sargasso Sea
aatgcctcaaaaaaataaacctttagtatcaataattatgggtagtcaatctgactattcaacaatgaaatatgcagaggaagtattaaaaaatttgaggattaaattcgagataaaaattgtttctgcacatagaacaccaaaaagattatacaattatgcctctaaggttgatggagaaggtattgcaataattattgcaggggctggtggctctgcacatttgccaggaatggtggctgcaataacaacagttcctgttattggcgttccaattgaaagtaaaaaacttaagggattggatagcttattatctatagtacaaatgcccaagggaattcctgttggatcagttgcgataggtaaagatggtgctataaacgcagctttgtatgcagcatcaatcttaggggtaagtgacaaaaaaataaaatcaaaattaaaacaattaaggtctaaacaaactaaatctgtaaaaaaaaaaccaaaataa

SEQ ID NO: 275850 - DNA, 457 bp, Unknown
  Bacterial polypeptide expressing nucleotide sequence isolated from the Sargasso Sea
tatgggtagtcagtctgattactctacgatgcgctatagtaaaaaagtacttaaaatattaaaaattaagcatgaaataaagatagtttctgctcatagaacccctgaaagaatgtaccaatttgcaaaaacagctgaaagaaacaatatatctgtgattattgctggtgctggtggctcagcacatttgcctggtatgattgcagctttaacaaaaataccagtaattggggtccctattgaaagtaaaaaattaaaaggtctagatagtcttttgtcaatagctcagatgcctaaaggaatacctgttgggactgttgccatagggaaaaatggagcaattaatgctgctttgtttgctgcttcaataatttctttaatcgatccaaaatctaaaaaaaatttaaatctttggagaaataaacaaacacgatctgttaaaaaaaaacctaactag

SEQ ID NO: 275851 - DNA, 432 bp, Unknown
  Bacterial polypeptide expressing nucleotide sequence isolated from the Sargasso Sea
aacaaattttaaaacattcgactattccagctcacattaatctgtctcattttgaaaaatctcaagaatgggccaaacttatttctgaagaacttaaatatgttggaactttatgtgttgaattttttatagataaagagcaaaatttatatgtaaatgaaattgcaccaagagttcataattcaggtcatttaactataaatgcttataatattagtcaatttgaaaatcatatcagggctgtttgtggattagaaaaaataaaactacaaaaaatatacaatgcaaaaatgataaatattattggtgacgaaataaataattacagaaataaaaaatttactgaaaatcaatttttttttgattatttaaaaaaacaaattaaacctaaaaggaaaatgggccacttaactataattgaaaataaataaa

SEQ ID NO: 275852 - DNA, 436 bp, Unknown
  Bacterial polypeptide expressing nucleotide sequence isolated from the Sargasso Sea
gcaactatgaaatatgctgaaaaagttttaaaaagtttaaaaattagatttgaaataaaaattatttctgctcacagaacacctaaaagattattcaattttgctttaagtgctgaaaaaaataatatttctgtgataattgctggagctggtggatctgctcacttaccaggcatggtagctgcaatatctcctataccagtaattggagttccgatagaaagtaaaaaattaaaaggattggatagtttattatctatagttcaaatgcctaaaggaattcctgttggatcagttgcaataggcaaggacggtgcaataaacgctgctttatacgcagcttcgatcttagcaataagtgataaaaaaattaaatcaagatttaatcaattaagatccaaacaaactaaatctgtaaaaaaaaaacctaaataat

SEQ ID NO: 275853 - DNA, 820 bp, Unknown
  Bacterial polypeptide expressing nucleotide sequence isolated from the Sargasso Sea
tgccgtccactagtggaagattttactgttggaagactaaccgacgaggatgcaatctatcagtggggtaagaaatttgacctcattacaatcgagatagaaaatgtctccgttgctgcgctaaaaaggctggaaaaagagggcgtgaaggtttttccgcagccccacattatcgaactgattcaggacaaacgcacccaaaaggtgttttacaaggagaatgaaatacctacggccgattttgagttagtcgaagaccttcaagacattcagtccaagaaacattggttgccggcagtcaataaagttgggaaagaaggatacgacggcaaaggggttcaaattcttagaacagaagacgacttacgcaaaggctttgattcccctggactgcttgaaaatctggtagattttgaaaaggaactgagcgttattgttgcaagaaatgagaaaggggagatgaagtgtttcccattagtggaactctcttaccaccctgaacagaaccttgtagaatttctatttgctcctgctcaggtctccaagtccattgaagcggcagcctatgaacttgcaaaagatgtgatttctaaactgtctatggttggcctactggccgtagagatgtttctaacaaaggatggccatttactagtcaacgaagttgctcctcgcacacacaattcgggccaccacacgattgaggcaaatgtcacgtcacaattcgaacaacatattcgagctattttgaacataccattaggcagcaccttacttcgtactcccgccgctaaaggcaacttacttggtgaagatggat

SEQ ID NO: 275854 - DNA, 646 bp, Unknown
  Bacterial polypeptide expressing nucleotide sequence isolated from the Sargasso Sea
tgtacctggtatacttaagacatgtactttgggctatgatggaaagggacagtataaaattggaaacgaaaaagaattagataatttaaaaattgattttgataatgaatatatttttgaaaaattaattaaactaaaaaaagaaatttctgttatcataacaagatttggacctgaaaaatatgaggtatacgatccaatagaaaatgtacacgaagatcaaatattaaaatattcaattatacctgctgaagtaaatcaaagtttgtatgatcagtcagttagatgggcaaaatatatttctgaagaacttaattttattggaactatgtgtgttgagtattttatagataaaaatgaaaatttatatgttaatgaaattgcaccaagagtacacaattcgggacatcttacaattaacgcttataatgttagtcagtttgaaaatcatataagagctgtgtgtggtttaaaaaaaattgaaactaaaaaaatatataatgcaaaaatgataaatttaattggggacgatattcttgtttatagaaacaaaaaatttaaagataatgaatttttctttgattatttaaaaaaaacaataaaagaaaaaagaaaaatgggtcatttaactataatagaaaaataa

SEQ ID NO: 275855 - DNA, 427 bp, Unknown
  Bacterial polypeptide expressing nucleotide sequence isolated from the Sargasso Sea
ctgaataataaagtagcaattattatgggatctcaatcggatcattccataatgaaagaatgcgcgaaaattttaaagactctcaaaattaaatatcaaatttcaatagtaagtgcgcacagaacaccaaaaagaatgttcgaatttgcagagtcagcctcaaaaaacggttttggtgttattgtggctggagcaggaggttcagcacatttgcctggcatggtggcatctttatcttccttgccagttattggagttccgatagaaacaaaaaaacttaagggtttagatagtttgttatcaatagtgcaaatgccgcgaggttgtcccgtagccacaatggctattaatggatctattaatgcagggttacttgctgcctcgattattggaaattttgatgaaaaaattaaaatcaaatttagaa

SEQ ID NO: 275856 - DNA, 733 bp, Unknown
  Bacterial polypeptide expressing nucleotide sequence isolated from the Sargasso Sea
aaagattttgtgaataaattaaatatcagaaccacaagatatgttagtatagaaaaaaaatcggatttagagactcttgatgattttttgccaggaattttaaaaacagcaaccatgggttacgatggaaaaggtcaatatcctattaaatcactaagtgagttaaatggattaaatatagatttttcaaaagaatatattcttgaaaaactagttaaattaaaaaaagaaatctcagttatagtcacaagatttggtaataacagatacgaaatttatgaggcaatcgaaaatattcatgaaaaccaaattttaaaaaagtctaaaatccctgctgatattagcaataaacttgttgatcaatctagagagtggagtaagcaaatttccgaggaattaaaatacattggtacactttgtgtagaattttttattgatagaaatgataatctatatgtgaatgaaattgcacccagagttcataattctggccatttaactattaatgcttttaatattagtcagtttgaaaatcatataagagcagtttgttctttagagcaaattcccttaaagaaattacataatgcagaaatgataaatcttataggtaatcaaattaccccatatagacaaaatataaatttaaaagataatgaattttttttcgattatcaaaaaaaagaaataaaagataaaagaaaaatgggtcatttaacaaaaattttataat

SEQ ID NO: 275857 - DNA, 493 bp, Unknown
  Bacterial polypeptide expressing nucleotide sequence isolated from the Sargasso Sea
aatgaaaaaaaaagttagtcataaagtttcaattgttatgggtagtcagtcagactattctacaatgaaattctgtgaaaaagtccttaaaatactaaatataagctatgaaacgagcattgtatctgcacatcgaacacctgaaagaatgtttaaatatgcaaaattagccgaaaatagaaatgtttcagttataattgcaggcgctggtggatctgcacatttgccaggtatgctagcatccttaacaagaattcctgtaataggggtaccaattgaaagtaaaaaactcaaaggattagatagcttgttatcaattgttcagatgccaaaaggcataccagttggaacagtcgctataggaaaaaatggagcaattaatgcaggactatttgcagcatcaattatttcaaattttgataaaaaaataaaaaatagtttaattaaatggcgaactaaacaatctaaagcagtaaaaaaaaaaccaaaataa

SEQ ID NO: 275858 - DNA, 814 bp, Unknown
  Bacterial polypeptide expressing nucleotide sequence isolated from the Sargasso Sea
atgaagaaaactaatcttggtattttgggtggcggtcaattaggttgtatgctttgtatggcagcaaaaaaattggatgtttatacaattgtatggagcgatgacccaatgtctcccgcgaaagaattttctgatgaatttattttgtcaaattataacgatgaagaaaaaattaattatttcactaaaaaagtagacaaaattacctttgaatttgagaatatcccttttgatattttagataaacttaattcgataaaagaagttttaccaaaacctcaaataaataagattattcaaaatagaattttggaaaagaattttgtaaatgatcaaaatatcaaaactacacaatacaaaaagattaataataaagatgatttgatatcaaatggtgatcttttacctgcgatgttgaagacagctactcttggttatgatggaaagggacaatttaaattaaataatcttgaggattgtgagaatattagcctttctaaaaatagcgactatatattagaaaaaatggttattttaaaaaaagaaatctctgtaatagtcacaagatttaaaaaaaatgaatacgaaatttatgagccatttgaaaataaacatgaagaccaaatattaaaagtctctaaaattccagccagcataagtaaagaacatttttctcaatctgttgaatatgccaaaaaaattagtgaaaagttggattatgtaggaactttatgtgtcgaattttttatagatgataaagacaatttgttagtaaatgaaatcgcgcccagagtacataattccggtcacatga

SEQ ID NO: 275859 - DNA, 442 bp, Unknown
  Bacterial polypeptide expressing nucleotide sequence isolated from the Sargasso Sea
tgaaaatatacataaaaatcaaattttaaaatactctaaaattccatgcaatattaataaaaaaattaaaaataaagcaatagcgtacgcaaaattaatttctgaaaaattaaattatattggtaccttatgtgtggaatactttatagataaaaaaaataatctttacgtaaatgaaatagcaccaagagtccataattcaggccacttgaccataaattcacataatgtaagtcaatttgaaaatcatattagagcagtttgcaaattgaaaaaaattaaaactaaaagaatttataaggcgagaatgataaatttaattggtaatgatataagaaaatatcgtaataaaaaaaataaaaaaaatcaatttttctttgactacttaaaaagtgatatcaaagctaaaagaaaaatgggacatgttactattataaaataa

SEQ ID NO: 275860 - DNA, 508 bp, Unknown
  Bacterial polypeptide expressing nucleotide sequence isolated from the Sargasso Sea
atgaataatcagaatataacaccatcagttgctattattatgggaagtcaaagtgattgggaaactatgaaattttcagaggaaattttaattaaacttaaaattgcttttactactaaaattatatctgcacacagaacccctgataggatgaatgacttcgcaaaaaaagcacgggataattcaatccaggttattattgctggtgctggaggtgccgctcaccttcctggtatggttgcctcacatactgaattaccagttataggtgtgcccattcaaagttcttcattaaatggcattgacagtcttctatcaatagtccaaatgcctggtggggttccagtagcaacaatgtccattgggaaagctggtgctattaatgcagccatttatgctgctaaaattttaagtttgtctaacaaagaaataaatacaaaactaacaaattggttatcttcccaaaaagacaatgtcccactcacaccaaacaaaaaaaatgactaaa

SEQ ID NO: 275861 - DNA, 656 bp, Unknown
  Bacterial polypeptide expressing nucleotide sequence isolated from the Sargasso Sea
tggagatgcaattattaaaactagaagatttggctatgatggaaaaggtcaaattagcgtaaatcaaaaaactaattttgataaaaatatttcatcattatttaatcaatcaattattgaaaaaaaaataccttttgaatttgaattttcacaagttagttgtagggatgtatttggtaatgtttttcattttcctttaactaaaaatattcacgaaaatcatattcttaaacactcatatgcccctttagatcttccaaatgatcttgaagaatatgcaagagaaattaccaaaaaaattatttctgatttagatcatgtaggcgtactaaccgttgagttttttaaaacaaaagaaaatattcttgttaatgaaatagctccaagagttcataattccggtcattggactattgaaggatgttcatcaagtcaatttaaagtccatatgcaggcagtatctgggataaaaataactcaacctaaattattaaatgaatgtcatatggttaacttgattggtgacgaaataaatgactggataaataaacaatctgatagtgacatgaatattcacctttatcataaaaaagaaattaaaaatggtagaaaaatgggacatttaacttatataaaagataagaaaatcttataaa

SEQ ID NO: 275862 - DNA, 457 bp, Unknown
  Bacterial polypeptide expressing nucleotide sequence isolated from the Sargasso Sea
tatgggtagtcaatctgattattctacgatgaaactaagtgaaaaagtgctgaaaatgcttaaaattaaatacgaaaccaaaatagtatctgcgcatagaactcctaaaagaatgtatgaatttgctaaatcgtctgaaaaaaatgggttttcagttattattgctggagcaggaggatctgcgcatcttccaggtatgatagcgtctttaactaaaattcctgtaataggagttccaatagaaagtaaaaaacttagaggtatagatagcctgttatcaatagctcaaatgccaaagggaattccagttggaactgttgcaattggagaagatggggcaattaatgcaggacttctcgctgcatcaatattgtcgctcagcgataaagttttgaaaaaaaaattaaatctctggagagataaacaaacaaattcagttaaaaaaaaacctcggtaa

SEQ ID NO: 275863 - DNA, 289 bp, Unknown
  Bacterial polypeptide expressing nucleotide sequence isolated from the Sargasso Sea
tgctggtggctctgcacatttaccaggaatgattgcggctcttactcaaataccggttttaggcgtgcctattgaaagtaaaaaacttaggggtttggatagtttattatctatagtgcaaatgcctaaaggaattcctgtaggaacgctagcgataggagaagatggagcaattaatgcagctatacttgctgcatcaattatatctaacaataatcctattgttagatttaaacttaaaagttggagagcttctcaaacaaaatcagtaaaaaaaaatccaaaataa

SEQ ID NO: 275864 - DNA, 157 bp, Unknown
  Bacterial polypeptide expressing nucleotide sequence isolated from the Sargasso Sea
atgataaatgaaacagttcaagtggcaattataatgggttcagactcagatttacctgttgtagagtcaagtttttcaatactagatgattttggtgtcaaatacactaaaaacgttatgtctgctcatagaacaccgcatgatgttaggaactaat

SEQ ID NO: 275865 - DNA, 454 bp, Unknown
  Bacterial polypeptide expressing nucleotide sequence isolated from the Sargasso Sea
atgggtagtaaatctgattatgctaccatgaaaaattgtgaaaaaattttaagattactgaaagttaagtttgaaactaaaattgtttctgcacaccgtacaccagagagaatgtttaaatttgccaaatcagctgaagacaataatatttctatcattattgctggcgcaggaggctctgcacatttaccaggaatgattgcatcattaacaactatacctgtaatcggcgtaccaatagaaagtcgtaaattaaaaggattggatagtttgttatctatagtacaaatgccaaagggtattcctgttggcagtgtggcaattggtgaagatggagcaatgaatgccggtttatatgcagcttccattattgctgttacaaataaagacattaagaaaaatttaataaattaccgaacaaaacaatcaaaagctgttaaacaaaaaccataag

SEQ ID NO: 275866 - DNA, 859 bp, Unknown
  Bacterial polypeptide expressing nucleotide sequence isolated from the Sargasso Sea
agtcgcttttgtaagaatgtagacgttctaacttatgaatttgaaaacatatacacaaaagcattagaggaattagatctctttgtgaacatgaggccttctgtaaaagccctaaaaatctctcaggaccgcttaactgaaaaaagttatcttaattcgttaggtattaaaactgcacaattttataaaattgatggagtttctgaaattgaaaagctatttactagactaaagaaaccaattcttatcaagacacgtaggctaggttacgacgggaagggacaaatattagtcaaaacactagatgatattaacaatcattttctcagcaaaaaactttttccatctatagctgaggaagttattagtttcgatagagaattatccgtaataatagtccgggataaaaagggtaatattaagacttttgaaccaggagaaaatgtacatgaaagcggaattctggcaaccacgactttaccctccccaaccagtgaagcgcttaaaaatgccgctattaccattgcaagaaaaattgtagccgatctagactatatcggagttatgggggtagaattttttttaaaagactctgagctttatgtaaacgaaattgctccaagagtacataactctgggcattggacaatggacgggagctactctagccagttccagcaacacatcagagcaattatggacttgcctctgctatcaaccgagaggcattccgacattatcatgtataacttaattggaaaagtgactagtaatctcgttaaaaatgagttagcaaaaatctatctttatggaaagaaagaaactcgtcctggaagaaaatgggtcacattaatttaat

SEQ ID NO: 275867 - DNA, 664 bp, Unknown
  Bacterial polypeptide expressing nucleotide sequence isolated from the Sargasso Sea
tttaaaagatttccttcctggtattttgaaaattacaactatgggatatgatggtaaaggccaatttccaataaacaaaatagaagatcttgattttcttaatatagatttttcaaaaaaatacatacttgaaaaactggttaagcttaaaaaagaaatttcaattgttttaactagatttggtaataataattacgaaatatacgatccaattgaaaatactcatgaggatcaaatccttaaacattctaaaatcccagccaacataagccaaacaaatatgaataaatctagagattgggcaaaatctatagctgaagaattaaaatatattggtactctatgtgtggaatttttcattgatagaaatgaaaatttatatgtaaatgaaatagctccaagagtgcacaactctggccatttaactatcaatgcttataatgtaagccaatttgaaaatcatgtcagagcagtttgttctctaaaaaaaataactttgaagaaagtatctgatgccgaaatgataaatttaattggaaatcaaattaaaccatatagggaaaatttaagattaaatgaaaatgaatatttttttgattatttaaaaaaagaaattaaagataaaagaaaaatgggccacataactagattaataaatgcttaa

SEQ ID NO: 275868 - DNA, 262 bp, Unknown
  Bacterial polypeptide expressing nucleotide sequence isolated from the Sargasso Sea
atggcgaaaatcgcaattgtgatggggtcgacatcggattggccaacaatgcaaaacgcggcagtaatgctcaaacaattcggtgttgaatttgaggcacaggttgtctcggcacaccgtactcctaatctgttagtcgaatttgccgagcaggcagagcaaaatgggttttgcgccattattgccggtgcaggcggggcagcccatctgccaggcatgattgccgctcacactcacttaccggtattcggttgcccggtga

SEQ ID NO: 275869 - DNA, 910 bp, Unknown
  Bacterial polypeptide expressing nucleotide sequence isolated from the Sargasso Sea
tgctttctacagctggctaaaaatttaaatttaaaaactataattatttctgatgatgaacatgcgcctgcacaattttttgcagatgagtttattttttgtaactataatgacgaattaaaaattgatgaattttctaataaaatagattttgtaacttatgaatttgaaaatattccgtacgaaactttatgtaaaatagataatataaaaaaagtaaatcctaggccttctataaataaaattattcaaaatagacttagtgaaaaggattttttaaataaaaataatattaaaactacttcctatatttctgtcaaaaatgaaagtgagctaaagtctagtcaagattttatcccgggtatacttaaaacttgtacgctaggttatgatggaaagggtcaatataaaattaataatgaagaagaattagataatttaaaagttaattttgaaaatcattacatattagaaaaattagttaagcttaaaaaagaaatttcagtaataattacaagatttggaaaacaaaaatatgaagtgtatgatccaatagaaaatgttcatgaagatcaattattaaagtattcaaaaataccagctgaggttagcgaagtcttgtttgataaatccaaagaatgggcaaagtatattgcggaagaacttgattatataggaactatgtgtgttgaatattttattgataaaaatgacaatttatttgtaaacgaaattgctccaagagttcataattcaggacatcttacaataaatgcatataacgttagtcaatttgaaaatcatataagagcagtatgtgggctagataaggttgaaactaaaaaattacataatgccaaaatgattaatttgattggtgaagatatattggtttatagaaaaaaaattt

SEQ ID NO: 275870 - DNA, 565 bp, Unknown
  Bacterial polypeptide expressing nucleotide sequence isolated from the Sargasso Sea
tatttcatcattatttaatcaatcaattattgaaaaaaaaataccttttgaatttgaattttcacaagttagttgtagagacatatttggtaatattgttcattttcctttaactagaaatattcatgagaatcatatccttaagcactcatatgctcctttaaatctttcaaatgatcttgaagaacatgcaaaagaaattaccaaaaaaattatttctgaattagaccatgtaggcgtactaaccgtagagttctttaaaacaaaagaaaatattcttgttaatgaaatagctccaagagttcacaattccggtcattggactattgaaggatgctcatcaagtcaatttaaagtccatatgcaggcagtgtatggggtaaaaataactcaacctaaattattaaatgaatgtcatatggttaatctgattggtgaagaaataaatgattggataaataaaaaatctgatagtgatgtgaatattcatctttatcataaaaaagaaattaaaaatggtagaaaaatgggacatttaacatacataaaaaataagaaaatatga

SEQ ID NO: 275871 - DNA, 660 bp, Unknown
  Bacterial polypeptide expressing nucleotide sequence isolated from the Sargasso Sea
ataaagatttattacctggaattcttaaaacatcaaaatttggatatgatggaaaaggacaatcaaaaataaattctgttaaagaaatagaaaatttaaaaattgattttaaatatgattatatacttgaaaaattagttaaattaaaaaaagaaatttcaataatattaacaagatttggtcctggaagttttgaaatttatgaacctattgaaaatgttcacgaggatcaaatattaaaatcatctaaaataccatctcaaattagcaaagaattaaatgataaatcgaaagaatgggctaaaataattgctgatgaattagattttattggaactatgtgtgttgaatactttatagataaaaatgataatttatttgtcaatgaaattgcacctagagtccataactcaggacatttaactattaactcttataatgtaagtcaatttgaaaatcatataagagctgtgtgtaaattagaaaaaatacctataaaaaaattatacgattctgaaatgattaatatattgggggataatattgttaattatagaaataaaaagtactctaataatgaattcttttttgattatttaaaaacagaaattaaatcaaaaagaaaaatgggacacttaaccacccttaaaattcaataaa

SEQ ID NO: 275872 - DNA, 301 bp, Unknown
  Bacterial polypeptide expressing nucleotide sequence isolated from the Sargasso Sea
gggatgttggcatccataacttgcatacctgtaattggagtaccagtagagagtaagacacttaaggggattgactctcttttatcaattgttcaaatgcccgctgggataccagtagcaacagttgcaattaatggaggtcaaaatgctggactattggcaataggaatgatcagtttatttgatgaatctatgaaggaaaatctaaaaaaattcagagaaaatcttcataaacaggtaagaactaaaaatagtaagttatcaactattggagctgaaaattatcttcaaaataaatgag

SEQ ID NO: 275873 - DNA, 844 bp, Unknown
  Bacterial polypeptide expressing nucleotide sequence isolated from the Sargasso Sea
catgaataaacccacacttggcattattggtggtggacaattaggaagtcttttagcagatgctgcaaaaaatatagatatacaaaccgtcatattgagtgatgatcctgatgcacctggaaaacactttgctacaaaatttatttttggtcagtatgacgatgatacaacgataaataattttattaatgaagttgatcttgttacatatgagtttgaaaatattccctttacaatattaaaaaagattaatgaaaagaaaaaagttttaccaaaacctgaaattaataaactcattcaacaccgagaagcagaaaaaaaatttcttaatgacaataaaataacaacaacaaaatatgtgactgtcagaaatgaaaaaaatttaagtgataatatagacttgcttcctggtctgttaaaaacaacaacgttaggatacgatggtaaaggtcaatataaattaaattctttagatgatattactagcgagattgattttacaaaagaatatatcttagaaaaaatcattcatcttaaaaaagaaatttcagtagtaattactcgctatgatcaaaatagttatgagatctatgaccctattgagaatgttcatgaagaacaaattttaaaatattcaacaataccaagtgatatttctcatgacatacaaacaaaatcggttgagtgggcaaaacaagttgtagaaaaactagattatattggaacgttatgtgtagaattttttattgatgccgatgataatttatatgcaaatgaaattgctcctcgtgttcataattctggacatcttacaatgaactctcataatattagtcaattttga

SEQ ID NO: 275874 - DNA, 656 bp, Unknown
  Bacterial polypeptide expressing nucleotide sequence isolated from the Sargasso Sea
agaggattttttacctggaatattaaaaacaacaacacttggctatgatggtaaaggtcaatatccaattaaatcaggtgatgaacttaattcattgaatattgatttttcaaaaggatatattcttgaaaaacttgttaaactaaaaaaagaaatttcaattatcattacgagatttagtaacaataaatatgaaatttatgaaccaattgaaaatatacatgaagatcaaattttaaaatattcaaaaattcctgcagaaattaatgaaaagatttttaatcaatctaaagattgggcaatgctaatagctgaagaattaaaatatgttggaactttgtgtgtagagttttttattgatagaaatgataatctttatgttaatgagattgcacctagagtacataactcaggacatttgacaataaatgcttttaatgtaagtcaatttgaaaatcatgtaagagctgtgtgtggtttagaacaaattccgttaaaaaaaatatctaatgctaaaatgatgaatttacttggtggtcaaattactcattatcggaacgtaaaacagtttaatgataacgaatttttctttgattatttaaaaaaagatataaaagaaaaaagaaaaatgggtcatatcacaactttagtataat

SEQ ID NO: 275875 - DNA, 496 bp, Unknown
  Bacterial polypeptide expressing nucleotide sequence isolated from the Sargasso Sea
tatgaaaaaaaaaatctttatttctattgtcatgggaagtcagtcggactggaaaactttaacctattgtgaaaatatctttaaaaagataggcattgattatgaaaaaaaaattgtctctgctcacagaacacctgacaggttatatgaatttgctaaaaatttaaaaaaaactaatattgaagttgtgattgcaggtgcaggaggagcagctcacctcccagggatgatagcctctctgactcatatacctgttctgggagttcccattgaatcaaaaacgttaaaaggtctcgacagcttattatctatagttcagatgcctgcaggtatacctgtaccaactttagccattgggaaagccggtgctattaattcagccctagctgcggctgcaatattgggtaataaatacccagatattaaaaaaaaactgatactttttagatccaaacaaactaagtctattaaaaaaaaacctattaatgaaaaatag

SEQ ID NO: 275876 - DNA, 828 bp, Unknown
  Bacterial polypeptide expressing nucleotide sequence isolated from the Sargasso Sea
aatgtcagaaattactcttggtatcattgggggtggtcaacttggaagtatgcttgcaatagcagctaaaaaattaaatgttaaaacagttattttttgtgatgatatagatgcaccagcacaaaatttttgcaatcaatttgttactggaagttatgataataatgaaaagatatcagaatttataaatcaggttgatttggtcacttatgaatttgaaaatattccatataaaacattaaatgaaattaataaatttaaacctgttttaccaaagccttctgttaatagattaattcaacatcgattggctgaaaaagattttgttaataaattaaatattagaacaactagatatgtttcgattgaaaaaaaatctgacatagatgccttagaagattttttaccaggaatattaaaaacaacaacacttggttatgatggcaaaggtcaatatccaatacattctagtaaggaacttaattcattgaatattgatttttcaaaaggatatattcttgaaaaacttgtaaaattaaaaaaagagatttcgattataattacaaggtttagtaataataaatatgaaatttatgaaccaatagaaaacgctcacgaagatcaaattttaaaatattcaaaaattcctgcggaaataaatgaaaaaatttttaaccaatctaaagattgggctatgcttatagctgaggaactaaaatatgttggaactatgtgtgtagaattttttatcgatagaaatgataatctttatgttaatgagattgcaccaagagtacataattcaggacatctaacaataaatgcttt

SEQ ID NO: 275877 - DNA, 908 bp, Unknown
  Bacterial polypeptide expressing nucleotide sequence isolated from the Sargasso Sea
ttgtgaaaactatgaagatgaaaatttaataaatgagttcatcagcaaggttgatttagttacatttgaatttgaaaatattccttacaaaatattaaaaaatattaataattataagcctgtattaccaagcccagaaataaataaattaattcaaaatagatattcagaaaaagattttttaaatcaaatagacattagaactacaaaatacaaattaataaaaaataaagatgaaattaaattaaatgaaaatttaattccaggaatattgaaaacgtgtactctcggttatgatggcaaaggtcaatttaaaattaattcaataaaagaaatagacgagaatattgattttaataatgaatatattttagaaaaactaatcaatttaaaaaaagaaatatcaataattatttctagatttggccatcaaaaatatgagctttatgaaccaatagaaaatgttcatgaagatcaaatattaaaacattcaaaaattcctgcagatatttctgaaactctaaaagaaaaatctatagattgggcaaaaaaaattgtggaagacttagattatattggaactttgtgtgtagaatattttatagataaaaatgataacttgtatgttaatgaaattgctccaagagttcataattcaggacacttaacaatgaacacacataacattagtcaatttgaaaatcatgttagagctgtttgtggacttgaaaaaattgaaacaaaaaaaatatctaatggaaaaatgatcaacctaattggaagtgatatatctgaatatagaggtaaaacttttgcagataatgagtttttttatgattatttaaaaactgaaattcgcgataaaagaaaaatgggacatctaacaattatagaaaataaatcataat

SEQ ID NO: 275878 - DNA, 781 bp, Unknown
  Bacterial polypeptide expressing nucleotide sequence isolated from the Sargasso Sea
cacatttgcgcggcgttcgatgacgaaacgggactcgcgaagcttgcggaattgtccgacatcgtcacctatgaattggagcagcttccggcagataccctacgctggctgatagcgcgcgttccagtcgcaccgggtgttcgcatacttgaagtggcgcaggatcgggtccgcgaaaagacgtttctctcctccgtcggtatccccacggcggcatggcgcgccgttgagcgcaaggatgatcttttggcagcgcttgcagaaattggcagaccggcggtcctcaaggtcgcctacggcggttacgacggtaagggccaagccatgctcgaacaaacaaccatggacgccgaagtcctggccatctgggaccgcttcgccgacggtgccgacatgacagtgatcatcgaagagaaacttgattttgagtacgagctatcggtgatcgttgggcggagcgccgccggcgacaaagtcgcctatgacccggcctttaatatccacaagaaccatattcttgatacgtccgaagttccgggcccgtttacccccttggtggtggaaagcgcaaaggccatcgggttcaacctagctgaggcgttagaattggtcggagtgctatgtattgagctgtttctcctggcgtcgggtgaactccgcgccaacgaaattgcaccccggccgcacaactcgggccattggacactagatgccgcccatacggatcagttcgagcaactcgtccgtgccgcctgcggcttgccgttagggaacccaggcc

SEQ ID NO: 275879 - DNA, 645 bp, Unknown
  Bacterial polypeptide expressing nucleotide sequence isolated from the Sargasso Sea
ttccaggaattttaaagacatctactatgggttatgatggtaaaggtcaatatccaattaaaaagatagaagatttagattcattagatattgatttttcaaaagaatatattcttgaaaaacttgtaaaacttaaaaaagaaatttcagtaattgttacaagatttggaaataataattatgagatatatgagccaatagaaaacactcatgaaaatcaaatacttaaatattctaaaattccagctgacatcagtcaaaaaatattagatcaatctaaagagtgggcaactagaatttctgaagagttaaaatatattggtactctttgtgttgaattttttattgatagaaatgaaaatttatatgttaatgaaattgctcctagggttcacaattctggtcatttaacaattaatgcttataatataagtcaatttgaaaatcatataagggcaatatgctctttggaaaaaattcagcttaaaaaactatctaatgctataatgattaatttaattggaaatcaaattaatccatatagacaaaatttaaaattaaaggataatgaatttttctttgattatcaaaaaaaagaaattaaagaaaaaagaaaaatgggtcatataacaaccttgatttaaa

SEQ ID NO: 275880 - DNA, 427 bp, Unknown
  Bacterial polypeptide expressing nucleotide sequence isolated from the Sargasso Sea
catgaaaaacaaaaaatatagtcacaaggtatcaattgttatgggaagtaattctgattactcaaccatgaaattttgtgaaaaaattcttaaattgcttaaaattaattatgaaacaaatatagtttcagctcatagaactccagaacgtatgtttaagtatgcaaaatctgcagaaaaaaataatatttctgtaataattgctggagctggaggatcggcccatctaccaggaatgattgcatctctaacaagaattccagtaataggagtgccaatcgaaagtaaaaaattaaaaggtctagatagtttactatcaatagctcaaatgccaaaaggtatacctgttggaacagtagcaattggtaaagatggagcaataaatgcagctttgtatgccgcatcgattatttctacctttgataag

SEQ ID NO: 275881 - DNA, 955 bp, Unknown
  Bacterial polypeptide expressing nucleotide sequence isolated from the Sargasso Sea
aatctctactagtgtatttactgatgacaaagatggacctgcacagaatttttgtgataattttatttatagcaaatatgatgataaagaaaaaataaaagaatttatagagaatacggatatcgtaacttatgaatttgaaaatattccagtagaatttttaaaattgattgaaaaagaaagaccagttctacctagtcctgatataaataaaatcgctcaaaatagaaaactagaaaaaacttttgtaaatgaactaggtattaaaactactgattgggcttatataaagtctgctgaagatattaaaaaaaatcaaaatctcttacctggaatattaaaatctaatactctaggttatgatggaaaaggtcagttcgttttaaattctcttgatgatgtcaaaaaagactggtgttttacggctgattatattttagaaaaaaaagtaaatttaaaaaaagagatatcagtagtcataacaagatttaaggatggaacactatctttttatgaaccaatagaaaacgagcatcgaaatcaaattttatttaaatctaaaataccagcaaatattagtaagaaaatatatgagcaggctatttcaaacgcaaaaaaaatatccgaagaattaaattatataggtgttcttactgtagaatatttcatcacagaaaaagatgagcttttagtaaatgaacttgcaccacgttttcacaattcagggcatttgactatcgatgcattcaatatttctcagttccagaagcatgttctcagtgtaatggatctaggttcaaaaccaattggcaaaatatctaatgcagaaatgtataatattttaggttctgaaattcttgattacagaaaaaagacttttaaaaaaaatgaatttttttatgattatttaaaaaaagaacctagagacggaagaaaaatgggccatattaccatt

SEQ ID NO: 275882 - DNA, 955 bp, Unknown
  Bacterial polypeptide expressing nucleotide sequence isolated from the Sargasso Sea
gcttgcaatagcagctaaaaaattgaatgttaaaactgtagttttttgtgatgacatagacgcgccagcacaaaatttttgcaaccaatttgttactggaagttatgataataaagaaaagatatcagaatttataaatctggttgatttagtaacttatgaatttgaaaatattccatttgaaacattaaatgaaattaataaatttaaacctgttttgccaaagccttccattaacagattaattcaacatcgattagctgaaaaagattttgtaaataaattaaatattagaacaaccaggtatgtttcaatagaaaaaaaatctgacatagatgccttagaggattttttacctggaatattaaaaacaacaacacttggctatgatggtaaaggtcaatatccaattaaatcaggtgatgaacttaattcattgaatattgatttttcaaaaggatatattcttgaaaaacttgttaaactaaaaaaagaaatttcaattatcattacgagatttagtaacaataaatatgaaatttatgaaccaattgaaaatatacatgaagatcaaattttaaaatattcaaaaattcctgcagaaattaatgaaaagatttttaatcaatctaaagattgggcaatgctaatagctgaagaattaaaatatgttggaactttgtgtgtagagttttttattgatagaaatgataatctttatgttaatgagattgcacctagagtacataactcaggacatttgacaataaatgcttttaatgtaagtcaatttgaaaatcatgtaagagctgtgtgtggtttagaacaaattccgttaaaaaaaatatctaatgctaaaatgatgaatttacttggtggtcaaattactcattatcggaacgtaaaacagtttaatgataacgaatttttctttgattatttaaaaaagatataa

SEQ ID NO: 275883 - DNA, 325 bp, Unknown
  Bacterial polypeptide expressing nucleotide sequence isolated from the Sargasso Sea
ggcgtacttactgtggaatactttattactgaaaacgacaaattattggttaatgaaatagctccacgttttcataattcgggtcatcttacaattgaagcttttaatatttctcaatttgaaaatcatgtaagagctgtttgtaatttacaacctaagttgattaaaaaagtttcaaacgcagaaatgtataatgttttaggatttgaaattcaagattataaaaaaaggactttaaaagaaaatgagtttttttatgattatttaaaaaaagagccaagagaaggccgaaaaatgggccatctaacaattttaaaagaataat

SEQ ID NO: 275884 - DNA, 281 bp, Unknown
  Bacterial polypeptide expressing nucleotide sequence isolated from the Sargasso Sea
tgttaatgaaattgcgcctagagttcacaattcaggccatctaactattaattcacataatataagtcaatttgaaaatcacataagagcagtatgcaagttagaaaaaattccagttaaaaaattatataatgcagaaatgatcaatatattaggtgaaaatattataaattatagaaaaagaaagtatttagataatgagtttttctttgactatttaaaaaaagaaattaagtcaaaaagaaaaatgggacatttaaccactctgaaaaatcaataaa

SEQ ID NO: 275885 - DNA, 337 bp, Unknown
  Bacterial polypeptide expressing nucleotide sequence isolated from the Sargasso Sea
attggaccacataggtactatctgtgttgaatactttatcgataagaatgataatttatatgtcaatgaaatagcacccagagtacacaactcaggtcatttaacaataaatgcatacaatattagtcaatttgaaaatcatataaaagcagtatgtggcttaagaaaagaagatataaaaaaaaaatataacgctaaaatgataaatataattggtgacgaaattgtctcatatcgatcaaaaaaatattctgataatgaattcttttttgattatggaaaaaaagaaattaaacctaaaagaaaaatgggccatttaactattattctaaaatag

SEQ ID NO: 275886 - DNA, 723 bp, Unknown
  Bacterial polypeptide expressing nucleotide sequence isolated from the Sargasso Sea
aaaagaatttattgataaagttgatatcgtaacttttgaattcgaaaatattccagtagatattttaaaaaaaatagaattaaagaaaaaagttttacctaaacctgagataaataaaataattcaaaatagaaagttagaaaaaacttttgtaaatgatttaggcataaaaactacagattggtcttttattaaacaggctggagatgtcgaaaagaataaaaacttgttacctggaattttaaagtcaaatacacttggttatgatgggcacggtcaatttgttttaaactctcttgatgatgtaaaaaaagattggtgctttactgctgattacattttagaaaagaaagtaaacttaaagaaagaaatatcagttgtaattacaagatacttaaatggtgaaacttatatttatgaacccatagaaaatattcataaagaccaaattttaaatcattcaaagatccctgcagatataaacaaggaaatttttactaaggcacagagtaatgcaaaacttattgcagaaaaattagattatgttggcacgatgtgtgttgaatatttcatcgaccaagatgataatttactagtcaatgaaattgcaccaagagttcataattcaggacacttaacaattaatgcttttaacatcagccaatttgaaaatcatgtaagatcagtatgtgatttaggtctagaaaaagtggaaaaaatttc

SEQ ID NO: 275887 - DNA, 493 bp, Unknown
  Bacterial polypeptide expressing nucleotide sequence isolated from the Sargasso Sea
atgtctaataaaagaaatcacaaagtaacaatagtaatgggtagtcagtcagactattcaactatgaaatattgtacaaaagtcttgaagatattaaaaattaaacacgaaacaaaaatagtttcagctcataggacgcctcatagaatgtataaatttgcaaaaaatgctgaaaaaaataatatatctgtaattatagctggtgctggaggatcagcacatttaccaggaatgatagctgcaattactactattccagtaattggggtccctatcgaaagtaaaaaattaaaaggcctggatagtttattatcaatctcccaaatgccaaaaggcatacctgttggaacagtaacaattggtaaagatggagctataaatgcagcacttttatccgcttcaattatttcaatcaatgataaaaaagttaggaacaatttaaatctttggagaaataaacaaacccgatctgtaaaaaaaaaacctagttaaa

SEQ ID NO: 275888 - DNA, 361 bp, Unknown
  Bacterial polypeptide expressing nucleotide sequence isolated from the Sargasso Sea
ttgggcaaaacacgtgtagaaaaaactagatatattggaactttatgtgtagaattttttattgatactgatgataatttatatgctaatgaaattgctcctcgtgttcataattctggacatctaacaatgaactcttataatattagtcaatttgaaaatcatgtacgagcagtatgtggcttagaaaaaattgagacaaaaaaattgtataatgccaaaatgattaatttaattggtgatgagataacaccttatcgaaataaaaaatttaaggataatgaatttttttatgactatttaaaaacagaaattaaacataaaagaaaaatgggtcatataacgattattgaaaaataaa

SEQ ID NO: 275889 - DNA, 508 bp, Unknown
  Bacterial polypeptide expressing nucleotide sequence isolated from the Sargasso Sea
ttgcgttatactgcgcggccttcggccggcagcacccggccaacgaatcatgacaagccacgctggcccgcccgcgtggcttgttggtttttgatgcgccgcgaggcgcccgagagaagaggcacgacgatgagcgcactggttggcgtgatcatgggctccaagtccgattggtccacccttagccacaccgccgagatgctggacaagctgggcattccccacgaggtcaaggtggtctccgcccaccgcaccccggacctgctgtttcagtacgccgaagaggctgaagcacgcggcattcaggtgatcatcgccggtgccggtggcgccgctcacctgccgggcatgtgcgcggccaagacccacctgccggtgctcggcgtaccggtgcagtcgtcgatgctctcgggcgtcgactcgctgctgtcgatcgtgcagatgccggccggcattccggtcgccaccctggccatcggcaaggccggtgcagtcaacgccgccctgc

SEQ ID NO: 275890 - DNA, 496 bp, Unknown
  Bacterial polypeptide expressing nucleotide sequence isolated from the Sargasso Sea
atgaaaaacaaaaaatatagtcacaaggtatcaattgttatgggaagtaattctgattactcaaccatgaaattttgtgaaaaaattcttaaattgcttaaaattaattatgaaacaaatatagtttcagctcatagaactccagatcgcatgtttaaatatgcaaaatctgcagaaaaaaataatatttctgtgataattgctggagcaggaggatcagcccatttgccaggaatgattgcgtctctaacaagaattccagtaattggagtgccagttgaaagtaaaaaattaaaaggtctagacagtttactttcaatagctcaaatgccaaaaggtataccggttggaactgtagcaataggtacagatggtgcaataaatgccgcattatatgcagcttcaattatctctacgtttgatatgggtgttaaaaataatctcaacaagtggcgatctaaacaatcaaaatctgttaaaaaaaaacctaaataaa

SEQ ID NO: 275891 - DNA, 389 bp, Unknown
  Bacterial polypeptide expressing nucleotide sequence isolated from the Sargasso Sea
tctgcggccatggcgggagacgatggcagtcttgcccttctgcgttgtgccgccagtgctcccccgtgttgccgttgtgatgggcagtgactctgacctgcccaccatggaacccgccgccgccatcctgcgcgagttgggggtggaggtggaggttcgggtgctctcggcccatcgcacccccttggagatggtgaacttcgctcacgcggcccgggatcaggggtttggggtgatcgttgccggcgctggcggggccgcccatctccccggcatggtggcggccctcaccacgctgcccgtgatcggcgtgcccgtgaaaagtcgggccctgtccggggtcgattccctccactcgatcgtgcagatgccgggggggatcccggtgg

SEQ ID NO: 275892 - DNA, 758 bp, Unknown
  Bacterial polypeptide expressing nucleotide sequence isolated from the Sargasso Sea
tgaagatttgcctcgtgcggtggcggactttggtggtgtagtggtaaaagcccgcagtggcggttatgacgggcggggcacctggatcgtcggcgaaggtggtgatttgagtgcagtgcctgctgttgagttggctggcaaagcgattgtagaacagaaaattccgttccgccgcgagctgtccattgtcggcgcgcgcagtattaccggcgaaacattgttctacccgttgacccgaaactggcatgtggatggcattctgcgcttgagtctggcaccggcgaatgcctgttccgatctgcaggcgccggcggaaataatgctcaagtgcattatggaagagttggattatgccggcgtcatggcggtggagttttttgaagtggatggccagctgatggtcaacgaaattgccccgcgggtacataactccgggcactggacccatgaaggtgcggattggtctcagtttgacctacacgttcatgctttggccggcgtaccgctccatgctctgaatgtgcatggctcgtctgccatggtaaatctgatcggtactccatttgaaaacgcctggctccagcatccgggtgtggtgcactggtatggtaaaagtgtgcgtccgggccgcaaggtgggtcatgctaatctcgcggcctcctctctggacgatttgcgccaggggcttgatgcctgggctgatgtcctgccggaggggtatcagcaggtgctggattccgagcgggctctgggctgaa

SEQ ID NO: 275893 - DNA, 823 bp, Unknown
  Bacterial polypeptide expressing nucleotide sequence isolated from the Sargasso Sea
atagcagccaaaaaattaaatgttaaaactgtagttttttgtgatgacatagatgcgccagcacaaaatttttgcaatcaatttgttactggaagttatgataataaagaaaaaatagcagaatttataaatcaggttgatttagttacttatgaatttgaaaatattccatatgaaacattaaatgaaattaataaatctaaacctgttttacctaagccttctgttaacagattaattcaacatagattggctgaaaaagattttgttaataaattaaatattagaacaactagatatgtttcaattgaaaaaaaatctgacattgatgccttagaagattttttacctgggatattaaaaacaacaacacttggctatgatggcaaaggtcaatatccaattaaatcaagcgatgaacttaattcattaaatattgatttttcaaaaggatatattcttgagaaacttgttaaactaaaaaaagaaatttcaattatcattacgagatttagtaacaataattatgaaatatatgaaccaattgaaaatacacatgaagatcaaattttaaaatattcaaaaattcctgcagaaataaatgaaaagatttttaatcaatctaaagattgggcaatgctaatagctgaggaactaaaatatgttggaactttgtgtgtagagttttttattgatagaaatgataatctttatgttaatgagattgcacctagagtgcataactcaggacatctaacaataaatgcttttaatgtgagtcaattcgaaaatcatgtaagagctgtgtgcagtttagaacaaa

SEQ ID NO: 275894 - DNA, 496 bp, Unknown
  Bacterial polypeptide expressing nucleotide sequence isolated from the Sargasso Sea
tatgtccattaagaaaaaatattataaagttgcgttagtaatggggagtcaatccgatttctctactatgagacactgcaaaaaagtacttaatttgttaaaaataaatcatgaggttaaaattatatctgctcataggactcccgatagattatataaatttgcaaagtctgcagaaaacaataagatttcagtaattattgctggtgcaggaggttctgctcatttacctggaatgattgctgcgctgacaaaagtaccagttattggggtacctatagaaagtaagaaattaaaaggacttgatagtttattatcaattgttcaaatgccaaaaggaatacctgttggcacagtagctattggaaaggatggagcaattaatgcaggtttatttgctgcatcaataattagtattaacgatacagctgtaaaaaaaaaattggacgattggagaaaaaaacaatctgcttctgtaaaaaaaaaacctaaataa

SEQ ID NO: 275895 - DNA, 493 bp, Unknown
  Bacterial polypeptide expressing nucleotide sequence isolated from the Sargasso Sea
atgattaataaaaaaaattataaagtcgcaatagttatgggaagtcaatctgactactcaacaatgaaatcagcagttaaaatacttaaaatgcttaaaattaaatatgaggcaaaaattgtttccgctcatagaacaccaaatagaatgtttgattttgctaaaaaagctgaaaaaaataatttttcagtgattatagctggagctggtggatcagcacacttgcctggtatgatagcttcattaactaacttgccagtaataggtgtgccaattgaaagtaaaaaattaaaagggttagacagtttgctttcaattgttcaaatgccaaaaggtataccagttgggactgtagcaataggtattgatggtgcaattaacgctgcacttctttctgcatctataatgtctatttacgataataaattaaaaaaacgaatcgagatttggaaaaataaacaaacaaaatctgtaaaaaaaaaacctagataaa

SEQ ID NO: 275896 - DNA, 727 bp, Unknown
  Bacterial polypeptide expressing nucleotide sequence isolated from the Sargasso Sea
ttaaaaaatattaatgaacgtaaaaccatattaccaaaaccagaaataaataaattgcttcaaaatagatacacggaaaaagattttttaaacaaaaatggtataagaactacaatatatacattaataaaagatgaagacgagattaaaattaaccaaaatttaattccaggaatattaaaaacttgcacttttggatatgatggtaagggacaatataaaattaattctataaaagatattaataaagacattgattttaataatgaatatattttagaaaaaataattaatttaaaaaaagagatatcaattatcattactagatttggtcatcaaaaatacgaagtatacgaaccaatagaaaatgtacatgaagaccaaatattaaaacattcaaaaattcctgctgatatttcagattctttaatagaaaaatctacagattgggcaaaaaaaattgttgaagatttagattatattgggacattgtgtgtggaatattttattgataagaataataatttatatgttaatgagattgctccaagagttcataattcaggtcacttaactattaatactcataatattagtcaatttgaaaatcatataagggcagtttgtgggcttgaaaaaattgaaacaaaaaaaatatacaatggtaaaatgcttaatctaataggaagcgatatatctaattatagaggtaaaactttcgcagata

SEQ ID NO: 275897 - DNA, 634 bp, Unknown
  Bacterial polypeptide expressing nucleotide sequence isolated from the Sargasso Sea
taaaactacaactatgggctatgatggtaagggccaatacctgattcaaaatatgaaacagatctcttcattagatatagatttttctaaagaatatatcttagaaaaattagtaaaattaaaaaaagaaatttctgtaattattactcgttttggaaataacaagtatgaaatttatgagccaatagaaaatactcatgaagatcaaatattaagatattctaagatccctgcaaaaataaataaaattttatttaatcaatctaaggattgggcaatacaaattgccgaagaacttaaatatatcggaacactttgtgttgaatttttcattgatagaaatgataatctttatgttaatgaaatagctcctagagttcataattcaggacatttaactattaatgcttacaatataagtcagtttgaaaatcatgtaagagcagtttgtgcattaaaacaaactcctttaaaaaaaatatctaatgctgaaatgatgaatttaattggtgatcaaatcactccttatcgacaaaaaaatttttcattaaacgataatcaattcttttttgattatcttaaaaatgaaattaaagagaaaagaaaaatgggccatttaacaactttaaaataa

SEQ ID NO: 275898 - DNA, 418 bp, Unknown
  Bacterial polypeptide expressing nucleotide sequence isolated from the Sargasso Sea
aatgagccaagtagcaattataatgggaagtaaatccgattttgatataatgaatgaggctattgaaatcctcgagtcatttgatatagaaacagaatatgatattgtttctgctcacagaacaccaaacaaaatggtagaatatgcttctaatgctgaaaaaaaaggaataaaagttattattgctggtgcaggaggagcggcccatcttcctggtatggtagcctcaattacaagtctgcctgttatcggagttccaattaagtcaagaaattcaattgatggttgggactcaattctatctatacttcaaatgcctggaggagttccagttgcaactgtagcgttaaacggatcaaaaaatgctggcatactggctgctcagataattggatcttttaattctaatgttgcaaac

SEQ ID NO: 275899 - DNA, 337 bp, Unknown
  Bacterial polypeptide expressing nucleotide sequence isolated from the Sargasso Sea
catgaaaaaaaataaaagtctaaaggtttcaatcgttatgggtagtcagtctgattataagactatgaagctgacagaaaaaacgctaaaaaaaattggtgtttcttttgaaacaaaaattgtgtcagctcacagaactccaaaaagaatgtacgattatgctctaaaagctgaacaaaataatataggtgtgattatagcaggcgccggaggatcggcacatttacctggtatgatttctgcacttacctcattaccagttcttggtgtgcctatcgaaagcaaaaaattaaaaggactagatagtcttttatcaatagctcaaatgccaaaagga

SEQ ID NO: 275900 - DNA, 297 bp, Unknown
  Bacterial polypeptide expressing nucleotide sequence isolated from the Sargasso Sea
gatgaaaaaaaataaaacacagaaagtttcaatagtaatgggtagtcaatctgattataaaactatgaaatttgctgaaaaaacacttaaaaaaattggtatttcctttgaaacaaaaattatatctgcccatcgaactccaaaaaggatgtatgaatatgccaataaagctgaaaaaaataatattgctgtaatcattgcaggtgctggtggatctgctcatttacctggtatgatttctgcattaacacatttgcctgttttaggagttccaatagaaagtaaaaaacttaaagg

SEQ ID NO: 275901 - DNA, 946 bp, Unknown
  Bacterial polypeptide expressing nucleotide sequence isolated from the Sargasso Sea
atgaacatttcagttcttggaatagttggcggaggtcaattagcaagtttatggacagaagctgccaaaaaattaaaaataaaaacaattatattaagtgatgatattgatgcaccagcaaaaaattttgcagaaaagttcatatatggaaagtatgatgatgaaagtattgttaatgaatttataaattcagtagatttagtgacttacgagtttgaaaatataccaaactcaattttaaataaaattgaatatgaaaaagttattttaccaaagccaaaaataaataaattagttcgaaatagacttacagaaaaagatttcttaaacaaaaataatataagaacaactaattatgcatctgtcaataattttgaagatgttaaattaaaccaaaaacttttacctggtctattaaaaacatgtacacttggatatgatggtaaaggtcaatttataataaacaaacttgaagatttaaatgatgattttgattttacaaaaaaatatattttagaaaaaaaaataaatttaaagcaagaaatttctgtagtaattacaagatacggacatcaaaaatatgaaatatatgaaccaatcgaaaatgttcatgaagatcaaattttaaaatattcgaaaattcctgcaaatatatctgataagattatgaataaatcaaaagaatgggcaatgataatagctgaagaattagattatataggaacattatgcgttgaatattttattgataaaaatgaaaatatttatgcgaacgagattgcgccaagagtgcataattctggacacttaactataaatacacacaatattagtcagttcgaaaatcatattagagctatttgtggattaaaacaaattaatataaagaaaatatacaacgcaaaaatgataaatttattaggagacgaaaatattatcatataga

SEQ ID NO: 275902 - DNA, 464 bp, Unknown
  Bacterial polypeptide expressing nucleotide sequence isolated from the Sargasso Sea
aattgtaatgggtagtcaatctgactacaaaactatgcaattatcagcaaaaatcctaaaaaaaatggggataaaatatgagactaaaattatctcagcacatcgtactccaaaaagaatgtatgaatttgccaatactgttgcaaaaaataatattggagtgataattgctggtgcaggaggctcggcacatttgccaggtatgatttctgctatgacatctattccagttttaggagttccagttgaaagtaaaaaacttaaggggttagatagcttgttatctattgctcaaatgccaaaaggagtccctgttggaacattagcaattggagaggacggtgcaataaatgcagctttattagcagctgcgataattgccaataacaatccagttatcaaaaaaaaattgaataattggagactattacaaacaaaatcagtaagaaaaaaacctaaataaa

SEQ ID NO: 275903 - DNA, 522 bp, Unknown
  Bacterial polypeptide expressing nucleotide sequence isolated from the Sargasso Sea
ctgttaaattaaaaaaagaaatttcaattatcattacaagatttagtaataacagatacgagatatatgaaccaattgaaaatacacatgaagatcaaattttaaaatattcaaaaattcctgcagaaataaatgaaaaaatttttaatcaatctaaagattgggctatgctaattgctgaagaacttaaatatgttggaactctgtgtgtagaattttttattgatagaaatgataacctttatgttaatgagattgcaccaagagtacacaactcaggacatctaactataaatgcattcaatgtgagtcaatttgaaaatcatgtaagagctgtatgtagtttagaacaaattccattaaaaaaaatatctaatgctaaaatgacgaatttgcttggcgatcaaattactcattatagaaacatacaaaagtttaatgataacgaatttttctttgattatttaaaaaaagatataaaagaaaaaagaaaaatgggtcatatcacaactttagtataaa

SEQ ID NO: 275904 - DNA, 838 bp, Unknown
  Bacterial polypeptide expressing nucleotide sequence isolated from the Sargasso Sea
tgaagatgaaaatttgataaatgattttatcagcaaggttgatttagttacatttgaatttgaaaatattccttataaaattttaaaaaatattaataattataagcctgtgttaccaaacccagaaataaataaattaattcaaaatagatattcagagaaagattttttaaatcaaatagacataagaactacaaaatacaaattaataaaaaatgaagatgaaattaagttaaatgaaaatttaattccaggaatattaaaaacatgtactctcggttatgatggcaaaggtcaatttaaaattaattcaataaaagaaattgatgagaatattgattttaataatgaatatattttagaaaaactaatcaatttaaaaaaagaaatatcaataattatttctagatttagccatcaaaaatatgaagtttatgagccgatagaaaatgtccatgaagatcaaatattaaaacattcaaaaattcctgctgatatttctgatactctgaaagaaaaatctatagattgggcaaaaaaaattgttgaagatttagattatattggaactttgtgcgtagaatattttatagataaaaatgataacttgtatgttaatgaaattgctccaagagttcataattcaggacacttgacaatcaatacgcataacattagtcagtttgaaaatcatgttagagcagtttgtggactagaaaaaattgaaacaaaaaaaatattcaatggaaaaatggtcaacctaattggaagtgatatatctgcatatagaggtaaaacttttgcggataatgaatttttttatgattatctaaaaact

SEQ ID NO: 275905 - DNA, 480 bp, Unknown
  Bacterial polypeptide expressing nucleotide sequence isolated from the Sargasso Sea
tctattcctcacgaagatcaaataattctgcacatagaacacctgaaagactaaacgaatatgcaaaacatgctgaaaaaagtaaattcaaagtaattattgcaggtgcagggggtgctgcacatctaccaggtatgattgcatcacataccacaattcctgtaataggcgttccaataatggtgtataatgataaacaaatgaaaaaaactgacaaaaacaagtattctgcatttggtggactagattctcttttgtcaatttcagaaatgcctactggatctccagttgtagctgttggggtgaataaggcttcaaatgcagggatttatgcgctaaaaattcttggaaactcatatcctgaaattaaaacaaaattgaagaagcataaatttgaccagtatacttcagttcttaaagaatcagaagagctaaaaaaattaggtttaacaaaatttgttaaaaagaaatttcgctaag

SEQ ID NO: 275906 - DNA, 865 bp, Unknown
  Bacterial polypeptide expressing nucleotide sequence isolated from the Sargasso Sea
tgtaaaaaaggtaagtataattacttatgaatttgaaaatattccttatgaaactttaaatgaaataaataaattaaaaacagtaaatccaaagccatcgataaatagattaatacaacatcgtttagctgaaaaagattttgttaataaattaaatatcagaactacaagatatgtaagtatagaaaaaaaatcagacttagagactcttgacgattttttgccaggaattttaaagacaacaaccatgggttatgatggaaaaggtcaatatcctattaaatcgctaaatgaattaaatggattaaatatagatttttcaaaagagtatattcttgaaaaaatggttaaattaaaaaaagaaatctctgttataattacaagatttggcaataacagatacgaaatttatgaagcaatcgaaaatattcatgaaaaccaaattttaaaaaaatctaaaatccctgctgatattagtgataaacttgttgatcaatctagagagtggagtaagcaaatttctgaggaattaaaatatatcggtacactttgtgtagaattttttattgatagaaatgataatctatatgtgaatgaaattgcacccagagttcataattctggccatttaactattaatgcgtttaatattagtcagtttgaaaatcatataagagcagtttgttctttacagcaaattcccttaaagaaattacataatgcagaaatgataaatcttataggtaatcaaattaccccatatagacaaaacagaaatttaaacgataatgaattttttttcgattatcaaaaaaaagaaataaaagaaaaaagaaaaatgggtcatttaacaaaaattttataa

SEQ ID NO: 275907 - DNA, 742 bp, Unknown
  Bacterial polypeptide expressing nucleotide sequence isolated from the Sargasso Sea
aatgtatgaaaaagactttataaataaatgtaatattagaactactatttacgatcaaataaaagacaaagaacaattaaagtatagttcaaatttaatacctggaatcctaaaaacttgtactatgggttacgatggaaggggtcaatataaaattaattctgtagaagatatagatagattaaatattgatttcaaaattgaatacattttagaaaaaatggtgaatttaaaaaaagaagtttcagtaataattacaagatatggtcaccaacaatacgaaatttatgaacctatcgaaaacttgcacgaagatcaaatccttaaaaattctaaaattccagctgatataagcgaagatttatcacaaaaagcaattgattgggcaggtacaatagcagaagagcttggatatatcggcactatgtgtgttgagtattttatcgatcaaaatgataatctttatgtcaatgaaatcgcgcctagagtccacaattcaggacatcttacaatcaatgcatacaacgtaagtcaatttgaaaatcatgtaagatctgtttgtaatctagagaggataaaattaaaaaagttaagtaatgcgaagatgataaatcttattggaaatgatattaaaatttacagaaataaaaaattaactgacggtgagtttttttatgattacatgaaacaagaaataaaggaaaagagaaaaatgggtcatttgaccattttggtcaattaa

SEQ ID NO: 275908 - DNA, 288 bp, Unknown
  Bacterial polypeptide expressing nucleotide sequence isolated from the Sargasso Sea
aatgcctcaaaaaaataaaaaacccttagtatcaatcgttatgggtagtcaatcagactactctactatgaaatatgccgaagatactttgaaaagtttaaaaattcgatttgaaacaaaaattatatctgctcacagaactccaaatagattatttgaattcgcaactaaagctgaaagaaataatatttcagtaattattgctggagctggagggtctgctcatttacctggtatgatagccgcactaactcctataccagtgataggtgtaccaatagaaagtaa

SEQ ID NO: 275909 - DNA, 295 bp, Unknown
  Bacterial polypeptide expressing nucleotide sequence isolated from the Sargasso Sea
gctggcatccataacttgcattcctgtattggagtaccagtagagagcaagacgctgaagggaattgactctcttttatcaatcgttcaaatgcctgctggaataccagttgcaacagttgcaattaatggaggacaaaatgctggattattagcaatagagataatcagtttatttgatgaatccataaagaaaaatttaaaagaattcagagaaaatctacatacacaggtaagaaataaaaataataagttatcaactattggacctgaaaattatcttcaaaataaatgaa

SEQ ID NO: 275910 - DNA, 427 bp, Unknown
  Bacterial polypeptide expressing nucleotide sequence isolated from the Sargasso Sea
atacataaaaatggtatattagttgagtctaaagtacctgcaaatataagcttttctacaagtagtgatgctattattatagcaagtaaaatagtaagaaatttaaattatgttggagtaatgggtatagagttttttataacaaaagcaaagaaaatattagtaaatgaaatggccccaagagttcataattcaggtcattggacacaaactggctgcataattagtcaatttgaacaacatataagagctatcactggaacaccaattggagatggtagaagacactcaaatgtactaatgaataatatattaggaaaccaaatttttgatattaattatgaaagtggagaatctataaatatctatggtaaagataaagtaaaaaataatagaaaaatgggacatacaaatataataaaataaa

SEQ ID NO: 275911 - DNA, 493 bp, Unknown
  Bacterial polypeptide expressing nucleotide sequence isolated from the Sargasso Sea
atgagtaataaaaaattaaataaagtagcaattataatgggtagtcaatctgattattctactatgaagtattcaaaaaaagttcttcaaagctttagtataaaatgtgatgtgaaaatagtttcagcgcacagaaccccaaaaagaatgtttgaatttgctaaaaatgctgaaagaaataattactctgtgataattgcaggagctggtggttctgcgcatcttcctggtatggttgcatctttgaccagcattccagttgttggagttccaattgagtctaaaaaattaaaaggtatggatagtcttttatcaatagtacagatgccaaaaggtatcccagttggtacagttgcaatcggtaaagatggtgcaataaatgctgggctttatgctgcatcaattattggacttcaaaataaaaaagttaaaaattcattattaaagtttagattgaaacaatcaaaattagtaaaaaaaaaacctaaataga

SEQ ID NO: 275912 - DNA, 360 bp, Unknown
  Bacterial polypeptide expressing nucleotide sequence isolated from the Sargasso Sea
aatgagcaaaatccaggtagggttaatcatgggaagccaatcagattggtcaaccatgaaggaggcagctaatattttatcggagcttgggataaaatatgaaactaaaattgtttcagctcacagaacgccagatcgtttatgggaatacggaaagtccgctgaacaaagaggtcttaaggtgattatcgccggtgctggaggcgcagctcatcttccaggaatgatagcatcgaaaactaacttacccgttatcggtgtgccagtcacaaccacaagtttaaatggcatagatagcctctattctattttgcaaatgcctaaaggttatcccgttgcaacgatggctattggagcgca

SEQ ID NO: 275913 - DNA, 493 bp, Unknown
  Bacterial polypeptide expressing nucleotide sequence isolated from the Sargasso Sea
atgagtaataaaaaattaaataaagtggcaattataatgggtagtcaatctgattactctactatgaagtattcaaaacaagttcttcaaagctttagaataaaatgtgatgtgaaaatagtttcagcacacagaactccaaaaagaatgtttgaatttgcaaaaaatgccgaaagaaataattactctgtgataattgcaggagctggtggttctgcacatcttcctggtatggttgcatctttgactagtattcctgttattggagttccaattgagtctaaaaaattaaaaggtatggacagtcttttatcaatagtacagatgccaaaaggtatcccggttggcacagttgcaatcggtaaagatggtgcaataaatgccggactttatgctgcatcaataattggacttcaaaataaaaaagttaaaaattcattattaaagtttagattgaaacaatcaaaatcagtaaaaaaaaaacctaaataga

SEQ ID NO: 275914 - DNA, 469 bp, Unknown
  Bacterial polypeptide expressing nucleotide sequence isolated from the Sargasso Sea
atgacaaatgaaacaatacaagtagcaataattatgggatctgactcagatttacccattgtagagtcaatattcccaatcttagaatcatttggggtgaaatttactaaaaacgttatgtctgctcatagaacgccacatgatgtaatggaactaataaaaaactcagaagaaaatggttgcaaggtatttattgcagctgcaggcatggcagcccatttagctggtgctgttgctgctcattctactaggccggttataggtattcctattgaatcaggtggtatgggaggtattgattcattattatctaccgcaatgatgccaccaggagttccagttgcaacagttgcagttggtaaaagcggagctaaaaatagtgcaatattagctgttcagattcttgcaacaagtgatgatggtcttgctaaaaaacttatcgagtataaacaaaatatgagatctgagg

SEQ ID NO: 275915 - DNA, 790 bp, Unknown
  Bacterial polypeptide expressing nucleotide sequence isolated from the Sargasso Sea
ttcgaaaacataccttttattactctagatttaattagtcaaagtaaagatgtcaaaccaaggccagaaataaataaaattgttcagcatagattgtatgaaaaagattttattaataaatgcaacataagaaccacaaattatgtatcaataaaacaaaagactgatttaaatgcaaatgttaagctagttccagctatacttaaaacttgtaaacttggttatgatggtaagggccagtacagaataaataatttgaatgatttagaaaatttaaatattgacttttctcaagattacattttagaaaaaattatcaatctaaaaaaagaattttcaataattttgacaagatttagtcattctgtacatcaaatctatgaaccaattgaaaatgaacatgaaaatcagattttgaagtattcaaaaattccagcgatcatcgatgaacgaattttatcaaaagcaaaagattgggcttctataatagctgatgatttaggttatataggtacattgtgtgtagaatattttatagataaaaatgacaatttgtatgtaaatgaaattgctcctagagttcataattcaggacatttaactataaactcttacaatataagtcaatttgaaaaccatataagagctgtatgtggtttggaaaaagttgaattaaaaaaattatacaatgctcaaatgattaatttaattggtgatcaaattgtccccttccgttcgaaaaagtattctgataatgaatttttcttcgattatgaaaaaaagaaataaa

SEQ ID NO: 275916 - DNA, 314 bp, Unknown
  Bacterial polypeptide expressing nucleotide sequence isolated from the Sargasso Sea
tgttgaatatttcatagataaaaacgataatttatatgttaatgaaattgccccaagagttcataactcgggacatcttactataaacgcatataacgttagccaatttgagagtcatatacgcgcagtatgtggtatggaaaaaattaaattaagtaaattatttgatgcaaaaatgataaatcttattggaagtgatataaacctttatagaggaaaaaaattaaatgaaaatgagtttttttttgattaccttaaaaaagatattaaggataagagaaaaatgggtcatttaactatattaaaaaaataaa

SEQ ID NO: 275917 - DNA, 337 bp, Unknown
  Bacterial polypeptide expressing nucleotide sequence isolated from the Sargasso Sea
tatgcaagttctgcaaatagaaataatatttggagtaataattgctggtgcaggaggatctgctcatcttccaggtatgatctcagccttaaccacaattcctgttttaggcgtaccaattgagagtaaaaaacttaaaggtctagatagtctattatctattgctcaaatgcccaaaggtattcctgtgggaactttggcaataggagaagatggagcaatcaatgctgctttattagctgcctcaattatcgcaaataataatccaattattaagaaaaaattaaaaagctggcgattatctcaaactaagtcagtaaagaaaaatccaaaataa

SEQ ID NO: 275918 - DNA, 381 bp, Unknown
  Bacterial polypeptide expressing nucleotide sequence isolated from the Sargasso Sea
ttttagatgaatctaaagagtggtctattcaaattgctgaagaactcaaatatattggtactttatgtgtagagttttttattgataggaatgaaaatctatatgtaaatgaaattgctccaagagtacataactctggtcatttaacaataaatgcatacaacataagtcaatttgaaaatcatgtaagagcagtttgttctctagaaaaaattccacttaaaaaaatttctgatgcagaaatgataaatttaattggtaatcaaatagaaccttatagaaaaaatttggaattaaataataatcaatttttctttgattatctcaaaaaagaaataaaagaaaaaagaaaaatgggccatataacaacattaatataaa

SEQ ID NO: 275919 - DNA, 283 bp, Unknown
  Bacterial polypeptide expressing nucleotide sequence isolated from the Sargasso Sea
tgctcatcttccagggatgaccgcagctaaaacaatattgcccgtaataggtgttcctatagaatctaaatcattgaatgggatagactcgttattatctatagtccaaatgccaaaaggtgtacctgtagctactgtagcaattggaaatgcaggagcagcaaatgctggaattttagcggctgaaattattgggttaattgatgatgatattcaaaaaaatattcaaaaaaaaagaaaaaacatagagaagaaaatcaagtcgattgatttagatatttag

SEQ ID NO: 275920 - DNA, 269 bp, Unknown
  Bacterial polypeptide expressing nucleotide sequence isolated from the Sargasso Sea
tatgcatcaaaaattattggttacaaaaaaaccgcttgttggaatcattatgggttcaagctcagatagccgaataatgcatggtgctgcagagatcttagactcattttctgtagcacatgaagatcagataatttctgcacatcgtacccctcaacgtttagatgaatatgcaaaacatgcagaaaaaaaccaattcaaagtaattattgcaggggcaggaggggcagcacatttgccaggtatgattgcatctcatacaacaatcc

SEQ ID NO: 275921 - DNA, 718 bp, Unknown
  Bacterial polypeptide expressing nucleotide sequence isolated from the Sargasso Sea
tccttatgcaccttacaaagagttaaacgatgaagaagatttcaattattcaatttcaaattttggagatgcaattattaaaactaggagatttggttatgatggaaaaggtcaaattagcgtaaatcaaaaaactaattttgataaaaatattacatcattatttaatcaatcaattattgaaaaaaaaataccttttgaattcgaattttcacaggttagttgtagagatgtatttggtaatgtttttcactttcctttaactagaaatattcacgaaaatcacatccttaaacactcatatgctcctttaaatcttccaaatgatcttgaagaacatgcaagagaaattaccaaaaaaattatttctgatttagatcatgtaggcgtactaaccgttgagttttttaaaacaaaagaaaatattcttgttaatgaaatagctccaagagttcacaattccggtcattggactattgaaggatgttcatcaagtcaatttaaagtccatatgcaggcagtatctgggataaaaataactcaacctaaattattaaatgaatgtcatatggttaacttgattggtaacgaaataaatgactgggtaaataaaaaatctgatagtggtgtgaatattcacctttatcataaaaacgaaattaaaaatggcagaaaaatgggacatttaacttatataaaagataagaatatcttataa

SEQ ID NO: 275922 - DNA, 403 bp, Unknown
  Bacterial polypeptide expressing nucleotide sequence isolated from the Sargasso Sea
tggggtaacatacgaaacaaaaattgtttcagctcacagaactccagatcgtttatgggaatacggaaattctgctgaacaaagaggtcttaaagtaattatcgccggtgctggaggcgcagctcatcttccaggaatgatagcgtcgaaaactaacctacccgttgtcggtgtgcctgtcacaaccaaaagtttaaatggcatagatagcctctattctattttgcagatgcctagaggttatcccgttgcaacaatggctattggagcgcaaggtgccaaaaatggtggcttattggcggctcagataatcgcattgtctgatgcaaaactaaacaaaagcctcagtgattggcggatagctttatcgacctcaatacctgatgagcctaaaaatgaataa

SEQ ID NO: 275923 - DNA, 359 bp, Unknown
  Bacterial polypeptide expressing nucleotide sequence isolated from the Sargasso Sea
ggcatcaataattgctgatgatttagattacgtaggaacaatttgtgtagagtactttatagataaaaatgataatttatatgttaatgaaattgcacctagagttcacaattcaggtcatttaacaataaatgcatataacataagtcaatttgaaaatcatataagagcgatttgtggattaggaaagcaagagttaaaaaaattatatgatgcaaaaatgataaatattattggtgaagaaattgtctcataccgatctaaaaaatattctgataatgaatacttttttgattatggaaaaaaagaaattaaagtaaatagaaaaatgggtcatttaactgttattcaaaagtaaa

SEQ ID NO: 275924 - DNA, 280 bp, Unknown
  Bacterial polypeptide expressing nucleotide sequence isolated from the Sargasso Sea
atcggcccatttgccaggaatgattgcagctttaacacatgtgccagttttaggggtaccaatagaaagcaaaaaattaaagggacttgatagtttactctccatagttcaaatgcctaagggtatacctgttggcacacttgcgattggtgaggatggtgcaattaatgccgcccttctagcagcagctatcatggggataaaaagatcaaaaattaaaaataaacttaaaagttggagattatctcaaactaaatctgtaaaaaaaaatcctaaataa

SEQ ID NO: 275925 - DNA, 868 bp, Unknown
  Bacterial polypeptide expressing nucleotide sequence isolated from the Sargasso Sea
ggacaacttgggatgatgctttgtcaggcttcgaaggaaataggcgttaatacgcatatatattgcccagataaaaattctccagctaagcactattctagtaagtttacatgtgaagattatttaaatgagaaagagattattaatttcagtaattctgtagatatcatcacctatgaattcgagaatattccaaaagaaacacttgaattaattactgataataaattaagaccaggcataaaaagtcttgaacaaactcaagataggctaatagaaagaaaattattagaaaaacttaatattccttatgctccctacaatgagttaaacggtgaagaagatttcaataattcaatttcaaattttggagatgcaattattaaaactaggagatttggctatgatggaaaaggacaaattagtgtaaatcaaaaaactaattgtgataaaaatatttcatcattatttaatcaatcaattattgaaaaaaaaataccttttgaatttgaattttcacaagttagttgtagagatgtgtttggtaatgtttttcattttcctttaactagaaatattcatgaaaatcacatccttaaacactcatatgctcctttaaatcttccaaatgatcttgaagaatatgcaagagaaataaccaaaaaaattatttctgatttagatcatgtaggcgtactaaccgttgagttttttaaaacaaaagaaaatattcttgttaatgaaatagctccaagagttcataattccggtcattggactattgaaggatgttcatcaagtcaatttaaagtccatatgcaggcggtatctgggataaaaataattgaacctaaattattaaatgagt

SEQ ID NO: 275926 - DNA, 499 bp, Unknown
  Bacterial polypeptide expressing nucleotide sequence isolated from the Sargasso Sea
aatgaatagttatagagataaaatagtttcaatcgtaatgggaagccaatcagattggccgtgtatgaaaagtgcttctataattttaaaagagcttaatatacaacatgaagtgaaaataatttcagcacatagaacaccagatagattatttaaatacgcagaaaatttagagaaaaatggaattatggtgtcaattgctggtgctggcggtgcagcacacctacctggcatgatagcatcaaaaacaataattccagttttaggtgtgccagttaaatctaaaaatttaaatggcattgatagtttattgtcaattgttcaaatgccacctggtgttcctgtaggcactctggcaattggaaatgctggtgcacaaaatgcagctttacttgctgcttcaattattgccacgagtgatgatgagattacaaaaaatttaaaaacttggagaaaaaaccaaactcaatctgttaaagaacacccctctgatgagtga

SEQ ID NO: 275927 - DNA, 454 bp, Unknown
  Bacterial polypeptide expressing nucleotide sequence isolated from the Sargasso Sea
gatgggtagtaaatctgatcacactaccatgaaaaattgtgaaaaaattttaaaattactaaaagttaagtttcaaaccaaaattgtttctgcacaccgaacaccagagagaatgtttaaatttgctaaagcggctgaagacaataatatttctgtcattattgccggtgcaggaggttctgcacatttaccaggaatgattgcatcgttgacaactatacccgtaatcggcgtacctgtagaaagtcgtaaattaaaaggattagatagtttattatcaatagtgcaaatgccaaaaggaattcctgttggaagtgttgcaatcggtgaggacggagcaatgaatgcaggtttatatgcagcatccattattgcccttacgaataaagatattaaaaaaaatttaaaaaattatcgaagtaaacaatcaaaagctgttaaacaaaaactataa

SEQ ID NO: 275928 - DNA, 350 bp, Unknown
  Bacterial polypeptide expressing nucleotide sequence isolated from the Sargasso Sea
aagaatgtatgaatttgcagagagcgcatcaagaaataatattggagtaatcattgctggtgctggtggatcagcacatttacctggtatgatttcagctataacctcaattccagttttaggtgttcccgttgaaagtaaaaagcttaaaggacttgatagtttattatcaatagcacaaatgccaaaaggaatacccgttggaactcttgcaatcggagaggatggtgccatcaatgctgctttattagctacagctataattgcaaacagcaatcccactgtaaaaaagaaattaaataattggcgttcatcacaaacaagatcagttaaaaaaaatccaaaataaa

SEQ ID NO: 275929 - DNA, 406 bp, Unknown
  Bacterial polypeptide expressing nucleotide sequence isolated from the Sargasso Sea
aaaatacctgctgatataagtgaaaaaattaccaatcaatcgatcgatcaagcaacaattattgctgaagaacttgattacattggaacattgtgtgtggaatattttatagataaaaatgataatctttacttgaatgaaattgcaccaagggttcataattcaggtcatttaacaataaactctcataatattagtcaatttgaaaatcatataagagctgtatgtggattagaaaaaataaaagtaaaaaaattattcaatgcaagtatgataaatttaattgggcatgaaatatctagttatagaaaaaaaaattataatgataatgagtttttttttgattatttaaaaaaagaaataaaggaaaaaaggaagatggggcatttaactacaattaaatgat

SEQ ID NO: 275930 - DNA, 535 bp, Unknown
  Bacterial polypeptide expressing nucleotide sequence isolated from the Sargasso Sea
tccggtagtagaaaatcttcatgagaataatattttgagaatgacgattgcgccaggtcgagtttcagaaaaagtaagaaaagaagcagaagatgtcgcacataaaacaatggaagtactacacggtgcaggggtgtttggtatagagatgttcgttactcaagatgaaaaaatactaatcaatgaaattgcaccccgagttcataattcaggacatcacacactacagtctagtactatatctcaatttgaattacatcttagagcaattttaggactggatctaggagacacatcaatcaaatctcctaccataatgtacaatattttaggaccccatacattcaaaggagaatataatgtattacaccgtgaagaagaaaatattttcttaaagatgtatggtaaactagaatcaaaacctcaaaggaaaattggccatatcaacatcgtagataaaaagaatgtagggattgaagggttgcttttgcaagtagaagatctaaaaaagaatctagtcattgaaccaaaataa

SEQ ID NO: 275931 - DNA, 631 bp, Unknown
  Bacterial polypeptide expressing nucleotide sequence isolated from the Sargasso Sea
aaaacaacaacacttggttatgatggtaaaggtcaatatccaattaaatcaggcgatgaacttaattcattaaatattgatttttcaaaaggatatattcttgaaaaacttgtaaaattaaaaaaagagatttcaattataattacaaggtttagcaataatcaatatgaaatttatgaaccaatagaaaacactcacgaagatcaaattttaaaatattcaaaaatacctgctgaaattaatgaaaaaatttttaatcaatctaaagattgggcaatgctaatagctgaagaacttaaatatgttggaactttgtgtgtagaattttttattgatagaaatgataatctttatgttaatgagattgcacctagagtacataactcaggacatttaacaataaatgcttttaatgtaagtcaatttgaaaatcatgtaagagctgtgtgtggtttagaacaaattccattaaaaaaaatatctaatgctaaaatgatgaatttgcttggcgatcaaattactcattacagaaacatgcaaaagtttaatgataacgaatttttctttgattatttaaaaaaagatataaaagaaaaaaggaaaatgggtcatatcacaactttagtataaa

SEQ ID NO: 275932 - DNA, 472 bp, Unknown
  Bacterial polypeptide expressing nucleotide sequence isolated from the Sargasso Sea
gatgaaaaataaaaaaaataatcataaagtttctatagttatgggtagtcaatcagactattctactatgcaatattgtgaaaaagttctaaaaatattgaaaattagatatgaaacaaatattgtttctgcacaccgtactcccaaaaaaatgtatagatttgcaaaatttgctgaaaaaagaaatatttctataattatagctggtgctggtggatctgctcatttgccaggtatgattgcttctttaactagtatacctgttatcggcgttcctattgaaagtaaaaaacttaaaggtttagatagtttgttatcaattgcgcagatgccaaaaggcatacctgttggaacggttgctataggtgtagatggagctattaatgctggattgtttgcaggttcaattatttctatttttgacaataaaatcaaaattaatttaaaaaaatggcgaacaaaacaatcaaaa

SEQ ID NO: 275933 - DNA, 802 bp, Unknown
  Bacterial polypeptide expressing nucleotide sequence isolated from the Sargasso Sea
gatgatcggcgttgtgggaggtggtcagctggcacggatgcttgtgcaggccgccgcgcaacgcgatgttcccatcgctgttcaaacgtccgatgcagctgatcccgcggctggtttggcctcgcgtctcgtggcagcggatccccgggatgtggcaggaacccgggagctggtggtgggctgtgacggcatcaccttcgagaacgagtgggtcaatatcgatgcacttctgccgctggagcagcagggggtccgtttccagccatcgctagcggcgctttcgcctctggtcgacaagttgtcgcagcgccagctgctcgacgacctggtgatcccgagcccgccctggtgtccgctgagtttgatttcaccggcccaacccgcgcttcctcagggctggaccttccctgtcatggccaaggcctcccgtggtggttacgacggcaagggcacggtggtgttgcgcgacatcgatggcctggcgcagttgttgcgggccgtccccgccgacgactggctcttggaatcttgggtggactacgagctggagttggctctcgtggtcagtcgcgatcagcgcggccggatccgccattttccgctggtgcaaacccaccaacaccgacaagtttgtgactgggttctggcccctgctcccgtggatccttcggtggctgcgctggcctacaacgtggcggcctctctgatgacgaagctcggctatgtgggggtgttggctctagagtttttctatgggccagctggcctgcaggtgaatgaaattgctccacgcacccacaat

SEQ ID NO: 275934 - DNA, 967 bp, Unknown
  Bacterial polypeptide expressing nucleotide sequence isolated from the Sargasso Sea
caccatcagccacaacccccttttcatgaccagcgcagcagctgacaaccgactctcccggataggcgtcgttggcggtggtcagctggcacggatgctcgttgatgcctctcgtcagcggaatgtggaggtaattgtccagaccccttctctggctgatccagctgcccaggttgcggcggacgtcattgaggcggatcctgttgatgctgacgccactcaggcattgctgaagcgatgtagcagcatcacctttgagaatgagtgggtcagcattgaagccctgacagctcttgagcgcaaaggagctcggtttcgcccctcgctggccagtctgaaacccctggtgaacaagcttcaccaacgtcaactgctcgatcggttatccattccaagtcctgactgggttgaactgatctctatcgatccaggtgctccgtcattacccaagggctggtcgttccctgtaatggccaaggccgtgaccggtggctacgacggcaggggcaccagggtgttgaaaaccattgactgcctggccgaactgttgcgatctgtcgatcctgacgactggattttggaagcctgggtcgatttcgagagcgaactggccctggtggtcagtcgcgatcagtccggccgggttcgggctctgcctttggctcagacgcaccaatcgaaccaggtttgtgattgggtggttgcgccggccgatgttgagcagctcgttgaggccactgcatacaacattgctgcatcccttctcaccacattggactacgtgggtgtgatggcgattgagatgttttacggatctaaggggttacttgtgaatgaaattgctccacgcactcacaattcgggccatttctcgattgaggcctgtcacagcagtcagtttgatcaacaactttgcattgcagctggcctcgacattcccgatcctgtcctcaagggcccggggcat

SEQ ID NO: 275935 - DNA, 805 bp, Unknown
  Bacterial polypeptide expressing nucleotide sequence isolated from the Sargasso Sea
aatttctgtgatgaattcatgtttggtgattacaaagataaaaataaaattaacgattttgttaaaaaggtaagtatagttacttatgaatttgaaaatattccttatgaaactttaaatgaaataaataaattcaaaactgtcaatccaaagccatcgataaatagattaatacaacatcgtttagctgaaaaagattttgtgaataaattgaatatcagaactacaagatatgttagtatagaaaaaaaatcagatttagagacccttgatgattttttgccaggaattttaaaaacagcaaccatgggttacgatggaaaaggtcaatatcctattaaatcactaggtgagttaaatcgattaaatatagacttttcaaaagaatatattcttgaaaaactagttaagttaaaaaaagaaatctcggttatagtcacaagatttggtaataacagatatgaaatttatgaggcaatcgaaaatattcatgaaaaccaaattttaaagaaatctaaaatccctgctgatattagcaataaacttgttgatcaatctagagagtggagtaaacaaatttccgaggaattaaaatacattggtacactttgtgtagaattttttattgacagaaatgataatctatatgtaaatgaaattgcacccagagttcataattctggccatttaactattaatgcttttaatattagtcagtttgaaaatcatataagagcagtttgttctttagagcaaatccccttaaagaaattacataatgcagaaatgataaatcttataggta

SEQ ID NO: 275936 - DNA, 295 bp, Unknown
  Bacterial polypeptide expressing nucleotide sequence isolated from the Sargasso Sea
cgctcacttggctggtgctactgcagcgcacactaccaaaccagtgatcggtgtgccaattgatgcaggtcctttgcaaggtctggactctttattgtcaacagtgcagatgcccggaggaattcctgttgcaactgttgcaataggtaaggctggcgcaaaaaatgccgcttatttagctgctcagattctatcgcttgctgacgaggcgctatcagagcgagtgaaacaggagcgtgcggcaaattctgagaaagttcaggcgcaagacgctgctttgcaatcttcgctttaa

SEQ ID NO: 275937 - DNA, 472 bp, Unknown
  Bacterial polypeptide expressing nucleotide sequence isolated from the Sargasso Sea
agggttaatcatggaagccaatcagattggtcaaccatgaaggaggcagctgatattttatcagagcttggtgtagcatatgaaacaaaaattgtttcagcgcacagaactccagatcgtctatgggaatacggaaagtccgctgaacaaagaggtcttaaggtaattatcgccggtgctggaggcgcagctcatcttccaggaatgatagcgtcgaaaactaacctacccgttgtcggtgtgcctgtcgcaaccacaagtttaaatggcatagatagcctctattctattttgcaaatgcctagaggttatccagttgcaacaatggctattggagcgcaaggtgccaaaaatagtggcttattggcggctcagataatagcactgtctgatgcaaaactaaacaaaagcctcagtgattggcggatagctttatcggcctcaattcctgatgagcctaaagatgaataaa

SEQ ID NO: 275938 - DNA, 820 bp, Unknown
  Bacterial polypeptide expressing nucleotide sequence isolated from the Sargasso Sea
gatgacaaagatgcaccagcacaattttttgctgatgagtttattttttgtaaatacgatgatgatttaaaagttgaagaattttcaagaaaaattgattttgtgacatttgaattcgaaaacattccttatgccactttaactaaaattgataatataaaaaaaataaatccaaaaccatctattaataaaattattcaaaatagacttagtgaaaaaaattttttaaataaaaataatgttaatacgacttcttatatttctgtcaaaaatgaaactgagctaaaatcaagtcaagattttataccaggcatacttaaaacttgtatgttgggttatgatggtaaaggtcaatataaaattaataatgaagaagaattagataatttaaaagttaattttgaaaatcattacatattagaaaaattagttaaacttaaaaaagaaatttcagtaataattacaagatttggaaaacaaaaatatgaagtgtatgatccaatagaaaatgttcatgaagatcaaatattaaaatattcaaaaataccagctgagattaacgaagttttagttaataagtctaaagcatgggcaaagtatattgctgaagaacttgattatattggaactatgtgtgttgaatattttattgataaaaatgaaaatttatttgtaaacgaaattgcaccaagagttcataattctgggcatcttacaataaatgcttacaacattagtcaatttgaaaatcatataagagcaatatgtggattggataaagttgaaacaaaaaaactatataatgcaaaaatgattaatt

SEQ ID NO: 275939 - DNA, 819 bp, Unknown
  Bacterial polypeptide expressing nucleotide sequence isolated from the Sargasso Sea
caaaggagagtatcaaaatctgccaaagattttcccctgtttttccagatgctgattccttatcaatctgccaagatagagtaaatgaaaaaaggttcctaaatgacataaatatcccgttctctccgtttgtctcgggttcaactgtaagtgaaatattacaaaaaggaagcatactacaatttcccctggtactaaaaagtagcaggtttggttacgatgggaaaggacaaagaattatttactccaagcaagagttaaaaaattctgaaacagagtttaaaaacacaccaattattttagagaatttcatagattttaaactagagatatcagtaatcatttgtagagacatgtttggaaacatatctgcttatgatcctgcagaaaactctcaccaaaacgggatactagttgagtcaaaagtacctgctaatatatcattttccttggctagcgacgctattttgatagccagtaagatagtaaatgctcttcaatacgtaggtgtgatgggggttgagttttttgtaaccaacgagaataagcttctagtaaatgaattagcacctcgagtacataactctggccactggactcaaagcggttgtttgataaatcaattcgaacagcatatcagagctatcactggttggactatcggaggtggaaaacggcattcggacgttacaatgactaatctattaggatcggtcactaagggtttaaagaacaaacctgatagctcagtaaatatatatggaaaagttaccccaagagagggtaggaaaatggggcacattaataatataaactaaa

SEQ ID NO: 275940 - DNA, 724 bp, Unknown
  Bacterial polypeptide expressing nucleotide sequence isolated from the Sargasso Sea
ataaataagtgtaatattagcactactagatatgtatcaataaaagaaaaatcagatcttaatgcaaatataaaattaattcctggactacttaaaacttgtagacttggttacgacggtaagggacaatacaaattaagtaatccttcagatatagaaaatttgaatattgatttttctcaggaatatattcttgagaaaatgattaatttaaaaaaagaattttcaattatattaactagatttggtcattctattcactcggtttatgaaccaattgaaaacgaacatgaaaatcagatattaaaatattcaaagataccagctgttattgatgataaaatcttattaaaagcaaaagactgggcatcaataattgctgatgatttagattacgtaggaacaatttgtgtagagtactttatagataaaaatgataatttatatgtcaatgaaattgcaccaagagttcataactcaggtcatttaacaataaattcatacaatattagtcaatttgaaaatcatataagagcaatctgtggtttagaaaaaaaggaattaaaaaaaatatataatgcaaaaatgataaatattattggtgaagaaattgtctcatatcgatctaaaaaatattctgataatgaatttttttttgattatgaaaagaaagaaattaaaaaaaacagaaaaatgggtcatttaactataattcaaaagtaaa

SEQ ID NO: 275941 - DNA, 493 bp, Unknown
  Bacterial polypeptide expressing nucleotide sequence isolated from the Sargasso Sea
tatgcaatcaaaaaaaatacataaggtttctattgtaatgggaagccaatcagatttcaatacaatgaaactgtgtcaaaaagtgtttaaaattttaaaagttaggtttgaaacaaaaattatttcagctcacagaacacctaatcgtatgtacgactatgcaaaaaaagcagaaaaaaataaaatttcagtaattatagctggagcaggtggttcagcccatttgccaggaatgatcgcctcacttacaacaataccagttataggtgttccaattgaaagtaagaaattaaaaggtttagatagtttattatctattgctcaaatgcctaagggagtaccagttggtacagttgctataggtgaggatggagcaattaatgctgcattattagcagcatctataatttctttaagtgatgaaaaattaaagaaaaatttaaataagtggcgtctaaaacaaagttcttcagtaaaaaagaaaccaaaataa

SEQ ID NO: 275942 - DNA, 397 bp, Unknown
  Bacterial polypeptide expressing nucleotide sequence isolated from the Sargasso Sea
ggatataaataaagaaatttttgttgaagcacaaagtaatgcaaaacttatttcagaaaaattagattatgttggcacgatgtgtgtagaatatttcatcgactatgatgataatttattagttaatgaaattgcgccaagagttcataattcaggccacttaacaataaatgcttttaatatcagtcaatttgaaaatcatgtgagagcagtatgtgatttaggtctagaaaaagtagaaaaaatttctaacgctgaaatgttcaacgtcttaggaaaagatatcgaaacctatagatcaaaaaaatttaataaagatgaatttttttatgactatgaaaaaaaatcaattaaagataaaagaaaaatgggacatcttacagttttaaaaaaataa

SEQ ID NO: 275943 - DNA, 648 bp, Unknown
  Bacterial polypeptide expressing nucleotide sequence isolated from the Sargasso Sea
attgactgaaaaagattttattaacaaattaaatattagaacaacaagatatgctttaatagaaaaaaaaactgatattgaacctttagaggattttttaccaggaatattaaaaactactaccatggggtacgatggtaaaggtcaatttgtcattaataatattaatgaaatagattctggaaatattgatttttctaaaaactatatacttgaaaaacgagttaaacttaaaaaagaaatttcagttatcattactagatttaactctaatagttatgaaatttatgatccaattgaaaatattcatgaagatcaaattcttaaacattccaaaattcctgcagaaattagtgatgagattttaaatcaatctaaggaatgggcgatcagattatctgaggagttaaaatatattggaactttatgtgttgagttttttattgacagaaacgaaaatctttatgttaatgagattgctcctagagtacacaattcaggacatttaactattaatgcttataatgttagtcaatttgaaaatcacataagagcggtatgttcactagaaaaaattcctttaaaaaaattatctaatgcaaagatgatcaatcttattggtaatcaaattacacattatagaaaaaa

SEQ ID NO: 275944 - DNA, 763 bp, Unknown
  Bacterial polypeptide expressing nucleotide sequence isolated from the Sargasso Sea
ataaatagtttaatccaaaatagattaactgaaaaagattttttaaataaaaataatattagaacaactaactatgctttaattaaaaataaggatgaaataaaagataatgaaaaccttttgcctgggttacttaaaactactactctaggatatgatggtaaaggtcaatataaattaaatagtttaactgacataaatgaagaaattgattttacaaaagaatatattttagaaaagtttattaatcttaaaaaagaaatttcaattgtcatatgtagatttggtaatcaaaaatatgagatatatgaaccgattgagaatgttcatgaagatcaaattttgaaacattcaaaaattcctgctgaagtttcagaaacaataaaggtaaaatcaaaagaatgggcaaaacaaattgttgaagaacttgattatattggaacattatgcgttgaattttttattgataaaaatgaaaacttatatgttaatgaaattgctcctagggttcataattctggtcatctaacaataaactcacacaatgttagtcaatttgaaaatcatataagagctgtttgtggtttagaaaaaattgacactaaaaaaatatataatgctcaaatgattaatctaatcggtgatgacataacaatttatagaaataaaacttttaaagagaatgagtttttttatgactatttaaaaaaacaaataaaagcgaaaagaaaaatgggacatctaacaataattgaaaaataat

SEQ ID NO: 275945 - DNA, 598 bp, Unknown
  Bacterial polypeptide expressing nucleotide sequence isolated from the Sargasso Sea
tcaatatccaattaaatcaggtgatgaacttaattcattgaatattgattttacaaaaggatatattcttgaaaaacttgtgaaattaaaaaaagagatttcaattataattacaaggtttggtaacaataaatatgaaatttatgaaccaatagaaaacactcacgaagatcaaatattaaaatattcaaaaatacctgctgaaattaatgaaaagatttttaatcaatctaaagattgggcaataaggatagctgaagaacttaaatatgtaggaactttatgtgtagaattttttattgatagaaataataatctttatgttaatgagattgcgcctagagtacataactcaggacatctaacaataaatgcttttaatgtgagtcaatttgaaaatcatgtaagagctgtgtgtggtttagaacaaattcctttaaaaaaaatatctaatgctaaaatgataaatttgcttggtgatcaaattactcattataggaacatgcaaaagtttaaagataatgaatttttctttgattatttaaaaaaagatgtaaaagaaaaaagaaaaatgggtcatatcacaacattagtataa

SEQ ID NO: 275946 - DNA, 283 bp, Unknown
  Bacterial polypeptide expressing nucleotide sequence isolated from the Sargasso Sea
ggttctgctcatttaccaggaatgatatctgcattatcatctttaccagttctaggagtaccaattgaaagtaaaaaattaaaaggtttagatagcttattatctatagttcaaatgcctaaaggtatcccggttggtacacttgccatcggtgaagatggcgcaataaatgctgcgttacttgcagcttcaattattggaaataataatcaatcaataaaaaataaattaaataattggagagcagctcaaacaaaatctgtaaaaaaaaaacctaaataaa

SEQ ID NO: 275947 - DNA, 277 bp, Unknown
  Bacterial polypeptide expressing nucleotide sequence isolated from the Sargasso Sea
cgctcatctgccagggatgttagcttctaaaacactattgcctgtcattggggtgcctattccgttaaataacttaaatggagttgattctctgctttctatcgtacaaatgcctagaggggttcctgtagctactgttgctataggaggtgctgaaaatgctgcaatattggcagcggaaattttatctatatccgacccaaaaattaaacaaaacctcaccaattggaggaataatatgactgagaaaatcatcctagatcacgagaataattga

SEQ ID NO: 275948 - DNA, 290 bp, Unknown
  Bacterial polypeptide expressing nucleotide sequence isolated from the Sargasso Sea
aatgccacaaaaaaataaacctttagtatcaataattatgggtagccaatctgactattcaacgatgaaatatgctgaagatgtcttaaaaaatttaaaaataagacatgaaactaaaattatatcagcacatagaacacctaaaagattatttgattatgcctctaaagcggaggcaaataatatctctgttattattgctggagcaggaggatctgctcatcttccgggcatggtagctgcaattactacaatcccagttattggtgtaccaatcgaaagtagtaaac

SEQ ID NO: 275949 - DNA, 437 bp, Unknown
  Bacterial polypeptide expressing nucleotide sequence isolated from the Sargasso Sea
agctattgaaattctcaaatcatttgacataaatactgaatatgatatagtttcagctcataggacgcctaataaaatggttgaatatgcttctaatgctgaaaaaaaaggcataaaagttattattgccggagcaggtggagcagcccaccttccaggaatgatggcatcaattacaagcttgccagtcattggagttccaataaaatcaagaaattcaatagatggttgggattcaattttatctatacttcaaatgcctggaggagttccagttgcaacagtagccttaaatggttcaaaaaatgcaggtattcttgctgctcaaattatcggatcttttgattctaaagttgctgataaagttaaggcatataaaaaagacctagaagataaggttattaaaagcagtaaagatttaaaaaagaatagctagt

SEQ ID NO: 275950 - DNA, 490 bp, Unknown
  Bacterial polypeptide expressing nucleotide sequence isolated from the Sargasso Sea
aattacaagattggaaaacaaaaatatgaagtttatgatccaatagaaaatgttcacgaagatcaaatattaaaatattcgaaaatacctgccgagattagcaatgatttacttaataaatctaaagagtgggcaaagtatatttctgaagaacttaattatattggaaccatgtgtgttgaatattttattgataaaaatgaaaatttatatgtaaacgagattgctccaagagttcataattcaggtcatcttacaataaatgcttataatgttagtcaatttgaaaatcatataagagcggtgtgtggtttagataaagttgaaacaaaaaaattatataatgccaaaatgattaatttaattggtgaagatatattggtttatagaagtaaaatttttaaggaaaatgaatttttctttgattatcagaaaaatactgtaaagaaaaaaagaaaaatgggccatataacaataatagaaaagtaaa

SEQ ID NO: 275951 - DNA, 343 bp, Unknown
  Bacterial polypeptide expressing nucleotide sequence isolated from the Sargasso Sea
attgttagattgttttgtgaaacccaataaaataaataacaaagtagcaatcataatggggtcacaatctgactatcctgttatgaaggatgctgaaaaaattttaagaattttaaaaataaattttgaagtgctgaccgtctcggctcatcgcactcccaagagaatgtttgaatttgcagaaaatgctaacaaaaaaggttttgcagtaataattgcaggagcaggaggagcagctcatttaccaggtatggtttcatcactagcaactgtgccagtaattggagttccaattgaaactaaaaaaatgaaaggattagatagtttattatctatagttcag

SEQ ID NO: 275952 - DNA, 841 bp, Unknown
  Bacterial polypeptide expressing nucleotide sequence isolated from the Sargasso Sea
ttttgaatttgaaaatataccttttgatactcttgagtttattaatgaacataaacaagttttaccaaaaccaaacataaatcaagttattcaaaatagatttcttgaaaaaaaatttgtaaataatcttcacatcaaaacaactgattatgtaatggtgaaaaatttacaagacttacataacaatgtaaattttttaccaggtattttgaaaactactaccttaggatacgatggcaaaggtcaattcaagttaaatagtaaaaatgatattgaaaaacttaaaattgattttgataaggaatatattctagaaaaagtagtaaatctaaaaaaagaaatttctgttattattacaaggtttaaaaatcaaacctatgaaatttatgaacccattgaaaacattcatgaagatcaaatacttaaattttctgaaataccagcaaatattaatgaaaatgttttaaacttatctaccgaatgggctaaaaagatatcagaggaattagattatataggtacactatgtgtagaatactttattgatgaaaaggataatatttatgttaatgaaatcgctccacgggtacataactctggacacttaacaattaactctcacaatataagtcaatttgaaaatcacattagggcagtatgtggcatgaataaaatagaaacaaaaaaaaaatttaatgcaaaaatggtaaatttaattggtgatgatattactaaatatcgaaataagaaaattcaagaaaatgagttttttttcgactacctaaaaaaagaaataaaacctaaaagaaagatgggtcatttcactacaatttttaaatag

SEQ ID NO: 275953 - DNA, 355 bp, Unknown
  Bacterial polypeptide expressing nucleotide sequence isolated from the Sargasso Sea
atgtcaaatgaaacaacacaagtagctataattatgggttctgattcagatttaccaattgttgaagcgatttttcctattttagatacttttggtgttaaatacaccaaaaacgttatgtcagcgcacagaactcctcatgctgttatggagttaatacagaattcagaagataatggttgtaaggtttttattgcagcggctgggatggcagcccatcttgctggtgctgttgctgctcactcaacaaggcctgtaataggcataccaatagagtctggtggcatgggtggtatagactctttattatcaaccgcaatgatgcctccaggcgtccctgttgcaactgttgctg

SEQ ID NO: 275954 - DNA, 924 bp, Unknown
  Bacterial polypeptide expressing nucleotide sequence isolated from the Sargasso Sea
ggatgctgggtggtggtcagatggggggtttttttgctgaagctgctctacgctttggttataaggtagcagtgtgggacccgtcaccaaatgcaccggccaagagatttgccagcgcgtcattcgacgcaccctttgatgatccagatactctaaaagcattttcagaagtggctgtgtgcgcttctctcgaatgggaaaatgttcctgtgagcttaaccgatggtctccaaaagctgatcagagtcagaccaggaagtcgaagtttagggcttgcgcaggataggaccaaggaaaaacatttccttacagaacagcatattccagtaacaaaatatgctgtcatagaaaaaccttcggaattgggtgcagttcagttagatctgccgtggatagtaaaaactgctaccttaggatatgacggtcatgggcaatggaggatatcaaacacgcaggatatcgtgagtactgaaaaaatcctgaagggcgatggtccctgggttgttgagcaggtagtcccttatagaattgagctttcagctgtggtggcctttgacggcaagagtaatttagtgacatttccgccaactgagaatattcatgaaaatggtatcttgagaataagtatatctcctggaaggatgtctaaagaaattgcaagaagagctcaagatcttgccgaagaggtcataaagaatatcggagaaccaggcgttttctgtgtggagatgtttttgctggaaaatggagaacttctcgttaatgaaattgcgccgagaccacataattcagggcatcatacgatagactctttcacagtgtcgcaatacgaacttcagattagggctctggtagggttaccacttgtaaatcctgagcaggttaccccgtcggtcttgttgaatgtgctgggagaagagtaac

SEQ ID NO: 275955 - DNA, 767 bp, Unknown
  Bacterial polypeptide expressing nucleotide sequence isolated from the Sargasso Sea
agttaacagattaattcaacatcgattggctgaaaaagattttgttaataaattaaatattagaacaacaagatatgtttcaattgaaaaaaaatctgacattgatgctttagaggattttttaccaggtattctcaaaacaacaacgctaggatacgatggcaaaggtcaatatccaataaaaacagttaatgaacttgattcattgaatattgatttttcaaaaggatatattctagaaaaactcgtaaaattaaaaaaagagatttcaattataattacaagatttagtaacaataaatatgaaatttatgaaccaatagaaaactctcacgaggatcaaattttaaaatattcaaaaatacctgctgaaattaatgaaaagatttttaatcaatctaaagattgggcaatgctaattgctgaagagcttaaatatgttggaactttatgtgtagaattttttattgatagaaatgataatctttatgttaatgaaattgcaccgagggtacataactcaggacatttaacaataaatgcttttaatgtaagtcaatttgaaaatcatgtaagagctgtatgtggtttagaacaaattcctttaagaaaaatatctaatgcaaaaatgatgaatttgcttggcgatcaaattactcattatagaaatattcaaaagtttaatgaaaatgaatttttttttgattatttaaaaaaagatataaaagaaaaaagaaaaatgggtcatatcacaactttagtataaa

SEQ ID NO: 275956 - DNA, 502 bp, Unknown
  Bacterial polypeptide expressing nucleotide sequence isolated from the Sargasso Sea
aatgacaaatgaaacagtacaagtagctattataatgggttctgactcagatcttcctgttgtagaaacaagtttttcaatattagatgattttggcgttaaatacactaagaacgtaatgtcagcgcatagaacgcctcatgatgttatggagctaataaaaacctctgaggaaaacggatgtaaagtttttatagcagctgctggtatggcagcgcatcttgccggagcggtagcggctcactcaacaaaaccagtaataggtattcctatagaatcaggcggcatgggtggaattgattccttgttgtccactgcaatgatgccaccgggagttcctgttgcaacagtagccgttggcaaaagtggggcaaaaaatagtgcaatacttgcagttcagattcttgcaactagtgatgaagatcttgcacaaaagttggttgagtataaacaaaatatgagatctgaagttttagaaaaagataaaaaacttaattcataa

SEQ ID NO: 275957 - DNA, 481 bp, Unknown
  Bacterial polypeptide expressing nucleotide sequence isolated from the Sargasso Sea
atggctaaagttggtattattatgggaagtaaatctgattatcctgttatgaaggaagctgaagatatacttaaagaatttaaagttgattatgaaataaatattgtctctgctcatagaacacctgaaaaaatgatggaatacagcaagaatgcacatgaaagaggaataaatgtcataatagctggtgcaggtggagctgctcatcttcctgggatggtcgcttctatcacaccacttcctgtgattggcgttccagtaaagtctagaaattctattgacggatgggattcaatcttatctattttacaaatgccaggtggtgttccagtagctacagttgctctcaacggagcaaaaaatgctggtattttagcagtagaaatccttggctcttcaaacagagaattattaaaaaaagtgattcaatacaaaaaagaacttgaagacaaagtgaatcaaagtaaaattgaagaataaa

SEQ ID NO: 275958 - DNA, 354 bp, Unknown
  Bacterial polypeptide expressing nucleotide sequence isolated from the Sargasso Sea
ctagaccacataacagtggtcacttcactttagatgcctgtaatacaagtcaattcgaacaacatattagagctattctaggtatagaacttggtgatgtttcgcaaaaaggcaatgcaattatgttgaatttggttggtgaagaaaattcttttggaaaagttacttactctaaccttgataatgccttaaatgatgattcatcatatgttcatatttacgggaaagaagaaactagacctaatagaaaaatggggcacataacaataatttgtgataactttgaagatgcttacacgaaagctaaaaattttaaaaacactattaaagtaaaatcaataaacaatggctaaa

SEQ ID NO: 275959 - DNA, 395 bp, Unknown
  Bacterial polypeptide expressing nucleotide sequence isolated from the Sargasso Sea
aattaatgaaaagatttttgatcaatctaaagattgggcaatgctaattgctgaagaacttaaatatgtcggaactttatgtgtagaattttttattgacagaaatgataatctttatgttaatgagattgcacctagagtacataactcaggacatctaacaataaatgcttttaatgtgagtcaatttgaaaatcatgtaagagctgtgtgtggtttagaacaaattcctttaaaaaaaatatctaatgctaaaatgatgaatttgcttggcggtcaaattactcattatagaaacttacaaaagtttaatgataatgaatttttctttgattatttaaaaaaagatataaaagaaaaaagaaaaatgggccatatcacaactttattataaa

SEQ ID NO: 275960 - DNA, 841 bp, Unknown
  Bacterial polypeptide expressing nucleotide sequence isolated from the Sargasso Sea
tattacctatgaattcgagaatattccaaaagaaacacttgtattaattaatgataataaattaagaccaggggtaaaaagtcttgaacaaactcaagataggctaatagaaagaaaactattagaaaaactcaatattccttatgcaccttacaaagagttaaacgatgaagaagatttcaattattcaatatcaaattttggagatgcaattattaaaactagaagatttggctatgatggaaaaggtcaaattagcgtaaatcaaaaaactaattttgataaaaatatttcatcattatttaatcaatcaattattgaaaaaaaaataccttttgaatttgaattttcacaagttagttgtagggatgtatttggtaatgtttttcattttcctttaactaaaaatattcacgaaaatcatattcttaaacactcatatgcccctttagatcttccaaatgatcttgaagaatatgcaagagaaattaccaaaaaaattatttctgatttagatcatgtaggcgtactaaccgttgagttttttaaaacaaaagaaaatattcttgttaatgaaatagctccaagagttcataattccggtcattggactattgaaggatgttcatcaagtcaatttaaagtccatatgcaggcagtatctggaataaaaataactcaacctaaattattaaatgaatgtcatatggttaacttgattggtgacgaaataaatgactggataaataaacaatctgatagtgacatgaatattcacctttatcataaaaaagaaattaaaaatggtagaaaaatgggacatttaacttatataaaagat

SEQ ID NO: 275961 - DNA, 904 bp, Unknown
  Bacterial polypeptide expressing nucleotide sequence isolated from the Sargasso Sea
aatgagagtagttttttacggcgcaggccaacttgctcaaatgatgtacctggcgggaagcccgttaggtattgacgttcaagctgtggacgtaaacaacgataccgttgtacatccagttagcaaaacccctcttgaaatctcacttgctcaagcactagaaggtgcagatgctcttaccgtagaatttgagcatgtacctgaaaggcttcttgaagacgcggcgaaaacaaacaagttgatgccaaatattgacagcattcttgttggcgccgatcgcgtacgtgagaaaaagctgcttgaaagcatgcaggtggcaaattgtgagcaccaaatagttaccgaccttgcccagttagacgattgcgtaaagcagttgggtagcaaacttattcttaaggctagccgtgatggctatgacggatatggtcaatggcgtctaagtgatgagtctgatttacctgaactaaaaaatgcccttcagggattggatttgcagaccgtgcctttagtggtcgaaaaaatggtggctttcgacagagagttgtcattaatcggagtacgcaatgctaatggcgacgtacgcacctatccacttgctgaaaatttgcatcaccaaggtcagcttcacgtatcggttgcaccagcgactaatgttgacgacgcacttcaagatcaggctcacgatatcttcgtgaaactggctgaaggcatgaactacgtaggagtgctggctgttgagctgttccaagtaggcgacaagctgcttgttaatgaactggctccccgcgtgcacaactctggtcactggagtcaatcaggcgcggtaaccagtcagtttgaaaatcacttacgcgcagtatgtggattgccccttggcgacacctccgctattggcccaagt

SEQ ID NO: 275962 - DNA, 634 bp, Unknown
  Bacterial polypeptide expressing nucleotide sequence isolated from the Sargasso Sea
tttgaaaactactactttgggctatgatggaaaaggacaatacccaattaaaaatataaatgaaattgactctttaaatattgattttagtaaagagtatattttagaaaaattagtaaaattaaaaaaagaaatttcggtaattattactcgatttaataataacaaatatgaaatttatgaaccaattgaaaatactcatgaagatcaaattttgaggaactctaaaataccagctgaaattagcgaaaaactttttaatcaatctaaggagtgggcaatcgaaatagctgagaaattaaaatatattggaactttatgtgtggagttttttattgatcgaaatgacaatctttatgtaaatgaaattgcgcctcgagtacataactcaggtcatttaactattaatgcttataatatcagtcaatttgaaaaccacgtaagagctgtatgttcgttagagcaaatcccacttaaaaaattatccaatgcaaaaatgataaatatcataggaaatcaaataatgttttatcgtgaaaatcctaaattaagtgataatcaatttctttttgactatctcaaaaaagagattaaagaaaaaagaaaaatgggtcatttaacaactttaaaataa

SEQ ID NO: 275963 - DNA, 403 bp, Unknown
  Bacterial polypeptide expressing nucleotide sequence isolated from the Sargasso Sea
tcctgctgaaatttcagaaaaaataaaggtaaaatctaaagaatgggcaaaacaaattgttgaagaactagattatattggaaccttatgtgttgagttttttattgataaaaatgaaaacttatatgttaatgaaattgcacctagagttcataattctggtcatctaacaataaactcacataatgttagtcaatttgaaaatcatataagagcagtttgtggtttaaaaaaaattgacacaaaaaaaatatataatgctcaaatgattaatctaattggtgatgacataacaatttatagaaataaaacttttaaagagaatgagtttttttatgattatttaaaaaaacaagtgaaagcaaaaaggaaaatgggacatctaacaataattgaaaaataa

SEQ ID NO: 275964 - DNA, 349 bp, Unknown
  Bacterial polypeptide expressing nucleotide sequence isolated from the Sargasso Sea
gttgtagaaaaactagattatattggaacgttatgtgtagaattttttattgatactgatgataatttatatgctaacgaaattgctcctcgtgttcataattctgggcatttgacaatgaactcgcataatattagtcaatttgaaaatcatgtacgagcagtatgtggcttagaaaaaattgagacaaaaaaattgtataatgccaaaatgattaatttaattggtaatgatataacagcgtatcgaaataaaacatttaaggataatgaatttttttatgactatttaaaaacagaaattaaacataaaagaaaaatgggccatataacaattattgaaaaataat

SEQ ID NO: 275965 - DNA, 589 bp, Unknown
  Bacterial polypeptide expressing nucleotide sequence isolated from the Sargasso Sea
tatgcaacaaaaattattggtcacaaaaaaaccgcttgttggaataattatgggttcaagctcggatagtcgaataatgcatggtgctgcagagatcttagactcattttcgattgctcatgaagatcagatcatttcggcacatcgtacccctcaacgtttagacgagtatgcaaaacatgcagaaaaaagtcaattcaaagtaattattgcaggtgcaggaggggcagcacatctaccaggtatgattgcatcacatacaacaattcctgtaataggagttccgatcatggtgtataacgataaacaaatgaaaaagactgacaaaaacaaatactctgcatttggaggattggattctttgctatctatatctgaaatgcctactggttctccagttgttgcggttggagtgaataaagcatcaaatgccggaatttatgcattaaaaattctgggcaactcatatcctgacatcaaaaccaaattaaaaaaacacaaatttgatcaatatacttccgtcttaaaagaatctgaagagatgaaaaaaatgggactatcaaaattcgtaaaaaagaaattccgttaa

SEQ ID NO: 275966 - DNA, 481 bp, Unknown
  Bacterial polypeptide expressing nucleotide sequence isolated from the Sargasso Sea
atatatttttatccaccatttgagaatattcacaaaaaccatattttgtttgaaacaatatctccatcacaaatagatgaaaaaataaataaacagctaataagaatatcaaaaaagattttaaataagcttaattatattggcttactcacaatagaattctttttagatgatgaaaataatatctatgtgaacgaaattgcaccaagagtccacaattcaggccatataacacttgataatgcgaatatgagtcaattcgagttgcatattaaagcaatcacaaaggataaaattaaaaccccaaaaattattaaaaaaggtcttatgagaaatcttattggcaatgagatcaaaagaaccaaacaaataagtaaattgaaaagttataaggtttttaaaaagaagaaggcatacgactatggtaaaaaagcaattaaacaaggccgtaaaatgggccatattaattttgtaatgtaga

SEQ ID NO: 275967 - DNA, 430 bp, Unknown
  Bacterial polypeptide expressing nucleotide sequence isolated from the Sargasso Sea
tatgcgaaattgtgaaaaagtttttaaaattttaaaaattttttttgaaacaaaaattatttctgcacatagaactccaaaaagaatgtttgaatatgccaaaagtgctgaaaaaaataatatatctgtaattatagcaggcgcagggggatcggcacatttacctggtatggttgcggctataacaaggattccagtaattggggtaccaatagaaagtaaaaaattaaaaggtttggatagtctattgtctattgcacaaatgccaaaaggtattcctgttggaactgtagcaattgggaaagatggagctattaatgctggattatttgctgcttcaataatctctaattttgataaaaaagttaaaaaaaatttagaaaattggcgatcgaaacaaacaaagtctgtaaaaaaaaaaccaaagtaa

SEQ ID NO: 275968 - DNA, 401 bp, Unknown
  Bacterial polypeptide expressing nucleotide sequence isolated from the Sargasso Sea
ttttcaggtgggtgaccaactgttggtcaatgagatagcaccacgggtgcataactcaggacactggactcaacaaggtgcagacacctgtcagtttgaaaaccacttaagagctgtttgtggtttgcctttgggcagcacagctttagtgcgccctactttgatggtgaatattctgggcgaagatcatgtcagccctgccgtcttaagcttaccaagctgccatttacactggtacggcaaaggcaaaagacctggccgcaaaatgggccatatcaatttaagtgcctccagcaccagcgaactggcacaacgttttgatctgctgcgtcagcatttaccagagcaggaattccctgagctggatttagtagcggcacgcttaaaacaactgcaatagc

SEQ ID NO: 275969 - DNA, 267 bp, Unknown
  Bacterial polypeptide expressing nucleotide sequence isolated from the Sargasso Sea
catgaaaaaaaatagtaaattaaaagtttcaatcataatgggcagtcaatctgactataaagtaatgaaactagcagaaaaaactctaaaaaaaattgaagtttcatttgaaacaaaaattatatctgctcacagaacaccacaaagaatgtatgaatatgctgcaaaagttgaacaaaataatataggtgtaattattgcaggtgctggaggatctgctcatcttccaggtatgatatcagcacttacacatgtgccagttcttgg

SEQ ID NO: 275970 - DNA, 634 bp, Unknown
  Bacterial polypeptide expressing nucleotide sequence isolated from the Sargasso Sea
ttaaaaacaacaacacttggttatgatggaaaaggtcaatatccaattaaatcaatcaaagaacttaattcattgaatattgatttttctaaaggatttattcttgaaaaacttgttaaattaaaaaaagaaatttcaattataattacaaggtttagtaataataaatacgaaatatatgaaccaattgaaaatacgcatgaagatcaaattttaaaatattccaaaattcctgcagaaataaataaaaaaatttttaatcaatctaaagattgggctatgctaatagcagaggagcttaaatatgttggaactctgtgtgtagaattttttattgatagaaatgataatctttatgttaatgagatagctccaagagtacataactcaggacatctaacaattaatgcttttaatgtgagccaatttgaaaatcatataagagctgtgtgtggtttagaacaaattccattaaaaaaaatatctaatgctaaaatgacgaatttgcttggcgatcaaattactcattatagaaacatgcaaaagtttaatgctaacgaatttttctttgattatttaaaaaaagatataaaagaaaaaagaaaaatgggtcatataacgactttagtataaa

SEQ ID NO: 275971 - DNA, 571 bp, Unknown
  Bacterial polypeptide expressing nucleotide sequence isolated from the Sargasso Sea
tgatgttaaaaaagattggtgttttactgcagattatattttagagaagagagtaaatttaaagagagaaatttcagtagtcattactagatattcgaatggtgagaattatgtttatgaacctattgaaaacatacacaaagatcaaatacttaggttttctaaaattcctgcaaatgtaaatcaaaatacttttaaaaaagctcaagatattgcaaaactaattgcagaaaaattgaaatatataggaacaatgtgtgtagaatattttttagatcaagatgagaatcttctattaaatgaaattgctccaagagttcataattcaggtcatcttacaattaatgctttcaatgttagtcaatttgaaaatcatgtgagagcagtaactgaacttaaaaaagaagaggtaaagaaaatatctaacgccgaaatgaacaatatattaggtgaagagatacaaaaatttagaaataaatcttttacaggcgaaaaattcttttttgattatggaaaaaaagaaattaaagagaaaagaaaaatgggtcacttaactattttaaaaaaataa

SEQ ID NO: 275972 - DNA, 811 bp, Unknown
  Bacterial polypeptide expressing nucleotide sequence isolated from the Sargasso Sea
attggttcaggtcaacttggttctttgctatgtcaggcagcaaaaaaacttaatataaagactatagtaatatcagacgatgaaaatggcccagcgcaaaactattcagataaattcattttttcaaaatatgatgacaaaaataagattagagaattcataaatggagcagatattataacttatgaatttgaaaatattccaatcaatattttaaaagagatagataaagaaaaaaaagttttgccaaaacctgaaattaataagattattcaaaacagacaattagaaaaaacatttgtaaatgatcttggtatcaaaactacaaagtgggcatttataaagaatgccaaagatattcagcaaaataaaaatttattacccgggattttaaagacaaatacgttaggttatgatggtcatggtcagtatgttttaaataccctagatgatgtaaaaaaagattggtgttttacagcagattatatattagagaaaagagtaaatttaaaaaaagaaatttctgtagttgttacaagatttaaaaataaagaaatttatatttatgaaccaatagaaaatactcataaagaccaaattttaaaatactccaaaattccagctgatataaaacctggtatcttcaagaaagctcaagataacgctaggttaattgcaaatgaattagattacattggaacaatgtgtgttgaatattttatagatcaagaagataacttgttggttaatgaaattgcacctcgagttcataactcaggtcatttaacaataaatgcatttaatgttagtc

SEQ ID NO: 275973 - DNA, 337 bp, Unknown
  Bacterial polypeptide expressing nucleotide sequence isolated from the Sargasso Sea
aaattacataggaacattatgtgttgaatattttattgataaaaatgacaatctatatgttaatgaaattgctccgagggttcacaattcaggtcatttaaccattaattcgcataatgtaagtcaatttgaaaatcacattcgagcaatttgtggtctagaaaaaattaaaattaaaaaaatttataatgcaaaaatgaaaaatttaattggtgatgatattaataattatagagaaaaaaaatttaatgataatgaatttttttttgattatttaaaaaaaaaaataaaaaaaaaaagaaagatgggacacttcaccaccacagaaaaatgttga

SEQ ID NO: 275974 - DNA, 341 bp, Unknown
  Bacterial polypeptide expressing nucleotide sequence isolated from the Sargasso Sea
tatggtgtctattgttatgggtagtaagtcagactattctacaatgaaattctgtgaaaaagtccttaaattactaaaaataagatatgaaactaatattgtctctgcacacagaactcctgaaagaatgtttaaatacgcaaaattggctgagcatagaaatatttcagttataattgctggcgctggaggatctgcacatttaccaggtatgatagcatctttaacaagaattccagtaataggtgtaccaattgaaagcaagaaactcaaaggcttagacagtttgctatctattgcccaaatgccaaaaggtatacccgttggaactgttgcaatag

SEQ ID NO: 275975 - DNA, 717 bp, Unknown
  Bacterial polypeptide expressing nucleotide sequence isolated from the Sargasso Sea
aactaaatatcagaactaccagatacgctgcaatagaaagtaaatctgatattgagcctttgggagattttttaccaggtatattaaaaacaacaactctcggttatgacggcaaaggtcaatacccaattaaaaaaattggggaaattggatctctcaatcttgatttttccaaaggatatatacttgaaaaattagtaaaactaaaaaaagaaatatcagtgattattaccagatttgggaataatagttatgaaatatatgaaccgatagaaaatactcatgaaaaccaaatattaaaacattcaataataccagcagaaattagcaaaaaaatatttgatgagtcaaaagaatgggcaattagaattgcagaagaattaaagtatatagggactctttgtgttgaattttttatagacagaaatgaaaatctttatgttaacgaaatagctcctagggttcataattctggtcatctgacaataaatgcttttaatgtaagccaatttgaaaatcatgtaagagcagtttgtggattagaaaaaattgccttaaaaaaaatatcaaatgcaaaaatggtcaatctcataggcaatcagattaaaccctacagagaaaattttaaattaaatgaaaatgaatttttctttgattatcaaaaaaaagagattaaagataaaagaaaaatgggtcatataacaactttaatataaa

SEQ ID NO: 275976 - DNA, 493 bp, Unknown
  Bacterial polypeptide expressing nucleotide sequence isolated from the Sargasso Sea
aatgtctcaaaataacaaatcaagagtatctatagtgatgggcagtcagtctgattataagacaatgaaattaagtgcaaaagtgctcaaatctcttaaaatccaatatgaaataaaaatagtatcagctcatagaactccaaaaagaatgtacaagtttgcaaaaaatacaaaaaaaaatagaatatctgtaattattgctggagctggaggctctgcgcaccttccaggaatgattgcttctttaacatctttgcctgtaattggggttccaatagaaagtaaaaaacttaagggattggatagtttactatcaatagttcagatgccaaaaggtatacctgttggaactgtagctattggtgaagatggtgctattaacgcagctttattagcagcatcaattattgcaatcagcaataaagaagtaagaaatagattaaattacctaagaaataaacaaacgagatcagtcaaaaaaaaacctagataa

SEQ ID NO: 275977 - DNA, 490 bp, Unknown
  Bacterial polypeptide expressing nucleotide sequence isolated from the Sargasso Sea
atgaaactatctaatccaaaaatttcaatcgtaatgggcagccaaagtgactggtcaacacttaaacatacaagtactgtattaaaagaattaaagattagtcacgaaaaaaaaatagtttctgcacaccgaaccccaaaaaggttatatgaatatgcagaacaagcttacgacaaaggtattaagataataattgctggtgctggtggctcggctcatttacctggtatgatcgcagctataactcatatcccagtaattggtgttcccattgagtcaaaaacattaaaaggattggatagtttactttctatagcacaaatgccttttggtgttcctgtaggaactgttgcaattggtgaaaatggagcaaaaaatgctgctttatatgcagcttcaattattagtaattacgactctaaagttgaaaatctattgattaaatggagactggctcaaacaaaaaaagtcaaaaagacacctaagtaat

SEQ ID NO: 275978 - DNA, 876 bp, Unknown
  Bacterial polypeptide expressing nucleotide sequence isolated from the Sargasso Sea
gatgtcaataaaaaatttgggtataattggtggtggtcaactaggaagcctattagctgtcgcagctaagaagttgaatatcaatacaataatctactgtgatgatgtagatgctccagcacaaaatttttgtaacaaatttattcatggcaaatacgatgacaaaattaaaatgcgagagttcattaatgaaattgatataattacttatgagtttgaaaatataccttatgaaactttaaatgaaatgaacaaggtaaaaccagttttaccaaaaccatcggtaaatagattaattcaacatcgaattgcagaaaaagattttgtaaataaactcaatattagaactactagatacgcatcgatagaaagtaaatccgatatggaaccattgggagatttcttacctggaattttaaaaacaactacaatgggttatgatggtaaaggccaataccctattaaaaaaattcaagacatcaataacctgaatattgatttttcaaaaggttatatactggaaaaattagtaaaacttaaaaaagagatatcagtcattattaccagatttgggaacaatagttatgaaatatatgagccaatagaaaatactcatgaagatcaaatattaaaacattcaataataccagctcaaatcaataaaaaaatatttgatgaatctaaagattggtcaatccgaatcgcagaagaattgaaatatataggaacgctttgtgttgaattttttattgatagaaatgaaaatctctatgttaatgaaatagctcctcgagttcataattctggccatctaacaataaatgcttttaatattagtcaatttgaaaatcatgtgagagcagtctgttcgctaga

SEQ ID NO: 275979 - DNA, 322 bp, Unknown
  Bacterial polypeptide expressing nucleotide sequence isolated from the Sargasso Sea
ctttgtgtgtagatattttattgataaaaatgataatctatatgttaacgaaattgctccaagagttcacaattcaggtcatttaacaattaactctcataacgtaagtcaattcgaaaatcatatcagagcaatttctggcctagatcaaattaaaattaaaaaaatttatgatgcaaaaatgataaatttaattggtgatgatattaatgcttatagaaaaaaaaaatttaagaataacgaatttttttttgattatttaaaaaaagaaataaaaaaaaaaagaaagatgggacacttcactgtaatagaaaaatgttga

SEQ ID NO: 275980 - DNA, 646 bp, Unknown
  Bacterial polypeptide expressing nucleotide sequence isolated from the Sargasso Sea
gatgttgaagacagctactcttggttatgatggaaagggacaatttaaattaaataatcttgaggattgtaagaatattagcctttctaaagatggtgaatatatattagaaaaattggtaaatttaaaaaaagaaatctctgtaatagtaacaagatttaaaaaaaatgaatacgaaatttatgaaccatttgaaaataaacacgaagatcaaatattaaaagtctcaaaaattccagctaacataagtaaagaacatttttttcaatctattgaaaatgcaaaaaaaataagtgaaaaattagattatgtgggaactttatgtgtcgaattttttatagatgaaaaagacaatttgttagtaaatgaaatcgcacccagagtacataattctggtcacatgacaattaactcacacaatatcagtcaattcgaaaatcacattcgtgcagtttgtggtctcaaaaaggtaaatacattaaaactttacaatgctaaaatgacaaatattctaggaaatgaaataactaaatataaaggaaaaaaatttcaaggtaacgaatttttttttgattatttaaaaaaggaagttaaagaaaaaagaaaaatgggacattttacagaaatcaataagatcaatgactaa

SEQ ID NO: 275981 - DNA, 397 bp, Unknown
  Bacterial polypeptide expressing nucleotide sequence isolated from the Sargasso Sea
atgcaagttggtattatcatgggctccacctcagactggcctactatgaaaaacgccgctgatatgctggataaattcggtattgcctatgaaaccagagttgtttccgcacaccgcacgccgcagttactggcggattacgccagctctgcagcaagccgcggtttaaaagtgattattgccggtgccggtggtgctgcgcatttaccaggtatggcagcagcctttaccagtttaccggtgttaggtgtgcctgtgcagtcaaaagcactaaaaggcctggactcactgttatctatcgtacaaatgccaaaaggcgtagcagtaggcaccttagccattggcgatgccggtgcagcaaacgccggtttattagcggcgcaaattctggccacac

SEQ ID NO: 275982 - DNA, 319 bp, Unknown
  Bacterial polypeptide expressing nucleotide sequence isolated from the Sargasso Sea
gagttttttaaaacaaaagaaaatattcttgttaatgaaatagctccaagagttcacaattccggtcattggactattgaaggatgttcatcaagtcaatttaaagtccatatgcagtcagtatctgggataaaaataactcaacctaaattattaaatgaatgtcatatggttaacttgattggtaacgaaataaatgactggataaataaaaaatctgatagcgatgtgaatattcacctttatcataaaaacgaaattaaaaatggcagaaaaatgggacatttaacgtatataaaagataagaaaatcttataaa

SEQ ID NO: 275983 - DNA, 454 bp, Unknown
  Bacterial polypeptide expressing nucleotide sequence isolated from the Sargasso Sea
gatgggtagtaagtctgattatgctaccatgaaaaattgtgaaaaaattttaaaattactgaaagttaagtttgaaactaaaattgtttctgcacaccgtacaccagagagaatgtttaaatttgccaaagcagcggaagacaataatatttctgtcattattgctggcgcaggaggttctgcgcatttaccaggaatgattgcatcattaacaactatacctgtaatcggtgtaccagtagaaagtcgtaaattaaaaggattagatagtttgttatcaatagtacaaatgccaaaaggtatccctgttggctgtgtagcaatcggtgaggatggagcaatgaatgccggtttatatgcagcttccattattgctcttacaaataaagaaattaaaaaaaatctaaaaaattatcgaagtaaacaatcaaaagctgttaaacaaaaaccataa

SEQ ID NO: 275984 - DNA, 340 bp, Unknown
  Bacterial polypeptide expressing nucleotide sequence isolated from the Sargasso Sea
aatgactcaagtagcaattataatgggtagtaaatctgacttcgatataatgaaggatgcaattgatattttaaagtcttttggtattgagaccgattatgatattgtatcagctcacagaacaccaaaaaaaatgattgaatatgcaaccaacgctgaaaaaaatggaattaaagtgatcatagctggagcgggtggtgcagctcatttacctggaatggttgcctcaataactagtctccctgtcatcggcgtacctatcaagtctagaaattcaattgatggttgggattcaattttatcaattttacagatgcctggaggagtacctgttgctaca

SEQ ID NO: 275985 - DNA, 326 bp, Unknown
  Bacterial polypeptide expressing nucleotide sequence isolated from the Sargasso Sea
tatggatgattgtgtagtgagtgtcatcatgggtagtcagtctgattgggaaaccatgaaagcctgctgtagtatacttattgaattagacattcagtatgaaaaaaaaataatatccgcacatagaacacccgatagattattcgaatatgctgagaatataaagaaaagagggataaaagtaattattgcaggagctggtggtgctgcccatttgcctggcatggtggcttcaaaagccagcctacccgtaataggtgtacctataatgtccaaagccctttccgggattgatagtgtttatttcatttttgcaaatggcaaaa

SEQ ID NO: 275986 - DNA, 732 bp, Unknown
  Bacterial polypeptide expressing nucleotide sequence isolated from the Sargasso Sea
atttcattaatagcttaggtattaaaacgacgtcttatgcttcagtaaaaaatattaatgatttaaattttaatagcaaattgttacctggaattctcaaaacatgtactttaggatatgatggaaaaggtcaatttaaaataaattcaattaaagatataaattctacaaatatagattttgaaaatgaatatattttagaaaaattggtgaatttaaaaaaagaaatttctataattattacaagatttggagagaatagttacgaaatttatgaaccaatagaaaatttacatgaaaaccaaattttaaaatattcaaaaatacctgcagatgtgaatgaaaaaatcattgatacatcaaaaaagtgggcaaaattaatttctgaagaattaaaatacatcggaacattatgtgttgaatattttatagataaaaaagacaatctttatgttaatgaaattgcacctcgtgtgcataactcaggtcatttaacaattaactctcataatatcagccagtttgaaaatcatgtaagagcggtatgtaatttagaaaaaaaaaatactatcaaattatttaatgcacaaatgattaacctgattggtgacgatattttaaaatatagaaataaaaaaataaataaaaacgaatttttttatgattactataaaaaggatattaaaataaatagaaaaatgggtcatttaacaaaattaattaatttatgaa

SEQ ID NO: 275987 - DNA, 307 bp, Unknown
  Bacterial polypeptide expressing nucleotide sequence isolated from the Sargasso Sea
atgaaaaatgaaaccattcaagtagcaataattatggggtctgactcagatctacctgttgttgaagcaatttttccagttttagaagcatttggcgtcaaatataccaaaaatgtaatgtcagctcatagaacaccacatgatgttatggagcttattaaaaattcagaaaataacggctgtaaagtatttattgctgctgccggcatggcagctcatttagctggagcagttgcagctcattccacaagaccagtaattggtattcctattgagtctggtggcatggggggcatagactctttat

SEQ ID NO: 275988 - DNA, 664 bp, Unknown
  Bacterial polypeptide expressing nucleotide sequence isolated from the Sargasso Sea
tgagactcttgatgattttttacctggaattttaaaaacaacaaccatgggttatgacggaaaaggtcaataccctattaaatcactaaatgaattaaatggattaagtatagatttttcaaaagaatatattcttgaaaaactggttaaattaaaaaaagaaatttctgttataattacaagatttggcaataataaatacgaaatttatgaggcaatagaaaatattcatgaaaaccaaattttaaaaaaatctaaaatccctgctgatattagtgataaacttgtcaatcaatctagagaatggagtaaacaaatttctgaggaattaaaatatattggcacactttgtgtagaattttttattgatagaaatgacaatctatatgtgaatgaaattgcacccagagttcataattctggccatttaactattaatgcttttaacattagtcagtttgaaaatcatataagagcagtttgttctttagaacaaattcccttaaagaaactacataatgcagaaatgataaatcttataggtaatcaaattacaccatttaggcaaaatataaaattaaatgaaaatgaatttttttttgattacctaaaaaaagagataaaagataaaagaaaaatgggacatttaactaaaattttataa

SEQ ID NO: 275989 - DNA, 310 bp, Unknown
  Bacterial polypeptide expressing nucleotide sequence isolated from the Sargasso Sea
attgggagtaattattgctggtgcaggtggttcagcacatttacctggcatgatttcagccctaacatcagttcctgttttaggagttcctattgagagtaaaaaactaaaaggattagatagtttattatcaatagcacaaatgccaaaaggtattcctgttggtactttggcaataggtgaggatggagcagtaaacgcagctttgctagctgcatctattattgctaataataatcaaattattaaaaaaaaactaaataattggcggttatcacaaacaagatctgttaagaaaaatcctaaatag

SEQ ID NO: 275990 - DNA, 622 bp, Unknown
  Bacterial polypeptide expressing nucleotide sequence isolated from the Sargasso Sea
cttgccttctaggaatgacggtaaaggtcaatacaagctatataatcttaaagatttaagtaaaaaaattgattttactaaagaatacatattggaaaaattagtaaatttaaaaaaagaaatatcagttattgttacaagatttggtcatcaaaaatatgagatttatgaaccaatagaaaatgttcatgaagatcaaatcttaaaacattcgaaaatcccagctgatatatcagaagcaattagaaaaaaatccaacgaatgggcaactaatattgctgaggaattggattatattggaactttgtgtgtagaattctttatagataaaaatgataatctttatgttaacgagattgctcctagagttcacaattccggtcatttaacaattaattctcacaatgtaagtcaatttgaaaatcatattagagctgtatgtggtcttgaaaaaatagaaacaaaaaaaatatataatgcaaaaatgataaatcttattggtgatgatatttctaattttaaaaataaatcatttaaagataatgaatttttttttgattatcaaaaaactgaaattaaaaataaaagaaaaatgggtcatttaacaactattgaaaaatag

SEQ ID NO: 275991 - DNA, 106 bp, Unknown
  Bacterial polypeptide expressing nucleotide sequence isolated from the Sargasso Sea
atgtgtgttgaatattttatagatcaagacaataatttgttggttaacgaaattgcacctagagtacataattctggtcatttaactattaatgcatttaatatta

SEQ ID NO: 275992 - DNA, 394 bp, Unknown
  Bacterial polypeptide expressing nucleotide sequence isolated from the Sargasso Sea
atgagcaaaatccaggtagggttaatcatgggaagccaatcagattggtcaaccatgaaggaggcagctgatattttatccgagcttggtgtagcatatgaaacaaaaattgtttcagcgcacagaactccagatcgtctatgggaatacggaaagtccgctgaacaaagaggtcttaaggtaattatcgccggtgctggaggcgcagctcatcttccaggaatgatagcgtcgaaaactaacttacccgttgtcggtgtgcctgtcgcaaccacaagtttaaatggtatagatagcctctattctattttgcaaatgcctagaggttatcccgttgcaacaatggctattggagcgcgaaggtgcccaaaaatagatggcttattggcggctc

SEQ ID NO: 275993 - DNA, 808 bp, Unknown
  Bacterial polypeptide expressing nucleotide sequence isolated from the Sargasso Sea
cttgaattaattaatgataataaattaagaccgggcataaaaagtcttgaacaaacccaagataggctaacagaaagaaaactattagaaaaacttaatattccttatgcaccttacaaagagttaaagagtgaagaagatttcaattattcaatttcaaattttggagatgcaattattaagactaggagattagggtatgatggaaaaggtcaaattagcataaatcaagaaacgaattttgataaaaatatttcatcattatttaatcaatcaattattgaaaaaaaaataccttttgaatttgaattttcacaagttagttgtagagacatatttggtaatatttttcattttcctttaactagaaatattcatgagaatcatatccttaagcactcatatgctcctttaaatcttccaaatgaccttgaagaacatgcaaaagagattaccaaaaaaattatttctgatttagatcatgtaggcgtactaaccgtagaattctttaaaacaaaagaaaatattcttgttaatgaaatagctccaagagttcacaattctggtcattggactattgaaggatgctcatcaagtcaatttaaagtgcatatgcaggcagtatctggagtaaaaataactcaacctaaattaataaatgaatgccatatggttaatctaattggtgaagaaataaatgattggataaataaaaaatctgatagtgatgtgaatattcatctttatcataaaaaagaaattaaaaatggcagaaaaatgggacatttaacatatataaaagataaga

SEQ ID NO: 275994 - DNA, 839 bp, Unknown
  Bacterial polypeptide expressing nucleotide sequence isolated from the Sargasso Sea
aaaaaagattaaagagtttatagatgatattgatgttgttacttttgaatttgaaaatattccgatagatatattaaaacaaatagataaagaaaaaaaagttttaccaaaaccagatattaataaaattattcaaaatagaaagttagaaaaaacttttgttaatgaacttggtattaaaacaacggattggtcatttgttaaatcagctgaagatgttaaaaaaaatgaaaaactattaccaggaattttgaagactaatacattaggttatgatgggcatggccagtttgttttaaattctttaactgatttaaaaaaagattggtgttttacagcagattatattcttgaaaaaagagttgctttaaaaaaggaaatttcagttttagtagtaaggttttctaatggagagacttatacttatgaaccgatagaaaatattcacaaagatcaaattttaaaatattcaaaaatacctgcagatatcagtcctaaaatatttcaagaggcccaatcaattggaaaattaattgctgaaaaattgggttatattggagtcatgtgtgttgaatattttattgaccaaaatgataatcttctggttaatgaaattgcgcctagagttcataattctggtcatttaacaataaacgctttcaatgtaagccaatttgaaaaccatataagagctgtttgtgatttaaaagtaaaaccaacaaaaaaagtttcaaatgctgagatgaacaatatattaggtgaagagattgagaaatataaaaacagatctattaaagatcatgaattcttttttgattataaaaaaaaaagaaattaaa

SEQ ID NO: 275995 - DNA, 358 bp, Unknown
  Bacterial polypeptide expressing nucleotide sequence isolated from the Sargasso Sea
tatgcctcaaaaaaataaaccctttgtatcaatcattatgggtagtcaatcggactatttaactatgaaatacacagaagatactttaaaaagtttaaaaataaaatttgaaactaaaatagtgtctgctcacagaactccaaaaagattatttgaatttgcaactaatgcagaaagaaataatatttctgtgattattgctggtgctggaggttctgctcacttgccgggtatggtggctgctataactactattccagtgattggcgttccaattaaaagtaaaaaacttaatggtttagacagtctactttctattgttcaaatgcctaagggaatacccgttggttcagttgca

SEQ ID NO: 275996 - DNA, 870 bp, Unknown
  Bacterial polypeptide expressing nucleotide sequence isolated from the Sargasso Sea
gcagcatggcttgggcatagctgccaaaaaattaagtattaaaactgttgttttttctgatgatacagatgcgccagcacagaatttttgcaatcaattttttactggtagttatgataacaaagatcaaatatcagaatttataaatcaagttgatgtagttacttacgaatttgaaaatatacctttcgagacattaagtgaaatcaataaattaaaaccagttttaccaaaaccttctattaacagattaattcagcatagattagctgaaaaagattttgttaacaaattaaatataagaactacaaggtatgtatcaattgaaaaaaaatctgacatagatgctttagaagattttttaccaggtattcttaaaacaactactttaggatatgatggtaagggtcaatatccaataaattcaagcgatgaacttaattcgttaaatattgatttttcaaaaggatttattcttgaaaaacttgttaaattaaaaaaagaaatttcaattatcattacgagatttagtaataataagtatgaaatatatgaaccaatcgaaaatactcatgaagatcaaattttaaaatattcaaaaattccagctgaaataaatgaaaaaatttttaatcaatcaaaggattgggctacgttgattgctgaagaacttaaatatattggaacgttatgtgtagaattttttatagatagaaatgaaaatttatatgtaaatgaaatagctcctagagttcataactcaggacatctaacaataaatgcatttaatataagtcaatttgaaaatcatgtaagagctgtgtgtggctttgagcaaattccaataaaaaagatatctaatgctaaaat

SEQ ID NO: 275997 - DNA, 432 bp, Unknown
  Bacterial polypeptide expressing nucleotide sequence isolated from the Sargasso Sea
tatgaaaaaatctaaaataagcattatcatgggttcaaaatcagattggcctacaatgaagcatgccagtgaaatgcttgataaactgaatattaagcatgaagtaaaagtggtttctgctcacagaacaccagacttattgtattcttttgctgaatcagcaagaaaaaaaggggttgaaattattattgctggcgctgggggtgcagctcatttagcaggaatgactgcatcgaaaacatcaatacctgttcttggggtcccaatagaatcaaaaacaatgaagggaatggattcattattatcaattaatcaaatgcctgcaggtattccggtgggcactctggccataggaaaagcaggagccataaatgcagctcttcttgctgcatcaattttatcaattagtgatccccaggttgaaaaaaactg

SEQ ID NO: 275998 - DNA, 481 bp, Unknown
  Bacterial polypeptide expressing nucleotide sequence isolated from the Sargasso Sea
atgaaaaaagttggaataattatgggtagtaaaagtgatctgccaataatgcaagatgccattgatattttaaaagaatttgatatcgaatctgaggttaatattgtatctgcacacagaaccccaaataaaatgtttacctacgcaagtaaggcaaaggataatggtataaatgtgattatcgctggtgctggtggagcagcacatctccccggaatggtagcttcaattactactcttccggttataggtgttcctgttaaatctagaaattctattgatggatgggattctgttttatctattttacaaatgccaaatggtgttccggttgctaccgtagctttagacggagctaagaatgctggaattttggctgctcaaattatcgggttaaatgacaataatgtagcaaaaaaacttattgattataagagcaaattagagcaaaaggtatttgactccgaaaaagatttataaa

SEQ ID NO: 275999 - DNA, 422 bp, Unknown
  Bacterial polypeptide expressing nucleotide sequence isolated from the Sargasso Sea
gatgggtagtaaatcagactataatactatgaaaaattgtgaaaaagttttaaaattactaaaagttaattttgaaataaaaatcgtttctgcacaccgaacaccagagagaatgtttaagtttgcaaaagctgctgaagaaaataatatttctgttattattgctggtgctggaggctctgcccatttaccaggaatgattgcatcattgacaaccataccagtgattggggtaccagtagaaagtaggaaattaaaaggtttagatagcttattatcaatagtacaaatgcctagaggggttcctgttggaagtgtagcaattggtgaagatggagcaattaatgcaggattatatgcagcttctattattgctctttcaaataatgaaattaagaaaaatttaaaaaattatcgaaata

SEQ ID NO: 276000 - DNA, 493 bp, Unknown
  Bacterial polypeptide expressing nucleotide sequence isolated from the Sargasso Sea
catgcaagcccttgttgctgttgttatgggttctaagagtgattggcccacaatggaagccgccgctgagatcatggataaactgcaagtgccttaccatgttgaagttgtatcagcccatagaacgccagataagctgatggagtttgcagccggagccgctgaccgtggttttaaaattattatcggtggcgcgggcggtgcagctcatttacccggtatgattgcctcaaaaactcgcttacctgtattaggtgtaccagtacaaagcaaagcgctatcgggcatggatagcttactgtctatcgtgcagatgccaaagggtatcgccgtaggcacactcgccatcggtaccgctggagcctttaacgctggtctactggcctgccaaattctcgccaataacgatgcagatcttgccgcacgtttagaagcctttagggaagaacaaacccgcgctgtgctagataatcccgatccgagggaagcctaa

SEQ ID NO: 276001 - DNA, 496 bp, Unknown
  Bacterial polypeptide expressing nucleotide sequence isolated from the Sargasso Sea
tatgaaaaataaaaaaaaaataggaatcataatgggaagtaaatcagaccttccaataatgaaagaggcgattgaaattctcaaattatttaaaattgaaaccgagacagatattgtatcagctcatcgaacaccatctaaacttatggactatgggaaaaaagctcacaaaagagggctaaaagttataatagcgggagcaggtggtgctgctcacctacccggaatgattgcctctctcagccctttgcccgtgattggtgttccaattaaatcaagaaactcaattgacggatgggattcagttctatcaattcttcaaatgcctggtggtgttccagttgctactgttgctttgaatggagcaaaaaatgcaggtattcttgctgcacaaattattggggttgattcatcagaaattcaagaaaaaatcatcgaatacaaaaatgagttgtcaaaaaatgttatagaaagttcaaaaaaaataagtggttag

SEQ ID NO: 276002 - DNA, 1039 bp, Unknown
  Bacterial polypeptide expressing nucleotide sequence isolated from the Sargasso Sea
tatgctgacccacgcaggcgagccactggctattgatgttcgcgccgtcgatatcatgacgccaaccgatgaaatcctgccgctagcgcctcaggatattatcaccgccgaacgcgagcagtggccagaatccgccctaagcttacaactcagtagccatccgcattttgttaacggcccagtatttagccgtttggccgaccgttactgccaaaaaagcttactcgatcagctccaagtcccaacggcaccttggacacttgtcgatgataagaccaacgtcgaaaacttgtatcaagcctttggcccacgcgtgttgatgaaacgtcgcacgggcggttacgacggtaagggccaacattggctcaaacaagctgaagcgggtgacatcccccaagattggcgcaacttagccattgccgaacaagcaatcaacttcgatgaagaagtctccttagtcggcgtgcgtacccgtgaaggtcaatgcgtgttttatccattaacactcaacctgcaccaagatggcattttgatggcctcaatttcgccactgactcgtctgaatcacctgcaagcgcaagcggaaggcatgctgagcgctattatgcatgagctggaatatgtcggcgtaatggcgatggaatgtttccgagttggcgataagctgctggttaacgagttagcgccgcgggtacacaactcaggccattggacccaagcgggtacccatatggatcaattccaactgcatttaagagctttgtgtgggattgcgattccgcagccacaggttaactttcaatgcgtgatggtcaatctgatcggtattgataacgatcctcgctggttaagcttgcctaatgctgagctctattggtacaacaaagaggttcgcccaggccgtaaagtcgggcacttaaatctttcagtgcctaatactagcgtgttaacagatagtattggcgcgttgcaaacttggatgccaagccaataccaagcgccccttgcgtggattttagccgagtttgctaaagcctaa

SEQ ID NO: 276003 - DNA, 496 bp, Unknown
  Bacterial polypeptide expressing nucleotide sequence isolated from the Sargasso Sea
catgaaaaacaaaaaatatagtcacaaggtatcaattgttatgggaagtaattctgattactcaaccatgaaattttgtgaaaaaattcttaaatttcttaaaattaattatgaaactaaaatagtttctgctcatcgaactccagaacgtatgtttaaatatgcaaaatctgcagaaaataacaatatttctgtgataattgctggagccggtggatcagcccatttgccaggaatgattgcatctctaacaagaattccagtaattggggtaccaatagaaagtaaaaagttaaaaggtctagatagtttattatcgattgctcaaatgccaaaaggtatacctgttggaactgtagcaataggtatagatggtgcaataaatgcagcattatatgctgcatcaattatttctacttttgatgatactgttaaaaataacctgaacaagtggcgatctaaacaatcaaaatctgttaaaaaaaaaccaaaataa

SEQ ID NO: 276004 - DNA, 514 bp, Unknown
  Bacterial polypeptide expressing nucleotide sequence isolated from the Sargasso Sea
atggcagctaaaaaaccaacagtagcaatagtaatgggtagtaaaacagactggacaacattagagcatacagtcaaaactttaaaagaatttggtgtcgagagcacagtaaaagtgatgtctgctcatcgaacacctcatgaagcgacagaatttgcagagaatgcagcaaagaatggctataaagttattattggagctgctggaggtgctgcgcatttatgtggagtattggcaggtcatactactttaccggtaattgggattcctgtaacaggttgggctttagatggattagattcacttttatctactgtacaaatgccaaaaggtgttcctgttgcaacagtagccattggtaaggcaggtgctattaacgcaggaattttagccgtacagattatgggcactgcggatgcaactttaagaagaaagatgaagtcctataaaaagaaaatggctgcagatgtattggcttcagatgctgagttgcaatcggaattaaattcttaaa

SEQ ID NO: 276005 - DNA, 493 bp, Unknown
  Bacterial polypeptide expressing nucleotide sequence isolated from the Sargasso Sea
atgagtaaagtagcaattataatgggtagtaaatctgacttcaatattatgaaggaagcaatagatgtattagaatcatttggcgtagaaactgagtatgacatagtatcagctcacaggacaccaaaaaagatgattgaatatgcatcaaatgctgaaaaaaacggtattaaagtaattattgctggtgctggtggtgctgctcaccttccaggaatggttgcctcaattacgagtcttcctgttattggcgtacctattaaatctagaaacaaaattgatgggtgggattcaattttatcaatcctccaaatgcctggaggagttccagttgcgacagtagctcttaatggttcaaaaaatgctggaattcttgcggcacaaataatcgggtcttttgatccaatcatatcagaaaaagttaagtcatacaaaaaagatcttgaaaacagtgttattgaaagcagtaaaaatcttaaaagaaaatcttaat

SEQ ID NO: 276006 - DNA, 502 bp, Unknown
  Bacterial polypeptide expressing nucleotide sequence isolated from the Sargasso Sea
attggcgctaaaatcaaaagaaaagaagttaatttcaattgttatggggagtcaatcagattggtctacaatgaagaatgcagcagtctttttagaggaactaaatattccatttgaaaagaaagttgtttcagcccatcgtactcctgaaagattatataattatgccaagaaggctcaaaaaagaggaattaaagttataatagctggcgcaggaggtgctgcacatctacctggtatgatagcttctttgacatcacttcctgtattaggtgtacccattgaaagtaaagcacttaaaggaattgatagtttattatctattgctcaaatgcctgcaggtgttccagttggaacattagcaattggagatccaggcgctaagaattctgcaattcttgctctttcaataatatctgtaagcaataaatcttatcttaataagttagaaaaatggaaaaagaacttaacagataatgttccattaagcccaaatgaatag

SEQ ID NO: 276007 - DNA, 490 bp, Unknown
  Bacterial polypeptide expressing nucleotide sequence isolated from the Sargasso Sea
aatgaaaatatctatccctaaaatctcaatagtaatgggaagccaaagcgattggtccacacttaggcatacgggtaaaattctaaaagaattaaagatagtccatgaaaaaaaaatagtttcagctcacagaactcccaaaagactctatgagtatgctgaacaagcttatgacagaggtattaagattattattgctggagctggtgggtctgctcatttaccaggcatgatagcagctataactcatattccagtaatcggggtaccaattgagtcaaaaacactaaaaggcttagatagtttactttcaatagctcagatgccttttggcattccagttggaactgtggctattggtgaaaatggagccaaaaatgctgcattatatgcagcttcaattattagtaattatgaccccaatattgaaagaagtttagtaaaatggagactggctcaaacaaaaaaagttaaaaagacacctagataa

SEQ ID NO: 276008 - DNA, 487 bp, Unknown
  Bacterial polypeptide expressing nucleotide sequence isolated from the Sargasso Sea
gatgaaagtaggtattatcatggggtctaaatccgattggcccacaatgaaaaacgcggccgatatgttagatcgttttcaaatcgcctatgaaaccactgttgtttcagctcacagaacccctcaactgctggccgactacgccactaatgcggcaagccgtggtttaaaagtcattattgccggtgctggcggcgcagcccatttacctggtatggcggcggcttttaccagcctgccggtcttaggtgtgccagtgcaatcgaaagccttaaaaggtctggattccttgttatccatagtgcaaatgccaaaaggtgttgcagtgggaacactggctattggggatgcaggtgcagccaatgcaggcttattggccgcccaaattctggcgacttctgatgcagagctgatgagcaaaattgatgctttccgtaaagaacaaaccgactctgtattggctcacccgaatccagccgaggaataa

SEQ ID NO: 276009 - DNA, 382 bp, Unknown
  Bacterial polypeptide expressing nucleotide sequence isolated from the Sargasso Sea
ttgtttgataaatctaaagaattggcaaagtatattgctgaggaacttgattatataggaactatgtgtgttgaatattttattgataaaaatgaaaatttatttgtaaacgaaattgcaccaagagttcataattcaggacatcttacaattaatgcttataacgttagtcaatttgaaaatcatataagagcagtgtgcgggttagaaaaagttgaaacaaaaaaattatataatgccaaaatgatcaatttaatcggtgaagatatattggtctatagaaataaaatttttaaggataatgaatttttctttgattatcagaagaatgctgtaaaagaaaaaagaaaaatgggtcatttaacaataatcaaaaagtaaa

SEQ ID NO: 276010 - DNA, 481 bp, Unknown
  Bacterial polypeptide expressing nucleotide sequence isolated from the Sargasso Sea
aatgtctaaagttggaattataatgggaagtaaatcagattatcctgtaatgaaggaagctgaaaatattttgaaagatttcggaatagattatgaaatagatatcgtttcagctcatagaacacccgaaaaaatgatggaatacagtaagaatgctcacaaaaatggtatttcagttataattgctggagcaggtggagctgctcacctgccgggaatggttgcatcaaacacaccattacctgttattggagtacctgtaaagtctagaaattcaatagatggatgggattcgatactgtcaattttacaaatgccaggtggagtacctgttgcaacagtagctttagacggggcaaagaatgccggtatccttgctgctgaaattttagggtcaagtaatcctgaaattttgcaaaaaattattgactataaaaaacaactagaaaacaaagtaaaatcttcatctttagatgattaa

SEQ ID NO: 276011 - DNA, 418 bp, Unknown
  Bacterial polypeptide expressing nucleotide sequence isolated from the Sargasso Sea
tatgagcaagaaacctttagtaagcatcattatgggaagccaatcagattggccaacaatgaaaaatgcttcaaagatattaaaatcttttaagataactcatgaagtaaaaattatttctgcacacagaacacctaaaagaatgtttgaatttgcagaaaaggctgagcaaagaggaattaaaattataattgctggcgcgggaggagcagcccatcttccaggtatgacagcatcaatctctaacttacccatactaggagtaccaatcgaatcaaaaaaattaaaaggcctagatagtcttttatcaattgctcagatgccagctggcattccagtaggatcactagcagtgggtgaagctggagcaataaatgctgcattattagcagtttctattctgggtattgaaaaataa

SEQ ID NO: 276012 - DNA, 725 bp, Unknown
  Bacterial polypeptide expressing nucleotide sequence isolated from the Sargasso Sea
tattaataagtgtaatattagcactactagatatgtttcaattaaagaaaaatctgatcttaacgcaaatataaaattaattcctggacttcttaaaacttgtagacttggttatgatggtaaaggacaatacaaattaaataatcccttagatatagaaaatttaaaaattgatttttcgcaggaatatattcttgaaaaaatgattaatttaaaaaaagaattttcaattatattaactagatttggccattctattcactcagtttatgaaccgattgaaaacgaacatgaaaatcagatattaaaatattcaaaaattccagcagatattgacgataaaatcgtaataaaagcaaaagactgggcatcaataattgctgatgatttagattacgtaggaacaatttgtgtagaatacttcatagataaaaatgataatttatatgtcaatgagattgcaccaagagtccataactcaggtcatttaacaataaattcatacaatattagtcaatttgaaaatcatataagagctatttgtggattaggaaaacaagaattaaaaaaattacatgatgcaaaaatgataaatataattggtgaagaaattgtctcatatcgatctaaaaaatattccgataatgaattcttctttgattatggaaaaaaagaaatcaaagcaaatagaaaaatggggcatttaactatcattcaaaagtaaa

SEQ ID NO: 276013 - DNA, 391 bp, Unknown
  Bacterial polypeptide expressing nucleotide sequence isolated from the Sargasso Sea
atgtccaataccaccacccgtcccgccgttgcagtctgcatgggaagccagtccgactggaccaccatgcaggaagccgcccagatgctggaaatgttggatgtgccttatgaggcgaaaatcatctcggcccatcgcacacccgacaggctggcggcatttgcgcgcggcgcggcggaagcgggattcggcgtgatcattgccggtgccggtggcgcggcgcatcttccaggcatgctggcggcgcataccgaccttcccgttcttggcgtgcctgtcgaatccaaatcattgaagggcatggattccctgctgtcgatcgtgcagatgccggccggcgttccggtcggcacgcttgccatcggcattccgggcgcccgtaatgccggcc

SEQ ID NO: 276014 - DNA, 1048 bp, Unknown
  Bacterial polypeptide expressing nucleotide sequence isolated from the Sargasso Sea
gatgtcaataaaaaatttgggtattattggtggtggtcaactaggaagcctattagctgtcgcagctaagaagttgaatatcaatacaataatctattgtgacgatgtggatgctccagcacaaaatttttgtaacaaatttattcatggcaaatacgatgacaaaattaaaatgcaagagttcattaatgaaattgatgtaattacttatgaatttgaaaatataccttatgaaactttaaatgaaatgaacaaggtaaaaccagttttaccaaaaccatcggtaaatagattaattcaacatcgaattgcagaaaaagattttgtaaataaactcaatattagaactactagatacgcatcgatagaaagtaaatctgatatggagccattggaagatttcttacctggaattttaaaaacaaccacaatgggttatgatggtaaaggccaatacccaattaaaaaaattgaagacatcaataacctgaatattgatttttctaaaggttatatacttgaaaaattagtgaaacttaaaaaagagatatcagtcattattaccagatttgggaacaacagttatgaaatatatgagccgatagaaaatactcatgaagatcaaatattaaaacattcaataataccagctcaaatcaataagaaaatatttgatgaatctaaagattggtcaattcgaatcgcagaagaattgaaatatataggaacgctttgtgttgaattttttattgatagaaatgaaaatctttatgttaatgaaatagctcctcgcgttcataactctggtcatcttacaattaatgcttttaatataagtcaatttgaaaatcatgtgagagcggtctgttctttagaaaaaattccgctcaaaaaaatatctaatgcaaaaatgatcaatctcataggaaatcaaatcaaaccctatagagaaaattttaaattaaaagaaaatgaatttttctttgattatcaaaaaaaagagataaaagataaaagaaaaatgggccacataacaactttaatataa

SEQ ID NO: 276015 - DNA, 787 bp, Unknown
  Bacterial polypeptide expressing nucleotide sequence isolated from the Sargasso Sea
actgactattagtcaagatagaaaaaaagagaaacaattcttcacaaaaaataaaattaaccacgcaggaattggtcttctaaataataagattagtttgaaaaaacttaaaacttcaattcagtatcctgtaatattaaaaacaactagatttggctacgatggcaaaggacaagcattagtaaaaaatataaaagatttagaaagacaatggaaagagaatggctaccaggattgtattatagaaaggaagattaatcttaaaaaagaagtttcagttatatgtgctagagacattaaacgaaattcttatttctatccaacgttcgccaatgtacacaaaaaccatatactttttgaaacaaaatcacctagtagtattgatgcagaaattgaaggtaaattattaaaaatatcaaaaaaaattattacaaagcttaattatattggattattaacgattgaatttttcattgataaagaaaatactatttatgttaatgaaattgctccaagggttcataattctgggcatataacacttgataatgcaaacataagtcaatttgagttgcatataaaagcaattacaggaaaaaaaattcttaaacccaaaatacttaaaaaagggcttatgagaaatcttataggcaatgaaataaaaagagtgaaaaatataaaatctatggggaagtataaagacttcaaaaaaaatattaagtatgactatggcaaaaagatcataaaaggtggccggaaaatgggtcacattaattttatctcataa

SEQ ID NO: 276016 - DNA, 502 bp, Unknown
  Bacterial polypeptide expressing nucleotide sequence isolated from the Sargasso Sea
tatgtcaaatgaaacaacacaagtagctataataatgggttcggattctgacctgcctgttgttgaagccattttccctatcctagactctttcggtgttaaatatactaaaaatgttatgtctgcccatagaaccccacatgcagtaatggatttaattaaaaattcagaaaataatggatgtaaagtttttattgcagcagcaggtatggctgcccacttagcaggtgctgttgcggctcactcaaccaagccagtaattggtataccaattgaatctggtggtatgggaggtatagattctcttttatcaaccgcaatgatgcctccaggtgttcctgttgcaactgtagctgttggaaaaagtggtgcaaaaaatagcgcgatattagctgttcaaatccttgcaacaggagatgaaaacctcgcagaaaaactagttgcatataaacaaaatatgagagatgaagttttagaaaaagataaaaaacttaactcataa

SEQ ID NO: 276017 - DNA, 502 bp, Unknown
  Bacterial polypeptide expressing nucleotide sequence isolated from the Sargasso Sea
aatgacaaatgaaacaacacaagtagcaataattatgggctcggactcagatttaccaattgtagaagccgccttttctattctagatagttttggaattaaattcacaaaaaatgttatgtcggcccatagaactcctcatgacgttatggaattaattaaaaactcagaacaaaatggatgtaaagtatttattgcagctgcaggcatggcagcacacttagctggagcagtagcagcacattcaactaaacctgttataggtataccaattgaatctggtggtatgggtggaattgactcattgctatcaactgcaatgatgcctccaggcgttccagttgcaactgttgccgttggaaaaagtggagcaaaaaatagtgctatattagctgtacaaatacttgctacatgtgatgatgatttagcaagaaagctaaaagagtataaagaaaatatgagagctgaagttttagaaaaagacaagaagctaaactcataa

SEQ ID NO: 276018 - DNA, 574 bp, Unknown
  Bacterial polypeptide expressing nucleotide sequence isolated from the Sargasso Sea
attggttacaaaaaagcctcttgttggaataattatgggttctagttcagatagccgcatcatgcatggtgctgcagagatattggattctttctctatacctcatgaagatcaaataatttctgcacatcgaactcctgaaagattaaacgaatatgctaaacatgctgaaaaaagtaaattcaaggtaataattgcaggtgctggaggggctgcacatcttccaggaatgattgcatcacatactacaattcctgtaatcggagttcccataatggtgtataatgataagcaaatgaaaaaaactgacaaaaacaaatattctgcatttggtgggctagattctcttttatcaatttcagaaatgcccacaggatcccctgttgtagctgtaggggtgaataaggcttcaaatgcaggaatttatgcactaaaaattcttggaaattcttatccagaaattaaaacgaaattaaagaaacataagtttgaccagtatacttcggttcttaaagaatctgaagaactaaaaaaattaggtttaacgaaatttgttaaaaagaaatttcgttaa

SEQ ID NO: 276019 - DNA, 1048 bp, Unknown
  Bacterial polypeptide expressing nucleotide sequence isolated from the Sargasso Sea
atgtcgaatattacccttggaatcattggaggcggccaattaggcagtatgcttgcaattgctgcaaaaaaattagggataaagataataattttttgtgatgatttggaagcaccagctcagaatttttgtgatgaatttattggggcaaaatatgacgataaagaaaaaataaatgaatttgttaacaaagttgataccgtaacttatgaatttgaaaacataccatttgaaacattaaatgatatcaacaagttaaaaccagttttaccaaaaccttcagtaaatagattgattcaacatcgtctagcagaaaaagattttgttaataaattaaatataagaactactagatatgtctctgttgaaaaccaatctgatattgatgtacttgaagattttttgccaggtataataaaaacaaccacattgggttacgatggaaaaggacagtatcctatttcatcagctgaggagttaaaaaaccttaaattagatttatcaagaggttatattttagaaaaattagtcaaacttaaaaaagaaatatctattattataactaggtttagtaataacaaatatgaaatttatgaacctatagaaaatacccatgaagatcaaatcttaaaacattccaagatacctgcggatataaatgaaaaaatatttaatcaatctaaagattgggcgattcttattgctgaagaacttaagtatgtgggaactctgtgtgtagaattttttatagatagaaatgataatctttatgtaaatgaaattgctccaagagttcataattctggtcatttaacaattaatgcttttaatgtaagtcaatttgaaaatcatataagagctgtttgtggacttgaacagatagctttaaaaaaattatcaaatgcaaaaatgataaatctactaggagatcaaatatctcagtacagaaattctccaaaacttaaagacaatgaattcttttatgattatttaaaaaaggaaattaaagataaaagaaaaatgggtcatattactattctagaataaa

SEQ ID NO: 276020 - DNA, 1048 bp, Unknown
  Bacterial polypeptide expressing nucleotide sequence isolated from the Sargasso Sea
aatgtcagaaattactcttggtatcattgggggtggtcaacttggaagtatgcttgcaatagcagcaaaaaaattaaatgttaaaacagttattttttgtgatgatatagatgcaccagcacaaaatttttgcaatcaatttgttaatggaaattatgataataaagaaaagatatcagaatttataaatcaagttgattttgtcacttatgaatttgaaaatattccatatgaaacattaaatgaaataaacaaatttaaaactgttttaccaaaaccctctgttaatagattgattcaacatcgattagctgaaaaagattttgttaataaattaaatattagaacaaccagatatgtttcaatcgaaaaaaaatctgacatagatgctttagaagattttttgccaggaatattaaaaacaacaacacttggttatgatggcaaaggtcaatatccaattaaatcaggtaatgatcttaattcattgaatattgatttttcaaaaggatatattcttgaaaaacttgtaaaattaaaaaaagagatttcgattataattaccaggtttagtaataataaatatgaaatttacgaaccaatagaaaacactcatgaagatcaaattttaaaatattcaaagatacctgctgaaattaatgaaaaaatttttaatcaatctaaagattgggcaatgctaatagctgaagaacttaaatatgttggaactttgtgtgtagaattttttattgatagaaatgataatctttatgttaatgagattgctccaagagtacacaattcaggacatctaacaataaatgcttttaatgtgagtcaatttgaaaatcatgttagagctgtgtgtggtttagagcaaattcctttaaaaaaaatatcaaatgctaaaatgatgaatttacttggcaatcaaataactcattacagaaacatgcaaaagtttaatgataacgaatttttctttgattatttaaaaaaagatataaaagaaaaaagaaaaatgggtcatatcacaactttagtataa

SEQ ID NO: 276021 - DNA, 1051 bp, Unknown
  Bacterial polypeptide expressing nucleotide sequence isolated from the Sargasso Sea
aatgagtaagataaatcttggaattttaggtggtggtcaattaggtagtatgcttgcaacagcagcaaaaaaattaaacgtacaaactttcatttattgtgatgatgaaaacgcacctgcacaaaaatttgctgatgatttcattctgggagattataatgatgagagtaaaatttcagaatttgtaaataaagtaaatgttgtaacatacgaatttgaaaatattccttttaatacccttgagtttattaataaacataaacaagttttacctaaaccaaatattaatcaagttattcaaaatagattttctgaaaaaaatttcataaataatttaggtattaaaactacagactacgtaatcataaaaaacttaaaagatttaaataataacttaaatcttttaccaggtattttgaaaactaccactcttggttatgacggcaaaggacaatttagactaaataataaaaatgatatagataaacaaaaaatagattttagcagtcaatatattttagaaagaattataaatcttaagaaagagatatcagtaattattacaagatttaaaaatcaaaattatgagatatatgaaccaatagaaaatgtacataaagatcagatacttaaattttcagaaatacctgcaaaaataagtagtaatattttaaatttatccactgaatgggcaaaaaaaatttcagaagaattagattatgtaggtactttatgtgtagagtattttattgacgaaaacgacaatctttacgtaaatgaaatagcaccgagagtacataactctggtcacttaacaataaattcacataatgtaagtcaatttgaaaatcacataagagcagtctgtgccctagataaattaaaaacaaaaaaaatttacaatgcaaaaatgataaacttaattggtgaagatattactgagtatcgaaacaaaaaagttaaagaaaacgaatttttttttgattaccaaaaaaaagaaataaaacctaaaagaaaaatgggtcatttcaccacaattattaaaatttaa

SEQ ID NO: 276022 - DNA, 1045 bp, Unknown
  Bacterial polypeptide expressing nucleotide sequence isolated from the Sargasso Sea
aatgtctaatccaacacttggtataattggtggcggtcaattaggaagtttattatcagtagctgcacaaaaattaaatattaaaactgtaatattaagtgacgacattaatgcacctgcaaaaaattttacttcaaattttatttgtgggaattatgaagaagaaaaaataattaatgattttattagtaaagttgacttagttacttttgaatttgagaatattccttacaaagttttaaaaagtataaataagaataaaactgtattgccaaaacctgaaataaaccaattaatacaaaatagatatacagaaaaagattttttaaataaaaatgacataagaactacaagatatgctttaattaaaaatgaagatgaaattaaaattaatcaaaatttaatcccaggaattttaaaaacatgtactctaggttatgacggaaaggggcaatttacaattaattcaatagaggaaattaatcaaaatattgattttaataaagattatattttagaaaaaaaaattaatttaaaaaaagaaatatcagttattattacaagatttggtcatcaaaaatatgaattataccaaccaatagaaaatgttcatgaagatcaaatattaaaacattcaaaaatacccgcagatatttcggactctataaaagataaatctttagattgggcaactaaaattgttgaagaattagattatattggaacattatgtgtagaatattttatagataaaaataataatttgtatgttaatgaaattgcaccaagggtacataactctgggcacttaactattaatactcataatattagtcaatttgaaaatcatgttagggctgtttgtggtcttgaaaaaatagaaacaaaaaaaatttacaatggtagaatgcttaatttaattggtaatgatatatctatttatagaggcaaaacttttaaagataatgaatttttctatgattaccttaaaactgaaattaaagacaaaagaaaaatgggacacttaacaattattgaaaaataa

SEQ ID NO: 276023 - DNA, 1249 bp, Unknown
  Bacterial polypeptide expressing nucleotide sequence isolated from the Sargasso Sea
gatgccgctattgcacgttttgcagcgcatccggccgcgaccgaccactaagatgaatccagacaacacaccggtttcaccgattctgcccggcgcatggcttggcatggtcggtggcggccagcttggccgcatgttctgctttgccgctcaggcgatgggctatcgcgtcgccgtgctcgacccggacgaaagcagtcccgcgggcaccgtggccgaccgccatatccgcgcgtcttacgacgacgaagcgtcgctcaccgaactcgcgcggctgtgcgcggccgtgtcgaccgagttcgagaacgtgccggcctcgagcctcgatttcctcgccaaaactacgtttgtgagcccggccggccgctgcgtcgccgtggcgcaggaccggatcgccgagaagcgctttatcgcgtcgtcgggcgtgaccgtggcgccgcacgtggtgatcgaatcgtcggacgcgctcgccgcgcttgacgacgcgaagctcgaagcggtgctgcccggcattctcaagaccgctcggatgggctacgacggcaaaggccagatccgtgtgcgcaacgccgaggaagtgcgcgaggcgcatgcgtcgctcgcgggcgtgccgtgcgtgttggaaaaacgcttgccgttgaagttcgaagtgtccgcgctgatcgcgcgcgcggcgagcggcgcgtcggtcgtatacccgctggcgcagaatacgcatcgtgacggcgtgctgtcgcacaccatcgtgcccgcgccggatgcaaacccgacgctagtcgagcaggcgcaacaggctgcgctgcaaatcgcggacaagctcggctatgtcggcgtgctgtgcgtcgagttcttcattctcgaagacggatcgctcgtcgccaacgaaatggcgccgcgtccgcacaactccggccactacacggtcgatgcgtgcgcgaccagccagttcgaacagcaggttcgggcaatgaccggtatgccgctgggcgacacgcgccagcattcgccggcggtgatgctgaacattctcggcgacgtctggttcccggacggcccgaagggcgcatcggtcacgccgccgtggcacgaagttgccgcgatgccggcggcgcgtctgcatctgtacggcaaggaagaagcgcgttgcgggcgcaagatgggtcacgtgaacttcacgtccgcgacgcttgaagaagcccgcacggcggcgcgcgattgcgcgcggctcctgcatatcgtcacgagctga

SEQ ID NO: 276024 - DNA, 496 bp, Unknown
  Bacterial polypeptide expressing nucleotide sequence isolated from the Sargasso Sea
atgagaaataataaaaatataagcaaagtatcaattattatgggtagtcaatctgactactcgacaatgaaattttgtgaaaaagtactaaaaattttaaaaatcagttttgaaaaaaaaattatatctgcccatagaactcctaaaagaatgtttgaatatgctagaaatgctgagaaaaataacatctctgtcataatagctggagctggtggatcagcacatctacctggaatggttgcggcaattaccagaataccggtaattggtgttccaatagaaagtaaaagattaaagggacttgatagtttattatcaattgcacaaatgccaaaaggtatcccagttggaacagttgcgattggtaaggacggtgcgataaatgcaggcctatttgcagcatcaataatttccacctttgataaaaaaattaaaaaaaatttagaaaactggagatctaaacaaacaaaatctgtaaaaaaaaaaccaaaataaa

SEQ ID NO: 276025 - DNA, 472 bp, Unknown
  Bacterial polypeptide expressing nucleotide sequence isolated from the Sargasso Sea
ctgaataataaagtagcgattattatgggatctcaatcggatcattccataatgaaagagtgcgcgaaaattttaaagactctcaaaattaaatatcaaatttcaatagtaagtgcgcacagaacaccaaaaagaatgtttgaatttgcagagtcagcctcaaaaaaaggttttggtgttattgtggctggagcaggaggttcagcacatttgcctggcatggtggcatctttatcttccttgccagttattggagttccgatagaaacaaaaaaacttaagggtttagatagtttgttatcaatagtccaaatgccacgaggttgtccagtagccacaatggctataaatggatcaatgaatgctggtttactcgcagcttcaattattggaaattttgatgaaaaaattaaatcaaatttagaaaaatggaaacgtttacaaactaaatctattaaaaaaaaaccttaat

SEQ ID NO: 276026 - DNA, 1057 bp, Unknown
  Bacterial polypeptide expressing nucleotide sequence isolated from the Sargasso Sea
aatgagcccgaataagaccatcggaattcttggcggagggcaattagcaaaaatgcttgctactgccgcagccgacttaggttttaatgtaaatatatattgccctgatacagactgtcctgcggcacaagtggccaacaaagtagtatttggaaactatgatgacaatgagaacctagtcgcttttgtaaagaatgtagacgttctaacttatgaatttgaaaacatagacacaaaagcattagaggaattagatctctttgtgaacatgaggccttctgtaaaagcccttaaaatctctcaggaccgcttaactgaaaaaagttatcttaattcgttaggtattaaaactacgcaattttatagaattgatgaagtttatgaaattgaaaagctatttactagactaaagaaaccaattcttatcaagacacgtaggctaggttacgacgggaagggacaaatattagtcaaaacactagatgatattaacaatcattttctcggcaaaaagctttttccatctatagctgaggaagttattagttttgatagagaattatccgtaataatagtccgagataaagagggcaatattaagacttttgaaccaggagaaaatgtacataggagtgggattttggtaactacaactttaccttcgtcaacaagtgaagtgcttaaaaatgacgctgtaaccattgcaagaaaaatagtggccaatctagactatgtcggagttatgggggtagaattttttttaaaagactctgagctttatgttaacgaaattgctccaagagtacataactctgggcattggacaatggatgggagctactccagccagttccagcaacacatcagagcaattatggacttgcctctactatcaaccgagagacattccgacattatcatgtataacttaattggaaaagtgactagtgatctagtaaaaaatgagttagcaaaagtctatctttatggaaagaaagaatctcgtcctgagagaaaaatgggtcacattaatttaataaaaaaaaaggggagttaa

SEQ ID NO: 276027 - DNA, 1048 bp, Unknown
  Bacterial polypeptide expressing nucleotide sequence isolated from the Sargasso Sea
atgtctgaaattagattaggaatacttggtggcggtcaattaggaagcatgttgtctgttgctgcaaaaaaattaaatattagaactataatttactctgatgatcaagatgctcctgcacaaaatttttgtgatgaatttatatttggtgattataaagataaaaataagattaacgattttgcaggaaaagtaagtatagttacatatgaatttgaaaatattccctatgagactttaaatgaaataaataaatttaaaaatgttaatccaaaaccatctattaaccgattaattcaacatcgtttagctgaaaaagattttgttaataaattaaatatcagaacaacaaggtatgttagtatagaaaaaaaatctgatttagagtcacttggtgattttttgccaggaattttaaaaacaacaactatgggttatgatggaaaaggtcaatatcccatcaaatcactaaatgatttgaatggattaaatattgatttttcaaaagaatatattcttgaaaaattggttaaattaaaaaaagaaatttcagtaataattacaagatttggtaataacagatatgaaatttatgaggcaatagaaaatatacacgaaaatcaaattttaaaaaaatctaaaatccctgctgacataagccaaaaacttatagaacaatctagagaatggagtaaacaaatttctgaagaattaaaatatattggtacactttgtgtcgaattttttgttgatcgaaacgataatctttatgtaaatgaaatagcaccaagagttcataattctggacatttaactattaatgcttttaatgttagtcaatttgaaaatcatataagagcagtttgttctttagatcagattcctttaaagaaattacataatgcagagatgattaaccttataggcaatcaaattacaccgtatagacaaaatatgaatttaaaggaaaatgaatttttttttgattatcttaaaaaagaaattaaagataaaagaaaaatgggtcatttaacaaaaactttctgat

SEQ ID NO: 276028 - DNA, 907 bp, Unknown
  Bacterial polypeptide expressing nucleotide sequence isolated from the Sargasso Sea
atgtcagaaataaatcttggtattattggtggaggtcaacttggaagtatgctttcatctgcagcaaaaaaactgaatataaaaacaactatttattctgatgatttagatgctccagctcaaaatttttgtaatgagtttatttttggtaagtataatgataaaattaaaattcttgagtttgctagtaaagtagatgttgtgacatatgaatttgaaaacattccttacgaaactcttaatgaaatgaacaaattaaaatctgttttaccaaaaccttcagtaaatagacttattcaacatagactggcagaaaaagactttataaataaattaaatattagaactacaagatacgcgtcaatagaaaaaaaatcagatatagaaactttagtagattttcttccaggaattttgaaaactacaacaatgggttacgatggcaaaggccaatatccaattagaaaaattgaagatctctattctttagatattgatttctccaaaggatatattcttgaaaaattagtaaaacttaaaaaagaaatttctgtaatagtgactagatttagtaataacaattatgaaatttatgaaccaattgagaatacacaccaagatcaaatactcaaacactccattataccagctgaaattagtaaaaaaattttagatcaatctaaggattgggctattcgaattactgaagaattaaaatatgttggaactctatgtgtggaattttttattgatagaaacgaaaatctatatgttaatgaaattgctccaagagtacataactcaggtcatttaactattaatgcatacaatgttagtcaatttgaaaatcacattagagctgtatgttcgttggaaaaaattcctttaaaaaaaatttcaaatgcaa

SEQ ID NO: 276029 - DNA, 460 bp, Unknown
  Bacterial polypeptide expressing nucleotide sequence isolated from the Sargasso Sea
tatttatgaaccaatagaaaatattcataaagaccaaattttaaaatactcaaaaattccagctgatataaaacctgatattttcaaaaaagctcaagataatgccgagttaattgcaaatgaattagattacattggaacaatgtgtgttgaatattttatagatcaagaagataacctattagttaatgaaattgcgcctcgagttcataactcaggtcatttaacaattaatgcatttaatatcagtcaatttgaaaatcacataagagctgtttgtggattgaagaaagaaaatgtacataaaatagcaaacgctgagatggaaaatatattaggtagcgaaatacaggactacagaaagcgatcttttaaaacggacgaatacttctttgattatggaaaaaaaataattaaagaaaaaagaaaaatgggccacttgacaattttaaaaaagtaa

SEQ ID NO: 276030 - DNA, 355 bp, Unknown
  Bacterial polypeptide expressing nucleotide sequence isolated from the Sargasso Sea
catgaaaaaaaataaaacacataaagtttcaatagttatgggtagtcaatctgattacaaaactatgaaatttgctgaaaaaacgctcaaaaaaattggtatttcttttgaaacaaagattatatctgcccatcgtactccaaaaagaatgtatgattatgcctatagagctgaaaaaaataatattaccgttattatagcaggtgctggtggatctgctcatctacctggaatgatttcatcattaacttatttacccgttcttggagttccaatagaaagtaaaaaacttaaaggtctagatagtctattatcaatttctcaaatgcctaaaggaataccagtggaactctgc

SEQ ID NO: 276031 - DNA, 867 bp, Unknown
  Bacterial polypeptide expressing nucleotide sequence isolated from the Sargasso Sea
aatgtcagatattactttaggaattataggctctggtcagttaggatctttattatgtaaagctgccaaaaagctaaatatcaaaaccgttgttatttcagacgatgaaaaaggaccagcacaaaattacacagatcaatttatatttgctaaatatgaaaacaaagaaaaggtaaaagaatttatcaacaaagcagatatagttacttacgaatttgaaaacattcctattgaaatattaaaaagtataaataaagagaaaaaagttttacctaaacctgacatcaatcagacagttcaaaatagaaaattagaaaaaacttttgtaaacaaccttggtattaggactacggagtgggcttttataaaatcagctcaagacgttaaaaaaaatgaaaaacttttacctggaatcttaaaaacaaatacacttggttatgatgggcatggacaatttgttttaaattctctagacgatattaagaaagactggtgttttactgctgactacattttagaaaaaaaagtaaatctgagtagagaaatttcagttgtaagtacaagatttggaaatggtgaaatttatacgtatgaacccatcgaaaatattcataaagatcaaattttaaaatattcgaaaatacccgcagacattagtgatgaaatatttaaaaaagcacaatctaatgcaaaacttattgccgaaaaactagattatataggtactatgtgtgtcgaatattttatcgatcaaaaaaataccttattagtcaatgagattgcacctcgagttcacaattcgggccatcttaccatcaatgcttttaatattagtcagtttgaaaatcatgttagagcagtgtgtgg

SEQ ID NO: 276032 - DNA, 889 bp, Unknown
  Bacterial polypeptide expressing nucleotide sequence isolated from the Sargasso Sea
atgtcgaatacttctatcggaataattggcggtggacaattaggaagcatgttgtgttcggccgcaaaaaaattaaatataaaatcagttgtaatatcagatgataaagatgccccagcacaatcatttgctgatgaatttatttttagtaaatacgataatgatgtaaaaattcaagaattctgtaataaagttgaatttataacatttgaatttgaaaatatccattatgatgtactaaaaaaaattgatgaaataaaaaaagtaaatcctaaacctcaaataaataaaattgtccaaaatagaattaacgaaaaagattttttaaataaaaataatattagaaccacttcatacatttcaataaaaaatgaaggtgaacttaaatccgcgcaggactttattcctggtttacttaaaacttgtactttgggctatgatggaaaaggtcagtataaaattgaaagtgaaaaagagttagataatttaaaaataaattttgataatgattatatttttgaaaaattagttaaacttaaaaaagaaatttctgtaataataactagatttggaccagaaaaatatgaggtatatgatccaatagaaaatattcatgaagatcaaatattaaaatattcaaaagtgcccgcagaaatagatcaaaatttatataatcaatcaattaaatgggcaaagtatatttctgaagaacttaactatattggaactatgtgtgttgaatattttatagataaaaatgaaaacttatatgtcaatgaaattgcaccaagggtccataattcaggacatcttacaattaatgcttataatattagtcaatttgaaaatcatataagggctgtatgtaatttagaaaaaattgaaacaa

SEQ ID NO: 276033 - DNA, 493 bp, Unknown
  Bacterial polypeptide expressing nucleotide sequence isolated from the Sargasso Sea
atgcctgcaaataatatacataaagtttcaatagtaatgggaagtcagtctgatttcaaaacaatgaaactgtgtcaaaatgttcttaaaattttaaaagtaaaatttgaaataaaaattgtttctgcacatagaacaccggatagaatgtttaaatatgcaaaaatggcagaaaaaaataaggtttcagtgattatagctggagctggaggatctgctcatttgcctggaatgattgccgctcttacaccaataccagtaattggagtaccaatagaaagtaaaaaattaaagggtttagatagtttattatcaattgttcaaatgccaaaaggaattcctgtaggtacagtagctattggtgatgacggggcaataaatgctgctttattagcagcttctataattgccttaagtgataaaaaagtaaaaaaaaacttaagcacatggcgtactaaacaaagcgcctctgttaaaaagaaaccaagataaa

SEQ ID NO: 276034 - DNA, 511 bp, Unknown
  Bacterial polypeptide expressing nucleotide sequence isolated from the Sargasso Sea
taaaaaagaaatttcaattgtcatatgtagatttggcaatcaaaaatatgagatatatgaaccgattgagaatgttcatgaagatcaaattttgaaacattcaaaaattcctgctgaagtttcagaaaaaataaaagtaaaatcaaaagaatgggcaaaaaaaattgttgaggaactagattatattggaaccttatgtgttgagttttttattgataaaaatgaaaacttatatgtcaatgaaattgcacctagggttcataattctggtcatctaacaataaactcacataatgttagtcaatttgaaaaccatataagagctatttgtggtttaaaaaaaattgacacaaaaaaaatatataatgctcaaatgattaatctaattggtgatgacataacaatttatagaaataaaacttttaaagagaacgagtttttttatgattatttaaaaaaacaagtaaaagcaaaaaggaaaatgggacatctaacaattattgaaaaataa

SEQ ID NO: 276035 - DNA, 793 bp, Unknown
  Bacterial polypeptide expressing nucleotide sequence isolated from the Sargasso Sea
gttaaaaaagtagatcctaatccagaagttaataaaattgttcaacacagatactcagaaaaaaattttctaacaaaaaaaaatataaaaactacagaatttgaaagaatcgttaatgaaagtgatataaaaaaaaataaaaatttattacctggaatactaaaaacctctacacttgggtacgatggtaagggccaatataaattaaataatttggaagatttggataatcataaaattacctttgatagagaatttgtactagaaaaattagtaaatctagaaaaagaaatttctgtggtaattacaagattttcaaaaaataattacgaaatatatgaaccaattgaaaatttacacgaagaacaaattttaaaatattcaactattccagcccaaattaatttgtctcattttaaaaaatctcaagaatgggctaaacttatttctgaagaacttcagtatgttggaactttatgtgttgaattttttatagataaagatcaaaatttatatgtaaatgaaattgcaccaagggttcacaattcaggtcatttaactataaatgcctataatattagtcaatttgaaaatcatatcagggctgtttgtggattagaaaaaattaaactaaagaaaatatgtaatgcaaaaatgataaatattattggtgatgaaataaataattacagaaacaaaaaatatactgaaaacgaatttttttttgactatttaaaaaaacaaattaaacctaaaaggaaaatgggacacttaactataattaaaaattaat

SEQ ID NO: 276036 - DNA, 1045 bp, Unknown
  Bacterial polypeptide expressing nucleotide sequence isolated from the Sargasso Sea
atgaaaaatcctattttaggaattataggtggaggtcaacttggaagtttgctgtcagtagctgctaacaaaattggtattaaaactgttattttaagcgatgatgagaatgcgccagctaaaaactttacggaaaaattcatatatggaaaatatgataacaaatcaattactcaggaatttatcgatagtgtcgatttagttacttacgaatttgaaaatattccatttcatattcttcaaagtataaataatgaaaaaacagttttacctaaacctgagattaataatttaatccaaaatagattgacagagaaaaattttctcaatgatataaatattcaaactacccaatatgtttctataaaacatatagacgaattaaaagaaaatgaaaattttttgccaggattgctaaaaacaactacattaggatatgatgggaagggtcaatacaaattaaatagcaaaaaggatatatctaatgaaatagatttttctaaagaatacatattagaaaaattcattaatttaaaaaaagaaatatctgttatcattacaagatttggtaatcaaaaatatgaaatatatgaaccaattgaaaatgttcatgaagaccaaattttaaagcactctaaaatccctgcagatgtttcgaaagcaattataattaaatccactgagtggtcaaaaaaaattgtagaggatttagattatattggaacattatgtgtagagttttttattgacaaaaatgataatttatatgctaacgaaatagctcccagagttcataactcaggacatttgacaattaattctcacaatataagtcaatttgaaaatcatgttagagctgtatgtggtttagaaaaaattaaaacaaagaaaatatataatgccaaaatgataaatttaataggtgacgatatttcaatatatagagacaaaaaattttctgagaacgaattcttttttgactatcttaaaaaagatataaaaaataaaagaaaaatgggtcatataacaatcattgaaaaataat

SEQ ID NO: 276037 - DNA, 1048 bp, Unknown
  Bacterial polypeptide expressing nucleotide sequence isolated from the Sargasso Sea
aatgtcaaaacctactattggaataattggcggtggacaactaggaagtatgctttctacagctgctaaaaatttaaatataaaaactgtaattatttctgatgatgagcaagcaccagcacagttttttgctgatgaatttattttttgtaaatatgatgatgaattaaaaattgtagaattttctaataaagtagattttgtaacctttgaatttgaaaatattccttatgacactttatgtaaaatagataatataaaaaaaatataccctaaaccttacataaataaaattattcaaaatagactaagcgaaaaagattttttaaataaaaataacattaaaactacctcctatatttctgtcaaaaatgaaagtgaactaaagtccagtcaagattttataccaggcatacttaagacttgcacactaggttatgatggaaggggtcaatataaaattaataatgaagaagaattagataatttaaaagttaattttgaaaatcattatatattagaaaaattagtcaaacttaaaaaggaaatatcagtaataattacaagatttggaaaacaaaaatatgaagtgtacgatccaatagaaaatgttcatgaagatcaaatattaaagtattcaaaaatacctgccgaagttagcgaagagttgcttgataaatcaaaggaatgggcaaagtatattgctgaagaacttgattatatcggaactatgtgtgttgagtattttattgataaaaatgataatttatttgtaaacgaaattgcaccaagggttcataattcaggacatcttacaataaatgcttataacgttagtcaatttgaaaatcatataagagcggtgtgtggactagaaaaagttgaaacaaaaaaattatataatgccaaaatgattaatttgattggtgaagatatattggtttatagaaacaaaacttttaaagataatgaatttttctttgattataagaagaataatataaaaaaaaaaagaaaaatgggccatttaacaataatcgaaaagtaa

SEQ ID NO: 276038 - DNA, 493 bp, Unknown
  Bacterial polypeptide expressing nucleotide sequence isolated from the Sargasso Sea
tatgcaatcaaaaaaaatacataaagtttctatcgtaatggggagccaatcagattttaaaacaatgaaactgtgccaaaaagtctttaaaattttaaaagtaaaatttgaaacaaaaattatttcagctcatagaactcctaaacgtatgtttgattacgcaaaaaaagctgaaaaaaacaagatttcagtaattatcgctggagcaggaggctccgcccatttgccaggaatgattgcttcacttacaacgataccggttattggtgttccaattgaaagtaaaaaactaaaaggtttagatagcttgttatctattgcacaaatgccaaaaggaatcccagttggtacagttgcgattggagaagatggtgcaattaatgctgcattattggcaacatctataatttccttaagtgatgaaaaattaaaaaaaaatctaaataagtggcgaattaaacaaagctcttcagtaaaaaaaaaaccaaaataa

SEQ ID NO: 276039 - DNA, 502 bp, Unknown
  Bacterial polypeptide expressing nucleotide sequence isolated from the Sargasso Sea
aatgacaaatgaaacaacacaagtagcaataattatgggctcggactcagatttatcaatagtagaggccgcctttcctattctagatagttttggagtttcatttactaaaaatgttatgtcagctcatagaacccctcatgatgttatggaattaataaagaactctgaacaaaatggatgtaaagtatttattgcagccgcaggtatggcagcacacttagctggggctgtagcagcacactcgactaaacctgttataggtataccaatagaatctggtggtatgggcggaattgattcattgctatcaacagctatgatgccaccaggcgttccagttgcaactgttgctgttggaaaaagtggagcaaaaaatagcgctatattagctgtacaaatactagctacaagtgatgatgatttagcaacaaagctaaaagattttaaagaaaatatgagggctgaagttttagaaaaggacaagaagcttaactcataa

SEQ ID NO: 276040 - DNA, 1033 bp, Unknown
  Bacterial polypeptide expressing nucleotide sequence isolated from the Sargasso Sea
aatgatcattggtatattaggtggaggtcaacttggtatgatgttatgtcaagtagctaaaaaattgaatatccaaacgtttatttacactgactctaatgattccccagcaattaaatatgcaaataattatgctatcaaacaatatgatgattttggtgaaatagacactttcattgatgggtgtgattttattacttatgagtttgagaatattccatttgagactttgtcgtatatagaaaataaaataacagtatcccctagttcccaaattaataaaattattcaggaccgtttaactgaaaaaaattacgtaaatgaaattaatattcccacagttccatatattgaaatcaaagatatagaagatttaaaatcagttaatacggatttctttccagcaatattaaagactcgcaagcttggatatgatggtaaaggacagtatatagtgaatagttcaaaggaaataactgaaatacctaaaaatgattatatcttagaaaagaaaataaatttacaacaagaaatctctattatagctgtgaggtatcaagatggaacaatttttacctatcagccgatagaaaatgttcataaagatcaaattcttttcaaatcttattcaccggcaaattcaaatcaatcaattattgaggaggcaaaaaaacacgccgttaattttgccaaaaaaataagctatgttggtactttctgtttagagttttttattacagataaaaatgaattattattaaatgaaatagctcctagagtgcacaactcaggacatttaactattgagtcatataatgtaagtcagtttgagtcccacctcagatctgtatgcgatcttgaaaaaataaagccatcactaagatataaatctgaaatgacaaatattcttggagaggatatttataattatcgtgataaagaattcaaaaaagatgaatattttcatgattattataaaaaagagtcaaaaattggaaggaaaatgggtcattttaccaaaatactggcttaa

SEQ ID NO: 276041 - DNA, 490 bp, Unknown
  Bacterial polypeptide expressing nucleotide sequence isolated from the Sargasso Sea
aatgaaactatctaatcctaaaatttcaatcgtaatgggcagccaaagtgactggtcaactcttaaacatacaagcattgtattaaaagaattaaaaattagtcacgaaaaaaaaatagtttctgcacaccgaacccctaaaaggttatatgaatatgcagaacaagcttacgacaaaggtattaagataataattgctggtgctggtggctcggctcatttacctggtatgattgcagctataactcatatcccagtaattggtgttccgattgaatcaaaaacattaaaaggattggatagtttactttctatagcacaaatgccttttggtgttcctgtaggaactgttgcaattggtgaaaatggggcaaaaaatgctgctttatatgcagcttcaattattagtaattacgactctaaagttgaaaatcaattaattaaatggagactggctcaaacaaaaaaagtcaaaaagacacctaaataa

SEQ ID NO: 276042 - DNA, 493 bp, Unknown
  Bacterial polypeptide expressing nucleotide sequence isolated from the Sargasso Sea
aatgaaaactaaaaagctaaaaaaagtatcaattatcatgggtagtcaatcagactataaaactatgaaatattgcagtaaaattttaaaaattttaaaaattaattatgagagtaaaattgtctctgctcatagaacacctaaaagaatgtatcattttgcaactagtgctgagaaaaataaaatacaagtaattatagcaggtgctggtggctctgcacatcttcctggtatggtagctgcgttaacgtcaatacctgttataggagtccctatcgagagtaaaaagttaaaaggattagatagtcttctttcaattgctcaaatgccaaaaggtatacctgttggtacagttgctatcggaaaagatggagcgattaatgctgcactactagcagcatctataatcggccttagtgataaaaaaattaaatttaaattagatctgtggagaaataagcagactagatctgttaagaaaaaacctctttaa

SEQ ID NO: 276043 - DNA, 391 bp, Unknown
  Bacterial polypeptide expressing nucleotide sequence isolated from the Sargasso Sea
aatgtttttaactgaaactgacgaactcattataaacgaagttgctcccagaccacacaactctggacacttaacgattgaatcttcttacacaagtcaatttgaacaacatgtaagatctatattaaatttaccattgggtagatccgataataaaattcccgctgtaatggtcaatctagttggtaaaaaagaagaatttggtcctgttgtatataaaaatattgatcagattcttgtaatggaaggagttactcctcatatttatgggaaaaaacaaacacatccaaacagaaaaatgggacatgtaacaatagtaaataaagacctaaaccaggctttaaaaattgccaaagaggtgaaatcaataattgaagttatatccgaataa

SEQ ID NO: 276044 - DNA, 490 bp, Unknown
  Bacterial polypeptide expressing nucleotide sequence isolated from the Sargasso Sea
gatggcgccgaccgtcggtgtggtaatgggatcgaagtcggactgggggatcatgcagcatgcagtctccacgctcgaagagcttgggatcaagactgaagcacgagtgatgtctgctcaccggaccccggatgtcgctatagagttttcgaagaccgctgaggagcgcggtctcgaggtgatcattgccgccgctggtggtgccgcgcacttggccggggtcatggcagctaaaacaacgatccccgtgctcggggttccaattcaggcgtggtcacttgatgggcttgattcactgctttcaacagttcagatgccgcgggggataccagtgggtacactagcgataggtaaggcaggagctgtgaacgctgccttgttagccggccaaatcctcggactgaaatacccagaggtcgccgatgccgtgaaggcagatcgtgctaggcgcagggatgcagtgctcgctgactccgatccgcgagtctga

SEQ ID NO: 276045 - DNA, 457 bp, Unknown
  Bacterial polypeptide expressing nucleotide sequence isolated from the Sargasso Sea
tatgaaccgatcgagaatgaacatgaagatcaaatattaaaatattctaaaattcctgctgaaatagatcgagacatttttgaaaaatcaaaagaatggtctaaaaaaatttctgaagaattagattatattggtactctgtgtgttgagtattttattgataaaaataatactttatatgtcaatgagattgcaccaagagttcacaattcaggtcatttaacaattaactctcataatataagtcaatttgaaaatcatataagagcagtttgttcattagaaaagatagaaactaaaaaattatttaatgcaaaaatgatcaatttgattggtgaagatattttaaattatagaaataaaaattttaatgaaaacgagtttttctttgattatcaaaaaaaagaggttaagccaaaaagaaaaatgggtcattttacaacattaattaagtaaa

SEQ ID NO: 276046 - DNA, 260 bp, Unknown
  Bacterial polypeptide expressing nucleotide sequence isolated from the Sargasso Sea
attgaccgctaaatcaaaacaaaaaaaactaatctcaattgttatgggcagccaatcagactggtctactatgaaaaatgctgcaaattttctagaagaacaaaatattccttttgaaaagaaagtagtttctgcacatagaacacctgaaaggctctataaatatgccagaaaagctcaaagtagaggaatcaaagttattattgctggggctggaggagccgctcatctgcctggtatgatagcctcattaacctctt

SEQ ID NO: 276047 - DNA, 397 bp, Unknown
  Bacterial polypeptide expressing nucleotide sequence isolated from the Sargasso Sea
gatgaaaagtttgccactcgttagcataataatgggaagccaatctgattggccaacaatgaaacatgcatcaaaaattctaactacttttaaaatcaaacatgaagtaaaaattatttcagcacaccgcactccgaaaagattattcacatatgctgaggaagctgacaaaagaggcataaaagtaataattgcaggagctgggggagctgctcatcttccaggtatgactgcatcaataagtaatttgcctgtgctaggtgtaccagttgagtctaaaaaattaaaaggattggatagcttgttatcaatcgctcaaatgcctacgggtgttcccgtaggatcactagctgtgggagagacgggtgcaaaaaatgctgccttattagcaatctca

SEQ ID NO: 276048 - DNA, 353 bp, Unknown
  Bacterial polypeptide expressing nucleotide sequence isolated from the Sargasso Sea
aatgaaactaaaaaagcatcgaaaaatcgcaatagtaatgggtagtcaatcggatttctcaacgatgaaagattgtgcaaaaattttaaagagtttaaaaattagctttgatttaaaaattgtatcagcgcacagaacaccaaaaagactttatgattttgcaaaaaaatcagagaaaagttattcagtcataattgctggggctggtggatctgctcatttacctggcatgattgcttctttaacaactgtcccagtcattggagttccaattgaaagtaaaaaattaaaagggcttgatagtttattgtcaatagttcaaatgccaaaaggtattcccgttggtactgttg

SEQ ID NO: 276049 - DNA, 268 bp, Unknown
  Bacterial polypeptide expressing nucleotide sequence isolated from the Sargasso Sea
catgactattccagtagtagcaatcctcatgggaagtcaatcggactggcctactatgaaagatgcaactatagcacttaaagaatttaacataccatatgaggttaagattgtatctgctcacagaactcctaaccgtctttttgaatttggaaatgaagcaaaaatccgaggtttaaaagtaattatagcaggtgctggaggtgctgcccatttgcctggaatgattgcttctaaaactgttatcccaggattggggtgccaataa

SEQ ID NO: 276050 - DNA, 373 bp, Unknown
  Bacterial polypeptide expressing nucleotide sequence isolated from the Sargasso Sea
gatggggtgtctgttggtcaatgaaattgccccaaggcctcacaactcagggcacttcaccatggattcatgtgaaacctctcaattccagcaacatctgctggccgtttctggatggcctctgggcccgacccatattatgaaacctgcgttgatgctgaacctgatcggggatcagcaagataaacttcttcagaacctgaaatttcttccggaaggagcaaaattgcatttttatggtaagaaagaggttcgcccgggaagaaaaatgggacacctcaatctgagtatggagaatccaagtgagctactggaaaccctgatcaaactccaggtctgggatcaagattctctggaaaggatgctgaattga

SEQ ID NO: 276051 - DNA, 478 bp, Unknown
  Bacterial polypeptide expressing nucleotide sequence isolated from the Sargasso Sea
tatgactaacagcgtggcaattgtgatgggttcaaagtctgatatggccttggcagaagcaactaaagaagtattggatggttatgaaattagttcagtgattaaagtactgagtgcccatagaacgccagaggccctcaaagaatttattgaaactaccatcatagacggaaccaaagttttcgtgggaattgctggcttagcagcacatttatcgggaaatattgctgcgcatacgactttgcctgtcattggaattccaggagatggcggacctttaaatggtttggatgctctcttctcaaccgttcaaatgcctagaggagttccggtcgcaaccgtagccataggaaaggcaggtgcagtaaacgctggccacttagccgctcaaatgcttgctactggagatcaagatttggctaaaaaaatagctgatcaaagagaagaacaaaaaagaatcttattagaggatcaataa

SEQ ID NO: 276052 - DNA, 463 bp, Unknown
  Bacterial polypeptide expressing nucleotide sequence isolated from the Sargasso Sea
atgggaagccaatcagattggccttgcatgaaaagtgcttctataattttaaaagagcttaaaatacaacatgaagtaaaaataatatcagcacatagaactccagatagattatttaaatacgcaggaaatttagagaaaaatggaattatggtatcaattgctggtgctggtggcgcagcacacctccctggcatggtagcatcaaaaacaataattccagttttaggtgtgccagttaaatctaaaaatttaaatggtattgatagtttattatcaatagttcaaatgccacctggtgttcctgtaggcactctggcaattggaaatgctggtgcaaaaaatgcagctttacttgctgcttcaattattgctacgagtgatgatgagattgcaaaaaatttaaaaacctggagaaaaaaccaaactcaatctgttaaagaatacccctctgatgagtaat

SEQ ID NO: 276053 - DNA, 321 bp, Unknown
  Bacterial polypeptide expressing nucleotide sequence isolated from the Sargasso Sea
catgaaaaaaaatagtaaattaaaagtttcaatcataatgggcagtcaatctgactataaagtaatgaaactagccgaaaaaaccctaaaaaaaattggagtttcaattgaaaaaaaaattatatctgctcacagaacaccgcaaagaatgtatgaatatgctgcaaaagttgaacaaaataatataggtgtaattattgcaggtgccgggggatctgctcatcttccaggtatgatatcagcacttacacatgtgccagttcttggcgttcctgttgaaagtaaaaaactcaaaggtttagatagtttgtatcaatgcac

SEQ ID NO: 276054 - DNA, 502 bp, Unknown
  Bacterial polypeptide expressing nucleotide sequence isolated from the Sargasso Sea
aatgacaaatcaaacaatacaagtagcaataattatgggatctgactcagatttacccattgtagaggcaattttcccaattttagaatcatttggagtgaaatttactaaaaacgttatgtctgcgcatagaacgccacatgatgttatggagttaataaaaaactcagaagaaaatggttgcaaggtatttattgcagctgcaggcatggcagcccatttagctggtgctgttgctgctcattctactaggccggttataggcattcccattgaatctggtggtatgggaggtattgattcattattatctactgcaatgatgccaccaggagttccagttgcaacagtcgcagttggtaaaagcggagctaaaaacagtgcaatattagctgttcagattcttgcaacaagtgatgacgatcttgctaaaaaacttatcgagtataaacaaaatatgagatctgaggttttagaaaaagataaaaaattaaactcataa

SEQ ID NO: 276055 - DNA, 961 bp, Unknown
  Bacterial polypeptide expressing nucleotide sequence isolated from the Sargasso Sea
gttattttttgtgatgatccagatgcaccagggcaaaatttttctgatgagttcatttatggaagatatgataatgataattcaatagatcaatttataagttctgtagacttcgtgacatttgaatttgaaaatattccttatgaaacccttaataaaataaataatgttaaacctgttttgcctcatccttctattaacaaaattgttcaaaatcgtttaacagaaaaagattttataaataaacttaatataagaacaactcaatatacctcgattaataacgaaaaagatattttttcgaatgaaaatttaattcctggtctgctaaaaacatgcactcttggctatgacggtaaaggacagcataaaataaattccattgatgatatagaaaatgaaaatattgattttaataaaaaatatattttagaaaaattagttaaatttaaaaaagaaatttctgtaataataacaaggtttaaaaatgaagaatttgaaatttatgaacctattgaaaacattcatgaagatcaaattttaaaatattcaaaaattcctgcaaatataaatgaaaaagtttcagaagaatcaaaaaaatgggcacgattaatagcggaagaattaaaatatattggaactttatgtgtagaattttttatagataaaaatgataatttgtatgtgaatgaaatagcccctagggttcataattctggtcatttaactattaatgcatacaatatttctcaattcgaaaatcatataagggcggtatgtaaccttgaacaaataaaattaaataaaatttcaaatgctgaaatggttaatcttattggtgatcaaattactatttatagaaaaaaaaaatactctcccaatgaatttttttttgattatttgaaaaaagaaactaaagacaaaagaaaaatgggtcatttgaccacattaattaaataac

SEQ ID NO: 276056 - DNA, 565 bp, Unknown
  Bacterial polypeptide expressing nucleotide sequence isolated from the Sargasso Sea
aaaaaaaattggtgttttactgctgattatattttagaaaaaaaggtaaatttaaaaaaagagatatcagttgttataacaagatatttaaatggtgaaatttatgtttatgagcctatagaaaatattcataaagaccaaatcttaaatcattcaaaaatccctgcagatataaataaagaaatttttattaaagcacagagtaatgcaaaacttatttcagaaaaattaggttatgttggcacgatgtgtgttgaatatttcattgatcaaaatgataatttgttagtcaatgaaattgctccaagagtccataattcaggtcacctaacaataaatgcgttttccataagtcaattttctggacatgttgcagctgtgtgtaatcttggtgtaaaaaaagttgaaaaaatttctaacgctgaaatgtttaatgtcttgggtaaagatatcgagacttataggtccaaaacatttagtaaaaatgaatttttttatgattacgggaaaaaatcaattaaagataagagaaaaatgggacaccttacggttttaaaaaaataat

SEQ ID NO: 276057 - DNA, 997 bp, Unknown
  Bacterial polypeptide expressing nucleotide sequence isolated from the Sargasso Sea
aatgagtttaaaagtttccaccgttggcatcattggtggtggacaactaggtatgttcttagcacattcctgtattaagttaggacttagagtgttcgtttactcagacagcaagaaagttcccgcagaaaaatatgctgacaagatgttctatggctcctttgaagatattgaaagtttgaaaatttttagtagtgaagtagatcttataacctatgaatttgaaaatgtgtcaactaaagctcttaaaaaattaaagagaaagaaaatatatccacctatttctgcgctgactattagtcaggatagaaaaaaagagaagcaattcttctcaaaaaataaaattaatcacgcaggaattggccttctaaataaaaagcaaaatttgaaaaaactagaatcttcaattcagtatcccgtaatattaaaaacaactagatttggctacgatggcaaaggacaagcgttgatacaaaatactaaaaatttaaaaagacaatggaaagaaaataactatcaggactgtattatagaaagaaagattaatcttaaagaagaagtttcagttatatgtgcgagagacattaagcaaaatttttatttttatccgacattcgctaatgtgcacaaagatcatatactttttgaaacaacatcgcctagtaacatagatgcgaaaattgaaggagagttattaaaaatatcaagaagaattattacaaagctaaattatattggattattaacgattgaattttttcttgataaagaaaataatatttttgttaatgaaattgctccaagagttcacaattctggtcatataacactggataatgcgaacataagtcaatttgagttgcatataagagccattacaggaaaaaaaattcttaaacccaaaatacttaaaaaaggacttatgagaaatctcataggtaatgaaataaaaaaagtaagtagaataaaatatatgaggaggtataaaggcttcaaa

SEQ ID NO: 276058 - DNA, 566 bp, Unknown
  Bacterial polypeptide expressing nucleotide sequence isolated from the Sargasso Sea
actctttaatatagatttttctaaaggttatatactagaaaagttagtgaaacttaaaaaagaaatatcagttatagtaacaagatacggtaataataattttgagatttatgatccaattgaaaatactcatcaagatcaaattttaaaattttcagtaatacctgctgaaattagtaaaaaaattttagatcagtcaaaagattgggctattatgattgcagaagaacttaaatacattggtacactatgtgtagaattttttatcgacagaaatgaaaatctctatgtaaatgagattgctccaagagttcataattctggtcatttaactattaacgcttataatgtaagccaatttgaaaatcatgtaagggctgtatgttcccttgaaaaagttccgttaaaaaaattatctaatgctaaaatggtaaatttaattggtaaccaaattgaaccttatcgaaaaaatttagaactaggtaaaaatgaatttttttttgattatctaaagaaagaggtaaaagaaaaaaggaaaatgggtcatataacaactttactataaa

SEQ ID NO: 276059 - DNA, 454 bp, Unknown
  Bacterial polypeptide expressing nucleotide sequence isolated from the Sargasso Sea
gatgggaagtaagtctgattatgctaccatgaaaaattgtgaaaaaattttaagattactgaaagttaaatttgaaaccaaaattgtttctgcacaccgtacaccagagagaatgtttaaatttgccaaagcagctgaagataataatatttctgtcattattgctggtgcaggaggctctgcacatttaccaggaatgattgcatcattaacaactatacctgttatcggtgtaccagtggaaagtcgtaaattaaagggattggatagtttgttatctatagtacaaatgccaaaaggtatccctgttggtagtgttgcaattggtgaagatggagcaatgaatgctggtttatatgcagcttccattattgctcttacgaataaagaaattaagaaaaatttaaaaaattatcgaactaaacaatcaaaagctgttaaacaaaaaccataa

SEQ ID NO: 276060 - DNA, 502 bp, Unknown
  Bacterial polypeptide expressing nucleotide sequence isolated from the Sargasso Sea
tatgtcaaattcaagtttacaggttgccataatcatgggttcagatagtgacttgcccgttgtagaggcaagtttctctattcttgagtcttttggcgttaaatatactaaaaatgtaatgtctgctcacagaactccgcatgatgtaatggatcttattaaaagatctgaagagaacggctgtaaagtattcatagctgcagctggaatggctgcgcatctagctggagctgtagctgcacattcaacaaaaccagttattggaattccaattgaatcaggtggaatgggaggaattgattctttactttcaaccgctatgatgcctcctggtgttcctgttgcaacagttgctgttggtaaaagcggtgcaaagaatagcgctattttggctgttcaaattctagcaacatctgatgatgagcttgctcaaaaactaaaagattataagtcaaatatgagggaagaagttttagagaaagataagaaacttaactcataa

SEQ ID NO: 276061 - DNA, 1045 bp, Unknown
  Bacterial polypeptide expressing nucleotide sequence isolated from the Sargasso Sea
aatgagccagccagttttaggaataattggaggtggtcagctaggtagtatgctttctgaagctgctaaaaagatagatataaaaactgtagtacttagtgacgatccagatgcgcctgccaaaaattttgcaaataagttcatatatggaaactataatgatacaaaaattataacagaatttgttaataatgttgatttagttacctatgaatttgaaaatataccctttgatatattgaatgaaataaataaatcaaagagtgttttgcccaaaccagaaataaatagtttaatccaaaatagattaactgaaaaagattttttaaataaaaacaatattagaacaactaactatgctctaattaaaaataaggatgaaataaaagataatgaaaatcttttgcccgggttacttaaaactactactcttggatatgatggtaaaggtcaatataaattaaatagttttattgacataaatgacaacattgattttactaaagaatatattttagaaaagtttattaatttaaaaaaagaaatttcaattgtcatatgtagatttggcaatcaaaaatatgaaatatatgaaccgattgagaatgttcatgaggatcaaattttgaaacattcaaaaattcctgctgaaatttcagaaacaataaaggtaaaatctaaagaatgggcaaaacaaattgttgaagaactagattatattggaaccttatgtgttgagttttttattgataaaaatgaaaacttatatgttaatgaaattgcacctagagttcataattctggtcatctaacaataaactcacataatgttagtcaatttgaaaatcatataagagctgtttgtggtttaaaaaaaatcgatacaaaaaaaatatataatgctcaaatgattaatctcattggtgatgacataacaatttatagaagtaaaacttttaaagagaatgagtttttttatgattatttaaaaaaacaagtaaaagcaaaaaggaaaatgggacatttaacaatcatcgaaaaataa

SEQ ID NO: 276062 - DNA, 496 bp, Unknown
  Bacterial polypeptide expressing nucleotide sequence isolated from the Sargasso Sea
catgaaaaacaaaaaatatagtcacaaggtatcaattgttatgggaagtaattctgattactcaaccatgaaattttgtgaaaaaattcttaaattgcttaaaattaattatgaaacaaatatagtttcagctcatagaactccagaacgcatgtttaaatatgcaaaatctgctgaaaaaaataatatttctgtgataattgctggagcaggaggatcagcccatttgccaggaatgattgcgtctctaacaagaattccagtaattggagtgccaattgaaagtaaaaaattaaaaggtctagacagtttactttcaatagctcaaatgccaaaaggtataccggttggaactgtagcaataggtacagatggagcaataaatgccgcattatatgcagcttcaattatctctacgtttgatatgggtgttaaaaataatctcaacaagtggcgatctaaacaatcaaaatctgttaaaaaaaaacctaaataa

SEQ ID NO: 276063 - DNA, 502 bp, Unknown
  Bacterial polypeptide expressing nucleotide sequence isolated from the Sargasso Sea
aatgacaaatgaaacagtacaagtagctattataatgggttctgactcagatcttcctgttgtagaagcaagtttttcaatattagatgattttggtgttaaatacactaaaaacgtcatgtcagcgcatagaacgcctcatgatgtaatggagctaataaaaacctctgaggaaaacggatgtaaagtttttatagcagctgctggtatggcagctcatcttgccggagcggtagcggctcactcaacaaaaccagtaataggtattccaatagaatcaggcggcatgggtggaattgattccttgttgtccactgcaatgatgccaccaggagttcctgttgcaacagtagccgttggaaaaagtggagcaaaaaacagtgcaatacttgcagttcagattcttgcaactagtgatgaaggtcttgcacaaaagttggttgagtataaacaaaatatgagatctgaagttttagaaaaagataaaaaacttaattcataa

SEQ ID NO: 276064 - DNA, 487 bp, Unknown
  Bacterial polypeptide expressing nucleotide sequence isolated from the Sargasso Sea
aatgaaaaatccttcactggtaagcatcattatgggcagccaatctgattggcccacaatgaagcatgcttcaaaaattttaaaattatttaatataaaacacgaagtaaaaattatttctgcccatagaacgcctaaaagaatgtttgaatatgctgaaagagcagagcaaagaggaatagaaataataattgcgggcgctggtggagcagctcatttgcctggaatgacagcctctatttcaaatattcctgtactaggtgttccaattgaatcaaaaaaactaaaaggcttagatagtttgctatcgatcgctcaaatgccagcaggtgttccagttggaacacttgctgttggagaagctggagcaaaaaatgcagcattacttgcagtatcaattttaagcagcaataacacaaaactgaaaaagaaatacgcttcatggagatcaaaacaaactaagtcagtaaaaaatatacctaaataa

SEQ ID NO: 276065 - DNA, 244 bp, Unknown
  Bacterial polypeptide expressing nucleotide sequence isolated from the Sargasso Sea
atggctaaaactcaaccattagtaagtatagttatgggtagccaatcagactgggatacaatgaaatatagtgttgcaaccttattagacttaggtattacacatgagactaaaatcgtttctgctcatagaactcctcaaagacttaataaatatgcagcttctgctcttaagcgaaaaattagagtaatcattgcaggagcaggaggttcggcacatttaccaggaatggtgcttcgatgac

SEQ ID NO: 276066 - DNA, 412 bp, Unknown
  Bacterial polypeptide expressing nucleotide sequence isolated from the Sargasso Sea
atgacaaatgaaaccactcaagttgctattataatgggctcagactctgatttgcatattgtagaggcaattttcccaattctagactcatttggcgttaaatttacaaaaaatgtaatgtcagcccacagaacaccccatgatgtaatggatctaattaagaaatctgaagatgatggctgtaaagtttttattgctgctgcaggtatggctgcacaccttgctggtgcagttgcagctcattcaactaggcctgttattggtatacctattgagtcaggtggaatgggtggcattgattccttactgtctactgcaatgatgcctccaggagtgcctgttgcaacagttgcagtgggaaaaagcggagctaaaaatagtgcaattttagctgttcaaattctgctacagc

SEQ ID NO: 276067 - DNA, 454 bp, Unknown
  Bacterial polypeptide expressing nucleotide sequence isolated from the Sargasso Sea
gatgggaagcaagtctgattatgctaccatgaaaaattgtgaaaaaattttaagattactgaaagttaagtttgaaaccaaaattgtttctgcacaccgcacaccagagagaatgtttaaatttgccaaagcagcggaagacaataatatttctgtcattatagccggtgcaggaggctctgcgcatttaccaggaatgattgcatcattaacaactatacctgtaatcggcgtaccagtagaaagtcgtaaattaaaaggattagatagtttgttatcaatagtacaaatgccaaaaggtatccctgttggcagtgtagcaatcggtgaggacggcgcaatgaatgccggtttatatgcagcttccattattgctcttactaataaagaaattaaaaaaaatctaaaaaattatcgaagtaaacaatcaaaagctgttaaacaaaaaccataa

SEQ ID NO: 276068 - DNA, 634 bp, Unknown
  Bacterial polypeptide expressing nucleotide sequence isolated from the Sargasso Sea
tttgttaaaaaccacaacgttaggatacgatggtaaaggtcagtataaattaaacactgtagatgatattacgaaagaaattgattttacaaaagaatatattttagaaaaactcattcatcttaaaaaagaaatttcagttgtcattactcgttatgatcaaaatagttatgagatctatgatcctattgagaatgttcatgaagaacaaattttaaaatattcaacaataccaagtgatatctctgatgacatacgaataaaatcaattgagtgggcaaaacaagttgtagaaaaactagattatattggaacgttatgtgtagaattttttattgatactgatgataatttatatgctaacgaaattgctcctcgtgttcataattctggacatcttacaatgaactctcataatattagtcaatttgaaaatcatgtaagagcagtatgtggcttagaaaaaattgagacaaaaaaattgtataatgccaaaatgattaatttaattggtgatgatataacaccgtatcgaaataaaacatttaagaataatgaatttttttatgactatttaaaaacaaaaattaaaaataaaagaaaaatgggtcatataacgattattgaaaaataa

SEQ ID NO: 276069 - DNA, 829 bp, Unknown
  Bacterial polypeptide expressing nucleotide sequence isolated from the Sargasso Sea
tgaaaatatacctgtagattttttaaatctcattcagaaagagaaaaaggtattaccctctcctaaaataaataaaattgctcaaaacagaaaactagagaagacttttgttaatgaactaggaattgatacgacagactgggtttacattaagtcagcagaagatataaagaaaaatcaacaccttttacctggaatacttaaatctaatactttaggctatgatggaaaaggtcagtttgttctgaattctctggatgatattaaacaagattggtgttttactaacgattatattcttgaaaaaaaagtagacttgaaaaaagaaatttcagtcgttattgctagatatgcagacgggacaatgacaaattatgagccaatagagaatgtccatcaaaatcaaattttatttaaatcaaaaataccagctgatattaatgataagatatacaaaaaggctatttcaaatgcaaaaaaaatatctgaaaaatttaattatgtgggtgttttaacagtagaatattttatcactgaaaaagatgaacttttagtaaatgagctagcaccacgttttcataattcagggcatttgaccatcgatgctttcaaccagtcgcaatttagcttacatgtttcatgtgtgtgtaatttaggctcgaaaccaattggtaaaatatctaatgcagaaatgtataatattttaggttctgaaattcttgaatacagaaaaaaaacatttaaaaaaaatgaatttttttatgattatttaaagaaggaacctagacagggaagaaaaatgggacatcttacgatattaaaagattaa

SEQ ID NO: 276070 - DNA, 255 bp, Unknown
  Bacterial polypeptide expressing nucleotide sequence isolated from the Sargasso Sea
tatgtcaaattcaagtttacaggttgccattatcatgggttcagatagtgacttgcccgttgtagaggcaagtttctctattcttgagtcttttggcgttaaatatactaaaaatgtaatgtctgctcacagaactccgcatgatgtaatggatcttattaaaagatctgaagagaacggctgtaaagtattcatagctgcagctggaatggctgcgcatctagctggagctgtagctgcacattcaacaaaacc

SEQ ID NO: 276071 - DNA, 576 bp, Unknown
  Bacterial polypeptide expressing nucleotide sequence isolated from the Sargasso Sea
tttctcaagtggctgcatgtaattgggatggaaaagtggagtttcttcctataagcgaaaatcatcatataaataatatcttacatacatcaaaagttcccgcaacgattagtaattcacaaaaaaaagaaatccaggatataacaaaaaaaattattaagtcgctttcctatattggagtgatatgtgttgaattctttattagtttagatgacgagattatggtgaacgagatagcaccaagaacacataacagcggacactactctattgaagcatgcgatatttctcaatttctatatcaggcacaaattgcaggtaataagagtattaaagcatcaaatttaaatcataaagctataatgttaaatttattaggcgacctttggagaaatggtgagccaaatttcgattttcttaataattattcaaatatttttcttcatttatataataaaaagaatggtgtgccaggaagaaaaatgggtcacctaacctttattagtgatgatgatgaggaactaaaaattttatttaaaaaagtaagtgatgaaatctcaaaaggatacatataaa

SEQ ID NO: 276072 - DNA, 1045 bp, Unknown
  Bacterial polypeptide expressing nucleotide sequence isolated from the Sargasso Sea
aatgaaagatcctattttaggaattataggcggaggtcaacttggaagtttgttatctgtagctgctaaaagtattggaattaaaactgttattttaagcgatgataaggacgcaccagcaaaaaactttacagaaaaattcatatttggaaattatgataacaaatcaataactcaggaatttattgatagtgtcgatttagttacttacgaatttgagaatattccatttagtgttcttcaaagtataaataatgaaaaaacagttttacctaaacctgagattaataatttaatccaaaacagattaacagaaaaaaattttcttaatgatataaatattcaaactacccaatatatttctataaaacatataaatgaattaagagaaaatgaaagttttttaccgggcttattaaaaacaactacattaggatatgatggtaaaggtcaatataaattaaatagtgcacaggatatatctaatgaaatagatttttcaaaagaatatatattagaaaaatttattaatttaaaaaaagaaatatctgttattattacaagatttggtaatcaaaaatatgagatatacgaaccaattgaaaatgttcatgaagaccaaattttgaaacattctaagatccccgcagatatttcagaagaattaaaaattaaatccacagaatggtcaaaaaaaattgttgaagatttagattatattggaacattatgtgtagagttttttatcgacaaaaatgataatttgtatgcaaatgaaatagcaccgagagttcataattcaggacatctgacaattaattctcacaatataagtcagtttgaaaatcatgtaagagctgtatgtggtttagaaaaaattaaaactaaaaaaaaatataatgctaaaatgataaatttaattggcgatgatattttaatgtatagaaataaaaaattttcaaagaatgaattcttttttgactatcttaagaaagaaataaaaaataaaagaaaaatgggtcatttaacaatcatagaaaaataa

SEQ ID NO: 276073 - DNA, 493 bp, Unknown
  Bacterial polypeptide expressing nucleotide sequence isolated from the Sargasso Sea
aatgagtcaagtagcaattataatgggcagtaagtcagattttgaaataatgagtgaagctattgaaattctcaaatcatttgacataaatactgaatatgatatagtctcagcccataggacacctaataaaatggttgaatatgcttctaatgctgaaaaaaaaggtataaaagttattattgcaggagcaggaggagcagctcacctccctggaatggtagcttcaataacaagtttgccagttattggtgttccaataaaatcaagaaattcaatagatggttgggactcaattttatctattcttcaaatgccaggaggagttccagttgcaactgtagctttgaatggctcaaaaaatgcaggtattcttgctgctcaaattattggatcctttgattctaaagttgccgataaggtcaaggcctataaaaaagatttagaagataaggttattgaaagtagcaaagatttaaagaaaaatagctag

SEQ ID NO: 276074 - DNA, 346 bp, Unknown
  Bacterial polypeptide expressing nucleotide sequence isolated from the Sargasso Sea
tatgacagataagcaagtatcaaaaagtaaacctaaagttgccatcgtaatgggaagtgagagtgactggagtgtgatgcgtaaggtaaccgaagtgtttgacgattttttggttgaatacgagtccaaaataatttcagctcatagaacaccagatttaatgagcgatttttcaaaaaatgctagtagttacgggtttcaatatattatcgcaggtgctggtggtgcagcccatttacctggaatgattgcttctaacacaactcttccagtaataggaattccaatccctactactcatctagaaggaactgattcgttattatcgaattgtacaatgcccaaa

SEQ ID NO: 276075 - DNA, 1138 bp, Unknown
  Bacterial polypeptide expressing nucleotide sequence isolated from the Sargasso Sea
atgagagtcgtcgtttacggtgcaggtcaattagcacaaatgatgtatcttgcgggtagcccgttaggtattgatgttcaggccgttgacgtaaacaacgacacggttgttcatccggtaagtaaaactcctctagatatccctcttgatgaagcgttagacggtgctgatgcgctaaccgttgaatttgagcacgttcccgagcgcctgcttgaagttgccgcgcaaaccaataagttaatgccgaatattcaaagtattttggtgggtgcagatcgggttcgtgaaaagcacttgttgcagactatgggtgtggcaaattgcgagcacaaaattgttacgcacttagaccaattagatgaatgtgttgatgcgcttggcagcaagttaattttaaaagccagtcgcgatggttacgatggttacggccaatggcgtttgtcagacgacgctgaattaccagagttaaagcagtctcttcagggcctagatttagaaaatgtgcctttagttgttgagaaaatggttgccttcgaccgcgagctttcactcattggtgtgaggaatgccaaaggtgatattcgcacctatccacttgcggaaaacttgcaccatcagggccagttacatgtgtctgttgcgcctgcaacaaacgtcgatgaggcgctacaacaacaagcacacgatatctttaccaccttggccgacggtatggactacgtgggtgtacttgccgtggagctatttcaagtaaacgataccttattggtgaatgaattagcgccgcgggttcacaactcaggtcactggagccaatctggcgcggtcaccagtcagttcgagaatcatctcagagcggtgtgcggattgccgttaggcgacacatcagcgttagggcccagtgccatggtgaatattattgggtgcagtagtttttctcgagagcttttgagtatcgatggcagtcatctgcattggtacggtaaatcggtaagagataagcgtaagatgggccacatcaatgtgactactgatagctaccatcagcttggtgaaaagttgatggcacttagtcagtacctcccccttgagtacttcccaaaattagttgctgaggcaacgcgattaaaaggttgac

SEQ ID NO: 276076 - DNA, 502 bp, Unknown
  Bacterial polypeptide expressing nucleotide sequence isolated from the Sargasso Sea
ttgttaaacttatttgtgaagcgtaataaactaaataacaaagtggcaatcattatggggtctaaatcagactatgccataatgaaagattgtgagaaaattttaaagactttaaagattaaatttcaagtatcaatagtaagtgcacatagaacacctaaaagaatgtttgaatttgctgagacagcctcaaaaaatggatttggcgttattgtagctggagccggtggctcagcccatttaccaggaatggtagcatctttatcgagtgtgcctgttattggcgttccaattgagtcaaaaaaacttaaaggtttagatagcttattatcaatagtgcaaatgccaaaaggttgtccagttgctactatggctataaacggatcaatgaatgctggattattagcggcctcaattatcggaaattttgatgaaaaaataaaatcaaatttcgaaaagtggaaacgtttgcaaactaaatctattaaaaaaaaaccttagt

SEQ ID NO: 276077 - DNA, 1126 bp, Unknown
  Bacterial polypeptide expressing nucleotide sequence isolated from the Sargasso Sea
attggaaaataattcaataggtataataggtggcggccaattatgtcaaatgttatccgaatatttagatagcattgataaaaaagtttatttcattgatccttcagaaaatcctccagcaaaaagtacaaatgctattcatattagaaaagattatggagacaaagaagctttagaatttctatctaaacaatgtgatgccataacttatgaatttgaaaatataccagtagaaagcttaagttttctaaatacagatattactataaatcttagtccgtatattctttctatttcacaaaatagattaaatgagaaaagaaattttactaggtgtggaataagtactcctaactttactagttttaacaagggagataacctagtttcagttattgagaaatcaaatataaattttccaataatattaaaaacaaatactcttgggtacgatgggaaaggtcaatatagaattgataatcgtgaggacgcagaacataatttacagcatttagatgaaaagactgactatattatcgaagaagttgtaaatttcaaaaaagaattctcagtaatcataggaaaggacagctttggaaatattgaatacttccaaccaatagaaaatatccataaaaatggaattctagatatatctatttatcctgcaagaattaccaaagaaactgaaaaaaattccattgaattagcgactaaattcatcaatgaaataaaattaactgggattttagctatcgaaatgtttcttaatactaacgataaaatacttttcaatgaaatagcacctagaccgcataattcaggccaccttacaatacaaactcattcaatctctcaatttggtttattaggtgaaatagtttcaaacaaaaaaatctgtaaacctttatcaaataaaaaggctgttatgaaaaacatattaggagaattttttaataaaaaaaattataaggaaatactcaatgaaataaaaaatatggataatcactatttaaagctttacaacaaagatgatgcaaagactggtaggaaaatggggcacgtaacaataattactgatgatattgaaaattctttggttaaaataaacgcattaatagattag

SEQ ID NO: 276078 - DNA, 598 bp, Unknown
  Bacterial polypeptide expressing nucleotide sequence isolated from the Sargasso Sea
ggtcagtataaattacatactgaagatgatattacgaacgaaattgattttacaaaagaatacattttagaaaaactcattcatcttaaaaaagaaatctcagtcgtcattactcgttatgatcaaaatagttatgagatctatgaccctattgagaatgttcatgaagaacaaattttaaaatattcaacaataccaagtgatatttctgataacatacgaataaaatcaattgagtgggcaaaacacgttgtagaaaaactagattatattggaacgttatgtgtagaattttttattgatactgatgataatttatatgctaacgaaattgctcctcgtgttcataattctgggcatttgacaatgaactctcataatattagtcaatttgaaaatcatgtacgagcagtatgcggcttagaaaagattgaaacaaaaaaattatataatgccaaaatgattaatttaattggtgatgagatatcactttaccgaaataaaacatttaaggataacgaatttttttatgattatttaaaaacagaaattaagcaaaaaagaaaaatgggtcatttaacgattatagaaaaataaa

SEQ ID NO: 276079 - DNA, 1126 bp, Unknown
  Bacterial polypeptide expressing nucleotide sequence isolated from the Sargasso Sea
atgatactgccacccgccaccctcggcatgttggggggcggccagctcggccgctacttcgtgatggctgcccaccgcctcggttacaaggtggtggtgctggatcccgaccccgccagcatcgccggcgccgctgccgatcaccatattgttgccgcctatgacgacccgaccgccctgcacgatctggccagccgctgcgccgccgtcacctgcgagttcgagaacgtgccggccaccgccctggccctgctggagcagtaccagccggtacgcccggccgccggcgccgtgcgcatctgtcaggatcgccgcgaagaaaaggccttcttgagcagagccggcatcccggtcgcgcccaaccagaccctgcagccgggcgagccgctgccggcgctgtccgcctctctcttccccgccatcctcaagaccgcccgcgaggggtacgacggcaaaggccagtggaccattcaggccgccgaccagctgccggcagcgctggccgccagcggcgtaccctgcgtgctggaacagcggctggcgctggagggtgagttttccctgactctggcccgcagcccgagcggtgccatcggtgccctgccgctggtgcagaactggcacagcggcggcattctggatcagacccgctccccggccaacgtaccagcgctggaagccgacgccagacgtatcgccgaacagctgatcgccgccctcgactacgtcggcgtgctgacggtggagttcttcctggtggcaggaaaactgctggtcaacgagctggcgccacgcccccacaactcgggccaccccagcctcgacaacgccgagtgcagccagttcgagctgcaggtacgcgccctgtgcgatctgccgctgcccgcccggatcgccgtgcaccccgccatgctgctcaacctgctgggggatctctggcagggcggcacgccagactgggccgccctgctggcactgcccggcgtgcatctgcacctctacggcaagggggaaccccgccccggccgcaagatgggtcatgtcaccattaccgccgccgactggccgacagtggaagagacctgccaccgggtgcgccagctgttggggctaccgccgcgctgag

SEQ ID NO: 276080 - DNA, 511 bp, Unknown
  Bacterial polypeptide expressing nucleotide sequence isolated from the Sargasso Sea
atgaatacccctcccctgatcggcctggtaatgggatccgactccgactggcccgtgatgcaggccgccgcccgcatcctcaaggagcatggcgtcccctacgaggcgcgcgtggtctcggcccaccgcaccccggatctgctgttcgaatatgccgccagcgcccgtgagcgtggcctgcgcgccatcatcgccggggctggcggcgccgcccatctgcctggaatggtggccgccaagaccaccattccggtgctgggtgtgcccatcccgacccgccagctcaaggggatggactccctgctctccatagtgcagatgcccaagggggtgccggtcgccaccttcgccatcggcgaggcgggcgccgccaacgccggcctgttcgcggtctccctgctctccgtcgcgcaagacggcgatgccccccgctaccagcagcagctcgacggctttcgcgccaacgaacgcgaccgggtgctggccctcacgctggaggacccggcatgat

SEQ ID NO: 276081 - DNA, 493 bp, Unknown
  Bacterial polypeptide expressing nucleotide sequence isolated from the Sargasso Sea
aatgaaaaaggcaaataatcataaagtttcaattataatgggcagtcagtctgactattcaactatgcaaaattgtgagaaagtatttaaaattttaaaaattaaatttgaaacaaagattatttctgcacatagaactcctaaaagaatgtttgaatatgccaaaactgcagaaaaaaataatatttctgtaattatagcaggtgctggtggatcggcacatttacctggcatggttgctgcaataacaagaattccagtaatcggggttccgatagaaagtaaaaaattaaatggactagatagtcttttatctattgtacaaatgccaaaaggtatacctgttggaactgtcgccattggaaaaaatggagcaattaatgctgcattatttgctgcatcaataatctctaacttcgataaaaaaataaaaaataatttagaaagttggcgatcaaaacaaacaaaatctgtaaaaaaaaaaccaaaataa

SEQ ID NO: 276082 - DNA, 496 bp, Unknown
  Bacterial polypeptide expressing nucleotide sequence isolated from the Sargasso Sea
aatgtctaataagaaaaaaaatcataaagtttcaataattatggggagtcaatctgattactctactatgagatactgccagaaggtgctaaaaatattaaaaataaagcacgaaataaagatagtttctgcacatagaactcctaatagaatgtataaatttgctaaaaatgcagaaaaaaataatatatctattattatagctggagctggtggttctgcgcatcttcccggtatgatagcagctctaacaagaatacctgttataggagtcccaatagaaagtaaaaaattaaaaggattagatagcttgttatcaatagctcaaatgccaaagggaattccagtaggaactgttgctataggaaaagatggagctataaatgcaggcttattagctgcttctatagtcgctattactgatccaaaaattaggaaaaatttaaatatttggagaaacaaacaatcaaaatctgttaaaaaaaaaccgaagtaa

SEQ ID NO: 276083 - DNA, 493 bp, Unknown
  Bacterial polypeptide expressing nucleotide sequence isolated from the Sargasso Sea
atgaaaacaaagaaaaatcttaataaagttacaatagttatgggcagtaaatccgatttcaaaacgatgaaattttgcaaaaaaattttaaaaattttagatataaatcatgatgtaaaaatagtatccgctcacagaacaccggaaagaatgtttgaatttgcaagaaatgcagaaaaaaataatatttctgtaattatcgctggtgctggaggttcagctcatttaccgggaatgatagcatctttaacaactattccagtaattggagttccggtagagagtaaaaaactcaaaggtctggatagtcttttgtctattgtacaaatgcctaaaggaattcctgttggaactgttgcaattggagtggacggtgcaatcaatgccgccttatacgccgcgtcaattctatcagtcaatgacactatggtaaaaaagaaactagctcactggagaaataaacaaacaaaatctgtaaaaaaaagaccttaaa

SEQ ID NO: 276084 - DNA, 502 bp, Unknown
  Bacterial polypeptide expressing nucleotide sequence isolated from the Sargasso Sea
aatgataaatgaaacaacacaagtagcaataattatgggttcggactctgatttacctattgtagaagctgcatttcctattttagaaaattttggcattaaatttactaaaaatgtgatgtcggctcacagaaccccacatgatgttatggaattaattacagattcagaaaaaaatggatgtaaagtatttattgcagctgcaggtatggcagcacatttagctggagctgtagcagcacattcaactaaacctgttataggaataccaatagaatctggtggcatgggcggcattgattcattattgtcaacagcaatgatgcctccgggtgttccagtcgcaactgttgccgttggaaaaagtggagctaaaaatagcgctatattagctgtacaaatactagccactagtgatgatgatctagcaagaaagctaaaagactataaagaaaatatgaggactgaagttttagaaaaagacaagaagcttaactcataa

SEQ ID NO: 276085 - DNA, 1099 bp, Unknown
  Bacterial polypeptide expressing nucleotide sequence isolated from the Sargasso Sea
atgactcaagcaagcgcaaaacctaaggtttgggtattaggtaatggccaacttggcgccatgctgactcacgcgggcgaacctctggcgattgatgttcgcgccgtagatatcatgacgccaaccgatgaaatcctgccgctagcgcctcaggatatcatcaccgcagaacgcgagcagtggcccgaatccgccttaagcttacaactcagcacccatccgcattttgttaacggcccagtatttagccgtttagccgaccgttacagccaaaaaagcttactcgatcagatccaagtcccaacagcgccttggacacttgtcgatgataaaaccgacgtcgaaaatctgtaccaagattttggccctcgcgtgctaatgaagcgccgcacaggtggttacgacggcaagggtcaacactggctaaaacaagccgaagcgggagagataccccaagattggcgtaacttggccattgccgaacaagcaatcaacttcgatgaagaagtctccttagtcggcgtacgtacccgtgaaggtcaatgcgtgttttatccattaacactcaacctgcaccaagacggcattttgatggcctcaatttcgccactgactcgcctgaatcacctgcaagcccaagcggaaggcatgctcagcgccattatgcatgagctggaatatgtcggcgtgatggcgatggagtgtttccgtgttggcgataatctgctggttaacgagttagccccgcgggtacacaactcaggccattggactcaagctggcacccatatggatcaattccaactgcatttaagagccctgtgcggtattgcgattccgcagccacaggtgaactttcaatgcgtgatggtcaacctgattggtatcgaaaacgatccccgctggttaagcctgcccaatgccgagctgtattggtacaacaaagaggttcgtccagggcgtaaagtcgggcacttaaacctttctgtgccgaatgctgccgtgttaaaagacagtattagcgcgctgcaaacttggatgccaagccaataccaagcgccactcgcgtggattttagctgagttcgctaaagcctaac

SEQ ID NO: 276086 - DNA, 493 bp, Unknown
  Bacterial polypeptide expressing nucleotide sequence isolated from the Sargasso Sea
atgcaagcccttgttgctgttattatgggttctaagagtgattggcccacaatggaagccgccgctgagatcatggataaactgcaagtgccttaccatgttgaagtcgtatctgcccatagaacgccagataaactgatggagtttgcagccggagccgctgaccgtggttttaaaattattatcggtggtgcgggcggtgccgctcacttacccggtatgattgcctcaaaaactcgcttacccgtattaggtgtaccagtacaaagcaaagcgctgtcgggcatggatagcttactgtctatcgtacagatgccaaaaggcattgccgtaggcacactggccatcggaaccgctggagcctttaacgccggattactcgcctgccaaatcttagccaataacgatgctgagcttgccgcacgtttagaagcctttagagaagaacaaacccgcgcagtgctggacaatcccgatccgagggaagcctaat

SEQ ID NO: 276087 - DNA, 505 bp, Unknown
  Bacterial polypeptide expressing nucleotide sequence isolated from the Sargasso Sea
atgaataaaccttttgttgccgtattgatgggctctgattctgattttccggtgatgcagaccaccctcgaggtgctcaagtcattcgatatcgccgtagaagtgaaagtgacctctgcacaccgcacaccggccgcgactcatcagtatgtgaccgacgccgaagcccgtggctgcaaggtctttatctgtgccgccggcctcgccgctcacctggcaggcgccgtggcgggtatcacgactcgtcccgtgatcggtgtgcccatcgatggcggcccgctcaaggggctggatgcgctgctttccaccgtgcagatgccgggcggggtgccggtggcgaccgtggcgatcggcaaggccggcgccaagaatgcaggctatctggcagctcagatgctggcagtggcggatgatgaactggcggccaaggtgcaggccgaacgccagaaaaatgccgatgaggtactggccaaggatgcggccttgcaggccctgctcaagtaag

SEQ ID NO: 276088 - DNA, 445 bp, Unknown
  Bacterial polypeptide expressing nucleotide sequence isolated from the Sargasso Sea
gaaaattatcatgaagatcaaattctaaaaaattcaaaaattcctgcagatataaataaagatattgtagatcagtctctaaactgggcaaaattaatagtagagaaattaaactatattggcactttgtgtgtagaatattttttagatcaaaatgaaaatctatatgtaaatgaaattgctccaagagttcataattctgggcatttaacaattaattctcataacataagccagtttgaaaatcacattagagcagtttgtagtctagaaaaaattgaaacaaaaaagatatataatgctgaaatgttaaatattttaggtaatgatattattaaatatagatcaaaaaagcatgaagataatgaatatttctttgattatttaaaaaaagatattaaagaaaaaaggaaaatgggtcacattacaaaagtgtttaaataac

SEQ ID NO: 276089 - DNA, 181 bp, Unknown
  Bacterial polypeptide expressing nucleotide sequence isolated from the Sargasso Sea
aatgacaaatgaaacaattcaagtagcaataataatgggttctgactctgatttacccattgttgaagcaattttccctatcttagacagttttggagtcaaatatacaaaaaatgtaatgtccgctcatagaacaccgcatgatgtaatgcaattgataaaagattctgaaaataatggc

SEQ ID NO: 276090 - DNA, 361 bp, Unknown
  Bacterial polypeptide expressing nucleotide sequence isolated from the Sargasso Sea
aaaaaaattgttgaagacttagattatattggaactttgtgcgtagaatattttatagataaaaatgataacttgtatgttaatgaaattgctccaagagttcataattcaggtcacttaacaatgaacacgcataacattagtcaatttgaaaatcatgttagagctgtttgtggacttgaaaaaattgaaacaaaaaaaatatctaatggaaaaatgataaacctaattggaagtgatatatctgcatatagaggtaaaacttttgcagataatgagtttttttatgattatttaaaaactgaaattcgcgataaaagaaaaatgggacatctaacaattatagaaaataaattataat

SEQ ID NO: 276091 - DNA, 331 bp, Unknown
  Bacterial polypeptide expressing nucleotide sequence isolated from the Sargasso Sea
atgaaaaaaaataaaaattttaaagttgcaatagttatgggtagtcaatctgactataaaacgatgcaattatctacaaaaattctaaaaaaaatgggcataaagtttgagactagaatactttcagcccatcgaactccaaaaagaatgtatgaatttgccagaaaagcagaaaaaaataattttaaagtaattattgctggtgcagggggttcggcacatctacctggcatgattgcagcaattacgcatttaccagttttaggagtgccaatagaaagtaaaaaacttaaaggtctagacagtttgctatcaatagcgcaaatgccta

SEQ ID NO: 276092 - DNA, 342 bp, Unknown
  Bacterial polypeptide expressing nucleotide sequence isolated from the Sargasso Sea
aatgtccaataaaagaaatcacaaagtaacaatagcaatgggtagtcagtcagactattcaactatgaaatattgcgcaaaaatcttaaagatattaaaaattaaacatgaaacaaaaatagtttcagctcatagaacacctgatagaatgtataaatttgcaaaaaatgctgaaaaaaataatatatctgtaattatagctggtgcaggaggatctgcacacttgccaggaatgatagctgcaataactactattccagtaattggtgtgcctatcttaagtaaaaaattgaatggcctagatagtttgttatcaatctctcaaatgccaaaaggtatacc

SEQ ID NO: 276093 - DNA, 293 bp, Unknown
  Bacterial polypeptide expressing nucleotide sequence isolated from the Sargasso Sea
aaatgaaaatctatatgtaaacgaaatagctcctcgagttcataactctggtcatcttacaattaatgcttttaatattagtcaatttgaaaatcatgtgagagcggtctgttcgttagaaaaaattccactcaaaaaaatatctaatgcaaaaatggtgaacctaataggaaatcaaatcaaaccctatagagaaaattttaaattaaatgaaaatgaatttttctttgattatcaaaaaaaagagataaaagataaaagaaaaatgggccacataacaactttaatataaa

SEQ ID NO: 276094 - DNA, 454 bp, Unknown
  Bacterial polypeptide expressing nucleotide sequence isolated from the Sargasso Sea
atgacaaatgaaacagtacaagtagctattataatgggttctgactcagatcttcctgttgtagaagcaagtttttcaatactagatggttttggtgttaaatacactaaaaatgtcatgtcagcgcatagaacacctcatgatgtaatggagctaataaaaaactctgaggaaaacggatgtaaggtttttatagcggccgctggtatggcagctcatcttgctggcgcggtagcagctcactcaacaaaaccagtgataggtattccaatagaatcaggcggcatgggtggaattgattccttgttgtccactgcaatgatgccaccgggtgttcctgttgcaacagtagccgttggaaaaagtggagcaaaaaatagtgcaatacttgcagttcaaattcttgcaactagtgaaaaaaatcttgcacaaaagttggttgaatataaacaaa

SEQ ID NO: 276095 - DNA, 496 bp, Unknown
  Bacterial polypeptide expressing nucleotide sequence isolated from the Sargasso Sea
aatgaaaaatagtaaaaatataagcaaagtatcaattattatgggtagtcaatcagactattcgacaatgaaattttgtgaaaaagttctaaaaaatttaaaaatcagttttgaaaaaaaaattatttctgcccatagaactcctaaaagaatgtttgaatatgctagaaatgctgagaaaaataatatctctgtcataatagctggagctggtgggtcagcacacttgcctggaatggttgcggcaattaccaggataccagtaattggtgttccaatagaaagtaaaaaattaaaagggcttgatagtttattatctatagcacaaatgcccaaaggcataccagttggaacagttgctattggcaaagatggtgcgattaatgcagggctatttgcagcatcaattatttctacctttgataaaaaaattaaaataaatttagaaaactggagatctaaacaaacaaaatttgtaaaaaaaaagccaaaataa

SEQ ID NO: 276096 - DNA, 493 bp, Unknown
  Bacterial polypeptide expressing nucleotide sequence isolated from the Sargasso Sea
atgagtcaagtagcaattataatgggtagtaagtcagattttcaaataatgagtgaagctattgaaattctcaaatcatttaatatagatacagaatatgatatagtttcagctcatagaacacctaataaaatggttgagtatgcttctaatgctgaaaaaaaaggtataaaagttattattgctggagcaggaggagcagctcacctccctggaatggtagcttcaattacaagcttacctgttatcggagttccaataaaatcaagaaactcaatcgatggttgggactcaattttatcaatacttcaaatgcctggaggagttccagtagcaaccgtagctttaaacggttcaaaaaatgcaggtattcttgctgctcaaattattggatcctttgatactgaagtttctgataaagttaaagcttacaaaaaagatttagaaaataaggttattgaaagcagtaaagatttaaagaagaatagctagt

SEQ ID NO: 276097 - DNA, 297 bp, Unknown
  Bacterial polypeptide expressing nucleotide sequence isolated from the Sargasso Sea
aatggcaaataaaaacaatcataaggtagctatagtaatgggtagtcaatcagattactcaacgatgaaatatacagttaatgtacttaagatactcaaaattaaacatgaaactaaaattgtctcagcacatagaactccaaatcgaatgtttgaatttgcaaaaaatgcagaaaaaaataatatttcagtaattattgcaggagctggcggatcagctcatttgccaggaatgattgctgccataacaagaataccagtaattggtgttccaatagaaagtaaaaaattaaaggg

SEQ ID NO: 276098 - DNA, 872 bp, Unknown
  Bacterial polypeptide expressing nucleotide sequence isolated from the Sargasso Sea
catgcctggagccctgcttggggttcttggaggcggtcagttgggggcaatgtttgcagtggctgctcgccgcatggggtaccgcgttgctgttattactgatactcgggaatgtcctgctgcgcgtcatgcagatcgactgcatgttggtagttatgatgatcccgcttttctggcacaagcagcggaagggctttctgttgtcacattcgaatttgaaaatgtgcctgcagcggccggtgaggccttaaaggctgctgttccggttcgtcctcatcccgaggtgcttttcacaactcagagccgtgagcgggaaaaagcatttcttgtcgaacgcggtattccgtgcggtcggcatgcgatggttcgcaccgaggaagagttgcgaaaggcggttgagaatattggtttaccagctgttctgaaaacagcagcctttggctatgacggaaaaggtcagaggatgctgaaggaaacgtcagacattcatgacgcatgggtgagccttggtgaattgccgtgcgtccttgaggagtggattgactttcaatgtgaactgtcagtggtcgctgcgagagggctagatggcgccgtcgttgcttttcctgccatacggaatgaacacgcaaaccatattctcgatgtgagttcctgccctgcagagttgccggtggaggtgttaggagaagcagagcacctcgcagcgactgtcctctcagaactcggcgttgttggtgtcgcgtgcgtggaattcttccttgcaaaagacagcaggcttctggtcaatgaaattgccccacggactcataattcaggccacctgacgattgaggcatgccctaccagtcagtttgagcagcaggtgcgagcga

SEQ ID NO: 276099 - DNA, 1138 bp, Unknown
  Bacterial polypeptide expressing nucleotide sequence isolated from the Sargasso Sea
aatgagagtagtcgtttacggcgcaggccaacttgctcaaatgatgtacctggcgggaagcccgttaggtattgacgttcaagctgtggacgtaaacaacgataccgttgtacatccagttagcaaaacccctcttgaaatctcacttgctcaagcactagaaggtgcagatgctcttaccgtagaatttgagcatgtacctgaaaggcttcttgaagacgcggcgaaaacaaacaagttgatgccaaatatcgacagcattcttgttggcgccgatcgcgtacgtgagaaaaagctgcttgaaagcatgcaggtggcaaattgtgagcaccaaatagttaccgaccttgcccagttagacgattgcgtaaagcagttgggtagcaaacttattcttaaggctagccgcgatggctatgacggatatggtcaatggcgtctaagtgatgagtctgatttacctgaactaaaaaatgcccttcagggattagatttgcagaccgtgcctttagtggttgaaaaaatggtggctttcgacagagagttgtcattaatcggtgtacgcaatgctaatggcgacgtacgcacctatccacttgcagaaaatttgcatcaccaaggtcaacttcatgtgtcggttgcgccagcgactaacgttgatgatgcacttcaggcccaggctcacgatatttttgtgaaacttgctgagggtatgaactacgtcggtgtgctggctgtggaactattccaagtaggcgacaagctgcttgtaaacgaacttgctcctcgtgtacataactctgggcactggagccagtcgggcgctgtaaccagccagtttgaaaatcacttacgtgcagtctgtggattgcctcttggtgacacgtcagccattggcccaagcgctatggtcaacattattggttgcagcagcttctcgcgcgatttgctaagcatcgatggcagtcatctgcactggtacggaaaatctgttcgtgaaaagcgcaagatgggacacatcaatgtcaccacgaatagttatggaagcttgggtgaaaagctcatggcattgagcaaatatttaccgcttgagtacttcccaaaattagttggtgaagcaacgcgattaaaaggttga

SEQ ID NO: 276100 - DNA, 496 bp, Unknown
  Bacterial polypeptide expressing nucleotide sequence isolated from the Sargasso Sea
gatggcaaaagtcgcgattgtaatgggttcaacttcagactggcctactatgcagcaggccgcaaaaatgctgaagtcgtttggtgttgaatttgaagcgaaggtggtgtcggcgcaccgtacacccaacttgctagtagagtttgcagaaagcgctgcagatgaaggttttagcgcaatcattgctggcgcaggcggcgcagctcacttaccgggaatgattgctgcacacacgcatttacctgtgtttggctgcccggttaaatcaaaggcgctcaacggattagactcactgctttctatcgttcaaatgccgaaaggtgttgcggtaggtacactggcaataggtgaggctggtgcagcaaatgcgggtcttctcgcggcacaagttgttgcgctgcaagacgaaagcgtacgcaatgccgttatcgcttttagaaaatcgcaaactgatacggtacttgcttcaagcaatacgttggagctagatgaatga

SEQ ID NO: 276101 - DNA, 493 bp, Unknown
  Bacterial polypeptide expressing nucleotide sequence isolated from the Sargasso Sea
aatgcaaaataaaaaaaatcacaaagtagcaattgtaatgggtagccaatcagattactcaactatgaaatatacagtcaaagtgcttaagatactcaaaataaaatttgaaactaagattgtatcagctcatagaactccaaacagaatgtatgaattcgcaaaaaaagctgaaaaaaatagtatttctgtaattattgctggtgctggtggctctgcacaccttcctggaatgatagcagcattaactagaatacctgtaataggagtgccaattgagagtaaaaaattaaaaggctttgacagtcttctttcaatagcacagatgccaaaaggaattccagttgggacagttgcaatcggtgtcgatggagcgataaatgctgctttactctcagcatccatattatcagttagtgatacaaaaattagaaaaagtcttgaaagttggcgtactaaacagactagatctgtgaaaaaaaaaccacattaa

SEQ ID NO: 276102 - DNA, 319 bp, Unknown
  Bacterial polypeptide expressing nucleotide sequence isolated from the Sargasso Sea
tctttgtgtagaattttttatcgataaaaatgacaatctttatgctaatgaaattgctccaagagttcataattcaggtcatttaactataaactctcacaacattagtcagtttgaaaaccatataagggctgtttgtggtttagaaaaaattgaaacaaaaaaactatatagtgccaagatgataaatattatcggagatgaaatttctatttatagaaaaaaatcttttaaaaataatgaatttttctatgattatttaaaaaaagagataaaaaacaaaagaaaaatgggacatttaactataattgataaatga

SEQ ID NO: 276103 - DNA, 508 bp, Unknown
  Bacterial polypeptide expressing nucleotide sequence isolated from the Sargasso Sea
tcacaagttagctgtagagatacttatggcaacatatctcattttcctttaacaagaaatgttcatgaaaatcatatccttaagcattcatatgctcctttaaaactaaataatgacctcgagagatattccaaagagattacaaaaaaaatactaatagaacttgatcatataggggttttaactgttgaatttttcaaggcaggagagaatattattgttaatgagatagctccgagagttcataattctggacactggactattgagggttgttcagaaagtcaatttaaaatccatatgcaggctgtatcaggcgttaagattaagcaacctagtttattatatgaatgccatatgaaaaatctaattggctctgaaataaatgactggatcaataaacaaactgataatggagtcaatgttcacctttatcataaaaaagaagttaaaaaaggcagaaaaatgggacatttaacttatataaaagatgttaaaaaattataaa

SEQ ID NO: 276104 - DNA, 304 bp, Unknown
  Bacterial polypeptide expressing nucleotide sequence isolated from the Sargasso Sea
tttattactaaaaaagatgagttactggtaaatgaactagctccacgtttccacaattcaggtcatctcactattgaagcttttaatatctcgcaattcgaaaatcatgtaagagctgtctgcagtctaaaatcaaagccgattgaaaaaatctctaatgcagaaatgtacaatattttaggttttgaaattcataattataaaaaaaaaacttttaaaaagaacgaattttttcatgattatttaaaaaaagaacctagagaaggaagaaaaatgggtcatctcacaattctaaaagactaat

SEQ ID NO: 276105 - DNA, 493 bp, Unknown
  Bacterial polypeptide expressing nucleotide sequence isolated from the Sargasso Sea
atgagtcaagttgcaattataatgggtagtaagtcagattttgaaataatgagtgaagcaattgaaattctcaaatcatttgacatagatacagaatatgatatagtttcagctcataggacacctaataaaatggttgagtatgcttctaatgctgaaaaaaaagggattaaagttattattgcaggagcaggaggagcagctcacctccctggaatggtagcttcaattacaagcttacctgttatcggagttccaataaaatcaagaaactcaatcgatggttgggactcaattttatctatacttcaaatgcccggaggagttccagttgctactgtagctttaaatggttcaaaaaatgcaggaattcttgctgctcaaattattggatcctttgatcctaaagttgctgataaggttaaagattataaaaaagatttagaaaataaggttattcaaagcagtaaagatttaaaaaaaaatagctagt

SEQ ID NO: 276106 - DNA, 502 bp, Unknown
  Bacterial polypeptide expressing nucleotide sequence isolated from the Sargasso Sea
ttggccgctaactcaaaagaaaaaaagttaatttcaattgttatggggagtcaatcagactggtctacaatgaagaatgcagcagtctttttagaggaactaaatattccatttgaaaagaaagttgtttcagcccatcgtactcctgaaagactatataattatgctaaaaaggcacaaaaaagaggaattaaagttataatagctggtgcaggaggtgctgcacatctacctggtatgatagcttctttaacatcacttcctgtattaggtgtgcccattgagagtaaaacacttaaaggaattgatagtttattatctattgctcaaatgcctgcaggtgttccagttggaacattagcaattggagatccaggcgcaaagaattctgcaattcttgctctttcaataatatctgtaagcaataaatcttatctttataagttagaaaaatggaaaaagaacttaacagataatgttccattaagcccaaatgaataga

SEQ ID NO: 276107 - DNA, 311 bp, Unknown
  Bacterial polypeptide expressing nucleotide sequence isolated from the Sargasso Sea
aatgacaaatgaaaaaatacaggtagcaataattatgggatctgactctgatttacccattgtagaagcaattttcccaattttagattcgtttggagtgaaatttacgaaaaacgtaatgtctgctcatagaacgccgcatgatgttatggaattaataaaagattcagaagataatggttgcaaagtatttattgcagctgcaggcatggcagctcatttagctggcgctgttgctgcgcattctactagaccagttattggcattcctattgaatctggtggtatgggaggtattgattcattattat

SEQ ID NO: 276108 - DNA, 387 bp, Unknown
  Bacterial polypeptide expressing nucleotide sequence isolated from the Sargasso Sea
agctaataataatatcaaaaaagattttaaataaacttaattttattggcttactcacaatagaattctttttagatgatgaaaataatatctttgtaaacgaaattgcaccgagagttcacaattcaggccatataacacttgataatgcgaatatgagtcaattcgagttgcatattaaagcaatcacaaaagataaaattaaaaccccaaaaattattaaaaaaggtcttatgagaaatcttattggcaatgagatcaaaagaaccaaacaaataagtaaattgaaaagttataaggtttataaaaagaagaaggcatacgactatggtaaaaaagcaattaaacaaggccgtaaaatgggccatattaattttgtaatgtaga

SEQ ID NO: 276109 - DNA, 835 bp, Unknown
  Bacterial polypeptide expressing nucleotide sequence isolated from the Sargasso Sea
aatgtcaaaacctactattggaataattggcggtggacaactaggaagtatgctttctacagctgccaaaaatttaaatttaaaaactataattatttctgacgatgaaaatgcacctgcgcagttttttgcagatgagtttattttttctaaatatgatgatgatatgaaaatcgaagaattttctaataaaatagattttgtaacctatgaatttgaaaatattccatataaaactttatctaaaatagacggtattaaaaaagttaatcctaaaccttctataaataaaattattcaaaatagactcagtgaaaaggattttttaaataaaaataatattaatacaacttcatatatttctgtcaaaaatgaaagtgagctaaagtctggtcaagattttataccgggtatacttaaaacttgcacgctaggttatgatggaaaaggtcaatataaaattaatagtgaaaaagaattagataatttaaaagtaaattttgaaaatcattatatattagaaaaattagttaagcttaaaaaggaaatttcagtaataattacaagatttggaaaacaaaaatatgaagtgtacgatccaatagaaaatattcatgaagatcaaatattaaaatattcaaaaataccagctgagattagcgaagacttgtttggtaaatctaaagaatgggcaaagtatattgctgaagaacttaattatataggaactatgtgtgttgaatattttattgataaaaatgaaaatttatttgtaaacgaaattgcaccgagagttcataactcaggacatcttacaataaatgcttataacgtt

SEQ ID NO: 276110 - DNA, 334 bp, Unknown
  Bacterial polypeptide expressing nucleotide sequence isolated from the Sargasso Sea
atgaataaaaaaaatctgaaagtttcagtagtgatgggtagtcaatctgactttaaaacaatgaaattagcaaaacaaattttaaaaaaacttaaagttcctatggaaataaagattatttctgcacacagaactccaatgagaatgtataagtacgcatctgatgcagaaaaaaataatattggggtaattattgcaggtgcaggaggctcggctcatttgcctggaatgattgcagcactaactcaaatacctgtattaggtgttccaattgagagtaaaaaactcaaaggcttagacagcttgttatctatcgctcaaatgccaaaaggaa

SEQ ID NO: 276111 - DNA, 574 bp, Unknown
  Bacterial polypeptide expressing nucleotide sequence isolated from the Sargasso Sea
attggttacaaaaaaacctcttgttggaataatcatgggttctagttcagatagccggatcatgcatggcgctgcagagatattggattctttctccatacctcacgaagatcaaatcatttctgcacatcgaactcctgaaagattaaatgaatatgccaaacatgctgaaaaaagtaaattcaaggtaataattgcaggtgccggaggggctgcacatcttccaggaatgattgcatcacatactacgattcctgtaattggagttcccataatggtgtataatgataaacaaatgaaaaaaactgataaaaacaaatattctgcatttggaggattggattctcttttatcaatttcagaaatgcctacaggatcccctgttgtagctgtaggggtgaataaggcttcaaatgcaggaatttatgcattaaaaattcttggaaattcctatccagaaattaaaacgaaattaaagaagcataaatttgaccagtatgcttcggttctaaaagaatctgaagaactaaaaaaattaggtttaacaaaatttgttaaaaagaaatttcgttaa

SEQ ID NO: 276112 - DNA, 1075 bp, Unknown
  Bacterial polypeptide expressing nucleotide sequence isolated from the Sargasso Sea
atgagtagtccatatttgaaactaggatcaactgtaggcattctagggggagggcaattaggaagaatgatatcgatggcttgtagtgaattgggctatcgaagtttaatttactgtccagaaggggataatccagcggttgaagtttcttctgaaaaaattattggaaattggaatgatgatgagctaataaaaaaattcatatcttccgttgatgcagtaactttagaatttgaaaatatacccattaggactataaagaaagttgaaaaacattttacagtttttccaaattctaaagttttagaaattgctcaatataggccatttgaaaaaaaatatgctaaagatgctggaattaaagtaccacgttggtggttgattaactcgaaacaagaactagttaatgctatttttcagcttgatggacctggcatcttaaaaactacttctcttggatatgatggaaaaggtcaattcaaaattttaggaaatgaaaaaattgaagatatttggagtaaaattgaaagtaatgaagttattttagaggaattcattgattttaagacagaagtatcttttttaatatgtaggaaaaataataatgaaatctgtattttccctccaactgaaaacattcatcagaatggtatccttcaaaaaagcaaagcacctgctgagctaccagaggaaatatggttatctggagctgcccatatatcaagattagctgataaactatctttaaatggtctaatggctgttgaattttttttattagataatggcgagcttgtatttaatgaaattgcgccaagaccacataattcttttcattggactatggatggtttgttatccagccaatttaatcaacttataagatgtgtagtaggaatgccatttggcaatgttagtataatcaataaatgggagatgattaatatactttcagaaaattatcaagatattccaaattatatattagataataatagtaaaatttatatctacaataaacaaagtataaagacaaaaagaaaattaggtcatataaatcgtctattaagctaga

SEQ ID NO: 276113 - DNA, 1045 bp, Unknown
  Bacterial polypeptide expressing nucleotide sequence isolated from the Sargasso Sea
gatgacaataagcaccctagggatcattggttcaggtcaacttggctcattgttatgccaggctgcaaaaaaacttaatataaagactatagtaatatcagacgatgaaaatggccctgcccaaaattattcgggtgaatttatctattcacaatacgacaacaaagaaaagataaaagagtttgtaagcaaagtcgatattatcacttatgagtttgaaaatattccaataaatattttaaatgagatcgataaagaaaaaaaagtcttacctaaacctgaaataaatagaataattcaaaacagaaaattagaaaaaactttcgtcaatgatttaggtattaaaactacagactgggcctttatcaaacaggctggagatgtcgaaaagaataaaaacttattacccggaattttaaaatcaaatacacttggttatgatggacatggacaatatgttttaaattctcttgatgatgtaaaaaaaaattggtgttttactgctgattatattttagaaaaaaaggtaaatttaaaaaaagagatatcagtagtaataacaagatatttaaatggtgaaacttatatttatgagcctatagaaaatattcataaagaccaaatcttaaatcattcaaaaatccctgcagatataaataaagaaatttttattaaagcacagagtaatgcaaaacttatttcagaaaaattagattatgttggcacgatgtgtgttgaatatttcatcgatcaagatgataatttgttagtcaatgaaattgctccaagagtccataattcaggtcacctaacaataaatgcgttttccataagccaatttgctggacatgttgcagctgtgtgtaatctcggcgtaaaaaaagttgaaaaaatttctaacgccgaaatgtttaatgtcttgggaaaagatatcgagacctataggtccaaaatatttagtcaaaatgaatttttttatgattacgggaaaaaatcaattaaagataaaagaaaaatgggacaccttacggttttaaaaaaataa

SEQ ID NO: 276114 - DNA, 1048 bp, Unknown
  Bacterial polypeptide expressing nucleotide sequence isolated from the Sargasso Sea
atgaccaaagttaatcttggaatattaggcggaggtcaattaggtagtttattagcaatagctgccaaaaagctagatattaaaactataattttttgtgacgataaagatgctccagcaaaaaattattgtgatgattttatctttggagattataaagatttaaaatgtattgaagaatttgtaaataaagttgatttagttacttttgagtttgaaaatattccttttgaaacactagatcaaataaataaacaaaaaaaagtttatcctaaacctgagattaataaagtaattcaaaatagattattagagaaaaattttattaataatttaaatataaaaacaactagctacaaatctataaaaagtaagattgaaatagaaagtaataaaaatctaattcctggtcttttgaagacgtgtaccttggggtacgatggaaaaggccaattcaaaattgactcaataaatgatttaaaaaatttaaaattagaaaccaataatgaatttattttagagaaatttattgatttaaaaaaagaaatttcaattattttaacaagatttaaaaaaaacagttatgaaatttatgagcctattgaaaatgtacacaaagaccagatattaaaaacttcaaagatacccgctgaaataaatgataaacttaaaacgttatctaaggaatgggcagtttctatttcggagtccttggactacataggaactttatgtgttgaattttttattgataaaaaagataatctttatgtaaatgagattgctccaagagtccataattcaggacatcttactattaactctcataatgttagccaatttgaaaaccatttaagagcggtttgtcaatttgaaaaaataaatactaaaaaaatgtttaatgcagaaatgataaatttaattggtgatgatattttagaatacagagataaaaaacttgaagagaatgaatttttctttgattataaaaaaaaatcaataaagccaaaaagaaaaatgggtcatcttacaagaataattaaatagc

SEQ ID NO: 276115 - DNA, 493 bp, Unknown
  Bacterial polypeptide expressing nucleotide sequence isolated from the Sargasso Sea
atgattaagaataaaaaccataaagtcgcaattgtgatgggtagtcaatcagattattcaactatgaaatatgctgtgaacgtactcaaaatacttaaaattaaacatgagattaagatagtctcagcccacagaactccaaaaagaatgtttgattttgcaaaaagtgctgagaaaaataatttttctgtaattattgctggtgccggaggatcggctcacttgccgggcatgattgcttctttaacaaatttaccagtattaggagtgccaatagaaagtaaaaaactgaaaggtcttgatagtttattatcaattgttcagatgccaaaaggagttcctgtaggtacggttgctataggagttgatggggcaattaatgctgctcttttatctgcatctataatttccctttctgataaaaaactaaaaaaacgtcttaataattggaagacaaaacaaacaaaatctgtaaaaaaaaagcctaaataga

SEQ ID NO: 276116 - DNA, 310 bp, Unknown
  Bacterial polypeptide expressing nucleotide sequence isolated from the Sargasso Sea
gaactatttcatacaaaagccggattaattgttaacgaaattgcacccagagttcacaattcaggtcattggacgcaaaacggttgctcaattgatcaatttgagcagcatattagagccattacaggctggccacttggagatggcaaaagacatactaacgtcgttatggagaaccttattggtgatgaaattaaacgtgcggccacgttagcactggatggaaatatttccctccacctatacggtaaaaatgacataaaaccgggccgcaaaatgggtcattttaatttagttaaagaaaaataaa

SEQ ID NO: 276117 - DNA, 649 bp, Unknown
  Bacterial polypeptide expressing nucleotide sequence isolated from the Sargasso Sea
tgcaattattaaaactaggatatttggctatgatggaaaagggcaaattagcgtaaatcaaaaaactaattttgataaaaatatttcatcattatgtaatcaatcaattattgaaaaaaaaataccttttgaattcgaattttcacaggttagttgtagagatgtatttggtaatgtttttcattttcctttaactagaaatattcacgaaaatcatatccttaaacactcatatgctcctttagatcttccaaatgatcttgaagaacatgcaagagaaattaccaaaaaaatcatttctgatttagatcatgtaggtgtactaaccgttgagttttttaaaacaaaagaaaatattcttgttaatgaaatagctccaagagttcacaattccggtcattggactattgaaggatgttcatcaagtcaatttaaagtccatatgcaggcagtatctgggataaaaataactcaacctaaattattaaatgaatgtcatatggttaacttgattggtaacgaaataaatgactggataaataaaaaatctgatagtggtgtgaatattcacctttatcataaaaacgaaattaaaaatggcagaaaaatgggacatttaacttatataaaagataagaatatcttataa

SEQ ID NO: 276118 - DNA, 496 bp, Unknown
  Bacterial polypeptide expressing nucleotide sequence isolated from the Sargasso Sea
catgaaatacaaaaaaaaatcacataaagtatcaattgtaatgggcagtcagtctgattacaaaacaatgaagaattgtgaaaaagttcttaagattttaaaagttaattatgagacaaatatcgtctctgcacacagaacgcctgatagactttatacctatgcaaagaaagcagaaaataataatatttctattattattgctggggctggaggatcagcacatttacctggtatgattgctgcaataactagaattccagtcataggtgttcctattgaaagtaaaaagttaaaaggtttagatagcctactatcaattgctcaaatgccaaaaggaattcctgttggtacagttgctattggagaagatggtgcaatcaatgctggtttatatgctgcttcaattatagctacgtatgataacaatgtaaaaaaaacacttttaaattggcgaaaaaaacaaacatcaaaagtaaaaaaaaaaccaaagtaa

SEQ ID NO: 276119 - DNA, 493 bp, Unknown
  Bacterial polypeptide expressing nucleotide sequence isolated from the Sargasso Sea
atggtttcagcatcaacaaaacataaagtagcaattgtgatgggtagtaagtctgattatgctaccatgaaaaattgtgaaaaaattttaaaattactgaaagttaagtttgaaactaaaattgtttctgcacaccgcacaccagagagaatgtttaaatttgtcaaagcagctgaagataataatttttctgtcattattgctggtgctggaggctctgcacatttaccaggaatgattgcgtcattaacaactatacctgtaatcggcgtacctgtagaaagtcgtaaattaaaaggtttggatagtttattatcaatagtacagatgcccaaaggtattcctgttggcagtgtagcaattggtgaggacggcgcaatgaatgccggtttatatgcagcttccattattgctcttacgaataaagaaattaagaaaaatctaaaaaattatcgaagtaaacaatcaaaagctgttaaacaaaaaccataag

SEQ ID NO: 276120 - DNA, 301 bp, Unknown
  Bacterial polypeptide expressing nucleotide sequence isolated from the Sargasso Sea
attgaattctaaagatatttataaaatcgctgtcgttatgggtagtgattcagatctacaaacattgaaaccagcaattgatattttaaaagaatttggaataaaaacagaagtttgtatactttcagcccatcgcacacctattgaaatgatggaatatgcaaaaaatgcagaatcagaaaacataaaagtaataattgccggtgctggtggttctgctcatcttccaggaatgctggcatccataacttgcattcccgtaattggagtaccagtagagagtaaggcacttaaggggatt

SEQ ID NO: 276121 - DNA, 493 bp, Unknown
  Bacterial polypeptide expressing nucleotide sequence isolated from the Sargasso Sea
atgaaaaagaaaaaaaatcttaaagttgcaattattatgggtagtcaatctgactacaaaactatgaaattagctgaaaaaatgctcaaaaatcttggagtaagctttaagacacaaataatttctgctcatagaactccaaaaagaatgtatgattttgcaagatcagctaagaaaaataattttggtgtaataatcgcaggagctgggggatcggcccatttgccagggatgatatctgctttgacttcaattcctgttttaggagttccaattgaaagtaaaaaacttaaagggttagatagcttattatcaattgctcaaatgcccaaaggaattcctgttggaactttagcaattggtgaagatggtgcaataaatgcagctttgcttgcatcatctataatagcaaataataattctaagattaaaagaaatttagaaaattggcgattatcacaaacaagatcagtaaagaaaaaacctaaataaa

SEQ ID NO: 276122 - DNA, 496 bp, Unknown
  Bacterial polypeptide expressing nucleotide sequence isolated from the Sargasso Sea
atgaaaagatcacaaatacttgttggtataatcatgggatcacaatctgactggccagtcatgaagcatgcctcagatactctaaaagatctatctataaaacatgaaaagaaagtagtctcagcacataggacgcctgatctattatttcattatgctgaaaatgcatctgagcgaggtattgaagttataatagccggagcaggaggtgcagctcacttaccaggtatgactgctgcaaagactcatgttcctgtgattggtgtgccggttaaaactaaaagtcttgagggaaaggactccttattgtcaatagtacagatgccagccggcatccctgtggctactgttgcaattggtaaggcaggatcaataaatgctgcattacttgcagcgtcaatattaagtatcaaatatccgaatattaataaaaaaatattagcttacagaaaaaaacaaactcaacgagtccttaaatctgctaaattaatctgat

SEQ ID NO: 276123 - DNA, 433 bp, Unknown
  Bacterial polypeptide expressing nucleotide sequence isolated from the Sargasso Sea
aatgggtagtgattcagatctaaatacattgaaaccagccattgatattttaagagaatttagaataaaaactgaagtttgtatactttctgctcatcgaacacctattgaaatgatggaatatgcaaaaaatgcagaatcagaaaacataaaagtaataattgccggtgctgggggggctgcgcatcttccaggaatgctggcatccataacttgcattcctgtaattggagtaccagtagagagcaagacgctgaagggaattgactctcttttatcaatcgttcaaatgcctgctggaataccagttgcaacagttgcaattaatggaggacaaaatgctggattattagcaatagagataatcagtttatttgatgaatccataaagaaaaatttaaaagaattcagagaaaatctacatacacaggta

SEQ ID NO: 276124 - DNA, 502 bp, Unknown
  Bacterial polypeptide expressing nucleotide sequence isolated from the Sargasso Sea
aatgacaaatgaaacagtacaagtagctattataatgggttctgactcagatcttcctgttgtagaggcaagtttttcagtattagatgattttggtgtcaaatacactaagaatgttatgtcagcgcatagaacgcctcatgatgtaatggagctaataaaaacttctgaggaaaacggatgtaaagtttttatagcagctgctggtatggcagctcatcttgccggagcggtagcggctcactcaactaaaccagtaataggtattccaatagaatcaggcggcatgggtggaattgattccttgttgtctactgcaatgatgccaccgggagttcctgttgcaacagtagccattggaaaaagtggggcaaaaaacagtgcaatacttgcagttcagattcttgcaactagtgatgaagatcttgcacaaaagttggttgagtataaacaaaatatgagatctgaagttttagaaaaagataaaaaacttaattcataa

SEQ ID NO: 276125 - DNA, 493 bp, Unknown
  Bacterial polypeptide expressing nucleotide sequence isolated from the Sargasso Sea
catgaaaaagaataaaaattataaagtctctattgttatgggtagtcaatctgattataaaaccatgaaattagcctcaaaaacactcaaaaatataggtattaaatttgagactaaaataatatcagcacatagaacaccaaagagaatgtatgaatatgcaagattggcagaaaaaaataacattgaagttataatagcgggtgccggtggatcagcgcatttaccaggcatgttagcatctcttacatctattccagtactaggtgttcctattgaaagtaagaagcttaaaggactagatagtttgctttctatagttcagatgcctaaaggaattcctgttggtactctggcaataggtgagaatggagcaataaatgctggtctactagctgcttcaataattgcaattagtaattcaactgtgaaaaaaaaattaaaaaattggcgattatctcaaacaaaatctgttaaaaaaaatcctaaataa

SEQ ID NO: 276126 - DNA, 424 bp, Unknown
  Bacterial polypeptide expressing nucleotide sequence isolated from the Sargasso Sea
atgaaaaaaaattcaagaataaatgtttcaataattatgggaagtcaatctgattactcaactatgaagtatgctgaaaaaactctgaagtctctaggcataaaatttgaaaaaaaaatagtttcagcacatagaactccaaaaagaatgtatgaatatgcatcaaacgtagaaaaaaaaaatattaatgttattattgcaggtgctggaggttcagcacatctgccaggaatggtagcatctttaactaaaatacctgtgataggtgttcctattgaaagtaaaaaattaaaaggtttagatagtttgctctctattgttcaaatgccaaaaggaattccagttgccactgttgctataggtaaagatggagcaataaacgccgcattacttgctgcctctattttatctaactcaaaatgaa

SEQ ID NO: 276127 - DNA, 385 bp, Unknown
  Bacterial polypeptide expressing nucleotide sequence isolated from the Sargasso Sea
catgaaaaaaaataaatctcttaaagtatcaatagtgatgggtagtcaatcggattacagaacaatgcagctagcagaaaaaacactaaaaaaaattggtgttccatttgaaaccaaaatcatatccgctcatagaacccctaaaagaatgtaccaatatgccttggatgctcaaaaaaaaaatattggagttattatagctggcgcagggggctccgctcatttgcctggaatgatttcagcgcttaccactataccagtacttggtgtacctattgaaagcaaaaaactaaaaggtttggatagtctattgtctatagcacagatgccaaaaggaataccagttggtactctcgcaattggcgacgatggagcaatcaacgcc

SEQ ID NO: 276128 - DNA, 508 bp, Unknown
  Bacterial polypeptide expressing nucleotide sequence isolated from the Sargasso Sea
tttggagaaaattgtgagtgtaactgtttcaataattataggttccgaatcagacttagagttggctaacaaatgtgccgacactttaaactctttgtctataactaactcaatacaggttctgtcagcgcacaggactccgggcttacttgagacccacgtaagggagtgtgagagtggaggcacaaaagtattcattgccatggcaggtttggctgcacacttagcaggcgctgttgcttcaaaaacagtgttgcctgtaataggagttcctggagatggtggtccgttaagcggaatggatgctctactgtcaacggtgcaaatgcccaaaggtattccagtggcaactgttgccataggctcagcaggtgcaactaactcagcttatcttgctgcgcagatcttaggaatagaatcggaagaagtaagaaacgctttagttaaggttagagaagagggcgtagaaacgatcaagaaatccaaccaaaagctagccagttcttaa

SEQ ID NO: 276129 - DNA, 411 bp, Unknown
  Bacterial polypeptide expressing nucleotide sequence isolated from the Sargasso Sea
tatgaataaaaataaagcacttaaagtgtcaattataatgggtagtcaatctgactataaaatcatgaaattatgtgaaaaaactcttaaaaatttaggagttttatttgaaacaaagataatttctgctcacagaactccaaaaagaatgtacgaatatgcatccaatgctgaaaaaaataatataggggttataattgcaggtgctggtggatcggcacatttacccggcatgattgctgcaataacttcagtgccagtattaggtgtacctgttgaaagtaaaaaattaaaaggattagatagcttactatcaatagctcaaatgccaaaaggaattcctgtagggactcttgcaataggtgaagatggttcaattaacgctgctttattagcagcatcgattattgg

SEQ ID NO: 276130 - DNA, 493 bp, Unknown
  Bacterial polypeptide expressing nucleotide sequence isolated from the Sargasso Sea
atgaaaaagaataaaaatcttaaagttgtcattgtaatgggaagccagtcagacttcaaaactatgaaattatccgcaaatatactaaaaaaaatgggtgttagatttgaaactaaaattatatctgcccaccgaactccaaaaagaatgtttgaatttgcaaagaacgcttcaaaaaataatattggagtaatcattgctggtgctggtggatcagcgcatttacctggtatgatttcagctataacctcaattccagttttaggtgttcccgtagaaagtaaaaagcttaaaggactagatagtctattatcaatagcacaaatgccaaaaggaatacccgttggaactcttgcaatcggtgaggatggtgccataaatgctgccttactagctacagctataatcgcaaatactaatcctactgttaaaaaaaaattaattaattggcgatcatcacaaacaagatctgttaaaaaaagacctaaataaa

SEQ ID NO: 276131 - DNA, 460 bp, Unknown
  Bacterial polypeptide expressing nucleotide sequence isolated from the Sargasso Sea
atggggagcgtatcagattgggagacgatgaaagaagcctgtgacgtactggaacaactgcaggtggcattcgaaaaaaaagtcgtttctgcccatcgtactccgcagtggctgacaaaatatgctgagaatgcgcagggcagaggcttaaaggtgatcatcgccggtgctgggggcgcagcgcatcttcctggtatggttgcctctcagacactccttcccgtgattggtgttcccgttcgtacttcaagccttaacgggatggattccctttattcgattgtccaaatgccacgcggagttccggtggcaacggttgctattggaggagcaggagcacacaatgccgggctgctggcggctcagatattatccatccacgatcttgaactgcgaggctctcttcaacagaggcgtgacaggattcgtgatgaagttcttgaaaataaactcccgtgat

SEQ ID NO: 276132 - DNA, 459 bp, Unknown
  Bacterial polypeptide expressing nucleotide sequence isolated from the Sargasso Sea
catgaaaaaaaataaaaatctcaaagtttcaatcgttatgggaagtcaatctgacagtaaaacaatgaaatttgcatcaaatatactcaaaaaattaggtattaggcatgaaatgaaaataatatcagcccacagaactcctaaaagaatgtacgaatttgctagttctgctgaaaaaaacaatgttggagtgataatagcgggtgcaggtggttcagcacatttgccaggtatgattgcagcattaacatcaataccagttttaggagtcccaattgagagtaaaaaacttaaaggattagatagcttgctttctatagttcaaatgcctaaaggtattcctgtaggaactttagctataggttcagacggagcgataaatgctggattgattgctggctccataattgcaaatagtgatccaaaaattaaaaaaaatttaaataattggcgattatc

SEQ ID NO: 276133 - DNA, 424 bp, Unknown
  Bacterial polypeptide expressing nucleotide sequence isolated from the Sargasso Sea
atggatgaaacaatagatgggcctttggtttccatagtaatgggaagtaagtcggatttacccttaatgcagccgtcaatggatatcttgtccatattaaaagtgccctacgagatggacatagtatctgcccatcgaactccaaaaaaaatgtactcctacgctcaggaggttgaatccagaggtgtcagagtggtaattgctggggcgggaggagctgcacatttaccgggaatgatagctgctatgaccatcgtgccagtagtaggagtgcctattccagccactaaacttgaaggcctagattctttgttatctattgtccagatgccagctggggtgccggttgctactgttgctattggtaacgctgagaacgcagggctgttagcagcccaaaattttagcaacatctcaccctagc

SEQ ID NO: 276134 - DNA, 499 bp, Unknown
  Bacterial polypeptide expressing nucleotide sequence isolated from the Sargasso Sea
atgactaaaagtaactataaggtaggtgtgataatgggatctgattccgattatccggtaatgaaagaagctgtaaaaattctaaaagaatttgaaattgattatgaatcaactattgtttctgctcatagaactcctgaaagactagttgaatatgctagtactgcatatgaaagagggatccgggtagttattgcaggagctggtggagctgcacatcttccgggaatggtagcttcattaacaacaattcctgttatcggagttcctgtaaagtcatccaattctattgatggttgggactctgttttatccattttacaaatgccaggtggtgtacccgtagccacagtagctcttaacggtgcaaaaaatgcgggtctattggcaattcaaatgctagcaacaggggatgaaaggctaataggaaaattgaaatcttacaaagaggaattaaaaaatcaagtattaaaaaaagtagataaaggattggaataat

SEQ ID NO: 276135 - DNA, 493 bp, Unknown
  Bacterial polypeptide expressing nucleotide sequence isolated from the Sargasso Sea
catgaaaccgttagtcgggatcattatgggctcccagtccgattgggacacgatgaggcacgcagtggatacactggaagccctggatgtcccctgcgagactcaagtgatttccgcgcatagaacaccagatcttttgtttgagtatgcctctaatgctcgtgaacgagaactgcgggtgattattgctggagcaggtggagccgctcatttacctgggatggctgctgcaaaaactactttacccgttcttggtgtacctgttcagtcaaagacgctaaccggtgtggattccctgctatctatcgctcagatgccagctggaattccagtgggaactttagcaataggtaaggctggtgcaataaatgcgggtcttttagctgcagcaattctggcgggcaatcatccaaatataagggaggcgttagataaatttcgtaagtctcaaacagaacgtgttctccaaaaccccgatccgcgcgatccttag

SEQ ID NO: 276136 - DNA, 406 bp, Unknown
  Bacterial polypeptide expressing nucleotide sequence isolated from the Sargasso Sea
catgacgactaaaccttctgttggcattattatgggaagccagtcagattggccaactttaaaatattccgccaatatccttgacgagttcgatgttaaatatgaaacaaaaatagtatccgctcatcgtacgccagatagactatgggaatacggtaaatctgcagtaaaccgtggcctaaaagcaattattgctggagctggtggagccgctcatttgccaggcatgatggcatcgaaaacacggatcccaatcataggcgttccgattcaaacacaagccttatctggagtagacagcttatattcaattgtccaaatgccacgcggctttcctgtggcaacaatggcaataggatcaactggggcatctaacgcagcactcatggcattagaaatattagcc

SEQ ID NO: 276137 - DNA, 490 bp, Unknown
  Bacterial polypeptide expressing nucleotide sequence isolated from the Sargasso Sea
atggaaaaaaatttaattagcataatcatgggaagccaatcggattggaaaacaatgcgatttgcttgtgatgttttagaagaatttaaaattaaatatgaaaaaaaaattatttcagcacatagaacacctgaccgactttttaattatgcaaggaatgctcataaaagaaaaataaaagttataattgctggagctggaggagctgcacatttgcctggaatggttgcatccaagactttagtaccagttattggtgttcctatattatcagaagcactttcaggtgtagatagtttatattctatagtacaaatgccaagaggttgtcctgtagcaacaatggcaataggcataccaggtgcagttaattcttcaattttagcaatttcagttttagcacttaatgataaaaaattagaaaaaaaattaaaaaattggcataaatgtaagactttaactgttccattggtcccaaaagatgaataaa

SEQ ID NO: 276138 - DNA, 490 bp, Unknown
  Bacterial polypeptide expressing nucleotide sequence isolated from the Sargasso Sea
catgaataaaaaaaatctaaaagtttcaattgttatgggtagtcaatctgactttaagacaatgaaattagcaaaacaaatattagaaaagctaaaagttcctttagaaataaagattatttctgctcatagaacaccaatgagaatgtacaaatacgcatctgatgcagaaaaaaataatatcggtgttatcattgcaggtgctggaggatcagcacatttacctgggatgatagctgcacttactcaagtaccagtattgggtgttccaattgaaagtaaaaaacttaaaggtttagacagcttattatctattgctcaaatgccaaaaggtatcccggtggggactttagcaataggagatgatggagcaataaatgcagcaatacttgctgcatcaattatttccaacaataatcctctggtaagatctaaacttaaaagttggagaacatctcaaacaaaatcagttagaaaaaaaccaaaataa

SEQ ID NO: 276139 - DNA, 331 bp, Unknown
  Bacterial polypeptide expressing nucleotide sequence isolated from the Sargasso Sea
tatggggagcgtatcagattgggagacgatgaaagaagcctgtgacgtacttgaacaactgcaggtggcattcgaaaaaaaagtcgtttctgcccatcgtactccgcagtggctgacaaaatatgctcaggacgcagagggcagaggcttacaggtgatcatcgccggtgctgggggcgcagcgcatcttcctggtatggttgcctctcagacactccttcccgtgattggtattcccgttcgtacttcaagccttaacgggatggattccctttattcgattgtccaaatgccacgcggagtcccggtggcaacggttgctattggagga

SEQ ID NO: 276140 - DNA, 502 bp, Unknown
  Bacterial polypeptide expressing nucleotide sequence isolated from the Sargasso Sea
tatgagtaaatctaataaccttgtcgggattatcatggggtcaaagtctgactggccaataatgaaacacgcgtcattaacactaaaaaagcttaagatctctcatgagtcaaaaattgtatctgcacacagaacaccaaagttgctttatgaatatgctgaccaagctgcgtcaaaaggacttgaagttataatcgctggagccgggggtgctgcacatctgcctggtatgacagcagcaatctctcatttgcctgtaataggtgttccaattcaaacaaaaacacttgatggtttagattcgcttttatcaattaatcaaatgccaaaaggaataccggttgctacagttgctattggcgagagtggagcaataaattcagcgttattagcagcaagcatactatcaaataaatatgaagagattcaaaaaatcttaatcaaattcagacaaaaacagacaagggaagttcttaaaaataattctcctcagaaaaaataa

SEQ ID NO: 276141 - DNA, 385 bp, Unknown
  Bacterial polypeptide expressing nucleotide sequence isolated from the Sargasso Sea
aatgatggattttgctcaaatggcagaatcaaatggttttggagtcataattgcgggggctggaggggctgctcatttgcctggaatgatcgcatcccttacgacacttccagtaataggagtaccagtcaaaagcaaagcactttcaggaatagattctatgtattcaatattacaaatgccctcaggcatcccagtagcaacggttgccattgaaggaggactaaatgctggccttttagcttctcaaattttggcagttaacaatactgaattaacaaataaattaaaaaaatacagatctgagcttcacgatcttgtcgtaaaaaaagatcaaaaacttaaagagattggagctaaaacttatctagaaaaaatgtcatga

SEQ ID NO: 276142 - DNA, 493 bp, Unknown
  Bacterial polypeptide expressing nucleotide sequence isolated from the Sargasso Sea
catgaaaaaaaataaaaatttaaaagtttcaattgttatgggcagtcagtccgattacaaaactatgcagctaacagaaaaaacactaaaaaaaattggtgtttcttttgaaacaaaaattatttcagcacatagaactccaaagagaatgtatgattatgctttaaaagctgaaaataataacattgcagtaattatagcgggtgcaggtggatcagcacatttgcctggcatgatctcggctattacttcaataccagttcttggtgttcctatcgaaagcaaaaaattaaaaggcttagatagtcttttatcaatagctcaaatgccaaaaggaatacctgttggaacacttgctattggtgaagatggggcaataaatgccgctttattagcagctgcaataatagctaaccaaaactcatctattaagttcaaattgaaaaactggagatccagccaaaccaaatctgttaaaaaaaatcctaaataa

SEQ ID NO: 276143 - DNA, 469 bp, Unknown
  Bacterial polypeptide expressing nucleotide sequence isolated from the Sargasso Sea
aatgtctaaaaaaatctttaataaagtctctatagtaatgggtagtcaatcagacaataaaactatgaagatttgccaaaaaattcttaaagctcttaatgtaaaatttgaaactagaatagtttcagctcatagaacgccaatgcgtttgtacgactatgcaagaaaagcagaaaaaaacaagattggagttataattgctggagctggaggatctgctcatttaccaggaatgattgccgctttaacaccactgcctgtgttaggtgtaccgatcgaaagtaaaaaacttaaaggtattgatagtctactctcaattgcgcaaatgccaaaaggtatacctgttggaacattagcaattggaaaagatggagcaataaatgctgcgctattagctgcttccataatttcactaaatgacactaaagttaaaaaaaaattaaataattggcgttatcgacaaacaaaa

SEQ ID NO: 276144 - DNA, 490 bp, Unknown
  Bacterial polypeptide expressing nucleotide sequence isolated from the Sargasso Sea
tttcgtagccatattaatgggttctgagtctgatctttcaattatgcaagctggtgcagatatcttgaaacaattggaaatcgattacgagataaaaattacttctgctcaccgcactccggcagtgacacagcaatacataagtgacgctgaggcaagaggttgtcaggtattcatagcaggggcaggcttagccgctcacttggctggtgctactgcagcgcacactaccaaaccagtaatcggtgtgccaattgatgcaggccctttgcaaggtttggactctttgttgtcgacagtgcagatgcccggaggaattcctgttgcgactgttgcaataggtaaggctggcgcaaaaaatgccgcttatttagctgctcagattctatcgcttgctgatgaggcgctatcagagcgagtgaaacaggagcgtgcggcaaattctgagaaagttcaggcgcaagacgctgctttgcaatcttcgctctaa

SEQ ID NO: 276145 - DNA, 493 bp, Unknown
  Bacterial polypeptide expressing nucleotide sequence isolated from the Sargasso Sea
catgaaaaagaataaaaatcttaaagttgctattgttatgggaagtcagtctgacttcaaaactatgaaattatctgcaaaaatactaaaaactatgggtgttaaattcgaaactaaaattatttcagctcacagaactcccaaaagaatgtatgagtttgcagaaaatgcatcaaaaaatgatattggggttataattgctggtgcaggtgggtcggcacacttacctggtatgatctctgctataacttcgattccagttttaggagttcctatagagagtaaaaagctaaaaggacttgatagtctattatcaattgcgcaaatgcctaaaggtataccagttggaactcttgcaataggtgatgatggtgcgataaacgctgctttgttggctgccgctataattagtaataataatcccattgttaaaaaaaaactaaataattggcgattgtcccaaacaagatcagtcaaaaaaaatccacgatag

SEQ ID NO: 276146 - DNA, 493 bp, Unknown
  Bacterial polypeptide expressing nucleotide sequence isolated from the Sargasso Sea
atgcaatcaaaaaaaatacataaagtttctattgttatgggaagccaatcagattttaaaacaatgaaactgtgtgaaaaagtgtttaaaattttaaaagtaaaatttgaaacaaagattatatctgctcatagaacgcctaatcgaatgtatgattattcaaaaaaagcagaaaaaaacaagatttcagtaattatagctggtgcaggaggttccgctcatttgccgggtatgattgcttcacttaccacaataccagttattggtgttccaattgaaagtaaaaaattaaaaggtttagatagtttattatctattgcacaaatgcctaaaggaataccagtagctactgtagctataggagaagatggagcaattaatgccgcattattagcagcatctataatctctttgagcgacgaaaaattaaaaaaaaatctaaataagtggcgtataaagcaaagctcttcagtaaaaaaaaaaccaaaataaa

SEQ ID NO: 276147 - DNA, 907 bp, Unknown
  Bacterial polypeptide expressing nucleotide sequence isolated from the Sargasso Sea
gcgatgttttaaaaaattagaatcaaatactgaaattaatccctctcctgaaacattaagaattattcaagataagtttttacaaaaacaattcttacaagaaaatcacatacctgtagcagaatttgaaaaagtagagaataaagaagaattagaaaaaatgataaaaaaactaggacttccattgttattaaaaactcgaagagatgcatatgatggtagaggaaattacaagattaattctcaaaatgatatagatgatgcattagatttgtttacaggaaaaacactaatggtcgaaaaatttgttgattttcaaaaagaagtatcagtaattgcagcacgaaatacaaatggagaaatttcaacatatcccgtggtagaaaatatgcatgaaaataatattttaaaaatgactattgcaccaggtcgagtttctgaaaaagtgagaaaagaggcagaagatgttgcccacaaaaccatggaagtatttcatggggcaggagtattcggtatagagatgtttgttacacaagatgaaaaaattctgattaatgaaattgctccacgagttcataattcaggacatcatacattacaatccagtacagtttctcaatttgaattacatctaagagctattttgggaatggcattaggagatacatcaataaaaaaatccaccatcatgtacaacattttgggccctcacacattcaaaggtgaatacaatattttacaccatgagcaagataatgtattcttaaagatgtacggaaaacaagaatctaaaccacaaagaaaaatcggtcacatcaatatcgtagataacaaaaatttagggatcgaaggtttgttattacaagtggatgaaataaaaaaaaatctaatcatagagccaaaataa

SEQ ID NO: 276148 - DNA, 493 bp, Unknown
  Bacterial polypeptide expressing nucleotide sequence isolated from the Sargasso Sea
atgaaaaaaaatagtaaattaaaagtttcaatcataatgggaagtcaatctgactataaagtaatgaaaatagccgaaaaaaccctaaaaaaaattggagtttcatttgaaacaaaaattatatctgctcacagaacaccacaaagaatgtatgaatatgctgcaaaagttgagcaaaataatataggagtaattattgcgggtgccggaggatctgctcatcttccaggtatggtatcagcacttacacatgtgccagtacttggtgttcctgttgaaagtaaaaaacttaaaggtttggatagtttgttatcaattgcacaaatgcctaaaggaattcctgtaggaacgcttgctattggagaggacggcgctattaatgctgctttattagcagcagcaataattgctaataataattcaaatgttcgaaaaaaacttaaaaattttagaacatcacaaactaaatctgtaaagaaatctccaaaataaa

SEQ ID NO: 276149 - DNA, 493 bp, Unknown
  Bacterial polypeptide expressing nucleotide sequence isolated from the Sargasso Sea
atgggtagtgattcagacctaaaaacaatgaaacctgcagtagatattttaagagaatttaatttaaaaactgaagtttgtatactttctgctcatcgaacacctattgaaatgatggaatatgcaaaaaatgcagaatcagaaaacataaaagtaataattgctggtgctggtggtgctgctcatcttccaggaatgttggcatccataacttgcattcctattattggagtaccagtagagagtaaaacactgaagggaattgattctcttttatcaatcgttcaaatgcccgctggaattccagttgcaacggttgcaattaatggagctcagaatgctggattattggcaatagaaatgatcagtttatttgatgaatccataaagaaaactttaaaagaattcagagaaaatcttcatacagaggtaagagccaaaaatagtaaattatcaactattggaccagacaaatatctgcaaaatgaataga

SEQ ID NO: 276150 - DNA, 493 bp, Unknown
  Bacterial polypeptide expressing nucleotide sequence isolated from the Sargasso Sea
atgaaaaaaaataaaaatctaaaagtttcaattgttatgggcagtcagtctgattacaaaattatgcagctagcagaaaaaacacttaaaaaaattggtgtttcttttgaaacaaaaattatatcagcacatagaactccaaagagaatgtatgattatgctttaaaagcagaaaataataacatagcggtaattatagcaggtgcaggtggatcagcacatttgcctggcatgatctctgctcttacttcaataccagttcttggtgttcctatcgaaagcaaaaaattaaaaggcttagatagtcttttatcaatagctcaaatgccaaaaggaatacctgttggaacacttgctattggtgaagatggggcaattaatgctgctttattagcagcttcaataatagctaaccaaaactcatctattaagttgaaattgaaaaactggagatccagccaaaccaaatctgttaaaaaaaatcctaaataaa

SEQ ID NO: 276151 - DNA, 490 bp, Unknown
  Bacterial polypeptide expressing nucleotide sequence isolated from the Sargasso Sea
atgaaaaaaaaacctctgaaagtttcaattattatgggtagtcaatctgactataagattatgctatttgccgaaaaaactctaaaaagtataggtattaaatttgagacaaaaataatatctgcccatagaactccgaaaagaatgtataattatgcaagttctgcaaaaaaaaataatattggagtaattatagctggagctggaggatctgcacatttaccgggcatgatatccgcactgacatcaataccagttttaggtgttcctattgaaagtaaaaagcttaaaggattagatagccttttatcaatagttcaaatgcctaagggaattcccgttggaactttggcaattggaaaagacggtgcaattaatgctgctcttttagctgcttctattatttcaaacaataaccctgtagtaagtaaaaaattagacagttggcgaatatcacaaacaaagtcagtgaaaaaaaaaccgaattaaa

SEQ ID NO: 276152 - DNA, 493 bp, Unknown
  Bacterial polypeptide expressing nucleotide sequence isolated from the Sargasso Sea
atgaaaaataataaaaatctcaaagtatcaattgtaatgggtagtcaatctgactataaaaccatgaaattaactgaaaaaatccttaaaaaacttggtataaagtttgaaactaaaatcatatctgcacacagaactccaaaaagaatgtacgaatatgcaagtgcagctgcaaaaaataatataggtgttattattgctggtgcaggtggatctgctcatttacctggaatgatttcggctttaacatcacttccagttttaggtgttcctatcgaaagtaaaaaattgaaagggttagacagtctgatgtcaatagctcaaatgccgaaaggaattcctgttggtactttagctataggtgatgatggagctataaatgctggcttactggcagcatcaataatagcaaataataatattgttgtaaaaaaaaaattaaataattggcgtcttgcacaaacacgatcaattaaaaaaaatcccaaataaa

SEQ ID NO: 276153 - DNA, 490 bp, Unknown
  Bacterial polypeptide expressing nucleotide sequence isolated from the Sargasso Sea
atgaaaaaaaataaaaatctaaaagtttcaattgttatgggcagtcagtccgattacaaaactatgcagctaacagaaaaaacactaaaaaaaattggtgtttcttttgaaacaaaaattatatcagcacatagaactccaaagagaatgtatgattatgctttaaaagctgaaaataataacatagcagtaattatagcgggtgcaggtggatcagcacatttgcctggcatgatctcggctattacttcaataccagttcttggtgttcctatcgaaagcaaaaaattaaaaggcttagatagtcttttatcaatagctcaaatgccaaaaggaatacctgttggaacacttgctattggtgaagatggggcaattaatgctgctttattagcagcttcaataatagctaaccaaaactcatctattaagttgaaattgaaaaactggagatccagccaaaccaaatctgttaaaaaaaatcctaaat

SEQ ID NO: 276154 - DNA, 505 bp, Unknown
  Bacterial polypeptide expressing nucleotide sequence isolated from the Sargasso Sea
tatgtcttgggttgctattttgatgggttcagagtctgattggccgacaatgcaatcgtgcaaagaggtattcgatgagttggatgtcacttctgaggtaagagtgactagcgcacacagaacgcctaaagaaactcaagaatatgtgctcgatgcggaggcgcgtggctgcaaagttttcatctgtgctgcaggaatggctgcgcacttggctggcgccgttgcggctcaaactacacgcccggttattggggtccctataagcagtgggtcgctccaaggtgtcgacgcgttgctgtcgacggtacaaatgccaggcggaatccccgttgccactgtagccattggaaaggctggagctaaaaatgcggcttatttggcgagccaaattctagcgacgagcgatgataatttgtttgagcgtgttcgtgctgatagagagaagaacaaagataaggtaatttcccaaaatcaggcgttacaagaaatactaagtggcagttag

SEQ ID NO: 276155 - DNA, 469 bp, Unknown
  Bacterial polypeptide expressing nucleotide sequence isolated from the Sargasso Sea
catgaaaaaaaatactaacaaaaaagtttcaatagttatgggtagtcaatcagactacaaaactatgcaattagcagaaaaaactctcaaacaattaggtgttttgtttgaaactaaaattgtttctgctcaccgtaccccaaagagaatgtatgatttcgcattaaaagcagaaaaaaataatatcggagtaattattgctggtgctggtggatcagcacatttgccaggaatgatttctgcattaactcaaattccagttttgggtgtaccgattgaaagtaaaaaattaaaaggtttagatagtttgctttcgattgctcaaatgccaaaaggaattcctgtcggtactttagcaattggagaagatggtgctattaattctgcactacttgcggctgaaataatagctgtcaataattcatcggtcaaaaataagttaaaaaaattggagatcaaagcaaactaa

SEQ ID NO: 276156 - DNA, 493 bp, Unknown
  Bacterial polypeptide expressing nucleotide sequence isolated from the Sargasso Sea
atgaacaaaattaaaacacttaaagtatcaattattatgggtagtaaatctgactacaaaattatgaaattatgtgaaaaaactcttaaaaatctaggagttttatttgaaacaaaaataatctctgctcacagaacaccaaaaagaatgtataaatatgctttaagtgctgaaaaaaataaaataggagtgattattgctggtgcaggtggatcagcacatttgcctggaatgattgcagctttaacttctttacctgtattaggtgtacctgttgaaagcaaaaaattaaaaggattagatagcttgttatcaatagctcagatgccaaagggaatacctgttggtactcttgcgattggtaaagatggcgcaattaatgctgcgttacttgcagcttcaattataggaaacagtaatttaaaggttaaaaataaattaaaaagttggagaatatctcaaactaaatctgtcaaaaaaactcctaaataaa

SEQ ID NO: 276157 - DNA, 316 bp, Unknown
  Bacterial polypeptide expressing nucleotide sequence isolated from the Sargasso Sea
aaaaatattaatgttattattgcaggtgctggtggctcagcacatctgccaggaatggtagcatctttaactaagatacctgtgataggtgttcctattgaaagtaaaaaattaaaaggcttagatagtctgctctctattgttcaaatgccaaaaggaattccagttgccactgttgctataggtaaagatggagcaataaacgccgcattacttgctgcctctattttatctaactcaaatttgaaaattgcaaaaaaactttctgattggagatcaaagcagactaaatctgttaagaaaaaaccttactaaa

SEQ ID NO: 276158 - DNA, 524 bp, Unknown
  Bacterial polypeptide expressing nucleotide sequence isolated from the Sargasso Sea
ttttgccattgaagtgtcaacaatatcagcacgtgatactcatggtaatacttttacttaccccccttctgaaaatatccataaaaaccacatacttaatacctcatgtgttcctgcatctattgatcagaagaccgagaatactctatatgaaatatcaaaaaaaatgattaaaaatctaaattatattggtgtcttagcaatagagttctttgtattaaaagataattctatattagtaaatgagatagcgccgagagttcataattcaggccattggactcttgatggagctgacatatcacaatttgaacaacatattagagctatatcacaattaaagatactaaatccaaaattaatttttaagacaaaaatgctcaatctgataggtgacgacgtcaatatttggaaagataagaatagctcaaaaaatgaaaaaatatatatttatggaaagactgaaacaaaaatgggacgaaaaatggggcacgttaattttcttgaagaatttaaatattaat

SEQ ID NO: 276159 - DNA, 451 bp, Unknown
  Bacterial polypeptide expressing nucleotide sequence isolated from the Sargasso Sea
catgaaaaaaaatagtaaattaaaagtttcaatcataatgggaagtcaatctgactataaagtaatgaaactggccgaaaaaaccctaaaaaaaattggagtttcatttgaaacaaaaattatatctgctcacagaacaccacaaagaatgtacaaatatgccgcaaatgttgagcaaaatcatataggggtaataattgcaggtgctggaggatctgctcatcttccaggtatgatatcagcacttacacatgtgccggtactcggtgttcctgttgaaagtaaaaaactcaaaggtttagatagtttattatcaattgcacaaatgcctaaaggaatacctgtaggaacccttgcaataggagaggatggcgcaattaatgccgctttattagctgcagcaataattgctaaccataatccaaatattctaaaaaaacttaaaaaattt

SEQ ID NO: 276160 - DNA, 385 bp, Unknown
  Bacterial polypeptide expressing nucleotide sequence isolated from the Sargasso Sea
catgaaaaagaataaaaatctaaaagtttcaattgttatgggtagtcaatcagactataaaactatgaaattagctgggaaaatacttaaaaaaatgggtattaagtttgaaactaaaataatttcagctcatcgcactccaaaaagaatgtatgaatttgcaagttcagcaaaaaaaaataatattggggtaataattgcaggtgctggtggttcagcacatttaccaggaatgatttctgcattaacatctattcctgttttgggagttccaattgaaagtaaaaaacttaagggattggatagtttgttatctatagctcaaatgccaaaaggaattcctgtaggcactttagcaattggtaaggatggagcaataaatgct

SEQ ID NO: 276161 - DNA, 399 bp, Unknown
  Bacterial polypeptide expressing nucleotide sequence isolated from the Sargasso Sea
aatgggtagtgattcagatctaaatacattgaaaccagcaattgatattttaaaagaatttggaataaaaactgaagtttgtatactttctgctcatcgaacacctattgaaatgatggaatatgcaaaaaatgcagaatcagaaaacataaaagtaataattgccggtgctgggggtgctgctcatcttccaggaatgctagcatctataacttgcattcctgtaattggagtaccagtagagagtaagacactgaaggggattgactctcttttatcaatagttcaaatgcccgctggaattccagttgcaacagttgcaattaatggaggacaaaatgctggattattggcaatagagataatcagtttatttgatgaatccataaagaaaaattt

SEQ ID NO: 276162 - DNA, 496 bp, Unknown
  Bacterial polypeptide expressing nucleotide sequence isolated from the Sargasso Sea
aatgggtagtgattcagatctaaaaacattgaaaccagctattgatatattaaaagaatttggaataaaaactgaagtttgtatactttctgctcatcgaacacctattgaaatgatggaatatgcaaaaaatgcagaatcagaaaacattaaagtaataattgccggtgctggtggtgctgctcatcttccaggaatgctggcatccataacttgtattcctgtagttggagtaccagtagagagtaagacacttaaggggattgattctcttttatcaatagttcaaatgcctgctgggattccagttgcaacagttgcgattaatggaggtcaaaatgctggattattggcaattgagatgatcagtttatttgatgaatctataaagaaaaatttaaaagaattcagagaaaatctacatacacatgtaagatctaaaaatagtaagttatccactattggacctgacaaatatcttcaaaatatgaactaa

SEQ ID NO: 276163 - DNA, 493 bp, Unknown
  Bacterial polypeptide expressing nucleotide sequence isolated from the Sargasso Sea
atgggtagtgattcagatctaaatacattaaaaccagccgttgatattttaagagaatttggaataaaaactgaagtttgtatactttctgctcatcgaacaccaattgaaatgatggaatatgcaaaaaatgcagaatcagaaaacataaaagtaataattgccggtgctgggggtgctgctcatcttccaggaatgctggcatccataacttgcattcctgtaattggagtaccagtagagagtaagacactgaagggaattgactctcttttatcaatcgttcaaatgcccgctggaattccagttgcaacagttgcaattaatggaggacagaatgctggattattggcaatagagattatcagtttatttgatgaatccataaagaaaaatttaaaagaattcagagaaaatctacatacacaggtaagaaataaaaacaataagttatcaactattggacctgacaattatcttcaaaataaatgaa

SEQ ID NO: 276164 - DNA, 496 bp, Unknown
  Bacterial polypeptide expressing nucleotide sequence isolated from the Sargasso Sea
atgggtagtgattcagatctaaaaacattgaaaccagctattgatatattaaaagaatttggaataaaaactgaagtttgtatactttctgctcatcgaacacctattgaaatgatggaatatgcaaaaaatgcagaatcagaaaacattaaagtaataattgccggtgctggtggtgctgctcatcttccaggaatgctggcatccataacttgtattcctgtagttggagtaccagtagagagtaagacacttaaggggattgattctcttttatcaatagttcaaatgcctgctgggattccagttgcaacagttgcgattaatggaggtcaaaatgctggattattggcaattgagatgatcagtttatttgatgaatctataaagaaaaatttaaaagaattcagagaaaatctacatacacatgtaagttctaaaaatagtaagttatccactattggacctgacaaatatcttcaaaatatgaactaat

SEQ ID NO: 276165 - DNA, 505 bp, Unknown
  Bacterial polypeptide expressing nucleotide sequence isolated from the Sargasso Sea
ttggagaaaattgtgactaaaactgtatcaattgtaataggatcggaatcggatttagaattagctaacaagtgcgcagacactttggactcgttgtctattagtaattcaatacaagttctgtctgcccatagaacaccaggacttcttgagacgcatgtcagggaatgcgaaagtggtggaacaaaagtttttgtagcaatggcagggttggcagctcatctcgcaggtgcggttgcttctaagactgttttgcctgtcattggtgttccgggagatggaggccccttgagcggtatggacgcacttttgtctacagtacagatgcctaaaggaatccccgtagcaacagttgcaataggctcagctggcgcaactaatgccgcttacttagcagctcagattttgggagttgaatcggatgaagtacggaatagcttggttaaagttagagaagacggcgtagaagctataaaagaatctaataagaaattatctaattcct

SEQ ID NO: 276166 - DNA, 817 bp, Unknown
  Bacterial polypeptide expressing nucleotide sequence isolated from the Sargasso Sea
tatgaaaaatgaaatttcaaaagtgattgttttagatcccacagaaaattgtcctgcagcaaaagttggtgcagaacagattattgcagattttaaggatgaagaatcaataaaaaaattatctgaattatcagatatcataacatatgagattgaatccggaaatagtgatgttttaaaaaaattagaagaaaatactgagataaatccttctccagaaaccttgcgaatcattcaagataagttcttgcaaaagcaatttttacaagaaaatggaattgcagtggcagaatttgaaaaagtggaaaacagagaagaattagaaaaaatgattgaaaaattgggtcttccgctattattaaaaacacgaagagatgcatatgacgggcgaggaaattataagattaattctaaaagtgatatcgatgatgcattagatctatttgcaggaaaaacactaatggttgagaaatttgttaattttcaaaaagaagtatcagtaattgcggcacgtaatactaaaggagagatttccacatatccagtagtagaaaatcttcatgagaataatattttgagaatgacaattgcgccaggtcgagtttcagaaaaagtaagaaaagaagcagaagatgtagcacataaaacaatggaagtactacacggcgcaggggtatttggtatagagatgttcgttacacaagatgaaaaaatactaatcaatgaaattgcgcccagagttcataattcgggacatcacacattacaatcaagtaccatatctcaatttgaattacaccttagagcaattctagga

SEQ ID NO: 276167 - DNA, 493 bp, Unknown
  Bacterial polypeptide expressing nucleotide sequence isolated from the Sargasso Sea
catgaaaaaaaataaaaatctaaaagtttcaattgttatgggcagtcagtctgattataagactatgcagctaacagaaaaaacacttaaaaaaattggtgtttcttttgaaacaaaaataatatcagctcatagaactccaaagagaatgtatgattatgctttaaaagccgaaaataataacattgcagtaattatagcaggtgctggtggatcagcacatttgcctggcatgatctcagctcttacttcaataccagttcttggtgttcctatcgaaagcaaaaaattaaaaggcttagatagtcttttatcaatagctcagatgccaaaaggaatacctgttggaacacttgctattggtgaggatggggcaataaatgccgctttattagcagctgcaataatagctaaccaaaactcatctattaagttcaaattgaaaatctggagatccagccaaaccaaatctgttaaaaaaaatcctaaataa

SEQ ID NO: 276168 - DNA, 298 bp, Unknown
  Bacterial polypeptide expressing nucleotide sequence isolated from the Sargasso Sea
tattgcaggtgctggtggctcagcacatctgccaggaatggtagcatctttaactaaaatacctgtgataggtgttcctattgaaagtaaaaaattaaaaggcttagatagtttgctctctattgttcaaatgccaaaaggaattccagttgccactgttgctataggtaaagatggagcaataaatgccgcattacttgctgcctctattttatctaactcaaatttgaaaattgcaaaaaaactttatgattggagatcaaaacagactaaatctgttaagaaaaaaccttactaa

SEQ ID NO: 276169 - DNA, 436 bp, Unknown
  Bacterial polypeptide expressing nucleotide sequence isolated from the Sargasso Sea
ctgaccgcctccgtgtacgtccccaaccgcgaggcggcggcgagcgcgtcgggcggcgggctcctctcgagccctcggccgctcgtcggcgtcatcatgggatccgactcggacctgccgtgcatgcaagctgccgccgagatgctcgacaagtttgaggtgccatacgagctcacaatcgtctcggcgcaccgcacgccgcagaggctgtatgagtactcgcgcgccgccgcaggtcgcggcctcaaggtgattattgcgggcgcggggggcgctgcccacttgccagggatggtggcggccatgacgccgctccccgtgatcggggtgccggtcaagtcgtcggcgctctcaggcaacgactcgctgctctccatcgtccaggtgcgtgatctcccaccatctccatctccctccctgggtgcatgcatctgac

SEQ ID NO: 276170 - DNA, 466 bp, Unknown
  Bacterial polypeptide expressing nucleotide sequence isolated from the Sargasso Sea
atgaacaaaaataaaacacttaaagtatcgattgttatgggtagtcagtctgactacaaaatcatgaaattatgtgaaaaaactcttaaaaatttaggaatcccttttgaaacaaaaataatttctgctcacagaactcctcaaagaatgtacgtttatgcctctaatgctgaaaaaaatcgtatagccgtcataattgctggcgccggtggatcggcacatttaccaggaatgattgctgcattaactcagatacctgtattaggagtgcctattgaaagtaaaaaattaaaaggattagacagcttactatcaattgctcaaatgcctaagggaataccagttggtaccttagcaattggtgaagacggagcaattaacgctgctttacttgcagcatcaattgttggaaataacaattcaaaaattaaaaataaattaaaaagttggagactatctcaaacta

SEQ ID NO: 276171 - DNA, 438 bp, Unknown
  Bacterial polypeptide expressing nucleotide sequence isolated from the Sargasso Sea
aatgaaaacaaaatctaaaccgatagtatcaatagtaatgggaagcaaatctgattatggaactatgaaattttgtgagcaagttttaaaaaaactaaacattaagtttgacacaaatattatttcagctcataggactcccaaaaggttgtacgattttgccttaaatgcagaaaaaaaaagaatttctataataatagctggagcaggtggatcagcacacctgcctggaatgattgctgcaattactagtattcctgtacttggagttccaatagaaagtaaaaaactaaaaggattagatagcctattgtccatagcacaaatgccgaagggaattccagttggtacattagccataggcaaagatggagctataaactctgctttactagcagcatccatattatcttctagcaatcaagtcatcaaaaataa

SEQ ID NO: 276172 - DNA, 493 bp, Unknown
  Bacterial polypeptide expressing nucleotide sequence isolated from the Sargasso Sea
atgggtagtgattcagatctaaatacattaaaacctgccattgatattttaagagaatttagaataaacactgaagtttgtatactttctgctcatcgaacacctattgaaatgatggaatatgcaaaaaatgcagaatcagaaaacataaaagtaataattgctggtgctgggggtgctgctcatcttccaggaatgctggcatccataacttgcattcctgtaatcggagtaccagtagagagtaagacactgaagggaattgactctcttttatcaatcgttcaaatgcctgctggaataccagttgcaacagttgcaattaatggaggacaaaatgctggattattagcaatagagatgatcagtttatttgatgaatccataaagaataatttaaaagaattcagagaaaatctacataaacaggtaagaaataaaaataataagttatcaactattggacctgacaattatcttcaaaataaatgaa

SEQ ID NO: 276173 - DNA, 550 bp, Unknown
  Bacterial polypeptide expressing nucleotide sequence isolated from the Sargasso Sea
cttgccggtctttctcgtgacgacagttcttccccgcgtagccgtggtgatgggcagtgattccgatctgccgaccatggaaccggccgcggcgatcctgcgggagctgggggttgaggtggaggtgcgggtgttgtcggcccaccgcactccgctggaaatggtggcgtttgcccaggcggcccgcactgaaggattcggcgtgatcgtggccggtgccggtggtgccgcccatcttccggggatggtggcggccctcaccaccctgccggtgatcggtgttcccgtccgaagccgcgccctctctggtgtggattcgctgcactcgatcgtgcagatgcccggtggcattcctgttgccacggtggccatcggcggtggcctcaatgcaggattgctggctgctcagatcctgtcggtggcagacgaggccctggcggcccgactggcggactaccgccgcaggttgcacgatgcagtggcggccaaggatgcccgtctgctcgatctcggcagcacggcctatctcgacggcatgtcgaccccctga

SEQ ID NO: 276174 - DNA, 493 bp, Unknown
  Bacterial polypeptide expressing nucleotide sequence isolated from the Sargasso Sea
atgaaaaaaaatagaaatcttaaagtttcaatcgttatgggtagccagtctgattataaaactatgcggctggcagaaaaaactctaaaaaaaattggtgtttcttttgagacaaaaattgtatcagctcacagaactccaaaaaggatgtatgattatgctctaaaagcggaacaaaataatataggggtaattatagcaggcgctggaggatcagcacatttaccaggtatgatctcagcacttacatcattacctgttcttggtgtccctatcgaaagcaaaaaattaaaaggcttagatagtcttttatcaatagctcaaatgccaaaaggaatacctgttggaacacttgctatcggtaaagacggtgcaattaatgctgcattattagcagcttcaataattgcaaaccaaaatccaactattaaaaaaaaattgaataattggagatctagtcaaactaaatcagtcaaaaaaaatcctaaataaa

SEQ ID NO: 276175 - DNA, 550 bp, Unknown
  Bacterial polypeptide expressing nucleotide sequence isolated from the Sargasso Sea
ttgccgttcttttccgtgacgacagttctcccccgcgtggccgtggtgatgggcagtgattccgacctgccgaccatggaaccggccgcggccatcctgcgggagctgggggttgaggtggaggtgcgggtgttgtccgcccaccgcacgcccctggagatggtggcgtttgcccaggcggcccgtgctgagggtttcggtgtgatcgtggccggcgccggcggtgcggcccatctgccggggatggtggcggccctcaccaccctgccggtgatcggggtccctgtgcaaagccgagccctgtccggggtggattcgctccattcgattgtgcagatgccgggaggcattcctgtggccaccgtggccatcggcggcggcctcaatgccggattgctggctgcgcagatcctgtcggtggcggacgaggccctggcggctcgactggcggactatcgccgcaggttgcacgatgcagtggcggccaaggatgcccgtctgctggatctcggcagcacggcctatctcgacggcatgtcgaccccctgac

SEQ ID NO: 276176 - DNA, 1147 bp, Unknown
  Bacterial polypeptide expressing nucleotide sequence isolated from the Sargasso Sea
atgagtaaaactctagggataattggtggtggacagttaggcatgatgcttacagaagccgcacaaaatttagatgatatttcaaaaataatagttttagatcctacggaaaattgccctgcagcaaaagttggcgcgcagcagatcattgcagattttaaagatgaagatgcgataaaaaaattatcagaattatcagatatcataacatatgaaattgagtctggaaatagcgatgtattaaaaaaattagaagaaaatactgagataaatccttcaccagatacattaagaatcattcaagataaattacttcaaaaacaattcttacaaaaaaatggtattgcggtcgcagaatttgaaaaaattgaaaataaagaagaactgaatcaaatgatagataaaatgggcctcccattgttgttaaaaactcgaagagatgcatatgatggacgcgggaattataaaattaattcaaaatctgaaatagatgatgctttagatttattttcaggaaaaactctcatggtagagaaatttgtgaaatttgaaaaagaagtttcagtcatagctgcaagaaatacaaaaggtgaaatttcgacatatcctgtagttgaaaatatccatgaaaataatattttaagaacaaccattgccccaggaagagtttccgaaatagttagaaaagaagcagaaaaaattgctgaaaaaacaatggaagtattacatggagcgggggtttttggaatagaaatgtttgttacatctgatgatgaaatattaattaatgaaattgcacctcgagttcacaattcaggtcaccatacattgcaatcctgcaatacatctcaatttgaacaacatttacgggcaattttaggaatggatctgggagattcatcaattaaaactcctacaataatgtacaatatcttaggaccaaaaacatttcaaggagaatacaatgtgttattcaaaaaacaggacaacattcatctgaaaatgtatggcaaattagaatcaaaaccacaacgtaaaattggacatgtgaatgtagtcgatgttgaaaatagaggaatgggagaattgcttaaacaagttgaagatctaaagaaaaatttggttatagaaccaaaagaatcctagt

SEQ ID NO: 276177 - DNA, 502 bp, Unknown
  Bacterial polypeptide expressing nucleotide sequence isolated from the Sargasso Sea
ttggccgttaaatcattagaaaaaaagttaatttcaattgtcatggggagtcaatcagattggtctacaatgaagaatgcagcaatttttttagaggaactaaatattccctatgaaaagaaagttgtttcagcccatcgtactcctgaaagactatataattatgccaagaaggctcaaaaaagaggaattaaagtaataatagctggcgcaggaggtgctgcacatctacctggtatgatagcttctttgacatcacttcctgtcttaggtgttcccattgaaagtaaagcgcttaaaggaattgatagtttattatctattgctcaaatgcctgcgggtattccagttggaacattagcaattggagatccaggcgcaacgaattctgcaattcttgctctttcaataatatctgtaagcaataaatcttatcttaataagttagaaaaatggaaaaagaacttaacagataatgttccattagacccaaatgaataaa

SEQ ID NO: 276178 - DNA, 502 bp, Unknown
  Bacterial polypeptide expressing nucleotide sequence isolated from the Sargasso Sea
ttggccgctaaatcaaaagaaaaaaagttaatttcaattgtcatggggagtcaatcagattggtctacaatgaagaatgcagcaatttttttagaggaactaaatattccctatgaaaagaaagttgtttcagcccatcgtactcctgaaagactatataattatgccaagaaggctcaaaaaagaggaattaaagtaataatagctggcgcaggaggtgctgcacatctacctggtatgatagcttctttgacatcacttcctgtcttaggtgttcccattgaaagtaaagtgcttaaaggaattgatagtttattatctattgctcaaatgcctgcgggtattccagttggaacattagcaattggagacccaggcgcaacgaattctgcaattcttgccctttcaataatatctgtaagcaataaatcttatcttaataagttagaaaaatggaaaaagaacttaaaagacaatgttccattaagcccaaatgaataga

SEQ ID NO: 276179 - DNA, 493 bp, Unknown
  Bacterial polypeptide expressing nucleotide sequence isolated from the Sargasso Sea
aatgtctaaaaaaatctttaacaaagtctcaatagtaatgggtagtcaatcagacaataaaactatgaagatttgccaaaagattcttaaaaatcttaatgtgaaatttgaatctagaatagtttcggctcatagaactccaaaacgtttatatgattatgcgagaaaagcagagaaaaacaagattggagttataattgctggagctggaggatctgctcatttaccagggatgattgccgctttaacaccactgcctgtgttaggtgtaccgatcgaaagtaaaaaacttaaaggtattgatagtctactctcaattgcgcaaatgccaaaaggtatacctgttggaacattagcaattggaaaagatggagcaataaatgctgcgctattagctgcttccataatttcactaaatgacactaaagttaaaaaaaaattaaataattggcgttatcgacaaacaaaagctgttaaaaaaaaaccacgctaa

SEQ ID NO: 276180 - DNA, 469 bp, Unknown
  Bacterial polypeptide expressing nucleotide sequence isolated from the Sargasso Sea
catgaaaaaaaatagtaaattaaaagtttcaatcataatgggaagtcaatctgactataaagtaatgaaactggtcgaaaaaaccttaaaaaaaattggagtttcgtttgaaacaaaaatcatatctgctcacagaacaccacaaagaatgtatgaatatgctgcaaaagttgagcaaaatcatataggagtaataattgcaggtgctggaggatctgctcatcttccaggtatgatatcagcgcttacacatgtgccagtgcttggtgttcctgttgaaagtaaaaaacttaaaggtttagatagtttattatcaattgcacaaatgccaaaaggaatacctgtaggaacgcttgctataggagaggatggtgccattaatgctgctttattagcatcagcaataattgctaataataatttaaatgttcgaaaaaaacttaaaaatttcagaacatcacaaaccaaa

SEQ ID NO: 276181 - DNA, 406 bp, Unknown
  Bacterial polypeptide expressing nucleotide sequence isolated from the Sargasso Sea
atgaaaaagaaaataataaatagtattgtttcaatagtaatgggtagtcaatcagactttaaaactatgaaatatgcagtaaaaattcttaaaaaattaggagtaaaacacgaagtaaaaattatatcagcacacagaacaccaaaacgaatgtatgattttgctattaatgtcgaaaaaaagaaatgtgaagtgattatcgcaggtgcaggtgggtctgcacatttgccaggaatgctagcggcaattactcacatacctgtattaggagtgcccattgaaagtaaaaagttaaaaggtttagacagtcttttatctattgttcaaatgccaaagggaatacctgtaggaactttagcaataggaaaagacggagcaattaatgctgctttgtatgctgcatcta

SEQ ID NO: 276182 - DNA, 493 bp, Unknown
  Bacterial polypeptide expressing nucleotide sequence isolated from the Sargasso Sea
atgaaaaaaaatagtaaattaaaagtttcaatcataatgggaagtcaatctgactataaagtaatgaaactagccgaaaaaaccctaaaaaaaattggagtttcatttgaaacaaaaattatatctgctcacagaacaccacaaagaatgtatgaatatgctgcaaaagttgagcaaaataatataggagtaattattgcgggtgctggaggatctgctcatcttccaggtatggtatcagcacttacacatgtgccagtacttggtgttcctgttgaaagtaaaaaacttaaaggtttggatagtttgttatcaattgcacaaatgcctaaaggaattcctgtaggaacgcttgctataggagaggacggcgctattaatgctgctttattagcagcagcaataattgctaataataattcaaatgttcgaaaaaaacttaaaaattttagaacatctcaaactaaatctgtaaagaaatctccaaaataaa

SEQ ID NO: 276183 - DNA, 508 bp, Unknown
  Bacterial polypeptide expressing nucleotide sequence isolated from the Sargasso Sea
tttggagaaaattgtgactgaaactgtatcaatagtaataggatctgaatctgatttagacttggccaataagtgcgctgatgctttggactcgttgtccattagtaattcaatacaagttttgtctgcacacagaacacccggactcttggaaacacatgtaagagagtgcgagagcggcggaacaaaagtctttgtagcaatggccggtctggcagctcatcttgctggcgcggtagcttcaaagactgttttgcccgttattggtgttccaggggatggaggcccattgagtggtatggacgcacttttgtcgactgtacagatgcccaaaggaattccagtagcaacggttgctatagggtcagcaggagcaactaatgcagcatatttagcggctcagatattaggtgtagaatcagaagaggtaagaaacagtctgctaaaagttagagaagaaggcgtagaagcaataaaagaatctaacaagaaattatccgattcctga

SEQ ID NO: 276184 - DNA, 508 bp, Unknown
  Bacterial polypeptide expressing nucleotide sequence isolated from the Sargasso Sea
ttggagaaaattgtgactaaaactgtatcaattgttataggatcggaatcggatttagacttagccaacaagtgcgcagacaccttggactcattgtctattagtaattcaatacaagttctatccgcccatagaacacctggacttcttgagacgcatgttagggaatgtgaaagtggtggaacaaaagtttttgtagcaatggcagggttggcagctcatcttgcaggtgcagttgcttctaagaccgttttacctgtcattggtgttccaggagatggtggtcccttaagcggtatggatgcactgttgtctacagtacagatgcctaagggaatccccgtagcaacagttgcaataggctcagctggcgcaactaatgctgcttacttagcagctcagattttgggtgtagaatcagatgaagtgaggaatagcctaattaaagttagagaagacggcgtggaagctataaaagaatctaataagaaattatctaattcctgac

SEQ ID NO: 276185 - DNA, 388 bp, Unknown
  Bacterial polypeptide expressing nucleotide sequence isolated from the Sargasso Sea
atttgaaacaaaaattatatctgctcacagaacaccacaaagaatgtatgaatatgctgcaaaagtcgagcaaaataatataggagtaattattgcgggtgctggaggatctgctcatcttccaggtatggtatcagcacttacacatgtgccagtacttggtgttcctgttgaaagtaaaaaacttaaaggtttagatagtttgttatcaattgtacaaatgcctaaaggaattcctgtaggaacgcttgctataggagagaacggcgctattaatgctgctttattagcggcagcaataattgctaataataattcaaatgttcgaaaaaaacttaaaaattttagaacatcacaaactaaatctgtaaagaaatctccaaaataa

SEQ ID NO: 276186 - DNA, 490 bp, Unknown
  Bacterial polypeptide expressing nucleotide sequence isolated from the Sargasso Sea
atgaataaaaaaaatctaaaagtttcaattgttatgggtagtcaatctgactttaaaacaatgaaattagcaaaacaaattttaaaaaagctaaaagttcccttggaaacaaagattatttctgctcatagaacaccaacaagaatgtacaaatacgcatctggtgcagaaaaaaataatatcggtgtaatcattgcaggcgctggaggatcggcacatttacctgggatgatagctgcacttactcaaataccagtattaggtgtcccgattgaaagtaaaaaactcaaaggtttagatagcttattatctattgctcaaatgccaaaaggtatccctgtggggactttagcaataggagaggatggagcaataaatgcagcgatacttgctgcatcaattatctccaataacaatcctctggtaagatctaaacttaaaagttggagaatatctcaaacaaaatcagttagaaaaaatccaaaataat

SEQ ID NO: 276187 - DNA, 493 bp, Unknown
  Bacterial polypeptide expressing nucleotide sequence isolated from the Sargasso Sea
atgaaaaaaaatactaataaaaaagtttcaatagttatgggtagtcaatcagactacaaaactatgcaattagtagaaaaaactctaaaacaattgggtatttcttttgaaactaaaattgtttcagctcaccgtacaccaaagagaatgtacgattttgcattaaaggcagaaaaaaacaacattggagttattattgctggggcaggcggatcagcacatttaccaggaatgatttctgcattaactcaaattccagttctgggcgtaccgattgaaagtaaaaaattaaaaggtttagatagtttgctttcgattgctcaaatgccaaaagggattcctgtcggaactttagcaattggggaagatggtgctattaatgctgcgttacttgcagctgagataatggcaatgactaattcatcgatcaaaaatagtttaaaaaattggagatcaaagcaaactaaatctgtaaaaagagctccaaaataaa

SEQ ID NO: 276188 - DNA, 896 bp, Unknown
  Bacterial polypeptide expressing nucleotide sequence isolated from the Sargasso Sea
aaaattagaagaaaatactgagataaatctttctccagaaaccttgcgaatcattcaagataagttcttgcaaaagcaatttttacaagaaaatggaattgcagtggcagaatttgaaaaagtggaaaacagagaagaattagaaaaaatgattgaaaaattggggcttccgctattattaaaaacacgaagagatgcatatgacgggcgaggaaattataagattaattctaaaagtgatatcgatgatgcattagatctatttgcaggaaaaacactaatggttgagaaatttgttaattttcaaaaagaagtatcagtaattgcggcacgtaatactaaaggagagatttccacatatccagtagtagaaaatcttcatgagaataatattttgagaatgacaattgcgccaggtcgagtttcagaaaaagtaagaaaagaagcagaagatgtggcacataaaacaatggaagtactacacggcgcaggggtatttggtatagagatgttcgttacacaagatgatagaatactaatcaatgaaattgcgcccagagttcataattccggacatcacacattacaatcaagtaccatatctcaatttgaattacaccttagagcaattctgggaatggaattgggagatacgtcaatcaaatctcctaccataatgtacaatattttaggaccacataccttcaaaggagaatacaatgtattacaccgtgaagaagaaaacattttcttaaagatgtacggtaaactagaatccaaacctcaaagaaaaattggtcacatcaacatagtagataaaaagaatgtagggattgaagggttgcttctgcaagtagaagatctaaaaaagaacctagtcatcgaaccaaaataac

SEQ ID NO: 276189 - DNA, 502 bp, Unknown
  Bacterial polypeptide expressing nucleotide sequence isolated from the Sargasso Sea
tatgagtaaacctttcgtagccatattaatgggttctgagtctgatctttcaattatgcaagctggtgcagatatcttgaaacaattggaaatcgattacgagataaaaattacttctgctcaccgtactccggcagtgacccagcaatacataagtgatgctgaggcaagaggttgtcaggtattcatagcaggggcaggcttagccgctcacttggctggcgctactgcagcgcacactatcaaaccagtgatcggtgtgccaattgatgcaggtcctttgcaaggtctggactctttgttgtcaacagtgcagatgcccggaggaattcctgttgcgactgttgcaataggtaaggctggcgcaaaaaatgccgcttatttagctgctcagattctatcgcttgctgacgaggcgctatcagagcgagtgaaaaaggagcgtgcggcaaattctgagaaagttcaggcgcaagacgctgctttgcaatcttcgctttaa

SEQ ID NO: 276190 - DNA, 490 bp, Unknown
  Bacterial polypeptide expressing nucleotide sequence isolated from the Sargasso Sea
catgacgactaaaccttctgttggcattattatgggaagccagtcagattggccaactttaaaatattctgccaatatccttggtgagttcgatgttacgtatgaaacaaaaatagtgtccgctcatcgtacgccagatagactatgggaatacggtaaatctgcagtaaaccgtggcctaaaagtaattattgctggggctggaggagccgctcatttgccgggcatgatggcatcgaaaacacggatcccaataataggcgttccgattcaaacacaagccttatctggcgtagacagcctatattcaattgtccaaatgccacgcggctttcctgtggcaacaatggcaataggatcaactggggcatctaacgcagcactcttggcattagaaatattagccctcaacgatgagagcttggcaaaaaatttagagatttggagaactcagttatcttcttcaataccagatgaaccacagaattga

SEQ ID NO: 276191 - DNA, 493 bp, Unknown
  Bacterial polypeptide expressing nucleotide sequence isolated from the Sargasso Sea
atgaaaaaaaataaaaatctaaaagtttcaattgttatgggcagtcagtctgattacaaaattatgcagctagcagaaaaaacacttaaaaaaattggtgtttcttttgaaacaaaaattatatcagcacatagaactccaaagagaatgtatgattatgctttaaaagccgaaaataataacatagcagtaattatagcaggtgcaggtggatcagcacatttgcctggcatgatctcggctcttacttcaataccagttcttggtgttcctatcgaaagcaaaaaattaaaaggtttagatagtcttttatcaatagctcaaatgccaaaaggaatacctgttggaacacttgctattggtgaagatggggcaattaatgctgctttattagcagcttcaataatagctaaccaaaactcatctattaagttgaaattgaaaaactggagatccagccaaaccaaatctgttaaaaaaaatcctaaataaa

SEQ ID NO: 276192 - DNA, 502 bp, Unknown
  Bacterial polypeptide expressing nucleotide sequence isolated from the Sargasso Sea
tatgagtaaatctaataatcttgtcggtattatcatggggtcaaagtctgactggccaataatgaaacacgcttcattaacactaaagaaacttaaaatctctcatgagtcaaaaattgtttcagcacacaggacaccaaaattgctttatgaatatgctgatcaagctgcatctaaagggattgaggttataatcgctggagccgggggtgctgcacatctaccagggatgacagcagcaatttcgcacttacctgtaataggtgttccaattcaaacaaaaacgcttgatggcttagattcacttttatcaattaaccaaatgccaaaagggatacctgttgctacagttgctattggtgaaagtggagcaataaattctgcattattagcagcaagtatactatctaataaatacgaagagattcaaaaaatcttagttaaattcaggcaaaaacaaacaagagaagttcttcaaaataattctcctcagaaaaaataa

SEQ ID NO: 276193 - DNA, 508 bp, Unknown
  Bacterial polypeptide expressing nucleotide sequence isolated from the Sargasso Sea
tttggagaaaactgtgactgtaaccgtatcaatactaatagggtctgaatcagatttggacttagcaaataagtgttctgaaactctggattcactttcaatttcaaattcaattcaagttctttcggctcatagaaccccaacccttcttgaaagtcatatcagagaatgtgaagcaggtggtactaaagtttttattgcgatggccggattggcggcgcacttagcaggtgctgtagcttctaaaacagttcttcctgttataggagttcccggcgacgggggtcctttaaatggcatggatgctcttttgtctaccgtacaaatgccaaaaggtattccggtggcaacggtcgcaataggttctgccggagcaattaactccgcatacttggcagcacaaatgttgggtatagagtctgctgaaatacaagcagcactgttaaaagtaagacaagacggaattgaagcaataaaagaatcaaataaaaagctagaaaattcttag

SEQ ID NO: 276194 - DNA, 508 bp, Unknown
  Bacterial polypeptide expressing nucleotide sequence isolated from the Sargasso Sea
tttggagaaaattgtgactgtaactgtatcaatactaataggatccgaatcagatttagatctcgcaaacaaatgttctgagaccctagattcattatcaataactaattctattcaagttttatctgcccacagaacacctggcctactagaaactcatatcagagagtgtgaatcagggggaacaaaagttttcattgctatggccggattggctgcacatttagcaggagcagtggcttccaaaacagttctaccagtaataggagtgcctggagatggcggacctctaagtggaatggatgcccttttatcgacagtgcaaatgcctaaaggcattcctgttgctacagttgccataggttcagcaggtgcaattaactctgcttacttggcagcacaaatgttgggaatagaatcagaagaaacaagatcagccttattaaaggtaagagaagatggagttgaggccataaaagagtctaacaaaaagctagctgactcatag

SEQ ID NO: 276195 - DNA, 493 bp, Unknown
  Bacterial polypeptide expressing nucleotide sequence isolated from the Sargasso Sea
catgaaaaaaaataacaaattaaaagtttcaattattatgggtagtcaatccgactataaaataatgaaactggcagaaaaaaccctaaaaaaaattggagttacatttgatacaaaaattatatctgctcacagaacaccacaaagaatgaacgaatatgcttcaaaattagagcaaaatcaaataggtgtaataattgcaggtgctggtggatctgcccatcttcccggaatgatatcagcactaacccaaataccagttcttggtgttccgattgaaagtaaaaaacttaaaggtctagatagtttgttatcaattgtacaaatgcctaaaggaatacctgttggaacccttgctataggagaagatggcgctataaatgctgcattactcgccgcagctattattgctaataacaatttaaatgtcagaaaaaaacttaaaaattttagaaacacacagactaaatctgtaaaaaaaactcctaaataa

SEQ ID NO: 276196 - DNA, 493 bp, Unknown
  Bacterial polypeptide expressing nucleotide sequence isolated from the Sargasso Sea
catgaaaaaaaatagtaaattaaaagtttcaatcataatgggaagtcaatctgactataaagtaatgaaactagctgaaaaaaccttaaaaaaaattggagtttcatttgaaacaaaaattatatccgctcacagaacaccacagagaatgtatgaatatgctgcaaaagttgagcaaaacaagataggagtaataattgcaggtgctggaggatctgctcatcttccaggtatgatatcggcacttacacatgtgccagtacttggcgttcctgttgaaagtaaaaaacttaagggtttggatagtttgttatcaatcgcacaaatgcctaaaggaatacctgtaggaacacttgctataggagaggatggtgccattaatgctgctttattagctggagcaataattgctaataataattcaaatgttcgaaaaaaacttaaatattttagaacatcacaaactaaatctgtaaagaagtctccaaaataa

SEQ ID NO: 276197 - DNA, 438 bp, Unknown
  Bacterial polypeptide expressing nucleotide sequence isolated from the Sargasso Sea
tattcgatgagttggatgtcacctctgaggtaagggtgactagcgcacatagaacgcctaaagaaacccaagaatatgtcctcgatgcagaggcgcgtggctgcaaggtttttatctgtgctgcaggaatggctgcgcacttggctggcgccgttgcggctcaaaccacacgtccggttattggggtcccaattagcagtgggtcgctccaaggtgtcgacgcattgctgtcgacggtacaaatgccgggcggaatccccgttgccactgtagccattggaaaggctggagctaaaaacgcagcttatttggcgagccaaattctagcgacgagcgacgatggtttgtttgagcgtgttcgtgctgatagagagaagaacaaagataaggtgatttcccaaaatcaggcgttacaagaaacactaagtggcagttagt

SEQ ID NO: 276198 - DNA, 514 bp, Unknown
  Bacterial polypeptide expressing nucleotide sequence isolated from the Sargasso Sea
attgagcaagatatcaaaagatcctttagtttcagttattatgggaagtaaaagcgaccttgatactatgaggctagcctctgaagtcctaagagaacttgaaattcctcatgagactaaaattatttctgctcacagaactcctgatctaatgtttgaatttgcaaaaaatgctaaagatagaggtataaaagtaataatagcaggtgcaggtggcgctgctcatcttccaggcatggttgcatccataactgaattacctgtaattggcgttcctgtaaaatcttctaatctaaatggtttagattccttattatcgattgttcaaatgccaaaaggtgtacctgttgcaactgtagctataggccaatcaggtgcagaaaattctgctttacttgcaggaaaaatattagcattaagtgataaagaagtgtcaaaaagaattaaaaatagaatttctgaaaatagcatgaatgtggccaaagatagccatattggaacttggttagaataa

SEQ ID NO: 276199 - DNA, 505 bp, Unknown
  Bacterial polypeptide expressing nucleotide sequence isolated from the Sargasso Sea
atgtcttgggttgctatcttgatgggttcagagtctgattggccgacaatgcaatcgtgcaaagaggtattcgatgagttgggtgtcacttctgaggtaagggtgactagcgcacacagaacgcctaaagaaactcaagaatatgtcctcgatgccgaggcgcgtggctgcaaagtttttatctgtgctgcaggaatggcggcgcacttggctggcgccgttgcggctcaaactacacgcccggttattggggtccctataagcagtgggtcgctccagggtgtcgacgcattgctgtcgacggtacaaatgccaggcggaatccccgttgccactgtagccattggaaaggctggggcgaaaaatgcggcttatttggcgagccaaattctagcgacgagcgacgatagtttgtttgagcgtgttcgtgctgatagagagaagaacaaagataaggtgatttcccaaaatcaggcgttacaagaaacactaagtggcagttagt

SEQ ID NO: 276200 - DNA, 493 bp, Unknown
  Bacterial polypeptide expressing nucleotide sequence isolated from the Sargasso Sea
atgaaaaataataaaaatcttaaagtctcaattattatgggtagtcagtcggactacaaaactatgcaattagcagttaaaatcctcaaatatatgggtatcaaatatgagactaaaataatatcagcacataggactccaaaacggatgttcgaatatgcaattaaagcatctaaaaataatattggagtaataattgcaggagctggagggtcggcacacttaccaggtatgatttcagcattaacatctattccagttttaggggtaccaattgaaagtaaaaaacttaaaggacttgatagtttgctttcgatagctcaaatgcctaaaggaattccagttggaactttggcaataggaagtgacggggcaatcaatgctggattacttgcagcttctataatttcaaacacaaaccctgcggttaaaataaaattaaaaaattggcgattatcacaaacaaagtctgtaagaaaaaatcctaaataat

SEQ ID NO: 276201 - DNA, 463 bp, Unknown
  Bacterial polypeptide expressing nucleotide sequence isolated from the Sargasso Sea
ttggccgctaaatcaaaagaaaaaaagttaatttcaattgtcatggggagtcaatcagattggtctacaatgaagaatgcagcaatttttttagaggaactaaatattccctatgaaaagaaagttgtttcagcccatcgtactcctgaaagactatataattatgccaagaaggctcaaaaaagaggaattaaagtaataatagctggcgcaggaggtgctgcacatctacctggtatgatagcttctttgacatcacttcctgtcttaggtgttcccattgaaagtaaagtgcttaaaggaattgatagtttattatctattgctcaaatgcctgcgggtattccagttggaacattagcaattggagacccaggcgcaacgaattctgcaattcttgccctttcaataatatctgtaagcaataaatcttatcttaataagttagaaaaatggaaaaaga

SEQ ID NO: 276202 - DNA, 520 bp, Unknown
  Bacterial polypeptide expressing nucleotide sequence isolated from the Sargasso Sea
gatggccacaccttcctcacagggctcacctgcccccgctgttggaatcatcatgggtagtaaatcagactggaaaacgcttgagcgtgcggcaaccactctcagtgagcttggtgtgcctcatgaatgcgaaattgtgtccgcgcatcgcacaccagagaaactcgctgaatatgcccgcacggccgttgagcgagggttgaaggtcatcattgccggtgctggtggcgcagcccatcttccagggatggtggcagcccaaacgccattgccagtgctaggtgtacctgtggagtcagccgttttacgtggcgtggattccctgttatcaatcgttcaaatgcctgcaggtattcccgttggaacgctggcaatcggaggtgctggtgctgcaaatgcagcacttcttgccgtttcaattctgtcgttaaatgacgatgaattacgagaacgtctctgttcatatcggaaggcgcagaccgatcgagtgctcgctgatgatctccctcctgttgtgtaa

SEQ ID NO: 276203 - DNA, 493 bp, Unknown
  Bacterial polypeptide expressing nucleotide sequence isolated from the Sargasso Sea
catgaaaaagaataaaaatctcaaagttgcaatcgtcatgggaagccaatcagacttcaaaacgatgaaattatccgcaaatatactaaaaaaaatgggtgttcgatttgaaactaaaattatatctgcccaccgtactccaaaaagaatgtatgaatttgcagagagcgcatcaagaaataatattggagtaatcattgctggtgctggtggatcagcacatttacctggtatgatttcagctataacctcaattccagttttaggtgttcccgttgaaagtaaaaagcttaaaggacttgatagtttattatcaatagcacaaatgccaaaaggaatacccgttggaactcttgcaatcggagaggatggtgccatcaatgctgctttattagctacagctataattgcaaacagcaatcctactgtaaaaaagaaattaaataattggcgttcatcacaaacaagatcagttaaaaaaaatccaaaataa

SEQ ID NO: 276204 - DNA, 496 bp, Unknown
  Bacterial polypeptide expressing nucleotide sequence isolated from the Sargasso Sea
atggcgaataattctgtaaatccggtggtggcgatattaggaggtagtacctcagactttccggttttgacaaaggctgtagaaatcttggatgaactcggaataccaaatgaactgaaggttgtatctgctcacaggactccagatttgttatttgattatgcagagaaagcatctgtacgaggtataaaaattatcatagctggtgcaggaggtgctgctcatttgccaggaatgcttgcgtcaaagacgatcctccctgtgattggagtgcctataccttccgaacaccttaaaggtatggattctttgctttctattgtgcaaatgccaagaggagttcccgttgctacggttgctattgggggatcagaaaatgctgcaatacttgccgcggagattctctctatatcagatgaagatgttcataatagcctgcaaaaatggcgccaagatatgacagataagattatctctgatcatcaaaaaggctagg

SEQ ID NO: 276205 - DNA, 493 bp, Unknown
  Bacterial polypeptide expressing nucleotide sequence isolated from the Sargasso Sea
atgaaatcaaaaaaaatacataaagtttctattgttatgggaagccaatcagattttaaaacaatgaaactgtgtcaaaaagtctttaaaattttaaaagtaaaatttgaaacaaagattatatctgctcacagaacacccaatcgaatgttctattacgcaaaaaaagcagaaaaaaacaagatttcagtaattatagctggcgcaggaggttctgctcatttgcctggaatgattgcttcattaactgccataccggttattggtgtgccaattgaaagtaaaaaattaaaaggtttagatagtttattatctattgcgcaaatgcctaagggaataccagttgctactgtagccataggagaagatggagctattaatgctgcactattagcggcatctataatttctttgagcgatgaaaaattaaaaaaaaatctaaataagtggcgtgtcaaacaaagctcttcggtgaaaaaaaaaccaaaataaa

SEQ ID NO: 276206 - DNA, 490 bp, Unknown
  Bacterial polypeptide expressing nucleotide sequence isolated from the Sargasso Sea
atgaaaaaaaaaattaataaagtttcaataataatggggagtcaatctgatttttcaactttaaaacataccattaaagttttaaaaatattatctatagcgcacgaagtaaaaattgtatctgctcatagaacacccaaaagaatgtttcagtatgctgcaaatgctgaaaaaaataatataagtgttataattgcaggcgcaggtggttcagcacatctaccagggatggttgcggctctcacaagaatacctgtaattggagtcccaattgagacaaaaaaattgaaaggattagatagtttattatctattgttcaaatgccaaagggcatacctgtagcaactgtagcaattggtatagatggagctataaatgctggattattggcagcgtctattttatcgatatttgatataaaaatcagaaaaaatttaattaaatggagatcttctcaaaggaaatctgtaaagataaaacctttataaa

SEQ ID NO: 276207 - DNA, 493 bp, Unknown
  Bacterial polypeptide expressing nucleotide sequence isolated from the Sargasso Sea
atgagcaaaaataaaatagtgaaagtatcaattgtaatgggtagtcaatctgactataaaattatgaaattttgtgaaaaaactcttaaaagtttagggatttcttttgagacaaaaataatttcagctcatagaactccaaaaagaatgtatgagtatgctttaaatgcagaaaaaaaaagtatagctgtaattattgcaggtgctggtggatcagcacatttaccaggtatgattgctgcattatgttcactgccagttttaggtgttcctattgaaagcaaaaaattaaaaggtttagatagcctattatctatagttcagatgcctaaggggatacccgttggcacattagctattggcgaggatggtgcaattaatgctgctctacttgcagcctcaattattggaaacaataatataaaaattaaaaataaattaaaaaaattgcgatcctttcaaactaaatcagtaaaaaaaactgcaaagtaga

SEQ ID NO: 276208 - DNA, 1147 bp, Unknown
  Bacterial polypeptide expressing nucleotide sequence isolated from the Sargasso Sea
atgagtaaaactctcggaataattggcgggggacagttaggaatgatgcttacagaagcagcacaaaatctagatgctatttcaaaaataatagttttagatcctactgaaaattgtcctgcagcaaaagttggtgcacagcaaatcgttgcagatttcaaagatgaggatgcaataaaaaaattatcggaattatctgatattataacatatgaaattgaatctggaaatagtgatgtattaaaaaaattagaaaaaaatactgagataaacccttcaccagacacattaagaattattcaagacaaattacttcaaaaacaatttttacaaaaaaatggcattgcggtcgcagaatttgaaaaaattgaaaacaaagaagaattgaatcaaatgatagataaaatgggtctaccattgttgttaaaaactcgaagagatgcatatgatgggcgagggaattataagattaattcaaaatccgaaatagacgatgctttagatttattttcagggaaaactctcatggtagaaaaatttgtgaaatttgaaaaagaagtttcagtcatagctgcaagaaatacaaaaggtgaaattttgacatatcctgtagttgaaaatatacatgaaaataatattttaagaacaaccattgccccggggagagtttcagagacggttagaaaagaagcagaaaaaattgctgaaaaaacaatggaagtattacatggtgcaggggtttttggaatagaaatgtttgttacatctgacgatgaaatcttaattaatgaaattgcacctcgagttcacaattcaggtcaccacacattgcaatcctgcaatacatctcaatttgaacaacatttacgggcaattttaggaatggatctaggagattcatcaattaaaactcctacaataatgtacaatatcttaggaccaaaaacatttcaaggagaatataatgtgttattcaaaaaacaggacaacattcatctaaaaatgtatggtaaattagaatcaaaaccacaacgtaaaattggacatgtgaatgtagtagatgtagaaaatagaggaatgggagaattgcttaaacaagttgaagatctaaagaaaaatttagttatagaaccaaaagaatcctagt

SEQ ID NO: 276209 - DNA, 502 bp, Unknown
  Bacterial polypeptide expressing nucleotide sequence isolated from the Sargasso Sea
atgaacaataagccaaaagtttcaataattatgggaagcaaaagtgatttagacaccatgagaatcgcttccgaagtacttagagaattggaagttagccatgaaataaaaattatttctgcccatagaacaccagatctaatgtttgaattcgcaaaaaatgcacaaaacagaggtatagaaattattattgctggtgcaggtggagcagctcatttacctggaatggttgcagcgataactgagcttccagttattggagttccaattaaatcttctaatttgaatgggattgactccttattatcaatagttcaaatgccaaaaggagttcctgtagcaacagttgcaataggagatcatggagctgaaaacgctgctcttatatcagccaaaatcttagcactcaacgataataaaatatcaaaaaatcttcaaaaaagaatttctaatacaagtaactcagtgaagaaagatagtgatatagggaactggccataat

SEQ ID NO: 276210 - DNA, 493 bp, Unknown
  Bacterial polypeptide expressing nucleotide sequence isolated from the Sargasso Sea
aatgggtagtgattcagatcttaaaactcttaagcctgcggtggcaattctagatcaatttggcatatctaatgaagtaaggattctgtctgctcataggactccaaaagaaatgatggattttgctcaaatggcagaatcaaatggttttggagtgataattgctggggctggcggggctgctcatctaccaggaatgatcgcatctcttacaacccttcctgtcataggcgttcccgtcaagagcaaggcactgtcagggatagattcaatgtattcaatcttgcaaatgccctcaggcatccccgtagcaacagttgccatagaagggggcctaaatgctggccttttggctactcaaattttagccatcaacaatactgaattaaaaaataaattaaacgcctacagatgtgagctgcacgaccttgtcgttaaaaaagatcacacacttaaagagattggagctgtaacttatctagaaaaaatgtaa

SEQ ID NO: 276211 - DNA, 496 bp, Unknown
  Bacterial polypeptide expressing nucleotide sequence isolated from the Sargasso Sea
catgacaagcaaaaaagctttaatcggagtaataatgggtagtgactctgattggaaaacactcgaggctgcaacaaaagtttgtgaagatttttctgtcccatatgaagctcatgtagtctcagcacatcgtacacctgatgatatgtttgattatgcaaaaaacgctcataaaaaaggtttaaaaatcattatagctggtgcgggtggtgctgctcatctgcctggtatggtagcaagcaatactccgcttccagtaatcggagtcccgataaaaacagaatcattaagtggaatggatgctttgctttctattgttcaaatgccaaatggtgttccagttgccaccgttgctattggtgcggcaagaaatgcagctttattagcaatagaaatattagcaactaataatcaagaattaacggacaagcttattgcttataaaaatgaaattgctgatgaatcgagaaaaaaagataaactaataaaaaaataa

SEQ ID NO: 276212 - DNA, 538 bp, Unknown
  Bacterial polypeptide expressing nucleotide sequence isolated from the Sargasso Sea
tttgtcagaattaaattctaaagaaatttataaaattgctgtcgtaatgggtagtgattcagatctaaatacattgaaaccagcaattgatattttaagagaatttagaataaatactgaagtttgtatactttctgctcatcgaacacctattgaaatgatggaatatgcaaaaaatgcagaatcagaaaacataaaagtaataattgccggagctgggggtgctgctcatcttccaggaatgctggcatctataacttgcattcctgtaattggagtaccagtagagagtaagacactgaagggaattgactctcttttatcaatcgttcaaatgccctctgggattccagtggcaacagttgcaattaatggaggacagaacgctggattattggcaatagggatggtcagtttgtttgatgaatccataaagaaaaatttaaaagaattccgagaaaatctacatacacaggtaagaaataaaaataataagttatcaactattggacctgacaattatcttcaaaataaatga

SEQ ID NO: 276213 - DNA, 529 bp, Unknown
  Bacterial polypeptide expressing nucleotide sequence isolated from the Sargasso Sea
ttgaattctaaagaaatttataaaattgctgtcgtaatgggtagtgattcagatctaaatacattgaaaccagccattgatattttaaaagaatttggaataaaaactgaagtttgtatactttctgctcatcgaacacctattgaaatgatggaatatgcaaaaaatgcagaattagaaaacataaaagtaataattgccggtgctgggggtgctgctcatcttccaggaatgctggcatccataacttgccttcctgtaattggagtaccagtagagagtaagacactgaaggggattgactctcttttatcaatcgttcaaatgcccgctggaattccagttgcaacagttgcaattaatggaggacagaatgctggattattagcaatagagatgatcagtttatttgatgaatccataaagaaaagcttaaaagaattcagagaaaatctacatacacaggtaagaaataaaaataataagttatcaactattggacctgacaattatcttcaaaataaatgaa

SEQ ID NO: 276214 - DNA, 868 bp, Unknown
  Bacterial polypeptide expressing nucleotide sequence isolated from the Sargasso Sea
ggcgtcgaactcttcctgttgaaggatggttcgattcttctcaacgagtgcgcgccgagaccgcacaacagcggtcactacaccatcgagggctgcgcttgctcgcaatacgagaaccacttgcgcgccatcctcggctggccgctcggcgacacatcacttaaggttggcggcgcggtgatgaagaacattttgggcgacggcgaaggcgacgaagccatgggtcgagcgcatcgactcatgggcgccgcgttggcgacccctggcgcgagcattcactggtacgaaaagcctgacatgaagctcgcgagaaagatgggtcacctcaccgtcgttggatcgagcgcagccgtggcgacggagcgtttggacaccattttgcgtgccgccaagggcgacaggacgccggctaaaaaggcaccgcaagtcggcatcatcatgggttccgacagcgatttgcccacgatgagcgccgccgcggaagtcctcgagtctttcggcatcggttgcgaagtcaccgtcatttccgcccatagaacgcccgagcgcatgaacgagtacgccagaagcgcgcacacgcgcggcttgcgcgccatcattgccggcgccggcggcgccgcgcacctccccggcatggtggccgccatgaccccgcttccggtgatcggcgttcccgtccccttaaagtatctcgacggcatggactccctcctttccatcgtccaaatgcccaagggcgttccggtggccacggtggccatcggcaacagcgccaacgccggtctcatcgccgcgcgaatcgtctcggcgtacgagcccgacgtgtgctcaaagatgttggcctatcaagacgacatggagaacgtcg

SEQ ID NO: 276215 - DNA, 496 bp, Unknown
  Bacterial polypeptide expressing nucleotide sequence isolated from the Sargasso Sea
atgggcagcgattcggatctgccctgcatgcagcgcggcatcgaggtgctggagcgctttgccatcccccatgaggtgcgcgtgctctcggcccatcgcacacccctggtgatgagcgattacgcccagaacgccgaagcgcggggcctgcaggtgctgatcgccggcgcgggcggggccgcccatctgcccggcatggtggcggccctcaccaccctgcctgtaatcggcgtgccggtgagcagcaaggccctttcaggcgttgattcgctttattcgatcgtgcagatgccggccggcattcctgtggccaccgtcgcgatcggcaatgcggccaatgccgccctgctcgcgttgcagatcctggcgctgcagcagccggccctgcggcagcagctgcacgcctaccgccatgagctggcggagatggtgtccaccaaggatgcacgcctgcaggatctgggcagccgcgcctacctgcagcagcaggcctgag

SEQ ID NO: 276216 - DNA, 520 bp, Unknown
  Bacterial polypeptide expressing nucleotide sequence isolated from the Sargasso Sea
gatgacagccccggcacgggtgggagtggtgatgggaagcgattccgacctgccctgcatgcacaaggctgtagagatgctggagaccttcggcgtagcccatgaagtgcgggtgctctccgcccaccgcacgccgctcgccatgaccgagtacgcccaacaagccgaagcgcggggcctgcaggtggtgattgcgggcgccggcggcgccgcccacctgcccgggatggtggcggccctcaccaccctgccggtgattggggtgccagtgagcagcaaagcgctctccggggtggattcgctctattcgatcgtgcagatgcccgccggcatccccgtggccaccgtggccatcggcaatgccgccaatgcagggctcttggccctgcaaatcctggccattagtgatccagccttgcgcgagcaattgcaccgctaccgccgaggcctggccgagatggtgaccgccaaagatgcccggcttcaggagttgggcagcagcaactatctggcgcagtga

SEQ ID NO: 276217 - DNA, 529 bp, Unknown
  Bacterial polypeptide expressing nucleotide sequence isolated from the Sargasso Sea
atggaaccaatatttagatctactttttatttccttttcataataaatcttatatttgccgaaagtgcggatattgggaatacaataccggaccttaagatacgattacttgatggtacaactacaaccatacatgaactcgttgatgatggtcctcttatgatcgatttttgggctacatggtgcgtgccatgtaaaaagctaatgagatacctagaccagtatcatcaggattattctagtgacggttttaaggtcttgatgatcaatacagatactcctagatcaatgggcaaagtaaagtcgtatgttagagctcaagattataaattttatattggaatggatcctaataaaacgatctcaaagaaattaaatgggatggttatgcccacgatgatacttgtagataaaggtggcgaagttaaatggcgtcatcaaggctacatatcaggagaagaaattgaggtgaataaccagattaaacaacttttggagaacaatcttgaagaaatatttgaaggctaag

SEQ ID NO: 276218 - DNA, 457 bp, Unknown
  Bacterial polypeptide expressing nucleotide sequence isolated from the Sargasso Sea
cttgagtaaatatcaacctttatttactacaattcatatatctggtggagacgaaatgatgaaatcttcaaaattaaaaaaaaatactacaaaaattttaggtgtatcaatattaactagcatgaataataagcaaacaaaaaaatattataatcaaagcaatatatcaacattagtaaaaaaatttgctatggaagcaaaaaaaaataaattagatggagttgtgtgcagtccaaatgaaataaaatatgtccgaaaaaatgttggaaagaaatttataattgttacccctggaattaggatagatgaaaaagtaaaaagtgatgatcagaagcgaattcaaacacccagaaaagccatagatttgggtgcagattatttagttataggaagaccaataacaatgtcaaaacatccacttaaagttttgaaagaaataaataatactctaagttaa

SEQ ID NO: 276219 - DNA, 468 bp, Unknown
  Bacterial polypeptide expressing nucleotide sequence isolated from the Sargasso Sea
aatgattattgttgcagtagacgagattgattttaaaaaggcaacttcattaattgataatcttgatccaaaaaaatgcctggttaaaataggaagtgtttcttttaattcgattgggcatgagatcataagctatactgctaaaaagggttttgatatatttcttgatctgaagctgcatgatattccacatacagtagaaaaaactatcaaaggattgtccgttttacctattaaaattctaacaattcatacatctggtggaaaagatatgatgatagctgctatgaaagccgcttatgggactggcataaagatttttggtgtcaccacattaacaagcttgagtgataatgatacagatattatttttcaaagatcagcatcagaacaagtaagcgcaatgttagatctagctgaaatagccggcattgatggagttgtatgttctcctcatgaattggaact

SEQ ID NO: 276220 - DNA, 277 bp, Unknown
  Bacterial polypeptide expressing nucleotide sequence isolated from the Sargasso Sea
atgctgatcgccgccgacatcggaaataccaatatcgtcatcggctttttcaaagacgggaattttctcttcagccgcagacttcataccggaccaccccagagtgtcgatgaatatgagatgcttttgcggggtatgcttttcgcatttaatatagacctcgatactgcagaaagtggagtcatggcttcggtggtaccgaaattgacaggagtttttattgagttgctgaaacgaatcatcggcaaaaagcctctgatcgtggatcatgcgctca

SEQ ID NO: 276221 - DNA, 709 bp, Unknown
  Bacterial polypeptide expressing nucleotide sequence isolated from the Sargasso Sea
aatgaaaaaatttaaagcatttatagcatttgatagtcgaactaattcagaaaatataaaaataataaaaaaattatcaccttatgtttatggattcaaagttggctatagtgcttattacaacaaagactctgaaaaacttttgtatgagataaaaaaaagaaagtctaagctttttcttgatttaaaattacatgatattcctaatacggtatcaaatgccataaaatctttatctaaagataatcctgattatttgacagtgcatatttctggtggcaaatctatgctagaacaagcattaaaaacaataaataaaaaaaaactaaaaacaaaattattaggcgttacacttttaacaagtttggataataaggatagtaaaattatatattccgataagaatgcaaactctgttgttaaaaaattagctaatatagcgaatagctcaaaaatttttggtattatttgttcggggaaagatcttaaagatcttatgcgtttcaaaaatcttttaaagataactcctggtgtgaaaatgtttaaaagaaaggatgatcaaaaaagaattgcctatgtccatgatgctataaatgatggtgcggactatgtagttattggaagagaattaataaataaaaaagaccctattgccttgttaaaaaaatattatgaagaaaatcaaaatcaaaatttgtggacaaactaa

SEQ ID NO: 276222 - DNA, 394 bp, Unknown
  Bacterial polypeptide expressing nucleotide sequence isolated from the Sargasso Sea
tatgtgtgataaaaaattaattgttgcattagatttcaataatatggatgaattaaaagatattattaaatctctcgatccaaaaaaatgtttagttaaagttggtttagaactttacatttcagaaggaaaacaagttttagaatttttatcagaggaaggctttgaaattttcttagatttgaagcttcatgatattcccaatacagtaaaaaaatctattcaagagttagtctccttgcctataagcatgcttactattcatacatctggtggaaaggaaatgatgaaatctgctatggatgcagttaagggctccaaaataaaaatttttggcgtcactattttgacaagcttatctgacaaagactctcaaaatattttttggaaataa

SEQ ID NO: 276223 - DNA, 268 bp, Unknown
  Bacterial polypeptide expressing nucleotide sequence isolated from the Sargasso Sea
gatgaagtctaaaaaaataatcgttgccttagacagtaaaaatttaaataaaacaataaaattagttaaaagtttaaagaaagatgtttatgctttcaaaattggttatcagtttttttttaactttggtttaaatggttataaaaaaatctattcaatttgtccaaaaatttttcttgatttaaaattacatgatatacctaatactgttacaaaaggattagaggctttaataaaaatgaagcctctctttactactatacatata

SEQ ID NO: 276224 - DNA, 505 bp, Unknown
  Bacterial polypeptide expressing nucleotide sequence isolated from the Sargasso Sea
agtggtagagagattaaaaaaacatggatggaaagttcttttagatctaaaacttcacgatataccaaatactgttaaagaagctacaaaaagtgcagcaaaccttggagcagattttttaacaattcatattgcttctagtggtgaagcattgatggaagcatcaagcaataaaggtaatactttgcaaattcttggtgttagtagtgcattaactagtagggctatgagcagctcggtaagtgaagatgtaaataaagaatttaaagaagcaaagtattgtggtgttgacggagtaatttgtcccgcttcagaaatttctaaaacaaaagaaatatttgatttaattgtaactcctgggattcgccttaaaaatgatgacaaaaatgatcaaaaaaatgttgcaacacccaattttgcaattaatgaaggtgcaaattatatagtaatgggaagaactataagaaataatctcgattacattatcaacgatttacagttatga

SEQ ID NO: 276225 - DNA, 546 bp, Unknown
  Bacterial polypeptide expressing nucleotide sequence isolated from the Sargasso Sea
taaaaaaattagaaatcccaattttcatagacctaaaattatacgatattcccaatacagcaaaacaagcgcttagtaatattttacaatttgaaccagaatatactactttgcatctttcagggggctcagaaatgcttattgattgtgtaaacgcaaaaaacgaactttatagtagaactaaattgattggtgtaaccatgctgaccagctttaatgatgcactcatttcagagattggtattgaaaaatcagttaatgagaatgtgaaacaactaactcaacttgctgtcaattgttgtatggatggcattgtttgtagtcctcttgaaatttcagaggttaaaaaaactcatgaaagtaaactacagataatttctccaggaattagaggtaaagagaatgtagcaaatgatcaaaaaaggacactttcagcaaaggaagctattgaagctggggctgatgttttagttgtaggcaggccaataacagatgctaaagatcctgctaaagcagctgaaagtatttattcagaaataacgtgac

SEQ ID NO: 276226 - DNA, 648 bp, Unknown
  Bacterial polypeptide expressing nucleotide sequence isolated from the Sargasso Sea
gatgtctaatgaacgcctgatagtcgcgctggatctaccaaatgtagatttggctgaaagtttggtttaccagctaggaaattgtgtttcattctataaaattggtttgtcgttgataccaatcggaggtttttctttagtagaaaaactaaaaaagcagggaaagaaggtttttcttgaccttaagctgtttgatattgcctctactgtagaaaattctgtaaaaaatctagcggatcttgatgttgattttttgactgttcacggcgacccccatgtcattcgtgccgcggtaaagggcaggcgagacaataaactaaaggtactggctataacatttctaactaatgtcgaccgtttagatttggataacgctctcgtgcaatcaggagatttaactgatctagttgttgagcgcgcgaagaaagcatttatcgaaggcgccgatggtgtaatagcctctgctcacgagtctttaagaattcgttctttgaaggagtcagaaggaaaactcatcgtgacacccggaatacgaagatcaaaagattctgacaaggacgatcaaaagagagtatgtagccctagagtagccattcaaaatggttcagactttatcgttataggcaggccaattcatcaatcacctca

SEQ ID NO: 276227 - DNA, 331 bp, Unknown
  Bacterial polypeptide expressing nucleotide sequence isolated from the Sargasso Sea
tatgtcaaaaaaaataattgttgcaatcgatgagacgaatttaactattttgaacaaaattttaaattctcttgataataatttatgcatggtaaaaattggaagtgttgcatttaattcaattggtttagatgcacttaaatgtgccgctgagaaaggttttgatatttttcttgatttgaaattgcatgatataccaaatactgtatataaatctgtgatgggacttgcaaacttgcctgtaaaaatgatgactgttcatatctctggtggaatacagatgttgaaagcttcaaaagaagcattatcaggcagtgatataaagatattg

SEQ ID NO: 276228 - DNA, 676 bp, Unknown
  Bacterial polypeptide expressing nucleotide sequence isolated from the Sargasso Sea
aatgaagagtaagatatttatagcggtagatacaacaagcgtttcaaaagcaaaaaaaataataaaaaatactcaaacatcaaaattgaaaattggttacaaatttggactagaatttttaaactctaaaaatggaagaaagtttgtatctaaattaaaaaatcaaatcacatttggagattttaagttttcagatattcctaacacttgtgtatcagcagtaaaagcaattaaagatcttaattttaattattgcactatgcatataagctcaggtttagaggcgttaaaagcagttaaaaaagtttctggaaaaactaaaatagttggtgtttcaattctaacttctttagataacaaggctttaaaagaaataggttacagtaaagatgtaaaaaaattagttgttcatcacgcgaaacttgctcaaaaagcaaagttggatgctattgtttgtagtgcacaagaagttaaaattgtaagaaaagtttttaaaaaagaaattattactcctggaataagatttaattcagataaaggagaccaaaaaagagttctaactccgaaagcagcattcaagagtggaagtgattggttagtaattggaagacctatcgttaaaaaaggcaatattaaaaataatgttaaaaaattaattgatcatttaaacaaatga

SEQ ID NO: 276229 - DNA, 578 bp, Unknown
  Bacterial polypeptide expressing nucleotide sequence isolated from the Sargasso Sea
aatgatcatagtagcaattgatgaaaataattttaaaaaagcctcagagcttataaataaacttgatcctaaaaaatgtatggtaaagattgggagtgttgcatttaattccattgggcatgaaataatctattacgcagcagaccatgggtttaaaatttttctcgatttgaagctacatgacatacctaatactgttaaaaaatctattctaggactggcttcactgccaataagaatgcttacgattcatacctctggtggtaaagatatgatgatggctgcaatggaggcaacctcagatacccaaataaaagtcttcggtgttacagctttgacaagcctcagtgacgatgaaatagatgaaatatttcaaagaacttcttcagagcacgtaaatgcaatgctagatttagctgaatcagcaggtattgatggtattgtatgttcgccacacgaactcaagcttgttaaaaaaagaggcacacttttatcaattactcctgggataaggctgcaagattcaaatgatgatcaaaaaagagttatgactccaaaagaggcaataaatcttggcg

SEQ ID NO: 276230 - DNA, 629 bp, Unknown
  Bacterial polypeptide expressing nucleotide sequence isolated from the Sargasso Sea
taaagaaaataatattttggtaattatggatgcaaaaagaggtgatattgggagtacatcatttgcctacgctaaagcttggcttggtaaaaactctccctttggagccaacgcattaacggttaatccatggatgggattagaaacattattaccttttattgaagtagcaaacaaaaataagaatggtgtatttattctacttaaaacatccaattcaggttctaaagacatacaggatcttttagttaataatagagctgttttccttcatttagcaaaaattcttcagaaagaaaccttaactaatttaggtaaatttgggtatagcgatattggtgtagttgttggtgcaactcatccaaaagaggcaaaattaattagaaaaattctacctaagtctttatttttgatacccgggtttggagcacaaggtgctagtgcaaatgaagcactatcaggattaatcttaaaaaatagaatttatgaaggtggtttaattaactcatctagaagtattctatttccaaaaaatactcatgatttaaatcattcacttaaatggaaagaaaaaatagtttcagctttaaaaaaaacaactgatgaacttaaatttaaggctggttgat

SEQ ID NO: 276231 - DNA, 634 bp, Unknown
  Bacterial polypeptide expressing nucleotide sequence isolated from the Sargasso Sea
atgctgatcgccgccgacatcggaaataccaatatcgtcatcggctttttcaaagaagggaattttctcttcagccgcagacttcataccggaccaccccagagtgtcgatgaatatgagatgcttttgcggggtatgcttttcgcatttaatggagacctcgatactacagaaagtggagttgtggcttcggtggtaccggaattgaccggagtttttattgagctgctgaaacgaatcaccggtcaaaagcctctgatcgtggatcacgcgctcaaactcggcatccggattgaaacggattttccggagaaagtaggccatgacaggatcgctaatgcagttgcggcctaccaccagcatcggacttcactgattgtgatcgattgcgggaccgccaccacttttgatgtgatccgttcggatggagtcttcgcgggaggattgatatgcccaggaatgctgatttcagcggaggcactctattccagggcggcccaactctttcaggtcaatctggacaaaccggaacagttgatcgggaagaacacgaccgaaagcatgcagtccggaatctttaacggatactgcgcgatgattgaggccttggtggtgaaaattacagaggattaaa

SEQ ID NO: 276232 - DNA, 346 bp, Unknown
  Bacterial polypeptide expressing nucleotide sequence isolated from the Sargasso Sea
aataagagaagtagattccgacaaagaattgtatgtagtaatcactatgtctcaccctaagggaggagatttcttcagaatagaggatttttgttctttagctcttgaggcaggagctacaggagtagtcgctccagcaacacgtccagaagatgtcgctaaagttagaagtttagttggtaatcttaagataatatcacctggcgtaggtgctcagggaggcagcagtaaagacacattgagagctggtgccgattacattatcgttggtagagggatatatcagtcagataatcctgcagaagctgcagagaaatattgtaacgattgttcaatagatgattaa

SEQ ID NO: 276233 - DNA, 700 bp, Unknown
  Bacterial polypeptide expressing nucleotide sequence isolated from the Sargasso Sea
gatgagcataaaaaacagcgaccgattgatttttgcagtggatgtacctgaagtggagcaagccaaagatttggttacccaattgggctcaagtgtcgattttttcaaaattggcatggaattgatgatgaccggcgattactttgagctgcttgactggcttgtggagagagacaaaaaggtctttgttgatttaaaactgtttgatgtgccagcaactgtttcaaaagccatcaaaaggttaagcaaaagaggcgcctactttacaacaatccatggcaatcaaagcatgatggaagctgccgcgtcggaaaagggcgatttaaaggtattggctgtgacagcattaacaagtttagaccgaggggatttggatgacctagggtttgattgtcctgtcgaagatttggttatttcaagggccaggagggcttatgagtctggcgtagatggaatcgtggcttctggccttgagttaccaagcatcaggaaagctctagaagataagattttaattgttacaccgggaatccgacccgtggagaatcgacaaacggatgatcaaaaaagagtagtcaccgttgagcgagcattccaggatggcgcagactatatagttgttggccgaccaattcaaaatgcagataaccctagaaaggctgcagagctgattcaggagagcatttctaattccttatag

SEQ ID NO: 276234 - DNA, 310 bp, Unknown
  Bacterial polypeptide expressing nucleotide sequence isolated from the Sargasso Sea
atgattatagtagcaatcgatgaaacaaactttgaaagagcatcagaagtaatagagagtcttgatccaaaaaaatgtatggtaaaaattggaagtgttgcttttaatgcaattggccacaaaattattagattcgctgctgaaaaaggatttgagatatttttagatcttaaattgcatgacataccaaatacagtaaaaaaatctataaaaggcctatcatctcttccgattaaaatgcttacaattcatacttctggtggtaaagacaagatgaaagctgcaatagaggcggcttcaggaactcaaa

SEQ ID NO: 276235 - DNA, 727 bp, Unknown
  Bacterial polypeptide expressing nucleotide sequence isolated from the Sargasso Sea
atgaacaatattgataatccaagtgaaaaaataattattgccttagatggtatggataagaataacgttatcaatttacttgaaaaaatacctgaaattgtttgggttaaagttggtctggagttatttgtaagtgaaggaccggatgtattatcaatattaagagataaggagaaaaaaatatttttagatcttaaatttcatgatattccaactacagttgcaagagcatgtttcgcagcatcacaaactggagcagaatttatttctttgcacacttgcgcaggtataaaggctctcaagatggctaatgaagcggcacaagagggagccgctaaggttaatttacagccgccaaaactgttgggaattacaatcttgactagttggactagcgaaagctttgctagtgatctattgatcaatcaatcaatagatcaacgtgttaagcatctggcagagattgcgtcgaagactggcttaggaggatgtgtctgcagccctagagaggttcaattccttcgtaaagtttatcctaaggaatttgagctggtaactcctggaatacggtcattaggttcagatattaacgatcaatccagggtttctgatgcatctgaagctctcaaaatgggagcttcaaaattagttattgggagagcaattactcaatcaaatcatcctgcaaatatgtttaaaagtttttgtaataaacttcttatttaat

SEQ ID NO: 276236 - DNA, 235 bp, Unknown
  Bacterial polypeptide expressing nucleotide sequence isolated from the Sargasso Sea
aatgattattgtagcaatagatgaaattaattttaaaaaagcatccaatgtaatagacaatcttgattcggaaaaatgtatggttaaaattggaagtgtcgcttttaattctttgggtcacaaaataattgattatgctgctcaaaaaagttttgatatatttctggatttaaaactccacgatattcctaacactgtaaaaaaaactattgaagacctttcttctttacaataa

SEQ ID NO: 276237 - DNA, 238 bp, Unknown
  Bacterial polypeptide expressing nucleotide sequence isolated from the Sargasso Sea
aatgaatttaaaaaaaattattattgctttagatagtgataatattaatgaaacattaaaaattattaaaaatttaaaaaatgatgcttttgcatttaaaattggatatgagttttttttaaattttggtattagcggatacaacattatcaaaaaagaaaatgttaatatttttctagatttaaaattacatgatattcctaatacagtagctaaaggaattaaagcaattacaaaa

SEQ ID NO: 276238 - DNA, 673 bp, Unknown
  Bacterial polypeptide expressing nucleotide sequence isolated from the Sargasso Sea
gatgagtataaagaacagtgaccgattgatttttgcagtggatgttccagaggtagaacaagccaaagatttgatcatccaactaggcccaagtgtggattttttcaaaattggcatggaattgatgatgacgggagattattttgagttgcttgactggcttgtggagagagacaaaaaggtctttgttgatttaaaactatttgatgttccagcaactgtttcaaaagccatcaaacgattaagcaaaagaggtgcttactttacgacaattcatggtaatcaaagcatgatggaagctgccgcggcagaaaaaggcgatttaaaagtattggctgttactgcattgacaagcttggaccgaggggatttggatgacctggggtttgattgtgccgttgaggatttggttatttcaagggctaggagagcctatgagtctggagtggatggaatcgtggcctctggtctagaattgccaagcatcaggaaagctgtcgaagacaagattttaattgttacgcctggaatccggcctgtggagaatcgacaaacagatgatcaaaaaagagtggtcaccgttgaacgagcattccaggatggcgcagactatatagttgttggccgaccgattcaaaacgcagacaatcccagagaggcggcagaactgatt

SEQ ID NO: 276239 - DNA, 500 bp, Unknown
  Bacterial polypeptide expressing nucleotide sequence isolated from the Sargasso Sea
tattcccaatacagtaaaacaagcgcttagcaatattttacaatttcaaccagaatatactactttacatctttcaggtggccctgaaatgcttactgagtgtgtaaaagcaaaaaatgaacttcatagtagaactaaattaatcggtgtaactatgctaaccagctttaatgatgcgacaatttcagagattggcattgagaaatcagttaatgagaacgtaaaacaactaactcaacttgctgtcagttgtggtatggatggcattgtttgcagtcccctagaaatttcagaagtaaaaaatactcataaaagcaaactacagataatttctccaggaattagaggtaaagagaatgcagtaaatgatcaaaaaagaacactttcagcaaaggaagcgattgatgcaggggctgatattttagttgtaggcaggccaataacagatgctaaagatcctgccaaagcagctgaaaatatttattcagaaattacgtgag

SEQ ID NO: 276240 - DNA, 231 bp, Unknown
  Bacterial polypeptide expressing nucleotide sequence isolated from the Sargasso Sea
aatgaatacaaaaagatttatattttgtgcccttgattttactgaccttaaaaaaactttggatttcaccgaaacaattaagaataatgttggggggataaaactaggattagaatttttttccaagaacggtccgcaaggagttgaaaagatgaaaaagtttggtttaccaatctttttggacttaaaacttcacgatattccaaatacagtaaaacaatctctaaaaaa

SEQ ID NO: 276241 - DNA, 355 bp, Unknown
  Bacterial polypeptide expressing nucleotide sequence isolated from the Sargasso Sea
ttgattaataatagatttaattcagaggataaaataatattggcaattgatggattagatgtaagtcaagcaaaattacttttggaaaaatgtcctaatattaagtgggtgaaagttggtttagaactttttgttagggaaggtccaaaggttattgaaatcttaaaaggtttaaataaaaaaatttttttagacttaaaatttcatgatattccaaataccatgcgcgcagcatgtttccaagtttcaaaattaggggttgatataatttctattcatgcttcagcaggtttaaaagctcttaaggattcgaaaaaagcatctttagaaggagccacctcagtcagtttaaaac

SEQ ID NO: 276242 - DNA, 730 bp, Unknown
  Bacterial polypeptide expressing nucleotide sequence isolated from the Sargasso Sea
tatgaatgtagtcgcagatattggtaatactcagattaaaattgctattgagaggaaaaatggaatttctagagtaaaagcctttcaatcggatgattttacctgcattaagaaatatctgaagtctcttgattatgataacaaaccatatttattttattcgtcagtattgggtgcgaactatgataaaaaactaataaagactcttaaatcattctttgagaaaataacaacatttaaatcgacaaggtcacttttatcaactacaaactcatataaaaaagcttctagtctaggttcagatagatgggcacaaattgtcgcggctaaaaatatctttaaaaaagactgtattattgttagctgtggaagtgctataagtattgattgtgtaacaaaaaatggcactcataaaggagggatgcttatgagtggagccgagaaatatataaactgtttttccgatatacataacctcaaaaatattagtctaactcaaacaaaaaagaataatcttcttcaaacggatacagcagaacaaattaacgtgggttaccgaacaatgatttctgcatctgttcacaaggtgtatgaagaatttaaaaaaaacacaaagtctaagccggctgtaattgtatctggaggttatgcacgacaaattgctagttatattgaagttaatacctcagtagaaccgttttttgttctcaaaagtttggctttcattaaa

SEQ ID NO: 276243 - DNA, 280 bp, Unknown
  Bacterial polypeptide expressing nucleotide sequence isolated from the Sargasso Sea
atggatagaatctacgttgctttagatactgttagtttgcaagaggcgcagtctttagcgagacttttaaaaggcaaagttggcggagtaaagttgggtaaggaattcttctcagcccatggtccgcagggggtaagcattataagcaaggaagggttgccaatctttttagacttgaaatttcatgatattcccaacactgtggaggcggcaataaaagcttccgtgcctctcaatctctctatgcttaacgttcacgtttcaggtggtctagaaatga

SEQ ID NO: 276244 - DNA, 359 bp, Unknown
  Bacterial polypeptide expressing nucleotide sequence isolated from the Sargasso Sea
gatgaataacagatttaattcagaagataaaataatattggcaattgatggattagatgtaagtcaagcaaaattacttttggaaaaatgtcctaatattaagtgggttaaagttggtttagaactttttgttagggaaggtccaagagttattgatatattaaaaggtttaaataaaaaaatttttttagacttaaaatttcatgatattcctaataccatgcgtgcagcatgtttccaagtttcaaaattaggggttgatataatttctattcatgcttcagcaggtttaaaagctcttaaggattcgaaaaatgcatctttagaaggagctaccctcagtcagtgtagaaccttcc

SEQ ID NO: 276245 - DNA, 544 bp, Unknown
  Bacterial polypeptide expressing nucleotide sequence isolated from the Sargasso Sea
agaaaaatttaaaggtaattttttcttagatctaaaattaaatgacattagcgcaactgctaaagccgcaataaattctattaaagaccttaagagatgcagatatataacaattcatgcaaatggtggtttagaaatgatgagggcagttaaaaaagaagccaaaaaaacaaataaaaatttaaaaattttgggcgttacagtattgaccagccttaataatagatctttaaaggagactgggcatacaaaaaacataaatcagatagttagaaaacaagctagtttaattaaaaaatcaggatgtcatggaattgtttgctctgcacaagaagctaaatttataaaaatgaaatacaagaatttgtttgttgtaacgcctggaataagattacctggagataaaaaggatgatcagtccagagtagtcacaccttttgatgcatttgtcaaaaaccaagctgatgcaatcgtcatgggccgatcattgacaaagaataatattaaaaaaaatattcaaaatttaattaatcatatttattaa

SEQ ID NO: 276246 - DNA, 681 bp, Unknown
  Bacterial polypeptide expressing nucleotide sequence isolated from the Sargasso Sea
tagatctaaaatcaaatactcaaaatattactcttgttaaaaaattatacccccacgtttatggttttaaagtggggtatagatctttttataatagacgcttaaaggagcttatttcagaaatcaaaaggtcgaaatgtaaattattccttgatttaaaacttcacgatattccgaacactgttagcagtgctatagattctttatcgaccataaatcctgattatcttaccttgcatatatcaggaggtgaagagatgatgaaagctgcattaaaatctattaagaaaaataaacttaaaactaaaatcttaggggtaaccttattgacgagcttagatgggaaagatagcaaaaaaatattcaaagagggaaatacaaaagaacttgtaaaaaaatttactgaaatcgctaataatgtaaatattcatggccttatttgctcaggtgatgacctaagagttttaggaaaatttaataaattaattaaaataacacctggcgttaaaatgtttgctagaaatgatgatcaaaaaagagttacttttgctcataatgctttacaagatggtgcaagctttgttgtaataggaagagaattaatagaaagcaaaaaacctttagagatattaaaaaaatatggcgaacaatataaaaataaaaatttgtggacaaaataat

SEQ ID NO: 276247 - DNA, 709 bp, Unknown
  Bacterial polypeptide expressing nucleotide sequence isolated from the Sargasso Sea
atgaaaaaatttaaatcctttatagctttggatctcaaatcaaattctaacaatattaatattgtcaataaactatatcgtcatgtatatggttttaaagtaggttacaggtctttttatagtaaaagatcaaatgaactaatttcagaaattaaaaagaaaaaaagtaaattatttcttgatttaaaattacatgatattcctaatactgttataagtgcgattgactccttatcaaaaataaaccctgattttcttacattacatatatcaggaggtaacgagatgataaaagctgcagttgattgtgtaaaaaaaaataagcttaaaacaaaagttttaggagtaactttattaactagcttagatgcaaaggatagtaaaaaaatatataacgaaaaaaatacaaaaaaacttgtgagaaaatttgctgaaactgcgaataaatataaaattcatgggcttatttgttcaggtgaagaacttattgctttaaaaaaatacaataaattaataaaaataacacctggtgttaaattattttctagaaaagatgatcaaaaaagagttacttttgctcataatgctttacaaagtggtgcaagctttgttgtcataggaagagagttaattgaaagcaaagaaccagttagtttgttagaaaaatatgctgaacaatataaagataaagatttgtggacaaaataat

SEQ ID NO: 276248 - DNA, 469 bp, Unknown
  Bacterial polypeptide expressing nucleotide sequence isolated from the Sargasso Sea
aaaatctgctgctgatttaggaatatggatggttaatgtgcatgcttcaggaggtagggcaatgcttgaggcatctaaaaaagccctggaaggttttgatcaaccccctttattgatagctgtgaccgttttgactagtctttcagaagattctcttaatgaagttggtataaaagacctttcagaacaagttctaaggcttgcagagttaactaatgagtgtgatttaaatggagtagtttgtgcttcaacggatgttaaagcaattaagaatatatttggaaaagactttataacagtaactccaggaattagacctaatgattctaaagttaatgaccagaacagaatatccacaccatctgaagctgttaagaatggatcagactatctagtcattggaagaccaattacagaatctgaaaatcctaccaaagctttggagaaaattattaaagaaatcttatga

SEQ ID NO: 276249 - DNA, 478 bp, Unknown
  Bacterial polypeptide expressing nucleotide sequence isolated from the Sargasso Sea
tccgctaaccaattagggcccttcatgctaaatgttcatgcttccggtggttgtgcgatgatgaaagccgcagttagagctaattcggaatccagaaaaccaagttctattcttttagcggtaactttattgacgtcattatccagcgatgacctgagagacattggaatgaaggctaatgtaggacagcaggtcgttcgattagcgcggctggcacaagattgcggtatggacggagttgtatgttcgccgcttgaaatcgacttaattcgagaagcttgcggtcaagattttattcttgtagtgccgggtgttcgaccaacatgggcagctgcaggtgaccaaaaacgaatagctacaccctcagaggcaattgcccgtggtgcagactacctggtaataggaagaccaattacggctgccgatgaccccgttgcagcagcagtacgaattggcgaagaactggcggtggtctgag

SEQ ID NO: 276250 - DNA, 253 bp, Unknown
  Bacterial polypeptide expressing nucleotide sequence isolated from the Sargasso Sea
tttgacaacttctataaattccaaagaccggttaatttttgccctggatgtgccagataagagagaggcccaacgcttggtaaagctactgcatgattctgtcggctgctttaaagtgggactgcaattattcgtacaagaaggtcctgatattttaaaactaataaaagatcattcaacagcagatatttttctggacttgaaacttcatgatatccccgcaacggttcgtggggctttaaagtctgcggaa

SEQ ID NO: 276251 - DNA, 700 bp, Unknown
  Bacterial polypeptide expressing nucleotide sequence isolated from the Sargasso Sea
gatgagcataaagaacagcgaccgattgatttttgcagtggatgttccagaagtggagcaagccaaagatttggttacccaattgggctcaagtgtcgattttttcaaaattggcatggaattgatgatgaccggcgattactttgagctgcttgactggcttgtggagagagataaaaaggtctttgttgatttaaaactgtttgatgtgccagcaactgtttcaaaagccatcaaaaggttaagcaaaagaggcgcctacttcacaacaatccatggcaatcaaagcatgatggaagctgccgcgtcggaaaagggcgatttaaaggtattggctgtgacagcattaacaagcttagaccgaggggatttggatgacctagggtttgattgtgctgtcgaagatttggttatttcaagggccaggagggcttatgagtctggcgtagatggaatcgtggcctctggccttgaattaccaagcataaggaaagctctagaagataagattttaattgttacacctggaatccgacccgtggagaaccgacaaacagatgatcaaaaaagagtagtcaccgttgagcaagcattccaggatggcgcagactatatagttgttggccgaccaattcaaaacgcagacaaccccagaaaggctgcagagctgattcaggagagcatttctaactccttatag

SEQ ID NO: 276252 - DNA, 283 bp, Unknown
  Bacterial polypeptide expressing nucleotide sequence isolated from the Sargasso Sea
atgttgtcaaaaaaacttatagtagctctagatttttctagttttcaagaagtaaacgaatttataaaatatattgatccatcaaagtgcttagtaaaagttggccttcagctctatacctcttgtggtaataaagtgattgaactcctttcagaaaaggggtttgaaatttttctagatttgaaacttcacgatattcctaatactgttaaaaaaacaatcaacgagatttcaagcttaagtgttgtaatgactacaattcatttatctggtgagaaaagat

SEQ ID NO: 276253 - DNA, 334 bp, Unknown
  Bacterial polypeptide expressing nucleotide sequence isolated from the Sargasso Sea
atggaatctaagaaccggatatttgttgcactagatacaccagacttagaatatgcgctagccttgtctaaagatttattgggttttattggtggtgtaaaattaggcaaagaattttttacagctaatgggcttgatggtgtgaaaaaaatagcaaaatcaggcatgccaatctttcttgatcttaaatttcatgacatacctaacaccgttgcaggagcggtaaagtcatcattacaagtcaatccatcaattattactattcatgcgtctggaggcagagctatgctagaagcagccgcaaacatggtagaacaaaaacccgcccccaagc

SEQ ID NO: 276254 - DNA, 490 bp, Unknown
  Bacterial polypeptide expressing nucleotide sequence isolated from the Sargasso Sea
atgaataacagatttaattcagaagataaaataattttggcaattgatggattagatttaagtcaagcaaaattacttttggaaaaatgtccaaatattaagtgggttaaagttggtttagaactttttgttagggaaggtccaagagttattgaaatattaaaaggttttaataaaaaaatttttttagacctaaaatttcatgatattccaaataccatgcttgcagcatgtttccaagtttcaaaattaggggttgatataatttctattcatgcttcagcaggtttaaaagctcttaaggattcgaaaaaagcatctttagaaggagccacctcagtcagagtaaaacctccattagttgtaggaataactgttttaacaagcttttctcttaaagattttcaaactgatcttgatagaaataattcaattgaggaaaatgtattgagacttgcaaagttgtcttttgatgctggattagatggat

SEQ ID NO: 276255 - DNA, 343 bp, Unknown
  Bacterial polypeptide expressing nucleotide sequence isolated from the Sargasso Sea
atgaataacagatttaattcggaggataaaataatattggcaattgatggattagatgtaagtcaagcaaaattacttttggaaaaatgtccaaatattaagtgggtgaaagttggtttagaactttttgttagggaaggtccgagggttattgaaatattaaaaggtttaaataaaaaaatttttttagacttaaaatttcatgatattccaaataccatgcgagcagcatgtttccaagtttcaaaattaggggttgatataatttctatccatgcttcagcaggtttaaaagctcttaaggattccaaaaaagcatctttagaaggagccacctcagtca

SEQ ID NO: 276256 - DNA, 380 bp, Unknown
  Bacterial polypeptide expressing nucleotide sequence isolated from the Sargasso Sea
gatgacaaataaagtaattgttgcattagataataaaaatctaaaacaaataatagctctagttaaaaaaactaaatcagaggcatttggttttaaaattggcaaagaatttttttacaattatgggattgaaggttacaaaaagatttataaactttctcctaatatatttttagatcttaaattacacgatataccaaatacagtggaaaaggcacttaaagctataattaaattaaatccactttttaccacaattcatataagtggtggtgatgatatgcaaaaaacttcatcaaaaataaaaagaaacagaacaaaaatacttggggtaacaatacttaccagtttaaatagtgtacaaacaaaaaaatatttta

SEQ ID NO: 276257 - DNA, 469 bp, Unknown
  Bacterial polypeptide expressing nucleotide sequence isolated from the Sargasso Sea
atgaatttaaaaaaaattattattgctttagatagtgataattttaatgaaactttatcaattgttaaaaatttaaaaaatgatgcctttgcatttaaaattggatatgagttttttttaaattttggtataagtggatacaaggctatcaaaaaagaaaatgccaatatttttttagatttaaaattacatgatattccgaatactgtagctaatgggattaaagcaatttcaaagttagagccatattttacaactattcatttatcagggggagacgaaatgcaaaaaatttcctcgtactttaaaatgaatactaagattctaggtgtatcaattttaacaagtcttgattcaaaacaaactaaaaaatattataataataatgttgaggaaatagtttcaaattttgcaaaaaatgcacttattaacaaacttgatggaatagtgtgtagccctaaagaaatta

SEQ ID NO: 276258 - DNA, 455 bp, Unknown
  Bacterial polypeptide expressing nucleotide sequence isolated from the Sargasso Sea
caatacagtggcaaattctgttagaaagatttctaattttaatgtttctcttactacaattcatcttaacggcggcaaagatatgattgaagcagcctcatcagaaaaaggaaatataaaaatccttggagttagcatacttacaagcttgtctaagagtgacatttttgaaataactcacacagaattcgatgcttattttaataatttaatatctatggcttctaacacgaatatagatggagtagtttgttctccaaatgaactgattaaactgaagaattttaaaaagctaaaggttgttcctggtataagaaatgatatttcaaatgatgatcagaaaagagtcatgagctcaatggaagcttatgaaaaaggcgctgactatattgtcgttggaagacctataactaaatcagaggatccaagaaaagctttggagcttttcttatgaa

SEQ ID NO: 276259 - DNA, 757 bp, Unknown
  Bacterial polypeptide expressing nucleotide sequence isolated from the Sargasso Sea
tttcaaaaaaacttttttatgcttaggattagatactgatatagataaaatccctaagcacttattaaactcacaggatcctgtttttgattttaataaatcattaattgatcgactctcatcaaaaatagttgccgtaaaaatcaatacagctttttatgagtcaagaggaaaagatggatggtcatcgcttgaaaaatctattgattacattaaatcaaatcatccagatttatttacgattgcagatgcaaaacgggctgatataggaaatacatctgaaatgtatgcaaaagcattttttgaaaaaatgaattttgattcaataactctatcaccatacatgggtgaagattcagtaagagagtttttgaaatatgatgataaatacgcaatcctacttgcacttacctcaaatcatggggcaaatgattttcaaatgcctaatgatttatttttagatgttatatctaaatcccaaaactggaataattctcaaaaattaatgtatgttgttggagctacaaaatcggattatcttttgaaaattcgggatatagtaaaagataatttcttactaattcctggcattggaacacaaggtggtaatcttcaacaaacaattaaaaattcaactaagtataataaaagaatattgattaatatgtctcgggcaattatttatgctagcaatgattttaaatatcttgatgctgcagagaaagttattgatgattttaatttaaaatctttttaa

SEQ ID NO: 276260 - DNA, 675 bp, Unknown
  Bacterial polypeptide expressing nucleotide sequence isolated from the Sargasso Sea
aatgaaaaaaaaaagtaaattaatatttgtagcttgtgatacatctaacattaatcaagtaaaaaaaataattaataacataaaaaatgatgaacttaaaattattcctaaatttggtttgcaatttttttattcaaaaaatggtagatcatttctaaaaaaaataaaaagagatttttggctcgatgtaaaaatttcagatattcctcaaactgctttctcagcaattgagagtttaaaagatttaaagaaatgcaagtatattacagttcatgctagtggtggattagaaatgcttaaggcagtaaaaaaaaaagtaaaaaaaataaataataatattaaaattcttggagtgacaattttaactagtttaaataacaaatcattaaaagaaattggatatacagataatgttgataagatagttttaaaacaaacaaatctaattgtaaaaagtggttgtgatggagttgtttgttcagcaaaggaagctagattaataagaaagaagtataaaaatttattcattgtaactcctggaataagacttcctggagacagtaaaaatgatcagtctagagtagttaccccttatgaagctctagtaaagaatcaagtatcaggaattgtaattggtagatctttaattttaggtaatataaaaaaaaatattaa

SEQ ID NO: 276261 - DNA, 637 bp, Unknown
  Bacterial polypeptide expressing nucleotide sequence isolated from the Sargasso Sea
caaagatttggtcacccaactgggcccaagtgtggattttttcaaaattggcatggaattgatgatgacgggagattattttgagttgcttgactggcttgtggagagagacaaaaaggtctttgttgatttaaaactatttgatgttccagcaactgtttcaaaagccatcaaacgattaagcaaaagaggtgcttactttacaacaattcatggaaatcaaagcatgatggaagctgccgcagcagaaaaaggcgatttaaaagtattggctgtgacagcattaacaagtttggaccgaggggatctggatgacctggggtttgattgtgccgttgaggatttggttatttcaagagctaagagagcttacgagtctggcgtagatggaatcgtggcttctggtctagaattgccaagcatcagaaaagctgtcgaagacaagattttaattgttacgcctggaatccggcctgtggagaatcgtcaaacagatgatcaaaaaagagtggtcaccgttgaacgagcattccagtatggtgcagactatatagttgttggccgaccaattcaaaacgcagacaaccccagagaggcagcagaactgattcaggagagtatttctaattccatatag

SEQ ID NO: 276262 - DNA, 562 bp, Unknown
  Bacterial polypeptide expressing nucleotide sequence isolated from the Sargasso Sea
cgtgagcaggggctgcgggtgttttttggatctcaaatttcacgacatcccgttcaccatggcgggggcctgtcggcgggcggcggcgctgggggcggagctaattacggtgcatgcctgcgccggcagtgaggcgttgcaggcggcccaggccgcggcggtggagggggctcagagtgcaggactggccactccaactctgctggcggtgacggtgctcactagctgggaggagcagcgactgcaacgagaactagccattgcccagggcatcggcgaacgggtgccagcgttggcgcagctgtcggcaaccgtcggcatcggtggctgtgtgtgttcaccgctggaggccgcggcattgcgggcccaacaccccgagccgtttgccttggtgacgccgggaattcgccaccaaggagtggcagtgggcgaccaggcccgggtgatgggaccggcggaggcgatcgcagccggcgcgagccagctggtgatcggccggccgatcaccaaagccggagatcccagcgctgcgtttgcgctgtgttgcggcgagctcgtttga

SEQ ID NO: 276263 - DNA, 358 bp, Unknown
  Bacterial polypeptide expressing nucleotide sequence isolated from the Sargasso Sea
acttaagatactactggttactgttctgacaagtatatcaaattcatctattaaaaagataggtcatacaaaatcaataaaagaattagtaaaaaaacaagcgctccttgctaaaacatgcggttgtcatggaattgtttgtgcgggacctgatttaaaatctgtaaaaaaaatatttaaaggtgaaatagttactccgggtattcgtcttaaaggtgatagtgctggggatcaaaaaagagtgatcggacctaaagaagcttttaaaaatggaagcacagctcttgttatgggaagatctattattaaagggaatatcaagaataatatttctagattgattaaagaattaaagtaa

SEQ ID NO: 276264 - DNA, 227 bp, Unknown
  Bacterial polypeptide expressing nucleotide sequence isolated from the Sargasso Sea
cacgaatatagatggagtagtttgttctccaaatgaactgattaaactgaagaattttaaaaagctaaaggttgttcctggtataagaaatgatatttcaaatgatgatcagaaaagagtcatgagctcaacggaagcttatgaaaaaggcgctgactatattgttgttggaagacctataactaaatcagaggatccaagaaaagccttggagcttttcttatgaa

SEQ ID NO: 276265 - DNA, 694 bp, Unknown
  Bacterial polypeptide expressing nucleotide sequence isolated from the Sargasso Sea
gatgaaacataaaaacatttttattgcttgtgatacttctaatttaagtgaaataaaaaaaattataaaacaaacccaaacaaacaagctcaaagttatccctaaatttggcttacaatttttttactcaaaaaatggaagaaaatttttagaaaatttcaagaaagatttttggcttgatttaaaaattaatgatattccccaaacagcattatctgcattagatagtttaaaagatctaaaaaaatgtaagtatataactgtccatgcaaatggaggttttgagatgttaaaggctattaaaaagaaggctaaatcaattaataaaaatttaaaagtacttggagtgacaattcttacaagtctaaataagaaatcacttaaagaaataggacacacaaaatctgttgaacaattagtattaaaacaagctggattgattaaaaaatcaggttgtgatggtatcgtttgctctgcacaagaagcaaaattggttcgaaaaaaatacaaaaacttatttattgtcacccctggaataagattacctggagatagtttaaacgatcaatcaagaataatgacccctaaagatgctttcaagaataaagtctctggaatagtaataggcaggtcgttaataaaaggaaatatcaaaaagaatactcaaagattaattgaccatttaaataaatga

SEQ ID NO: 276266 - DNA, 346 bp, Unknown
  Bacterial polypeptide expressing nucleotide sequence isolated from the Sargasso Sea
tttggaccgaggtgatttggatgacttggggtttgattgtgctgttgaggatttggttatttcaagagctaggagagcttatgagtctggcgtagatggaatcgtggcctctggtctagaattaccaagcatcaggaaatctctcaaagacaagattttaattgttacacctggaattcggcctgtggagaatcgacaaacagatgatcaaaaaagagtagtcactgttgaacgagcattccaggatggtgcagactatatagttgttggccgaccaattcaaaatgcagacaaccctagagaggcggcagagctgattcaggagagtatttccaattccatatag

SEQ ID NO: 276267 - DNA, 568 bp, Unknown
  Bacterial polypeptide expressing nucleotide sequence isolated from the Sargasso Sea
aatgatcatagtagcaattgatgaaaataattttaaaaaggcctcagagcttataaataaacttgatcctaaaaaatgtatggtaaagattgggagtgttgcattcaattccattggacatgaaataatctattacgcagcagaccatgggtttaaaatttttctcgatttaaaacttcatgacatacctaataccgttaaaaaatctattcaaggactggcttcactcccaataaaaatgcttacgattcatacctctggtggcaaagaaatgatgttggctgcaatggaggcaacctcagatacccaaataaaagtctttggtgttacggctttgacaagcctcagtgacgatgaaatagatgagatatttcaaagaacttcttcagagcaagtaaatgcaatgcttgatttagctgaatctgcaggtattgatggtattgtatgttcaccacacgaactcaagcttgttaaaaaaagaggcacacttttatcaattactcctggaataaggctgcaagattcaaatgatgatcaaaaaagagttatgactccaaaagaggcaata

SEQ ID NO: 276268 - DNA, 292 bp, Unknown
  Bacterial polypeptide expressing nucleotide sequence isolated from the Sargasso Sea
gatgaaaaatagatttaattcagaagataaaataatattggctattgatggattagatgtaagtcaagcaaaattacttttggaaaaatgtcctaatattaagtgggttaaagttggtttagaactttttgttagggaaggtccaagtgttattgaaatattaaaaggtttaaataaaagaatttttttagacttaaaatttcatgatattccaaataccatgcgtgcagcatgtttccaagtttcaaaattaggggttgatataatttctattcatgcttcggcaggttta

SEQ ID NO: 276269 - DNA, 316 bp, Unknown
  Bacterial polypeptide expressing nucleotide sequence isolated from the Sargasso Sea
attgattgggaatttattgtgtctatattattttaatttattaatgaaaggaaaaactatgaactttgttggaacaacaacatatgaaggaactaaaaaagatgcagatgaattatacagtatatttaaagatgatcttgcaaaatgtacttcatcatttgaatgggcacacattcgtgaaggtaaaatgatttttattgcaaatgtcactgatgaggaaaaattttatgccttatttgaagatcaaagatctaaagactggaacgcaaagtttaatgctaaagatgaagcttggaaacttgagaaaataatgtaa

SEQ ID NO: 276270 - DNA, 316 bp, Unknown
  Bacterial polypeptide expressing nucleotide sequence isolated from the Sargasso Sea
attgattgggaatttattgtgtctatattattttaatttattaatgaaaggaaaaactatgaactttgttggaacaacaacatatgaaggaactaaaaaagatgcagatgaattatacagtatatttaaagatgatcttgcaaaatgtacttcatcatttgaatgggcacacattcgtgaaggtaaaatgatttttattgcaaatgtcactgatgaagaaaaattttatgccttatttgaagatcaaagatctaaagactggaacgcaaagtttaatgctaaagatgaagcttggaaacttgagaaaataatgtaa

SEQ ID NO: 276271 - DNA, 907 bp, Unknown
  Bacterial polypeptide expressing nucleotide sequence isolated from the Sargasso Sea
tgcgggtctgcagacatgcttgagcaattggcagaacgcgtaccaggtgcaaacgttacacttcgaattaatcctggttttggacatggtcatagccagaaaactaatacaggaggcgaaggctccaagcatggcatctggcatgaaaccatacctgatgttcttcaacgcgcggagtgggctggactcgcggttaatggtctccacatgcacattggcagcggtgctgacttagaccatctcgccacggttgcagaatctctcgaaaagacagcacacgacattggtcgttccctgacaacaataagcgccggcggaggacttccggtcccttatcagaaacatgaacgccgagctgacctggcggaatacttcaagctatgggatgccaccagaaagcgtctcgaagattcctttggtcatcgaattcgcctcgagattgagcctgggcggtacctaactgctgagtccggcattctggtcactgaagtacgggcggtgaagcgacaaggttcaaaaaagtatcttttggttgatgcaggctttcatactcttgcccgaccggtgctgtatggctcgtatcacccaatgagtctctgcccaacatctacgacacctccgcacgaacttgaagccgtcgcaataggtggcccactctgtgaatccggtgacatctttacgcagaaagagggcggttttgtgtcgactcgcgacctcccccctgcccgtgtaggtgaccttctcattattgaggttgccggtgcttacggattcgtcatggcgagcaactacaactcaaaaccttttcctgctgaagtcctcatcgacggtggcacatcgcaacttgttcgggcgaggcagactgcagaagagctattctctggtgagtctcttccacaggaataaa

SEQ ID NO: 276272 - DNA, 730 bp, Unknown
  Bacterial polypeptide expressing nucleotide sequence isolated from the Sargasso Sea
gatgaataacagatttaattcggaggataaaataatattggcaattgatggattagatgtaagtcaagcaaaattacttttggaaaaatgtcctaatattaagtgggtgaaagttggtttagaactttttgttagggaaggtccgagggttattgaaatattaaaaggtttaaataaaaaaatttttttagacttaaaatttcatgatattccaaataccatgcgagcagcatgtttccaagtttcaaaattaggggttgatataatttctattcatgcttcagcaggtttaaaagctcttaaggattccaaaaaagcatctttagaaggagccacctcagtcagtgtaaaacctccattggttataggaataactgttttaacaagcttttctcttaaagattttcaaactgatcttgatagaaataattcaattgaagaaaatgtattgagacttgcaaagttgtcttttgatgccggattagatggatgtgtttgttccccttgggaggtaaaaatgttgagatctatttataaggataattttgaacttattacaccaggtatcagattaaatattgataataaagatgatcaaaatagaattatgactccctatgaagctatagataatggcgcttcaaagttagtcattggcagatcaatttcaaaagctatagatcctaataaatctctaatagaaatatttaaatctattgagtctgattaa

SEQ ID NO: 276273 - DNA, 664 bp, Unknown
  Bacterial polypeptide expressing nucleotide sequence isolated from the Sargasso Sea
aatgattattgtagcaattgacgaaattaccttcgaaaaagcatcagaaataataaataatttggatcctaaaaaatgcattgtcaaaatcggtagcgtcgcttttaattctataggtcataaaattatttcatatgcagctaataaagatttcgatatatttcttgatttaaagcttcatgacatacctaatacagttaaaaaatctattcaagggttagctacactaccaattaaaatgcttacgattcatacttctggtggaaaagatatgatgatggccgcaatggaggcagcctcaaggactaaaataaaagtctttggagttacagctttgacaagtctcagtgatgatgaaacaaatgaaatatttcaaagaacctcttcagagcaagtaaatgtaatgcttgatttagctgaatcagcaggcattgatggtattgtttgttcaccacacgaactcaagcttgtcaaaaaaagaggcacacttttatcaattactcctggcattagactaaaagattcaaatgatgatcaaaaaagagttatgaccccgaaagaggcaataaaacttggcgcagattttcttgtaattggaagacctattacagaggctgaaaatatcggtgaggctttaaacgagatttttcaaaatatatcatga

SEQ ID NO: 276274 - DNA, 700 bp, Unknown
  Bacterial polypeptide expressing nucleotide sequence isolated from the Sargasso Sea
atgagtataaagaacagtgaccgattgatttttgcagtggatgtaccagaggtagaacaagccaaagatttggtcacccaactgggcccaagtgtggattttttcaaaattggcatggaattgatgatgacgggagattattttgagttgcttgactggcttgtggagagagacaaaaaggtctttgttgatttaaaactatttgatgttccagcaactgtttcaaaagccatcaaacgattaagcaaaagaggtgcttactttacgacaattcatggcaatcaaagcatgatggaagctgctgcggcagaaaaaggcgatttaaaagtattggctgtgactgcattaacaagtttggaccgaggggatttggatgacctagggtttgattgtgcagtggaggatttggttatttcaagggctaggagagcttatgagtctggcgtggatggaatcgtggcctctggccttgaattgccaagcatcaggaaagctgttgaagacaagattttaattgttacacctggaatccggcctgtggagaatagacaaacagatgatcaaaaaagagtggtcaccgttgaacgagcattccaagatggtgcagactatatagttgttggccgaccgattcaaaacgcagacaatcccagagaggcggcagagctgattcaggagagtatttctaattccatataga

SEQ ID NO: 276275 - DNA, 700 bp, Unknown
  Bacterial polypeptide expressing nucleotide sequence isolated from the Sargasso Sea
gatgagcataaagaacagtgaccgattgatttttgcagtggatgttccagaggtagaacaagccaaagatttggtcacccaactgggcccaagtgtggattttttcaaaattggcatggaattgatgatgacgggagattattttgagttgcttgattggcttgtggagagagacaaaaaagtctttgtcgatttaaaactatttgatgttccagcaactgtttcaaaagccatcaaaaggttgagcaaaagaggtgcttactttacaacaattcatggcaatcaaagcatgatggaagctgccgcggcagaaaaaggcgatttaaaagtattggctgtgactgcattaacaagtttggaccgaggggatttggatgacttggggtttgattgtgccgttgaggatttggttatttcaagagctaggagagcttacgagtctggcgtagatggaatcgtggcctctggtctagaattaccaagcatcagaaaagctgtcgaagataagattttaattgttacgcctggaatccggcctgtggagaatcgacaaacagatgatcaaaaaagagtggtcaccgttgaacgagcattccaggatggtgcagactatatagttgttggccgaccaattcaaaacgcagacaaccccagagaggcggcagaactgattcaggagagtatttctaattccatatag

SEQ ID NO: 276276 - DNA, 700 bp, Unknown
  Bacterial polypeptide expressing nucleotide sequence isolated from the Sargasso Sea
gatgagcataaagaacagcgaccgattgatttttgcagtggatgttcctgaaatggagcaagccaaagatttggttacccaattgggctcaagtgtcgattttttcaaaattggcatggaattgatgatgaccggcgattactttgagctgcttgactggcttgtggagagagacaaaaaggtctttgttgatttaaaactatttgatgtgccagcaactgtttcaaaagccatcaaaaggttaagcaaaagaggcgcttactttacaacaatccatggcaatcaaagcatgatggaagctgccgcgtcggaaaagggcgatttaaaggtattggctgtgacagcattaacaagcttagaccgaggggatttggatgacctagggtttgattgtgctgtcgaagatttggttatttcaagggccaggagggcttatgagtcaggcgtagatggaatcgtggcttctggccttgagttaccaagcatcaggaaagctctagaagataagattttaattgtaacacctggaatcagacccgtggaaaatcgacaaacagatgatcaaaaaagagtagtcactgtagaacaagcattccaggatggcgcagactatatagttgttggccgaccaattcaaaatgcagataaccccagaaaggctgcagagcttattcaggagagcatttctaactccttatag

SEQ ID NO: 276277 - DNA, 709 bp, Unknown
  Bacterial polypeptide expressing nucleotide sequence isolated from the Sargasso Sea
atgaaaaaatttaaatcttttatagccctagatctaaaatcaaatactcaaaatattactcttgttaaaaaattatacccccacgtttatggttttaaagtggggtatagatctttttataatagacgcttaaaggagcttatttcagaaatcaaaaggtcgaaatgtaaattattccttgatttaaaacttcacgatattccgaacactgttagcagtgctatagattctttatcgaccataaatcctgattatcttaccttgcatatatcaggaggtgaagagatgatgaaagctgcattaaaatctattaagaaaaataaacttaaaactaaaatcttaggggtaaccttattgacgagcttagatgggaaagatagcaaaaaaatattcaaagagggaaatacaaaagaacttgtaaaaaaatttactgaaatcgctaataatgtaaatattcatggccttatttgctcaggtgatgacctaagagttttaggaaaatttaataaattaattaaaataacacctggcgttaaaatgtttgctagaaatgatgatcaaaaaagagttgcttttgctcataatgctttacaaaatggtgcaagctttgttgtaataggaagagaattaatagaaaacaaaaaaccattagaattattaaaaaaatatggcgaacaacataaaaataaaaatttgtggacaaaataat

SEQ ID NO: 276278 - DNA, 709 bp, Unknown
  Bacterial polypeptide expressing nucleotide sequence isolated from the Sargasso Sea
gtagcagcatttaaacctcaagttgctttctttgaggagtggggacccgaaggattatctcttttagcaaaaatttcaaagtttgcaaaagatttggatattccaattatcatggatgcaaaaagaggtgacattggttctacttctgtagcttatgcaaatgcatggttgggggataattctcatttttatgcagatgcattaactgttaatccatggatgggaatagacactataagaccttttattgaagttgctaaaaaagaaagtaagggtgtttttattttactaaaaacatctaacccgggatcaaaagatattcaaagcctcgaagtaaatggcgaaagtatatttctaaaaatatcaaaattaataaaagaaaacttacctcttaatttaggaaaatctggttatagcaatattggcgttgtagtaggtgctactaaacctaaagaggctgagttaataagacaaatccttcctagtcatttatttttaattcctggatacggtgcacaaggaggcagtgctaaagacgctttttcaggactaattttgagtaaaaatatttatgaaggaggattaattaattcttcaagagcaattcttttccctgaaaaatcaaaaaaatacaatagtatttatgaatggagagagagtgtcataatggcattaaacaaagcgaaaaacgaccttatgattaattaaa

SEQ ID NO: 276279 - DNA, 700 bp, Unknown
  Bacterial polypeptide expressing nucleotide sequence isolated from the Sargasso Sea
atgagcataaagaacagcgaccgattgatttttgcagtggatgttcctgaagtggagcaagccaaagatttggttacccaattgggctcaagtgtcgattttttcaaaattggcatggaattgatgatgaccggcgattactttgagctgcttgactggcttgtggagagagacaaaaaggtctttgttgatttaaaactgtttgatgtgccagcaactgtttcaaaagccatcaaaaggttaagcaaaagaggcgcctactttacaacaatccatggcaatcaaagcatgatggaagctgccgcgtcggaaaagggcgatttaaaggtattggctgtgacagcattaacaagtttagaccgaggggatttggatgacctagggtttgattgtgctgtcgaagatttggttatttcaagggccaggagggcttatgagtctggcgtagatggaatcgtggcctctggccttgaattaccaagcatcaggaaagctctagaagataagattttaattgttacacctggaatccgacccgtggagaaccaacaaacagatgatcaaaaaagagtagtcaccgttgagcgagcattccaggatggcgcagactatatagttgttggccgaccaattcaaaacgcagacaaccccagaaaggctgcagagcttattcaggagagcatttctaactccttataga

SEQ ID NO: 276280 - DNA, 664 bp, Unknown
  Bacterial polypeptide expressing nucleotide sequence isolated from the Sargasso Sea
atgattgatgctaaaaaaattattgttgctttagattataataatattgaagacgcattaaaatttattgttgatatagatccaagtctttgtaggctcaaaattgggaaagaactttttacaaagtatggtcctaaaactatactggaactccacgataagggttttgaagtctttctggatttaaaatttcatgatattccaactacagtttataaagcctgtatttctgctctttcattaaatgtttggatgttaaatattcatttgtctggtggttgtgaaatggctattgcagcgatgaatgcaaagaaggactgtcaatctgattcaaaagtgataggagttactgcattaactagcttaactgatgatgattgtataagaatttatggttgcaaaagatctgagcaattaaaaagattaaaagatatcggcctagatgccaatgtggatggctttgtctgttcaccatatgatattaatattcttagaacagataataaaatatttgtaacacctgggataagaactgatggcaatgccaatgatcatcataaagttattactccacaagaagcactaaaactaggctccaattatttagttataggaagaagtgttactgagagttcaaatccaaataaagaaataaagagaatta

SEQ ID NO: 276281 - DNA, 304 bp, Unknown
  Bacterial polypeptide expressing nucleotide sequence isolated from the Sargasso Sea
aatgatcatagtagcaattgatgaaaataattttaaaaaagcctcagagcttataaataaacttgatcctaagaaatgtatggtaaagattgggagtgttgcatttaactctattggacatgaaataatctattacgcagcagagcatgggtttaaaatttttctcgatttaaagcttcatgacatacctaataccgttaaaaaatctattcaaggactgtcttcactaccaataaaaatgcttacaattcatacctctggtggcaaagatatgatgatggctgcaatggaagcagcatcaagg

SEQ ID NO: 276282 - DNA, 591 bp, Unknown
  Bacterial polypeptide expressing nucleotide sequence isolated from the Sargasso Sea
aggtggtggcccagctgcgggagcaggggttgcggtttttcctggatctcaaatttcacgacatccccgcgacgatggtaggagcctgccagagggcggcggcgttgggggcggagctgatcacggtgcatgcctgcgccggcagtgaagcgctcaaggcggcccaggccgcggcggtggagggggcccagcaggctggtcttaatctgcccacgctgctggcggtgacggtgctcaccagctgggaggagcagcgactgcaacgggaactcgccattcagcaatccattggcgagcgggtgccggcgttggcgcagctctcggcaacggcaggcatcggtggttgtgtctgttcgccgctggaggccgcggcattgcggggccagcagcccgaaccgtttgccctggtcacgccgggaattcgcccccaaggtgctgcggtaggcgatcaggcccgggtgatgggaccggccgaggcgatcgcggccggcgcgagccagctggtgatcggacggccgatcaccagggcggaagaccccagcgctgcctttgcggcctgttgcgcccagttgccgggatcgattgattgat

SEQ ID NO: 276283 - DNA, 700 bp, Unknown
  Bacterial polypeptide expressing nucleotide sequence isolated from the Sargasso Sea
atgagtataaagaacagtgaccgattgatttttgcagtggatgttccagaggtagaacaagccaaagatttggtcaaccaactgggccaaagtgtggattttttcaaaattggcatggaattgatgatgacgggagattattttgagttgcttgactggcttgtggagagagacaaaaaggtctttgttgatttaaaactatttgatgttccagcaactgtttcaaaagccatcaaaaggttaagcaaaagaggtgcttactttacaacaattcatggaaatcaaagcatgatggaagctgccgcggcagaaaaaggcgatttaaaactattggctgtgactgcattaacaagtttggaccgaggggatttggatgatctggggtttgattgtgccgttgaggatttggttatttcaagagctaagagagcttacgagtctggtgtggatggaatcgtggcctctggtctagaattgccaagcatcagaaaagctgtcgaagacaagattttaattgttacgcctggaatccggcctgtggagaatcgtcaaacagatgatcaaaaaagagtggtcaccgtagaacgagcattccaggatggtgcagactatatagttgttggccgaccaattcaaaacgcagacaaccccagagaggctgcagaactgattcaggagagtatttctaattccatataga

SEQ ID NO: 276284 - DNA, 397 bp, Unknown
  Bacterial polypeptide expressing nucleotide sequence isolated from the Sargasso Sea
aatgaataataaaataattgttgctttagatagcaacaatttaaaaaaaattaaatccctagtttcaaaattgcgaagtgaagtatatgcttttaaaattggttatgaattttttttaaattttggaattaatggatataatgaaattaaaaagatttgtcctaatatttttcttgatctaaaattgcatgatatccctaatacagttgaaaaaggaattaaagcaattgaaaaattatctcctaaatttacaacaatacatatttctggaggtgatgaaatgcaaaaatcaacacattcaaaaaaaaataggaaacttaaaatacttggggtttcaatattaacaagcttaaactcattacaaacaaaaaaatattataatgaggctaatgttgaa

SEQ ID NO: 276285 - DNA, 778 bp, Unknown
  Bacterial polypeptide expressing nucleotide sequence isolated from the Sargasso Sea
gatgctgatcgccgccgacatcggaaataccaatatcgtcatcggctttttcaaagacgggaattttctcttcagccgcagacttcataccagaccaccccagagtgtcgatgaatatgagatgcttttgcggggtatgcttttcgcatttaatgaagacctcgatactgcagaaagtggagttttggcttcggtggtaccagaattgaccggggtttttgttgagttgttcgaacgaatcaccggtcaaaaacctctgatcgtggatcacgcgctcaagctcggcatccggatcgaaacggattttccggagaaagtaggccatgacaggatcgctaatgcggttgcggcctatcaccagcatgggacttcactaattgtgatcgattgcgggaccgccaccacttttgatgtgatccgttcagatggagtcttcgagggaggattgatctgtccgggaatgctgatttcagcagaggctctctattccagggcagcccaactctttcaggtcaacctggacaaacctgaacagttgatcgggaagaatacgacggaaagcatgcagtccggaatctttaacggatactgcgcgatgatcgaggccttggtggtgaaaattacagaggatttgaggaaacgaaaccaacccgaaccgaaagtgatcattaccggcggacatgcaacaaaaatcagtgaatatttgccggatgcggcaattgaggaaaatttgactttaacagggttatctcttatccatttattaaatcagaaatga

SEQ ID NO: 276286 - DNA, 644 bp, Unknown
  Bacterial polypeptide expressing nucleotide sequence isolated from the Sargasso Sea
cgaaatagacttgataaaggcatcgataattatagataaccttgatcctgaaaaatgtatggtcaaaattgggagtatatcttttaattcaattggtaaggacataatctattatgcagcagaaaaaggttttgatatttttctagacttaaaacttcatgatattccaactacagtcaagaaaactattcaaggtttatctttattaccaatttcaatgctcaccattcatacttcgggtggaaaagatatgatgttatctgctatggaggcagtaaaaaactcaaaaataaaagtttttggagtgactgctttaacaagtttaagtgatgaagacacattaagtatatttaagaggactacatctgatcaggtaaatgctatgcttgatatagctgagttggctggtattgatggtgttgtgtgttcacctcatgaattaaaactagttaattcaagacaatctttattagctataacaccaggaataagaatcaaagatttaaaagatgatcaaaaaagagtaatgaccccaaaagaagcaattaaaatgggctcagatttcatagttattggacgaccaataaccctctcttcagatattagtaaatcactaaatgaggtttatgagagtattcaatgaa

SEQ ID NO: 276287 - DNA, 316 bp, Unknown
  Bacterial polypeptide expressing nucleotide sequence isolated from the Sargasso Sea
atgataattgttgccatagatgaaactacttttgaaaaagcagcagatgtcataaataaacttgatcctaaaatttgcatggtgaaaataggtagcgtcgcttttaattctataggtcataaaattattttgtacgcagctaataaagatttcgatatatttctcgatttaaagcttcatgacatacctaatactgttaaaaaatctattcaaggactggcttcactaccaataaaaatgctaacaattcatacctctggtggcaaagatataatgatggctgcaatggaggcaacctcaggaactcaaataaaag

SEQ ID NO: 276288 - DNA, 676 bp, Unknown
  Bacterial polypeptide expressing nucleotide sequence isolated from the Sargasso Sea
atgaagagtaagatatttatagcatgtgacacaactagcgtttcaaaagttaaaaaaataataaaaaatacacaaacatcaaaattgaaaattggttacaaatttggactagagtttttaaactctaaaaatggaagaaagtttttatctaaactaaataatcaaattacatttggagattataaattttcagatattcctaacacttgtttttcagcagtaaaagctattaaagatcttaaatttaattattacactatgcacattagctcaggcttagaggcgttaaaagcagctaaaaaggtttctggaaaaactaaaataatcggtatttcgattctaacttcacttgacaacaaagctttaaaagaaataggttacaataaagatgtaaaaaaattagtagtccatcaagctaaacttgcacaaaaagcaaagttggatgctatagtttgcagtgcacaagaggtaaaaatagtaagaaaagtttttaaaaaagaaattattacccctggaataagatttaatcctaacaaagataaaggagatcaaaaaagagttctgacacctaaagaagcattcaaaaatggcagtgattggttggtaattggaagacccattactaaaggaaatattaaaaataatattaaaaaattaattgatcatttaaactgat

SEQ ID NO: 276289 - DNA, 793 bp, Unknown
  Bacterial polypeptide expressing nucleotide sequence isolated from the Sargasso Sea
atgaacttaaatcaattagaagaaaatataatatcaaaaaaaacatttttatgtttaggtttagatactgatattgaaaaaataccaaagcatctcctgtcacaagatgatcccgtttttcagttcaataaattgttagttgataggctctctaataaaatagctgcagtaaagattaatactgctttttatgaggctaggggagttgatggctggaattctcttgaaaaaacaattaagtatattggagataatcatcctgatttatttactatagctgatgcaaaaagagctgatattggtaatacctcaaaaatgtatgcaaaagctttttttgagaagatgccatttcattctattaccttatctccttatatgggtcatgattccgtgacagaatttttaaattatgaaaataagtatactattctattagctctaacttcaaatgatggtgctgttgattttcagttacagaacgacttgtatttaagtgtagtatcagagtcccaaaaatggcaaaatgctgatagaattatgtatgttgttggtgcaactaagtctgattatttattgaaaattagaaatattagtgagaaaagctttttattaattcctggcgtaggaagtcaaggtggtgattttgaaaatgtaattttgaattcaacccaaaaaaataaaagaatacttgtaaatatttcaagagctataatttacgctggaaacgacgaaaactttctcgattcatctgaaaaagtggttgaccactataatagccgaacttcattttaaa

SEQ ID NO: 276290 - DNA, 709 bp, Unknown
  Bacterial polypeptide expressing nucleotide sequence isolated from the Sargasso Sea
aatgaaaaaatttaaatcttttatagccttagacctaaaatcaaatactcaaaatattagtattgttaagaaactataccgttatgtttatggttttaaagtggggtatagatctttttataataaccgttcaaatgaacttatttcagaaatcaaaaagtcgaaatgtaaattattccttgatttaaaacttcacgatattccaaacactgttagcagtgcgatagattctttatcgaacataaatcctgattttcttaccttgcatatatcaggaggtaaagagatgatgaaagctgcagtaaactctattaagaaaaataaacttaaaactaaaatcttaggagtaaccttattaacgagcttagatggaaaagatagcgaaaaaatttataaagagggtagtacaaaaaaacttgtaaaaaaatttactgaaattgctaataatgtgaatattcatggccttatttgctcaggtgatgacctgagagttttaagaaaatttaataaattaattaaaataacacctggtgttaaaatgtttgctagaaatgatgatcaaaaaagagttacttttgctcataatgctttacaagatggtgcaagctttgttgtaataggaagagaattaatagaaagcaaaaaacctttagaattattaaaaaaatatggcgaacaatataaaaataaaaatttgtggacaaaataa

SEQ ID NO: 276291 - DNA, 778 bp, Unknown
  Bacterial polypeptide expressing nucleotide sequence isolated from the Sargasso Sea
atgctgatcgccgccgacatcggaaataccaatatcgtcatcggctttttcaaagacgggaattttctcttcaaccgcagacttcataccggaccactccagagtgtcgatgaatatgagatgcttttgcggggtatgcttttcgcatttaatgaagacctcgatactgtagaaagtggagtcgtggcttcggtggtaccggaattgaccggggtttttattgagctgctgaaacgaatcaccggtcaaaagcctttgattgtggatcacgctctcaagctcggcatccggatcgaaacggattttccggagaaagtaggccatgacaggatcgccaatgcggttgcggcctatcaccagcatcggacttcactgattgtgatcgattgcgggaccgccaccacatttgacgtgatccgttcggatggaatcttcgagggaggattgatctgtccgggaatgctgatttcggcggaggctctctattccagggcggcccaactctttcaggtcaacctggacaaaccggaacagttgatagggaagaatactaccgaaagcatgcagtccggaatctttaacggatactgcgcgatgatcgaagccttggtggtgaaaattgcagaggatttgaggaaacgaaaccaacccaaaccgaaagtgatcatcaccggcggacatgcaacaaaaatcagtgaatatttgccggatgcggcaattgaggaaaatttgactttaacagggttatctcttatccatttattgaatcagaaatgaa

SEQ ID NO: 276292 - DNA, 730 bp, Unknown
  Bacterial polypeptide expressing nucleotide sequence isolated from the Sargasso Sea
gatgaataacagatttaattcggaagataaaataatattggcaattgatggattagatgtcagtcaagcaaaattacttttggaaaaatgtcctaacattaagtgggtgaaagttggtttagagctttttgttagggaaggaccaagaattattgaaatattaaaaggtttaaataaaaaaatttttttagacttaaaatttcatgatattccaaataccatgcgtgcagcatgtttccaaacttcaaaattaggggttgatataatttctattcatgcttcagcaggcttaaaagctcttaaggattcgaaaaaagcatctttagaaggagccacctcagtcagtgtgaaacctccattggttgtaggaataacagttttaacaagcttttctcttaaagattttcaaactgatcttgatagaaataattcaattgaagaaaatgtattaagacttgcaaagttgtcttttgatgccggactagatggatgtgtttgttccccttgggaggtaaataagttgagatctatttataaacataattttgaacttattacaccaggtatcagattacatattgacaataaagatgatcaaaatagaattatgactccccatgaagctatagataatggcgcttctaagttagtcattggcagatcaatttcaaaagctatagaccctaataaagctctaatagaaatatttaaatctattgattctgattaa

SEQ ID NO: 276293 - DNA, 304 bp, Unknown
  Bacterial polypeptide expressing nucleotide sequence isolated from the Sargasso Sea
atgacaaataggataattatacctttagatatggaatatacttcagcagttagtattgctgacaaacttgatcctaatatttgtagattaaaggtaggtaatcaattatttacttcttcgggcccaaaaatcgtaaagacgctgcatgataaggggtttgaaattttcttggaccttaaattccatgatattccaaatacagtctatgaatcagtcaggtcggcagctaacttaggggtatggatgataaatgttcatgcctcaggtggttcaaaaatgctggatgcttcgaaaaaggctcttg

SEQ ID NO: 276294 - DNA, 709 bp, Unknown
  Bacterial polypeptide expressing nucleotide sequence isolated from the Sargasso Sea
aatgaaaaaatttaaatctttcatagcgttagatctcaaatcaattactcaaaatattagtattgttaaaaaactatatcgccatgtttatggttttaaagtaggttatagggctttttataataatggttcaaacgagctaatttcagaaattaaaaagtcgaaatgtaaactattccttgatttaaaacttcatgatataccgaacacagttaagagtgcaatagactctttgtctaacattaatcccgattttcttaccttgcatatatcaggaggtaacgaaatgatgaaagctgcagtaaactctattaaaaaaaataaacttaaaactaaaattttaggtgtaacattattgacgagcttagatggaaaagatagtgaaaagatatataaagagaggaatacaagcaaacttgtaaaaaaatttgctcaaattgcaaataatgtaaacattcatggccttatttgttcaggtgatgacctgaaagttttaagaaaatataataaattaattaaaataacacctggtgtaaaaatgtttgctagaaatgatgatcaaaaaagagttacttttgctcataatgctttacaagatggtgcaagctttgttgtaataggcagagaattaatagaaagcaaaaaacccttagatttattaaaagaatatggcgaacaaaataaaaataaaaatttgtggacaaaataa

SEQ ID NO: 276295 - DNA, 408 bp, Unknown
  Bacterial polypeptide expressing nucleotide sequence isolated from the Sargasso Sea
aatgataattgtagcaatagatgaaactgagttagatcaattaaaatatattgttgactctcttgataatagaaaatgcatgttgaagattggtagtgtttcttttaattcaattggtcaggcaagtattatgtatgcatctgagaaaggttttgatatttttctagatttaaaacttcatgatattccaaatactgtaaaaaaatctatcgaaagcctgacttcattacctataaaaatgctaaccgtccatacatctggcggaaaagatatgatgtcagctgcaatggaagctgtttcaggaacaggtataaaagtttttggagtaacagttttgactagtctcagcgatcaggatactgctgctatcttcaataaaatgtcgtctgaacaagtagaggcaatgtt

SEQ ID NO: 276296 - DNA, 286 bp, Unknown
  Bacterial polypeptide expressing nucleotide sequence isolated from the Sargasso Sea
tttgatacgcatacagaattcgatacttattttaataatttaatatctattgcttctaacacgaatattgatggagttgtttgttccccaaatgaactcgataaactgaagaattttaataagcttaaggttgttcctggtataagaaaagatatttcagatgatgatcagaaaagagtgatgagtcctatcgaagcatataaaaagggtgctgattttattgttgttggaagacctataactaaatcagaggatccaagaaaagctttggagcttttcttatgaa

SEQ ID NO: 276297 - DNA, 262 bp, Unknown
  Bacterial polypeptide expressing nucleotide sequence isolated from the Sargasso Sea
gatgaataacagatttaattcagaagataaaataatcttggcaatggatggattagatttaagtcaagcaaaattacttttggagaaatgtcccaatattaagtgggtgaaagtgggtttagagctttttgttagggaaggtccaagagtgattgaaatattaaaaggtttaaataaaaaaatttttttagacttaaaatttcatgatattccaaataccatgcgtgcagcatgttaccaagtttcaaaaattaggggttga

SEQ ID NO: 276298 - DNA, 301 bp, Unknown
  Bacterial polypeptide expressing nucleotide sequence isolated from the Sargasso Sea
attgtgtctatattattttaatttaataaagaaaggaataactatgaactttgttggaacaacaacatatgaaggaactaaaaaagatgcagatgaattatacagtatgtttaaagatgatcttgcaaaatgcacgtcatcatttgaatgggcacacattcgtgaaggtaaaatgatttttattgcaaatgtcactgatgaagaaaaattttatgccttatttgaagatcaaagatctaaagattggaacgcaaagtttaatgctaaagatgaagcttggaaacttgagaaaataatgtaa

SEQ ID NO: 276299 - DNA, 259 bp, Unknown
  Bacterial polypeptide expressing nucleotide sequence isolated from the Sargasso Sea
tatgaattttgttggaacaacaacttatgaaggaactaaaaaagatgctgacgaattatataatatgtttaaagatgatcttgcaaaatgcacgtcatcatttgaatgggcacacattcgtgagggtaaaatgatttttattgcaaatgtcactgatgaagaaaaattttatggcttatttgaagatcaaagatctaaagactggaacgcaaagtttaatgctaaagatgaagcttggaaacttgaaaaaataatgtaa

SEQ ID NO: 276300 - DNA, 442 bp, Unknown
  Bacterial polypeptide expressing nucleotide sequence isolated from the Sargasso Sea
aatgtcagttaaacctattttctttgcattggatggtaaagagctaagcgaatttacagaaacccttgaaaaactgaaaggtgtgatttatggagtaaaagttggattagaaatgtttactgccgaaggcccttcttcagttgaaaaactaaaaaatgatggttggaaagtatttttagatcttaaattacacgatatcccaaacactgtacaagcagcaacagtaagtgcaggtaatattggtgctgattatttgactattcatatagcatcagaaaaagaagctttgcttgcagcaagtgaaaataaaacagataatattaaactcctcggtgttagtagtgctctaacaagtaaggcaatggatgaagaaactagtaataaggttgaaaaagattttatagttgcgaaagaatcaggaattgatggtgttatctgtcca

SEQ ID NO: 276301 - DNA, 291 bp, Unknown
  Bacterial polypeptide expressing nucleotide sequence isolated from the Sargasso Sea
gatgtcagttaaaccaattttctttgcactcgatggtaagtccctaaaagaatttaaagaacaattagatgtcttaaaggatcatatttatggggtaaaagttggattagaactttttacttccgaaggcccatcatgtgttgaacaacttaagaatgatgggtgggttgttttcttagatttaaaactacatgacatcccaaacactgtaggtgaagctgccgcttcagtttcaaatattggagcagactatttaactttacatatatcatctggggaaagaagcattat

SEQ ID NO: 276302 - DNA, 523 bp, Unknown
  Bacterial polypeptide expressing nucleotide sequence isolated from the Sargasso Sea
tatgaaaaagaaattaatagtcgctcttgattttgatagtgctgagttagcattaaatttcttagaaaatttagatgcacaaaagtgcttagtaaaagttggattagagctttttatttcagaagggtggaaagtattagacttaatttcagaaaagggattcgaaattttccttgatcttaagttgcatgatattcctaatacagtagcaaattctgttagacagatttctaattttaatgttgcccttaccacaattcatctcaatggcggtaaagatatgatcgaagcagcctcttcagaaaaagggaatataaaaatccttggagtcagcatacttacaagcctgtctgagaatgacatattcgaaataaccaaaacagaattcgatacttattttaataatttaatatctattgcatctaactcgaatattgatggagtagtatgttccccaaacgagctcgataaactaaagaattttaataagcttaaggtcgttcctggcataagaaatcatatt

SEQ ID NO: 276303 - DNA, 523 bp, Unknown
  Bacterial polypeptide expressing nucleotide sequence isolated from the Sargasso Sea
gatggattctaaaaaagtaatagttgctttagatagtagtaattttgataaaacaataaaattagtaaagatacttaaagatgatgtgtatgcttttaaaattggttatgaatttttttttaattttggattgattggatataaaaaagtatattcaatttgtcctaaaatatttttagatttgaaactacacgatattccaaacactgttaaaaaaggtttaaaggctcttattaaaattaaacctattttaacaactattcatatatctggtggtgatgaaatgatgcaatcaacaaaaagtgaaaaaaaattgactaaagtacttggtgtttctattttaactagcatgaataacgaacaaactaataaatattataatgaaaaaaaaatatcttctttagtaaaaaagtttgcaagggcagcaaagcaaaatatgttagatggtgttgtttgcagtcctcaagaaataaagcatattaggaaaacagttggtaaaaaatttataattgttacaccagga

SEQ ID NO: 276304 - DNA, 616 bp, Unknown
  Bacterial polypeptide expressing nucleotide sequence isolated from the Sargasso Sea
atgatcaaaaaaaataaagtaatagtagcattggatactaacagtttagaaaaagctatttctgttgctactctaatagatgttgatattgtcttcaaaataggtatggagtttttttattcctttggatatgaaggtatagaaaaaattaaaaatattagaggcaatataaaaatatttctagatttaaaattgcacgatattcccaatacagtttgtaaagcgataattcctcttatagagaaagtaaatccttatatgcttaccttgcattctactgggggagaagtaatgttaaaaaaagtggttaaagttgtaaaggaaacatcaagagaaaaaagaccattattattaggtgttacagttttaacttcgctagattctaagtctttagttcaattaggatggggagctaatattaaaaaaaatgttataaattatgctttattatgtaaaagcgcaggattagatggcgttgtatgttcagcccatgaaatagaggatgtacgaaaagcatgtggagaaaactttctaatagttactccaggaattaggctcggaaaaaattctaatgatgatcaaatgagagttttatctccaataggctgcctttaat

SEQ ID NO: 276305 - DNA, 550 bp, Unknown
  Bacterial polypeptide expressing nucleotide sequence isolated from the Sargasso Sea
aacaggagctagaatatttttagatttaaaatttcatgatattcctaataccgttgctggagcaataaaagctattttacatttacagccttatatgctgacagtacatttgtctggtggctacgatatgctaatgaaggctaatgaaatagtttcagaatactgtcttaaaaatgcaataaaaaagcctataatactaggtgtatcggtgcttactagtttagatgataatgattttgtatcattaggtattaatggtaaagttgaagatcaagtagttcgtttagccaaattagcagaagcggctggtttagatgggttagtaagttcagcaaaagaattaaagatgattagaaaagaactaggcagttcgcttatattagttacgcctggtataagattaatggatggacaagttaatgatcaaaagagaatagtaacaccttctcaagctattaatgatggagctaattttttagttataggtagacctataacagcctctaaagatccggaagcagctctagaacatatttctaaagtaatttga

SEQ ID NO: 276306 - DNA, 718 bp, Unknown
  Bacterial polypeptide expressing nucleotide sequence isolated from the Sargasso Sea
tttgagttttaaaaataaaaatgcccttttctgcgctcttgatatgaaaagtatagaccaagctttatctttcacaaacattataaaagattacatagacggcataaagattggaatggaagccttttattcaatgggtattgatggttacttaagattacaagatttaaacataccaatatttctagatttaaaattacatgatatacccaatacagtaagctcagcaataaaatccctaatcccacttaatccgtatatgattaatgttcacatatctgggggcgctgtgatgcttagagaagcagttagtgcaattcatgaaagtaaagataacaggccaaaaattgttggggtaacaatattgactagcatgaatgagtctagttttgaagaacaaggcttaaagcttaatattcaagatcaggtaatcaatcttgcaactttagcagctgattgtggacttgatggtgttgtttgtagcccgcatgaggcaggtagggtaaaaagtaaatgcggaagtgattttttaacagttgtgccgggtattagactagaaaaaacacaatctgatgatcaaaaaagaactcttacaccatatgaagctgttcggaatggtgcagacattctagtagttggaagacctctaacaaaagcgagtgatcccatgggagttgccaaaataattagaaagaatatcgacgattatgagagttaa

SEQ ID NO: 276307 - DNA, 697 bp, Unknown
  Bacterial polypeptide expressing nucleotide sequence isolated from the Sargasso Sea
atgacaaataaagtaattgttgcattagataataaaaatctcagacagatagtttctatagtaaaaaaaactaaatctgaagcatatggatttaaaattggtaaagaatttttctacaattatggaattgaaggttataaaaaaatttataatctttcaccaaatattttcttagatctgaaattacacgatataccaaatacagtagaaaaagctttaaaagtcatattgaaattaaaaccattattatcaacaattcacattagcggtggtgatgaaatgcaaaaagtatcattaaaagtaaaaaaaaataatactaaaattctaggagtaacaattctgactagcttaaacagtcatcaaacgaaaaaatactataataatcaaaacgtgaaacaattagtaaaaaaatttgcacttaatgcaaagaaaaataatctagatggaatagtgtgtagccctcttgaaattacaaccgtaagaaaagcagttggaaatgaaatgttaatagtggttccaggtataaggttagaaaaaaaacaaacaaataagaaagatgatcaaaaacgaattctaacaccaaaacaagctattaatttaggagcggattatttagtaattggcagaccaattttagagtcaaataaccctctaagaacacttaaagaaataaataagagtataatagataagtgat

SEQ ID NO: 276308 - DNA, 310 bp, Unknown
  Bacterial polypeptide expressing nucleotide sequence isolated from the Sargasso Sea
gtaagcggtgttacaccagagcaacaagtgctgcgtctggcggcactaacagaaaaagcaggattagacggcattgtctgctcggcacaggaagccagcgcattacgcgaaaaacacagcgacgattttctgctagttacaccaggtattcgcccagtaggcgcagatgctggtgatcaaaagcgcgtcatgacgcctcccgatgctatgaaagctggcgtgagctatttagttatgggaagacctatcactaaagcggaagaccctattgccgtactgaaagcagtaaacgcatcaataaacggttaga

SEQ ID NO: 276309 - DNA, 370 bp, Unknown
  Bacterial polypeptide expressing nucleotide sequence isolated from the Sargasso Sea
tttgattggtgtaacattattaacaagtcttgatcagcaggatcttcttactattacacgtaatactgtctcacttgataaatacgtttccagtttggcgttaatggcgaaaaacaaggggttggacggggttgtctgttccgcaaatgaggttcctttagttcgtgatgtatgtggcacagattttttattggttactccgggtatcaggctcgtggatgagggtgatgatcaaaaacgagtggtcacccctcaagacgctcttcgggttggagcagactgtttggtgctgggcaggcccattactcagtcgccacgccctagagaggtggcgattgaattattgaatagtgtgaagtctttagattaa

SEQ ID NO: 276310 - DNA, 635 bp, Unknown
  Bacterial polypeptide expressing nucleotide sequence isolated from the Sargasso Sea
aatgaaaaaaattaattcagaagaaaaaataatattagctatcgacggattagatatttatcaagcaaaagttttactagatagatgtccgaatattaagtgggtaaaagttggattagaacttttcacgaaggaaggacctaatgtaattaaaattttgaaagatttaaataaaaaaattttcttagatcttaaatttcacgatattccaaataccatgagcgctgcttgttatgaggtgtctaaactaggagttgatattatttctgttcatgcttcagcaggtgctaaagctctcatagcatcaaaaaatgcatctttagaaggggctaaaataactaatgtaaatgcaccgtatgttattggaataactgttttaacaagcttatctagtaaagaattccaaattgatctggataggaaaaattctattgaggaaaatgttgttaggcttgcaaaattgtcttttgatgctggattagatggctgcgtttgttccccattggaggcaaaaatattgagatcgatttataaaaataatttcgaattaattacacctggtataaggacaaagattcaaaataaagatgatcaaaatagaataatgactcctcatgaagctataagtaatggag

SEQ ID NO: 276311 - DNA, 220 bp, Unknown
  Bacterial polypeptide expressing nucleotide sequence isolated from the Sargasso Sea
aatgtcagttaaacctattttctttgcattggatggcaaagagctaagcgaatttacagaaacccttgaaaaactgaaaggtgtgatttatggagtaaaagttggattagaaatgtttactgccgaaggtccttcttcagttgaaaaactaaaaaatgatggttggaaagtatttttagatcttaaattacacgatattccaaatactgtacaagcagca

SEQ ID NO: 276312 - DNA, 505 bp, Unknown
  Bacterial polypeptide expressing nucleotide sequence isolated from the Sargasso Sea
aatgaagtctaaaaaaattatagttgcattagataatagtgatcttaaaaaagtaaaaaaaattgtatctgacttaaaatctgaagcttttgcctttaaaattggatatgaattttttttaaataatggaatatcaggttacaaagaaataaaaaagatttgcccgaatatttttttagatttaaaattacatgatatacctaatactgttcaaaaaggtcttgaggcaatttataaattaaaacccattctatcaactgttcatatttcgggtggagatgatatgatgagagttactaccttaaatagaaaacatacaaagatactaggggttacaattttaacaagtcttgatagtaggcaaacaaagaaatattataatgaaaaaaatttaaaaattttaatacaaaaatttgttaaagaagctaaaaagtttaaattagatggagtagtttgtagtcctaaaagaaataaaaaatatattagggaacttgtaggtaaaaat

SEQ ID NO: 276313 - DNA, 418 bp, Unknown
  Bacterial polypeptide expressing nucleotide sequence isolated from the Sargasso Sea
atgaaaaagaaattaatagttgctcttgattttgatagcgctgagttagcattaaatttcttagaaaatttagacccacataagtgtttagtaaaagttggattagagctttttatctcagaagggtggaaagtattagacttaatttcagaaaagggatttgaaatcttcctagatcttaagctgcatgatattcctaatacagtagcaaattcagttaaaaagatttctaattttaatgttgcccttactacaattcatctcaatggcggtaaagatatgattgaagcagcctcttcagagaaagggaatataaaaatccttggagttagcatacttacaagcctgtccgagaatgacatttttgaaataacgcatacaaaatttgatacttattttaataatttaatatctattg

SEQ ID NO: 276314 - DNA, 529 bp, Unknown
  Bacterial polypeptide expressing nucleotide sequence isolated from the Sargasso Sea
aatgtttactgccgaaggcccttcttctgttgaaaagctaaaaaatgatggttggaaagtatttttagatcttaaattacacgatattccaaatactgtacaggcagcaacagtaagcgcaggaaatattggtgctgattatttgactattcatatagcatcagaaaaagaagctttgcttgcagcaagtgaaaataaaacagagaatattaaactcctcggtgttagtagtgctctaacaagtaaggcaatggatgaagaaactagcaataatgttgaaaaagattttacagttgcgaaagaatcaggaattgatggtgttatctgtccagcttcagagattctaacaactaaaaaactctttgatctgattgttacgcctggaattagattagagagtgatagtaaagatgaccaaagaaacaccacaactccagaaaaagccattgaattaggtgcaaaatacattgttatgggaagatcgattaaaaataacctggactatgtaataaataacttaactatatga

SEQ ID NO: 276315 - DNA, 568 bp, Unknown
  Bacterial polypeptide expressing nucleotide sequence isolated from the Sargasso Sea
atgaatgagaaaaaaattattgttgccctagatagcgataatatattcaaaactttagaattagtagaagaaataaaagaacatgcttttgcatttaaaattggttatgaattttttttaaactttggtcatgaaggttataaaaagatacagaaaaaaaacgtaaaaatatttttagatttaaaacttcatgatattccaaacacaataaacaatgctataaaagcaatatcaatattagatccatattttacaactattcatatttctggtggtgatgatatgcagttaataacaaatcttaataaaaaaaatgtaaaggttttaggtgtgtcagttttaactagcctagataaaaaacaaacaaaaaaatattatgattctgataatatagaaaaacttgttgaaaaatttgtaagatactcaatagaaaataaattagatggtgtggtttgcagtcctcatgaaattaaaatagctaaaagtttaaagaatttatcatcaaataattttattattgttacacctggtataagaatagatatgggtgaagatgagatcaaaaaag

SEQ ID NO: 276316 - DNA, 484 bp, Unknown
  Bacterial polypeptide expressing nucleotide sequence isolated from the Sargasso Sea
aatgataatagtagcaattgatgaaataaattttgaaaatgcttcaatgattataaataatcttgatccaaataaatgtatgattaaaattggtagtgttgcttttaattcaattgggcacgaagtaattaaatatgctgctgaaaaaggttttgatgtatttcttgatcttaaacttcatgacataccaaatactgtaaaaaaatcaattcaaggactagtttctttgcctattaatatgatcacaattcatgtttctggcggaaaagaaatgatgaaagcggctatggatgcagtttcaggaactaagataaaagtatttggtgttacagcactaacaagtttaagtgacgaagatacaaatattatttacaaaagaaaaattttagaacaggtaaatgttatgttagatcaagcagaaatagcaggcatagatggcatagtatgctctccgcacgagctagagattgtcaagaaaagaggg

SEQ ID NO: 276317 - DNA, 619 bp, Unknown
  Bacterial polypeptide expressing nucleotide sequence isolated from the Sargasso Sea
atgattatagtagcaatagacgaaactgattttaataaagcatcatctatcttagatagccttgattcaaaaaaatgtatggtaaagataggaagcattgcttttaattcaattggtcctgacctaattttcttcgctgctgaaaagggctttgatgtttttcttgatctcaaacttcatgatattccaaataccgtaaagaaatctattcaaggactttcatcattaccaataaaaatgcttactgttcatacctctggtggaatagatatgatggaggctgcaatggaggcggtagctggaacagatattaaagtttttggcgtgactgcattaactagtctcaacgacgaagatacaaataatatataccaaaggaatgcttcagatcatgtaaatgcaatgttagatctagcagagtcagctgcaatagatggtgttgtatgttctccacacgaacttaagcttgttaaaaaaagaggtacacttttatcaattactcctggcattagactgcaagattcgaatgatgatcaaaaaagatttatgacaccaaaagaggcgataaatcttggcgcagattatctggtaattggaagacccaataactcagtcagat

SEQ ID NO: 276318 - DNA, 699 bp, Unknown
  Bacterial polypeptide expressing nucleotide sequence isolated from the Sargasso Sea
aaagtgaatctaaagttatagttgctctagactatgataatagtgatgacgctatagcaatggcaaaaacacttgatccaaatctttgcaaggttaaagtcggtttagaactatttgtatcttgcggcccaaaaattattgaccaattgcataaacttggatataaaatttttctagatttaaaatttcatgatattgctaataccgtcgaaaaaagttgtatagtagcatctaaattaaatgtgtggatgttaaatctacatgcaagtggtggaactaaaatgatgtcgaatgcaaaaaaaattttttttggagaaaagccattgctaataggcgtaactattctcacatcgttagaccaagaagaaacaagagaaattggctacacaagagaaataagtgaacaggttctacatatggcagaattatgctataaatcaaacttaaatggtgtagtgtgctctgctagtgaagtagaagctataaaaaaaagattctctaatgattttatttgcgtttgtcctgggattagaaatcataatgatgatcaaaatgatcaaaaaagaatatatactccagcaatggcggcaaagaatggtgcagattatattgtagtaggaaggccgattacaaaaagcgataatcctttagagtccttaaaaaaagtaaagatggagtttgaaaaaaatattcaatgag

SEQ ID NO: 276319 - DNA, 649 bp, Unknown
  Bacterial polypeptide expressing nucleotide sequence isolated from the Sargasso Sea
tatgaaaaagaaattaatagtcgctcttgattttgatagtgctgagtcggcattaaaatttttagaaaatttagatcctaaaaagtgtctagtaaaagttggactagagctttttatctctgaagggtggaaaatattagatttaatatccgaaaaaggatttgaaatattcctcgatctcaagctccatgatattccaaatacagtggcaaattctgttagaaaaatttccaattttaatgttgctctaactacaattcatctcaacggcggtaaagatatgattgaagcagcttctttagaaaaaggaaacataaaaatccttggagttagcatacttacaagcctgtctgagaatgatatttttgaaataactcataccgtattcgatacttattttaataatttaatatctattgcttctaacacggatattgatggagtagtttgttccccaaatgaactcgataaactgaagaattttaataagcttaaggttgttcctggtattagaaatgatatttcaaatgatgatcagaaaagagtaatgagctcaatggaagcttatgaaaaaggcgctaactttattgttgttggcagaactataactaaatcagagaatccaagaaaagccttggagcttttctta

SEQ ID NO: 276320 - DNA, 388 bp, Unknown
  Bacterial polypeptide expressing nucleotide sequence isolated from the Sargasso Sea
atgaaaaagaaattaatagttgcactcgattttgaaagcgctgagttagcgttaaatctcttagaaaacctagatccacaaaagtgcttagtaaaagttggattagagctttttatctcggaagggtggaaagtattagacttaatttcagaaaagggattcgaaatcttccttgatcttaagctgcatgatattccgaatacagtagcaaattctattagaaagatttctaattttaatgttgcccttactacaattcatctcaatggcggtaaagatatgattgaagcagcctcttccgaaaaggggaatataaaaatcctaggagttagcatacttacaagcttgtctgagaatgatatttttgaaataactcatacagaattcg

SEQ ID NO: 276321 - DNA, 496 bp, Unknown
  Bacterial polypeptide expressing nucleotide sequence isolated from the Sargasso Sea
tatgaaaaagaaattaatagttgctcttgattttgatagtgctgagttagcattaaatttcttagaaaatttagacccgcaaaagtgcttagtaaaagttggattagagctttttatctcagaagggtggaaagtattagatttaatttcagaaaagggattcgaaatcttccttgatcttaagctgcatgatattcctaatacagtagcaaattctgttagaaagatttctaattttaatgttgccctcactacaattcatctcaatggcggtaaagatatgattgaagcagcctcttcagaaaaagggaatataaaaatccttggagtaagcatacttacaagcctgtctgagaatgacatttttgaaataacacatacagaattcgatgcttattttaataatttaatatctattgcttctaacacgaatattgatggagtagtttgttccccaaatgaactcgataaactgaagaattttaataagcttaag

SEQ ID NO: 276322 - DNA, 508 bp, Unknown
  Bacterial polypeptide expressing nucleotide sequence isolated from the Sargasso Sea
atgaagtctaaaaaaataatagtagctttagatagcaaagatttaataaaaaccataaacttagtaaaaattttaaaaaaagatgttttcgcctttaaaataggctatcagtttttttatagttttggtttagaaggttataaaaaaatatattctatatgcccaaaaatatttcttgatttaaagttacacgatataccgaacacagtagaaaaaggtttagaagcattaataaaaatgaagcctctttttacaacaattcatatatctggtggtgatgaaatgatgcaaatatctagttcaaataaaaaaaaaacaaagattttaggagtttcagttctcacaagtttaaatagcaatcaaacaaaaaaatattacaatcaaaaaaatgtcacagaattagtaaaaaaattttctcaatcagcaaaaaaaaataaattagatggtgttgtgtgcagtcctcaagaaataaaatatattagaaaaaaaatggaaaaaattttataat

SEQ ID NO: 276323 - DNA, 586 bp, Unknown
  Bacterial polypeptide expressing nucleotide sequence isolated from the Sargasso Sea
tatgataaaaataggtaccattgcttttaattcaattggcagtgagataatttcttacgctaacagtaaaggatttgaaatatttcttgatcttaaacttcacgatattccaaatactgttaagaaatcaattgaaggacttatttcacaaccaataaaaatgctcacaatacatatttctggtggaaaagaaatgatgactgccgcaatggaagctgtgtcagggacaggtataaaagtttttggcgttacagcattaaccagtcttagtgacgacgacacgaaggaaatatacagaagaaatacttcagagcaagtgaatgtaatgttagatttagctgaatcagcaggaatcgatggcgtagtgtgctctccgcatgaattaaatcttgttagcaagaggaagtcattattatcaataactcccggtattagagtacaaaattcaaatgatgatcagaaaagagtaatgaccccaaaagaggctattgatatgggttcagattatctagtaataggaagaccaataacaaaatcggcaaatatagaacaatctttaaatgagatttataagagtataaagtga

SEQ ID NO: 276324 - DNA, 394 bp, Unknown
  Bacterial polypeptide expressing nucleotide sequence isolated from the Sargasso Sea
atgaataagaaattaatagttgctcttgattttgatagtgctgagttagcattaaatttcttagaaaatttagatccgcaaaagtgcctagtaaaagttgggttagagctttttatctccgaaggatggaaagtattagacttaatctcagaaaagggatttgaaattttcctcgatctaaagctacacgatattccaaatacagtggcacattctgttagaaagatttccaattttaatgttactcttactacaattcatctcaatggcggcaaagatatgattgaagcagcttcttcagaaaaagggaatataaaaatccttggagttagcattcttacaagtttgtctgagaatgatatttttgaaataactcatacagaattcgatactt

SEQ ID NO: 276325 - DNA, 673 bp, Unknown
  Bacterial polypeptide expressing nucleotide sequence isolated from the Sargasso Sea
atgtcaaagaaaataattgtagccattgatgaaacagacataattttatttaaaaaaatagtaacagctttagataaagaaaaatgccttataaaaattggaagtgtttcattcaattcaatcggcaaagaagcagttgattatgcatccagcctaggatttgatatttttttagatctgaagcttcatgatattccaaacacagttgagcaatctatcaaaggactatcctctttgcctattaaaatgttaacgattcatatatctggcggaacagaaatgatgaaagctgcaaaaaaagcagtttcaggaactaaaattaaaatctttggagttacaactttaacaagtctcaatgatgacgatacaaattacatttttagaagaagtgcatctgagcaagttttgaaaatgttagatatggctgagtcagttgggattgatggtgtagtttgttctccacaggaattagaaattgttaagagcaggaaatcattgctatgtatgactcctggaattagacttgatcacttaaatgacgatcaaaaaagagtcatgagtccaaagaatgctattgatttaggtgcagattatattgtaattggaagaccaataactttatctaatgatattaataaaactcttaatgacatatatcaaagcatcctgtgaa

SEQ ID NO: 276326 - DNA, 544 bp, Unknown
  Bacterial polypeptide expressing nucleotide sequence isolated from the Sargasso Sea
gaaatcattagttttgctgctgagaaaggatgtgacatatttctagatcttaagcttcacgacataccaaatactgttaaaaaatctattcaaggattagcttccttgcctattagtatgttaacaattcatacctccggtggtaaggatatgatgatggctgctatggatgctgtttcaggatctcaaataaaagtctttggtgtcactgctttaaccagtcttaataatgatgatacaaatcagatatttcaaagaacaacttcagggcaagtgagtgctatgttagatttagcagaagaagcaggcatagatggagtagtatgttctcctcatgagcttcaactagttagcaaacgaaaaactttgttatcgataacaccaggtataagacttcaagaatcaaatgacgatcaaaaaagagttatgactccaaaagaagctattgaccttggagcagattatattgtgatcggaaggcctataacaggtgctaaaaacataagtgaaatattagataaaattaatcgaagtatattgtgag

SEQ ID NO: 276327 - DNA, 638 bp, Unknown
  Bacterial polypeptide expressing nucleotide sequence isolated from the Sargasso Sea
aatgcaccctgccgatcggattatcgtggcccttgatggcatggatccagaccaagcgctgaggttttcggctcaggtggaggggttgcgctgggtgaaggtgggcctggagctgttcgtgcaggcggggcctgaggtggtggcccagctgcgcgagcaggggttgcgggtgttcctcgacctcaagttccacgacatcccagccacgatggcgggcgcctgccggcgggcttcggcgttgggggcagagctgatcacggtgcatgcctgcgccggcagtgaggcgttgagcgctgcccaggccgcggcggtggagggggcccagagtgcagggatggccacgccaactctgctggcggtgacggtgctcactagctggcaggagcaacgactgcaacgggaactcgccattgcgcagggcatcggcgagcgtgtgccggcgtttgcacagctatcggcaacagcaggcatcggcggttgtgtgtgttcaccgctggaggccgcggcattgcgggcgcaacaccccgagccgtttgccttggtcacaccggggatccgccccaaattttctgcagtgggtgatcaggcccgggtgatggggccggcggaggcgattgctgccggtgccagccagctgg

SEQ ID NO: 276328 - DNA, 640 bp, Unknown
  Bacterial polypeptide expressing nucleotide sequence isolated from the Sargasso Sea
aatgtcagttaaaccaatattctttgcattagatggaaaatcattatctgaatttgaatttgaactaaagatattaaaagatcatatatacggagtaaaagtaggccttgaactctttgtttctgaagggccatctgttgtagaaaagttaaaaaaacaaggatggcaggtttttttagacctaaaacttcatgatataccaaatactattaaggaagctacaagaagtgcagcaaacgttggagcagattttttaacaattcatattgcttctactagcgatgccttgattgaagcatcaaacactaaaggtaacactctacaaattcttggtgtaagtagtgcattaaccagtagggctatgagtaactcagtaagtgaagaagtgaacaaagagtttaaagaagcaaaggaatgtggtgttgacggagtaatttgtccagcttcagaaatatctaaaacaaaagagatatttgatttaattgtaactcctggaatacgtcttaaaaatgatgacaaaaatgaccaaaaaaatgttgcaacacctaattttgcaatcaatgaaggtgcaaaatatatagttatgggaagatctataagaaataatctcgactacattatcaatgatttagagttatga

SEQ ID NO: 276329 - DNA, 490 bp, Unknown
  Bacterial polypeptide expressing nucleotide sequence isolated from the Sargasso Sea
aaaaaatgatggttggaaagtatttttagatcttaaattacacgatatccccaacactgtacaggcagcaacagtaagtgcaggaaatattggtgctgattatttgactattcatatagcatcagaaaaagaagctttgcttgctgcaaatgaaaataaaacagacaatattaaactcctcggtgttagtagtgctctaacaagtaaggcaatggatgaagaaactagtaataatgttgaaaaagattttatagttgcgaaagaatcaggaattgatggtgttatctgtccagcttcagagattctaacaactaaaaagctctttgatctgattgttacgcctggaattagattagaaagtgatagtaaagatgaccaaagaaacaccacaactccagaaaaagccattgaattaggtgcaaagtacattgttatgggaaggtctgttaaaaataatctagactatgtagtagaaaggttaaaaatttga

SEQ ID NO: 276330 - DNA, 343 bp, Unknown
  Bacterial polypeptide expressing nucleotide sequence isolated from the Sargasso Sea
atgaaaccatctgatcacatctttgtggcattggatctcaccgatcaaaatgaggcgagaggacttgccagacggcttgcgggacatgttggtggttttaaactcggtctagagttttttgcagcaaatggaccggatgcagtgcgtaatattgtcgatagcggcttgaaagtgtttcttgatcttaaatttcatgatattccaaataccgtcgcaggctcggtgggagctgccgtggctaccggagcctcgatcatcaatgtccacgcttctggggggctcgacatgatgcgtgccgcgggtgaagccgcagcagagggtgcggagcggcatggtgttgcga

SEQ ID NO: 276331 - DNA, 626 bp, Unknown
  Bacterial polypeptide expressing nucleotide sequence isolated from the Sargasso Sea
tatgtcaaaaaaaataattgtagccattgatgaaacagacataatttcatttaaaaagatagtaatagctttagataaagataaatgccttataaagattggaagtgttacattcaatgcaatcggtaaagaagcagttgattatgtatccaatctaggcttcgatatttttttagatctaaagcttcatgatattccgaacacagttgagcaatctattaaaggactatcctctttacctattaaaatgttgacgattcatatatcaggcggaagagaaatgatgaaagctgcaaaaaaagcagtttcaggaactaaaattaaaatctttggagttaccactctaacaagtctcaatgatgacgatacaaattacattttcagaagaagtgcatctgagcaagttttgaaaatgttagatatggctgagtcagtagggattgatggtgtagtttgttctccacatgagttagaactagttaagagcaggaaatcattgctatgtatgactcctggaattagacttgatcacttaaatgacgatcaaaaaagagtcatgagtccaaaggatgctattgatttaggtgcagattatattgtaattggaagaccaataactttatcta

SEQ ID NO: 276332 - DNA, 721 bp, Unknown
  Bacterial polypeptide expressing nucleotide sequence isolated from the Sargasso Sea
atgaaaaaatttaatacagaagaaaaaataatattagctattgatggattagatatatttcaagcaaaagtattgctagaaagatgtcccaatattaaatgggtaaaagttggcttagaactttttatgagggagggacctaatgtaataaaaattttgaaaaatttaaataaaaaaatattcttagatcttaaatttcacgatattcctaatactatgagcgctgcttgttatgaggtgtccaaactcggagttgatattatttctgttcatgcttcagcaggttctaaagctattactgcatcaaaaaaagcatctttagaaggagcaaaaatagctactgtaaatgctccttgtgttatagggataactgttttaactagcttatctactaaagaattccaaactgatcttgatagaaaaaactcgattgaggaaaatgttatcagacttgcaaaattgtctttcgatgctggtttggatggatgcgtttgttctcctttggaggcaaaaatattgagatcaaggtataaaaataatttcgaattaattacacctggtattaggacaaagatgcaaaaaaaagatgatcaaaatagaataatgattccttatgaagcaataaggaatggagcttctaagttggttattgggagagctattacgaaagctaaagatcccaataaggcttttcttgatatctgtgattctatttattaag

SEQ ID NO: 276333 - DNA, 730 bp, Unknown
  Bacterial polypeptide expressing nucleotide sequence isolated from the Sargasso Sea
gatgaataacggatttaactcagaagataaaataatattggcaattgatgggctagatgtaaaccaagcaaaattacttctagaaaaatgtcccaatattaagtgggtaaaagttggtttagagctttttgttagggaaggtccaagagttattgaaattttaaaaagtttaaataaaaaagtttttttagacttaaaatttcatgatattccaaataccatgagtgcagcatgtttccaagtttcaaaattaggggttgatattatttctattcatgcttcagcaggtctaaaagctcttaaggattcgaaaaaagcatctttagaaggagcctcctcagtcagagtaaaacctccatttgttgttggaatcactgttttaacaagcttttctcttaaagattttcagactgatcttgatagaaataattcaattgaagaaaatgtattgagacttgcaaagttgtcttttgatgctggattagatggatgtgtttgttccccttgggaggtaaatatgttgagatctatttataatgataattttgaactcattacaccaggcatcagattaaatattgaaaataaagatgatcaaaatagaattatgactccccatgaagctatagataatggagcttctaagttagtcattggtagatcaatttcaaaagctatagatcctaataaagctctaatagaaatatttaaatctattgattctgattaa

SEQ ID NO: 276334 - DNA, 697 bp, Unknown
  Bacterial polypeptide expressing nucleotide sequence isolated from the Sargasso Sea
atgacaaataaagtaattgttgcattagataataaaaatcttacgcagatagttgctatagtaaaaaaaactaaatctgaggcatatggatttaaaattggtaaagaatttttctataattacggaatagaaggttataaaaagatttataagctttcaccaaatattttcttagaccttaaattacatgatataccaaatacagtagagaaagctttaaaagctatagtgaaattaaaacctctactatctacaattcacattagcggtggtgatgaaatgcaaaaagtatcagctaaactaaaaaaaaacaaaactaaaattcttggagtgacaattcttaccagcttaaatagttctcaaacgaaaaaatattataataatcaaaacgtaaatcaattagtaaaaaaatttgcaattaatgctaagaaaaataatcttgatggaatagtttgtagtcctcttgagatatcaactgtaagaaaagaagttggcaataaaatgctaatagtggtgccaggtataaggttagaaaaaaagcaaataaacaaaaaagatgatcaaaaaagaattctaactccaaaacaagcaattaatttaggagcagattatttagttattggtagaccaattgtagagtcaaataacccactaaaaatacttaaagaaataaataagagtattatagagaagtgat

SEQ ID NO: 276335 - DNA, 459 bp, Unknown
  Bacterial polypeptide expressing nucleotide sequence isolated from the Sargasso Sea
aatgattattgtagcaatagatgaaattacttttgataaagcctcagttatcatagatagccttgattcaaaaaaatgcatgctaaaaattggaagtgttgcttttaattctattggccacgaaatcattagctttgctgctggtaaaggatttgacatatttctagatcttaagcttcacgacataccaaatactgttaaaaaatctattcaaggattagcttccttgcctattagtatgttaacaattcatacctccggtggtaaggatatgatgatggctgctatggatgctgtttcaggatctcaaataaaagtctttggtgtcactgctttaaccagtcttaataatgatgatacaaaccagatatttcaaagaactacttcagaacaagtaaatgcaatgttagatttggctgaatcggctggcatagatggagttgtatgttcgccactcga

SEQ ID NO: 276336 - DNA, 544 bp, Unknown
  Bacterial polypeptide expressing nucleotide sequence isolated from the Sargasso Sea
taaaaaagtttattctatttgtcccaaaatatttcttgatttaaagttacacgatataccaaatacagtagagaaggggttgaatgctctaattaaaatgaagcctctttttactacaattcatatatccggtggtgatgaaatgatgcagctatctatagcaaataaaaaaaatacaaagattttaggagtttcaattttaacaagcttagatagtgatcaaactaaaaaatattatggtcaaaaaaatgtaccaactttagtaaaaaaatttgctcaagaagcaaaaaaaaataaacttgacggagttgtatgcagtcctcaggaaataaaacatataagaaaaatagttgggaaaaattttataatcgtcacacctgggattagaattacaaataaattaaaaattgatgatcaaaagagagttgaaactccaaaaaaagctttaaaactaggagcaaattatttagtcataggaagacctataactaaatccagagatccacttaaaactttaaaagaaattaataaaagtttaatttaa

SEQ ID NO: 276337 - DNA, 640 bp, Unknown
  Bacterial polypeptide expressing nucleotide sequence isolated from the Sargasso Sea
atgtcagttaaaccaatattctttgcattagatggacctaatcttaacaaatttgaatttatgctaaaaaaattagagagtcatatttttggagtaaaagttggtcttgaaatgtttatctctgaggggccaaaagtagttgaaaagttgaaaaaagatggatggactgtttttcttgatcttaaacttcatgacattcccaacacagtaaaaaaagccacaaaaagtgctaataatctgggagcagattttttaactatacacattgcgtcgggtaaagatgctttacaagaagcctctacaagcaaaaatgattctttaaaaattttaggagttagtcaagcacttacaagctcaacaatggatgcaaaaatgagtaagggtgtatctgaagattttcttttggctaagcaatgtggcgttgacggtgttatttgtcctccaagtgaaatagagagaactaaaaatctttatgatttaatcgttacgccaggaatcagattgaacaacgataccaaagatgatcaaaaaaatactacaactcccaaaaatgcaatacttgcaggagcaaaatatatagttatgggaagatccataataaataatttggattttgtaatgaatgaattagatatatgaa

SEQ ID NO: 276338 - DNA, 640 bp, Unknown
  Bacterial polypeptide expressing nucleotide sequence isolated from the Sargasso Sea
atgtcagttaaacctattttctttgcattggatggcaaagagctaagcgaatttacagaaacccttgaaaaactgaaaggtgtgatttatggagtaaaagttggattagaaatgtttactgccgaaggcccttcttcagtagaaaaactaaaaaatgatggttggaaagtatttttagatcttaaattacacgatatcccaaacactgtacaagcagcaacagtaagtgcaggtaatattggtgctgattatttgactattcatatagcatcagaaaaagaagctttgcttgcagcaagtgaaaataaaacagataatattaaactcctcggtgttagtagtgctctaacaagtaaggcaatggatgaagaaactagtaataaggttgaaaaagattttatagttgcgaaagaatcaggaattgatggtgttatctgtccagcttcagagattagttccactaaagaactctttgatctaattgttacccctggaattaggttagagagcgatagtaaagatgatcaaagaaacaccacaaccccagaaaaagccattgaattaggtgcaaaatacattgttatgggaagatcgattaaaaataacctggactatgtaataaataacttaactatatgaa

SEQ ID NO: 276339 - DNA, 709 bp, Unknown
  Bacterial polypeptide expressing nucleotide sequence isolated from the Sargasso Sea
catggcaaaagaaattgataatagagaaagacttatattcgcaatggatgttccagattgcaatcaagctaggcaattggtagagacattggatgattctgtcgttttttttaagctaggcttggagttaatgatgacagatggttacttcgatcttatggattggatgctaaagcgaaataaaaagatttttgctgatttgaaattcttcgatattccagccactgtaggtgccgcagtgaataggcttcggaacaggggcgcaagtttcgtaacagtccatgggaatcaggcaataatggaggcggccgcaaaaaataaaggaaaacatttaaaagtgctcgctgttaccgcgctaacaagtcttgatagaggtgatcttgacgatatgggttttgcgtgtgacattggagatttagttttatcaagagcaaagcgggctcttgaggcgggttgtgatggagttgtatcgtcgggtctcgaggttcctgaactaagaaaaaatattgattctcaattactggtggtcactccaggaattcgtcctgttgataataaagagagcgaagaccaaaaaagagtagtaactgtggcaaaagcttttaaaaatggtgcagattatattgttgttggccgccctattcgagatgcagacaatccaagaaatgcggctgaagaaatacaatcatcaatcagtgaatgcttctag

SEQ ID NO: 276340 - DNA, 670 bp, Unknown
  Bacterial polypeptide expressing nucleotide sequence isolated from the Sargasso Sea
atgattatagtcgcaatagatgaaatcagttttattaaagcatctgagattttaaataatcttgacccaagaaaatgcatggtaaagattggaagcgtatctttcaattcaattgggcaagagattatttactatgcagctgaaaagggatttgatatttttcttgatctaaaacttcacgatattccaaatacggtaagaaaatcaattgaaggactaaagtccttgccaattaaaatgctcacaattcatatctctggtggcaaagatatgatggaagcagcgatggatgcggttacaggaactgacataaaaatctttggcgtaactgctttaactagtcttagtaatgctgacacaaatgaaatatttcaaagaacaactttagaacaagtaaatgcaatgttagatttagcagagtctgtaggaatagacggtgttgtatgttctcctcatgaattagagcttgttagtaaaagagaatcattgttatcaataactcctggtataagattaaaggattctaatgatgatcaaaaaagagttatgataccaaaagaagcaattgacttaggcgcaaattatctggttattggaagaccaataactcagtcagatgacatgttaggtactttggaagatatttttaataaaatatataactcttagt

SEQ ID NO: 276341 - DNA, 1303 bp, Unknown
  Bacterial polypeptide expressing nucleotide sequence isolated from the Sargasso Sea
gatgcgagtcaccgaagtcagtaaacgtgaacaggtactggagaacatccagaaaacctcggctcgcctacaggatgctcagatccaaatggccaccggacagaggatcaataagccttctgacgacccgatcggcacggctaaaatgcaggatattgtttccacaatgtccgcacaggaacagcaccttcgcaacattaccgacaatatcgccagtctccagcatgccgaaaaggaaatcactcatatgacggaactgctgggacgtgccaaaaccctggcaatttcccagtccggttctgatgccaacgaagaatcccgcatgatggtggcacgtgaatttgcggctctgagagaatctctcttcgatgcaggaaactccagaaacgggaaactctatcttttttccggtctgaaatccctttccccggcgttagagaaaaattcgatgattcagcctgccaaagtcgaaacccgtgggatcatccagaaagacatccgggacctgatcgatatcgatcaataccgtgccgtttttgaaggacattcaaacaatgagtatcggctcagaatcaccaaaggaggcccgtgggggaaggcacgatgccagatttcagatgatggaggaagaacctgggccaaggaacaggttctgcgtccggtaactgcgatgttcaatcccgatggcaagcaggatgatctggtgaaattgaaattttctgatgaacagggattacttggcaataccattccgggatacttcgattttaccaacgaagtctccgaagatgttgaagcagaatcactgggattggtttttccggatggaatggagttcatcggcagaccgaatcctgagatttcttacatcggcgcagaagataaaaaagaggttctgatttccgacggtttggccagccctgtccaggttacggctagggaattactgctttctgaggaagcggggggagtggatgtcttctccatgctcagttccctggagcgcgccatgctggaaaatgatggcaccgcccttgcactacgtttaaaagaactggatcaagcgctggaacagatcctcaaacggcaggctgacattggcaataccgttcgagaatttgaaaccgccatgcaaaagatcgagtctcagaaatttgagcaagaacggagattgtccgaaatccgcgatagtgacttggcagaaacagtcattgaagtcaaaaccgcggaagcgaataatcggcttgccctcgataccgggagcaagttgattcaaccgactttatcggatttcctccgctaa

SEQ ID NO: 276342 - DNA, 652 bp, Unknown
  Bacterial polypeptide expressing nucleotide sequence isolated from the Sargasso Sea
atgaataagaaattaatagttgctcttgattttaatagtgctgagttggcattaaatttcttagaaaatttagacccgcaaaagtgcttagtaaaagttggattagagctttttatctcggaaggatggaaagtattagacttaatctcagaaaagggatttgaaatcttccttgatcttaagctacatgatattccgaatacagtggcaaattctgttagaaagatttccgattttaatgttgctcttaccactattcatcttaatggcggcaaagatatgattgaggcagcctcttcagaaaaagggaatataaaaatcctcggagttagcatacttacaagcctgtctgagaatgatatttttgaaataactcatacagaattcgatgcttattttaataatttaatatctattgcttctaacacgaatgttgatggaatagtttgttctccaaatgaactcgataaactgaagaattttaataagcttaaggttgttcctggtataagaaatgatatttcagatgatgatcagaaaagagtgatgagtcctatggaagcctataaaaagggtgctgattttattgttgttggaagacctataactaaatcagaggacccaagaaaagctttggagcttttcttatgaa

SEQ ID NO: 276343 - DNA, 685 bp, Unknown
  Bacterial polypeptide expressing nucleotide sequence isolated from the Sargasso Sea
atgaataaacaaataattgttcctctagatatggatcatgataaagcaatagaacttgctaaatgctttaatccagaattatgcagattaaaggttgggaatcagctatttacttcttcaggaccaaaaattatcgaagagttaaacgcactaggatatgagatctttttagatctgaaattccatgatatccctaatacagtttatgaggcagtaagatcagcagccgatctaggtgtgtggatgttaaatgtccatattgctggaggcagatcaatgttagaaaaagctaaagaagctctagattcttccacacaaccccccttattaattggtgttactatgctaacaagcttaagtaatgaagatgtaaaagaaatagggataaatgatatttctgacagtattttaaatttagccagtcttgcaaaagaatgtggactagatggagtcgtttgctcgccaagagaagtttctcttattaaagataagttaggtaaagattttatagctgtaactccaggaattaggcttgagacttcaagcgatgatcaggtaagagttttgactccaatcgaagctgtcaacaatggatctgattttttagttataggaagacctattactaaaagcagaaatcctttagaatctctcaaggaaatcattacagatttaaattcatgaa

SEQ ID NO: 276344 - DNA, 697 bp, Unknown
  Bacterial polypeptide expressing nucleotide sequence isolated from the Sargasso Sea
atgaatgaatttaatgaaaaactaattgttgctctagattctaaagaaatcagtcaaagtaaaaaattggtttcttcactcgaaaataaagtttcatttttcaaaatcggtctaagaacttttgtaattaatggtttcaaccttgttgatgaaattaagcaaaaaggaaaaaaagtatttttagatttaaaattgtatgacattaagagtacaatccaagaaactgtagctagaatatctgaacataaaatagattttttgactgtaaatggagatccttcggttgtagaggcagcagtgattggaagaaaagatgaaaaaatgaaaatcttagctgtaacctttcttactaaccagaaccgtaatgatcttgatttatcattaataaaagatggaaatttaaatgaactggttgctgaaagagcaagtaatgcatttatagcaggagcagacggaataatatgttcaccattagaggccaatttaattcgatctaaagatcacttttccaataagataatcgtaacacctggtatcagattaaattattctgcaaatgaagatcaaaaacgtgtttccacaccctcagaagctttaaaagcaggagctgattatatagttgttggacgacctatttggaatgcaaaagatcctattctagcagttaatgatatctttaatgacatgattaattaag

SEQ ID NO: 276345 - DNA, 433 bp, Unknown
  Bacterial polypeptide expressing nucleotide sequence isolated from the Sargasso Sea
ggtggcgagcggatgatgcgggccgccaaggaggcgctgctgccttatggcgacaaggcgccgctgcttatcggggtgaccgtgctgaccagcatggagcaggccgatatggcgccgttggggctcactgtcggcccggccgagcaggtgatccggctggccaaattgaccaaggaggcggggctcgatggggtggtctgctccgccgaagaggcgcgtgaattgaaggcgctgctcggcgccgacttcaagctggtgacgccggggatccgtcccgctggctcggcagccggtgatcaacgccgggtcatgacaccgctggcggcggtggaggcgggggccgactatctggtgattggccgccccatcacccaggcggccgatcctgccgccatgctggcaggcatcaatgcagagctggcaaatcgataat

SEQ ID NO: 276346 - DNA, 655 bp, Unknown
  Bacterial polypeptide expressing nucleotide sequence isolated from the Sargasso Sea
tatgatatctaaaaggctaataattgctctagatacagatgacttaaatcttgttaaaaaactaagtgctttttttgatccaaaattatgtttaatgaaagtaggtcttcagttatatattgcacacggaaaagaagttctagactatttaagcgagcaaggttttgaaatttttttggatttaaaactacatgatattccaaatacagtcgctaaatcgattaaagaaattcagaaatttaatataaaaatgaccacaattcattcccaaggaggagttgaaatgataaatgcagctctcgaccagtcaaatgatataaagatccttgctgtgagccttttaacaagtttagataggcgtgatgtttcaagactgtatgacaatgattttgaaaaacaattcgaaatgcttctcaaagttataacagatacaaaaacgcatggaatagtatgtagctctcatgagcttgctaaaattactgataataaccttattaaagttgttcctggaataagaaatgatgatgtttcagatgatcaaaaaagaataatgtcatctaaagcagcatatgcgaacggtgcagattttatagttgttggaaggccaataatcaattctgaaaatccatcagaagaatataaaaaatatttatga

SEQ ID NO: 276347 - DNA, 343 bp, Unknown
  Bacterial polypeptide expressing nucleotide sequence isolated from the Sargasso Sea
tatggagcaaagtgatttagtggagctgggtattaatttaacaccacaacagcaggtgctcagactggctggtctggtggaaaaatctggtttagatggcgtggtgtgttctgcacaagaagctgttgaattaaaacagcaatttggtaaagaattctgcttagtgacgcctggtattcgcccatcttttgccactgctgatgatcaaaaaagggtgatgactccagctgatgcgttaaaggctggtgtagactatatggtgatagggcgcccaattaccaaagcagccgatccgttatccgctttacaacaaatttatcgggagatttaccccgcgcattaa

SEQ ID NO: 276348 - DNA, 709 bp, Unknown
  Bacterial polypeptide expressing nucleotide sequence isolated from the Sargasso Sea
tatgtcatcaaataaagaagattccaaggtcataattgctctagactacagtaataaaaaagatactttaaatttagtaagtaagttagataaatcactatgcaatttaaaagttggatacgagctttttttgtcagaaggtcaaagtttaataaaagaacttcataaaagagaatttaaaattttccttgatttaaagcttcatgatattcctaatactgtaaaaagagcaattaatgttatttgtgattacggcatttggatgacaaatgttcatgtgcttggtggaaaagaaatgttagcttcagcgaaacaagtagttaaaaaagaatcacctgaaactaaattaataggagttacaattttaacttccttaaacgatgaccttctcaagcctttaggtttttctaatagtgttgaagaaacagtatacaattttgctgacttatgtcatgaggccggtcttgatggtattgtctgctcagctggtgaagcaatacatattagaaaaaaattcttagataacttcctaattgttacacctggaattagactaaagaacgatactgctgacgatcaaaaaagagttgtaacccctgtacaagcaaagaataatggtgtttcctacattgttgtaggtagacctgttacaatgagcagtgaccctttaagtatcttaaaaaagatcaataatgagtttaatgaataa

SEQ ID NO: 276349 - DNA, 700 bp, Unknown
  Bacterial polypeptide expressing nucleotide sequence isolated from the Sargasso Sea
gatgactataaaaaacagtgatcgtttaatttttgcactggatgttccagaaattgaacaggcgaaagatttaatcaaccaactcggcccaagcgtagattttttcaaaattggtatggagttgatgatgacaggcgattacttcaatctcctggactggcttgtcgaaaaagacaaaaaggtttttgttgatctaaaactttttgatgttccagcaaccgtttcaaaagccattaaaagactaagcaaaagaggcgcatactttacgaccattcatggcaaccaaagcatgatggaagctgctgcggcagaaaaaggcgatttaaaagtattggctgtgactgcattaacaagtctggaccgaggggatttggatgaccttggatttgattgtgcagtggaagagttggttatttcaagggctagaagagcatatgagtcaggcgtagatggagtagtggcctctggccttgaattaccaagcattaggaaagctgtcgaagataagattttaattgttacacctggaatccgacctgtggacaatcgacaaacagatgaccaaaaaagggtggttaccgttgagcaagcattccaggacggcgcagactatatagttgtcggccgaccaattcaaaacgcagataaccctagagaggcggcagaactgattcaggagagtatttctaaaaccatatag

SEQ ID NO: 276350 - DNA, 658 bp, Unknown
  Bacterial polypeptide expressing nucleotide sequence isolated from the Sargasso Sea
agttatgtcgaacaaaagactaattattgcactcgatttaaaaacatcgatgaagtatctaattttatctctaagcttgacccccaaaaatgtattgccaaagtaggtttacagctattcatatcagaaggacctaaggttttagaatttttatctcataagggttttgagatatttttagatttgaaattgcatgatataccaaatactgtcaaaaaatccgttgaagaaatatctcaatataatgtcaaactaacaacaatacatcttcaaggtggtcgagatatgattcaggctgctaatgaagctaagggagatacaaagattcttggtgttagtttgctaacaagccttgatgatagtgataccagagaactttataataatgatttcaaaaaacaatttgataatttaatcagtcttgcgatggagacgaaaattgatggaattgtatgtagttcacaagagcttgatatcgttaaagacacttcattgataaaggttgtgccagggataagaaatcaacacacattcgatgatcaaaaaagagtaatgacatcgggagaagcatactctaaaggtgctgattatattgtagttggtagaccgattacacaggcaaaagatattggagaagcaataaaggattactcgtgaa

SEQ ID NO: 276351 - DNA, 303 bp, Unknown
  Bacterial polypeptide expressing nucleotide sequence isolated from the Sargasso Sea
aatgagtagtcccatcatcatacctcttgataccaattacgataaggcgattactcttgctagaagtttcgatccagatttgtgtcgtttaaaagtgggaaaccagttatttacatcaagtggtccaagagtgatagatgagttatcttccttaggttatgatgtttttttagatttgaagttccatgatattcctaatacagtatttgaagcagtaagatcggttgctgatctaggagtgtggatgacaaaatatacatatttctggtggttcaaaatatgcttgatagtgcaaaaagagca

SEQ ID NO: 276352 - DNA, 664 bp, Unknown
  Bacterial polypeptide expressing nucleotide sequence isolated from the Sargasso Sea
aatgatcatagtagcaattgatgaaacaacttttgaaagagcatcagaagtaatagaagatcttgattcaaaaaaatgtatggtaaagattggaagtgttgcttttaatacaattggccacaaaattattagttttgcttctgaaaaaggatttgagatttttttagatcttaagttacacgacataccaaatactgtaaaaaaatctattcaaggattaacctctctacctattaacatgctaacaattcatacttccggcggaaaagacatgatgatggcggcaatggaggcggtttcaggatctcaaataaaggtctttggcgtcactgctttaactagccttaataataatgatacaaagtatatatttaaaagaactacctcagagcaagtaaatgctatgttagatttagctgaagatgcaggtatagatggagttgtatgttctcctcatgaacttgaacttgttagcaaacgagacaatttgttatcgataactccaggcataagacttcatgaatcaaatgatgatcagaagagagttatgactccaagagaagcaattgatcttggagcaaattatcttgtcattggaagaccaataaccgaatcaaaagatataaaaaaatctttaaatgaaatatatcaaagtatgatatga

SEQ ID NO: 276353 - DNA, 555 bp, Unknown
  Bacterial polypeptide expressing nucleotide sequence isolated from the Sargasso Sea
aatgtcagttaaacctattttctttgcattggatggcaaagagctaagcgaatttacagaaacccttaaaaaactgaaaggtgtgatttatggagtaaaagttggattagaaatgtttactgccgaaggcccttcttcagttgagaagctaaaaaatgatggttggaaagtatttttagatcttaaattacacgacattccaaatactgtagaagcagcaacagtaagtgcaggaaatattggtgctgattatttgactattcatatagcatcagaaaaagaagctctccttgcagcaagtgaaaataaaacagacaatattcaacttcttggtgttagtagtgcactaacaagtaaggcaatagatgaagaaactagtaataacgttgaaaaagattttatagttgcgaaagaatcaggaattgatggtgttatctgtccagcttcagagattctaacaactaaaaaactctttgatctgattgttacgcctggaattagattagagagtgatagtaaagatgaccaaagaaacaccacaactccagaaaaagc

SEQ ID NO: 276354 - DNA, 647 bp, Unknown
  Bacterial polypeptide expressing nucleotide sequence isolated from the Sargasso Sea
gtctaacaaaagactaattatcgccctagattttaagaacattgatgaaatgtctcacttcatctctagtcttgatccccaaaaatgtattgtcaaagttggactgcagctatttatatcagaaggacccaaggttttagattttttatcacaacgtggttttgagatatttttggatcttaaattacatgatatacccaatactgtcagaaaatctgttgaagaaatttcacaatacaatatcaaattaacaacaatacatcttcaaggtggtcgtgacatgattcaagcagcaaatcaagttaagggagatacaaagcttcttggggttagtttgctcacaagccttgacgatagtgataccagagaactctataacaatgattttaaaaaacaatttaacaatttgatcaatcttgccacagagacaaaagttgatggaattgtatgtagttcacaagagcttgaacttattacagatccttcattaattaaggttgtgccaggaataagaaatcaagaatcatctgatgatcaaaaaagagtaatgacgtccagtgaagcatattctaatggtgcagattatattgtggtcggcagaccaattacacaggcaaaatatattgcagaagctgtcaaggattaat

SEQ ID NO: 276355 - DNA, 652 bp, Unknown
  Bacterial polypeptide expressing nucleotide sequence isolated from the Sargasso Sea
atgaataaaaaattaatagttgctcttgattttgatagtgctgacttagcattaaattttttagaaaatttaaacccgcaaaagtgcttagtaaaagttggattagagctttttatctcggaaggttggaaagtattagacctgatctcagagaagggatttgaaatcttccttgatctaaagcttcatgatattccaaatacagtggcaaactctgttagaaagatttccaattttaatgttgctcttactacaattcatctcaatggcggcaaagatatgatagaagcagccttatcagaaaaagggaatataaaaatccttggagtcagcatacttacaagcttgtctgaaaatgatatttttgaaataactcatacagaattcgatgcttattttaataatttaatatctattgcttctaatgcgaatatagatggagtagtttgttctccaaatgaactgattaaactgaagaattttaaaaagcttaaggttgtccctggtataagaaatgatatttcagatgatgatcaaaaaagagttatgagctcaatggaagcttatgaaaaaggcgctgactttattgttgttggaagacctataactaaatcagaggatccaagaaaagccttggagcttttcttatgaa

SEQ ID NO: 276356 - DNA, 652 bp, Unknown
  Bacterial polypeptide expressing nucleotide sequence isolated from the Sargasso Sea
tatgaataacaaattaatagttgctcttgattttgatagcgctgaattagcattaaattttttagaaaatttagacccgcaaaagtgcttagtaaaagttggattagagctttttatttcggaagggtggaatgtattagacttaatctcagaaaagggatttgaaatcttccttgatctaaagctccatgatattccaaatacagtagcaaattctgttagaaagatttccaattttaatgttgctcttactacaattcatcttaacggtggcaaagatatgattgaagcagcctcttcagaaaaagggaatataaaaatccttggagttagcatacttacaagcttgtctgagagtgatatttttgaaataactcatacaaaattcgatgcttattttaataatttaatatctatggctactagcacgaatatagatggagtagtttgttctccaaatgaactgattaaactgaagaattttaaaaagctaaaggttgttcctggtataagaaatgatatttcaaatgatgatcagaaaagagtcatgagctcaacggaagcttatgaaaaaggcgctgactatattgttgttggaagacctataactaaatcaaaggatccaagaaaagccttggagcttttcttatga

SEQ ID NO: 276357 - DNA, 637 bp, Unknown
  Bacterial polypeptide expressing nucleotide sequence isolated from the Sargasso Sea
tctgttagagtatacagcgatctatggagccaaatttgtgaaaaaaagaataatagtagcattagattttgatactccctctaaagccttaaattttcttgatcacttagatccagatctttgcagggtaaaaattggaaaggagttatttacggcaggtgggcctgacctagtaagttcagtggttagcaaaaactttgatgtctttcttgacttaaaatttcatgatattccaaacacggtcgcaggcgctgtgcgggttgcctctgaacttggggtttggatgcttaatgtacatattgcaggtggctctaggatgatgagagcggcaaaagaagcattatcgaggagccgtgggcagcctccaatattaatcggagtaacagtgctgacaagtctgtcaaaagaggatctttttgaggttggtgtcaataatgacctagcagagcatgtgatgaaccttgccagtctagcgcataagtctggactggatggtgttgtttgttcggcagatgaagctaaattattgagagcatccctctcgaaagattttaaattgatcactccaggcatcagaagagtccaagactccacaggtgatcaaaagagagtgataagtccttcagaggcgattcaa

SEQ ID NO: 276358 - DNA, 577 bp, Unknown
  Bacterial polypeptide expressing nucleotide sequence isolated from the Sargasso Sea
taaaaaaattagaaagggtcatatttttggagtaaaagttggtcttgaactgtttatctctgaggggccaaaagtagttgaaaagttgaaaaaagatggatggactgtttttcttgatcttaaacttcatgatattcccaacacagtaaaaaaagccacaaaaagtgctaataatctgggagcagattttttaactatacacattgcgtcaggtaaagatgctttacaagaagcctcttcaagcaaaaatgattctttaaaaattttaggagttagtcaagcacttacaagctcaacaatggatgcaaaaatgagtaaaggtgtatctgaagattttcttttggctaagcaatgtggtattgacggtgttatttgtcctccaagtgaaatagagagaactaaaaatctttatgatttaatcgttacaccaggaatcagattaaacaacgataccaaagatgatcaaaaaaatactacaactccagaaaatgcaatacttgcaggagcaaaatatatagttatgggaagatccataataaataatttggattatgtaatgaatgaattagatatatga

SEQ ID NO: 276359 - DNA, 663 bp, Unknown
  Bacterial polypeptide expressing nucleotide sequence isolated from the Sargasso Sea
catgacaaatcagccaacactgcccgcgaacccggtgttcgcggcgctcgacacgcccgatctggaacaggccctcgcctgggccgaggtcctgcgcggtcaggtgggcggggtgaaagccgggctcgagttcttctccgccaacggcgccgacggggttcggcggatcgtcgatctcggcctgcccctgttcctcgatctgaagttccacgacatccccaataccgtggccggcgccgtgcgggcggttgccgatctgggcgcggccatcgtcaatgtgcacgcggccggcgggccggccatgctcgaagccgcccgcgaggcggccgaggtggccggtggcgctaaccgcccgctggtcatcgccgtgacggtgctgaccagcatggacgacagcgacctgacggccgtcggtcaggccacaccggcgggcgaacaggtcgtccgcctggcgcaactggccgaggcacagggcctcgacggcgtggtctgctcgccggccgagatcaccgccatccgcgcggcatgtgggccggatttcaagctgatcgtgccgggcattcgccccgaatgggccgcaaccggcgaccagaaacgtatcaccacgccgcggcaggcccgcgacgatggtgcggatgtccttgtcatcgggcgcccgatcac

SEQ ID NO: 276360 - DNA, 541 bp, Unknown
  Bacterial polypeptide expressing nucleotide sequence isolated from the Sargasso Sea
atgataatcgtagcgatagatgaaactgatttctcgataataaaaagtattatcaattcacttgataataaaaaatgtatgttaaagattggaagtgttgcctacaattcgattggaaatgaagtaatattttacgcatctaaaaaaggattcgatgtatttctcgatcttaaacttcatgatattccaaataccgtaaaaaaatctattaaaggtatggctttcttaccaatccaaatgttaactattcatatatctggtggaaaagaaatgatgattgctgctatggaagcagtatcaggatatgatataaaagttttaggagtgacagctcttacgagccttgatgatgaagatacaaatgagatttatcaaagaactgtaaaaaaacaggtaattgcaatgctagatttggcggaagcttctggcatagatggggtagtgtgctcaccccatgaactagaattagtttcaaaaagagaaaatctaatatcagtaactcctggtataagattaaaaagtttagttgatgatcagaaaa

SEQ ID NO: 276361 - DNA, 646 bp, Unknown
  Bacterial polypeptide expressing nucleotide sequence isolated from the Sargasso Sea
atgaataataccagtcctatagtggtcgccttagactttgagcaaaaatccgcagcattaaatttagtcagccaacttgacccggcgttgtgccgtttaaaagtcggtaaagagatgtttactcactttggtccggactttgtcaaagagctgcagcagcgcaagtttgatgtgtttttagatctgaagtttcacgatattccaaacacagtcgccaaagctgtcaaagcatcggccgacttaggtgtctggatggtaaacgtccatgcctgcggtggtagccgtatgatgattgctgcccgcgaagccctagaaagctttggcaaagaaaaaccactgctgattgctgtgactgtattgaccagtatggagcaaagtgatttagtggagctgggtattaatttaacgccacagcagcaggtactaagactggctgggctggtggataagtcaggtttggatggcgtggtttgttctgcacaagaagctgttgaattaaaacagcaatttggtaaagaattctgcttagtaacacctggtattcgtccatcttttgctactgctgatgatcaaaaaagggtgatgactccagctgatgcgttaaaggctggtgtagactatatggtgatagggcgccccaatacca

SEQ ID NO: 276362 - DNA, 706 bp, Unknown
  Bacterial polypeptide expressing nucleotide sequence isolated from the Sargasso Sea
gatgacgaccaaacctatcctcgtagcgcttgattacgataataaaaaccacgccttacaactgatagatcaactcgatcccaacatgtgccgcctcaaagtgggcaaagaaatgtttaccctatttggcccacaattggttaaagacattcacgaccgcggtttcgatcttttcctcgacctaaagtttcacgatattcccaatacggtcgccaaagcagtcgcggccgcggcagaacttggcgtgtggatgacaaacgtgcatgccagtggtggcttggccatgatggaagcagcgaaaaaagcgttgcagccctatggtaaggatgcacctctgctaatcgcagtaacggttctcacttccatgagcgatgaggatttaaaactcatcggcattgatgttccagcttttgagcatgtgcaacgtctcgcgaaactcaccaagcaggcaggtcttgatggtgtggtctgttcggcgcaagaggcgagcgtacttaaatcgctcttaggtcaagattttaaacttatcaccccggggatccgccccgtgggcagtgacgtgggtgaccaacaccgggtgatgacgccaccggaggcgcttgccgctggttctgattatttagtgattggtcgaccaatcactaaggccgccgatcctctggcggcgttgcaggcgattcatcaatctctcgctagagaggcatga

SEQ ID NO: 276363 - DNA, 697 bp, Unknown
  Bacterial polypeptide expressing nucleotide sequence isolated from the Sargasso Sea
gatgacgactaaacctatcctcgtagcgcttgattacgataataaaaaccacgctttacaattgatagatcaactcgatcccaacatgtgccgccttaaagttggcaaagaaatgtttaccctgttcggcccgcagttagttaaagatatccatgaccgtggcttcgatcttttcctcgacttaaaatttcacgatatccctaatacggttgcgaaagcggttgctgctgcagcggaacttggtgtgtggatgacgaatgtccatgccagtggcggcttagcgatgatggaagcggcgagaaaggctttgctgccttacggtaacgaggcgccaatgctgattgctgtgacggtattaacctctatgagcgatgacgatctgaagctcatcggcattgatgtgccagcatttgagcatgttcagcgtttagctaaattgactaaacaggccggacttgatggtgttgtctgttcagcccaagaagcgagtgtgcttaaatctttattaggccaagactttaaacttattacacctggtattcgtcctgtgggtagtgaggttggcgaccaacaccgtgtgatgacgccgcctgaggcgcttgctgccggttctgattatttagtgattggtcgtccgatcactaaggcgacagatcctctggctgcgctgcaggcgattcaccaatctttgctttag

SEQ ID NO: 276364 - DNA, 685 bp, Unknown
  Bacterial polypeptide expressing nucleotide sequence isolated from the Sargasso Sea
atggaaaataagataattattccacttgatttagatggtaaagaagcttcggagcttgctaaaacacttgacccaaaaatttgtagactgaaagtaggaaatcaattatttacctcatcaggacctaaaattgtaaaagaatttcaacaacagggctttgatattttccttgatttaaagtttcacgatattcctaacacagtacatgaagcggttaaatctgccgcagacctaggagtttggatggttaatgtgcatgcagcaggagggaggaagatgctagaggcttctagaaaagctttagaggattactccaatcctccgctattgataggcgtgactgtcttaacaagtttttctgaagactctcttttagatataggtttaagcaatcttagtgagcaagtaataaggcttacacggttagcaaaaaatagcggcttagatggagttgtatgcgctgcttctgatacaaaatttgtaaaaactgagtttggaaaagactttttaacggttacaccgggtataaggccatctgggtcgagattagatgatcagagtagagtttcgactcctctggaagcaataagaaatggatctgactatctcgttataggaagaccgataactgggtcacctgatccaaagaacacgcttgaagaaatttataaagaaatatcatgaa

SEQ ID NO: 276365 - DNA, 652 bp, Unknown
  Bacterial polypeptide expressing nucleotide sequence isolated from the Sargasso Sea
atgaaaaagaaattaatagttgctcttgattttgatagtgctgagttagcattaaatttcttagaaaatttagatccgcaaaagtgcttagtaaaagttggattagagctttttatctcagaagggtggaaggtattagacttaatttcagaaaagggatttgaaatcttcctagatcttaagctgcatgatattcctaatacagtagcaaattctgttagaaagatttctaattttaatgttgcccttactacaattcatctcaatggcggtaaagatatgattgaagcagcctcttcagaaaaaggaaatataaaaatccttggagttagcatacttacaagcctgtctgagaatgacatttttgaaataacccatacagaatttgatacttattttaataatttaatatctattgcttctaacacaaatattgatggagtagtttgttccccaaatgaactcgataaactgaagaactttaataagcttaaggttgttcctggtataagaaatgattttttagatgatgatcagaaaagagtgatgagtcctttcgaagcctataaaaatggtgctgattttattgttgttggaagacctataactaaatcagaggacccaagaaaagctttggagcttttcttatgaa

SEQ ID NO: 276366 - DNA, 685 bp, Unknown
  Bacterial polypeptide expressing nucleotide sequence isolated from the Sargasso Sea
aatgagtagtcccatcatcatacctcttgataccaattacgataaggcgattactcttgctagaagtttcgatccagatttgtgtcgtttaaaagtgggaaaccagttatttacttcaagtggtccaagagtgatagatgagttatcttccttaggttatgatgtttttttagatttgaagttccatgatattcctaatacagtatttgaagcagtaaaatcggttgctgatctaggagtgtggatgacaaatatacatatttctggtggttcaaatatgcttgatagtgcaaaaagagcattagattcttataaaaatcctcctttattaattggagtcaccatgttgacaagtctaagcaatgaagacgttaaagaattaggcataaatgacctctctactagcataataaatttagctcaattggcaaaatatcatgatctagatggtgtagtgtgttctgcccaagaagtttctgagattaagagattacttggggatgactttattgctgtaactccagggattagaccggtttccactgacgatgatcaaacaagagtttccactcctcaggaagctataaagaatggatcggactatttggtaattggtagacctattactgcaactaaaaatcctttagaatcacttgaaaaaatacttagagatataaatctatga

SEQ ID NO: 276367 - DNA, 655 bp, Unknown
  Bacterial polypeptide expressing nucleotide sequence isolated from the Sargasso Sea
aatgtctcagaaaaaactaatcattgcattggattttgccaatctagatgaagtcaaaaaaataattgaacacattaacccagaacaatccatggtaaaagttggtcttcaattatatgtatctgaaggaaagagagttttagattacttaacagaaaaagggttcgagatatttctggatttaaaattgcatgatattcctaatactgttgatagaacagttaaagagatctcaaattttaatgtagcaatgacaacaatacaccttcagggaggcagagacatgatagaagctgccttagaaagttcatcaaaaacaaaaataataggtgttagtgttctgactagcttaaatgataaagatatgaatgaaatgcatggaagcagttttaatgaccaatttggacgacttatgaagctagcagagagcactaaaattgatggtattgtttgtagccctcaagagcttaagcaacttaaagaattcaatagaataaaagttgtgcctggaataagaaatgaactaactagcgatgatcagaaaagaacaatgagctcaaaagaagcttatgaaaatggtgcagattttatagttgtgggtaggcccataactcaagcagacaatattaaagaaactattttaaattacatataa

SEQ ID NO: 276368 - DNA, 652 bp, Unknown
  Bacterial polypeptide expressing nucleotide sequence isolated from the Sargasso Sea
atgaaaaagaaattaatagtcgctcttgattttgatagtactgagttagcattaaatttcttagaaaatttagacccacaaaagtgcttagtaaaagttggattagagctttttatctcagaagggtggaaagtattagacttaatttcagaaaagggattcgaaatcttccttgatcttaagctgcatgatattcctaatacagtagcaaattctgttagacagatttctaattttaatgttgcacttactacaattcatctcaatggcggtaaagatatgattgaagcagcctcttcagaaaaagggaatataaaaatccttggagttagcatacttactagcctatctgagaatgacatttttgaaataacccacacagaattcgatgcttattttgataatttaatatctattgcctctaacacgaatattgatggagtggtttgttccccaaatgaactcgataaactgaagaattttaataagcttaaggtcgttcctggtataagaaatcatatttcagatgatgatcagaaaagagtgatgagtcctctcgaggcctatcaaaagggtgctgattttattgttgttggaagacctataactaaatcagaggacccaagaaaagccttggagcttttcttatgaa

SEQ ID NO: 276369 - DNA, 652 bp, Unknown
  Bacterial polypeptide expressing nucleotide sequence isolated from the Sargasso Sea
tatgaaaaagaaattaatagttgctcttgattttgaaagcgctgagttagcgttagacgtcttagaaaacctagacccgcaaaagtgcttagtaaaagttggattagagctttttatctcggaagggtggaaagtattagacttaatctcagaaaagggatttgaaatcttccttgatcttaagctgcatgatattcctaatacagtagcaaattctattaaaaagatttccaattttaatgttgccctaactacaattcatctcaatggcggtaaagatatgattgaagcagcctcttcagaaaaaggggatataaaaatccttggagttagcatacttacaagtctgtctgaaaatgacatttttgaaataacccatacagaattcgatacttattttaataatttaatatctattgcttctaacacgaatattgatggagtagtttgttccccaaatgaactcgataaactgaagaattttaataagcttaaggttgttcctggtataagaaatgatatttcagatgatgatcagaaaagagtgatgagctctctcgaagcctatcaaaaaggtgctgattttattgttgttggaagacctataactaaatcagaggatccaagaaaagccttggagcttttcttgtga

SEQ ID NO: 276370 - DNA, 244 bp, Unknown
  Bacterial polypeptide expressing nucleotide sequence isolated from the Sargasso Sea
aaagtcggcaaagaaaagtttacccactttggcccggactttgtcaaagaactgcatcagcgcaagtttgatgtgtttttagacctgaaatttcacgatattccaaatacagtggccaaagcagtgaaagcctctgccgatttaggtgtgtggatggtgaatgtacatgcatccggtggcagtcgtatgatgattgcagcccgcgaagctttagaaagttttggtaaagagaaaccactctgat

SEQ ID NO: 276371 - DNA, 685 bp, Unknown
  Bacterial polypeptide expressing nucleotide sequence isolated from the Sargasso Sea
atgaaaaatagaatcattattcctctagatcttgatcatattaatgctttaaatattgccaaaactcttgatccaaaaatctgcaggttaaaggtaggtaaccaattattcacttcatcaggtcctcaagtaattactgatctgaaaggactgggatttgaaatatttttagacttaaaatttcacgatattccaaatactgtctacgaagcagtaaggtccgctgctgatcttggagtatggatggtaaatgttcatgcttctggtggcattaaaatgctggaagcctcaagaagggccttagaaggctatgatcacccccctttattaattggtgtcacagttttaacaagtctatcagaagatgctctcaaagaagttggcttgcagggagtttcagagcaagttttaagactggcgaccttagctaaagaatgtgagttagatggagttgtgtgtgcatcatcagatacaaaaggtataaaagaaaaatttggcgaaaattttttaactgtaactcctggaataagacctttactatctgattcaaatgatcaaagcagagtatcaacacctgaagaagccgttaagaatggctctgattttcttgttataggaaggcccattactggttcccaaaatcccagagctactctagaagaaataaatttaaaaattgcatgac

SEQ ID NO: 276372 - DNA, 640 bp, Unknown
  Bacterial polypeptide expressing nucleotide sequence isolated from the Sargasso Sea
atgtcagttaaaccaattttctttgcactagatggcaaatcactaaaagaatttgaaaagcaattagatatcttaaaagatcatatttatggtgtaaaagttggattagaactttttacttccgaaggcccttcatgtgtggaacaacttaagagtgatgggtgggttgtattcttagatttaaaactacatgacattccaaatactgtaggtcaagctgctacttcagtatcaaatattggagcagactatttaactttacatatatcatctgggcaagaagccctatcagaagctgtaaataaaaaaagtaaagatttaaaccttcttggagtcagtagtgctctaacaagtaaagcagttaattcaagtacaagcaagattgtagaaaacgagtttcaaatagcaaaggactcaaatttagatggcgtaatttgtccagcatctgaaattgctaatacaacaaagttatttgatctaattgttacaccaggcattagattagaaaatgatttacgtggagatcaaaaaaatataactactcctaaaaaagctatcgagcttggagcaaaatatattgttatgggacgatcaattaaaaataatccttcaatggtaataaatgaattagaagtatgaa

SEQ ID NO: 276373 - DNA, 697 bp, Unknown
  Bacterial polypeptide expressing nucleotide sequence isolated from the Sargasso Sea
atgacgactaaacctatcctcgtagcgcttgattacgataataaaaaccatgccttacaactgatagatcaactcgatcccaacatgtgccgcctcaaagtgggcaaagaaatgtttaccttgtttggcccacaattggttaaagacattcacgaccgtggtttcgatcttttcctcgacctaaagtttcacgatattcctaatacggtcgccaaagcggtcgcggccgcggcagaacttggggtgtggatgacaaacgtccatgccagcggtggcttggccatgatggaagcagcgaaaaaagcgttgcagccctatggtaatgacgcacctatgctcatcgcagtaacggttctcacttccatgagtgatgaggatttaaaactcatcggcattgatgtaccagcttttgagcatgtgcaacgtctcgcgaaacttaccaagcaggcaggtcttgatggtgtggtctgttcagcgcaagagtcgaacgtacttaaatcgctcttaggtcaagattttaaacttatcaccccggggatccgccctgtgggcagtgacgtgggtgaccaacaccgggtgatgacgccaccgcaggcgcttgccgctggttctgattatttagtgattggccgaccaatcactaaggccgccgatcctctggcggcgttgcaggcgattcatcaatctctcacttgag

SEQ ID NO: 276374 - DNA, 655 bp, Unknown
  Bacterial polypeptide expressing nucleotide sequence isolated from the Sargasso Sea
atgtctcagagaaaactaattattgcattagattttgccaacttaaatgatgtcaaaaagatagtcgagcatattgatcctcagcaatcgatggttaaagtaggtcttcaattatatttagctgaaggaaaaagagctttagattacttgtcagaaaaaggtttcacgatattcttggatttgaaattgcatgatataccaaatactgtaaataaagcagttaaagagatatcaaattttaatgtggcaatgacaacaattcatcttaatgggggtaggaatatgatagaagctgctttagagggcgcatcaaatacaaaaataattggtgttagtgttttaactagtctgaatgatgatgatgtcgaggaaatgcatggaagtaattttgataatcagtttaaaaggataataaaactagcagagactactgaaattgatggtattgtttgtagccctcaagaactttcaaacctcaaggaacttaataaaataaaagttgtgccaggaataagaaatgagttaagtggagatgatcaaaaaagaactatgagttcaacagaagcttataaaaatggtgcagactttatagttgtaggaagacctataactcaagctgaaaatgttaaaacagctatcttagactacatataag

SEQ ID NO: 276375 - DNA, 622 bp, Unknown
  Bacterial polypeptide expressing nucleotide sequence isolated from the Sargasso Sea
ttttttgcattagacggtaaatcaattaatgaatttgagtttgaacttaaaaagcttgagggtcatatctatggagtaaaagtagggcttgagctttttatttctgaaggaccatctgtggtagagagattaaaaaaacaaggatggaaagtttttttagatctaaaacttcacgatataccaaatacagttaaagaagctacaaaaagtgcagcaaaccttggtgcagattttttaacaattcatattgcatctactagtgaagccttgattgaagcatcaagtaataaaggtaatactttacaaattctcggtgttagtagtgcattaactagtaaagctatgagcagctcgataagtgaaaatgtaaataaagagtttaaagaagcaaaggattgtggtgttgacggagtaatttgtcccgcttcagaaatttctaaaacaaaagaaatatttgatttaattgtaactcctgggattcgccttaaaaatgatgacaaaaatgatcaaaaaaatgttgcaacacccaattttgcaattaatgaaggtgcaaattatatagttatgggaagaactataagaaataatctcgattacattatcaacgatttacagttatgaa

SEQ ID NO: 276376 - DNA, 440 bp, Unknown
  Bacterial polypeptide expressing nucleotide sequence isolated from the Sargasso Sea
actgccaaaaaaattcataacttcatcaactggaggtggagttcttcaagatacggcatcaagttcaagcttggttgctttaattgccgcacgagaaaaagcatctaacggtgaaataaatgatagcggatataatcaaaaattaacagtttatacttcatcgcaagcgcattcatctatagaaaaagccgttaagatagctggcattggcaaaaataacttaagattagttgatgttgatgattcattcgcaatggatccaaatcatcttaggaaattgatattaactgatatagaacaaggactccagccagcatatgtttgtgcaactgttggcacaacatcaagtactgcaattgaccccgttgataaaattggtccaatttgtaaggaatttggaatatggcttcatgttgatgcagcaatggctggacctgctg

SEQ ID NO: 276377 - DNA, 1056 bp, Unknown
  Bacterial polypeptide expressing nucleotide sequence isolated from the Sargasso Sea
tgctccatcttcccaaaaaatttaaatctactagttctggaggtggtgtcattcaagatacagcttccagcgcaacactttgtgctctaatagctgctagagaaaaaatatctaatggaaaaataaatgaaagcggatttgacgattctattagagtttatacttctaaagaagctcattcttcaatagaaaaagcaattaaaatagcaggaattggaagaaaaaatcttagactaattaaagtcgataataactttgctatggatcctatcaaattacgtgaagcaatcaatcaagatataaacaataacaaaacacctgcttttgtttgcgctactgttggcaccacatcaagtacagcaattgatccattaaaagaaattggtaaaatatgtgatgaatttggtttatggctgcatgttgatgctgcaatggctggatcggcatcaatttgtcctgagtatcagtttatacatgatggaatcgaatatgctgatagttactgctttaacccacataaatttttccttactaactttgactgtagctgcttatatgtttctgatagacaagcgttaattaattctctaacaattaatccagaatacctgaagacagaggtgagtaattctgatacggtatttgattatagagactggcaaatacctctcggaagaaagtttagatctttaaaactatggagtgttatcaagtattatggaattgatggaatacaatcacatgttagacaacatatttcatctgcaaagttgttatcggaattaattattaaagaagaaaaatttgagattatggcaccaacgatacttaatttagtttgtttccgatataaaggatctgatcactttaataaaacacttttagaagaactaaactcaagtggaaagatatatttagtccatacaaaattaaatgatatatacacgttgagattttctattgggcaaacaaataccacaaaagaccatgtgttaaatggctggaaatttatcttaaaaaagactgaagaattggaaagaaatggagttaagtagc

SEQ ID NO: 276378 - DNA, 1003 bp, Unknown
  Bacterial polypeptide expressing nucleotide sequence isolated from the Sargasso Sea
tcaagtgctacactttgtgctttattaactgcccgagagaaaatcaccgctgacacagttaataaatcaggctttaatgcagagaattcaaaattgactgtgtatacgtcggaggaagcgcattcgtccgccgaaaagggtgccaaaatagcaggttttgggcgagataatatccgttttattcggacggatagtctatttggtatgtgtgcagacactctacgggcacaaattctatcagatctagaacagggagcactccctacttgtgttgttgcttccattggaactacaggtgttggagccgttgatccaataagaaaaatagcttcagtctgtgaggagtttgatttgtttctgcatgttgatgcggcatgggcaggatctgcaatgatactacctgaacaaaaagcaatggccgatggagtcgagttagccgacagcatcgtcataaacccgcacaagtggttgctgacaaatttcgattgttccgctcactttgtaaaggatcctgaagcccttgtacgcacactcaccattttacccgaatatcttaagaataatgaaagtgaaaatataattgactatcgggattggagcattccgcttgggcgacgattcagagccttaaaactttggtttgttattaggtattacggcgtggaaggacttcaagaaattatcagaaaacacataaaattagcctcacaagttgaagaatggataaacagatcaagcaattttgaattggtgacgccacgatcactatctttgattaacttcagatttctgcctgagcaaaatggcaagtttctagatattgatgaattgaacctaaagcttataaatgagctaaatgacagtggtagtgtctattttacccaaaatcgtgtgcgcggtgattttgtaataaggtggtcaattggccagacaaatacagaattaaggcacgttgaagatgcttggatacaagtccagaaaatagcatcaagcctcaattagg

SEQ ID NO: 276379 - DNA, 766 bp, Unknown
  Bacterial polypeptide expressing nucleotide sequence isolated from the Sargasso Sea
gaaaaagctaccgactggcgaaccaataaagaggggatgaactcgttgtcgtcatcactaatagtgtatacttcggaagaggcacactcttccacagaaaagggtgcaaagatcgcaggctttggcaaagatagcgtccgacttatccgtacgggtaataactttgagatgtgttctgaagcactagagcgcaccattttagaggatatatcgaatggatatactccagcatgcgttgttgcgtcaatgggtacgacgggcgtcggtgctactgatcctctgaaggctattggccaactctgtaaagaatatgaaatttttttgcatgttgatgctgcgtgggctggctctgctttaatcttgcctgaagaacgatggatggcagagggaattgaaatggcagacagtattgttttcaatccacataaatggctattaacgaattttgattgttcagcgcattatgtaaaacaaccggaattgcttattcgtactctatcaatccttccggaatatctaaaaagtagagaacaagatcaggtgattgactatcgcgattggagcgttcctctggggcggcggtttagggccttaaaactctggtttgtgatacgctcctatggtgttaaaggtcttcagaagatcatccgaaatcatattaaattagcccaatacgctgctacttggatggatgaggatcctgagtttgaattggtatcaccgaggtctttatccttattaaattttaggtttcgaccgaaaaata

SEQ ID NO: 276380 - DNA, 821 bp, Unknown
  Bacterial polypeptide expressing nucleotide sequence isolated from the Sargasso Sea
aaaaattaaagttacccagcagggagaggtaatttcagataattttgcaaactctgatctatctcaaataaatcttaaaataattctatcttctgttatcgaagcttcattaaatgaaaaggaaagccattcagaaaaatggaaagatctaatgaattttctttctaatgaaagttatgactattatcgcaaattgattaatgaagaaaattttgttgattacgtaaaaaaaagtactcctcttgaagaattttcaaaaatgaatattggctctaggccctctaaaagaaattcaggcagcaatacattaaaggatcttagagcgataccttgggtattttcttggtctcagtcaagacaaatcattacaggttggtatggatttggttatgcaattgagagagctatagaagaaggaaaagaagaagaaataaagaaaatgcacaaagagctaaaattctttcgggcattagtatctaatgtagaaatgaatttagctaagacagatatggcgatatcagaatcttatgtcgatgagttacatgatggtcagcatgaaattttaaatgaaattaaaaaagaatttagtagatcagaaagtttaataaaaaaaattacttcacagaaatcattattagaaaataatcccacgctcaaaaaaaccctagatgttagagaggcatatttgattccactaaatatgtttcaaattatctttctaaaaaaaatcagagaaggtgttggtgatccccagcttttaaccagaggtctattactaactataaatgggctttctgccggattaaaaaatactggctaat

SEQ ID NO: 276381 - DNA, 598 bp, Unknown
  Bacterial polypeptide expressing nucleotide sequence isolated from the Sargasso Sea
accgtaactcctcatatggcactagggaaattatcaattggctctagaccttctaaaagaaaaaatgttgataatataaatagtttaagagctattccttgggtttttgcctggacacaaattagattaatgttacccgcttggttaggtactgctgaggccttaagatattcatctataaagaaatttaaaaaaacacttattgatatggaaaaaaactggccttattttaattcaacaatggacttgcttgacatggtaatttctaaggtagacccagaaatatcaaaaatttacgaaaaaaacctagctgatgataaacttatcagagttggaaaaaaattaagatttcaatttgatgctgttaaaaaattgaatgatcaaataacaccaaaagaaatttttaaacaaagaaaaatttttagaggtccagcaattattagaaacatatattctgaaatccttaatgttttacaagcagtagtgatgaataagcttttaaaaagaaatttaaataaaaaagataaaaaagatttaaatgatgcaatgatggcatcaatagcaggtatttctgcagctatcaaaaatactggataat

SEQ ID NO: 276382 - DNA, 921 bp, Unknown
  Bacterial polypeptide expressing nucleotide sequence isolated from the Sargasso Sea
aaaaaccttaaacaatttaagtccatcaaatacttttaaattaacaagagctttttctcacttcatgaattttattaatttagccgagtcaatcgatgcctcaagaagattaaatgaatatgaaaatagtaagaaaaaatcttcaagcaaaaatatttttattgaagaaatatttgaagaattgttcaaaaataaaaatatttcttctaatacaatttataatcttgcaaaaaatttaaatataggaattgttttaaccgctcatccaacagaggttaaaagaagaactctaattcaaaaatatcataaaattacagaaataatggaacaaagagaactattaaaaaaatttccatcaaaattaaaaactttagataaaaaaatttatgatgaattcacaataatttggaatacagatgacttaaaaagaacaagaccctctccatttgatgaagctagatggggtttggctataatagaggatagcctttgggagacaattcctagagtttatagaagactaaataatatttttttgaaaaatatgaataaaaatttacctaaaaattttaatccgattgagtttggatcatggatgggtggagatagagatggcaatcctaatgtaacagcagaagttacaaaagaagttatacttttatcaagatgggaagctgcaaaactttatgaaaaagaattaacaaagttaattagatcttattctatggcaaaatgttcaaagaaaataattaaatcgacaggaaaatcatttgaaccatatagagtttatcttagacctttgagaaataagatgagactaacgcacagatccatagaacaacatttaataaataatcaaactttagataaagataaacttttaaaatctaaagaagaaattttacaacctttgagaatagt

SEQ ID NO: 276383 - DNA, 735 bp, Unknown
  Bacterial polypeptide expressing nucleotide sequence isolated from the Sargasso Sea
taatggaggctactctaaatccaccaccacaacctaaagatagttggagaaaattaatagaaaaaatgaccaaaatttctactttagcttatagaaaaaatataaacgagaactcagattttataagatattttaaaactgttacgcctcacttagctcttggaaaattatcaataggatcacgaccttctaaaagaaaaaatgtagataacatccaaagcttaagagcaatcccttgggtatttgcatggacgcaaataagattaatgttaccagcttggttgggaactggcgatgccttaaaatattcttcagtaaaaaaatataaaactaccctcactgatatggaaaaaaattggccatttttcaattctacaatggatattttagatatggttatttcaaaagttgacccagagatatcagaagtttatgaaaacgctcttgctgataaaaaattaacagaagtaggtcacaaacttagatcagagtttggaatgattaaaaaattaaatagatacataactccatgggaaataattaatcaaagaaaaaaatttagaacaacagtcctagtaagagacatttattctgaagttttaaatatactacaagccgtagttatgaataaattatcaaagaaaaaattcaaatctaatgataagaaatatcttaatgatgcaatgatgacatcaatagcaggtatatctgcggcgatgaagaataccggttaaa

SEQ ID NO: 276384 - DNA, 1112 bp, Unknown
  Bacterial polypeptide expressing nucleotide sequence isolated from the Sargasso Sea
aagaggaagtcagactttttggtggagaacagatgaattgcatcaatttaagccttccgttttagatgaagtagattatgctttgcattattttcagcaagttttatttaatgcaatgcctaaattgagaggtagaatttttgaagcgcttaccgaaaactacccagatgttcagatgccttctgaatctttttgcaactttggttcttgggtaggatccgatagggatgggaatccatctgttactcctgagataacatggagaactgcttgttaccaaaggcagttgatgttggaaagatatataactgcgacatctaacttaagagatcaattaagtgtctcaatgcaatggagtcaagtaagctcttctttattagagtctttagaaacagatagggttaagtttccagaaatatatgaagctagggctacaagatacagatcagaaccttacagattgaaattaagttatattttagagaagttgaggctcacacaagaaaggaataatttattagctgatagtggttggaaatctgatttagaaggggaaattgatactaaaaatatagataaagttgaaaacttatattacaaatcagtcagtgaatttacctatgatctcgaactgattaaaaatagtctgattagtacagatttaaattgcgaggccgtaaataccttgcttactcaggttcatatttttggtttttcactagcaagtttagatatacgccaagaaagcacaaggcatagtgacgctatacaagaacttacaaattatcttgatttgtctgtcctatatgaccaaatgtctgaggaagagaaaattaaatggcttgtagaggaattaaatacaaaaaggcctttaattcctcctgacgttaactggacaaaaactacagaagaaaccttttcagtttttaaaatggttaaaagactacagcaagaatttggaagtcgtatttgtcattcttatgtaatttcaatgagtcatagcgcatctgatttgcttgaagttcttttattagcaaaagaaatgggactccttcatcaaaagtcacaaaagtcaaaattatttggtgttcctcttttcgaaactgttgaag

SEQ ID NO: 276385 - DNA, 859 bp, Unknown
  Bacterial polypeptide expressing nucleotide sequence isolated from the Sargasso Sea
aatgaagaaaagagatctttactatgagcgaataccaacaaagcttttaagagatgatattagattattaggaacttttcttggaagagtaattaaagatcaagaaggttcagttttttttgaaattgttgaaaagtttagattattatcaaaaaatactttatcagataaaaataaaagtaaaattttttcaaaaatttcgaaagaagtaaaaaaactttcacctaaaaatacttttaaattaacaagagcattttcgcatattttaaatttaatgaatttagctgagtcattagatgcatctagaaagttaaatgaatttgaaaatccatattttaaaagtaaaaatcaaaatcttttcattgaagatataatagaaagtttatttaaaaataaaaaaattccagataaaaaaatttacgaacaagccacaaaacttgatattggcattgtacttactgctcatcctactgaagtaaaaagaagaactttaattcaaaaatatgccaatttaattgaaattatggagcaaagacatctttataaaaaatatccatctaagattatagaattagatagaaagctttactcggaaattgcaataatatggaaaacagatgagctaaaaagaactaaaccatctccattagatgaagcgagatggggtttagccgttattgaggacagtctttgggacactattcctaaagtttacaaaagacttaacgacatattcagaaagaatttaaagaaagatttaccgcgtgattttaatccaattcaatttggttcatggatgggtggagatagagatggaaatcctaatgtaacagcagaagttacaaagaaagtaatatta

SEQ ID NO: 276386 - DNA, 688 bp, Unknown
  Bacterial polypeptide expressing nucleotide sequence isolated from the Sargasso Sea
tatgaatcttttaaatctagctgagatggttgatgcttcaagaaatcttgatgactatgaaaataaaaaaaaaataaataataagaatatttttattgaagaaatttttgaaaaactttttaaaaataaaaaaatatcaaataacaaaatttatgattttgcaaaaaaccttaatatcggaatagtactaactgctcatcctacagaggttaaacgaagaactttgatacaaaaatatcataatataactgaaatacttgaacaaagagatttatttaaaaattttccttttaaaacagtaaagttagataaaaaattatatgatgaacttactgtaatttggaacactgatgatctcaaaagatttaaaccatcaccatttgatgaggcaagatggggtttagcaattattgaagatagtctatgggaaactattccaaaagtttacagaagattaaattcaatttttattaaaaatatgaataaaggccttcctaaaaactttaatcctatagaatttggttcttggatgggtggagatagagatggaaatccaaatgttacttcaaaagtaactaaagaagtaattttactatctagatgggaagcagctaaactttatgaaaaagcattaactaaaataattagagcttattcaatggaaaaatgttctaacaaaataactaaa

SEQ ID NO: 276387 - DNA, 887 bp, Unknown
  Bacterial polypeptide expressing nucleotide sequence isolated from the Sargasso Sea
ttgtacttcggttcttgggtaggctccgatagggacggtaatccatcggttactcctgagataacatggagaactgcttgctaccaaaggcagttgatgttggaaagatatattattgcgacatctaatcttagagatcaattaagtgtctcaatgcaatggagtcaagtcagttcttctttattagagtcactcgaaacggatagggttaagttcccagagatctatgaagctagggctacaagatatagatcagaaccttacagattgaaattaagttatattttagaaaaattgaggttaacgcaagaaagaaataatttattggctgatagtgggtggaaatttgacttggagggagaaattgataaaaaaaatctagataaacttgaaaacttacattacaagtcagtaaacgaatttacttatgatctcgaattaattaaaaatagcctgattagtacagatttaacttgcgagtctgtaaacactctacttactcaggttcatatttttggattttctttagcaagtttagatattcgtcaagagagtacaaggcatagtgacgctatacaagagcttacaaattatcttgatttatctctgcaatatgaccaaatgtctgaggaagagaaaattaaatggctcatagaagaattaaatacaaaaaggcccttaattccatctgacgttaactggacacaaactacagaagaaaccttttcagtttttaaaatggttaagagactacagcaagaatttggaagtcgtatttgtcattcttatgtaatttcaatgagtcatagcgcatctgatttacttgaagttctcttactggcaaaagaaatgggacttcttgatcaaaattcacaaaagtcaaaatt

SEQ ID NO: 276388 - DNA, 606 bp, Unknown
  Bacterial polypeptide expressing nucleotide sequence isolated from the Sargasso Sea
cttacagattaaaattaagttatattttagaaaaactaagattaactcaagaaagaaataatttattagccgatagtgggtggaaatttgacttagagggagaaattgataataaaaatctagataaagttgaaaacttatattacaagtcagtaaacgaatttacttatgatctcgaactaattaaaaatagcttgattagtacagatttaacttgtgagtctgtaaacaccttacttactcaggttcatattttcggtttttctttagcaagtttagatattcgtcaagagagtacaagacatagtgacgctatacaagagcttacaaattatcttgatttatctgttcaatatgaccaaatgtctgaggatgagaaaattaaatggcttatagacgaattaaatacaaaaaggcctttaataccacctgatgttaactggacaaaaactacagaagaaactttttcagtttttaaaatggttaagagactacagcaagaatttggaagtcgcatttgtcactcttatgtaatttcaatgagtcatagtgcatctgatttgctcgaagttcttcttactggcaaaagaaatgggacttcttgat

SEQ ID NO: 276389 - DNA, 280 bp, Unknown
  Bacterial polypeptide expressing nucleotide sequence isolated from the Sargasso Sea
atgggacttcttgatcaaaattcgcaaaagtcaaaattattagttgttcctctttttgaaactgtggaagaccttaaaagagcacctgaagtaatggaaaagttgtttaaattagatttctatagatcattattgccgaaagtaggagaatcttttaaacctctgcaagaattaatgcttggatattctgatagcaataaagattcagggtttgtttctagtaattgggaaatccatagagcccaaatagctcttcaaaatctctcaagtagaaataaca

SEQ ID NO: 276390 - DNA, 973 bp, Unknown
  Bacterial polypeptide expressing nucleotide sequence isolated from the Sargasso Sea
aaatcatttcaaaatctttcaaataaaattaaaaatttaagtccagtcaatttatttaaattaactagagcttttactcattttatgaactttataaatatagcagagtctattgatggcgctcgaaagctagatgagtatgaaaataaaaatcaaattgatagcaataaaaatatttttattgaagaaatatttgaaagttttttcaagaacagaaaaatatcaaataataaaatctatgatattgcaaaaaatttaaatataggtatcgttttaaccgcacatccaacagaagtaaaaagaagaaccttgatacttaagtatcataaaatcgctgaaattttagagcaaagggatttgctaaaaaagtatccctccaaaataaaaatattggataaaaaattatacgatgaattcacaataatatggaatactgatgaattaaagagatctagacctacaccatcagatgaagcaagatggggactcgcaatcatagaagatagtttatgggaaactattccaaaagtttatagaaggctaaatgatatttttgtaaaaaatataggaagaggattgccaaaaaatttcaacccaattgaatttggatcttggatggggggtgatagagatggaaatccaaatgttactgctaaagttactaaagaagtaattttattatcaagatgggaagctgcaaaattatatgaaaaagaattaacaaaattaatccgatctttatctattgaaaaatgttcaaaaaaaattttatctaaaacaggaaaaacttttgaaccttatagagtttatttgagaccattaagaaataaaatgcgtcttactcataaattaatagaacagcatttagttgaaaaaattcctttagatcaaaaaaagcttttaaataatcgggaagagattttaaaacccttaagagtagtaagggagtctttagaagagaataaaaacgaaa

SEQ ID NO: 276391 - DNA, 949 bp, Unknown
  Bacterial polypeptide expressing nucleotide sequence isolated from the Sargasso Sea
atgtttcaagcggtgacaatctggtttcacctgtctcaaatactggatgaaattctaaacattcgaaggtctaggcgctcaggctataaaggttccaccggtgttgaacctacgcagtatgattttaggggaattttatcagagagtgacccagaaaatagaaaacatcttttagggatcgttcgaaaaaataaactttcgattgggcctacaataacggctcatcccactgaggcgaaacgtgtttcagtactagagattcataggcgtatctatcaaactttggttaaatttgacagctttagatggggcccaaaagaaatactgcaactagaaaaagaccttgagggagaaatagatttactgtggctaacgggagagttgcgattagaaagaccttcattagaggcagagatcgaatggggtctacagttttataaaaccagtattatcaaggcgttgccacgtgtattcgaaagttacgatgatgctgttaaatctgtttttggaaggcaagatattgatcattttgaccttcgtttccattcttggattggtggagaccgagatggcaatcccaatgttacctcagagaaaactttgtttgctctcgagtctgcaaaggaaatggttctatctgtttattcagaaagtttaactgaaattgcatcccaactgagcatttctaataagattatgcccttatctgaaagtaatttcatgactttgaatgaaataatcagagtgcgatcaagtgatccagagaacttaatacgccgaaatccaaatgaaacttttcgccaagcgcttacgggaatgaaccaatgtttggacgatggcagatataaatacgttaaagatttcattgctgatttaagagctattgaggctgcattacattcaattggggctgttaatatttcagataagcttgttcgacctctcagat

SEQ ID NO: 276392 - DNA, 907 bp, Unknown
  Bacterial polypeptide expressing nucleotide sequence isolated from the Sargasso Sea
ggaagaggtggtggtccaattcaagcaactctcagatctttacctcccaactctgttaacggtaaaattagaattactgatcaaggtgaagttattcagcaaaaatatggttatgagcctttagctaattataatttgtgtagttacataggcgctgttactgaagctactttaaatccaccaccatccccaaaaaataactggagaaacctaattgaaaaaatgtcagatatatccaaaagctcttatagaaagaatattaatcaaagtttagaatttataaaatactttgaaacagtcactccgcacaaggcacttggaaagctttcaataggttcgagaccatcgaaaagaaaaaatattgataatataaaaagtttaagagctataccttgggtttttgcttggacacaaattagacttatgctcccagcatggcttgggagtgctgaggctttaagatactcctatataaataaatttagaagaaccttagtagacatggaaaaaaattggccattttttaattctatgcttgatacattagatatggttattgcaaaagctgatccggagatatcaaaaatatatgaagaatatttagcagacgaaagtttaaagagagttggtaagaaacttaggtttcaatttgatgttattaaaaaattgaataagaaaattacacctaaagaaattgctgctattagaaaacaatttagatctccaattatcgctagaagtatatactctgaggtattaaatattattcaacctaccgtaattaaaaaacttcaagtcaataaaaacccaaaaaataagcagtttttaaatgacgctttgctaacttcatatagctggtatttcagctgcaatgaaaaatactggttgatggttttttttagatagc

SEQ ID NO: 276393 - DNA, 757 bp, Unknown
  Bacterial polypeptide expressing nucleotide sequence isolated from the Sargasso Sea
aacttatgcagctatataggagcggtgactgaggcaacccttaatcctccacctaaacctaaaaataactggagaactttaattgaaaaaatgtctgatatttcaaaaagttcctatagaaaaaatataaatcaaagtactgaattcataaaatattttaaaacagttacaccacatcaagcacttggaaaattatcaattggatcaagaccatcaaagagaaaaaatgtagataatataaaaagtttaagagcaataccctgggtgtttgcatggacacaaattagacttatgttaccagcttggttaggtagtgctgaagcactaagatactcttatattaaaaaatttagaaaaactctttacgatatggaaaaaaattggcctttctttaattcaatgcttgatatgttagatatggtaatttcaaaagcagatcctgatatttctaaaatttatgaagaatatttagccgatgaagaattgaaaagagttggaaaaaaacttagatttcaatttaatgcgataaaaaaactcaataaaaaaattactccaaaagaaataattaatctaagaaaacaatttagaacatctataattgtaagaaatatttactcagaagttcttaatataattcaaccaattgtaattagcaaactcaaaaaaagtaaaaaaataaaagataaaaaatatttaaatgactcattgatgacctcaattgcaggtatatctgctgcaatgaaaaatacaggataaa

SEQ ID NO: 276394 - DNA, 804 bp, Unknown
  Bacterial polypeptide expressing nucleotide sequence isolated from the Sargasso Sea
tttgaaagtctttttaaaaatcgaaagatatctacaaataaaatttataatattgcaaaaaatttaaatataggtatcgtattaactgcacacccaacagaagtaaaaagaagaactttaattcaaaaatatcataaaattacagaaatattagagcaaagagatttattaaaaaaatttccatcaaaattaaaaatgttagacaaaaaattgtatgacgaatttacaataatatggaacacggatgagttaaaaagaaatagacccacaccatcagacgaagcaagatggggattggcaataatagaagatagtctatgggagactattcctaaagtttataggagactaaacgatatttttttaaaaaatatgggaaaaggattaccaaaaaattttaatccaattgaatttggttcttggatggggggagatagagatggcaacccaaatgttacttcaaaagttacaaaggaagtaattttattatcaagatgggaagctgcaaaattgtatgaaaaagaactaactaaattaattcgttctttatccattgaaaaatgttcaaaaaaaataaaatctaaaactggtaagagttttgaaccctatagagtttttttaagaccattaagaaataaaatgcgtcttactcataaattaatagaacaacatttggttaacaaaattccactagatcaaagaaaactattgtcttcaagggaagagattttaaaacctttaagaatagttagacaatctttggaagaaaataaaaatgaaaatattgccagtggtgacttatta

SEQ ID NO: 276395 - DNA, 889 bp, Unknown
  Bacterial polypeptide expressing nucleotide sequence isolated from the Sargasso Sea
gaggtaatacttttatcaaggtgggaagcagcaaaactttacgagaaagaattaacaaaattaattagaggactttcaatggaaaaatgttcaaaaaaaattctaaaaactaccggaaaaacttttgaaccttatagagtttatttaagaccattaagagatgaaatgagaaagacgcatagattaatagaaagacatttagtggcaaaaaaaccattagatcaaaaaaaacttttatcttctaaagaggaaattctaaaacctttaagagttgtaagagagtcattagagcaaaaccaaagtgaaaacattgcaagcggtgaattgctcgatttaatgagacgagctaaatgctttggtataaatttagcaaaattggatataagacaagagtcatcaaggcattcacaattattagtagaatatgtaaagaaaaaaaataaatctaattatttaaattgggatgaaaataaaaaaattaaatatttagcaaatgaaatgaagaaaaataaaaaaattttcaaaaattttaattttaaaaataaagaaaataaagaagtttggtcaacttttaagattttagctgatgagccatcagaatgtttgggtgcttatgtaatatcaatgacttcagcagcttcagatgtcttagcagtttatttaatgcaaatgcaggcaaatattaaaaataaattacgagtagttccactttttgaaactttgcaggatttaaaaaatgcaaaatctattatggaaaaacttttttcattaaagtggtacagaaaattaatcaaaaacaatcaagaaattatgattggttattcagactctagcaaagatgctggaaaattatctgctagctggcatcaatataaactcaagaagaagt

SEQ ID NO: 276396 - DNA, 550 bp, Unknown
  Bacterial polypeptide expressing nucleotide sequence isolated from the Sargasso Sea
cctgcctcaggagacggcggtcaagcccggcatcaccgaccttcgcgctattccctgggtgttcggctggactcaatcgcgccagatcatcctcggatggttcggcgccggtaccggccttcacgctgctatggaagccggacgggcggatgacctgcgccatatgtatgctgaatggcacttcttctcaacattcgtgtcaaacgtcgaaatgacactcgccaagactgaccttgccatcgcgcgccactatgttgaacgactggttgatccgaaactgcatcatttattcgatcaggttgttgaggagcacacgctcacgatggaaatgatcacttcaatcaccggaactgcactattgtctgacaagccgatgctgcgtcgtacgctagaagtgcgggacgcctatctcgatcccatcagcgtgctgcaggtggaattgctcacccgtagcagacgcgaaaaaagccgcgaccgcaatgaccagatgcagcgggcattattgctttccattaacgggattgctgcggggctacgcaacaccggctga

SEQ ID NO: 276397 - DNA, 643 bp, Unknown
  Bacterial polypeptide expressing nucleotide sequence isolated from the Sargasso Sea
ctgattctaaaggttttagttgattattacagcgctgccagcccggttgaagagcttgtaaagatgaatattggttcaagacctgcaagaagaaccggagaaaactcactgaaagatttgagagctataccgtgggtgttcgcatggacacaaaacagacatctcgtacctggatggtacggtgttggcacagccataaaagaatttactgataagcatgcaggcaagggagaaaagttaatcaaaaagatgtttaccgattcacgtttatttcgcttgattattgatgaaactgaaaaaaccttagcgcttattgattttgatatttgtaaggcatattcaagtcttgttgaaaacaaaactgagagagaaaatatttttaatatgatttccgctgaatacaacctgacaaaagaagtaattctaaatataactggcgaagaaaaactatgtcagcgtttcaaaaagtttagtcgaaaattaaaccgacgttcgccagtgcttcatcaggcaggtttagagcaaatcaaattaatcaaagagtttcgtcagcaaaatgggaatggtgataatattgatgatttgatacctttattactttcaataaattgtatttcatcagggctgggttggacaggataat

SEQ ID NO: 276398 - DNA, 616 bp, Unknown
  Bacterial polypeptide expressing nucleotide sequence isolated from the Sargasso Sea
tttattcgttacttcaaaacagtaacgccacacaaatcactaggaaaacttgcaattggatcacgaccaaccaaaagaaagaatgttgataacatccaaagtttaagagctattccttgggtatttgcttggacacaaattagactaatgttacccgcttggcttggtacaactgaagcattgaggtacggatcaattaaaaagtttaaaagaacaatgactgatatggaaaaaaactggccatatttcatatcaacgatggatattttagatatggtaatttccaaggtagatccaaaaatatcagttatttatgaaaataatttagctgatgcctcattaaaaagaattggtaagaaattaagatttcaatttgaagcattggtcaaattgcataataaaattactcctaaagaagtggtaaaagagagaaaagaatttagaaagtcgctatttataagaaacaattatactgaaatgttaaatatacttcaggcaaatgtaatgaaaaaattaacaaataaaaaatataaaaatttagataaaaaattgcttgaagatgctttaatgacatcgatagcaggtatttctgcagcaatgaaaaatactggataaa

SEQ ID NO: 276399 - DNA, 778 bp, Unknown
  Bacterial polypeptide expressing nucleotide sequence isolated from the Sargasso Sea
ttgcttagagaagatatcagttatcttgggaatattctcggcgaagtaattaaagagcaagaaggtataaagtttttcaatttagtcgaaaaggtaaggaaactctcaaaagccaataaaataaatcttaaaaataaaaattctttcaaaaaattagttaaaacagtaagaaaaagtaatccaagagatacactcagactaactagagcatttactcatttcataaattttataaatctagctgagtcaattgatactgcgagaaatttagatgaatatgaaactaagaggaaaaatctaaaatataatattttcatagaagaaatatttgaaaaactttttaaaaacaaaaaaatatccaataacaaaatttacaatcttgctaaaaatttgaatatagggatagttttaaccgcacatccaacggaggtaaaaagaagaacattaatacaaaaatatcacaagataattgaaattttagagcaaagagacctctataaatctaattcatctaaattaatacaattaaacaaacaactatatgacgagtttacaattatttggaatacagacgatcttaaaagatcaaaaccttccccatttgatgaagcaagatggggtttagcgatcatagaagatagtttgtgggatactgttccaaaagtttatagaagattaaattctatttttttgaaaaatatgaatagaggattgccaaagaattttaatccaattcaattcggttcgtggatgggtggggatagagacggaaatccta

SEQ ID NO: 276400 - DNA, 847 bp, Unknown
  Bacterial polypeptide expressing nucleotide sequence isolated from the Sargasso Sea
tcatggatcggtggcgaccgcgacggtaatcccaatgtcacccatcagatcacacaaagcaccatcgaagcccttcgtgccgcggcccgagaactgtgggacgaacaactcaaagaactgcatcgtgaactcagtccttcggtacgtcgggtcgaccttccggaagcctcagtcgatctggtcgacggaaaggatcaacgtcgccatgaaccccttcggcttcgaattgaagctctgcgcgatggcgtgcgagaccacacgatttcaccaacagagctttgtgatgaactgcttgccattcggagtgatctcatcgcggctggcctgtctcgggttgccaacgcccgccctttaaccgacgcgattgtccgatctcgagcttttggccttcacctcgccaaattagacatccgacaacattcccaagtccacttgtccgcgctctcggaactcttcgaacacgctggaatccacgacgacttttcctcgttgcccgagactgaaaagatggacttgttaagaaaagaacttgccaatccacggccgttggccgcgcctgtcaccccactctcgagccagaccgaagaagtgcttcggacgctcaaagtggccaaagcagctcaggcctccgacgaaaacaccattggctcatgcattgtttccatgacccaccatatttcagaccttctggtccttcggttgctcatgaaagaagtgggtttcgaactcaacgatgaccgaacgccgccagtggttcccctcttcgaaaccgtggaggatttgcaccgggcgccagatcttcttcaaggcatcttgaacgagcccacgttgtccccacgcgtagatg

SEQ ID NO: 276401 - DNA, 846 bp, Unknown
  Bacterial polypeptide expressing nucleotide sequence isolated from the Sargasso Sea
ttaagaaattttccatcaaaattaaagatattagataaaaaactttttgatgaattaacaataatttggaatacagatgatttaaaaagatcaagaccatctccatttgatgaggctagatggggccttgcaatcatagaggatagtctttgggatactattccaaaagtatatcgaagattaaattcaatttttgtcaaaaatatgaataaaggattacctaaaaattttaatccaattgaatttggatcgtggatgggaggtgatagagatggaaatcccaatgttactgctgaagtcacaagaaaagttatattattatctaggtgggaagcagctaaattatatgaaaaagctttaacaaaaataattagatcttactcaatgaaaaaatgttcaaaaaaaattctaaacaaagttggtaattcctacgaaccctacagagtatttttgagaccattaagaaataaaatgagaaaaacacataggttgatagaacagcatttagttaataataaatccttaaatcataatgaattactttataacaaagaagaaatactaaaaccattaagagtagttagagaatctttagaacaaaatcaaaatgaaaatttagcaagtggagaacttttagatttaatgagaagagcaaaatgttttggtataaatcttgctaaactagatatcagacaagaatcttttaggcatagtaaattaatatctgaatttataaaaaaaaaatatcataaagattatttaaaaatgagtgaaaatgaaaaaatagaatttctaaagtctaaattactttctaaaaaaaattatataaataaatttcaatttaaa

SEQ ID NO: 276402 - DNA, 590 bp, Unknown
  Bacterial polypeptide expressing nucleotide sequence isolated from the Sargasso Sea
tcctcacatggcgcttgggaaattatcaattggatcgagaccatcgaaaagaaaaaatatagataatataaatagtttaagagctattccttgggtttttgcatggactcaaattaggttaatgttgcctgcttggttaggtactgctgaggcattgagatactcatctattaaaaaatttagaaaaactcttattgatatggaaaaaaattggccatattttaattctacaatggacttacttgatatggtaatttccaaggttgatccagaaatatcaaaaatttatgaaaaaaacttagctgatgataaacttattagagtaggaaaaaaattaaggtttcaatttgatgctgttaaaaaattgaatgatcaaataacaccaaaagaaatttttaaacaaagaaaaatttttagaggtccagcaattattagaaacatatattctgaaattctaaatgttttacaagcagtagtgatgaataagcttttaaaaagaaatttaaataaaaaagataaaaaagatttaaatgatgcaatgatggcgtcaatagcaggtatttcagcagctattaaaaatacaggataat

SEQ ID NO: 276403 - DNA, 859 bp, Unknown
  Bacterial polypeptide expressing nucleotide sequence isolated from the Sargasso Sea
ttctcctaaaaatacctttaaattaacaagagcattttcacatattttaaatttaatgaatctagctgaatcattagatgcatctagaaaattaaatgaatttgaaaatccatactttaaaagtaaaaatcaaaatcttttcattgaagatataattgaaagtttatttaaaaataaaaaaatttcagataaaaaaatttatgaacaagctacaaaacttgacataggtattgtccttactgctcatcctactgaagtaaaaaggagaactttaattcaaaaatatgccaatttaattgacattatggagcaaaggcatctctataaaaaatatccatcaaagataattgaattagatagaaagctttactcagaaattgcaataatatggaaaacagatgagctgaaaaggactaaaccatctccattagatgaagcgaggtggggtttagccgttatcgaggatagtctatgggacaccatacctaaagtttacaaaagacttaacgacatattcagaaaaagtttaaaaaaggatttgccgcgtgatttcaatccaattcaatttggatcatggatgggcggagacagagatggaaatcctaatgtaacagctgaagtaacaaagaaagtaatattattttctagatggcaagctgcaaaattgtatgagagagaacttactaaattgatacaagatttatcaatggaagaatgttctaccaagattaaaaaagcaacaggaaacagttatgaaccttatagagtttatttgagaccaattagggacaaggtaagactaactcatcaattaattgaaaatcatttaaataaaaatgcatttttagatgaaaaaaaa

SEQ ID NO: 276404 - DNA, 975 bp, Unknown
  Bacterial polypeptide expressing nucleotide sequence isolated from the Sargasso Sea
ctgtatttactggctcatccaacagaagcaaaaagaagaagtaaactcgaagctatgagaagaatctttaatactattcttgaacttcaaagatacaaaggacagtcaattaaacgagaagaattaattgaagagcttcaagctgaaattttaattttatggagaacagacgaagtaagactcaaaaaacctacagtgatagatgaagtcgaaaatggtctttattattttagaacttctttattcaagtctatacctgaagtctataaagatatggagaaggctattaaaagggtttaccacacagataatatcaaagttcctagtttcataaaatttggttcatggattggcggtgatagagacggcaacccgtttgttactcctgacataaccagagaggcagtttatatgcatgcagaaactgccatacatgagtatatgagaagagcacaaaacttatcaaccatacttactcactctcttgaactcactcgaccatcaaatcaatttttagaatcctctaaaagcgatgaaatttatttagctaatgcattcaaaaatactacacaagattttgcgaaagagccgtatagaagaaaatttaaaattattagataccgtcttgatcaacgattaaaagtgattaatcaattaaaaaataacaatcaacctgaagctgaacatgcataccagtctgagcaagagctactgaatgatttatatgtcataagagattcacttatttctgataatgacttgatacttagtgattttggtttaaatgattttataagattagtcgaaacatttggtttccacttagttaatcttgacatacgagaagagtcaacaaaccacactaatgcgatttctgatgtactgaatgtttcatctcaaattgactacacatcattggatgaaaaatctagaataaatgaacttgaaaagttcattaaatcagatatcagtttg

SEQ ID NO: 276405 - DNA, 538 bp, Unknown
  Bacterial polypeptide expressing nucleotide sequence isolated from the Sargasso Sea
aaaaaatgttgataatataaatagtttaagagctattccttgggtttttgcttggactcaaattagattaatgttacccgcttggttaggcactgccgaggctttaagatattcatctataaagaaatttaaaaaaacacttattgatatggaaaaaaactggccttattttaattcaacaatggacttgcttgacatggtactttcaaaggtggacccagaaatatcaaaaatttatgaaaaaaacctagctgatgataaacttattagagtagggaaaaaattaagatttcaatttgatgctgttaaaaaattgaatgatcaaataacaccaaaagaaatttttaaacaaagaaaaatttttagaggtccagcaattattagaaatatatattctgaaatccttaatgttttacaagcagtagttatgaataagcttctaaaaagaaatttaaataaaaaagataaaaaagatttaaatgatgcaatgatggcatcaatagcgggtatttctgcagctatcaaaaatactggataa

SEQ ID NO: 276406 - DNA, 829 bp, Unknown
  Bacterial polypeptide expressing nucleotide sequence isolated from the Sargasso Sea
tccttttatagttaatcacccaactctattaaataattggattttaagtagagaaagggcactcaaagaaattagagaaatcaaggatgtaaaaagtcaagatagcgatttatttttagattgtgtaaaaaaatcactaaaaaacattacaagctggaatactgatagcgaatatcagcaaaaaaaaatttcttcattattaaaggatgttgaaaaattcttaaattttatagataaagattttaattttgagagcgaatatccttttaacaaaatctatcaatggttagaagataatacttgtgaagaatgtattgaatacatagtgtcaataatgatggaaccttataataatattgtaaatcctttggtaaaagaaatgagttcagatgaagaaaaatattttaatattccaactcatagaaaagttgaagaattgcgtaatatcatcgaagcaaagtatccaaacattttagatattaattttgaagaaaaagaaaataataaaaacttttggtttatttcaaaaaataaagaggaacctagattagctgatcgttttgaggagcatggatcagaattagaacagcctttagcaatagcaagagatataaaaaaactttatgacaaattattagtctcaaaaaatagtttaactattgctgagtttttaacgtcaaattctgaattaagacatgtcgtgaggagggcattcattgtagaaaaatttccttattcagaaatacaagataatacaattggtaaagatttaatgccaattgatatgcttagactaaaattgtctttctttggggcattaaaaatttga

SEQ ID NO: 276407 - DNA, 769 bp, Unknown
  Bacterial polypeptide expressing nucleotide sequence isolated from the Sargasso Sea
tagcaaatataatttatgtagctacataagttcggtaatgcttgcaacattaattccaccaccagagccaaaaaataattggaggactttaatagaaagtatgtctgatatatctaaaagctcatatagaaaaaatttaacatcaaactcggaatttattagatattttaaaacagttacaccgcatttagcattaggaaaactttcaattggatcacgtccctctaaaagaaaacaagtagatagtataaaaagtttaagagcaataccttgggtatttgcttggacacaaattagattaatgctgccagcttggttaggcactgctgaggccttaagatattcttcaataaaaaaatttagaaaaactttaatagatatggaaaaaaattggcctttctttaattctactatggatttattggatatggttatttctaaagtagaccctgaaatttcaaaaatttatgaagaaaatttagcagatattgatttaagaagagttggcaaaaaactcagatttcaatttgaagctctaaaaaaacttaatcacagcattacaccacctgaaattttaaaacagagaaaagcttttagaggcccagcaattattaggaatgtatattctgaagttttaaacattctgcaagcaacagtgatgatgaaattaactaaaaaaaataataataaaattagtaatgattatctaaatgatgctttaatgactagtatagcaggtatatcagcagcaattaaaaataccggttaa

SEQ ID NO: 276408 - DNA, 697 bp, Unknown
  Bacterial polypeptide expressing nucleotide sequence isolated from the Sargasso Sea
atcaaattggcgtgatttgattcaaaaaatgtcagaaatttctacatcttcatatagaaaatatctaaatcaaagtgaggattttattcgttacttcaaaacagttacgccacataaatcactaggaaaacttgcaattggatcaagaccaaccaaaagaaagaatgttgataatattcaaagtttaagagctatcccttgggtatttgcttggacacaaattagattaatgttacccgcttggcttggtacaactgaagcattgaggtacggatcaattaaaaagtttaaaagaacaatgactgacatggaaagaaattggccttactttgtatcaacgatggatattttagatatggtaatctccaaggttgatccagaaatatcagttatatatgaaaataatttagctgatgcatcattaaagagaattggtaaaaaattaagatttcaatttgatgcattggtcaaattgcacaataaaattactcctatagaagtggtaaaagagaggaaagaatttagaaaagctttatttataagaaataattatacagaaatgttaaatatactgcaggcaaatgtaatgaataaattaacaaataaaaaaaataaaaagctagataaaaaatttcttgaagatgccttaatgacatcgattgcaggtatttctgcagcaatgaaaaatactggataa

SEQ ID NO: 276409 - DNA, 1032 bp, Unknown
  Bacterial polypeptide expressing nucleotide sequence isolated from the Sargasso Sea
tgcagtagatgcaatttcacaaaatttgtatcctatttttagcactaactttattcgccgtacgtggttaattgaaacgcaagctggtgcaaaaattgaggtggtgcttgataaaggcgaaattgcagcctcagggcaagttgagatgatcagcgagctggaaatagaattaattgaaggtagccgcaatgagctgtttgctttggctgatattttagttagccaaaactgtattcgactcggtttgtattcaaaagcagcacgcggctaccgtttagccgacgacaatccgcttaagcctagtaagtcgattggctttgttaagcttcctcgttctgcaacccaagaaagcgctttaaaagaagcaatgaactttggtattcggtttgtgcaaaagcatgagcagtgttatttcgataaaccgagtttaaaaactttaaaaagggtgactgatggtattagtttaattcgccatactttttggttgtttgacgatatagtctctaaagacagtaccgaacaattacgcaccgagcttaagtggcttttgagcgagttagcatgggtagaaaatgcaattcagttaaaaacttatacatcaaaacgtcatgcattttataaaaaaataaatgcggcgccagctttggcgcaagttattaacgatttaaaagagctgcagcctagtattgatgacattaatgcgctttttcatagtgctcgttataatcgtttattgctctcgttaacaacgtggttgattgacaagcaatggcgaaaagattgggggcaggtagagctccaagctgcagaaaatccagtgtcttctattgctgaaagattgtttaataaagactggaaaaacctgcatcaattattgcctaaagagcaaacgcttggtgtagttgactaccttaatttacgaatgcagcttgaaaacagcttgctaagtggtatttgcttaggatcgatgttcgataaagaagaacgtcttgagtttaggttgccgtgggtagatatttcgcatggtgttta

SEQ ID NO: 276410 - DNA, 883 bp, Unknown
  Bacterial polypeptide expressing nucleotide sequence isolated from the Sargasso Sea
aaaccagtcaaaatatttaaattagcaagagcatttacacattttatgaattttattaatcttgcggagtccatagatgcctctagaaaactagacgaatttgaaaactctggccttaaagataaacataagaatatttttattgaagaaatttttgaaaatctttttaaaaacaaaaaaattaaacctcaaaaaatttataatattgcaaaaaatcttcatattggagtggttcttacagctcacccaactgaagttaaaagaagaactttaatacaaaaatatcataaaataactgagataatggatcaaagagatcttttgaaaaataaaccatcacggttgaaaattttggataaaaaactttacgatgagtttacaatcatttggaatactgacgatttaaaaagatttaagccaactcccgctgaagaagcgagatggggattagcagtaattgaagacagtctttgggaaacaattccaaaagtttacagaagattaaacgctatttttgttaaaaatatgggaaaaggtttgcctaaaaatttcaatccaattgaatttgggtcttggatgggaggagatagggatggtaatccaaatgtaacagcagccataactaaagaagtgatacttttatcaagatgggaggcagcaaaactttacgaaaaagaattaacaaaattaattagaggactttcgatggaaaaatgttcaaaaaaaattctaaaaacaactggaaaaacttttgaaccttatagagtttatttaagaccattaagagatgaaatgagaaaaacacatagattaattgagagacatttagtagcgaaaaaacctttagatcaaaaaaaactttttcttcaaaagaggaaattct

SEQ ID NO: 276411 - DNA, 581 bp, Unknown
  Bacterial polypeptide expressing nucleotide sequence isolated from the Sargasso Sea
ttctttgggaaaactatcaattggttcaagaccttcaaaaagaaaaaatgtagataacattaaaagtttaagagcaataccatgggtttttgcttggactcaaattagattaatgttaccagcttggcttggtaccgctgaggctttgagatattcttcaattaaaaaatttaaaaaaacactttatgatatggaaagaaattggccattttttaactcgacaatggatattcttgatatggttatatcaaaagttgatccagaaatttccaaaatatatgaagataacttaggagataaaaagttaaaaagagtaggtaaaaaattaagatttcaatttgaaacaatcaaaatactaaataaaaatattacgccaaaagaaattgttaaagcaagaaaagagtttcgaagatcagtaataataagaaatatatattctgaagttttaaatataatacaagcaacagttatgaataaattattaaaaaaaggatataaaataaatcaaaaaaaatatcttgaagatgctttaatgacttcaattgcaggaatttctgcagcaatgaaaaatacaggataaa

SEQ ID NO: 276412 - DNA, 549 bp, Unknown
  Bacterial polypeptide expressing nucleotide sequence isolated from the Sargasso Sea
catccaaaagaaagaatgtagataatattaatagtttaagggctataccatgggttttcgcttggacacaaataagattgatgttacctgcttggttaggaactgctgaggctttaaggtactcatcaattaaaaaatttagaaaaaccttaacagatatggaaaaaaattggccatattttaattctacaatggatttattagatatggttctatcaaaagttgatcctgaaatttcaaaaatttatgaaaaaaatttagcagatcataaattagttagtttaggggataaacttagatttcagtttaatgcagtaaaaaaattgaattatgatattacacctaaagaaatacttaaacaaagaaaagcctttcgaggacctgcgattatcagaaatatttactcggaaatactaaatgttttacaggtaactgtgatgaaaaagcaaaaacaaaagaaattaaataaaagaagtaaaaagttacttgatgatgcgatgatgacatctattgcaggaatttctgcagcgattaaaaatacaggataat

SEQ ID NO: 276413 - DNA, 757 bp, Unknown
  Bacterial polypeptide expressing nucleotide sequence isolated from the Sargasso Sea
cagaaaatttcatttttatcaaaaggcataaaatcaaagagaaacattattaacaattttaaatttaaaaataatgaaaacttagaagtttggtctacatttaatgttttatctgatgaaccagaggaatgcttaggaggttacattatatcaatgacagcttctgcatctgatattttagcagtctcttttctacaaaaagaggcaaaaattaaaaaaaaattaagagttattccactatttgaaactttagatgatttgaaaaatgcaaaatcaataatgcaaaaattgttctccctaagttggtatagaaaactaataaaaaataaacaagaaattatgatcggttattctgattctagtaaagatgctggaaaactatctgcgagttggcatcaatacaaattacaagaagatattgtaaaactagcaaataaatttaaaattgatcttactttctttcatggaagaggaggatctgctggaagaggaggaggacctattcaatctactttaagatctcaacctccaggatcagtaaaaggcaaaattagaattacagatcaaggagaaatgatacaacaaaagtatggttacgaacctttagctaaatacaatctttgcagctatataggtgctgtaatgcaagcaaccttaaacccgccgtcaaaaccgaaagataaatggaggcgattaatagaggaaatggctcaaatttcaactctgtcatatagacagaatattaaaaataattcag

SEQ ID NO: 276414 - DNA, 910 bp, Unknown
  Bacterial polypeptide expressing nucleotide sequence isolated from the Sargasso Sea
gggactaaaaaagaaattagaaaaattagactcctaattgaatccttaaaagttggaggatttgttactgctgaaatggatattagggaagattctgcaattacaactaatgctgctaaagaaataatttcaaaaatatatgatgaatctacatcgattgcagatgctatcaattttatagatagagaaaataatttcgatttaagtaatttggaaataaatgaagtaactagagaagtaattaacacatttgaaactgtaaaagtttccagaaaaaaatatgggataaactcaattaatacctggattgttgctatgactggcagttcagatgatttaacttcaattgcctttttagctttattaaccaaaactgtagaatcaaaaaaagaattgtcaggttttagaatagttccattacttgaaacaattgatgacttaaaaaatgcaaatgaaattttaaaaactttttggacgcaaacttatgaagaaggcagtctagttgaagtaatgataggttattccgattctaataaggatggcggaataattaaatctcagtggaatttatattcttcacaaagagaaatatttaatttatcaaaacaacttaaattggacttaattttgtttcatggtcgtggtggatcttctagtagaggaggagggccttcgggtgaagctattttatctcagcctctggaaaccattaatggaaaaataaaaataactcaacaaggtgaagtaatttcagacaactttgctaacccagaattatctgagactaaccttaaaattataatgtcatcagttttagaagcatcattagattatccggaagaaaataataaggataaaaaatggtttgatttaatgaacatattgtctgatgaaagttacagtcactata

SEQ ID NO: 276415 - DNA, 856 bp, Unknown
  Bacterial polypeptide expressing nucleotide sequence isolated from the Sargasso Sea
agttggcatcaatacaaacttcaagaggaattaagaggtctagcaaaaaaatataagtttgatttagttttctttcatggaagagggggatctccaggaagaggaggtggtccgattcaggcaacattaaaatcccaaccagctggaactgtaaatggaaaaattagaattactgatcagggagaagtaattcaacaaaaatatggatacaaacctttagctgaatacaatctttgtagctacatcggagcggttatggatgcttctttaaacccacccccaagatcaaagcctaagtggcgagagttaattcatagcatgtctgaaatttcaacatctgcttataggaaatatttaaatcaaagtgaagactttattagatactttaaaacagtcacacctcacaaatctcttggaaagttagctatagggtcaagaccaacaaaaaggaaaaatgttgataatattaaaggtttaagagctataccatgggtatttgcttggacacaaattagactgatgttaccagcttggttaggaacaacagaggctttgagatatggatcaattaaaaaatttaaaaatactatgatggacatggaaaaaaactggccatattttgtttcgactatggatattttagacatggtaatttcaaaagttgatccagaaatatcagttatttatgaaaataatttggctgatgccccattaaggagaattggtaaaaaattaagatatcaatttgatgcactggtcaaattgcataataaaataactccaagggaggtggtaaaagaaagaaaaaaatttagaaaagcactgtttattaggagcaattatacagagatgttaa

SEQ ID NO: 276416 - DNA, 796 bp, Unknown
  Bacterial polypeptide expressing nucleotide sequence isolated from the Sargasso Sea
ttttttcatggaagaggaggatctgctggaagaggaggtggaccaatacaggctacattgagatcacagccagcgggttcagttaatggtaaaattcgaataactgatcaaggagaagttatacaacaaaaatatggttatgagccgttggcaaaatataatctatgtagttacatcgggtctgttatggaagctactttaaacccacctccaaaaccaaaagatagttgggtaaaattaattcaaagtatgtcagaaatatcaacaagctcttatagaaaaaatataaatcaaagttcagattttattagatactttaaaactgtaacgccacatatggcgcttggcaaactctcaataggttctagaccttctaaaagaaaaaatgttgataatataaatagtttaagagctatcccttgggtatttgcctggacgcagattagattaatgttacctgcttggttaggtactgcagaagctttgagatattcatcaattaaaaaatttaaaaagacacttatagatatggaaaaaaactggccgtattttaattcaacaatggacttacttgatatggtactttcaaaagtagaccctgagatatctaaaatttatgaaaaaaatttagctgatgataaacttataagagttggtaaaaaattaaggtttcaatttgatgcagttaaaaaattaaatgatcaaataacaccaaaagaaatttataaacaaagaaagagttttagaagtccagcaattattagaaacatatattctgaaatccttaatgttttac

SEQ ID NO: 276417 - DNA, 667 bp, Unknown
  Bacterial polypeptide expressing nucleotide sequence isolated from the Sargasso Sea
aatgtcatcttccaaatcaaaaaaagttcgccgcgaaaaaatcttctttgctgaaaaagaccaggccctgaaggccgatgtccgtcgacttggagagttggttggagagttggtaaaagagcagggaggggaggctctttttgacttggtggaggaagcacgcagaatttctatagctcacagagaaggcagtgttgacgagcttgaaaagttgcaagccttactttcagcattagagcctggcatagcaagggattttatacgtgcattttcgacttattttcaaatggtcaatatggccgagaaggttcatcgcattagaaggcgacgagcttatctgagagattctacaaagcatcagcctcttggttttttagatatatttaagcagttgaaagagtctggtcttgaagctccagatatagaagatgctctagcacagatatctgttgagccagtttttactgcccaccctaccgaggccagccgccgcaccttgctgcgtaaacagcagaatattgctcgccatttagtcacaatgctcgatccctatctaacacctcaggaagagcaagaagtcttaggtcaaatacttcatgaaatgacatccggctggcaaacggaagagcatccacaggcatatatgcgtgttgccgatgaagctgaa

SEQ ID NO: 276418 - DNA, 828 bp, Unknown
  Bacterial polypeptide expressing nucleotide sequence isolated from the Sargasso Sea
cttgaaagataaacataagaatatatttattgaagaaattttcgaaaatctttttaaaaacaaaaaaattaaacctcaaaaaatttacaatattgcaaaaaatctaaatattgggatagttcttacagctcatccaactgaagttaaaagaagaactttaatacaaaaataccataaaataactgagataatggatcaaagaaatcttttaaaggacaagccatcacgattaaaaattttagataaaaaactttatgatgagtttactattatttggaatactgatgatttaaaaagattcaaaccgactcctgctgaagaagcaaggtgggggttagcagtaatcgaagatagtctttgggaaacaattccaaaagtttatagaagattaaatgctattttcgtaaaaaatatgggaaggggtttgcctaaaaattttaatccaattgaatttggatcatggatgggaggagatagagatggtaatccaaatgtaacagcagcgatcactaaagaagtaatacttttatcaagatgggaagcggctaaactatatgagaaagaattaacaaaattaattagaggactttcaatggcaaaatgttcaaaaaaaattctgaaaaatactggaaaaacttttgaaccttatagagtttatttaagaccattaagagatgaaatgagaaggacacatagattaatagaaagacatttagtagcaaaaaaaccactagacaaaaaaaaacttttatcatctaaagaggaaattctaaaacctttaagagttgttcgagagtcattagaacaaaaccaaaatgaaaatattgc

SEQ ID NO: 276419 - DNA, 529 bp, Unknown
  Bacterial polypeptide expressing nucleotide sequence isolated from the Sargasso Sea
gataacatccaaagtttaagagcaatcccttgggtttttgcatggacacaaattagattaatgttacctgcttggcttgggacaactgaggcattgagatatggttcaatcaaaaagttcaaaagaacaatgactgacatggagagaaattggccttactttgtatcaactatggatattttggatatggtaatttctaaagtagatccaaaaatatcagttatctatgaaaataatttagctgatgcctcattaaagagaattggtaaaaaattaagatttcaatttgaggcactggtcaaattgcacaataaaattacacctaaagaagtggtaaaagagagaaaagaatttagaaaggctttatttataagaaacaattatacagagatgttaaatatactgcaagcaaatgtaatgaaaaaattaacaaataaaaaatataaaaatttagataaaaaatttcttgaagatgctttaatgacatcgattgcaggtatttctgcagcaatgaaaaatactggataaa

SEQ ID NO: 276420 - DNA, 961 bp, Unknown
  Bacterial polypeptide expressing nucleotide sequence isolated from the Sargasso Sea
cctcgccgagctcacccgctacctgcaactgcctcaggactatgaggccatggaggagccgcagcgggtggagtggctgctggagcagctgcaaccccggcgccccctgattcccaccggtccgctgtggagtgattccacggcggaaacctttgccgtcttccaaatgctgcggcggctccaggaggaattcgggcagcggatttgccgcacctatgtgatctcgatgagtcacacggagtcggatctgctggaggtgctgctgctggccaaagaggccggcttggtggatccagtggaaggcaccacacgcctgcaggtgatccccctgtttgaaacggtggaggacttgcgctgcgcccctgaggtgatgggcgctgtgatggctcgccccttctacaagcgactgctcgctaacgaggaggtgccgctgcaggaggtgatgctcggctactccgatagcaacaaagactccggcttcctctccagcaactgggaaatccaccgggcccaaatcgccctgcaatcgctgtgcagtgagcacaacatcagcctgcgcatcttccacggacgcggcggctcggtcagccgtggtggcggcccggcctatcaagcgatcctggcccagcccagcggcaccctcaaaggccggatcaagatcaccgagcaaggggaggtgctggcttcgaagtacgccctgccggaactagcgctctacaacctcgagacggtgaccaccgccgtgctgcaaaacagcttgctctccagtggcgtggacgacacccccagctggaatgagctgatggaacggctggcttcacgttcgcgtcagcactaccgcgccctggtgcatgagcacccagatttggtggccttcttcgagcaggtcaccccgattgaggaaatcagcaagctgcaaatcagctcgaggccggcgcggcgccgcacgggcgcccgggat

SEQ ID NO: 276421 - DNA, 783 bp, Unknown
  Bacterial polypeptide expressing nucleotide sequence isolated from the Sargasso Sea
attggatattcagactcaagtaaagatgctggaaaattatcagcgagctggcatcaatataaacttcaagaggaattaagaagtctagcaaagaaatataaaattgatttagttttctttcatggcaggggaggatctccaggtagaggtggtgggccaattcaagcaaccttaaaatctcaaccatctggtacagtaaatggaaaaatcagaattactgatcagggtgaggtaattcaacaaaaatatggatataaacctttagctgaatataacctttgtagttatataggagcagttatggatgcatctttaaatccacctccaagatcaaagccaaattggagagaattaattcacaatatgtcagaaatttcaacatctgcttatcgaaaatatttaaatcaaaatgaggactttattagatattttaaaactgtaactccacataaatcacttgggaagttggcgatagggtctagaccatcaaaacgtaagaatgttgataatatccaaggcttaagagcgataccatgggtatttgcttggacacagattagacttatgttgccagcgtggcttggaacaacagaggctttaagatatggatcaataaaaaaatttaaaaaaacaataactgacatggaaaagaattggccatattttatttcaactatggatattttagatatggtaatttcaaaagtagacccaaaaatatcaataatttatgaaaacaatttagctgacaactcattgaagagaattggtaaaaaattaaga

SEQ ID NO: 276422 - DNA, 911 bp, Unknown
  Bacterial polypeptide expressing nucleotide sequence isolated from the Sargasso Sea
atgtttaaaaaaattcttaaatggccattacgacatagagtcaattattaatgatctcaatttggttttaaattcacttaatgagcatagagggactaagaaggaaatcaggaaaattagccttcttattgagtcattaaaagttggaggatttgttactgccgaaatggatataagagaagattctgcaattacaactaatgctgccaaagaaataatttcaaaaatatatgatgaatctacatcaatttcagatgctatcaacctaattgataaaaaaaatgattttgatttaagtaatttgaaactaaatgatgcttcaagagaagtaattaacacgtttgaaacagtaaaaattaccagaaaaaaatatggggcaagctcaattaatacttggattgttgccatgaccggaagttcagatgatttaagttcaattgcttttttaactttactgactaaaactgttgaatcaaaaaaagatttgccaagctttagaatagttccattacttgaaacaattgatgacttaaaaaatgcaaaagaaattttaagaaatttttggacacaaatttacgatcaaaatagtttagttgaagtaatgataggttattccgactcaaataaagatggagggataattaaatctcaatggaatttatattcttctcagaaagaaatatttaatttgtcaaaacagcttaagctagatttagtattgtttcatggtcgtggtggatcttccagtagaggaggaggccctgcaggtgaagccattttatctcaacctctggaaacaattaatggaaaaataaaaataactcaacaaggcgaagtaatttcagataactttgctaattcagaattatctgagactaaccttaaaattataatgtcatcagttttagaag

SEQ ID NO: 276423 - DNA, 949 bp, Unknown
  Bacterial polypeptide expressing nucleotide sequence isolated from the Sargasso Sea
ctctcaaacaaaattaaaaatttaagtccaatcaatttgttgaaattaacaagagctttcacacattttatgaattttataaatatagccgaatctattgatggagctagaaaacttgacgaatacgaaaacaacagtcaaaacaatagtaacaaaaatatttttattgaagaaatatttgaaagtttttttaatgatagaaagatatctgcaaataaaatttataatgtcgcaaaaaatttaaacataggtgttgttttaactgcacatccaacagaagtaaaaagaagaactttgatacttaagtatcgtaaaattgcagaaattttagaacaaagagatttattaaaaaaatatccatcaaaaataaaaattttggacaaaaaaatgtatgatgaatttactataatatggaacacagatgatttgaaaagaacaaaacctaggccagtagatgaagctagatggggacttgcaattatggaagatagtctttgggtgacaatacccaaggtttatagaagactaaacgatatttttgtaaaaaatatgggcaaaagtttaccaaaaaactttaatccaattgaatttggttcatggatgggaggagatagagatggcaatccaaatgtaacagcaaatgtaaccaaagaagtaattttattatcaagatgggaggctgccaaattatatgaaaaagaattaacaaatttaatccggtctttatctatagaaaagtgttcaaaaaaaatattgaaaaaaactggaaaaacttttgagccatatagagtttatttaagaccattaagaaataaaatgcgctctacttttacattaatagagcagtatttggtaaataaaaaaccattagatcaaaaaaaattaatatcttcaagagaagagattttgagaccgttaagagtagtaagagagtctttggagcaaaaca

SEQ ID NO: 276424 - DNA, 757 bp, Unknown
  Bacterial polypeptide expressing nucleotide sequence isolated from the Sargasso Sea
aatggtaaaaaaaattaaatacaaaatcgcaaacattcaactttctaaaatcgtaagtttattaggaaaaattttaggcattgtagttaaagaacaagaaggtttaccgctttataacaaaattgaagaaataagatctttgtctaaggcaagcagaggcacaaagaataagagaaaaataaagttaaatgaaacaaaaaagtttaggcaattaatagccactattaacaaattaaaaccaaaagaatctttagttatagctagatcatttagtaaatttctaaacttttcaaatttagcagagtctcttgatagtgttcataaaattgatgaaggcagaattcaaaaaaagcaaggaactaatgcatttacacttttagaagatgctattaatagactgttagagcaaaaatctatttctaaagaaaaattttaccaagtagcaaaatcgcttaaaattgatttggttttaacagcacatcctacagaagtaaaaagaagaacgcttatacaaaaatatactaatgtgaataatattttagaaaaatttaacaaatctagaatatttaaactcaaaaatattaaaacagaaacattagcgatggaaagaaatcttcatgaagaaattacatcaatatggaaaacagacgaattaaaaagatccaagccaaaaccaactgaagaagcacaatgggggattagcagtaatagaggacagtctatggaacgcagttccaaaaatatgttcaagatttaa

SEQ ID NO: 276425 - DNA, 451 bp, Unknown
  Bacterial polypeptide expressing nucleotide sequence isolated from the Sargasso Sea
cttgtgggatacaataccaaaagtttatagaaggcttaattctatattcgttcaaaacatgggaaaaggattaccaaaaaattttaatccaattgaatttggttcctggatgggtggtgacagagacggaaatccgtttgtaacatctaaagtcactaaggaagttatacttttatctcgatgggaagctgcaaaactttatgaaaaagcccttactaaaattattagatcatattcaatgcaaaattgttcaaaaaaaatctctagcaaagttggaattacacatgaaccttatagagttttcttgagacctttaagagataaaatgagaaatactcatagacaaattgaacagcatttaattaataaaaaacaattagaccaaaccaagttattgaatagcaaggaagaaattttaaaacctttaagaatagtaagagagtctttagaa

SEQ ID NO: 276426 - DNA, 532 bp, Unknown
  Bacterial polypeptide expressing nucleotide sequence isolated from the Sargasso Sea
gtagataacattcaaagtttgagagcaattccttgggtttttgcttggacccaaattagattaatgttaccagcatggctaggaatcgcagaggcgcttaaatattcttcatcaggtaaattaaagaaaattttggttgaaatggaaaaagattggcctttctttaactcaaatatggatattttagatatggttatatcaaaagcagatcccgaaatttcaaaaatatacgaagaaaatttagctgatattaaattgaaacgtgtaggaaaaaatttaagatatcagttccacaacattaaaaaattaaataaaaaaattacaccaaaagaaattattaaggctagaaaagaatttagaacatcggtaatcgtaagaaacatatattcagaagtgctgaatataattcaatcagctacaatgaataaactttcccaaaaaaagtacaataaacaaggaaaaaaatatttaaatgatgcattaatgacctcaattgctggaatttcagctgcaatgaaaaatacaggttaga

SEQ ID NO: 276427 - DNA, 943 bp, Unknown
  Bacterial polypeptide expressing nucleotide sequence isolated from the Sargasso Sea
tatgccttgcattattttcagcaagttttatttaatgctatgcctcaattgaggggcaggatcactgaagcactcaccgaaaattatccagatgttcagttgccttctcaatctttttgtaatttcggttcctgggtaggctccgatagggacggcaatccatcagttactcctgagataacatggagaactgcttgctatcaaaggcagttgatgttggaaaggtatattatcgcgatatctaatcttagagatcaattaagtgtttcgatgcaatggagtcaagtaagttcttctctattagagtcactcgaaacggacagggttaagttcccagaaatctatgaggctcgggctacaaggtatagatcagaaccttacagattgaaattaagttacattttagaaaaattaaggttaactcaagaaagaaataatttactagctgataatgggtggaaatttgatttagagggtgaaattaataacaaaaatttagataaagttgataacttgcactacaagtcagtcaacgaatttacttatgatcttgaattaattaaaaacagccttattagtactgatttaacttgcgaatctgtaaacaccttacttactcaggttcatatttttggattttctttagcaagtttagatattcgtcaagagagtacaaggcatagtgacgctatacaagagcttacaaattatcttgatttatctttccaatatgaccaaatgtctgaggaagagaaaattaaatggcttatagacgaattaaatactaaaagacctctaattccatctgacgctgactggacaaaaaccacagaagaaaccttttcagtttttaaaatggtaaagagattacagcaagaatttggaagtcgtatttgccattcttatgtaatttcaatgagtcatagtgcatctgatttgcttg

SEQ ID NO: 276428 - DNA, 800 bp, Unknown
  Bacterial polypeptide expressing nucleotide sequence isolated from the Sargasso Sea
cttgggtagagttattaaagatcaagaaggcttagttttttttaaaattgtagaaaaatttagattgttatcaaaaaataccttaattgataaaaataaatttaaaatcttatcaaaaatatcaaaagaagttaaaaaactatcatctgaaaatatatttaaattaacaagagcattctcacaaattttaaatttattaaatttagctgagtctattgatgcctctagaaggttaaatgagtatcaaaatccatattttaaaagtaaaaatcaaaatctttttattgaggatgtaattgaaggtctttttaaaaataaagcaatatctaaaaaaaaaatttatgaacaagctacaaaacttgatattggaattgtgctcactgctcatcccacagaagtgaagagacgaacattaattcaaaagtatgcaaatttaatacacataatggagcaaagacatctatataaaaaatatccatctaaaattatagagctagacagacagttgtattctgagattgcgataatatggaaaacagatgagcttaaaagaacaaaaccatctccactcgatgaagctagatggggtttagcagtaatagaggatagtttatgggataccattccaagagtttataaaagactaaacgatatttttagaaaaaatctaaaaaaggatctaccaagagattttaatccgatccaatttggatcatggatgggtggtgatagggatggaaatccaaatgtcacagccgaagttaccaaaagagttattttattttctagatggcaggctg

SEQ ID NO: 276429 - DNA, 625 bp, Unknown
  Bacterial polypeptide expressing nucleotide sequence isolated from the Sargasso Sea
aaattcagattttataagatattttaaaacagtaacaccgcatttagctcttggtaaattatcaattggatcaagaccatctaaaagaaagaatgtagacaacatacaaagtttaagagctattccttgggtatttgcttggacgcaaattagattaatgcttccagcatggcttggaacgggtgatgcattaaaatattcatcagttaaaaaatataaaaaaataattactgaaatggaaaagaattggccattttttaattcaacaatggatttattagatatggtaatttcaaaagttgacccagagatttcagaagtttacgaaaataatcttgctgataaaaaattaaaagaagtgggtgataaattaagatctgaatttgaaattataaaaaaattaaataaatatataactccaactgaaatactcaatcaaagaaaaaagtttagaaccacaattttagtaagaaatatttattctgaggttttgaatattcttcaagcagtagttatgaaaaaattatcaaatcaaaatttaaaaactgatgacaaaaaaaatcttaacgatgcaatgatgacttcaatagcaggtatatctgcagctatgaagaatactggttaa

SEQ ID NO: 276430 - DNA, 855 bp, Unknown
  Bacterial polypeptide expressing nucleotide sequence isolated from the Sargasso Sea
agagaagatgtaagatatttaggcattgttcttggcaaagttataaaagatcaagagggaaaagatttttttaagttaattgagaaaattagaaaattgtcaaaaacaaacaaatttaactttaaatcagataaatcaaaaaaaaatatttcgaaaattttaattaaacttgatccaaaaaaaactttaaaaattacaagagcttttacccatttcatgaatcttttaaatctggctgaattagttgatgtatcaagaaatttaaatgaatacgaaaataaaaaaaatataaatagtaagaatatttttattgaagaaatatttgaaaaactctttaaaaatacaaaagtatcaaataacaaaatttataattttgcaaaaaatttaaatattggaattgtattaacagcacatcctacagaagtaaaacgtagaactttaatccaaaaatatcataatataacagaaattcttgaacaaagagatttgcttaaaaattttccttccaaaacaaaaaatttaaataaaaaactttacgatgagttaacaataatttggaatactgatgatctaaaaagattcaagccttcaccatttgacgaggctagatggggattagcaatcatagaagatagtttatgggaaacaattcctaaggtttataggagattaaactctatttttttaaaaaatatgaacaaaagtcttccaaaaaactttaaccctatcgaatttggctcatggatgggtggagatagagatggaaatcctaatgtaaccgcaaaagttacaaaggaagtaatcttattatcaagatgggaagcggcaaagttatatgagaaggcattaacaaaa

SEQ ID NO: 276431 - DNA, 877 bp, Unknown
  Bacterial polypeptide expressing nucleotide sequence isolated from the Sargasso Sea
atggtaaaaaaaactaaatacaaaattgcaaacatagaactttcaaaaattgtaagtttattaggaaaaatcttaggaattgtagttaaagaacaagaaggattaccactttataataaaattgaagaaataagatctttatcaaaagcaagcagaggcacaaagaataagaaaaaaataaagttaaatgaaacaagaaagtttcgtcaattaatatttaaaattaataaattaaaaccaagagagtctttagttatagctcgatcatttagtaaatttctaaatttttcaaatttagctgaatctctcgacagcgtccacaaaattgatgaaggaaaaattcaaaaaaaacaaggcactaatgcatttatggttttagaagatgctattaatagatttttaaaacaaaaatctatttctaaagaaaaattctatcaagtagcaaagtcacttaaagttgatttagttttaacagctcatccaacagaagtaaaaagaagaactcttattcaaaaatatactaatgtgaataatattttagaaaaatttaacaaatctagaatatttaagcttaaaaatataaaaacagaaacattagccatggaaagaaatcttcatgaagaaattacatcaatatggaagaccgatgaactaaaaagatctaaaccaaaaccaactgaagaagctcagtgggggttagcagtaattgaagatagtctgtggaatgctgtaccaaaaatatgttcaagatttaatgagtcggttgaaagttatacaggtaaaaaattaccaatagatttttctccattagtatttggatcttggatgggcggaaatggagatggaaatccaaaatgttactgccaagactacagaa

SEQ ID NO: 276432 - DNA, 781 bp, Unknown
  Bacterial polypeptide expressing nucleotide sequence isolated from the Sargasso Sea
aaatgtaacagcagccattacaaaggaagtaatacttttatcaagatgggaagcagctaaactttatgagaaagaattaacaaaactaattagaggactttcaatggaaaaatgttcaaaaaaaattctaaaagccactggaaaaacttttgaaccttatagagtttatttaagaccgttaagagatgaaatgagaaaaacacatagattaattgaaagacatttagtagcaaaaaaaccattaaataaaaaaaaacttttaacttccaaagaggaaattctaaagcctttaagagttgtacgagagtcattagagcaaaatcaaagcgaaaatatcgcaagtggtgatttgctcgatttaatgagacgagctaaatgttttggtattaatctagcaaaattagatataagacaagagtcatcaagacattctcagctactagcagaatatataaagaaaaaaaataaatctaattatttaaattgggatgaaaataaaaaaattaaatatttgataagtgaaatgaataaaaataaaaaaaatttcaaaaattttaattttaaaaataaagaaaataaagaagtttggtcaacttttaaaattttagctgatgaaccatcagaatgtttaggcgcttatgtaatatcaatgacttcatcagcttcagatatcttagaagtttatttaatgcaaatgcaagcaaatattaaaagcaaattaagagtagttccactttttgaaactttgcaagatttaaaaaatgcaaaatccattatggaa

SEQ ID NO: 276433 - DNA, 649 bp, Unknown
  Bacterial polypeptide expressing nucleotide sequence isolated from the Sargasso Sea
tcctatagaaaaaatataaatcaaagttcagattttataagatattttaaaaccgtaactcctcatatggcacttgggaaattatcaattggctctagaccttctaaaagaaaaaatgttgataatataaatagtttaagagctattccttgggtttttgcctggactcaaatcagattaatgttacccgcttggttaggcactgccgaggctttaagatattcatctataaagaaatttaaaaaaacacttattgatatggaaaaaaactggccttattttaattcaacaatggacttgcttgacatggtactttctaaggtcgacccagaaatatcaaaaatttatgaaaaaaacctagctgatgataaacttattagagtaggaaaaaaattaagatttcaatttgatgctgttaaaaaattgaatgatcaaataacaccaaaagaaatttttaagcaaagaaaaatttttagaggcccagcaattattagaaacatatattctgaaatccttaatgttttacaagcagtagtgatgaataagcttctaaaaagaaatttaaataaaaaagataaaaaagatttaaatgacgcaatgatggcatcaatagcaggtatttctgcagctatcaaaaatactggataat

SEQ ID NO: 276434 - DNA, 856 bp, Unknown
  Bacterial polypeptide expressing nucleotide sequence isolated from the Sargasso Sea
caaaaaagacttttatcttctaaagaggaaattctaaaacctttaagggttgtacgagaatcgttagaagaaaatcaaagtgaaaatattgcgagcggtgatttgcttgatttaatgagacgagccaaatgttttggtataaatctagcaaaattagacataagacaagagtcttcaagacattcacaactattagcagaatatgtaaagaaaaaaaataattctaattatttaaaatggaatgaaaataaaaaaattaaatatttaataagcgagatgaaaaaaaatagaaaaagtttcaaaaattttaattttaaaaataaagaaaataaagaagtttggtcaacttttaaacttttagctgatgagccatcagaatgtttaggtgcttatgtaatatcgatgacttctgcagcttcggacatcttagcagtttatttaatgcaaatgcaggcaaatattaaaaataaattacgggtagttccgctttttgaaaccttgcaagatttaaaaaatgcaaaatcgattatggaaagacttttttcattaagttggtacagaaaattaattaaaaacaaacaagaaattatgattggttattcagattctagtaaagatgccggaaaattatctgctagctggcatcaatacaaacttcaagaagacgttttaactatcgcaaaaaaatataaaattaaccttacttttttccacggcagaggtggttcacacggaaggggtggtggaccaattcaagcaacaatgagatctcaacctccaaattctgtatatggtcgtattagaattactgaccaaggagaaaatgatccacaaaatatggttatgaacctttagc

SEQ ID NO: 276435 - DNA, 691 bp, Unknown
  Bacterial polypeptide expressing nucleotide sequence isolated from the Sargasso Sea
gttggagaaattaatagaagaaatgacgaaaatttctactttagcttatagaaaaaatataaatgaaaactcagattttataagatattttaaaactgttacaccacacttagctcttggaaaattatcaataggatcacgaccttctaaaagaaaaaatgtagataacattcaaagtttaagagcaataccctgggtatttgcttggacacaaataagattaatgttgcccgcttggttaggaactggggatgctttaaaatattcgtctattaaaaatcacaaaactactcttacaaatatggaaaaagattggccattttttaattctacaatggatatattggatatggttatttctaaagttgatccagagatatcaaaggtttatgaaaatagtcttgcagataaaaaattaagagaagtgggtgacaaacttagatccgagttcgctataattaaaaaattaaatagatacataactccacgagaaataattaatcaaagaaaagaatttagaaaaacggtcctagttagaaacatttattctgaagttttaaacatattacaagctgtggttatgaacaaaatatcaaagaaaaaatttaaatctaatgataagaaatatcttaatgatgcaatgatgacatcaatagccggtatttccgcggcaatgaagaatactggttaa

SEQ ID NO: 276436 - DNA, 697 bp, Unknown
  Bacterial polypeptide expressing nucleotide sequence isolated from the Sargasso Sea
aaaaattggaggactttaatagagagtatgtctgatatatctaaaagctcatatagaaaaaatttaacatcaaattcggaattcattaggtattttaaaacagttacacctcatttagcattaggcaaactttcaattggatcacgtccctcaaaaagaaaacaagtagatagtataaaaagtttgagagcaataccttgggtatttgcatggacacaaattagattaatgctgccagcatggttaggtactgctgaagccttaagatattcctcaataaaaaaattaagaaaaactttaattgatatggaaaaaaattggcctttttttaattctacaatggacttattggacatggttatctctaaagtagaccctgaaatttcaaaaatttatgaagaaaatttggccgatgaaaatttaaaaagagttggaaaaaaattaagatttcaatttgatgcacttaaaacacttaacaaaaaaattacaccgacagaaattttacaacaaagaaaagtttttagaagtccagcaattataagaaacctttattctgaagtgttaaatattctgcaggcaactgtaatgatgaagctatcaaaaaaaaataataaaagagaaaataaagcatatttaaatgatgctttaatgactagcatcgccggaatatcggcagcgataaaaaatacaggataaa

SEQ ID NO: 276437 - DNA, 921 bp, Unknown
  Bacterial polypeptide expressing nucleotide sequence isolated from the Sargasso Sea
aaatttaagatagatcttgttttcttccacggtagaggcggatctccaggaagaggaggtggtccaattcaggctactttaaaatcacaaccttcagggacagttaatggaaaaattagaattactgatcaaggtgaagtaattcaacaaaagtacggttacaaacctttagccgagtataatttgtgtagttatataggttctgtaatggacgcatctttaaatcctccaccaagatcaaaaactaattggcgtgaattaattcaaaaaatgtcagaaatttctacatcttcatatagaaaatatctaaatcaaagtgaggattttattcgttactttaaaacggttacgccacataaatcacttggtaagcttgctattggatcaagaccaaccaaaagaaagaatgtcgataatattcagagtttaagagctattccttgggtatttgcttggacgcaaattagactaatgttaccagcttggctaggcacaactgaagcgcttagatatggttctattaaaaagtttagaacaacaatgacagatatggaaagaaattggccatactttgtatcaaccatggatattttggatatggtaatttctaaggtggatccagaagtatcagttatttatgaaaataatttagctgatgcctcattaaagagaattggtaaaaaattaagatttcaatttgatgcactggtcaaattgcataataagattactcctaaggaagtggtaaaagagagaaaagaatttagaaaagctttatttataagaaacaattatacagagatgttaaatatactgcaggcaaatatcatgaataaattaacaaataaaaaatataaaaatttagataaaaaatttcttgaagatgcttttatgacatcgatcgcaggtatctctgcagca

SEQ ID NO: 276438 - DNA, 874 bp, Unknown
  Bacterial polypeptide expressing nucleotide sequence isolated from the Sargasso Sea
taccacacaattattgaaattatggaacaaattgaattactgaaaaaacatccatcgaaaataaaaattttggaaaaaaaattatatgatgaatttacaattatttggaacacagatgatctaaaaagatttagacctactccttcagaagaaacacgttggggactagctgttattgaagatagtttgtgggagtcaattcctaaagtgtatagaagattaaatggaatttttgttaaaaatatggggaaaaatttacctaaaaattttaatccaattgaatttggatcttggatggggggagatagggatggcaatccaaatgttacatctaaagttactaaagaagttattttattatccaggtgggaagctgcaaaactttatgaaaaggcattaactaaattaataaggtcatattctatggaaaaatgttcaaacaaaataactaggattattggtaaatcacatgagccatatagggtttatttgagaccattgagaaataaaatgagatatacccatagagctatagagaatcatcttgtgcgaaataaatcccttaatcgaaaaaaacttttatcctcaaaagaggaaattttaaaacctcttcgaatagttagagagtctttagaaaataatcaaagcgaaaatattgcaagtggagatctattagacttgatgagaagagcaaaatgtttcggtataaatttagcaaaattagatataagacaagagtcttataggcatgctcaacttgttaatgaattattaaaaaaaaaattaaaaaaaaattatttcaaatttacagaaaatcagaaaattaaatttttatctaagtctattagatcaaacaaaaatttaataaataatt

SEQ ID NO: 276439 - DNA, 778 bp, Unknown
  Bacterial polypeptide expressing nucleotide sequence isolated from the Sargasso Sea
gaacctttagctaaatataatttatgtagctatataggatctgtaatgcaggctactctaaacccacctccacaacctaaggaaagttggagaaaattaatagaagaaatgacaaaaatttctacattagcttatagaaaaaatataaatgagaattcagattttataagatattttaaaactgttacacctcacttagcacttggaaaattatcaataggatcacgaccctctaaaagaaaaaatgtagataacattcaaagtttaagagcaataccctgggtgtttgcttggacacaaataagattaatgctgccagcttggttaggaaccggcgatgcattaaaatattcatcagttaaaaattacaaaaatattattacagatatggaaaaaaattggccattttttaattctacaatggatattttagatatggttatttcaaaagttgacccagaaatatcagaagtttatgaaaatagccttgcggataaaaaattaagggaagtgggtgacaaacttagggcagagtttgctataattaaaaaattaaataaatacataactccaagagaaataattaatcaaagaaaaaaatttagaacaactgtcttggttagaaacatttattctgaagttttaaacatactacaagccgtggttatgaaaaaaatatcaaagaaaaaatttaaatttgatgataaaaagtatcttaacgatgcaatgatgacatctatagctggcatatctgcagccatgaagaatactggttaaa

SEQ ID NO: 276440 - DNA, 424 bp, Unknown
  Bacterial polypeptide expressing nucleotide sequence isolated from the Sargasso Sea
catgaagaaatgctcaaaaaaaattcttaaaaaagttggaaaatcatttgagccttatacagtttttttaagacctttaagggacaaaattccaacaacacacagatccattgaacaacacctagtaaataaaaaacctttaaatcataaaaaattattaagctctcgtgaagaaatactaaagccgctcagagtagtaagagagtctcttgaacaaaatcaaaatgaaaatattgctagtggggaattattagatttgatgagaagagctaagtgttttggtattaatttagcaagactagacattagacaagagtcatctagacatagtcaattaataagtgaatttattaagaggaaatacaataaaaactattcaaaatttagcgaagataaaaaaattgaatttttaaaaaacaaataa

SEQ ID NO: 276441 - DNA, 739 bp, Unknown
  Bacterial polypeptide expressing nucleotide sequence isolated from the Sargasso Sea
aaaagatttaataaaattacttcagaaattcaaagacttaaaccaattaaaatatttaaattagcaagagcatttaatcattttatgaattttattaatcttagtgaatctatagatgcctctagaaaactagacgaatttgaaaattctgacttgaaagacaagcataaaaatatttttattgaggaaattttcgaaaatctttttaaaaacaaaaaaattaaacctcaaaaaatttataatattgcaaaaaatcttcatattggaatagttcttacagcccatccaactgaagttaaaagaagaactttaatacaaaaataccataaaataactgagataatggatcaaagagatcttttgaaggataaaccatcaagattaaaaatcttagataaaaaactttatgatgaatttacaattatatggaatactgacgatttaaaaagatttaaaccgactcctgctgaggaagcaaggtggggattggcagtaatcgaagatagtctttgggaaactattccaaaagtttatagaagattaaacgctattttcgtaaagcatatgggaagaggtttgcctaaaaattttaatccaattgaatttggatcttggatgggaggagatagagatggcaatccaaatgtaacagcagccaccactaaagaagtaatacttttatcaagatgggaagcagcaaaactatatgagaaagaattaacaaaattaattagaggac

SEQ ID NO: 276442 - DNA, 787 bp, Unknown
  Bacterial polypeptide expressing nucleotide sequence isolated from the Sargasso Sea
atatggttatgagcctttagcaaaatataatctgtgcagttatataggatctgttatggaagctactttaaacccacctccaaaaccaaaagacagttggagacaattaattcaaagtatgtctgagatatcaacaagttcttatcgaaaaaatataaatcaaagttcagattttataagatattttaaaaccgtaactcctcatatggcactagggaaattatcaattggctctagaccttctaaaagaaaaaatgttgataatataaatagtttaagagctattccttgggtttttgcctggacacaaattagattaatgttacccgcttggttaggtactgctgaggccttaagatattcatctataaagaaatttaaaaaaacacttattgatatggaaaaaaactggccttattttaattcaacaatggacttgcttgacatggtaatttctaaggtagacccagaaatatcaaaaatttacgaaaaaaacctagctgatgataaacttatcagagttggaaaaaaattaagatttcaatttgatgctgttaaaaaattgaatgatcaaataacaccaaaagaaatttttaaacaaagaaaaatttttagaggtccagcaattattagaaacatatattctgaaatccttaatgttttacaggcagtagtgatgaataagcttttaaaaagaaatttaaataaaaaagataaaaaagatttaaatgatgcaatgatggcatcaatagcaggtatttctgcagctatcaaaaatactggataa

SEQ ID NO: 276443 - DNA, 928 bp, Unknown
  Bacterial polypeptide expressing nucleotide sequence isolated from the Sargasso Sea
tttaaattagtgaaaaaaacaagacttttatcaaaagcaaatattgcgaataaaaataaaaaagatcctttcaaaaatctatctaaagaaattaaaaaacaaaaacctaaaaatctactcaaactaactagagcatataatcattttatgaacttatataatttagctgagtcagtagatgcctcaagaactctggatcaatttgaaaatttttcaaaaaataaaaaaaataaaaacatttttattgaggaaatatttgagagtttttttaaagataatacaatttcaaataaaagaatttacgatttagctaaaagacttaatatcggtattgttttaactgctcatccaaccgaagtaaagagaaggaccttaattcaaaaatatcataaattgactgagatattggaacaaagaaatttacttcaaaactatccttctaaaataaaggtattagacaaaaaaatgtttgatgaaataacaattatttggaacacagatgagctaaaaagatacaaaccatctccttttgatgaagcaagatggggattagcaattatagaagatagtttatgggatactattcctaaagtttacagaagacttaatgaaatatttgtaaaaaatatgaaaaaaaatttaccaaaaaattttaatcctattgaatttggttcatggatgggtggtgacagagatggaaatcctttagttacatctaaagttactgaggaggtcttacttttatcaagatgggaagctgcaaaactttatgaaaaatctttaacaaaattaataagatctttttctatgcaaaaatgctccaaaaaaatattagaatatacaggtaatacatgtgaaccttatagagtatatttaagacctcttagagataaaaggagaagaacccatagaatgatagaacgacatt

SEQ ID NO: 276444 - DNA, 916 bp, Unknown
  Bacterial polypeptide expressing nucleotide sequence isolated from the Sargasso Sea
gtgaaaaaagttagaaaattatcaaaagctaataaagccaatcctaattcaaaaaaactaaataatgatgtaattaacgcaatcaaaaaacttgatcctaaaaatacctttaaattaactcgagcattttcacattttatgaattttatgaatttagccgagctagttgatgcctctagaagtataaatgaaaatgaaaataataagaaaaaattaaacaaaaaaaatttatttatcgaggaaatttttgaggacttatttagaaaaaaaaatatttcagacaataagatttatgatttagctaaaaatcttaatataggtattgttttaacagctcatccgacagaagtaaaaagaagaactttaattcaaaaatatcataggatcatagagattcttgaagagcaagaattgtttaaaaattttccctcaaaattaaaagttctcgataaaaatctttacgatgagttgacgattatttggaatacggatgatcttaaaagatttaaaccatcaccatttgatgaggctagatggggattggccatcattgaggatagtctgtgggatacagttccaaaagtttatagaaaattaaattctatatttgtaaaaaatatgggtaaaaatttaccaaaaaactttaatcctattgtatttggttcatggatgggtggtgatcgagatggcaatcctaatgttacttcagaagtcacaagaaaagtaattttactctctagatgggaagcagctaaattgtatgaaaaagctcttactaaaataataagatcctattctatggaaaaggcttcaaaaaaaatcttaagtaaagttggtcaatcatttgagccttatagagtttttttaagacctttgagagacaaaatgagaattacccatagatctatgaacaaca

SEQ ID NO: 276445 - DNA, 500 bp, Unknown
  Bacterial polypeptide expressing nucleotide sequence isolated from the Sargasso Sea
caaaggacagtcaattaaacgcgaagaattaattgaggagcttcaagcagaaattttgattttatggagaacagacgaagtaagactcaaaaaacctacagtgatagatgaagtggagaacggtctttattattttagaacttctttattcaagtctatacctgaagtctataaagatatggagaaggctattaaaagagtttaccacacagataatatcaaagttcctagtttcattaaatttggttcatggattggcggtgatagagacggcaacccgtttgttactcccgacataaccagagaggcagtttacatgcatgcagaaactgccattcatgagtacatgaggagagcacaaaacttatcaactatccttactcactctctagaactaacccgaccatcaaatcaatttttagaatcatctaaaagagatgagatttatttaactaatgcattcaaaaatactacccaagattttgcgaaagagccgtata

SEQ ID NO: 276446 - DNA, 871 bp, Unknown
  Bacterial polypeptide expressing nucleotide sequence isolated from the Sargasso Sea
aaattagatgaatttgaaaattctgatataaaagacaaacataagaatattttcattgaggaaattttcgaaaagctttttaaaaacaaaaaaattaaacctcagaaaatttataatattgcaaaaaatcttcaaattggaatagttcttacagctcatccaactgaagttaaaagaagaactttaatacaaaaataccataaaataactgagataatggatcaaagaaatcttttgaaagacaaaccatcacgattaaaaattttagataaaaaactttatgatgaatttactattatttggaatactgatgatttaaaaagatttaaaccaactccagcagaggaagcaaggtggggattggcagtaattgaagacagtctttgggaaacaattccaaaagtttatagaagattaaacgccatattcgttaaacatatgggcaaaggtttgcctaaaaattttaatccaattgaatttggatcttggatgggaggagatagagatggcaatccaaatgtaacagcagctatcactaaagaagtaatacttttatcaagatgggaagcagcaaaactttatgagaaagaattaacaaaattaattagaggactttcaatggaaaaatgttcaaaaaaaatcctaaaagctactggaaaaacttttgaaccttatagagtttatttgagaccgttaagagacgaaatgagaaaaacacatagattaatagaaagatatttggtagcaaaaaaaccattagacaaaaaaaaacttttatcttctaaagaagaaattctaaaacctttaagagttgtgcgagagtcattagaacaaaaccaaagtgaaaatattgcaagtggtgattgctcga

SEQ ID NO: 276447 - DNA, 664 bp, Unknown
  Bacterial polypeptide expressing nucleotide sequence isolated from the Sargasso Sea
tttcagtgctgccttcaggcctatcggcaatttgtcgaaaccccggggctgccggagtacttcaccacctcgacaccggttgaggagctcgggtccatgaatatcggatcccggcccgctcgccggtccgcggccaagaccgggatcgccgaccttcgcgccattccctgggtgttcggctggactcagtcgcgccagattatccctggatggtttggcgctggcactggtctgcgtgctgggatggaagccggacacgcagatgacctgcgccgcatgtatgctgaatggcacttcttctcaacgttcgtgtcaaacgtcgaaatgacgctcgccaaaactgacctcgccatcgcacgtcactatgttgaacgactggttgatccgaagctgcatcatttattcgatcaggttgttgaggagcacacgctcacgatagagatgatcacttcaattacgggaaccgcactattgtccgacaagccgatgctgcgtcgtacactggaagtgcgggatgcctatctcgatcccatcagcgtgctgcaggtggaattgctcacccgcagccgacgagaaaaaagccgcgatcgcaatgaccagatgcagcgggcattgctgctttccatcaatgggattgctgcgggactacgcaacaccggctaag

SEQ ID NO: 276448 - DNA, 541 bp, Unknown
  Bacterial polypeptide expressing nucleotide sequence isolated from the Sargasso Sea
aagaaaaaatgtagataacattcaaagtttgagagcaattccttgggtatttgcttggacccaaattagattaatgttaccagcatggcttggaagtgcagatgcactaaaatattcttcgtcaggaaagttaaagaaaattttggttgaaatggaaaaagattggccattctttaactcaaatatggatatattagatatggttatttcaaaagcagatccagaaatttcaaaaatttatgaggaaaatttggctgataataaattgaaaagtgttgggaaaaatttaagatttcagtttcataaaattaaaaaattaaataaacaaattacaccaaaagaaattattaaggctagaaaagaatttagaacatcagtaattgtaagaaatatatactcagaagtactgaatattattcaagcagttacaatgaataaactttcccgaaaaaaatacaataaagaaggaaaaaaatatctaaatgatgcattaatgacctctattgctggaatttcagctgcaatgaaaaatacaggttag

SEQ ID NO: 276449 - DNA, 763 bp, Unknown
  Bacterial polypeptide expressing nucleotide sequence isolated from the Sargasso Sea
tattaccaaagaagtaattttattatcacgatgggaagctgcaaaattatatgaaaaagaattaacaaagttaatcagatctttttcaatggagaaatgttctaagaaaattttaaaagttacaggaaaaacttttgaaccatacagagtattcttaagacctcttagggataaaatgaggttaacgcatagagcaatagaaaatcatcttgtaagacataaacctcttgatcaaaataaattattatcatctaaggaagaaattttaaaacctttaagggtggtaagagactctcttgaaaaaaatcagaatgaaaatatagcaagtggtgaattacttgacttaatgagaagagcgaaatgttttggtataaatcttgctagactagatataagacaggaatcatcaagacactcacaattactttatgagttcatcaaaaagaagtacagagctgattattataaatggtcagaaaagcagcgaataaattttttatcaaaacatttaaaaacaaataaaaaaatcattaaaaatttcagatttaagaatagagaaaatcttgaagtttggtctacttttaagattctagctgatcaacctgaggaatgtttaggtgcatatattatttcaatgacatcatcagcctctgacattttagcagtttcttttttacaaaaggaagcaaatataaataaaagattaagagtagttccaatattcgaaaccttagatgacttaaaaaatgcaaaatcgattatg

SEQ ID NO: 276450 - DNA, 736 bp, Unknown
  Bacterial polypeptide expressing nucleotide sequence isolated from the Sargasso Sea
aatcttaatataggtattgttttaacagctcatcccacagaggttaaaagaagaactttaattcaaaaatatcacaagattatagagatactagaggagcgggaattgttcaaaaatttttcctcaaaattaaaagtgcttgataaaaatctttatgatgagttaacaattatttggaatacagatgatcttaaaagattcaaaccatcaccatttgatgaagctagatggggattggccgtcatcgaggatagtttgtggaacactgttccaaaagtttacagaaaattaaattctatatttgtaaaaaatatgaataaaaatttaccaaaaaattttaatcctattgtatttggttcgtggatgggtggtgaccgtgatggtaatcctaatgttacctcagatgttacaagaaaagtaattttactttctagatgggaagcagctaaattatatgaaaaagctctcactaaaataataagatcttattctatggaaaaggcttcaaaaaaaatcttaagtaaagtaggtcaatcattcgaaccttatagagtttttctgagacctttgagagataaaatgagaattactcatagatctatagaacaacatttagttcataataagtcattagatcagaaaaaattattaagttctagagaggaaattctcaaacccttaagagttgttagagaatctttagagcaaaatcaaaatgagaatattgccaatggtg

SEQ ID NO: 276451 - DNA, 862 bp, Unknown
  Bacterial polypeptide expressing nucleotide sequence isolated from the Sargasso Sea
cttaaaatcacaaccttctggaactgttaatggaaaaattagaattactgatcaaggagaggtaatacaacaaaagtatggttacaaacctttagccgaatataacctctgtagttatattggttctgtaatggatgcttctttaaatccaccaccaaaatcaaaaaccaagtggcgtgaattaattgaaaaaatgtcagaaatttctacatcctcatatagaaaatatttaaaccaaagtgaagattttattcgttattttaaaattgttacacctcataaatcacttggaaaacttgcaattggttcaagaccgaccaaaagaaagaatgttgataacattcaaagtttaagagctatcccctgggtatttgcttggacgcaaattagattaatgttacctgcgtggcttgggacaactgaggcattgagatatggatctattaaaaagtttaaaaaaacaatgacagatatggaaagaaattggccttattttgtatcaactatggatattttagacatggttatttctaaggtagatccagaaatatcagttatatacgaaaataatttagctgatgcttcattaaaaagaattggtaagaaattaagatttcaatttgaagcactggtcaaattgcataataaaattactccaaaggaagtgataaaagaaagaaaacaatttagaaaatcgttatttataagaaataattatacagaaatgttaaatatacttcaggctaatgtgatgaataaattaacaagtaaaaaatataaaagttcagataaaaaattccttgaagatgctttaatgacctcgattgcaggtatttctgcggcgatgaaaaatactggataa

SEQ ID NO: 276452 - DNA, 184 bp, Unknown
  Bacterial polypeptide expressing nucleotide sequence isolated from the Sargasso Sea
tgtagaaaccccggggctgccagagtacttcaccacctctacaccggttgaggaactcggatccatgaatatcggatcccggcccgcgcgccggtccgcagcgaaggccggcatcgccgacctgcgtgccattccctgggtattcggctggacccagtcgcgtcagattattcctggatggttc

SEQ ID NO: 276453 - DNA, 544 bp, Unknown
  Bacterial polypeptide expressing nucleotide sequence isolated from the Sargasso Sea
aaaagaaaaaatgtagacaacattcaaagcttaagggcaataccctgggtatttgcttggacacaaataagattaatgttacccgcttggttgggaactggtgatgctttaaaatattcatcaattaaaaaatacaaaactattcttacagatatggaaaaaaattggccattttttaattctacaatggatattttggatatggttatttctaaagttgatccagagatatcagaagtttatgaaaatagtcttgcagataaaaaattaagagaagtaggtgataaacttagatctgagtttgctataattaaaaaattaaatagatacataactccacgagaaataattaatcaaagaaaagaatttagatcaaaggtcctagttagaaacatttattctgaagttttaaacattcttcaagccgtggttatgaacaaaatatcaaagaaaaaatttaaatctaatgataggaaatatcttaatgatgcaatgatgacatcaatagcaggcatttctgcagccatgaagaatactggttaaa

SEQ ID NO: 276454 - DNA, 960 bp, Unknown
  Bacterial polypeptide expressing nucleotide sequence isolated from the Sargasso Sea
ttttttgaaattggttgagaaatttagattattatcaaaaaacacactttcagataaaaataaaactagaatattttcaaaaatttcaaaagaagtaaaaaaactttctccaaagaatacatataaattaacaagagcattttcacatatcttgattttaatgaatttagctgagtcactagatgcatctagaaagttaaatgagtttgaaaatccatattttaaaagcaaaaaccaaaatcttttcatagaagatataattgaaggtttatttaaaaacagaaaaatttcagataaaaaaatttacgaacaagcaacaaaacttgatataggcattgtccttactgcccatcctactgaagtaaaaaggagaaccttaatccaaaaatatgccaatttaattgaaataatggagcaaagacatctttataaaaaatatccatcaaaaataatagaattagatagaaagctttattcagaaattgcaatcatatggaaaacagatgaactaaaaaggactaaaccatctccattagatgaagcaaggtggggtttagccgttatcgaggatagtctgtgggacaccattcctaaagtttacaaaagacttaacgacatattcagaaaaaatttaaagaaagatctgccgcgtgatttcaatccaattcaatttggatcctggatgggtggagatagagatgggaatcccaatgtaacagctgaagttacaaaaaaagtaatattattttctagatggcaagctgcaaaattatatgaaaaagaactcactcaattgattcaagatttatcaatgaaagaatgctcattaaagattaaaagagcaacaggaaatagttttgaaccttatagagtttatttgagaccaattagggataaagtgagattaacccatcaattaattgaaagtcatttaaataataacatagctctagatgaaaa

SEQ ID NO: 276455 - DNA, 602 bp, Unknown
  Bacterial polypeptide expressing nucleotide sequence isolated from the Sargasso Sea
tgaacaagtaacaccaaataaaacaattggtaagctctatataggatcacgacctactaaaagaaatacttcaaaagatattaatagtttgagagcaattccgtgggtatttgcttggacacaaattagatttttattacctgcatggttaggaacaactgaggcaatggattttgcttctgaaaaatctaataaaaaaattttaaatgatatgcttaaaaattggccttttttctatgaaatgatggatatgcttgatatggttttaacaaaaactgatcaaagagttatcaaatattatgaagaatgtttagctgataaaaactcaaaaaaaattggtttccaattgagacaaaaacttaattttttaatctcattaaataaaaaaataatcccaaaacatatacaaaatcaaagaaaagcatttagaaaatctataaaattaagaaatacttatgcagaaatattgaatattcttcaggctgatattatgaaaaaacttgagaataaaagattgtcaaaaaagaatgaaaaaatccttatggatgcaatgtttgtcactatatcaggaatatctgcatcaatgaaaaatactggataat

SEQ ID NO: 276456 - DNA, 625 bp, Unknown
  Bacterial polypeptide expressing nucleotide sequence isolated from the Sargasso Sea
aactcagactttataagatattttaaaactgttacaccacacttagctcttggaaaattatcaataggatcacgaccttctaaaagaaaaaatgtagacaacattcaaagtttaagagcaataccttgggtgtttgcttggacacaaataagattaatgctgccagcttggttaggtactggggatgctttaaaatattcgtcaattaaaaattacaaaactactcttacagatatggaaaaaaattggccattttttaattctacaatggatattttagatatggttatttcaaaagttgacccagagatatcagaggtttatgaaaatagccttgcggataaaaaattaaaagaagtgggtgacaaacttagatctgagttcgctataattaaaaaattaaatagatacataactccacaagaaataatcaatcaaagaaaagaattcagatcaacggtcctagttagaaatatttattctgaagttttaaacatattacaagctgtggttatgaacaaaatatcaaagaaaaaatttaaatctgatgacaagaagtaccttaatgatgcaatgatgacatcaatagcaggcatatccgcagccatgaagaatactggttaaa

SEQ ID NO: 276457 - DNA, 982 bp, Unknown
  Bacterial polypeptide expressing nucleotide sequence isolated from the Sargasso Sea
aaaagaagaacacttatacaaaaatatacaaaggtaaatgatattttagaaaaatttaataaatcaagaatttttaagataaaaaatatagaaaaagaaaataaaattttagaaaaaaaacttcatgaacaaattacatcaatttggaaaaccgatgagcttaaaagatcaaaaccaacacctgttcaagaagcaaaatggggtctggcagtcatcgaggatagtttatggaattctattccaaaaatttgttctagattggatgaagcagttcaaagatattcaggcaaacaattaccaataaactattcaccatttaaatttggatcatggatgggtggagatcgggatggcaacccaaatgttaatcataaaatcactaaagaagtaatattgttatcaagatgggaggctgcaaatttgtatgaaaaagaaataacaaaaattatacaagatctctcaatgcatgaatgttctaacgaaatcaaaagaaaaacaggtgaaagccaggaaccttatagggtttatcttagaccggttagaagtaaattgcaaaaaactcaaaaggaaatcgaactttatttgctcaaaagaaaaaaatttaatgataaattaattgtgaattctataaatgaaataataaaccctttagtggtggtttataactctctgtgtaaaacaaaatgtaaagcgttagcagatggatcagttttggatttaattagaagagcttatgcatttggtcttaatcttgcaaaattagatataagacaagaagcctcaagacatacagatataataagtaaaatttataaacataagtttaaaaaagattatttgaaaattgatgaaaaagaaaaaatatcttttttaattaaatctctgaagtcaaataaaaaggtttttaataaaagaataaaattaacaaaagatgaaaaagaaacctgggaaacgttcaatatgctatcacatacaccgtatg

SEQ ID NO: 276458 - DNA, 773 bp, Unknown
  Bacterial polypeptide expressing nucleotide sequence isolated from the Sargasso Sea
tttagcaaaatataatctgtgcagttatattgattctgttatggaagctactttaaatccaccaccaaaaccaaaagacagttggagacaattaattcaaagtatgtccgagatatcaacaagttcctatagaaaaaatataaatcaaagttcagattttataagatattttaaaactgtaactcctcatatggcacttgggaaattatcaattggctctagaccttctaaaagaaaaaatgttgataatataaatagtttaagagctattccttgggtttttgcctggactcaaattagattaatgttacccgcttggttaggcactgccgaggctttaagatattcatctataaagaaatttaaaaaaacacttattgatatggaaaaaaactggccttattttaattcaacaatggacttgcttgacatggtactttctaaggtcgacccagaaatatcaaaaatttatgaaaaaaacctagctgatgataaacttattagagtaggaaaaaaattaagatttcaatttgatgctgttaaaaaattgaatgatcaaataacaccaaaagaaatttttaaacaaagaaaaatttttagaggtccagcaattattagaaacatatattctgaaatccttaatgttttacaagcagtagtaatgaataagcttttaaaaagaaatttaaataaaaaagataaaaaagatttaaatgatgcaatgatggcatcaattgcaggtatttctgcagctatcaaaaatactggataat

SEQ ID NO: 276459 - DNA, 892 bp, Unknown
  Bacterial polypeptide expressing nucleotide sequence isolated from the Sargasso Sea
aagagcatttacgcattttatgaattttgtaaatttaacagagactttagactcttctagaaaattagatgaatttgagaattcaaaaattaaaaatgataataaatatatttttattgaggaaatttttgagaaactttttaaatctaaaaaaatttcaaaaaataaaatttataatattgcgaaaaatttaaatattggaattgtgttaacagctcacccaactgaagttaagagaagaaccctaattcaaaaatatcataaaataacagagattatggagcaaagagaattattgaaacattatccatctaaaattaaaattttagaaaaaaaactttatgatgaatttacaattgtttggaatactgatgatataaaaagatttagaccgagccctactgatgaagcaagatggggtttggctgtaatagaggatagtttatgggaaacaattccaaaagtttatagaagacttaatggcattttccttaagaatatgggtaaaaatttaccaagaaactttaatcccattcagtttggttcttggatgggaggagatagggatggtaatccaaatgtaacttcatctattacaaaggaagttattttattatctcgatgggaagcagcaaaattatatgaaaaagagttaactaagttaattaggtcgttttcaatggaaaaatgctcaagtcaaattttgagaattacgggtaaaacatttgaaccttatagagtttttttaaggccattaagagataaaatacgattaactcatagggcaatagaaaatcatttggtaaggcaaaagccacttgatgagaagaaattactatcatctaaagaagacatattaaaacctttaagagttgtaagagaatctctcgag

SEQ ID NO: 276460 - DNA, 718 bp, Unknown
  Bacterial polypeptide expressing nucleotide sequence isolated from the Sargasso Sea
atacagtcttggaacctatattggcgctgttttagaggcaacaattgcacctccaatacatccaaaaaaggattggagagaattaataaataaaatgagtgaactttcaagtgaagcatatagaaattatcttttaaaagatgaaaattttttaaattattttgagttaatcactcctaaaaatattttagataggttgtatattggatctagaccttctaaaagaaaaaattctcaagatattagaaatttaagagcaataccttgggtttttgcttggacacaaataagatttcttttgcctgcttggttaggaacttttgaagctcttaaaatttcatcaaaagaaaaaaataaagttattttgaaagatatgctttataattggccttttttttatgaaatgatggatatgttagatatggtattaacaaaaacagatcaaagagttataaaattttatgaagaatgtcttgctactaatcaattaaaaactttaggagaagatttgcgacataagttatcattattaattgatttaaacaaaaaattaataccaccgcatatattaaatcaaagaaaagaatttagaaaatctattatggtgagagaaacatatgcagaaatattaaatttattacaggcttctattatgttaaaactcaataaaaaaaatttaaataaaaaagaaagagatattttgatggatgcgatgatt

SEQ ID NO: 276461 - DNA, 752 bp, Unknown
  Bacterial polypeptide expressing nucleotide sequence isolated from the Sargasso Sea
tgccacgcgattattccatggccgcggcggttattacctaggctgcgaacatctttgtttagattggttcgcgcccgtgttgttattgaccagttttactcccctcgatgcggccgagttggccgagtgccaacaggcgattacggcgcgttggcaagtgatacaacccaatcggccgttaaacttggtgtatcaataccgcagcggtggcgaaacctttagccaagtactggcgggtgaggtgcccgatccccatgtggtcagcgaaaacggcgcccagtttcaggtgcatttattgcggggacaaaaccacggtttgttcctcgatatggcaaacggccgtgaatgggtcagagcccatgctcgccataagaaagtgctgaatttgtttgcttatacctgtggtttctcggtggcagcgctacagggcggcgccgatgaagtagtgaatatggacatgagtaaaggggcgttagccataggcaagcagaatcatcttctcaatggctttagtgcgggtgcacgcttcttagggcacgatatttttaagtcatggggtaagttacgcaagttaggaccctatgacatagtggttgccgatccgccgagtaatcaaaagggcagtttcgtggcgactaaagattacgtgcgtttgatcaggcatttacccgagttgttagccgagaatgctgaagtgttactctgtttaaatgcgcctgaactcgatacccagttttacgccagcaggtgaa

SEQ ID NO: 276462 - DNA, 804 bp, Unknown
  Bacterial polypeptide expressing nucleotide sequence isolated from the Sargasso Sea
aagtgattcaacaaaaatatggatatgaacctttagcaaaatacaatctatgcagttatattggagcggtaatggaagcaactcttaacccccctcctaaaccaaaagaaaaatggagagcgttaatagaaaaaatgtcagatgtttctacaagttcatatagaaagaatataaatcaaaattctgattttataagatattttaaaaccgtcacaccacatgtttcacttggaaaattatcaataggatcgagacctactaaaagaaaaaatgtggataatattaaaagtctaagagcaataccttgggtttttgcttggacgcaaatacgattgatgttaccagcatggttaggaacagctgaggcgctaagatattcatcttacagaaattataaatctatattaacagacatggaaaaaaactggccattttttaattcaactatggatattttagatatggttatttcaaaagtagaccctgaaatctcaaaagtttatgaggaaaatcttgctgactttaaattgaaaagagtaggtaaaaaacttagatttcaatttgatactgttaaaaaattaaatataattattacacctaaagaaatcataaatgctagaaaaaagtttagaaaaagtgtcattgttagaaatatttattctgaggtattaaatattttacaagctatagtaatgaaaaaactttctagtaagaaacatagcagaattcaaaaaaaatatttacaagatgctatgatgacatctatagctggtatttcagctgcaatgaaaaatacaggttaat

SEQ ID NO: 276463 - DNA, 855 bp, Unknown
  Bacterial polypeptide expressing nucleotide sequence isolated from the Sargasso Sea
gtttgaaactttagatgatttgaaaaatgcgaaatcgataatggaaaatttattttctcttggttggtatagaaatttaattaaaaaaaatcatgaaattatgattggttattcagactcaagtaaagatgcaggaaagctttcagcaagctggcatcaatataagttacaagaggaaattgttcagctaggaaagaagtataaaataaatcttacattttttcatggtcgtggaggatctgcgggcagaggaggtggtcccattcaatcaacattaagatcacaaccagcaggttctgttaatggaaaaattaggataactgaccaaggtgaaatgatacaacaaaaatatggctacgagccattagcaaaatataatttatgtagttacattggtgcagtaatgcaagcaacccttaaaccaccatccaaaccaaaagaaagttggagaagattaattgaagacatgactaaaatatcaacaaaatcttataggaaaaatattagagaaaattcggattttataagatactttaaaaccgtaacacctcatgtcgctcttggaaaattatcaattggatcaagaccttcaaaaagaaaaaatattgataatataaaaggtcttagagcaataccgtgggtttttgcatggacgcaaattagattaatgttaccagcatggcttggtactggtgatgcattaaaatattcttcggttaaaaagtttaaatctaccttggttgatatggaaaaaaattggcctttttttaattcaacaatggatatattagacatggtaatttcaaaagttgatcccgatatttcagaaatttatgaagatggtttagctgatag

SEQ ID NO: 276464 - DNA, 853 bp, Unknown
  Bacterial polypeptide expressing nucleotide sequence isolated from the Sargasso Sea
tataagacaagagtcttcaagacattctcaattattagcagaatatataaagaaaaaactaaaccagaattattctacttgggatgaggatcgaaaaataaaatatttatcgaataaaatgcaaagcaaaaatgtattaaaaaaatttcaatttaaaaacaaggaaaacaaagaggtttggtccacatttaaagtattggcaagtcaacctaaagagtgtttaggagcgtatgtaatctcaatgacatcttcagcatcagatatcttatcagttatgtttttccaaaaagaagctaacattaagaatagactaagagtagttcctcttttcgaaactcttgatgatcttataaatgcaaaaccaataatggaaaaacttttttcattaaaatggtacagaaaagatattaataacaagcaagaaattatgattgggtactctgactccagtaaagatgctggaaagctctctgcaagttggcatcaatttaaattacaggaagaaataattaaactagctaaaaaatataaaatagacgttacattctttcatggcagaggaggttctgcaggaagaggaggtgggcctatacaagcaacattgaggtcacagcctgctggatcggtcaatggtaaaattcgaataactgatcaaggagaagtaatacagcaaaaatatggttatgagcctttagcaaaatataatctgtgcagttatattggatctgttatggaagctactttaaatccaccaccaaaaccaaaagacagttggagacaattaattcaaagtatgtccgaaatatcaacaagttcctatagaaaaaatataaatcaaagttcagattttata

SEQ ID NO: 276465 - DNA, 724 bp, Unknown
  Bacterial polypeptide expressing nucleotide sequence isolated from the Sargasso Sea
tatgtagttatattgggggcagtagcggaggcttcattaaatccaccaccatcccctaaaaaaagctggagagaattaattgaaaaaatgtctgatatttctaaaagttcatatagaagaaatattaatcaaagttctgaatttataaaatattttagaactgttacaccacatgttgctctcggtaaattatccattggctcgagaccttcaaaaaggaaaaagacagataacattaaaagtttaagagctatcccatgggtatttgcttggacgcaaataagattaatgctacctgcgtggcttggaacagcagaggcatttagatactcatataataaaaaattaagaaagactttattcgatatggaaaaaaattggcctttctttaattctatgcttgatatattggatatggtgatctctaaagttgacccaaatgtatctaaaatttatgaacattatttagctgatgataatttaaaaaaagtaggaaaaaagctgagatttcaatttgatacaatcaaaaaattgaataaaaaaattactccagtagaaatttcgaataatagaaaacaatacagaacatctataattattagaaatatttattctgaagttttaaatattattcaaccaattgtaattaaaaaactaaaaaataaaaaaaattttaaaaataaaaaagatttaaacgatgcacttatgacttctattgcaggta

SEQ ID NO: 276466 - DNA, 922 bp, Unknown
  Bacterial polypeptide expressing nucleotide sequence isolated from the Sargasso Sea
ccaactaaatcactaagagaagatgttagatatttaggaaatatcttaggaaaagttataaagcagcaagagggaataaatttttttagattagttgaagacgttcgacgtttatcaaaagcgaatacgtcaaataccgataaaagaaaatcatttcaaaatctttcaaataaaattaaaaatttaagtccaatcaatttgtttaaattaacaagagctttcacgcattttatgaattttattaatatagccgaatccattgatggggctcgaaagctcgatgaatatgaaaacaaaaatctaattggtagtaataaaaatattttcattgaagaaatatttgaaaatttttttaaagacaggaaaattccaaataataaaatatatgaaatagcaaaaaatttaaatattggaattgttttaactgcacatccaacggaagtaaaaagaagaactttaatacttaaatatcgtaaaattactgaaatattggaacaaagagatttgttaaaaaattttccctcaaaaataaaaattttggataaaaaattatacgatgaatttacaataatatggaatacagatgaattgaaaagaactagacccacaccttttgatgaggctagatggggacttgcaatcatcgaagatagtttgtgggaaactattccaaaagtttataggagattaaacgatatttttgtaaaaaatattggaaaaggattgccaaaaaactttaacccaattgaatttggttcttggatgggaggagatagagatggaaatccaaatgttactgccaaagttacaaaagaagtaattttattgtcaagatgggaagctgcaaaattatatgaaaaagaattaacaaaattaattagatctttatctatagacaagtgctcaaaaaaaataataaaga

SEQ ID NO: 276467 - DNA, 838 bp, Unknown
  Bacterial polypeptide expressing nucleotide sequence isolated from the Sargasso Sea
gttttttgatttagtagaaaaagttagaaaattatcaaaagcaaataaaaaaaatccaaaccaaaaaaaattaaatagcaaagtgataaatgttattaaaaaactaaatcctaaaaatacttttaaattgactagagcattttcgcattttatgaatttcattaatctagcagaattagtagatgcttctagaagtttaaacaaatacgaaaataataagaaaaaaataaataagcagaacttatttattgaagaaatatttgaagatttatttaagaaaaatatttcaaaaaataaaatatacaacttagccaaaaacttaaatattggtatagttttaactgcccatcccactgaggttaaaagaagaactttaattcaaaagcaccataaaattattgagatacttgagcaaagggagttgttcaaaaattttaagtcgaaattgaaaacactcgataaagaactctttgacgaattaacaataatttggaacacggatgatttgaaaagagtaagaccttcgccctttgatgaagctaggtggggactcgccgtaattgaagatagtttgtgggacacagttccaaaagtatacagaaagttaaactctatatttgttaaaaatatgggtaaaaatttacctaaaaattttaatccaatagtttttggttcatggatgggtggtgatcgagatggcaacccaaatgtaactgctgatgttacaagaaaagtaattctattatctagatgggaagctgcaaaactttatgagaaagcgcttactaaaataattagatcgtattccatgaaaaaatgctcgaaaaagattctaaaa

SEQ ID NO: 276468 - DNA, 688 bp, Unknown
  Bacterial polypeptide expressing nucleotide sequence isolated from the Sargasso Sea
gaaattttaattgagaacatgacacaaatctcaacaagatcttacagaaaaaatattagagaaaatacagatttcataagatactttaaaaccgtgacaccacatcttgcacttggaaaattatcaattggatcaagaccctctaaaagaaaaaatgttgataacatcaagggactaagagcaattccgtgggtttttgcatggacgcaaataagattgttgttgcctgcatggcttggaacaggtgaggcgttaaagtattcctcagtaaaaaaatttaaatctatattagtagacatggaaagaaattggcccttttttaattcaacgatggatatcttagatatggtaatctcaaaagttgatcctgaaatttcagaggtttatgaggacggtttggctgatgctaaattaaaaaaagttggtgataaattaagattacaattcgataatattaaaaaaattaatcaatttataactccaacagaaattattaatcaaagaaaaaaatttagatcctcagttattgtaagaaatatttacaccgaagttcttaatattttacaagcagtggtaatgaaaaaattatctagaaaaagtatacaaaaaaaacacaaaaaatatttagatgatgcaatgatgacctctattgcaggtattgcagctgcaatgaaaaattcaggataaa

SEQ ID NO: 276469 - DNA, 1219 bp, Unknown
  Bacterial polypeptide expressing nucleotide sequence isolated from the Sargasso Sea
atgcttaagagagatctatactatgagagtataccttcaaagtcattaagggatgatgttagatatttaggcaatatacttggtaaagtaataaaaaagcaagaaggtgatagtttttttaaccttgtagaaaagattagattattatcaaaagcaaacatatcaggcaaaaataatattaatagatttagaaaaattatatctgaagtttcaaaactaagtccaagtaaaatatttaagttatcgagagcttttaatcactttatgaattttataaatttatcagagtcaatagatgcatctcgaaaactagatgattttgaaaactcaaaaaagaaggataaacacaaaaatatctttattgaagaaatatttgaaggtctatttaaaaataaaaaaatttctaataataaaatatataatattgccaaaagtttagatatcggaattgttttaactgctcatccaaccgaggtaaaaagaagaaccctaatacaaaaatatcataaaattactgaaattttagaacaaaaagagctacaaaaaaattatagctctaaattaaaaattctagataagaagctttatgatgaatttaccataatctggaatactgacgatctaaaaagatttaaaccaactccttcggaggaagcaagatggggtttagcagtaatagaagatagtctttgggacacaattcctaaagtttatagaagattaaatggaatatttttaaaaaacatgggaaaaaatctaccaaagaattttaatcctatagaatttggttcttggatgggtggtgacagagatggaaatccaaacgtaacagcagaggttacaaaagaagtcatattattatcaagatgggaagcagcaaaattatatgaaaaagaattaactaaattaattagatcattatctatagaaaaatgctcaaaaaaaattaaaaaggaaactgggaaaacttttgaaccttatagagtttttttaaggcctttaagagataaaatgagaattactcatagggctatagaaaaccatttagtaagaaaaaaaccactcaaccaaaaaaaacttttatcagaaaaagaagaaattttaaaacctttaaggattgtaagagagtcattagaacaaaaccaaagtgaaaatattgcaagtggagatttaaaagatttgatgagaagagcaaaatgtttcggaataaaccttgcca

SEQ ID NO: 276470 - DNA, 1084 bp, Unknown
  Bacterial polypeptide expressing nucleotide sequence isolated from the Sargasso Sea
tttgagggatgatgttagatacttgggaaatattttagggagagtaataaaaaaacaggagggagaaattttttttaatttagtagagagaataagattgctgtcaaaagcaaacattaaaaataaaaataataaaaatagatttaataaaattacttcgcaaattcaaagacttaaaccaattaaaatatttaaattagcaagagcatttactcattttatgaattttattaatattgccgaatccatagatgcctctagaaaactagatgaatttgaaaattctggcttaaaagataaacataagaatatttttattgaagaaattttcgaaaatctttttaaaaataaaaaaattaaacctcaaaaaatttataatattgcaaaaaatcttaatattggaatagttcttacagctcatccaacagaagttaaaagaagaaccttgatacaaaaataccataaaataactgagataatggatcaaagaaatcttttgaaggacaaaccatcacaattaaaaatcttagataaaaaactttatgatgagtttacaattatttggaatacagacgatttaaaaagattcaaaccgactcctgttgaagaagcaaggtggggattagcagtaatcgaagacagtctttgggaaacaattccaaaagtttatagaagattaaacgctattttcgtaaaaaatatgggaaagggtttgcctaaaaattttaatccaatagaatttggatcttggatgggaggagatagagatggtaatccaaatgtaacagcagcaatcactaaagaagtaatacttttatcaagatgggaagcagcgaaactatacgaaaaagaattaacaaaattaattagaggactttcaatggaaaaatgttcaaaaaaaattctgaaaataactggaaaaacttttgaaccctatagagtttatttaaggccattaagagatgaaatgagaaaaacacatagattaatagaaagacatttagtggcaaaaaaaccattagacaaaaaaaaacttttatattctaaagagcaaattctaaaacctttaagagttgtacgagag

SEQ ID NO: 276471 - DNA, 841 bp, Unknown
  Bacterial polypeptide expressing nucleotide sequence isolated from the Sargasso Sea
tcggtatatggtcgtattagaattactgaccaaggagaaatgatccaacaaaaatatggttatgaacctttagcaaaatataatttgtgtagctacataggatctgtaatgcaggctactctaaatccacctccacatcccaaagatagttggagaaaattaatagaagaaatgacaaaaatttctactttggcatatagaaaaaatataaatgagaattcagattttataagatattttaaaactgtcacaccccacttagctcttggaaaattatcaataggatcacggccttctaaaagaaaaaatgtagataatattcaaagcttaagagcaataccctgggtatttgcttggacacaaataagattaatgctgccagcatggttgggaactggtgatgcactaaaatattcatcagttaaaaatcaaaaaactattcttacagatatggaaaaaaattggccattttttaattcgacgatggatattttagatatggttatttcaaaagttgacccagaaatatcagaagtttacgaagatagtcttgcagacaaaaagttaagagaagtgggagacaaacttagatctgagtttgctataattaaaaaattaaatagatatataactccaagagaaataattaatcaaagaaaaaaatttagaacaacggttctagttagaaatatttattctgaggttttaaacatattacaggccgtagttatgaataaaatatcaaagaaaaaacttaaatctaatgataagaaataccttaatgatgcaatgatgacatcaatagcaggaatatctgcagcaatgaaaaatactggttaag

SEQ ID NO: 276472 - DNA, 524 bp, Unknown
  Bacterial polypeptide expressing nucleotide sequence isolated from the Sargasso Sea
tataaagagtctaagagcaataccttgggtttttgcttggtctcaaataagattattgctgcctgcttggttaggaactggcgaagctttaagatattcatctataaaaaaattacgtaaaactctaatagaaatggaaaagaattggccattttttaattcgactatggatttattagacatggttatatcaaaagtagatccggatatttcaaagatttacgaagaagcccttggagatgaaaagttaaaaagagttggtaaaaaattaagatttcaatttgagacaatcaaaaaattgaataatcagataacgcctaaagaaatacacaaacaaagaaaaaattttagggggcctgctatcataaggaacatttactctgaggttttgaatgtgctacaagccgttgtaatgaataaactttctaaaaaaaaccttaaaaaaaataccaagaaaaatctaaacgatgcaatgatgacatcgatagccggaatttctgctgctattaaaaatactggataat

SEQ ID NO: 276473 - DNA, 913 bp, Unknown
  Bacterial polypeptide expressing nucleotide sequence isolated from the Sargasso Sea
aatgcaaggttttatagatgcactggcgacaataaaagtcagtgaagatgccacgcgcttattccacggccgcggtggacattatccaggttgcgagcatctttgtttagattggtttgcgcccgtattgttattgaccagtttttcggcccttgaagcagctgagctcgccctttgccaacaggccattacggcacgttggcaagtgatacaacccaatcagccattaaatttggtgtatcaataccgcagtggtggcgaaacctttagtcaattactggcgggtgacgtgccagagcctcatatcgtgactgaaaatggtgcgaggtttcaggtacatttactgcgtggtcaaaaccacggtttgttcctcgacatggccaatggccgcgaatgggtgagagccaatgcacgccacaagaaagtgctgaatttgtttgcttacacctgtggattctcggtggcagcactgcagggcggcgccgatgaagtggtgaatatggacatgagtaagggggctcttgcgataggtaagcagaatcatctgctgaatggctttaccgctggcgcgcgttttttagggcacgatatttttaaatcgtggggtaaattgcgtaagttaggcccctatgacatcgtggttgctgatccgccgagtaatcaaaagggcagttttgtagcaactaaggattatgtgcgtttgctcaggcatttacccgagttgttagccgataatgctgaagtcttgctttgcttaaatgcgccagagcttgacactcaatttttgcgtcagcaggttgaggaggcggctcctgagcttgaataccttgaacgtttacctaaccctgcatcctttgcagacatctctgaggagaaatcattaaaggtgctgcggtatcgtttaaaagcgtaa

SEQ ID NO: 276474 - DNA, 517 bp, Unknown
  Bacterial polypeptide expressing nucleotide sequence isolated from the Sargasso Sea
aggcttaagagcaataccttgggtatttgcttggacacaaataagactaatgcttccagcgtggcttggaagtgcagaagctttaagatattcatcaattaaaaattttgaaaaaacaataatagatatggaaaaaaactggcctttcttcaattctatgatggatatcttggacatggtaatttcaaaagtggacccagatatttcaaaaatatatgaggaatacttagctgataaagatttaaaaagagttggaaaaaaacttaggttccaatttgaagttattaaaaaattaaataaaaagattacgcctaaagaaattataaatgaaagaaaaaaatttagatcaggagttattgtaagaaatatttacacagaagtattaaatataattcaagcagtagttatgaataaaatcaaaaacaaaaaattaaattcagataaaaaaaatgatcttaatgatgcattattaacatctattgcaggtatttcagctgcaatgaaaaatactggttaa

SEQ ID NO: 276475 - DNA, 712 bp, Unknown
  Bacterial polypeptide expressing nucleotide sequence isolated from the Sargasso Sea
accaccttatccaaaaaaagaatggagagaattgattgaaaaaatgtcagaaatttcaaccatatcatacagaaaaaacataaatgaaaattctgattttataagatactttaaaactgtaacccctcatgtgtctttaggaaaattatctataggatcaagaccttcaaaaagaaaaaatgtagataatattcaaagtttaagagcaataccctgggtatttgcttggacacaaattagattgatgttaccatcgtggcttggaagcgcaaaggcgttaaggttttcttctaaaagtaaatataaaaaaactttaattaaaatggaaaaagattggccattctttaactctatgatggatatattagatatggttttatcaaaagcagatcctgagatttctaaaatttacgaagaaaatttagcagattataacttaaagaaagttggtagcaaactaagaattcaatttcaagaaatacaaaaacttaacaaacaaataactccaaaagaaattattaaagcaagaaaagaatttaggacaactgttattgttagaaatatatattctgaagttttaaatattgttcaagcggcgacaatgagcaagttatctcgaaagagatataattttaaacaaaaaaaatatcttaatgatgctttaatgacctcaatagcaggtatttcagctgcaatgaaaaacactggttaa

SEQ ID NO: 276476 - DNA, 562 bp, Unknown
  Bacterial polypeptide expressing nucleotide sequence isolated from the Sargasso Sea
ttggatcaagaccaaccaaaaggaaaaaatgtcgataatattcagagtttaagagctattccttgggtatttgcttggacgcaaattagactaatgttacctgcttggctaggtaccactgaagcgcttagatatggttctattaaaaagtttagaagaacaatgaccgatatggaaagaaattggccatactttgtatcaactatggatattttggatatggtaatttctaaggtggatccagaaatatcagttatttatgaaaataatttagctgatgcttcattaaaaaggattggtaagaaattaagatttcaatttgatgcactggtcaaattgcataataaaattactcctaaggaagtggtaaaagagagaaaagaatttagaaaagctctatttataagaaacaattatacggagatgttaaatatactacaggcaaatgtcatgaataaattaacaaataaaaaatataaaaatttagataaaaaatttcttgaagatgctttaatgacatcgattgcaggtatctctgcagcaatgaaaaatactggataaa

SEQ ID NO: 276477 - DNA, 718 bp, Unknown
  Bacterial polypeptide expressing nucleotide sequence isolated from the Sargasso Sea
atgaatcttggaaataaattaaaggtaagaataccaaatcaggaattcttacaagagctttcagataagtcatatgaagaatataggtctttttttactgatccaaatcttatagattactttgaaatgggaactcccgtaaaacttctttctacattaaatattggatcaaggcccacaaagcgaaccaaaaatgtgaagactttacaaaattacagagcaattccttgggtatttggatgggctcaaactagaaatacattaacaggttggtatggttcaggaacagcattgaactacatgattgaaaaatatggtattaattatgtaagaaaaatatataaaaattcagactttatgcagaacttaattagcaatattgaaatgacactttccaaatctgatctaaaaatagctaaacgatatgttgatgaacttcttgatgaggatgcactaaagatttataaaaaaattcttaaagagtcacaattagcaaatatttctattaagaaaataaaaaagatagacgaactgttagaagataacaaaattttaaaaaatactttaaatataagaaatgcatatttggatccgttgtctttaattcagataactcttatgaaaaaattaaaaatgcgtaaacttaattcagtagaaaataattctttattactatctgtaaatggattagctgctggtcttagaaatactggctgat

SEQ ID NO: 276478 - DNA, 1108 bp, Unknown
  Bacterial polypeptide expressing nucleotide sequence isolated from the Sargasso Sea
atgaaaaaaagagatctttattatgaaagaatacctacaaagttacttagagaagatatccgttatcttggaaatattcttggagaagtaattaaagaacaggaaggtattaagttttttaatctggttgaaaaggtcagaaagctatcaaaagcaaataaaataaatcttaaaaataagaattcattcaaaaaactagtcaaaacagtaagaaatagtaattcaatcgatactctcagattaactagagcatttactcatttaattaattttataaatctagctgagtcaattgatacatcaagaaatcttgatgaatatgaaactaagcgtaaaaatctaaaatataatatttttattgaagaaatatttgaaaaactctttaaaaataaaaaaatatctaacaataaaatttataaccttgctaaaaatctagatattggaatagttttaactgcccatccaacagaggtaaaaagaagaactttaattcagaaatatcataagattatagaaattctagagcaaagagatctttataaatctcatccatcaaagttaacacaattaaataaacaacttcatgacgagtttacaattatttggaacactgatgatcttaaaagaaccaaaccttctccatttgatgaggcaagatggggcttggcgattatagaagatagtttgtgggacacaattcctaaagtttacagaaggttaaattctatttttttgaaaaacatgaatagaggattaccaaaaaattttaatccaattcaatttggttcttggatgggaggagatagagatggaaatcctaatgtaactgcaaaagttactaaagaagtaattttattatcaagatgggaagcagcaaaactatatgaaaaatctttgactaaaattattagatcttactcaatgaaaaaatgttcaaaaaaaataagctctaaagttggtaaaacttttgagccgtatcgagtttttttaagacctcttagagataaattgagatttactcatagatctatagaacaatattttattaataagacacctttagataaaaaaattttattaagttcaactgaagaaattttaaaacctt

SEQ ID NO: 276479 - DNA, 913 bp, Unknown
  Bacterial polypeptide expressing nucleotide sequence isolated from the Sargasso Sea
aatgcaacgttttatagaagcactggcgacgatagaggtcggggaagatgccacgcgattattccatggccgcggcggttattacctaggctgcgaacatctttgtttagattggttcgcgcccgtgttgttattgaccagttttactcccctcgatgcggccgagttggccgagtgccaacaggcgattacggcgcgttggcaagtgatacagcacaatcggccgttaaacttggtgtatcaataccgcagcggtggcgaaacctttagccaagtactggcgggtgaggtgcccgatccccatgtggtcaccgaaaatggcgcccagtttcaggtacatttattgcggggacaaaaccacggcttgttcctcgatatggcaaacggccgtgaatgggtcagagcccatgctcgccataagaaagtactgaatttgtttgcttatacctgtggtttctcggtggcagcgctacagggcggcgccgatgaagtagtgaatatggacatgagtaaaggggcgttagccataggtaagcagaaccatctgctgaatggctttagctcaggtgcacgtttcttagggcacgatatttttaagtcttggggtaagttacgtaagttaggaccctatgacatagtcgttgccgatccgccgagtaatcaaaagggcagtttcgtggcgactaaggattatgtgcgtttgatcaggcatttacccgagttgttagccgagaatgctgaagtactactctgcttaaatgcgccggaactcgatacccagtttttacgccagcaggttgaagacgccgcgcctgcactcgaatatcttgagcgcttacccaatcccgccgcctttgttgatgtctctgaggagaaatcattaaaggtgctgcgttaccgcttaaaggcgtaa

SEQ ID NO: 276480 - DNA, 524 bp, Unknown
  Bacterial polypeptide expressing nucleotide sequence isolated from the Sargasso Sea
catacaaagtttaagagctataccttgggtgtttgcatggactcagataagattatttttaccagcatggcttggaacaggtgaagccttaaaattttcatcaattaaaaaaaatttaaaaacacttatcgatatggagaaaaattggccttttttcaattcaacaatggatattttagatatggttatctcaaaagtagacccagatatttcagaggtttatgaaactaacctagcagacaaaagtttaaaaaaagttggcgacaaacttagaaatgaatttaatacaataaaaagattgaacaaaaatatcacacctaaagttattattggacaaaggaaaaaatttaggggaaatataattgtgagagatatttattcagaagtacttaatatcttacaagcaacagttatgaaaaaactttcaaaaagaaaaattaacaaaaatcataaaaaatatctaaatgatgcaatgatgacttcaattgcaggtatctcagcagcaatgaaaaatactggttaaa

SEQ ID NO: 276481 - DNA, 745 bp, Unknown
  Bacterial polypeptide expressing nucleotide sequence isolated from the Sargasso Sea
ttttggagctgtggttgaagctactttaaatccaccaccatttcccaaaaaaaattggagaaatttaatcgaaaaaatgtcagatatttcaaaaagttcttatagaaaaaatattaatgataattcagattttataaattattttaaaactgttacaccgcatatttcgctaggaaaattatctattggatctagaccgtcaaaaagaaaaaatatagataatattaagagtttaagagcaataccttgggtttttgcatggacacaaattagattaatgttgccagcatggctaggtagcgctgaagcattaagatattcatcaataaaaaaatttagaaaaactttgatagatatggaaaaaaactggccattttttaattcaatgatggatattttagatatggttatatcaaaagcggacccagaaatttcaagaatttatgaagataatcttgcagataaaaaattaaaaagagtaggaaaaaaattaagatttcaatttaatgtaataaaaaatttaaataaaaagattactcctggagaaataataaaaattagaaaacaattcagatcttcagttattgtgagaaatatttattcagaagttttgaatatagctcaagcaattgtaattaaaaaattaaaacaaaagaagataaaatctgttaataaaaaatatcttgatgatgcattaatgacatcaattgcaggaatttctgcagctatgaaaaatactggataa

SEQ ID NO: 276482 - DNA, 544 bp, Unknown
  Bacterial polypeptide expressing nucleotide sequence isolated from the Sargasso Sea
aattgcaaaaaaatataaaatagatgttactttctttcatggaagaggtggttcagcaggtagaggtggaggcccaattcaagctactttaaaatctcagccgccaaatacagttaatggaaaaattagaataactgatcaaggagaagttattcagcagaaatatggatatcagcctttagcaatttataatttatgtagctatataggagcggtaatggaggcaacattaacaccacctccagtccctaaaaaagattggagaaatctaattgaaaaaatgtccgatatttcaaaaagttcatatagaaaaaatattaatcaaagttcagattttattaaatattttaaaaccgttacgccacatgtgtctttaggaaaactttcaattggatcaagaccgtctaaaagaaagaatattgataatatcaaaggtttaagagcaataccctgggtatttgcttggacacaaataagactaatgctcccagcatggcttggaagtgcagaagctttaagatattcatcaattagaaaaatttga

SEQ ID NO: 276483 - DNA, 1048 bp, Unknown
  Bacterial polypeptide expressing nucleotide sequence isolated from the Sargasso Sea
aatgaagaaaagagatctttactatgagcgaatacctacaaagcttttaagagaagattttagattattaggtacttttcttggtaaagtaataaaagatcaagaaggcaatattttttttaatattgttgaaaaatttaggttattatcaaagaatactctaacagataaaaataaaagtaaagttttttcaaaaatatcaacagaagtaaaaaagctttcacctgaaaatacattcaaattaacaagagcattttcacatattctaaatttattaaatctagcagaatcaattgatgcttcaaggaagctaaatgaatatgaaaatccatattttaaaaacaaaaatcaaaatttatttattgaagatttaattgaaggcctttttaaaaataagaaaatttctgacaaaaaaatttataaacaggctacaaaactagatattggaattgttttaacggcacatcctacagaagtaaaaagaaggaccttaattcaaaaatacgcaaatttaattaatatactggaacaaaggcatctttataaaaaatatccatccaagattatcgaattagacagacagctatattcagaaattgctataatatggaaaacagatgaacttaaaaggactaaaccttctccattagatgaggcaagatggggtttagcagtaattgaagatagtttatgggatacaatacctaaagtttataagagacttaacgatatatttagaaaaaatttaaagaaagatttacctagagactttaatcctattcaatttggatcctggatgggaggagatagagatggaaatccaaatgtgactgctgaagtcacaaagaaagttttgttattttctcgatggcaagccgcaaaattatacgacaaagaacttacaaaattaatacaagatttatcaatggaagaatgttcgacaaaaattaaaaaaataacaggaagtagttttgagccatatagagtattcttaagacctattagaaataaagtaagattaacacatcagctaatgaaaatcattaaa

SEQ ID NO: 276484 - DNA, 625 bp, Unknown
  Bacterial polypeptide expressing nucleotide sequence isolated from the Sargasso Sea
cttgattgaagataaaaatttaatttattattttgaatctgtcactccagttaatctcttatctgtattaaatattggatcgagaccctcaaaaagatctaaaattagctctgttaagaactatcgagcaattccttgggtatttggttgggctcaaactcgacagacaatcacaggctggtatggctcaggaacagctctagaggaattaataaataaatatggaataaaccaggtaagaaaaatatataactcatcatcattttttcaaaatttgttaagcagtattgaaatgacgcttgccaaaacagatttaaatatttcaaggttttatgcagaaaacctagtagaaaaagaaatgtattatttgtatgagaacatagttgaagaatcattgaaagttgaaagtgcaataaaacgcattacgttgtcaaaagaattactcgattcaaataaaattttaaagaacacattagcaatcagagacacctaccttgatcctttatcactaattcaggtttttttattacaaaaattacagaaaaatgaattaacaaattatgaaaaaacatccttacttctttcagtaaatggattagccgctggcttgagaaatactgggtga

SEQ ID NO: 276485 - DNA, 631 bp, Unknown
  Bacterial polypeptide expressing nucleotide sequence isolated from the Sargasso Sea
atgagtcgcaaaactgaactttctgaaacaattcatatcctaggagaagttttaggtcgtgtaataaaagatcaagaaggaatttcagcttttaataaaatagaaaaaattagactattgtcaaaatcaagtagaggaaaaaataacataaaagctattgaaaaatcatttaaaaaactcaagtcagaaatttcaaaactgacaaataaagagtctttaattattgcaaggtcatttagtaaatttttgaatctttcaaatatagctgagtctctctatagtattaataatatccatgatcataatattcgtaaaattcaagaaactaatgagattgttttacttgaagaagcaataataaagattttgaaaaataagaatgtatcaaaagaaaatttttataaaacagcatcaaaattaaaaatagatttagttcttactgcacatccaacagaagttaaaagaagaactattattcaaaagtatgcaaaaattaataaaatactagatgaatttaatagactaggaactctatcaaaagagaatatagatagagaaaaaaatttggttaaaaatgagcttcatgaagaaatcacatctattggaaaactgagaaataaaaagatcaaga

SEQ ID NO: 276486 - DNA, 1219 bp, Unknown
  Bacterial polypeptide expressing nucleotide sequence isolated from the Sargasso Sea
atgaagaaaagagatctttactatgagagaatacctactaagcttttaagagaggattttagattattaggtactttcctaggtagagttattaaagatcaagaaggtctagcattttttaaaattgttgaaaaatttagagtgctatcaaaaaatactctctctgataaaaataaaagaaaagtactatcaagaatttcaaaagaagttaaaaaactaactccggagaacacatttaaattaagtagagcattttcacatattttaaatttactgaatctagtagagtcccttgatgcatcaagaaagttaaatgagtatgaaaatccgtattttaaaagtaaaaatcaaaatttatttatagaagatataattgagggattatttaaaaacaaaaaaatttctgacaaaaatatttatgagcaggcaaaaaaacttgatattgggattgttcttactgctcatccaacagaagtaaaaagaagaactttaatacaaaaatatgcaaatttgatttatattatggagcagagacatttatataaaaaatatccatcaaagattatcgaactagatagacaattatattcagaaatagcaattatatggaaaacagatgagttaaaacgaaccaagccctctccattagatgaggccagatggggtttagccgttattgaggatagtttgtgggacacaattcctaaagtttataaaagactaaacgatatatttagaaaaaatttaaaaaaggatttaccaagagattttaaccctattcagtttggatcatggatgggcggtgatagagatggaaatcctaatgtgacagctgaagtaactaagaaagtaatattattttctaggtggcaagctgcaaaattatatgaaaaagaacttactaagttaattcaagatttatctatggaagaatgttctgcaaaaattaaaaaagcgactggaaatagttttgaaccgtatagagtgtatttaaggccaataagagataaagtaagactaacccatcaattaattgaaaatcatttaaataataattcaaacttaaatgaagaaaaattgattcaaaacaaacatgaaattactattccattaagagaagtaagaaactcattaaaactaaataaaggagatcatattgccaatgcagatctattagatttaatgaggagagttaggtgttttggtattaatcttgcaa

SEQ ID NO: 276487 - DNA, 1201 bp, Unknown
  Bacterial polypeptide expressing nucleotide sequence isolated from the Sargasso Sea
aatgatcaaaagagatctttattatgaaagaatcccaacaaaatcacttagagaagatgttagatatttaggaagtattttaggaaaagtaataaaaaaacaagaaggtatagttttttttaaattggttgaaaaagttagactattatcaaaggccaatatagcaaataatatcaatcaaagatcatttcaaaatctttctaaccaaattaagaacttaaacccaaataatttatttaagttaactagagcttttacacattttatgaattttataaatatagcagaatctattgatggagctagaagacttgatgaatatgaaaacaaaagtcaaaataaaattaacaaaaatatttttattgaagaaatatttgaaaacctttttaaaaataaaaaaatatcttcaaataaaatttataatatcgcaaaaaatttaaatataggtattgtgctaacagcacatccaacagaagtaaaaagaagaactttaattcaaaaatatcataaaattacagaaatattagagcaaagagatttattaaaaaaatatccttcaaaattaaaaattttagaaaaaaaactttatgatgaatttaccataatatggaatacagatgatttaaaaagaactagacctacaccattcgatgaagctagatgggggcttgctattatagaagacagcttgtgggaaactattcccaaagtttatagaagattaaatgatatttttgttaaaaacatgggcaaaggattgccaaaaaattttaatccaattgaatttggttcatggatgggtggagacagagatggcaatcctaatgtcaccgctaaaattactaaagaggtaattttattatctagatgggaagcggctaaattatatgaaaaagagttaacaaaattaattagatctttatctattgaaaaatgttctaaaaaaattatagcaataaccggaaaaacatttgaaccttatagggttttcttgagaccattgagagataaaattcgtcttacccatgaattaatagaacaacatttagttgaaaaaacaccattagatcaaaaaaaattaatatctacaagggaagaaattttaatacctttgagagttgtcagacaatctttggaggaaaataaaaatgaaaatattgccagtggagatttattggatttaatgagaagagcaaaatgt

SEQ ID NO: 276488 - DNA, 1054 bp, Unknown
  Bacterial polypeptide expressing nucleotide sequence isolated from the Sargasso Sea
attggttatttctgattcaaataaagacggcggctatttaactgctaattgggaattaaataaagcgcaggtaagcctaaccaaagttggtgatgaagcaggcattcctatttctttttttcatggtcgcggaggttcggttagtcggggtggagcgccaaccggcattgcgattgcagcacaacccgctggttctatacatggtcaaatgcgtatcactgaacaaggtgaagtagtttcatctaagtatgcaaatgaaggtactgcgcagtatcaaatggagttgcttgcggcaagtgtatttcagcatactctgagatcattaaatgaggaccagttaaaaccaaattcagactttgataatgctatggaactactatcgagtttagcattaaaaaaatatcgagaattagctaactctaaaggtttggttgattattacagcgctgccagtccggttgaagagcttgcaaagatgaatattggttcaagacctgcaagaagaactggagaaaactcattgaaagacttgagagctatcccgtgggtgtttgcatggacacaaaacagacatctcgtacccggatggtatggtgttggcacggccataaaagaatttactgataagcatgcagacaagggagaaaagttaatcaaaaagatgtttaccgattcacgtttatttcgtttgattattgatgaaactgaaaaaaccttagcgcttattgattttgatatttgtgaagcatattcaactcttgttgaaaacaaaacagagagagaggttatctttaatatgatttctgccgaatataacttaacaaaagaagtgatactaaatataactggcgaagaaaaactatgtcagcgtttcaaaaaatttagtcgaaaattaaatcgtcgttcgccagtgcttcatcaggcaggtttagagcaaatcaaattaattaaagagtttcgtcagcgtaatgagaatggtgacaatattgatgatttgattcctttattactttcaataaattgtatttcgtcagggttgggttggacaggataa

SEQ ID NO: 276489 - DNA, 922 bp, Unknown
  Bacterial polypeptide expressing nucleotide sequence isolated from the Sargasso Sea
aatcacccaactctattaaataattggattttaagtagagaaagggcactcaaagaaattagagaaatcaaagatgtaaaaagtcaagatagttatttatttatagattgtgtaaaaaaatcattaagaaacattacaagctggaatactaatagcgaatatcaacaaaaaaaaatttcttcattattaaaggatgttgaaaaatttttaaattttatagacaaagattttaatttcgagatcgaatatccttttaataaaatatatcaatggttagaggacaatacttgtgaggaatgtattgaatacattgtgtcaataatgatggaaccttataacaatattgtcaatcctttggtaagagaaatgagttcagatgaagaaaaatattttaatattccaacatatagaaaagtagaagaattgcggaatatcattgaagcaaagtatcctaatattctagatattaattttgaggaaaaagaaaataataaaaacttttggtttatttcaaaaaacaaagaagagcctagattggctgatcgttttgaagagcatggatctgaattagaacagcctttagcaatagcgagagatataaaaaaactttatgacaaattattagtctcaaaaaatagtttaactattgctgagtttttaacatcaaattctgaattaagacatgttgtaaggagagcgttcattgtggaaaaatttccttattcagaaatacaagataatacaattggcaaagatttaataccaattgatatgctcagattgaaattgtctttttttggggcattaaaatttgatccacgatctgacaaatggttaagaatttgtatgttccaaggagctccacttccaaatgagctaaaaaattatgatgagcattgggtatataaaaccaatatttaat

SEQ ID NO: 276490 - DNA, 538 bp, Unknown
  Bacterial polypeptide expressing nucleotide sequence isolated from the Sargasso Sea
aagaatattgataatatcaaaggtttaagagcaataccctgggtatttgcttggacacaaataagactaatgctcccagcatggcttggaagtgcagaagctttaagatattcatcgatagaaaaatttgagaaaacactaatagatatggaaaaaaattggcctttcttcaattcaatgatggatatcttggatatggtaatttcaaaagtggacccagatatttcaaaaatatatgaggagtatttagcagacaaagatttaaaaagagttggaaaaaaacttaggttccaattcgaagttattaagaaattaaataaaaaaattacgccaaaagaaattataaatgaaagaaaaaaatttagatcaggagttattgtaagaaatatttacacagaggttttaaatataattcaagcagtagttatgaataaaattaaaaacaaaaaattaaattcagataaaaaaaatgatcttaatgatgcattattaacatctattgcaggtatttcagctgcaatgaaaaatactggttaaa

SEQ ID NO: 276491 - DNA, 844 bp, Unknown
  Bacterial polypeptide expressing nucleotide sequence isolated from the Sargasso Sea
tccatattcagttaatggaaatatcagaattactgatcaaggcgaagtaattcaacaaaagtatggttatgagcctttagctaattataatttatgtagttacattggcgcggttactgaggctacgttaaacccaccaccagttccaaaaaaaaattggagagatctaattgaaaaaatgtcggaaatttcaaaaaattcatatagaaaaaatataaatcaaagctctgattttattcagtattttagaaccgttactcctcataaagcccttggtaaattatctattggttcaagaccttcaaaaagaaaaaatgttgataatataaaaagtttaagagctattccctgggtgtttgcgtggacacagataagattaatgcttccagcttggctaggtagtgctgaagcattaagatactcacatattaaaaaatttagaaaaactttatatgatatggaaaaaaattggcctttttttaattcaatgcttgatatgcttgatatggtaatttctaaagctgatccagaaatttcaaaaatttatgaggagtttctcgctgacaaaaaacttcaaagagttggacaaaaactaagatttcaatttgatacaataaaggaattaaataaaaaaattactcctaaggaaattttgaagataagaaaagaatttagatctaaggtattagcaagaaatatatattctgaggttttaaatattattcagccaatagttatttacaaattaaaaaaaaaaaaagataaaaaaaatagaaaatatttagaggatgctttgctgacctctatcgcaggtatttctgctgcaatgaaaaatactggatga

SEQ ID NO: 276492 - DNA, 859 bp, Unknown
  Bacterial polypeptide expressing nucleotide sequence isolated from the Sargasso Sea
aaaacagtcagaggcatgatcaagattacagaacaaggtgaggtgttatcttataaatacgcagtgccacaatccgcatcttatgagcttgaacttgcaattagtggcttaatcaaagcaagtaaacatctcgtaatagacgatacagtatgtacaaataactttgaagaaattatgagcgaaatgtccattgttggtgaaaaaaagtacagagaccttacggatgacaaagaaggaatcatggattatttctatgaagccactccagttcaagaattggccgagctgaatataggatcaagaccatcccatagaaaaaaaactcaacgatcaaaatactcgataagagccattccttgggtatttggctggtcactctctaggcataccttacctgcatggtacggcctgggatcagcgctcacccaaatgattgctagcgatcaatctagtatggacaaattaaaaacaatgtatgcagagtggccattttttcgggtattgctcgataacattcaaatggcacttgcaaaatctgatctaggtattgctagagattattcgctgctcgtaaaagatagaaatgcggccaatcaaattattgatgatatagaaaaagaatttgaatggactgttcaaactttattgagaattgttggctcagatcaacttttgtctgataacactaaattgtcattatcactgagtagacgacagccatatctagatccgctaaattatattcaagtaatgttattaaaagctcatcgagagatacctgatgaagatacagttaacctcgacccattgctgaggactattcatgctattgcaactggcatgaaaaataccggatagt

SEQ ID NO: 276493 - DNA, 856 bp, Unknown
  Bacterial polypeptide expressing nucleotide sequence isolated from the Sargasso Sea
tgtttaggagcgtatgtaatctcaatgacatcctcagcatcagatatcttatcagttatgtttttccaaaaagaagctaacattaagaatagacttagagtagttcctcttttcgaaactcttgatgatcttataaatgcaaaaccaataatggaaaaacttttttcattaaaatggtacagaaaagatattaataataagcaagaaattatgattgggtactctgattcaagtaaagatgctggaaagctctctgcaagttggcatcaatttaaattacaggaagaaataattaaacttgctaaaaaatataaaatagacgttactttctttcatggcagaggagggtctgcaggaagaggaggtgggcctatacaagcaacattgaggtcgcagcctgctggatcagtcaatggaaaaattcgaataaccgatcaaggagaagtaatacagcaaaaatatggttatgagcctttagcaaaatataatttgtgcagttatattggttctgttatggaagctactttaaacccacctccaaaaccaaaagacagttggagacaattaattcaaagtatgtctgagatatcaacaagttcttatcgaaaaaatataaatcaaagttcagattttataagatattttaaaaccgtaactcctcatatggcacttgggaaattatcaattggctctagaccttctaaaagaaaaaatgttgataatataaatagtttaagagctattccttgggtttttgcctggacacaaatcagattaatgttacccgcttggttaggtactgctgaggccttaagatattcatctataaagaaatttaaaaaaaacacttattgat

SEQ ID NO: 276494 - DNA, 816 bp, Unknown
  Bacterial polypeptide expressing nucleotide sequence isolated from the Sargasso Sea
agtggtgatttattagacttaatgagaagaactaaatgttttggtattaatttagcaaaactagatattagacaagaatctaaaagacattcacaattaatttctgaattaattaaaaaaaaatataaatctaattatttatcttggagtgaagataaaaaaatatcatttttatcatcaaaactaaggacaaagaaaaatataataaataatttcttatttaaaaataaagaaaataaagaagtatggtcaacctttaaaattttgtctgaacaacctaaagaatgtttaggtgcatatgtaatttcaatgacatcatcatcatcagatatcctatctgttttatttcttcaaaaagaagcaaaaatcaaagatagattaagagttgtgccgctttttgaaacattagatgatttaattaatgcaaaatcaataatggaaaaaattttttcactaaattggtataaaaaattaataaattttaaacaagaaataatgatcggttattcagattctagtaaagatgctggaaagctatctgctagctggcaccaatataagttgcaagaagaaataattaagttggcaaaaaaatataaaattgaagttacattcttccatggaagaggagggtctgctggccgaggtggaggacctattcaagcaactttaaaatcacagccaccaaattcagtaaatggaaaaattagaattacagaccaaggtgaagttattcaacaaaaatatggctatgagcctttggcaaaatataatctttgtagttatattggcgctgttgttgaagcaacattaaat

SEQ ID NO: 276495 - DNA, 964 bp, Unknown
  Bacterial polypeptide expressing nucleotide sequence isolated from the Sargasso Sea
ccttacagagttttcttaagacctttaagagataaaatgcgatttactcatcgagcaattgaacagtttatagtgaacaaaaaacctttagactataacaaattgctaaactcaaaagaagaaattttaaaaccccttagaattgtccgtgaatctttagaggaaaatcaaagtgaaaatatcgcaagcggtgaattattagacttaatgagaagagcaaaatgttttggaattaatttagcaaaactagatattagacaagaatcatctagacactcacaattaattaatgaacttgttcagaaaaaaaataaacacaattatttaaaatggagtgaggaggaaaaaattaaatttttatcatctaagatgaaaaaaaaatccaatttcatcaaaaattttaattttaaaaataaagaaaacaaagaagtttggttaacatttaaaattttgtctgaagagccacctgaatgtttgggggcttatgttatttcaatgacatcatctgcatctgacattatctctgttttatatttgcaaaaagaagcaaatattaagaatagattaagagttgtcccattatttgaaacattagatgacttaattaatgcaaaatcaataatggccagcttgttttcattaaagtggtacagagatttaataaaaaataaacaagaagtcatgattggatattcagactcaagcaaagatgctggaaaaatttgtgcaagttggcatcaatataaggctcaagaagaaattattaaaattgcaaaaaaatataaaatagatgttactttctttcatggaagaggtggttcagcaggtaggggtggaggcccaattcaagctactttaaaatctcagccgccaaatacagttaatggaaaaattagaataaccgataaaggagaagttattcagcagaaatatggatatcagcctttagcaatttataatttat

SEQ ID NO: 276496 - DNA, 895 bp, Unknown
  Bacterial polypeptide expressing nucleotide sequence isolated from the Sargasso Sea
atgataaaaagagatctttattacgaaagaattcctaccaaaagtttaagaaacgatgttagatatctaggaaatatactaggtaaagtaataagagaacaagaaggaaatacattttttaaattagttgaaaaaacaaggcttttatcaaaggcgaatattgcaaataaaaataagaaggatcctttcaaaaacctatctaaagaaattaaaaaacaaaattctaaagatctactgaaattaactagggcatacaatcattttatgaacctatataatttagccgagtcagtagatgcttctagaactctggatcaatttgaaaatttttcaatagataaaaaaaataaaaatatatttattgaagaaatatttgaaagtttttttaaaaataaaaatatttctaataaagaaatttttgatttagcaaaaagacttaacattggcatcgttttaactgctcatccaactgaagtaaagagaaggaccttaattcaaaaatatcacacattaactgaaatattggaacaaagaaatttgcttaaaaactatccctctaaaataaaagtattagacaaaaaaatgtttgatgaaataacaattatttggaacacagatgaacttaaaagatataaaccatctccttttgatgaagcgagatggggattagcaattatagaagatagtctatgggatactattcccaaagtttacagaagacttaatgaaatatttgtaaaaaatatgaaaaaaaatttaccaaaaaattttaatcctattgaatttggttcatggatgggcggtgacagagatggtaaccctttcgtcacatcaaaagttactcaagaagtcttgcttttatcaagatgggaagctgcaaaactttatgaaaaag

SEQ ID NO: 276497 - DNA, 952 bp, Unknown
  Bacterial polypeptide expressing nucleotide sequence isolated from the Sargasso Sea
tctaaaccatccccagccgatgaagcgcgctggggtcttgctataatagaggacagtctttgggaaacaataccaaaagtctacaggagacttaatgagatatttttgaaaaatatgggtaaaggtttgccaaaaaattttaatcctattgagtttggatcgtggatgggtggcgatagagatggaaatccaaatgttacgtcaaaagtaaccaaagaagttttgctattatcaagatgggaagcagcaaaattgtatgaaaaagaactaactaaattaattagatcatattccatgaaaaagtgttcaaaaaaaattcaaaaacttacaggaaaatcatttgaaccttacagagttttcttaagacccttaagagataaaatgcgatttactcatagagcaattgaacagtttatagtgaacaaaaaacctttagaatataacaaattactaaattcaaaagagcaaattttaaaaccccttagaattgtccgtgaatctttagaggaaaatcaaagcaaaaatatcgcaagcggtgaattattagatttaatgagaagagcaaaatgttttggaattaatttagcaaaactagatattagacaagaatcatccagacattcacaattaattaatgaacttgttaagaaaaaaaataaacataattatttaaaatggagtgaggaggaaaaaattaaatttttatcatctaagatgaaaaaaaaatcaaatttcataaaaaattttaattttaaaaataaagaaaacaaagaagtttggtcaacatttaaaattttatctgaagagccacctgaatgtttgggggcttatgttatttcaatgacatcatctgcatctgacattctctcagtcttatatttgcaaaaagaagcaaatattaaaaataaattaagagttgtccctttatttgaaacattagatgacttaatta

SEQ ID NO: 276498 - DNA, 775 bp, Unknown
  Bacterial polypeptide expressing nucleotide sequence isolated from the Sargasso Sea
cctgagatatatacctgttttcacagcacacccaactgaagcaaagagaagaagcaagctagaggcaatgcgaagaatttttaataccattctagagttacaaagctataaaggacagtccataaaaagagaggagttgattgatgagttacaagctgagattctcatactatggagaacagatgaagttagactcagaaaacccacggtactagatgaagtggagaatggattatattattttagaacttctctgttcagagcaataccagaggtttacagagatttagaaaaagctataaaaagagtttatcatacagataatgtaaaagtacctagcttcatcagatttggttcttggattggtggagatagagatggaaatccatttgtcacaccagacataactagagaggcagtatatatgcatgcagagactgcgttgcacgagtacatgagacgtgcacagaaactgtcaactcttctcacacattcatcgggtctaacaacaccatcaaacgaatttctatcttcattaaaagaagatgaaaaatatcttcaaggtgcgtttgaagatacaacacaggatttcgcaaaagagccctataggagaaagttaaaaataataagatacaggttaaaagaacggttaaatgtaattaagcagctaaaaaataaaaatgaaatcagatctcctcatgcgtataaatccgaaaaagaacttttaaatgacctgtatctaatcaaagactcattaatttctgacaatgataaa

SEQ ID NO: 276499 - DNA, 922 bp, Unknown
  Bacterial polypeptide expressing nucleotide sequence isolated from the Sargasso Sea
caaaaaatacaaacaaaaagagttattaaagctattagggatctaagcccaaaaaatacttttaaattaacaagagcatttagtcactttatgaaccttatgaatttggctgaattgattgatacctctcgtaatttaaatgaatatgaaaataataaaaaaaaattcaaaaataataacttatttattgaagaagtttttgaaaatctttttaataacaaaaatatttcaaatattaagatctacaatactgctaaaaagctaaatataggaattgtgttaaccgcccatccaactgaagttaaaagaagaactttaattcaaaaatatcataatattattgaaattttggagcaaagaaatctactgaagaattatccctcaaagatgaaaatattagacaaaaaactttttgatgaactcacaattatttggaataccgacgatttgaaaagatttaaaccttctccttttgatgaagcaaaatggggcttagctattattgaagatagtttatgggatacaattccaaaagtttacagaagattaaattcaattttcgttcagaatatgggtaaagggttaccaaaaaatttcaatccaattcagtttggttcttggatggggggtgatagagatggcaatccaaatgtaacagcagaagtcacaaaaaaagtaattttgttatcaagatgggaagcagccaaattatatgaaaagtatttaacaaaattaattaggtcttattctatggagaaatgctcaaaaaaaattaagagaaaggttggaaaatcatttgaaccatatcgtgtttttttaagacctttaagagataaaatgagaactacacacagatcaattgaacaatatcttgttaataataaacccttggataatagaaaattacttaatccaagagagg

SEQ ID NO: 276500 - DNA, 952 bp, Unknown
  Bacterial polypeptide expressing nucleotide sequence isolated from the Sargasso Sea
tcaaaacaaattctaaagaaaactggtaagtcatatgaaccttatagagttttcttaagaccattaagagataaaatgagaataactcatagaatgattgagcaacatttagtaaataaaaaacctttagatcaaaaaaaattacttaattctaaagaagaaatattaaaacctttaagagttgttagacaatctttagaacaaaataataatgaaaatttagctagtggagagttattagatttaatgagaagagcaaaatgttttggtattaacttagctaaattagatattagacaagagtcatcaagacactctcagttaataagtgaatttgtgaaaaaaaaatataataaagattattcaaaattttctgaaattgaaaaaataaattttttaaaaacaaaattaaactcatccaaaaatgtgatcaataaattcaaatttaaaaatagagaaaatagtgaagtttggtcaacttttaatattctagctgaagagccatcagaatgtcttggagcctatgttatttctatgacatctgcagcatctgacattttatcagtgtcttttttgcaaaaagaggcaaaaattaaaaataagcttagagttgttcctttatttgaaactttagatgatttaataaatgccaaatctattatggagagcttgttctctcataaatggtacagaaaattaataaatcataaacaagaagtaatgattggttattcagactcaagtaaagatgcaggtaagatttgtgctagctggcaccaatataaagcgcaagaagagatagttaaacttggaaaaaaatttaatattgaaattactttcttccatggaagaggaggttcagctggaagaggaggaggacctattcaggcaacaatgagatcattaccacccaattctgttaatggaagaataagaatcactgatcaaggag

SEQ ID NO: 276501 - DNA, 871 bp, Unknown
  Bacterial polypeptide expressing nucleotide sequence isolated from the Sargasso Sea
aaatttaaaagttacgggaaaaacttttgagccatatagagtattcttaagacctcttagggataaaatgaggttgacgcatagagcaatagaaaatcatcttgtaagacacaaacctctagatcagaataaactattatcctcaagagaagaaatcttaaaacctttaagggtagtaagagactctcttgagaaaaaccagaatgaaaatatagcaagtggcgaattacttgacttaatgagaagagcaaaatgttttggtataaatcttgctagactagatattagacaggaatcatcaagacactcacaattactttatgagtttatcaaaaagaagtacagagctgattattataaatggtcagaaaagcagcgaataaattttttatcaaaatatttaaaaacaaataaaaaagtcattaaaaatttcaaatttaagaatagagaaaatcgtgaagtttggtctacttttaagattttagctgatcaacctgaggaatgtttaggtgcatatattatttcaatgacatcgtcagcctctgatattttagcagtttcatttttacaaaaagaagcaaatataaataaaagattaagagtagttccattattcgaaaccttagatgacttaaaaaatgcaaaatcaattatggaaaatttattttcattaagctggtacagaaaattaattaaaaataatcacgagattatgattggctactcagactcaagtaaagatgctggaaaactttctgcgagctggcatcaatataaacttcaagaggaaattgttaagttaggaaaaaaatataaaattgatctcacattttttcatggtagaggtggatctgcaggaagagggggtggt

SEQ ID NO: 276502 - DNA, 841 bp, Unknown
  Bacterial polypeptide expressing nucleotide sequence isolated from the Sargasso Sea
aaaaataaagaaaataaagaagtttggtcaacttttaaacttttagctgatgagccattggaatgtttaggcgcttatgtaatatcaatgacatcagcagcatcagatgtcttagcagtttatttaatgcaaatgcaggcaaatattaaaaataaactacgagtagttccactatttgaaactttacaagatttaaaaaacgcaaaatcaattatggaaagacttttttcattaagttggtacagaaaattaattaaaaacaaacaagaaattatgattggttattcggattctagcaaagatgctggaaaattatctgctagctggcatcaatacaaacttcaagaagaagttttaattattgcaaaaaaatataaaattgaccttacttttttccatggcagaggtggttcacacggaaggggtggtggaccaattcaggcaacgatgagatcccaacctccaaattcggtatatggtcgtattagaattactgaccaaggagaaatgatacaacaaaaatatggttatgaacctttagcaaaatataatttatgtagttatataggatctgtaatgcaggctactttaaatccacctccacatcctaaagatagttggagaaaattaatagaaaaaatgacaaaaatttctacttcagcttatagaaaaaatataaatgataactcagattttataagatactttaaaactgttacgcctcacttagctcttggaaaattatcaataggatcacgaccttcaaaaagaaaaaatttagataatattcaaagcttaagagcaataccttgggtgtttgcatggacacaaataagattaa

SEQ ID NO: 276503 - DNA, 844 bp, Unknown
  Bacterial polypeptide expressing nucleotide sequence isolated from the Sargasso Sea
ttagcagaatcgattgatgcctcaaggactttagatatatacgaaaatacaaagaaagataaaaaattaaaaaatatatttattgaggagatatttgaaaatttttttaaaaacaaaaaaatatcaaacagtaaaatttataatgttgcaaaacaattacatatcggtatcgtacttacggcacatcctacagaagtaaaaagaagaactttgatacaaaaatatcataccttgacagaaattttggagcaaagaaatttgttaaaaaattatccatctaaaataaaaattttagataaaagaatgtttgatgagataactattatctggaatacagatgaactaaaaaggtctaaaccaacaccttcagaagaagctcgttggggtctagcaataattgaagatagtttatgggagactattccaaaagtttatagaagattaaatcaaatctttgttaaaaatatggggaaaggattgcctaaaaacttcaatccaattgaatttggatcttggatgggtggagacagagatggaaacccatttgttacttcaaatgttacgaaagaggttattcttttgtcaagatgggaggcagcaaaactttatgaaaagtctttaactaaattaatacgatcttattctatgcaaaaatgttctaaaaaaattcgtaaatttgcaggtaaatcttacgaaccttatagagtttatttgagacctttaagagataaaattagaaaaacgcatagatctatcgaacagcatttggttaataatacaccgctaaatgaaaaaatactaatttcaagtaaaaaagaaattttaaaaccattgagagacgtta

SEQ ID NO: 276504 - DNA, 917 bp, Unknown
  Bacterial polypeptide expressing nucleotide sequence isolated from the Sargasso Sea
tcttgcaatcatagaagatattctatgggatactatcccaaaagtttatagaaaattaaattccatatttgttaaaaatatgaataaaaatttacctaaaaattttaatccaatagtattcggttcttggatgggtggtgatcgggatggaaatccaaatgtgactgctgaggtaaccagaaaagtaattttattgtctaggtgggaggctgcaaaattatatgaaaaagccttaactaaaatcataagatcttattctatggaaaagtgttcaaaaaaaattttgaaaaaggttggaaattcattcgagccttatagagtttttttaagacctttaagggataaaatgcgaattacacatagattaatcgagcaacatttagttcaaaaaaaaccactagaccaaaaaaagttattaagttctcgagaggaaatacttaggcctcttagagttgtgagagaatctttagaagaaaatcaaaacgaaaatattgccagtggggatttattagatttgatgagacgagctaaatgttttggaattaaccttgcacgactagacataagacaggagtcttctagacacaaacaattaatttcagagctaatgaaagctaaatataataagaattatttaaattttagtgaaaaagagaaattaaattttttaagatcatcaattacttcaaaatctaagaaaataggaaattttcgatttaaaaataaagaaaataaagaggtttggtctacatttaaaaccctatctaaagaaccaccagaatgtttaggtgcatatgtaatttcaatgactacatcagcttctgatattttatctgtttctttcttacagaaagaggcagaaataaaagacaaattaagagtggttccctttgttgaaactttggatgatttaatta

SEQ ID NO: 276505 - DNA, 850 bp, Unknown
  Bacterial polypeptide expressing nucleotide sequence isolated from the Sargasso Sea
ttaataaaaaataaacaagaagtcatgattggatattcagactcaagcaaagatgctggaaaaatttgtgcaagttggcatcaatataaggctcaagaagaaattattaaaattgctaaaaaatataaaatagatgttaccttctttcatggaagaggtggttcagcaggtagaggtggaggcccaattcaagctactttaaaatctcagccgccaaatacagttaatggaaaaattagaataaccgatcaaggagaagtaattcaacagaaatatggatatcaacctttagcaatttacaatttatgtagctatataggagcggtaatggaggcaacattaaccccaccgccagtccctaaaaaagattggagaaatctaattgaaaaaatgtctgatatttcaaaaagttcatatagaaaaaatattaatcaaagttcggattttattaaatatttcaaaaccgttacgccacatgtgtctttaggaaaactttcaattggatcaagaccgtctaaaagaaagaatattgataatatcaaaggtttaagagcaataccctgggtatttgcatggacacaaataagactaatgctcccagcatggcttggaagtgcagaagctttaagatattcatcgatagaaaaatttgagaaaacactaatagatatggaaaaaaattggcctttcttcaattcaatgatggatattttggatatggtaatttcaaaagtggacccagatatttcaaaaatatatgaggagtatttagcagacaaagatttaaaaagagttggaaaaaaacttaggttccaattcgaagttattaagaaattaaataaaaagatta

SEQ ID NO: 276506 - DNA, 763 bp, Unknown
  Bacterial polypeptide expressing nucleotide sequence isolated from the Sargasso Sea
actggctgaagttacaagaaaagtaattttattatctaggtgggaagctgcaaaattatatgaaaaagctctcactaaaattataagatcctattctatggaaaaggcttcaaaaaagatctccagtaaagttggaaaatcattcgagccttatagagttttcctaagacctttgagagacagaatgagaattacccatagatccattgaacaacatttggtttatagtaagccattagatcaaaaaaaattattgagttctaaagaagaaattctcaaacccttgagagttgtgagagagtctttagaacaaaatcaaaatgagaacattgcaagtggagaattgttggatttaatgaggcgagctaaatgttttggaattaatcttgccagattagatataagacaagagtcttcaagacatgagaaattaatctccgaattagttaaaaccaagtacaataagaattacttaaatttaagtgaaaaagagaaattgaattttttaagattatcgatcacttcaaaatctaataaaataggaaattttcaatttagaaataaagaaaataaagaagtttggtctacatttaaaactctggctaaagagccaccagagtgtttaggtgcatatgtaatttcaatgactacttctgcttctgatatcttatctgtttctttcttacaaaaagaagctgaaataaaagataaattaagggtagttcctttgttcgaaactttgaatgatttgattaatgcaaaa

SEQ ID NO: 276507 - DNA, 549 bp, Unknown
  Bacterial polypeptide expressing nucleotide sequence isolated from the Sargasso Sea
ttagatttaatgaggagagcaaaatgctttggtataaacttagcaaaattagatattagacaagagtcttcaagacattcacaattaatagcagagtatgttaaaaaaaaattcaatcaaaattacagtcattgggatgaaaataagaaaatcaattttttatctaaaaaccttaaaagtaaaaaaaacaatattaataatttcacatttaaaaatagggaaaataaagaggtatggtcaacttttaaagctatagcttcagaaccttcagaatgtttaggtgcttatgtaatctcaatgacctcatctgcatcagatattttaacagtgtcatttcttcaaaaagaagcaaaaataaaaaataaattaagagttgttccattatttgagactttagatgatttaattaatgctaaaccaataatggaaaaattgttttcactaggatggtatagaaaattaataaactacaaacaagaaattatgatagggtattcagactctagtaaagatgctggtaagctatcagcaagttggcatcaatataag

SEQ ID NO: 276508 - DNA, 787 bp, Unknown
  Bacterial polypeptide expressing nucleotide sequence isolated from the Sargasso Sea
agagatttattaattgatcacccgtcaaaattaaaaatacttgataaaaaactttacgatgaattaactatcatttggaatacagacgatcttaaaagatttaaaccatcaccatttgatgaagctagatggggtttagcagtaattgaagatagtttatgggatacgataccaaaggtttatagaagattgaactcaatatttctaaagaatatgaagaaaggtttaccaaaaaattttaatccaattgagtttggctcttggatgggaggagatagagatggcaatcctaatgttactgctgccgtaacaaaaaatgtaattttattgtctagatgggaagcagcaaagttatatgaaaaatcattaactaagattattagatcttactcaatgaaaaaatgttcaaataagatatctcggaaagttggaaagacatttgaaccttatcgtgtttttctaagacccttaagagataaaatgagaattactcacagaagtatagagcaacatttagtatataaaaaaccattagatcaaaaaaaactgttaagacaaagagaggaaattttaaaacctttaagaattgtaagagagtctttagagcaaaataataatgagaatattgcaagtggtgaacttttagatctgatgaggagagctaaatgttttggtataaatttagcaagacttgatatacgacaagaatcagtaagacatagtcaattaatctcagaatttgtaaaaaatagatataaaaaaaattttttgaaatttgatgaaaaac

SEQ ID NO: 276509 - DNA, 873 bp, Unknown
  Bacterial polypeptide expressing nucleotide sequence isolated from the Sargasso Sea
caatttatgaagcattattatcccaacctccagggacagttaatggaagaacacgtgtaaccgaacaaggagaaattatacaacaaaaatatgcaacagaatcattagctgaatacagtcttggaacttatattggatcagtgttagaagctaccttggcaccaccaatcaaaccaaaaaaaaattggcgagaattaatgaatgccatgagtaaagtttctactaaagcttatagaaataatttttttaataaagattttttaagatattattttaatattacacctcaaagattgttagaacaactttccattggttcaagaccagctaaaagaaacaaatcaaaagatgtaaaaagcctgagagctataccttgggtttttgcatggacacaaattcgctttcttttgccggcttggctaggaatatatgaagcattaaattttgctataaaaaacaaaaatataaacactttaaaggaaatgctgaaggtatggccatatttttacgccatgatggatatgttggacatggttctagctaaaactgatcaaagaataattaaattttatgaagaatgtttaggagatcacagcttaaaaaatacaggtgaaaaacttagaaaacaattgtcaactctaatttatttaaatagaaaaataataccaacttatgtcttggagcagagaaaagaatacagggattctataagaaaaagaaacacttacgcagaagtattaaacatcttacaggcagacattatgaaaaaactttataaaaaaaagttaaaaacaaaagataaaaaacttctaatagacgcaatgctagttacaattgctggaatagctgctgcgatgaagaacgtaggttaag

SEQ ID NO: 276510 - DNA, 873 bp, Unknown
  Bacterial polypeptide expressing nucleotide sequence isolated from the Sargasso Sea
atcaatataaattacaggaagaaattttagctttgtcaaaaaaatttaaaataaaattatctttttttcatggaagaggtggttctgctggaagaggaggtggaccaatacaggctactcttaaatctcaaccacctggatcggtaaatggtaaaataagaattacagatcaaggtgaggtaatacaacaaaagtatggctatgagcccatagctaaatacaatctatgtagttacataagttctgtgatgttagctactttaatacctccacctcaacctaaagaaaattggcgaaacttgataaagagtatgtcggatatatcaaaaagttcttatagaaaaaatttaacatctagcactgaatttataagatactttaaaacagttacacctcatttagcattaggaaaattatctattgggtctcgtccttctaaaagaaaaaatttagataatattaaaggtcttagagcaataccttgggtatttgcatggacgcaaataagattaatgttaccagcatggttaggtactgccgaagcattaagatactcttcaataagaaaatttaaaaaaactctaattgatatggaaaaaaattggccattttttaattcgaccatggatttacttgacatggttatttcaaaagttgatccagaaatttcaaaaatttacgaaggttatttagcggatgataatctaaaaagagtgggtaagaaactcaggtttcaatttgaagctttaaaaaaacttaatcatagcattacaccctctgaaattttaaaacaaagaaaagtatttagaagtcctgcaattataaggaatgtatattctgaagttttaaatatcctctcaagcaaccagtaat

SEQ ID NO: 276511 - DNA, 706 bp, Unknown
  Bacterial polypeptide expressing nucleotide sequence isolated from the Sargasso Sea
gatatcttatctgtttattttttacaaatgcaggcacaaaacaaaaatttattaagagttgtgccactttttgaaactttggatgatttaaaaaatgccaatggcgtaatgacaaatttgttcaaactttcatggtacagaaaaatgattaagtcaaaacaggaagtgatgattggatattctgattcaagtaaagatgctggaaaactatctgcgagttggcatcaatataaactacaagaggagcttagaagtttagcaaaaaaatataaaatagatcttgttttcttccacggtagaggtggctctccaggaagaggaggtggtcctattcaggctactttaaaatcgcaaccttcaggaacagttaatggtaaaattagaattaccgatcagggagaggtaattcaacagaagtatggttataaacctttagctgaatataacctctgtagctatatcggttcagtaatggatgcttctttaaatcctccaccaagatcaaaaactaattggcgtgaattaattcaaaacatgtcagaaatttctacatcgtcatatagaaaatatctaaaccaaagtgaggattttattcgttactttaaaacagttacgcctcataaatcacttggaaagcttgctattggatcaagaccaaccaaaagaaagaatgtcgacaatattcagagcttaagagctattcctt

SEQ ID NO: 276512 - DNA, 982 bp, Unknown
  Bacterial polypeptide expressing nucleotide sequence isolated from the Sargasso Sea
aacttttgagccctatagagtttatttaagaccattaagaaacaaagtgcgccttacgcataaattaattgaacagcacttaattgaaaatgttcctttagatcaaaaaaagcttttgtgtaacagagaggaaattttaaaacctttaagagtagttagagagtcgcttgaagaaaataatagtgaaaatattgccagtggtgatttattagatttaatgagaagggctaaatgttttggcattaatttggcaagactagatataagacaggagtcatcaagacattcacaattaatttctgaaattttaaaaagaaaatataaatttaactataataatttgagcgaagataagaaaataaaatttttgtcgtcaaaaattaaatcaaaaacaaatcttataaatagattttcttttaaaaataaagaaaataaagaagcatgggaaacatttaaaattttatcaaaagaaccaaaagaatgtttaggcgcttatgtaatttctatgacttcggcagcatcagatatattaagcgtggtttatcttcaaaaggaagctaatattaaagaacctcttagagtcgttcctctttttgagactctaaatgatttaataaatgcaaaacctataatggaaaaattattttcattaaattggtacagaaaattgattaattacaaacaagaagtaatgattggttattcagattcgagtaaagacgcaggaaaattatctgcaagttggcatcagtacaaagcccaagaagaaattataaaaattgcaaaaaaatataaaattgatgttacattttttcatggccgtggaggatctgctggtcgtggaggaggcccaatacaagcaactttgaggtctcaaccaccaaattcagtaaatggaaaaattagaattacagaccaaggcgaggtaatacaacaaaaatatggatatgagccaatggctaaatataatctctgtagctat

SEQ ID NO: 276513 - DNA, 832 bp, Unknown
  Bacterial polypeptide expressing nucleotide sequence isolated from the Sargasso Sea
atgttctaacaaaataactaaagttgttggaaaatcttttgaaccttacagggtatatttaagacctttaagagacaaaattagaaaaactcatagattaatagaacatcatttaattaatggtgaacctttagatcaatccaagctgttaaattcaaaagaagaaatactaaaacctcttagagttgtaagagagtcccttgagcaaaatcaatgtgaaaatatagcaagtggtgaacttcttgacttaatgagaaggacaaaatgttttggtattaatttagcaagactagatataagacaagaatctgcaagacatagtcaattaataaatgaattttttttaaaaaaatataaaaaaaaatatttaatgttaagtgagaaagagaaattaaaatttttcaaaaacacacttacttcaaaaaaaaatttattaaataattttaaatttaaaaacaaagaaaataaagaagtttggtctactttcaatatattatctaaggaaccaaaagaatgtttaggcgcatatgtaatttcaatgactacattagcgtcagatattttatcagtgtcttttttacaaaaggaagcaaacataaaagataagttgagagtagtacctttatttgaaacattagatgatttaataaatgcaagaaaaataatggaaacattattttcacaaaattggtacagaaaattaattaaaaacagtcaagaaattatgattggctattctgactcaagtaaggatgctggaaaattatgtgctagttggcaccaatataaagcacaagaagaaataataaaattagcaaagaaatataatatt

SEQ ID NO: 276514 - DNA, 813 bp, Unknown
  Bacterial polypeptide expressing nucleotide sequence isolated from the Sargasso Sea
actgaacaaggtgaagttattcagcaaaaatatgatactgcatcattagctgaaaatagtttaggtacttacattggttcagtttttgaggcaactctcattcctcctgtcaaacctaagcaaaaatggcgtaatgtaatggatgaaatgagtaaagtttctgcgaaagcctatcattcaaatataatggatgaccaaaatttcttgagatattttgacgaggtaacacctcaaagaaatcttgaaaaactttttattggatctagacctactcgacgaagtgcatctaaagatattaaaagccttagggcaattccttggatgtttgcttggactcaaatgagatttattttgcctgcatggcttggtattttagaagctttatctgagacaaagaaaaaacacaccaataaaattttaaaagaaatgcttaatcagtggcctttcttttatgcaatgatggatatgttagacatggtactagttaaaacggatcagagagtgatcgagttttatgaggaatgtctagctgacaggacactaaaaaatactggccgcaatttacgtggccaattgaataaactcattaaaatgaatagagagataatgccaaagcatatactcgaagagcgagaatcatacagaaattcaattaaaattagaaatacttatagtgatattctaaatttactccaagctgatgtaatgaaaaagctcaattcagcaaacaaaatcagatcaaaatctcaaaaagatttattgaacgatacgatgatggtcactgtggccgggatctcagcagggatgaaaaac

SEQ ID NO: 276515 - DNA, 727 bp, Unknown
  Bacterial polypeptide expressing nucleotide sequence isolated from the Sargasso Sea
aaccgaccgacgccagtggaagaggcgcggtgggtcttcgccgccatcgagaactcgctgtggaaggccatacccaatgtattgcgccagaccgatgcgacgctcaggcgggcgaccgggctgcacctgccgctagaagccgcgccgatccgcttcgcctcctggatgggtggcgaccgcgacggcaacccgaacgtgaccgcgatggtatcccgcgaagtgttgctgaccgcccgctgggtggctgccgatctgtacctgcgggagatcgaagggttgattaccgcactgtctatgagcgaagccagtgaggaactgctgcgcctgaccggtgattcggccgagccgtaccgggtcctgctcaagcccctgcgtcaacggctgcgggcgacccgggagtgggcgcgagcggccatcgagcatggccagccggctccggcggaagtgctgcaggactgcgccgagctgcgtcggccgctggaactctgctaccgctcattgcatgcccgcgggatgggcatgatcgccgatggcgcgctgcttgactgcctgcggcgactggccgtgttcgggctgttcctggtacggctggacattcgccaggacgcggcacggcatgccgcagcactggcggaaatcaccgattacctcgggctgggcgactatcaggcgtgggacgagcagcggcgactggactggctgcagcttgaactgagcaatcgccgcc

SEQ ID NO: 276516 - DNA, 583 bp, Unknown
  Bacterial polypeptide expressing nucleotide sequence isolated from the Sargasso Sea
ctgcggtatatacctgttttcacagctcatccgactgaggctaaaaggagaagtaagctagaggcaatgcgaagaatattcaatactattctggagttgcagagttataagggacagtctattaaaagagaggagttaatcgacgagttacaagctgaaattctcatattatggcgaacagatgaagttagacttagaaaaccaacagtactagatgaagtggagaacggattatattacttcagaacttctctgtttagagctatacctgaggtgtacagagacttagaaaaagctataaagagggtttaccacacagacaatgtaaaagtacccagcttcataaggtttggttcttggattggtggagacagagatggcaatccatttgtgacaccagatataacgagagaggcagtgtacatgcacgcagagactgcattacatgagtatatgaggcgtgcacaaaaactttcaactctactcactcattcatcaggccttacaacaccatcagatgaattcctatcttcattaaaagaagatgaaaaatatcttcaaggtgcgtttgaagatacaacac

SEQ ID NO: 276517 - DNA, 890 bp, Unknown
  Bacterial polypeptide expressing nucleotide sequence isolated from the Sargasso Sea
gccagtacaggaggcaaaatggggactagccgtaatagaagatagtctatggaattctgttccaaaaatttgttcaaggttagatgaagctgttcaaaaatactctggaaaaaaattacctatacattattcaccattcaaatttggttcttggatgggaggtgatagagacgggaatccaaatgtagatcacaaaataacaaaagaggtaatcttattatctaggtgggaagctgctaacttatatgaaaaaaatcttactaaaatcatacaagatctttcaatgcacgaatgctcgcacaaaattagaaaagttgtaggtaatagtcaagaaccttacagagtttatttaaggccaataagaagtaaattaaaaaatactcagaaagaaattgaaaattttttaaatgaaaagaagcaattaaataaaaatttattagtaaattcaattcaagaaatcattgatcctctgaccacagtttatgaatcgttatgcagtgttaagtgcaaagctttagcagatggagaagttttagatttgataaggagagcttattcatttggtttaaatttagctaaacttgatattagacaagaagcatcaagacactcaagtttaataagcaagttttataaaattaaaacaaaaaaaagttattttaatttaacagagaaacaaaaaatctcatttttaattaaattaatcaaagcaaataaaaaagttaactttaataaaataaaactatctagtgaagataaggaaacttggaatacatttaaacttttaggccaaactcctttagagtgtttaggagcatatgttatatcaatggcatcttcctcatcagatgttcttgcggtaatgttcttcaaaaagcagctggtataaa

SEQ ID NO: 276518 - DNA, 850 bp, Unknown
  Bacterial polypeptide expressing nucleotide sequence isolated from the Sargasso Sea
gcctgttaccagcgacagctgatgctggagctctacatcagttctgtgcagtcgctccgccagcagctgagcatctccatgcagtggagtcaggtggctccatcactgttggagtcgctcgaaatggatcggctccgcttccctgagatctacgagcgcagagcagcgcgataccgactggagccctaccggctcaagctctgctacgtgctcgaaaaactagagcgcaccctcgcccgcaacaaccaactgtcggaagcgggctggcagatgccctgtgaggcgctggccgatcccaaggatgggctcggtaacgctgaggttctccactacacctcggtggaccagttccgcagtgatctggagttggtgcgcaacagcctcgtcagcaccgaactgagctgcgaacagctcgacaccctgctgcaccaggtgcacatcttcgggttctcactggccagcctggacatccgtcaggagagcacccgccacagcgatgccatcgacgagctcacccgcagccttgaactgccccaggcctatggggacatggacgagacggagcggatggcatggctcctgcaggagttgcagacccgtcgacccctgatcccgcctgccgccagctggtcggcagcgacggccgagacgctggcggtgttccgaatgctgcagcgcctccaggaggagttcggtccgcggatctgcaactcctacgtgatctccatgagccacacggcatcggatctcttggaggtcctgctgctggccaaggaagcgggtctcgtagacccgcccaacaaacgggcctccctgttggtggtgccgctgttcgaaaccgtggaggatc

SEQ ID NO: 276519 - DNA, 849 bp, Unknown
  Bacterial polypeptide expressing nucleotide sequence isolated from the Sargasso Sea
gactctagcaaagatgctggaaaaatttgtgcaagttggcatcaatataaagctcaagaagaaattgttaaattaggaaaaaaattcaatatagatgtaactttttttcatggaagaggaggttcacctggaagagggggaggtccaatccaagctactttaagatctcaaccaccaaattcagtgaatgggaaaataaggatcactgatcagggagaagttattcagcaaaaatatggttatgaacctatagctgaatataatctatgtagttacattggtgcagtgactgaggcaacacttaatcctccacctgtacccaaacaaaactggagagaacttattgaaaaaatggctgatatttctaaaagttcgtatagaaaaaatattaatcaaagttcagaatttattaaatactttaaaactgttaccccaagtgcagctcttggaaaattatcaattggatctagaccagcaaaaaggaaaaatattgacaatattaagagtttaagagctatcccttgggtttttgcttggacacaaataaggttgatgttgccagcttggctcggtagtgcagaggcattaagatacgggtatataaaaaaatttagaaaaacattaattgatatggaaaaaaattggccttttttcaattcaatgttagatattcttgatatggtaattactaaagttgatccggaagtttcaaaaatttatgaagcgtatttagcagataaaacattaaaaagagtcggaaaaaaactaagatttcaatttgatgcaataaaaaccttaaataaaaaaattactacaaaagaaattattttaacgcgtaagcaatttaga

SEQ ID NO: 276520 - DNA, 790 bp, Unknown
  Bacterial polypeptide expressing nucleotide sequence isolated from the Sargasso Sea
aattacgataaaccattaaatgaaaaaaaacttctttctgaaagagaagaaattttaaagcctttaagagtagttagagagtctttagagcaaaaccagaacgaaaatattgctagtggtgagttgcttgatttaatgagaagagcaaaatgttttggaattaatcttgcaagactagatataagacaagagtcttctagacattcccaattaatgaatgagtttattaaaagaaaatctaggcaaaattataactcttggagtgaggttgaaaaaattaagtatttatcaaaaagaattacaggaaaaaatatagttaacaattttgttttcagaaataaggaaaacaaagaggtttggtccacctttaaagtcttggcaagtcaaccaaaagagtgtttaggggcgtatgtaatatcaatgacatcaagtgcatcagatattttatcagtaatgtttttacaaaaagaggcgaatataaaaagcaagttaagagtagttcctttatttgaaacattagaagatttaataaatggtaaagaaataatggaaaaattattttcattaaaatggtatcgaaaatatatacaaaataaacaagaaattatgattgggtattctgactctagtaaagatgcaggaaaattgtcggctagttggcatcaatataaattacaagaagaaattataagattagcaaaaaaatataaaattaatgttacattttttcatggaagaggtggttctgcaggtcgggggggaggacctattcaagcgactttaagatcac

SEQ ID NO: 276521 - DNA, 826 bp, Unknown
  Bacterial polypeptide expressing nucleotide sequence isolated from the Sargasso Sea
aagaaataatttattagctgatagtgggtggaaatttgacttggagggtgaaactgataacaaaaatctagataaagttgaaaacttatattacaagtcagtaaacgaatttacttatgatctagaactaattaaaaatagcttaattagtacagatttaacttgtgagtctgtaagcaccttacttactcaggttcatatttttggattttctttagcaagcttagatattcgtcaagagagtacaaggcatagtgatgctatacatgagcttacaaattatcttgatttatctgttaaatatgaccaaatgtctgaggaagagaaaattaaatggcttatagacgaattaaatacaaaaaggcctttaattccatctgacgttaactggacaaaaactacagaagaaaccttttcagtctttaaaatggtcaagagactacagcaagaatttggaagtcgcatttgtcattcttatgtaatttctatgagtcatagtgcatctgatttgcttgaagttctcttactggcaaaagaaatgggacttcttgatcaaaattcacaaaagtcaaaattattagttgttcctctttttgaaactgtggaagaccttaaaagagcaccagaagtgatggaaaagttatttaaattagatttttatagatcattattgccaaaagtgggagaatcttttaaaccactgcaagaattaatgcttggatattctgatagcaataaagattcagggtttgtttctagtaattgggaaattcatagagcccaaatagctcttcaaaatctctcaagtagaaataatatattgctg

SEQ ID NO: 276522 - DNA, 721 bp, Unknown
  Bacterial polypeptide expressing nucleotide sequence isolated from the Sargasso Sea
cccagatttcagtactttatctcaaactataaatattcttggaagtgaattaggtaatgtaattaaacaacaagctggtataaataattttgaactagttgaagaaataagagttaattcaaaaaaatatagatcaacaaaaaattctaaattcttagaattaatttataaaagattaaagaccttagatgaaattgagcttttgactctgactaaatcattcacattatttttttatctttcaaatatttccgaacaagtttttagagaaaaatttcaatacaaaattgataaaaatgatttggataagaataaggacagtctaattttctcaccagtttttactgctcaccctactgagagtgcaaggcaatcaaccttaaaaaagctttataaaattgcaaaaattatttccaaaaataattcaactgatttaaatgaaattaataatttaattactcaactttggtacacgagagaagttcggtcaacaaaaccagatcctattgatgaggtcaaaactcttttgtattatttaaacaatttatatacagatgtttacgatgaaattgaccagacattcacctcaaataatataaaccaaaaagacataattaggctgggtacttggattggtggagatagagatggaaacccatttgttactttaaaagtaactgaagaagctttaaaaatctactcaaatcagattattcaaatc

SEQ ID NO: 276523 - DNA, 853 bp, Unknown
  Bacterial polypeptide expressing nucleotide sequence isolated from the Sargasso Sea
tttaaaaagagtaagaccatcaccctttgatgaagctaggtggggactcgctataattgaagatagtttgtgggatacagttccaaaagtttacagaaaattaaactctatatttgtaaaaaatatgggtaaaaatttaccaaaaaattttaacccaatagtatttggttcatggatgggaggtgatcgagatggtaatccaaatgttactgctgatgttacaagaaaagtaattctattatctagatgggaagctgcaaaactatatgagaaagctcttacaaaaataataaggtcttattctatgaaaaaatgctcaaaaaaaatccaaaaaaaagttggaaaatcatttgaaccttatagggtttttttaagacctttaagagataaaattcgattaactcacagatctatcgaacaacatttggtcaataaaaaacctttaaatcataaagaattaataagttctcgtgaagaaatattaaaacctttaagagtagtaagagagtcacttgagcaaaaccaaaatgaaaatatagctagtggtgaattgttagatttgatgagaagagccaaatgttttggtatcaatttagcaagattagatatcagacaagagtcttctaggcacactcaattgataaacgaatttgtaaaaagaaaatataataaagattatttaaaatttagtgaagataaaaagatagaattcctaaaaaaacatacacttgcaaaaaaaaatcaaataaataatttacaaataacaaataaagaaaataaagaggtttggtctacttttaaaattctagctaatgagccaagtgaaagtttaggagccctatgttatatcaat

SEQ ID NO: 276524 - DNA, 887 bp, Unknown
  Bacterial polypeptide expressing nucleotide sequence isolated from the Sargasso Sea
attgcaggaagatgttttaaagttagctaaaaaatttaaaatagatgtaacctttttccatggaaggggaggttcagctggaagaggtggcggacctatacaagcaacattaagatctcaaccacccggatctgttaatggaaaaattaggattaccgatcaaggtgaagtaattcaacaaaaatatggttacgaacctttggcgaaatataatttatgtagttatatcggatcagttatgcaagcaacactaaatcctcctccactaccaaaaactaaatggagaagcttaatacaaaaaatgtcagagatatctactagttcatatagaaaaaatataacacccaattcagaatttataagatattttaaaacagttacaccacacatggctttaggaaaactttctattggatctagaccttccaaaagaaaaaatgtagacagtattaaaggtttaagagcaattccatgggtttttgcctggacacaaataagactaatgctcccagcttggcttggtacagcagaggcgctaagatactcatcaataaaaacatttaaaaagactttaactgatatggaaaaaaactggccatattttaattcaactatggacttacttgatatggtgttatcaaaagttgatcctgagatttcaaaagtttacgaagataatttagccgatgcgtctttaaagagagtaggtaaaaaattaagatttcaatttgaagcagtaaaaaaacttaatcacgatattaccccaattgaaatattaaaacagagaaagagttttaggagtcctgctatagttagaaacatatactctgaagtgcttaatgttctttcagcagtagtaatgagcaaattatctaataaaaagttaa

SEQ ID NO: 276525 - DNA, 971 bp, Unknown
  Bacterial polypeptide expressing nucleotide sequence isolated from the Sargasso Sea
taaccatgatcaattaataagatacattgaaaagctggatcataaaactctaactaatgttatacgatccttttctaagtattttgcacttgtaaacgttgctgaggaagcgtatttgcatattcatcgtgtagatcgactcaaaacaggctttgagtcttgggaaggttcttttgatcagactatcaaagaatttaaagattcagacaccgatattacgagtttacagaaaatgttagatacacttcattattcgcctgtttttactgctcatcctacagaggcaaaacgtaggagtaaaatggaagcaatgaggagaatttttaacactattctcgaattacaaagatacaaaggagagtcaataataaaagaggaaatcattgataagctacaagctcagatactaatcttatggagaactgatgaggtaaggctaaaaaaaccaaccgtcatagatgaggtagagaatggactatactattttagaacgtcattgttcaaagcaataccagaagtatataaagatcttgaaaaggctattaaaagaatatatcgctcaaactctgtgaaaattccaagctttattaaatttggatcatggataggtggtgatagagatggaaatccatttgtgacaccagaaattacaaaagaagctgtttacatgcatgctgaaacagcaatactagaatacattagaagagcccagagcttatcaacattactaacgcactcgatacaacttactaacccatcagatgactttatcaaatcttcgcacgaggatttaaaatatttagatggagcactagaagattccactcaagattttgctaaagaaccatacagacgaaaattaaaaatagtaagatatagattaaaacagaagttacaacacattcgaaatttaagaaataaaattgaaaaatcagtgaatcatgcctatgcatcagagagggaattataag

SEQ ID NO: 276526 - DNA, 733 bp, Unknown
  Bacterial polypeptide expressing nucleotide sequence isolated from the Sargasso Sea
attgacaataatttggaatacagatgatttaaaaagagttaagccatcaccatttgatgaagcaagatggggtcttgctataatagaggatagcctttgggatactattccaaaagtttatagaagattaaattcaatctttgttcaaaatatggataagggattaccaaaaaattttaatcctattgagtttggatcatggatgggcggtgatagggatggcaatccaaatgtaactgcagatgtaacaaggcaagtaattttattatcaagatgggaggcagcaaaattgtatgaaaaagcactaacaaaaataattagatcatactcaatggaaaaatgttcaaaaaaaattaaaaataaagttggtaaatcttatgagccttacagagtttttttgagacctcttagagacaaaatgagaattactcatagaactattgaacaacacctagttaataaaaaacctttggatcaaaaaaaattacttagttcgcgagaggaaattttaaaaccgttaagagtagttagagagtcccttgagcaaaatcaaaatgaaaatattgcaagtggtgaattattagatttaatgagaagagcaaaatgttttggtattaatttagcaagactcgatataaggcaagaatcatcaaggcatagtcaattaatctctgaattcgtaaagaaaaaatataataaaaattatcttaagatgagtgagaaggaaaaaata

SEQ ID NO: 276527 - DNA, 622 bp, Unknown
  Bacterial polypeptide expressing nucleotide sequence isolated from the Sargasso Sea
aatgaaagaactcgacgcgctgcttcgcgataaagtaagaatgctgggaaacgcgctgggcaacaccatacggaatgatcttggtgaagacacgctggcgcagatcgagacgatccgtaagcaggctaaacgggcccgtaccggtgatgaaaacgaccgggataaactgctcgatctgcttaaaggattgtctgatgattctctggtgccggtggtgcggggctttaatcagtttcttaacctggccaacctggctgagcaacagcacggcatcagctggcggcgggaggatgtcggtgaagatagcaccgataccatgttccctgaccttattaaacgccttgttgaggccggaatcgaaggcgaagatcttacctcgaaagtggcagcggctaatgtcgagctggtactcaccgcgcacccgacggaagtcacacgccgtaccctgatccagaaatacgatgagctgtcgcacctcctgcagcagcgtgatgatttgcatgatgagcatccatcactggcctcaattgagcaccggatttcgcgtttaattgatgagatctggcacaccgatgaaattcgcaaggtccggccaacggctgttgatgaagcgaaatggggt

SEQ ID NO: 276528 - DNA, 704 bp, Unknown
  Bacterial polypeptide expressing nucleotide sequence isolated from the Sargasso Sea
  misc_feature (54)..(54): n is a, c, g, or t
  misc_feature (679)..(679): n is a, c, g, or t
aatgcagttccaaaaatatgttcaagatttaatgagtctgttgaagattatacntggaaaaaaattacctatagatttttccccattaatatttggatcttggatgggtggtgatagagatggaaatccaaatgttactgctcagactacagagcaggttattttattgtctcgatgggaagctgcaaacttgtatgaaaaagaatttacaaaaataattcaaaaattatctatgcacgaatgctcaaaagaattaaaaaaaaaagtagggaatagccaagagccttatagaacttatttaagaccaataagaaataaattaaagagcacccagaaagaaatagaaatatatttaaaagataaaaaatctttaaaagaatcattattagtgcaatctgttaacgaaataataaatcctctaaaagttgtttataattctttatgtgaagtcaaatgcaaagcaattgcaaatggctctgtacttgatttaattagaagggcttactcttttggtctaaatttagctcgtctagatatacgtcaagaatctaaaagacattcgaaactaatgaaaagcatctgcaagcacttagatttaggcaactttgaagaatggactgaagaagaaaaaatttcttttttgtcaaatgaatttaaatcaaaaagacccttaatatcngaaaatatttctttagataaagatg

SEQ ID NO: 276529 - DNA, 769 bp, Unknown
  Bacterial polypeptide expressing nucleotide sequence isolated from the Sargasso Sea
aatggttactgcagaagttactaagaaagtattgctattttctagatggcaagctgcaaaattatacgaaaaagaacttacaaaattaatacaggatttatctatggaagaatgttcggcaaaaattaaaaaagcaacaggaaacagttttgaaccatatagagtattcttaaggccaatacgagataaattaagattaacacatcagctaattgaaaatcatcttaacaataattcacctctagatgaaaaaaaattgatacaaaataaaaatgaaattacactcccattaagagaagtaagaaaatctctaaaattaaataagggagatcatattgcaaatgcagatttacttgacttaatgagaagagtaagatgttttggtatcaatcttgctagattggatataagacaagaagcagatagacatagtaagcttttaaatgaactatttaaaaaaaaatataatattaaatataattctttaactgaaaatgaaaaaataaaattattaaacaaatcaattaaagaaaaaacattttttgttgaaagaataaatttaacagacaaggaaaataaggaagtttggaatacatttaagcagatatcaaaaactccaaacgaatgtttaggtgcctatgtaatatcaatgacatctaccgcgtcagatattttgtcagtgtattttttacaaaaacaagcaaaaataaaaaatttcttaagagttgtaccactttttgaaactttagatgaccttaaaaacgcaaaa

SEQ ID NO: 276530 - DNA, 774 bp, Unknown
  Bacterial polypeptide expressing nucleotide sequence isolated from the Sargasso Sea
tacagaagaaaccttttcagtttttaaaatggttaagagattacagcaagaatttggaagtcgcatttgtcattcttatgtaatttcaatgagtcatagtgcatctgatttgcttgaagttctcttacttgccaaagaaatgggacttcttgatcaaaattcacaaaagtcaaaattattagttattcctctttttgaaactgtcgaagaccttaaaagagcgccagaagtaatggaaaagttgtttaaactagatttctataaatcattattgccgaaagtaggagaatcttttaaacctctgcaagaattaatgcttggatattctgatagtaataaagattcaggatttgtttctagtaattgggaaattcatagagcccaaatagctcttcaaaatctctcaagcagaaataacatattgctaagactttttcatggaagaggaggttctgttggtagaggtggcgggccagcctatcaggcaatattagctcaaccaagcggcactttaaaaggacgaataaaaataacagaacaaggtgaagttttagcttctaaatatagtcttcccgaactggctttgtacaatcttgagactgtaactacagcggtaattcaaaatagcttggttaataatagacttgacgctactccagaatggaatcaattaatgtctaggctggcagaaacatcaaggtctcattacagaaaattagtgcatgagaatcctgatttgttaaatttctttcaagaggtcactccaatagaaga

SEQ ID NO: 276531 - DNA, 891 bp, Unknown
  Bacterial polypeptide expressing nucleotide sequence isolated from the Sargasso Sea
aaatttaaactaaaattatcttttttccatggaagaggtggttcagccggaagaggaggtggaccaatacaggctactcttaaatctcaaccaccaggttcagttaatggaaaaattagaattacagatcaaggtgaagtaatacaacaaaagtatggttatgagcctatagctaaatataatttatgcagttacataagttctgttatgctagctactttaattcctcctccacgaccaaaggtaaaatggagaagcttgatagaaagtatgtcggatatatctaaaagttcttatagaaaaaatttaacattaagtaccgaatttatcagatattttaaaacagttactcctcatttagcattaggaaaattatctataggatctcgtccatctaagagaaaaaatttagataatattaaaggccttagagcaataccttgggtatttgcttggacacaaataagactaatgctaccagcatggttaggaactgctgaagcattaagatactcatcaattaaaaaatttaaaaaaattttaattgatatggaaaaaaattggccgttttttaattcgactatggatttacttgatatggttatatcaaaagtcgatccagagatttcaaaaatttatgaggagaatttagcagatattgatttaaaaagagtaggcaaaaaacttagatttcaatttgatgctttaaaaaaacttaatcacagtataacaccatccgaaattttaaaacaaaggaaaccattcagaagtcctgcaataataagaaatgtatattctgaagttttaaatattttacaggcaacagtaatgatgaaattaactaaaaaaaattacaataaaattaataacgattatctaaacgatgcttta

SEQ ID NO: 276532 - DNA, 931 bp, Unknown
  Bacterial polypeptide expressing nucleotide sequence isolated from the Sargasso Sea
gggcgcctgctgggcgatgtgattcgcgcctatggcggggatagcctctatcgccagaccgaatatatccgctccgcctcggtcgatcgggcgcgcggcatacagggcgcggaccttgtcgataccgggctggacgcgctcagcctcgacgacacgctcaacttcacccgcggcttcatgctgttttcgatgctcgccaatctggccgaggaccggcagggggtcgcggcggacccaggggccgatgtggcgtcggcgatcgcccggctcgattcgcacggaattgatcgtgacgcggttctggggctgctggcgcattcgctgatcgtccccgttctcacggctcacccgaccgaggtgcggcgcaagagcatgatcgatcacaagaatcgcattgccgatctgatgctgctcaaggatgcgggtcgccaggaaacggctcatggcgaaaatctggatgaggcgatttttcgccagatcgccctgctgtggcaaacccgtccgctgcgccgtgaaaaactgttcgtcgcggacgagatcgacaatgtgctcacctatttccgcgacatattcctgcctgtcctgcccgccctttatacgcggtgggagcgggtgctgggcgcgcgcccgcaaagcttcctgcgggtcggcagctggatcggcggcgaccgcgacggcaatcccttcgtgcaggcgccccaactggaattcgcgctcaagcggggggcgcaggcggcgctcgcttattatctcgatgcgctgcatgcgctaggcgcggaactctcgctgtcgaccgaactcgcccatgtgccgcaggcggtgctggatattgccgacgccagcggagacgagtcgcccagtcggcaggacgaaccctatcgccgcgccatttcgggcatctacgcccggctcgtcgccacctatgtggcgt

SEQ ID NO: 276533 - DNA, 823 bp, Unknown
  Bacterial polypeptide expressing nucleotide sequence isolated from the Sargasso Sea
tcttttttacaaaaagaagcaaatatagagaataaactaagagtagtgccattatttgaaactttagaagacttaattaatgccaaagaaataatggaaagtttattttctcaaacttggtatagaaaattgatcaaaaaaaatcaagaagttatgataggatattcagattctagtaaagatgctggaaagatttgtgctagttggcatcaatataaagcgcaagaggaaataattaaattaggtaaaaaatttaaaattaatattaccttttttcatggtcgaggaggatctgcagggagaggaggtggcccaattcaagctacattaagatctcaacctccaaattcagttaatggaaaaataagaattacagatcaaggtgaagtgatacagcaaaaatatgggtatgaacctttagcaaaatacaatttatgtagttatattggagcagtaactgaagcaacattaaatcctccacctattcccaaaaaaaattggagatcattgatcgaaaaaatgtcagaaatatctaaaagctcatatagaaaacatattaatcaaagttcagaatttataaaatattttaagaccgtcacacctcataaggcacttggaaagctttcaattgggtcaagaccatcaaaaagaaaaaatgctgataacataaaaagtttgagggctattccttgggtttttgcatggactcagatcagattaatgttaccagcttggctcggaattgcagaagctttgagatattcatacattaaaaaatttagaaaaactttatatgacatggaaagaaattggccttttttta

SEQ ID NO: 276534 - DNA, 851 bp, Unknown
  Bacterial polypeptide expressing nucleotide sequence isolated from the Sargasso Sea
agcatctgatattttatcagtatcttttttacaaaaagaagcacatataaaaaataaactaagagtagttccattatttgaaacattagatgatttaataaatgccaaagaggtgatgagaaatttattttctcaaaattggtacagaaaattaattcaaaataaacaagaaattatgattggatactctgactcaagtaaagatgctggtaaaatttgtgctagttggcatcaatataaagctcaggaggatataattaaattaggtaaaaaatataaaatcaaaattacattttttcatggtagaggcggatcagcaggtcgaggtggcgggccaattcaagcaacattgagatctcaacctccaaattcggttaatggtaaaataagaattaccgatcaaggagaagtaattcaacaaaaatacggatatgagccaatggcaaattataacttatgtagttatataggcgctgttactgaagcaacattaaaccctccagctcatccaaaaaaaaattggagatcattaatcgaaaaaatgtcagatatatctaaaagttcatatagaaaaaatattaatcaaaactctgatttcataaaatattttgaaactgttactccacataaggcattaggaaaactttcaattggctcaagaccctctaaaagaaaaaatgttgataatataaaaagtttaagagcaatcccttgggtttttgcatggacgcagattagattgatgttaccagcttggttaggaagtgctgaagcacttagatatgcttacattaaagaatttagaaaaactttatatgatatggagagaaaatggcccttttttaattcta

SEQ ID NO: 276535 - DNA, 763 bp, Unknown
  Bacterial polypeptide expressing nucleotide sequence isolated from the Sargasso Sea
aaaaaaatccaatttcatcaaaaattttaattttaaaaataaagaaaacaaagaagtttggtcaacatttaaaattttatctgaagagccacctgaatgtttgggggcttatgttatttcaatgacatcatctgcatctgatattctctccgtcttatatttgcaaaaagaagcaaatattaaaaataaattaagagttgtccctttatttgaaacattagacgacttaattaatgcaaaatcaataatggccagcttgttttcattaaagtggtacagagatttaattaaaaataaacaagaagtcatgattggatattcagactcaagcaaagatgctggaaaaatttgtgccagttggcatcaatataaggctcaagaagaaattgttaaaattgcaaaaaaaaacaaaatagatgttaccttttttcatggaagaggtggttcagcgggtagaggtggaggcccaattcaagctactttaaaatctcagccgccaaatacagttaatggaaaaatcagaataaccgatcagggagaagttattcaacagaaatatggatatcaacctttagcaatttataatttatgtagctatataggagcggtaatggaggcaacattaaccccaccgccagtccctaataaagattggagaaatctaatcgaaaaaatgtctgatatttcaaaaagttcatatagaaaaaatattaatcaaagttcagattttattaaatattttaaaacccgttacgccacatgt

SEQ ID NO: 276536 - DNA, 862 bp, Unknown
  Bacterial polypeptide expressing nucleotide sequence isolated from the Sargasso Sea
aataaaacggtaagagggatgattaaaataacagaacaaggagaggtcctatcatataagtatgctgttcctcaatcagcatcttatgaacttgagcttgcggttagtggcttaataaaagcgagccagcatcttgtagtgggtgattcagtatgtactaataatttcgaggagataatgagtcaaatgtcagttactggtgaaaaaaaatacagagatctcactgatgacaaagagggaataatggattacttctatgaagccacacctgtacaggaattagcagagttaaatataggatcacgaccatcgcatagaaaaaagacacaaagatcgaagtattcaattagagcaataccatgggtgtttggttggtcactgtccagacatacacttcctgcatggtatgggctgggaacagctttaaataaaatggtcgaagacagtgatgaaaatattgataaactgaaaagcatgtattctgaatggcctttcttcagagtcctgcttgataatattcaaatggcattagctaaatctgatttaggtatcgcaagagattactcgatgttagttaataataaaaatgctgcgaaagacatcattaatgatatagaaaaggaatttaattctacagtatctactttgcttaagatagtagactcagaggaacttcttacagagaacataaaattatcattatcattaagcagaagacaaccttatcttgacccacttaactatatacaagtgatgctattaaaagctcaccgcgaaattccagatgaagatactgtaaatcttgatccacttttgagaacaattcatgctatagcaactggtatgagaaacactggataag

SEQ ID NO: 276537 - DNA, 917 bp, Unknown
  Bacterial polypeptide expressing nucleotide sequence isolated from the Sargasso Sea
ggcagatgaccatcagaatgtttggggtgcttacgtaatatcaatgacctcagcagcatcagatgttttagaggtttatttaatgcaaatacaggcaaatattaaaaataaattaagagtagttccactttttgaaactttgcaagatttaaaaaatgcaaaatctattatggaaaaacttttttcattaagttggtacagaaaattaatcaaaaacaaacaagaaattatgattggttattcagactccagcaaagatgctggaaaattatctgctagctggcatcaatacaaacttcaagaagaaattttaattatcgcaaaaaaatataaaattgaccttacttttttccatggcagaggcggctcagctgggagaggtggtggcccaattcaagcaacgatgagatcacagcctccaaactcggtatatggtcgtattagaattactgaccaaggtgaaatgatccaacaaaaatatggttatgaacctttagctaaatataatttatgtagctacataggatctgtaatgcaggctactctaaatccgcctccacaacctaaagaaagttggagaaaattgatagaagaaatgacaaaaatttctacatcagcttatagaaaaaatataaatgagaactcagattttataagatattttaaaactgttacaccacacttagcacttggaaaattgtcaataggatcacgaccttctaaaagaaaaaatgtagataatattcaaagtttaagagcaataccttgggtatttgcttggacacaaataagattaatgctgcctgcttggttgggaactggtgatgcattaaaatattcgtcagttaaaaatcacaaaactattcttacagatatggaaaaaaattggccattttttaattctacaatggatattt

SEQ ID NO: 276538 - DNA, 751 bp, Unknown
  Bacterial polypeptide expressing nucleotide sequence isolated from the Sargasso Sea
aacaacgagagctgcttaagcattatccttcgaaaactaaaaattttagacaaaaaactctatgatgaatttacaattatttggaacaccgatgatctcaaaaggtttagacctagcccaactgatgaagccagatggggtctcgcagtaattgaggatagtttgtgggaaacaattccaaaagtttatagaagactaaatgggatttttcttaaaaatatgggaaagaatttaccaaaaaattttaatccaattcaatttggatcttggatgggcggagatagagatggaaatccaaatgtaacctcctctattaccaaagaagtaattttattatcacgatgggaagctgcaaaattatatgaaaaagaattaacgaagctaattagatctttttcaatggagaaatgttctaaaaaaattttaaaagttacaggaaaaacttttgaaccatacagagtattcttaagacctcttagggataaaatgaggttaacgcatagagcaatagaaaatcatcttgtaagacacaaacctctagataaaaaaaaactattatcctcaagagaagaaattttaaaacctttaagggtagtaagagactctcttgaaaaaaaccagaatgaaaatatagcaagtggtgaattacttgacttgatgagaagagctaaatgttttggtataaatcttgctagattagatattagacaggagtcatcaagacactcacaattactttatgagttcatca

SEQ ID NO: 276539 - DNA, 742 bp, Unknown
  Bacterial polypeptide expressing nucleotide sequence isolated from the Sargasso Sea
tccattgagagaagtaagaaattctttaaaattaaataagggagaccatattgcaaatgcagatttactagacttaatgagacgagtaagatgttttggtatcaatcttgctagattagatataagacaagaagcagatcgacatagtaaacttctaaatgaactttttagaaaaaaatataatattaaatacaattctttaagtgaaaaagaaaaaataaaattattaaataaatcaattaaagaaaaaaaatattttgttgatagaataaaaataactgacaaagaaaataaggaagtttggaatacatttaaacagatatcaaaatcccccaacgaatgtttgggtgcttatgttatttcaatgacctctaaagcatctgatattttgtcagtttattttttacaaatacaagcgcaaataaagaattttttaagagttgtaccactttttgaaaccttagatgacttaaaaaatgcaaacattgttatgaaaaatttattcaaactttcttggtatagaaaaatgacaagtgctaaacaagaagtaatgattggatattcagattcaagtaaggacgcaggcaaattatcagctagctggcatcaatacaaacttcaagaagaattaagaggtctagctaaaaaatataagtttgatttgattttcttccatggtagaggaggatctccaggaagaggaggtggtccaattcaggcaacattaaaatctcaaccagct

SEQ ID NO: 276540 - DNA, 819 bp, Unknown
  Bacterial polypeptide expressing nucleotide sequence isolated from the Sargasso Sea
tatggaaactctattttcaaaaaaatggtatagaaacttaattaaaaataaccaagaagttatgataggttactctgattccagcaaagatgctggaaagatatgtgcgagttggcatcaatatacagctcaagaggaaattattaaattagcaaaaaaatatcaaattaatgtaactttttttcacggtagaggtggatcagctggtagaggaggtggtccaattcaggcaactctaagatctcaaccaccaaattcagttaacggaaaaataagaattacagatcaaggtgaagtaattcagcaaaaatatggatatgaaccactcgcaaaatataatttgtgtagctacataggagctgttaccgaggcatctttaaatccaccaccagtgccaaaaaaaaattggagatatttaattgagaaaatgtccaatatatcaaaaaattcttacagaaaaaatatcaatcaaagctctgaatttataaaatattttaaaactgttacgccacatattgcgctcggcaaattatcaataggatcaaggccgtctaaaagaaaaaaaactgataacataaaaagtctaagagccattccatgggtttttgcatggactcaaattaggttaatgttgccagcatggcttggaaccgcagaagcattaagatattcttatataaaaaaattcagaaaaacattatttgatatggaaaaaaattggccttttttcaattccatgcttgatattttagatatggtgatttctaaagtagatccaaatatttcaaaaatatatgaatattatttagctgacgaaag

SEQ ID NO: 276541 - DNA, 643 bp, Unknown
  Bacterial polypeptide expressing nucleotide sequence isolated from the Sargasso Sea
aagtaaattgcagatatctagtaggcctgctagaagaaaaaaaggtgcaaaagatttgtcaagtttaagagctattccatgggtatttggttggacacaaagtagatttcttttgccaagttggtttggagtaggcactgcattgtcatctgaattaaattcagatccacaacaaattgaattattaagagttctacatcaaagatggccattttttaggatgcttatatctaaggttgaaatgacattatcgaaggtggatctagaagttgctagatattatgttgatactcttggcagtgaagaaaataaagattcttttgatgatatttttgaggtaatttctaaagaatataatcttacaaaatctttaatacttgaaattactggtaaaaataagcttctagaatcagatagagacttgaaatcatcagtaagcttgagaaataaaacaattattcccttagggtttttgcaggtttcacttttaagaagattaagagatcagacaagacagcctccaataagtgaattttttatagataaagatgaatttagaagagcttacagcagaagtgaactattgaggggggcacttttaactattaatgggatagcagctggcatgagaaatacaggttga

SEQ ID NO: 276542 - DNA, 859 bp, Unknown
  Bacterial polypeptide expressing nucleotide sequence isolated from the Sargasso Sea
agcggtgtactggacggcgaggtgaagttcaccgaacagggcgaggtcatcgccgacaagtacggccatcctgagatcgctcgtcgcaaccttgatttggcgtttacagccgtgctcgaggcctcgctcgcccacagggctccccggcacgacgaggccaccatcgcccggtggtactcgatcatggacgggattgccaacaacgcgtacgccgcctaccggcgcttcgtcgagacgccaggcttggttgagtacttcaccacctccaccccggtggaggaactgggtgaaatgaacatcggatcgcgcccggcccgccggaagggggcgaccaccggaatcgccgacctgcgagccattccatgggtgttcggatggacgcagtcccgtcagatcatcccggggtggttcggcgccggcagtggcctggcgtcctgccgggcgagcggccacagtgacgaactccgctacatgtacgagaactggagctttttccgaacctacgtctccaacgtcgagatgacgctcaccaagaccgacctgcccatcgctcgccactacgtcgaacgactcgtcgatccgtccctgcaccacctcctcgagtcagtagtggacgagtaccaccgcaccgtggaggagatccaagctgtaaccggcgccgagctcctggccgaaaagcccctgctgcgcagaacactggccgtccgtgacgcctatctggatccacttaacgtgctccaggtggagatgttgcaccgctctcgttccgatgccgcagcaggtcgggcagccgacggggagcttcagcggggcctcctgttgaccatcaacggcatcgctgcgggcatgcgcaacaccg

SEQ ID NO: 276543 - DNA, 366 bp, Unknown
  Bacterial polypeptide expressing nucleotide sequence isolated from the Sargasso Sea
gcgcaactgacggcgctggatcacagcgatctattgccaacagagcgtgaacgcatcgcccagcgtctgcagcggctgatcgccgaggcctggcataccgaggaaattcgccgcagtcggcccagtccggtagatgaggccaagtggggctttgccgtcatcgagcactcgctgtggcaggccgtgccgcagttcctgcgacgtgctgatcagagcctgcaggccgccaccgacttacgtctgccgctggaggctgcgccgattcgcttcgcctcgtggatggggggcgaccgtgacggcaaccccaatgtcactgcgcgtgtaacccgagaggtgttgctgctggcgcgttggatggccgcggat

SEQ ID NO: 276544 - DNA, 778 bp, Unknown
  Bacterial polypeptide expressing nucleotide sequence isolated from the Sargasso Sea
atggaaaaatgttcaaaaaaaatattaaaaactacaggaaaaacattcgagccttatagagtttatctgagacctttaagagataaattaagaaaaacacatagagcaatagaaggttatttaacaagcaataaatcattaaatgaaaaagatttactatcagaaagggaagaaattttaaaaccattgagagtagtaagagagtcattagaacaaaaccaaagtgaaaatatagctagtggtgatttattagatttaatgcgaagagctaagtgttttggaataaatcttgcacgacttgatatcagacaagagtcttcaagacattctcaattattagcagaatacataaagaaaaaactaaaccaaaattattctacttgggatgaggatcaaaaaataaaatatttatcgaataaaatgcaaaacaaaaatgtactaaaaaaatttcaatttacaaataaggaaaacaaagaggtttggtcaacatttaaagtattggcaagtcaacctaaagagtgtttaggagcgtatgtaatctcaatgacatcttcagcatcagatatcttgtcagttatgtttttccaaaaagaagctaacattaagaatagacttagagtagttcctcttttcgaaacacttgatgatcttataaatgcaaaaccaataatggaaaaactcttttcattaaaatggtacagaaaagatattaataataagcaagaaattatgattgggtactctgattcaagtaaagatgctggaaagctctctgcaa

SEQ ID NO: 276545 - DNA, 841 bp, Unknown
  Bacterial polypeptide expressing nucleotide sequence isolated from the Sargasso Sea
agagaaaaaatttcaaaatattttcatagaagaaatatttgaaaatttttttaaaaataaaaagatatctaataataaaatttataatattgccaaaagtctaaatataggaattgtactcacggcacatccaaccgaagtaaaaagaagaactttgatacagaagtaccactctttaacagaaatattagaacaaagaaacttacttaaaaattatccttcaaaattaaaaattttagatcgtaaagtttttgatgaaataacaattatatggaatacagatgaaattaaaagatctaaaccaacccctgcggaagaagcaagatggggacttgcaattatagaagatagcttgtgggatacaattccaaaagtttatagaagattaaatcaaatatttgaaaaaaatatgggcaaaggtttacctaaaaattttaatccaattgagtttggatcgtggatgggtggtgatagagatggcaatccatttgtaactgcagaagttactaaaagagttatcttgttatcgaggtgggaggcagctaaactttatgagaagtcaatgacaaagttaattagatcttattctatggaaaaatgttcaaaaaaaatattaaaaactacaggaaaaacatttgaaccttatagagtttatctaagacctttaagggataaattaagaaaaacacatagagcaatagaaggttacttggcaaacaataaaccattgaatgaaaaagatctactatcagagagagaagaaattttaaaaccattgagagttgtaagagaatcgttagaacaaaaccaaagtgaaaatatagctagtggtgatttatta

SEQ ID NO: 276546 - DNA, 793 bp, Unknown
  Bacterial polypeptide expressing nucleotide sequence isolated from the Sargasso Sea
gtttggtcataatagacttgacgctactccagaatggaatcaattaatgtctttgttggcagaaacatcaaggtctcattacagaaaattagtgcatgagaatcctgatttgttaaatttctttcaagaggtaactccaatagaagaaataagtaaattacagatatctagtaggcctgcaagaagaaaaaaaggtgcaaaggatttatcaagtttaagagctattccatgggtgtttggttggacacaaagtagatttcttttgccaagttggtttggagtcggcactgcattgtcaactgaattaaattctgatcctcaacaaatagaattattaagagttctgcatcaaagatggccattttttaggatgctcatatctaaggtagaaatgacattatctaaggtggatttggaagttgctagatattatgttgatactcttggtagtaaagaaaataaacattcttttgatgatatttttgaagtaatttctaaagaatataatcttacaaaatctttaatacttgaaattactggtaaaaatgtgctcttagaatctgatagagacttgaaatcatcagtaagcttgagaaataagacaattattccattagggtttctgcaagtttcactactaagaagattaagagaccaaacaagacaacccccaataagcgaatttgttatggataaagaagaatctagtagagcttacagcagaagtgaactattgaggggagcacttttaactattaatgggatagcagctggcatgagaaatacaggttga

SEQ ID NO: 276547 - DNA, 840 bp, Unknown
  Bacterial polypeptide expressing nucleotide sequence isolated from the Sargasso Sea
tttcgtatatctaaattagatgattttgtagattatgtaaaacaatttgaatttcatggagttaccttagatattcgtcaaaattcttcaattattaattcaaaaaaaggaaaaatttataaagactttattaatttaattaaagaaattcctgaactgcagcatatttatggccaaaaggtattcaattcaattatcttatccatgactaaatctcatcaagacatgttaaatttatttaatttatgcaattcattgattccagataaaaatattccaacactaacacctttaattgaagaaatagaagatttacaatcatcacatttgatccttaatgaaatccttaaagataaaaaatattataaatttataaagacttttaaaagtaataatcaagaagttatgcttggctactcagactcaaacaaagatggtgggataattgcatcacaatggaatgtttataaagcccaaatttcactatttaatatagctaaaaaaaacaatatcaatattaatttttttcatggtagaggtggcactataagtaggggtggtggtccaacatatgattcaataatgtcccaaccaaaaggaactatttcttctcaaattagatatacagaacaaggagaggttatatctgataagtactctactcgttacttagcttttgaaaatcttaaattaggttccgtagcattcatcaatacttcctcaagcactcttgaatcaaatttgaaatatgaaaatatatttgaagagctgtcacataattcctattcaaaatacagaagtcttgtagataggaataatctcattaactattttgagaat

SEQ ID NO: 276548 - DNA, 164 bp, Unknown
  Bacterial polypeptide expressing nucleotide sequence isolated from the Sargasso Sea
gttaaggaatgtttatactgacccgctgaacgtcttacaggcagaattgttacaccgctcacgccaggccgaagagcaaggccatgaaccggatccacgcgttgaacaagcgctgatggtgactatcgctggtgttgcagccggtatgcgcaatacaggctaac

SEQ ID NO: 276549 - DNA, 898 bp, Unknown
  Bacterial polypeptide expressing nucleotide sequence isolated from the Sargasso Sea
cggtggaccaacatacaacgctatcctcgcgcaacctaataaaacatttcgaggtatgattaaaattacggagcagggtgaggttctctcatacaaatacgcagtacctcagtctgcctcatatgagttagaacttgctgttagcggtcttttaaaagctagccaacatctagtctctgatgatacagcatgcactaataattttgaggagctgatgagtgagatgtctacatcaggtgaaaagaaataccgagatcttacagatgataagcctggaattatggattatttttatgaggcgacaccagtgcaagaattagcagagttaaatattggatcaaggccatctcatagaaaaaaaactcaaagatcaaaatattctatcagggctatcccatgggttttcggttggtctctctcaagacatacattacctgcatggtatggtttagggacagctctaaataaaatggtctctgatgatgcatctaatatgaataagctaaagaatatgtattcagaatggcctttttttcgagttttacttgataacatacaaatggctttagcgaaatcggacctcgggatagccagagattactctttattggttgagaataaagaagccgcgagagaaatcatcaatgatatagaaatcgagtttaaatccacagtttctacacttttaaaaatagtcgattcggatgaacttcttctagaaaataaaaaactgtctttgtcactaagccgaaggcagccatatctagatccactaaattatatccaagtgatgctgttaaaagcacatcgagaaatccctgatgaagatacgataaatcttgatccgctattgaggaccattcatgctattgccacaggcatgagaaacactggataa

SEQ ID NO: 276550 - DNA, 751 bp, Unknown
  Bacterial polypeptide expressing nucleotide sequence isolated from the Sargasso Sea
gaaaaagaactcactaaattaattagatcatattcaatgaaaaagtgttcaaaaaaaattcaaaaacttacaggaaaatcatttgaaccttacagagttttcttaagacctttaagagataaaatgcgatttactcatcgagcaattgaacaatttatagttaacaaaaaacctttagactacaaaaaattgctaaactcaaaagaggaaattttaaaacctcttagaattgtccgtaagtctttagaagaaaatcaaagtaaaaatattgcaagtggtgaattattggatttaatgagaagagcaaaatgttttggaattaatctggcaaaactagatattagacaagaatcatctagacactcaaagttaattaatgaactttttaagaaaaagaataaacttgattatctaaaatggagtgaggaagaaaaaattaaatttttatcatctaagatgaaaaaaaaatccaatttcataaaaaactttaattttaaaaataaagaaaacaaagaagtttggtcaacatttaaaattttatctgaagagccaacagaatgtttaggggcttatgttatttcaatgacatcatctgcatctgatattctttccgttttatatttgcaaaaagaagcaaatattaaaaataaattaagagttgtccctttatttgaaacattagatgacttaattaatgcaaaatcaataatggcaagcttgttttcattaaagtggtacagagatttaataa

SEQ ID NO: 276551 - DNA, 799 bp, Unknown
  Bacterial polypeptide expressing nucleotide sequence isolated from the Sargasso Sea
attcaacaaaaattttggcacagaatctttggcggaatatactctcggaacttatattggttcagttttggaagctactttgtcaccaccgatgaaaccaaaagaaaattggcgcaatttaatgaatgacatgagtgttgttgctagttatgcatatcgttacaatttaagaaaagacaaaaactttttaagatattattatcaagtaacaccccaaaaaatattggaaaatctttttattggttcaagacctgctaaacgtaataaatctcaggatataaaaaatttgcgtgctataccctgggtgttcgcttggacacagattcgtttcattttacctgcttggctaggaacccttgaaggattaaaacttgctgaaagaggtaaaaataataaaatattaaaagatatgttaaataattggccttttttttatgcaatgatggatatgttagacatggtattgacaaaaacagatcaacgtgtaattcaattttatgaagaatgtctagcagatcaagaattgaaaaatataggtgaaaaacttagaaaacaattattatctcttatttatttaaataaaaaattaatcccaacacatattcttgaacagcgtaaatcgtatagagaatcaataagaattagaaatacttatgctgaaacattaaatttattgcaagctgatataatgagaaagttaaataaaagtagtataaaagataaaaatagaaaaatattaaaagatgctatgctgttaactattgcagggatatcagcagctatgaaaaatacaggatag

SEQ ID NO: 276552 - DNA, 919 bp, Unknown
  Bacterial polypeptide expressing nucleotide sequence isolated from the Sargasso Sea
ttacaaaagacttaacgacatattcagaaaaaatttaaataaagatttgccaagggactttaatccaattcaatttggatcatggatgggtggagatagagatggaaaccctaatgtaacagctgaagttacaaagaaagtaatattattttctagatggcaagctgcaaaattgtatgagagagaacttactaaattgatacaagatttatcaatggaagaatgctctaccaagataaaaaaagcaacaggaaacagttatgaaccttatagagtttatttgagaccaattagggacaaggtaagactaactcatcaattaattgaaaatcatttaaataaaaatgtattcttagatgaaaaaaaattgattcaaaataaaaacgaaataactcttccattaagagaagtaagaaactccttaaaagcaaacagaggagagcatattgcaaacgcagacttattagatttaatgagaagagtgaggtgttttggaattaatttagcaagattagatataagacaagaggcagatagacatgaaaaacttttaaatgaaatttttaaaaagaaaaaaaatataaaatattcttctttaaccgaaatagaaaaaataaaattattaaacaaatctataaaagaaaaaaaattttttatcgataaaataaaaataaatgataaagaaaataaagaagtttggaatactttcaaacagttagcaaaaacaccaattgagtgcctaggtgcttatgtaatatcaatgacttcaaaagcatcagatattttatctgtttattttttacaaatgcagacacaaaacaaaaatttattaagagtagtgccactatttgaaactttggatgatttaaaaaatgctaaatggggtaatgacaaatttaatcaaactttcatggtatag

SEQ ID NO: 276553 - DNA, 916 bp, Unknown
  Bacterial polypeptide expressing nucleotide sequence isolated from the Sargasso Sea
agagaagaaattttaaaaccattgagagtagtaagagagtcattagaacaaaaccaaagtgaaaatatagctagtggtgatttattagatttaatgcgaagagctaagtgttttggaataaatcttgcacgacttgatataagacaagagtcttcaagacattctcaattattagcagaatacataaagaaaaaactaaaccaaaattattctacttgggatgaggaccgaaaaataaaatatttatctaataaaatgcaaagcaaaaatgtattaaaaaaatttcaatttaaaaacaaggaaaacaaagaggtttggtccacatttaaggtattggcaagtcaacctaaagagtgtttaggagcgtatgtaatctcaatgacatcttcagcatcagatatcttatcagttatgtttttccaaaaagaagctaaaattaagaatagactaagagtagttcctcttttcgaaactcttgatgatcttataaatgcaaaaccaataatggaaaaacttttttcattaaaatggtacagaaaagatattaataacaagcaagaaattatgattgggtactctgattcaagtaaagatgctggaaagctctctgcaagttggcatcaatttaaattacaggaagaaataattaaactagctaaaaaatataaaatagacgttacattttttcatggcagaggagggtctgcaggaagaggtggtgggcctatacaagcaacattgaggtcgcagccagctggatcggtcaatggtaaaattcgaataaccgaccaaggagaagtaatacagcaaaaatatggttatgagcctttagcaaaatataatctgtgcagttatattggatctgttatggaagctactttaaatccaccaccaaaaccaaaagacagctggagac

SEQ ID NO: 276554 - DNA, 805 bp, Unknown
  Bacterial polypeptide expressing nucleotide sequence isolated from the Sargasso Sea
tgacaaagaaactcttacaaatgtgataaggtctttttctaaatattttgctttagtaaatgttgcagaagaagcatacctccatatacacagaatggataggttaaaaacagggtttgaatcttgggaaggatcctttgatcagactctaaaagagtttaaagaatcagagatagatgttgataacttacaaaaattacttgatacattacattattctcctgttttaactgcacatccaacagaagctaaaagaagaagcaaaatggaggcgatgagaagaatttttaatactattcttgagctccaaaggtataaaggccagtccataataagagatgaaattattgataaactccaagcacaaatattaatattgtggagaacagatgaagtcagattaaaaaaacctaccgtaatagatgaagttgaaaatggtctttattattttagaacatccttatttaaggcaatccctgacgtttataaagatttagaaaaagctataaaaagaatctacaggacagactctgtcaagatacctagttttataaaatttggttcatggataggaggagatagagatggcaatccttttgttacaccagagattaccaaagaggcagtttacatgcatgctgaaacagcgatacatgaatatattagaagagctcagaatttgtctacattattaactcattcagtacagcttacatccccctcaaaggaattcatagagtcttctcagcgtgatttaaagtatttagagggagcgtttgaagactctacacaagaattttgctaa

SEQ ID NO: 276555 - DNA, 670 bp, Unknown
  Bacterial polypeptide expressing nucleotide sequence isolated from the Sargasso Sea
ttcagaggtcactccaatagaagaaataagcaaattacagatatctagtagacctgcgagaagaaaaaaaggtgcaaaagatttgtcaagtttaagagctattccatgggtatttggttggacacaaagtagatttcttttgccaagttggtttggagtaggcactgcattatcatctgaattaagttcagatccgcaacaaattgaattattaagagttattcatcaaagatggccatttttcaggatgcttatatctaaggtagaaatgacattatctaaggtggatttggaagttgctagatattatgttgatactcttggcagtaaggaaaataaaaattcttttgatgatatttttgaagtaatttctaaagaatataatcttacaaaatctttaattcttgaaattactggtaaaaataagctcctcgaatctgataaggacttgaaatcatcagtaagtttgaggaataagactatcatcccattggggtttttgcaggtttcacttttaaggagactaagagaccagacaagacaacccccaataagcgaatttattattgataaagatgaatctagaagagcttacagcagaagtgaactattgaggggagcacttttaactataaatgggattgcagctggcatgagaaatacaggttga

SEQ ID NO: 276556 - DNA, 916 bp, Unknown
  Bacterial polypeptide expressing nucleotide sequence isolated from the Sargasso Sea
atgaataaaaattgcccaaaaaattttaatccaattgaatttggatctgggatgggaggagatagagatggcaatccacatgtcacggcagaagttacgaaagaagtaatacttttatcaaggtgggaagctgcaaaactgtatgaaaaagaactaacaaaattaattagatcttattcgatggcaaaatgctcaaaaaaaataataaaatcgacaggaaaatcatttgaaccttatagagtttatcttagaccattgagagataaaatgagaaatacacacagatctatagaacaacatttaataaataaacaaaacttagataaaaataaacttctaaaatcaaaagaagaaattttacaacctttgagaatagttagagattcgttagaacagaatgatagtattaatattgctaacggagatcttcttgatttaatgagaagagcaaaatgttttggtattaatttagccagattagacatcagacaagagtcatcaagacactctaaaacaatttcagaatttgttaaaaaaaaatataaatcaaactatttagattggaacgaagataaaaaattaaaatttttaatttcaaaaattaaaaaaaaacaaaatattttaaaaaattttaattttaaagttaaagacaataaagaagtttggtcaacttttaaaatattagcggatgaacctagcgaatgtttaggggcctatgttatatctatgacttcttcggcatcggatattttgtctgtttcatttcttcaaaaagaagcaaaaataaaagaaaaactaagagtagttccattatttgaaacattaaatgatctaattaatgcaaaaaaaataatggaaaagcttttttcattaaaatggtatcgaaaatttataaattataagcaagaaaaattat

SEQ ID NO: 276557 - DNA, 672 bp, Unknown
  Bacterial polypeptide expressing nucleotide sequence isolated from the Sargasso Sea
aatggaaaaatgttctaaaaaaattcaaaagaaggtaggtaaatcatacgagccttatagagtttttttaagacctcttagagacaaaatgaggataactcatagatctattgagcaacatttagtcaataaaaaacctttagataaaaataaattactaagttcaagagaagaaatattaaaacctttaagaatagtaagagagtctttggagcaaaaccaaaatgaaaatatagcgagtggcgaattgttagatttgatgagaagagcaaaatgttttggtatcaatttggcaagacttgatattagacaagaatcttcacgacatagtcaattaatttctgaatttataaaaaaaagatataaaaaaaattaccttaaaatgagtgaaaaagaaaaaattcaatttttaaaaacgttaatactttctaaaaaaaatcaaataaataaatttaaatttaagaataaagaaaacaaagaagtttggtcaacatttaaaattttagctaatgaaccagcagaatgtttgggtgcttatgttatttcaatgacaacctcagcatctgatattttatcagtttcttttttacaaaaagaagcacaaattaaaaataagttaagagttgttcccttatttgaaactttagatgatttgattaatgctaaagaaat

SEQ ID NO: 276558 - DNA, 1417 bp, Unknown
  Bacterial polypeptide expressing nucleotide sequence isolated from the Sargasso Sea
ataaagaaaaagcttaaccaaaattatttatcatggaatgaggatagaaaaataaagtatttatctacaaaaatgcggagcaaaaatttattaaaaaattttaaatttaaaaataaagagaataaagaagtatggtccacttttaaagtattggcaactcaacctaaagagtgtcttggggcatatgtaatatcaatgacatcctcagcctcagatattttatcagttatgttttttcaaaaggaagcaaacattgaaaatagactaagagtagtccctttgtttgaaaccttggatgatttaataaacgcaaaaccaataatggaaaaacttttttcattaaaatggtatagaaaagatattaatcataaacaggaaatcatgattggatattcagactccagtaaagatgccggaaagctttctgcgagttggcaccaatataaattacaacaagaaataattgaactagctaaaaaatataaaatagacataacattctttcatggtagaggagggtctgccggaagaggtggtggaccaatacaagctacattgagatcacagccagcaggttcagtgaatggtaaaattaggattacagatcaaggagaagtaatacaacaaaaatatggttatgagcctctggcaaaatataatttatgtagttacattgggtctgttatggaagctactttaaatccacctccaaagccaaaagatagctgggtaaaattaattcaaagtatgtcagaaatatcaacaagctcttatagaaaaaatataaaccaaagttcagatttcattagatattttaaaactgtaaccccacatatggcacttggcaaactatcaataggttctagaccttcaaaaagaaaaaatgttgataatataaatagtttgagagctatcccttgggtatttgcctggacgcagattagattaatgttaccggcatggttaggtactgcagaagctttgagatattcatcaattaaaaaatttaaaaagacacttatagatatggaaaaaaactggccatattttaattccacaatggacttgcttgatacggtactttcaaaagtagaccctgagatatctaaaatttatgaaaaaaatttagctgacgataaacttgtaagagttggaaaaaaattaaggtttcaatttgaagcagttaaaaaattaaatgatcaaataacacctaaagaaatttataaacaaagaaaaagttttagaggtccagcaattattagaaatatatattccgaaatccttaatgttttacaagcagtagtaatgaataagcttttgcaaaaaaatttaaacaagaaggataaaaaaaacttgaatgacgcaatgatggcatcaattgcaggtatttcagcagctatcaaaaatacaggataat

SEQ ID NO: 276559 - DNA, 2134 bp, Unknown
  Bacterial polypeptide expressing nucleotide sequence isolated from the Sargasso Sea
aatgataaaaagagatctctattacgaacgtatacccacaaaatctttaagagatgacgttagatacttaggaaatattttagggagagtaataaaaaaacaggaaggagaaagtttttttaatttagtagaaagaataaggttgttatcaaaagcaaatattaagaataaaaataacaaaaatagatttaataaaattacttcagaaattcaaagacttaagccaattaaaatatttaaattggcaagagcatttaatcattttatgaattttattaatcttagtgaatcgatagatgcctccagaaaattagatgaatttgaaaattctgatttaaaagataaacataagaatatttttatcgaggaaatttttgaaaagctttttaaaaataaaaaaattaagtctcaaaaaatttataatattgcaaaaaatcttcatattggaatagttcttacggctcatccaaccgaagttaaaagaagaactttaattcaaaaataccataaaataactgagataatggatcaaagaaatcttttaaaagacaaaccatcacgattaaaaatcttagataagaaactttatgatgagtttacaattatttggaatactgatgatttaaaaagatttaaaccaactcctgctgaggaagcaaggtggggattagcagtaattgaagatagtctttgggaaacaattccaaaagtttatagaagattaaacgatattttcgtaaaacatatgggaaaaggtttgcctaaaaattttaatccgattgaatttggatcttggatggggggagatagagatggtaatccaaatgtaactgcatctatcaccaaagaagtaatacttttatcaagatgggaagcagcaaaactttatgagaaagaattaacaaaattaattagaggactttcaatggaaaaatgttcaaaaaaaattctaaaaactactggaaaaacttttgaaccttatagagtttatttaaggccattaagagatcaaatgagaaaaacacatagattaatagaaagacatttagtagcaaaaaaaccattagaccaaaaaaaacttttatcttctaaagaagaaattcttaaacctttaagagttgtgcgagaatcattagaacaaaaccaaagtgaaaatattgcaagtagtgacttacttgatttaatgagacgagctaagtgtttcggtataaatttagcgaaattagatattagacaagagtcattaagacattcacagctattagcagaatatgtaaagaaaaaaaataattctaattatttaaattgggatgaaaataaaaaaattaaatatttgataaatgaaatgaagaaaaatagaaaaagtttcaaaaactttaattttaaaaataaagaaaatagcgaagtttggtcaacttttaaaattttagctgatgaaccatcagaatgtttaggcgcttatgtaatatcaatgacttcagcagcctcagatgtattagaagtttatctaatgcaaatgcaagcaaatattaaaaataaattacgagtagttccactttttgaaactttgcaagatttaaaaaatgcaaaatttattatggaaaaacttttttcattaagttggtacagaaaattaatcaaaaacaaacaagaaattatgattggttattctgattcaagcaaagatgctggaaaattatctgcaagctggcatcaatacaaacttcaagaagaagttttaattatcgcaaaaaaatataaaattgatcttacttttttccatggtagaggtggatcagctggaagaggtggggggccaattcaagcaacgatgagatctcaacccccaaattctgtatatggtcgtattagaattactgaccaaggagaaatgatccaacaaaaatatggttatgaacctttagcaaaatataatttatgtagttatataggatctgtaatgcaggctactttaaatccacccccacatcccaaagatagttggagaaaattaatagaagaaatgacaaaaatttctactttagcttatagaaaaaacataaacgaaaattcagattttataagatattttaaaactgttacacctcacttagctcttgggaattatcaatag

SEQ ID NO: 276560 - DNA, 1798 bp, Unknown
  Bacterial polypeptide expressing nucleotide sequence isolated from the Sargasso Sea
aatgataaaaagagacctctattacgaacgtatacctacgaaatctttaagagatgacgtcagatacttgggaaatattttagggagagtaataaaaaagcaggagggagaaagtttttttaatttagtagagagaataagattgctatcaaaagcaaacattaaaaataaaaataacaaaaatagatttaataaaattacttcagaaattcaaagacttaaaccaattaaaatatttaaattagcaagagcatttaatcattttatgaattttattaatcttagtgagtctatagatgcctctagaaaactagatgaatttgaaaattctgacctgaaagacaaacataaaaatatttttattgaagaaattttcgaaaatctttttaaaaacaaaaaaattaaaccccaaaaaatttacaatattgcaaaaaatcttcatattggaatagttcttaccgctcatccaactgaagttaaaagaagaactttaatacaaaaataccataaaataactgagataatggatcaaagaaatcttttgaaagacaaaccatcgcgattaaaaattttagataaaaaactttatgatgaatttacaattatttggaatactgatgatttaaaaaggtttaagccaactcctgctgaggaagcaaggtggggattagcagtaatcgaagacagtctttgggaaacaattccaaaagtttatagaagattaaacgccatttttgttaaacatatgggcagagatttgcctaaaaattttaacccaattgaatttggatcttggatgggaggagatagagatggaaatccaaatgtaacagcatccattactaaagaagtaatacttttatcaagatgggaagcagcaaaactttatgagaaagaattaacaaaattaattagaggactttcaatggaaaaatgttcaaaaaaaattctaaaagctactggaaaaacttttgaaccctatagagtttatttaagaccgttaagagatgaaatgagaaaaacacatagattaatagaaagacatttagtagcaaaaaaaccattagacaaaaaaaaacttttaacctccaaagaggaaattctaaaacctttaagagttgtaagagagtcattagaacaaaatcaaagtgaaaatattgcaagtggtgatttgctcgatttaatgagacgcgctaaatgctttggcattaatctagcaaaattagacataagacaagagtcatcaagacattctcagctactagcagaatatataaagaaaaaaaataaatctaattatctaaattgggatgaaaataaaaaaattaaatatttgataaatgaaatgaaaaaaaatagaaaaagtttcaaaaattttaattttaaaaaaaaagaaaataaagaagtttggtcaacatttaaaattttagctgatgagccatcagaatgtttaggtgcttatgtaatatcaatgacttcagcagcttcagatatcttagaagtttatttaatgcaaatgcaagcaaatattaaaagcaaattaagagtagtcccactttttgaaactttgcaagatttaaaaaatgcaaaatcgattatggaaaaacttttttcattaaattggtacagaaaattaattaaaaacaaacaagaaattatgattggttattcagattccagcaaagatgctggaaaattatctgctagctggcatcagtacaaactccaagaagaagttttgactatagcaaaaaaatataaaatagaaattacttttttccatggtagaggtggttca

SEQ ID NO: 276561 - DNA, 1513 bp, Unknown
  Bacterial polypeptide expressing nucleotide sequence isolated from the Sargasso Sea
gatgcagaaagaatctaaaataaaaccagaattcagcactttatcaaaaactattaatattcttggaagtgaattaggaaacgtaattaaacaacaggctggtaaaagtaagtatgaattagttgaagaaataagaataaattcaaagaaatatagatcatcaaaaaattctaaatttttaaatttaatttatgaaaggttaaaaactttagatgaaaatgagcttttaatcctaaccaaatccttcacattatttttttatctttcgaatatttcagagcaagtatttagagaaaaatttgagtatgaaattgataaaaatgatttggataaaaataaggaaagcctcacattctcaccagtctttaccgcacaccctactgagagtgcaagacaatcaactttaaaaaagctttataaaattggaaatatcatttctgaaaataaatcaagtgatttagatgaaataaataatttaataacgcaactttggtacaccagagaaattaggtcaactaaacccaatcctattgatgaggtaaaaactcttttatattatctaaacaatctgtatacagatgtttacgatgaaattaacaagacattcactgaaaacaatatagttcaaaaagacataataaggttgggtacttggataggtggagatagagacggaaacccatttgttacattgaaagttactgaagaagctttaaaaatttattcaaatcaaattattcaaatttataaagaaaaaattataaatttatcagagagttttagtatctcaactttatatgcagatgagcctcaattacttaagtcaaagattaaagaatattcaaacgtattaaataaagaatatcgtcactataccaaaataaattttgatgagccatttagaatatttctttcgctagtttttcatagacttgacaattttcagaagaataaaaagggatacaatacttttagtgaatttcaggatgatctaaatttatttgagacagaagttaataaatgttttaagaataattctccatctttagatttaagaacttttattgattatgtaaatcaattcaaatttcatggtgttgaaatggatataagagaaaatgcagatgtcctgagatataaagataatttcaaaaaagaatattccgaatttaccactcttattaaacggatacctgaatggaaaaaaatatatggtgacactgtaataagttcaataattttatcaatgactaaaaacgaaaatgatatgttaaatttattcaaattttgtaagaaattaattaaaaataaatctgatattccgatgctcgtccctttatttgaagaaattgatgatctagaagaatctcataatataatttcaaatctttttgataataaagaatacaaaaaacatttaataaatttcaacaacagtcaagaaataatgcttggttactcagattcaaataaggatggtggaattgtgtcttcgctaatggtcagtatataa

SEQ ID NO: 276562 - DNA, 1320 bp, Unknown
  Bacterial polypeptide expressing nucleotide sequence isolated from the Sargasso Sea
gttttttcatttagttgaaaaagtcagaaaattatcaaaagcaaataaagcaaatccaaattctaaaaaatcaaattctaatgtaattaacgctataaaaaagcttgatcccaaaaatacttttaaattaactcgagcattttcacattttatgaattttatgaatttagctgagttggttgatgcctctagaagtataaatgaaaatgaaaataataaaaaaaaattaggtaaaaaaaatttatttatagaggaaatatttgaagacttgttcagaaaaaaaaatattttagataataaaatttatgatttagcaaaaaatcttaatataggtattgtattaacagctcatcctactgaagtaaaaagaagaactttaattcaaaaatatcataaaattatagagatacttgaggagcgtgagctatttaaaaattttccctcaaaattaaaagttctcaataaaaatctttatgatgagttgacaattatttggaatacggatgatctaaaaagatttaaaccatcaccattcgatgaggctagatggggattggctatcatagaagatagtttgtggaatactgttccaaaagtttacagaaaattaaattctatatttgtaaaaaatatgggtaaaaatttaccaaaaaatttcaatccaattgtatttggttcatggatgggtggtgatcgcgatggtaatccaaatgttacctctgatgttacaagaaaagtaattttactatcaagatgggaagcagctaaattatatgaaaaagctctcactaaaataataagatcctattctatggaaaaggcttcaaaaaagatcttaagtaaagttggaaaatcatttgagccttatagagtttttttaagacctttgagagatagaatgagaattactcatagatccattgaacaacatctagttcataataagccattagatcaaaaaaaattattgagttctaaagaagagattctcaaacccttgagagttgtaagagaatctttggagcaaaaccaaaatgagaatattgcaagtggtgaattgttggatttaatgaggcgagctaaatgttttgggattaatttagcaagactagatatcagacaagaatcttcaagacataaacaattgatatctgagtttgtaaagacgaagtataaaaaagattattcaaattttgtcgagaaagaaaaattaaattttttaaagaaatttataacgtctaaatcaaataaaattggaaattttcaatttaagaatagagaaaataaggaagtttgggccacttttaatactttatcaaa

SEQ ID NO: 276563 - DNA, 904 bp, Unknown
  Bacterial polypeptide expressing nucleotide sequence isolated from the Sargasso Sea
agtaggtcggggagggggaccaacgcataatgccatactttctcaaccaccgggaacagttaatggaaagatcaaaattactgaacaaggcgaggttctatcatttaagtacggaaacatgcaaacttcatgctatgagattgagatggcaattagtggattacttaaagctagcacaagtttaatcggcatagagaaagaatacgattctacttatgaagatttaatggaccaattatcaaatctaggagaaggttcttatagaaacttaacggaggatactgatggtattatggattatttttatgagggaacaccaatacaagaattaagtaaactgaatattggttctagacctgctcatagatcaggtgcaagatcaaaatactcaattagagcaatcccatgggtatttggctggtctctttcaaggcataccttgccagcttggtatgggctaggcacggcaattagtagcattacaaatgaaagcgaaaaattagatacattaaaaaatatgtatcaagaatggccttattttagaagtctttttgataatattcaaatggctttatctaaagctgatttagtagtttctaaggactacgctgatttagtaaaaaataaaaaacaatcttcagtaatatataaaaaaatatttgatgaatatcagttgagtattgagtcacttctcaaagtgactgaaaaccaggatcttctcaaagacaacgaaaagcttgctttatctatataccgtaggaaaccgtatttagatcctcttaattatatacaagtgatgttattagaaaaaaataggcttggggcagaacataatgaaaaattatttaatccacttataagaacaattcatgcaatttctacaggattaaagaataccggttag

SEQ ID NO: 276564 - DNA, 922 bp, Unknown
  Bacterial polypeptide expressing nucleotide sequence isolated from the Sargasso Sea
atgacaaaaacggtgaacgatatattaggtgtttattttttggcaaaaattactggtattttttccggtgaaaatgagaaagaattttcgcgtttatctattgttcctctattcgaaactattgaggatttaagatctgcgccaaagatagttcaagagttattagcggtaccaattatcagtaaaacaattaaacaaaaaactggtattcaggaaattatgattggttattctgattcaaataaagatggtggttattttactgctaattgggagttgaatagagcacaagcaagcctaaccagggttggtaatgaagctggtattccagtttctttttttcatggacgcggtggatctgtgagtcgcggtggtgcgccaactggcattgctgttgcagcacagcctgccggttctgttcacggacaaatgcgaattacagagcaaggcgaggtagtttcatcaaaatatgcaaacgaggggacagcgcagtaccaaatggagctactttcggccagtgtgtttcaacataccctaagatcacttgatgaagagcaattaaagcctaatttagattttgataaagcgatggaatcattatccagactagcatttaaaaaatatcgagaactcgccgaatcaaatggtttggttgattattacagtgccgccagtccagttgaagaacttgctaaaatgaatattggatctagacctgctagaagaactggcacaaagtcacttgatgatttaagagctattccttgggtttttgcgtggactcaaaataggcatcttgtacctggatggtatggtgttgggagtgcaataaaagaatttacagatgaacatggcaatcagggcagaaaattaataaaaatagatgtttgccgaatcacgcttatttcgtttagttgttgat

SEQ ID NO: 276565 - DNA, 1636 bp, Unknown
  Bacterial polypeptide expressing nucleotide sequence isolated from the Sargasso Sea
taaaaaaagttttatagatagataccaaactgagccaataagattaaagatactctatattaaagaaaagcttattgggtatgaacgacatattaattcggaagaaaatccaaagtattcatctaagcttttcatagaagatttaaatataatttttcaacatttagtaaaagttgttaaaaatgagtctttggcaaaaggacatttaaagaaattaatttttagatctaaaatatttggtttacacctttttgagatggatatacgtcaacattcagacgttcattgtaaggttgtttcagaaactatttcaaatataaatccaaatgttgattatttacatttgagtgagtcagacaaatgttccctattgaaaaaattcatacgttcagaacaggatgtattcaagatcaacaactttaaatgttcaaaacttctgcttgaggtttttgaaacgtttaaaacaattaaagaactattagaaattgataagaaattaatatcctcctacatcattagtatgacccactcaaaaagtgatgttttagaagttttatttctcgggaaattatttggtcttgtatcttgtaacgaaggtctattaataacagatttaaatatcgtaccactttatgaaaccataccagacttggaatccgctcctgaattattgtctgacctttttcaagatgagctttatgattcgtatcttaataacaaaaatcgattccaggaaattatgttgggatattctgacagtaataaagatggtggctttgggatggcaaacttttccctaaataattgtcaaataaaaatcagtgaattaatgagggagaatgagatcgattttaggatttttcacggaagaggaggctctatcagtagaggcggaggtaagagcaataaagcgatacttagccttcctgatgaatgtcaaaatggaaaaataagattcactgaacaaggagaagttgttaattacagatatggatcatcgcaaattgccaaaagacacttagaacaaattgtaagcgctcaattaattactttagagaaatcaaaaaaagataacgagcagtcatcatataattatattgatcaaattatgtttgattctcagctgaattataaagaaaaaattttgggtgatccttgttggcaatttttattgaatgctaccccaatgaaacagataagtaaaatcccaattacctctagacctgcatcaaggaaaaagataaaagatagtgttatagggtttgatgagttaagagctataccctgggttttttcttggacgcaagtaagatataatttgagcggatggtttgggatggggatagctctaagtcgcgcgttaaaaaatccggcaagtaaaaaacaacttaaagcaatgtcaaaaaaatcaaagttttttggtcagcttcttgataatatgtcttttgaaatggctagggcgagattagatgtttcgggcttatatgcaaaaacgaaaaatgaaaaaaactttcacaaggtaatagaaggtgaattttcattagcattaaatgcttataaaactatttcgggttacgattatttgctggaaagaaacagtataatctcaaactccattgattcaggaatcctttga

SEQ ID NO: 276566 - DNA, 1377 bp, Unknown
  Bacterial polypeptide expressing nucleotide sequence isolated from the Sargasso Sea
ggatgggcggagacagagatggaaatccaaatgtaactgcagaagtaaccaagaaagtaattttattttctagatggcaagctgcaaaattatatgagaaagaacttactaaattaatacaagatttatcaatggaagaatgctcaacaaaaattaaaagagcaacaggaaacagttacgaaccttatagagtttatttgagaccaatcagagacaaggtaagactaacccatcaattaattgaaaatcatttaaataaaaatgtacctttagatgaaaaaaaattaattcaaaataaaaacgaaataactcttccattaagagaagtaagaaactcattaaaagtaaatagaggagagcatattgcaaacgcagacttattagatttaatgagaagagtgaggtgttttggaattaatttagcaagattagatataagacaagaggcagatagacatgaaaaacttttaaacgaaatttttaaaaagaaaaaaaatgtaaaatattcttctttaactgaattagaaaaaataaaattattaaataaatctataaaagaaaaaaaatcttttgtagataaaataaaattaaaagataaagaaaataaagaagtttggaatactttcaaacagattgcaaaaacaccaattgaatgtttaggcgcatatgtaatatcaatgacttcaacagcatctgatatcttatctgtttattttttacaaatgcaggcacaaaacaaaaatttattaagagttgtgccactttttgaaactttggatgatctaaaaaatgctaacagtgtcatgacaaatttattcaaacttccatggtacagaaaaatgattaagtcaaaacaggaagtgatgattggatactcggactcgagtaaagatgctggaaaattatctgcaagttggcatcaatacaaacttcaagaggagcttagaaatttagcaaaaaaatataagatagatcttgttttcttccacggtagaggcggatctccaggaagaggaggtggtccaattcaggctactttaaaatcacaaccttcaggaacagttaatggaaaaattagaattactgatcaaggtgaagtaattcaacaaaagtacggttataaacctttagccgagtataatttgtgtagttatataggttctgtaatggatgcttctttaaatcctccaccaagatcaaaaactaattggcgtgaattaattcaaaaaatgtctgaaatttctacatcttcatatagaaaatatctaaatcaaagtgaggattttattcgttactttaaaacggttacgccacataaatcacttggtaagcttgctattggatcaagaccaaccaaaaggaaaaaatgtcgataat

SEQ ID NO: 276567 - DNA, 1052 bp, Unknown
  Bacterial polypeptide expressing nucleotide sequence isolated from the Sargasso Sea
catggaggccgatggcgcgaccacggccacccctgacagggtacgcccagcgcgaaacctcaaggaaatcagcgatacggaacaatcggcatccatggagacggagtctgagggtgttcgcctgcggactcacatccgcatgctcggggatctcctcggccagacgctagccaggcaggagggcggcaccctgctggagatggtcgagtccgtgcgattggccgtccgcagcaaccctgccgtagctgccacagttcttgattccgtagacgtcgccacggcaacgacgttggcccgttcgttctcgatttacttcgatttggccaatgtggcggagcaggttgagcgcgctcacgacgcgcaagccgatcgacgcgtgcattccggtccgcttcatcgcgtagtcgacgcggcacgagaagccaacctcgaccccgtcttggtcgggcagatggcatcagcaatgtcggtcagacccgtcttcaccgcccacccgacagaggccgctcggcgctcggttctcgtcaaactacgtcggatcgccgatgtgcttctcgatcaagggctgtcggatcgcgaacgcgagcgtcggctggctcaggtgatcgatctgctctggcaaaccgatgaactccgactcgagcagccgcaggttcttgatgaagcacgcaacgccctgtactacctcgacgacctcacccgaggaccgctcgcgcaggttctcgaggaccttgctgattcatttcgagatctcgaagtagaactgcctcccgacgcgcgtccggtcagcttcgggtcgtggatcggaggcgatcgagacggcaaccccttcgtcacacccgatgtgacagccgatgtggtccgcttccaacgtgatcacgcagtactgaacttgatgccacacatcgatcgcttgctggaagacctgtctatctccgaacgcattgccggcgccagcgacaagcttcgcgactctgtcgaatcagatttgcgctttcttcccgatctcgatccacgcttcttgcggatcaatgctgaagagccggttcgac

SEQ ID NO: 276568 - DNA, 1210 bp, Unknown
  Bacterial polypeptide expressing nucleotide sequence isolated from the Sargasso Sea
aaattatatgaaaaaagtttaactaaactaataagatctttatctatggaaaaatgttcaaatacaattattagaaaaacaggaaaaacatacgaaccgtatagagtatttttaagaccactcagaaataaaatgagggttactcatagattgatagaacagcacttagttagaaaaaaaccattggatcagtcaaaattattatcttcaaaagaagaaatattaaaaccattaaggttagtaagagaatctttagaaaaaaatcaaagtaaaaatattgctagtggggacctattagatttgatgagacgtacaaaatgttttggaattaatttagcaaagttagatattagacaagagtctaaaagacattctcaattaatttatgagttagttaaaaaaaaatataaatcaaattattatttatggagtgaagaaaaaaaaataaattttttatcatctaaaataaaaaataaaaaaaatttaataaataatttcttatttagaaatacagaaaataaagaagtgtggtcaacctttaaaactctagctgaacaacctaaagaatgtttaggtgcatatgtaatttccatgacttcatcagcctctgatattttatctgttctatttctccaaaaagaagcaaatatcaaaaataagttaagagtagttccactttttgaaacattagatgatctaattaatgctaaagcaataatgcaaaaaattttttctttaaaatggtacaaaaaattaattaattttaatcaagaaataatgattggttattcagattcaagtaaagatgcaggtaaactttctgctagttggcaccaatataaattgcaagaagaaattataaatttagcaaaaaaatataaaattgataacaccttttttcatggaagaggcggttcagctggccgcggaggaggaccaatccaggcaactttaagatcacaaccacccaattctgtaaatggaaaaattagaattactgaccaaggagaagttatccagcaaaagtacggatatgagccattggcaaaatataatctttgcagctatataggtgctgtagtggaagcaactttaaatcctcccccaaaaccaaaagataaatggagaaaattaattgagataatgagcaacatttccacagactcatatagaaaaaatataaatgaaaattcagattttattagatatt

SEQ ID NO: 276569 - DNA, 1168 bp, Unknown
  Bacterial polypeptide expressing nucleotide sequence isolated from the Sargasso Sea
ggcatcaaagatactttgagagttgttcctctattcgaaactttagaagatttaataaatgcaaaacctataatgcaaaaattgttttctcttaattggtatcgtaaatcaattaaaaataagcaagaaattatgattggttattctgactctagtaaagatgctggaaaattatctgcaagttggcaccaatataagttgcaagaagaaattataaaattagcaaaaaaatataaaattgatattactttttttcacggaaggggaggttcagcaggaagaggaggaggtccaattcaagctacattaagatcccaaccgcctaattctgtaaacggtaaaattagaattactgatcaaggagaagtaatacaacaaaaatatggatatgaacctttggcaaaatacaatctttgcagttatataggagccgttatgcaagctactttatctccgcctccaattccaaaaaaagaatggagagatttaattgaaaaaatgtcagaaatttcaacaaaatcttatagaaaaaatataaatgaaagttcagattttataagatattttaaaactgtaactcctcatgtttctttaggaaaactttctataggatccaggccatcaaaaagaaaaaatgtagataacattcaaagtttgagagcaattccttgggtatttgcttggacccaaattagattaatgttaccagcgtggcttgggagtgcggaagcactaaaatattcttcagcaggcaagttaaataaaattttggttgaaatggaaaaaaattggccattctttaattcaaatatggatatattagatatggttatatcaaaagcagatcctgaaatttcaaaaatttatgaggaaaatttggctgatagtaaattaaaaagtgttggaaaaaatttaagatttcagtttcatgtcattaaaaaattaaataaacaaattacaccaaaagaaattattaaggctagaaaagaatttagaacatcggtaatcgtaagaaatatatattcagaagtactgaatattattcaagcagctacaatgaataaactttctcaaaataagtacaataaacaaggaaaaaaatatcttaatgatgcattaatgacctcaatagctggaatttcagctgcaatgaaaaatacaggttaga

SEQ ID NO: 276570 - DNA, 1528 bp, Unknown
  Bacterial polypeptide expressing nucleotide sequence isolated from the Sargasso Sea
caaaccatcacgattaaaaattttagataaaaaactttatgatgaatttacaattatttggaatactgatgatttaaaaagatttaaaccaactcctactgaggaagcaaggtggggattagcagtaattgaagacagtctttgggaaacaattccaaaagtttatagaagattaaacaccattttcgttaaacatatgggtagaggtttacctaaaaattttaacccaattgaatttggatcttggatgggaggagatagagacggcaatccaaatgtaacagcagccattacaaaggaagtaatacttttatcaagatgggaagcagcaaaactttatgagaaagaattaacaaaattaattagaggactttcaatggaaaaatgttcaaaaaaaattctaaaagccactggaaaaacttttgaaccttatagagtttatttaagaccattaagagatcaagtaagaaagacacatagattaatagaaagacatttagtagcaaaaaaaccattagatcaaaaaaaacttttatcttctaaagaggaaattctaaaacctttaagagtcgtacgagagtcgttagaacaaaaccaaagtgaaaatattgcgagtagtgatttgcttgacttaatgagaagagctaaatgttttggtataaatctagcaaaattagacataagacaagaatcatcaagacattcacagctattagcagaatatgttaagaaaaaaaataattcaaattatttaaattgggatgaaaataaaaaaattaaatatttaataaataaaatgaagaaaaatagaaaaagtttcaaaaattttaattttaaaaataaagaaaataatgaagtttggtcaacttttaaaattttagctgatgaaccttcagaatgtttaggagcttatgtaatttcaatgacttcggcagcatctgatgttttggaagtttatttaatgcaaatgcaggcaaatattaaaagtaaattaagagtagttccactttttgaaactttgcaagatttaaaaaatgcaaaatctattatggaaaaacttttttcattaggttggtatagaaaattaatcaaaaacaaacaagaaattatgattggttattctgattcaagtaaagatgctggaaaattatctgctagttggcatcaatacaaacttcaagaagaaattttaattattgcaaaaaaatacaaaattgatcttacttttttccatggcaggggtggttcagcaggaagaggtggtggcccaattcaggcaacgatgagatcacaacctccaaattctgtttatggtcgtattagaattactgatcaaggagagatgatccaacaaaaatatggttatgaacctttagctaaatataatttatgtagttacataggatctgtaatgcaggctactctaaacccgcccccacaacctaaggaaagttggagaaaattaatagaagaaatgacaaaaatttctacattagcttatagaaaaaatataaatgagaactcagga

SEQ ID NO: 276571 - DNA, 1261 bp, Unknown
  Bacterial polypeptide expressing nucleotide sequence isolated from the Sargasso Sea
atgaaaaaaaaagatctttattatgaaagaattcccacaaaacttctaagggaagatgttagatatttgggtaatatacttggaaaagtaattaagtctcaagagagtgaaaagtttttcattttagtagaaaaaattcgaaaattatcaaaagcgaataaaaaaaacccaaatgaaaaaaagttaaataataaagtattaaaggccataaaaagtcttgatcctaaaaatacatttaagcttacaagagcattttcccattttatgaattttatgaatttagctgaattagttgatgcctctagaagtttaaatgaatacgaaaacaataaaaaaaaaataagtaaaaaaaatttatttattgaggaaatttttgaggatttatttaaaaaaaaaaatatttcaaataataaaatttacgatttagctaaaaacttaaatataggtatagttttgaccgctcatccaacagaagtcaaaagaagaactttaattcaaaaatatcacaaaataatagagatacttgaacaaagagagttgctaaagaattttccttcaaaattaaaacttttaaataaacaactttttgatgaattaacaattatttggaacacagatgatttaaaaagaacaaaaccatctccttttgatgaagcaagatggggtcttgcaattatagaagatagcttatgggatactgttccaaaagtttatagaaaattaaattctatattcgtaaaaaatatgaacaagaatttacctaaaaattttaatccaatagtatttggttcatggatgggaggggatcgagacggaaatccaaatgtgactgctgaggtaacaagaaaagtaattttattatctagatgggaagcagcaaaattatatgaaaaagccttaaccaaaataataagatcctattctatggaaaagtgttctaaaaaaattttgaataaagttggaaattcatttgaaccctacagagtttttttaagacctctaagagataaaatgcgaataactcataggctgatagaacaacacctagttcaaaaaaaaccattggatcaaaaaaagttattgagctctcgagaggaaatacttagaccacttagggttgtaagagaatctttagaggaaaatcaaaatgaaaatattgctagcggggatttgttagatttaatgaggcgagctaaatgttttggaattaaccttgcaagattagacataagacaagagtcatcaagacataagcaattaa

SEQ ID NO: 276572 - DNA, 1885 bp, Unknown
  Bacterial polypeptide expressing nucleotide sequence isolated from the Sargasso Sea
ttgcgggacgatgttagatacttgggaaatattttagggagagtaataaaaaaacaagagggagaaagtttttttaacttagtagagagaataaggttgttatcaaaagcaaatattaaaaataaaaataataaaaaaagatttaataaaattacttcagaaattcaaagactaaaaccaattaaaatatttaaattagcaagagcatttaatcattttatgaattttattaatcttagtgaatccatagatgcctctagaaaattagatgaattcgaaaattctaatttgaaagataagcacaataatattttcattgaggaaatttttgaaaagctttttaaaaacaaaaaaattaaacctcaaaaaatttataatattgcaaaaaatcttcaaattggaatagttcttacagctcatccaactgaagttaaaagaagaactttaatacaaaaataccataaaataaccgagataatggatcaaagaaatcttttgaaggacaaaccatcaagattaaaaattttagataaaaaactttatgatgagtttacaattatttggaatactgatgatttaaaaagatttaaaccgacaccttctgaggaagcaaggtggggattagcagtaattgaagacagcctttgggaaacaattccaaaagtttatagaagattaaatgctatttttgtaaaacatatgggaaaaggtttgcctaaaaattttaatccaattgaatttggatcttggatgggaggagatagagatggcaatccaaatgtaacagcaactatcaccaaagaagtaatacttttatcaagatgggaagcagcaaaactttatgaaaaagaattaacaaaattaattagaggactttcaatggaaaaatgttcaaaaagaattctaaaaactactggaaaaacttttgaaccttatagagtttatttaagaccattaagagatcaaataagaaagacgcatagattaatagaaagacatttagtagcaaaaaaaccattagagcaaaaaaaacttttatcttctaaagaggaaattctaaaacctttaagagttgttcgagagtcattagaacaaaatcaaagtgaaaatattgcaagtagtgacttgcttgatttaatgagacgagctaaatgtttcggtataaatctagcaaaattagacattagacaagagtcatcaagacattctcagctattggcagaatatgtgaagaaaaaaaataactctaattatttaaattggaatgaaaataaaaaaattaaatatttgataagtgaaatgaagaaaaatagaaaaagttttaaaaattttaattttaaaaataaagaaaataatgaagtctggtcaacttttaaaattttagctaatgaaccatcagaatgtttgggcgcttatgtaatatcgatgacttcagcagcttcagatgttctagaagtttatttaatgcaaatgcaggcaaatattaaaaataagttacgagtagttccactttttgaaactttgcaagatttaaaaaatgcaaaatccattatggaaaaacttttttcattaagttggtacagaaaattaatcaaaaacaaacaagaaattatgataggttattctgactcaagtaaagacgctggaaaattatctgcaagttggcatcaatacaaacttcaagaagaagttttagtaattgcaaaaaaatataaaattgaagttacttttttccatggcagaggtggttcagccggaaggggtggtggaccaattcaagctacgatgagatcacaacctccaaattcagtatatggtcgtattagaattactgatcaaggagaaatgattcaacaaaaatatgggttacgaacctttagcgaaa

SEQ ID NO: 276573 - DNA, 1460 bp, Unknown
  Bacterial polypeptide expressing nucleotide sequence isolated from the Sargasso Sea
tatgataaaaagagatctttactatgaaagaattcccacaaaatcttttagagaagatgttagatatttgggaaatattcttggacaagtaattaaaaaacaagaaggaatttccttctttaatttagttgaaaaagtaagaaaactttcaaaagcaaataagccaaacaaagcagaaaagagatcacattttaaaattgtaaaaactataaaaaatttaagtccagaaaatacttttaaattaacaagagctttttctcacttcatgaattttattaatttggcagagtcaattgatgcttcaagaagattaaatgagtatgaaaatagcaaaaaaaaatccttaagcaaaaatatttttatagaagaaatatttgaagatttgttcaaaaataaaaaaatttcttcaaacacaatttataatgttgcaaaaaatttaaatataggaattgttttaacagctcatccaacagaggttaagagaagaacactaattcaaaaatatcataaaattactgaaatacttgagcaaagagaattattaaaacaatttccatcaaaattaaaaactttagataaaaaaatttacgatgaatttacaataatttggaatacagatgacttaaaaagaacaagaccttctccatttgatgaagcaagatggggtctagctattatagaagatagtttatgggaaactattcctaaagtttacagaagactaaataatatttttttgaaaaatatgaataaaaatttgccgagaaatttcaacccaattgaatttggatcttggatgggtggtgatagggatggcaatccaaatgttacagcagaagttacaaaagaagtaatacttttatcaagatgggaagctgcaaaactttatgaaaaagagttaacaaagttaattagatcatactcaatggccaaatgttcaaaaaagataataaagtcaactggaaaatcatttgaaccatatagagtttatcttagaccattaagggataagatgagaaatacccatagatctatagaacggtatttaataaataatcagactttagataagaataaaatcttaaaatctaaagaagaaattttgcaacctttgagaatagtaagagagtcattagagcagaatggtagtaaaaatattgctaatggagatttgctagatcttatgagaagagctaaatgttttggaattaatttagcaagattagatatcagacaagaatcttcaagacatactgaaattatttcagaatttgtaaaaaaaaaatataaatctaattatttggactggaatgaagataaaaaaataaaatttttaatttcgaaaataaaaaaaaaacaaaatagttttaaaaattttaattttaaaattaaaaaaaataaagaagtttggtctacttttaaaatattggccgatgaacctagcgaatgtttaggagcat

SEQ ID NO: 276574 - DNA, 1153 bp, Unknown
  Bacterial polypeptide expressing nucleotide sequence isolated from the Sargasso Sea
cattgctgaatctattgatgcagcacgaaaacttgatgagtatgaaaataaaaatcaaatagatgctaataaaaatatttttattgaagaaatattcgaaggtttttttaaaaatagaaaaatttcaactaataaaatttatgagattgcaaaaaatttaaatataggcattgttttaactgctcacccaacagaagtaaaaagaagaactttgatacttaagtatcataaaattacagaaatattggaacaaagagatttgttaaaaaaatttccatctaaattaaaaatattggataaaaagttgtacgatgaattcacagtaatttggaacactgatgaattaaaaagaacaagacctacgccatcagatgaagctagatgggggttagcaataatagaagatagtttatgggaaactattccaaaagtttatagaagactaaatgatatttttgtaaaaaatataggaaaagggttaccaaaaaactttaatccaattgaatttggatcttggatgggaggagatagagatggcaatccaaatgttacagctaaagtaactaaggaggtgattttattatcaagatgggaggctgctaaattatatgaaaaagaattaactaaattgatacaatctttatcaatagataaatgttcaagaaaaatactttctaaaactggtaaaacttttgaaccatacagagtttatttaagaccattaagaaataagatgcgtcttactcataaactaatagaacagcatctagttgaaaaagttccgttagatcaaaaaaaacttttatcaaacagagaagaaattttaaaacctttaagagtagtaagggagtctcttgaagaaaataacagtgaaaatattgcaagtggtgatttattagatttaatgagaagagcaaaatgctttggaattaatttagcaagattagatattagacaagaatcatcaaggcattcgcaacttatttctgaatttttaaagagaaaatataatatgaattatggtgattggaatgaagataaaaaaattaagtttttatcatcaaaaattaaatcaaaaaaaaagtttattaataatttttcatttaaaaataaagaaaacaaagaagtctggtcaactttcaaaattctatct

SEQ ID NO: 276575 - DNA, 2011 bp, Unknown
  Bacterial polypeptide expressing nucleotide sequence isolated from the Sargasso Sea
ttgagggatgatgttagatacttaggaaatattttaggtagagtaataaaaaagcaggaaggagaaagtttttttaatttagtagagagaataagattgctgtcaaaagcaaatattaaaaataaaaataataagaatagatttaataaaattaattcagaaattcaaagacttaaaccaatcaaaatatttaaattaggaagggcatttaatcattttatgaatttcattaatcttgctgaatctatagatgcatctagaaaattagatgaatttgaaaattctggtttgaaagacaaacataagaatatttttattgaggaaatttttgaaaatctttttaaaaacaaaaaaattaaacctcaaaaaatttataatattgcaaaaaatctttatattggaatagttcttacagctcatccaactgaagttaaaagaagaactttaatacaaaaataccacaaaataactgagataatggatcaaagaaatcttttgaaagacaaaccgtcgcgattaaaaatcttagataaaaaactttatgatgagtttacaattatttggaatactgatgatttaaaaagatttaaaccaacacctgttgaagaagcgagatggggattagcagtaatcgaagacagcctttgggaaacaattccaaaagtttatagaagattaaatgctatttttgtaaaacatatgggaagaggtttgcctaaaaattttaatccaattgaatttggatcttggatgggaggagatagagatggcaacccaaatgtaacagcagccattaccaaagaggtaatacttttatcaaggtgggaagcagcaaaactttatgagaaagaattaacaaaattaattagggggctatcaatggaaaaatgttcaaaaagaattctaaaaaccaccggaaaaacttttgaaccttatagggtttatttaagaccattaagagatgaaatgagaaagacgcatagattaatagaaagacatttagtggcaaaaaaaccattagaccaaaaaaaacttttatcttctaaagaggaaattctaaaacctttaagagttgtaagagagtcattggagcaaaaccaaagtgaaaatattgcaagtggtgagttgctcgatttaatgagacgagctaaatgctttggtataaatttagcaaaattagatataagacaagagtcatcaaggcattcacagttattggcggaatatgtaaagaaaaaaaataactctaattatttaaattgggatgaaaataaaaaaattaaatatttgatgaatcaaatgaagaaaaagaaaaaaattttcaaaaattttaattttaaaaataaagaaaataaagaagtttggtcaacttttaaacttttagctgatgagccatcagaatgtttgggtgcttatgtaatatcaatgacttcagcagcttcagatgtcttggcagtttatttaatgcaaatgcaggcaaatattaaaaataaattacgagtagttccgctttttgaaactttacaagatttaaaaaatgcaaaatctattatggaaaaacttttttcattaagttggtacagaaaattaataaaaaacaaacaagaaattatgattggttattctgattcaagcaaagatgctggaaaattatctgctagctggcatcaatacaaacttcaagaagaagttttaaatattgcaaaaaaatataaaattgacctcactttttttcatggcagaggtggttcacatggaagggggggtggaccaatccaagctacgatgagatctcaacctccaaattcggtatatggtcgtattaggattactgaccaaggagaaatgatccaacaaaaatatggctatgaacctttagcgaaatataatttatgtagctacataggatctgtaatgcaggctactttaaatccacctccaaatcctaaagatagttggagaaatttaatagaagaaatgacaaaaatttctaccttagcttatagaaaaa

SEQ ID NO: 276576 - DNA, 1735 bp, Unknown
  Bacterial polypeptide expressing nucleotide sequence isolated from the Sargasso Sea
actggaaaaacttttgaaccttatagagtttatttaagaccattaagagatcaaatgagaaagacgcatagattaatagaaagacatttagtagcaaaaaaatcattagaccaaaaaaaacttttatcttctaaagaggaaattttaaaacctttaagagttgtaagagagtctttagaacaaaatcaaagtgaaaatattgcaagcggtgatttgcttgatttaatgagacgagctaaatgtttcggcataaatctagcaaaattagacataagacaagagtcatcaaggcattcacaattattaaaagaatatgtgaagaagaaaaataactctaattatttaaattgggatgaagataaaaaaattaaatatttgataagtgaaatgaagaaaaatagaaaaattttcaaaaattttaattttaaaaataaagaaaataaagaagtttggtcaacgtttaaacttttagctaatgagccatcagagtgtttaggtgcttatgtaatttcaatgacttcagcagcttcagatatcttgacagttaatttaatgcaaatgcaggcaaatattaaaaataaattacgagtagttcctctctttgaaactttacaagatttaaaaaatgcaaaatctatcatggaaaaacttttttcattaagttggtacagaaaattaatcaaaaacaaacaagaaattatgattggttattctgattctagtaaagatgctggaaaattatctgctagctggcatcagtacaaacttcaagaagaagttttaattattgcaaaaaaatataaaattgatcttacttttttccatggcagaggtggctcacacggaaggggtggtggaccaattcaagcaacgatgagatctcaacccccaaattctgtttatggtcgaattaggattactgaccaaggagaaatgattcaacaaaaatatggttatgaacctttagcaaaatacaatttatgtagttatataggttctgtaatgcaagctactttagatccacccccacatcctaaagatagttggagaaaactaattgaaaaaatgacaaaaatttcaaccaatgcttatagaaaaaatataaatgagaactcagattttataagatattttaagacagttactcctcacttagctcttggaaaattatcaatagggtcacgaccttctaaaagaaaaaatatagacaacattcaaagcttaagagcaataccatgggtatttgcatggacacaaataagattaatgttgcctgcttggttaggaactggtgatgccctaaaatattcttcagttaaaaattacaaaactattcttacagatatggaaaaaaattggccattttttaattctacaatggacattttggacatggttatttcaaaagttgatccagagatatcagaggtttatgaaaatagtcttgcagataaaaaattaagagaagtgggtaataaacttagatctgagttcgctataattaaaaaattaaatagatatataactccaagagaaataattaaccaaagaaaaaaatttagaacaacggttatagttagaaacatttattctgaggttttaaatatactacaagctgtggttatgaataaattgtcaaagaaaaagctaaaatcaaatgataagaaatatcttaatgatgcaatgatgacatcaatagcaggcatatctgcggcaatgaaaaatacaggttaaa

SEQ ID NO: 276577 - DNA, 1364 bp, Unknown
  Bacterial polypeptide expressing nucleotide sequence isolated from the Sargasso Sea
gaagatctctgggaatctgtgctcagagaagaatgcccagatgatcaagcagaaagattgatacagctaaaagaattaagttattcaaaacaaattgatggtgatagttcaaaaacttttaaaaatgaaatagttgatattgtaaattctatggatttagcagaatccatagctgcagcaagggcattttcattatattttcaactcgtgaatattttggaacaaagagttgaggaagatagatatattcaaagctttaccaataaggatgttcaaaaatcgcccgacaatcttgatccttttgccccagcattggctaggcaaaatgctccagtaacttttagagaattattttacaggttgagaaaattaaatgtaccaccaggaaaattagaggagttattacaggaaatggatattcgtttagtttttactgcacatccgacggagatagtaagacatacgattagacataagcaaacaagagtagcaaatttgttaaaaaaaatacagattgagcaatttctaacaaaagaagaaaaaatttctctaaaaacccaattaaaagaggaagtaagactttggtggagaacagatgaattgcatcaatttaaaccttcagttttagatgaagttgattatgccttgcattattttcagcaagttttatttaatgcgatgcctcaattgagaggcaggatcgctgaagcacttaccgaaaattatccagatgttcagttgcccccagaatctttttgtaacttcggttcttgggtaggttctgatagggatggtaatccatcagtaactccggagataacatggagaactgcttgctaccaaaggcagttgatgttggaaagatatattattgcgacgtctaatcttagagatcaattaagtgtgtcgatgcaatggagtcaagtaagttcctccttattagagtcactcgaaactgacagggttaagttccctgaaatatatgaagctagagctacaaggtatagatcagaaccttacagattaaaattaagttatattttagagaaattaaggttaacacaagaaagaaataatttattagctgatagtgggtggaaatttgacttggagggggaaattgataacaaaaatatagataaagttgaaaatttatattacaagtcagtaaacgaatttacatatgatcttgagctgattaaaaatagcttaattagtacagatttaacttgtgattctgtaaataacttacttactcaggttcatatttttggattttctttagcaagtttagatattcgtcaagagagtacaaggcatagtgatgctattcaagagcttacaaattatcttgatttgtctgt

SEQ ID NO: 276578 - DNA, 1894 bp, Unknown
  Bacterial polypeptide expressing nucleotide sequence isolated from the Sargasso Sea
ggaggagatagggatggtaacccgaacgtaacatataaagtaactaaggaagttatattattatccaggtgggaagcagcaaagctttatgagaaagcattgaccaaattaattagatcatattctatggaaaaatgttcaaataaaataactagagttattgggaaatcgcatgaaccatatagggcttatctaagacccttgagaaataaaatgagatatacacacagagctatcgaaaaccatctcgtacgaaacaaacctctaaatcgaaaaaaaattttatcctcaaaagaagaaattttaaaacctttacgtatagttcgagaatctttagaaaacaatcaaagtgaaaatattgcaagtggcgatctattagacttaatgagaagagcaaaatgttttggaataaatttagctaaattagatataagacaagagtcttttaggcatacacagctaattaatgaattattaaaaacaaaattaaataaaaattatttaaaatttactgaaaatgagaaaattcaatttttatccaagtctattaggtctaagaaaaatttaataaaaaattttatttttaaaaataaagaaaactcagaagtttggtcaacatttaaagttttggctgatgaacctgaagaatgtttaggaggctatattatatccatgaccgcgacagcttcggacatattgacggtttctttcttgcaaaaagaagccaaaataaagagaaaattaagagtaattccattattcgaaactttacaggatttaaaaaacgcaaaatctattatggaaaatttattctcactcaactggtacagaaagatgattaaaaataaacaagaaataatgataggttattcagactctagcaaagatgcgggtaaattgtctgcaagttggcatcaatacaaacttcaagaggaaataattaaattagcaaaaagatttaaaatagatgtcacattttttcatggaagaggtggatcagcaggacgaggagggggacctatacaatcaactcttagatcacaaccaccaggatcagtaaatggcaaaataagaattacagatcaaggagaaatgatacaacaaaaatatggttatgagccaatcgcaaattataatctttgtagttatataggtgcagtaatgcaagctacgcttaatccacctcctcaaccaaaagataaatggaggcaactaattgaaaatatgacaaatatatcgacattgtcatatagaaaaaatattaaagaaaattcagacttcatcagatattttaaaacagttacaccccatctagcattaggaaagttatcaataggttctagaccatctaaaaggaaaaatgtagataacattaaaagtcttagagctattccatgggtctttgcatggacacaaataagacttatgcttccagcatggttaggaacaggggatgcgcttaagtattcttcacaaaaaaataataaatcaattttgatagatatggaaaagaactggcctttctttaattctacaatggatattttagatatggttatttcaaaagttgaccccgaaatatctaaagtctacgaaaatggtcttgcagataataatcttaagaatgttggtaataaattaagaaatgaatttaatattgtaaaaaagttcaataatcttataactccgaatgaaattacatatcaaagaaataaatttagaacaaatacatttgtcagaaatatttattcagaggttttaaatattttacaagcagcagttatgaaaaaattattaaaaaaaaatataagcaaaaatcataaaaaaaatcttgaagatgcaatgatgacctcgatagcaggaattgctgctgctatgaaaaatacaggctaag

SEQ ID NO: 276579 - DNA, 1177 bp, Unknown
  Bacterial polypeptide expressing nucleotide sequence isolated from the Sargasso Sea
gccacaggaaaaacctttgaaccatatagagtttatttaagaccattaagagataaacttagaacaactcatagagaaatagaacaacatcttaattatggtaaaccattaaatgaaaaaatattactttctgaaagagaggagattttaaaacccttaagagttgtaagagagtctttagagcaaaatcagaacgaaaatatagctagtggtgatttacttgatttaatgagaagagcaaaatgttttggaattaatcttgcaagactggatataagacaagagtcatctagacattcacaattactgaatgaatttataaaaagaaaatctaggcgaaattataattcttggagtgagacagaaaaaataaagtatttatcagataaaattagaggtaaaaattcaattaataaatttatttttaaaaataaggaaaataaagaagtttggtcaacttttaaagctttgtctagtcaaccaaaagagtgtttaggagcgtacgtaatatcaatgacttcatctgcctcagatattttatctgtaatgtatttgcaaaaagaggctaatatcaaaagtaagttaagagtagttcctttatttgagactttagatgatttgataaatggtaaaaaaataatggaaaaattattctcattaaaatggtaccgaaaatacatactaaataagcaagaaattatgattgggtattcagactctagtaaagatgcaggtaaattatcagctagttggcatcaatataaattacaagaagaaattattaaattagcaaaaaaatataaaattaacgttacattttttcatggtagaggtggttctgctggtagaggaggagggcctattcaagcaactttaagatcgcagccaccttattctgttaacggaaaaataagaattacagaccaaggtgaagtaatacaacaaaaatatggatatgagccattagcaaagtataacctgtgtagttatattggctctgtcatggaagcaactctaaatccacctccaaatccaaaaaaagaatggagaaatcttattcaaaacatgtcaaatgtctcaactagttcttatagaaaaaatataaatcaaacctctgacttcatcagatattttaaaaccgttacgccacatatggctttgggtaagttatcgatag

SEQ ID NO: 276580 - DNA, 1108 bp, Unknown
  Bacterial polypeptide expressing nucleotide sequence isolated from the Sargasso Sea
tataaagaaaaaattataaatctatcagagagttttagtatctcaactttatatgcagatgaacctcgactgctaatgtcaaaaattaaagaatactcaaatttgttaaataaagaatttcgtcactacacaaaaattaattttgacgagccttttagaatatttctttcacttgtttttcatagacttgacaattttcaaaagaataaaaaaggatataattctttttctgaatttcaggatgatctcaacttatttgaaaacgaagtaaataaatgttttaagaataattcttcgtctttagatttaaaatattttattgattacgtgaatcaattcaaatttcacggtgtcgaaatggatataagagaaaatgcggatgtcttcagatttaatgaagatttcaaaaaagaatactctgaatttacaactcttataaaacgaattccggaatggaaaaaaatatacggtgatactgtcataagttcaataattttatcaatgactaaaaatgagaaagatattttaaatttatttaaactttgtaaaaaattaattaaaaataaatgtgatattcctatgcttgttcctttgtttgaggaaattgatgatcttgaaaaatctcatattataatttcaaatctttttgcaaataaagattacaaaaaacatttaactaatttcaataataatcaggagataatgcttggttattcggattcaaataaagatggaggaattgtagcttcacaatggtcagtgtataaatctcaaattgctttattcaaaactggtcagaaacataatatcgatatttcattctttcacggtagaggtggaactattagtaggggaggcggacctacttacaactcaattctgtcacaacctaagggaacaataaaaaacgaattaagatataccgaacaaggagaagttatttctgataagtactcgacaactagtcttgcatcagaaaatctgaaacttggtttattcgcattctttaaggcaaataaaacaaagaatcgtgaaataaaatatgaacataattttcttaatgagctttctaaattatcttcaaaaaaatatagaaaccttgattgaa

SEQ ID NO: 276581 - DNA, 855 bp, Unknown
  Bacterial polypeptide expressing nucleotide sequence isolated from the Sargasso Sea
aaagcctgagcctgttgctgagttattgcagctgttgcagaataaaaatgtcagcaaaagccggattgagcaggccgtggccgatttatccatcgagctggtgctgactgctcacccgacagaagtcactcgccgtacccttatccataagttgactgagattgcatcttgcctggcagaattggagcaggatttagcgcctgcgcagcaggaaaaaacagaaaaccgtttgtatcagctgatcactcaggcctggcacaccaacgaaatccgcgaacaacgacctacgccagtagatgaggctaagtctggttttgctgtgattgaaacctcactctgggatgctattccggagtttatccgagatttggatactgctttgatccctgtgctgggtcatggtttggcgttagacgctgctcctattcgtttttcatcctggatgggaggagacagggatggtaacccttttgtcacagcaaaggtcacgcgtcaggtactgttgttaagtcgctggaaagctgcggatttatttagtcgtgacttggatatactggcgaacgaactgtcaatgaatcaagccaacgatgcattacgtgccgtcgttggggaggcgtcagagccttatcgtaagttgctgaatgatgtccgctataagttactgcacaccagagactggctaaccgaagcgttaaaacatgacagattgcaacgacctgagggactgatttggcataatcagcagttgttggagcctttgctgctgtgttatcagtctctgctcgactgcaaaatgcaggtggtggctgaaggcttattaaaagacactattcgtcgtgcttatgcctttgggtt

SEQ ID NO: 276582 - DNA, 976 bp, Unknown
  Bacterial polypeptide expressing nucleotide sequence isolated from the Sargasso Sea
tatgggcaaagggctgccaaaaaatttcaatccaatcgaatttggatcctggatggggggtgatagggatggaaatccttttgttacttccgaggtgactaaaagagtaattcttttatccagatgggaagctgctaaactttatgaaaagtctttgactaaactaataagatcttactcaatggaaaaatgctcaaataaaatattaaaagctacaggaaaaacctttgagccatacagagtatatctaagaccgttaagagataaactcagaacaacccacagagaaatagaacaacatctaaattatggcaaaccattaaatgagaagaaattactttctgaaagagaggaaattttaaaacctttaagagttgttagagagtctttagagcaaaaccagaacgaaaatatagctagtggtgatttacttgatttaatgagaagagcaaaatgttttggaattaatcttgcaagactagatataagacaagagtcatctagacattcacaattactgaatgaatttataaaaagaaaatctaggcaaaattataattcttggagtgagatagaaaaaataaagtatttatcagataaaattagaggcaaaaatttaattaataaatttatttttaaaaataaggaaaataaagaagtttggtcaacttttaaagctttgtctagtcaaccaaaagagtgtttaggagcgtatgtaatatcaatgacttcatctgcctcagatattttatctgtaatgtttttgcaaaaagaggctaatatcaaaagtaagttaagagtagttcctttatttgaaactttagaagatttaattaatggaaaagaaataatggaaaaattattttcattaaattggtaccgaaaatacattaataataaacaagaaataatgattgggtattcagactcaagtaaagatgcaggcaaattatctgctagttggcaccaagtataa

SEQ ID NO: 276583 - DNA, 900 bp, Unknown
  Bacterial polypeptide expressing nucleotide sequence isolated from the Sargasso Sea
tgtttgggggcttatgttatttcaatgacatcatctgcatctgacattctctccgtcttatatttacaaaaagaagcaaatattaaaaatagattaagagttgtccctttatttgaaacattagatgacttaattaatgcaaaatcaataatggccagtttgttttcattaaagtggtacagagatttaataaaaaataaacaagaagtcatgattggatactcagactcaagcaaagatgctggaaaaatttgtgcaagttggcatcaatataaggctcaagaagaaattattaaaattgcaaaaaaatataaaatagatgttaccttctttcatggaagaggtggttcagcgggtagaggtggaggcccaattcaagctactttaaaatctcagccgccaaatacagttaatggaaaaatcagaataaccgatcagggagaagttattcaacagaaatatggatatcaacctttagcaatttataatttatgtagctatataggagcggtaatggaggcaactttaaccccaccgccagtacctaaaaaagattggagaaatctaattgaaaaaatgtctgatatttcaaaaagctcatatagaaaaaatattaatcaaagttctgattttataaaatactttaaaaccgttacgccacatgtgtctttaggaaaactttcaattggatcaagaccgtctaaaagaaagaatattgataatatcaaaggcttaagagcaataccttgggtatttgcttggacacaaataagactaatgcttccagcgtggcttggaagtgcagaagctttaagatattcatcaattaaaaattttgaaaaaacaataatagatatggaaaaaaactggcctttcttcaattcaatgatggatatcttg

SEQ ID NO: 276584 - DNA, 767 bp, Unknown
  Bacterial polypeptide expressing nucleotide sequence isolated from the Sargasso Sea
tatgaacgaacaatattccgcgttgcgtagtaatgtcagtatgctcggcaaagtgctgggagaaaccatcaaggatgcgctgggagagaacattcttgatcgcgtagaaacaatccgtaagctgtctaaatcctcacgcgctggcaatgaagctcatcgccaggagttactcaccacgttacaaaatctgtcgaatgacgagctgctgccggtcgcgcgcgcgtttagccagttcctgaacctggccaacaccgccgagcaatatcacagcagttcgccaaaaggcgaaggcgccagcaacccggaagtgattgcccgcaccctgcgtaaactgaaaaaccagccggatctaaacgacgccatcatcaaaaaagcggtggagtcgttgtctctggaactggtgttgaccgcgcatccgacggaaatcacccgtcgcacgctgatccacaaaatgggcgaaattaacgcttgtctgaagcaactcgataacaaagatatcgttgagtacgaacgccaccagctgatgcgccgtctgcgccagctgattgcacagtcctggcacaccgatgaaattcgtaagctgcgcccaagcccggttgatgaagccaaatggggcttcgcggtggtcgagaacagcctgtggcagggggttccgaactatttacgcgaactaaacgaacagttggaagagaatctggggtaccagttacccgttgatttcgttcccgtacgtttcacctcgtggatgggcggcgaccgtgacggca

SEQ ID NO: 276585 - DNA, 849 bp, Unknown
  Bacterial polypeptide expressing nucleotide sequence isolated from the Sargasso Sea
gatgggtggtgatagagatggtaatccatttgttactgcagaagttactaaaagagttattttgttatcaaggtgggaggcagctaaactttatgagaagtcaatgacaaagttaattagatcctactctatggaaaaatgttcaaaaaaaatattaaaaactacaggaaaaacattcgagccttatagagtttatctaagacctttaagagataaattaagaaaaacgcatagagcaatagaaggttatttgacaaacaataaatcttttaacgataaagatttactatcagagagagaagaaattttaaaaccattgagagtagtgagagagtcattagaacaaaaccaaagtgaaaatatagctagtggtgatttattagatttaatgcgaagagctaagtgttttggaataaatcttgcacgacttgatatcagacaagagtcttcaagacattctcaattattagcagaatacataaagaaaaaactaaaccaaaattattctagttgggatgaggatcgaaaaataaaatatttatcaaataaaatgcaaagcaaaaatgtattaaaaaaatttcaatttaaaaacaaggaaaacaaagaggtttggtccacatttaaagtattggcaagtcaacctaaagagtgtttaggagcgtatgtaatctcaatgacatcttcagcatcagatatcttatcagttatgtttttccaaaaagaagctaacattaaaaatagactaagagtagttcctcttttcgaaactcttgatgatcttataaatgcaaaaccaataatggaaaaacttttttcattaaaatggtacagaaaagatattaataacaa

SEQ ID NO: 276586 - DNA, 679 bp, Unknown
  Bacterial polypeptide expressing nucleotide sequence isolated from the Sargasso Sea
ttgccaaaacaatatgatcaaatgtctgaaaaagagaaaatacaatggcttaatgaggaattaaataccaaaaggcccttgattccctctgaagttaactggaataaaagtactgaagaaactttctcagtttttaaaatggtcaaaagattgcaagaagaatttggaagtcgtatttgtcattcatatgttatttcaatgagtcacagtgcatctgatttgcttgaagtccttcttttagcaaaagagatgggactaattgatcaaggttctcaaaaatcgacattgttggtcgtccctctgtttgaaactgttgaagatctgcaaagagctcctgatgtaatggagcaattatttcaattagatttttataagtcattattaccaaaagttggagaaagttttaaacctctccaagagttaatgttaggttattcagatagcaataaagattcaggattcttatctagtaactgggaaattcatagagctcaaattgctcttcaaaatctttcaagcaaaaataatatacttttaagactgtttcacggtagaggaggttccgtaggaagaggaggaggtcctgcttatcaagcaatattggctcaaccaagtgggacgctcaaaggaagaataaaaattacagaacaaggagaggttttagcttctaaatatagtc

SEQ ID NO: 276587 - DNA, 946 bp, Unknown
  Bacterial polypeptide expressing nucleotide sequence isolated from the Sargasso Sea
gtaggagactcttttgaaccctatagagtttttttaagaccattaagaaataaaatgagattaactcatagatctattgaacagtatttgattaataaaaaacctttaaataaaaataaccttttaagttcaaaagaggaaattttaaaacctttaagagttgtaagagaatcattagaacaaaatcaaaatgaaaatattgctagtggtgaacttctggatttaatgagaagagcaaaatgttttggagtgaatttggcaaggttagatattagacaagaatcttccagacacaaacaagtaatagctgaacttataaaaaagaaatacagaaaagattattacagttttacagaaaagcaaaaaatagattttctaaaatctaaattagtttcaaataaaaatattataaataaatttaaattttctaataaagaaaataatgaagtttggtcaacttttaaaatattagctaacgaacctccagagtgtttaggcgcatatgtgatttcaatgacaacttctgcatctgatattctggcagttttatttttacaaaaagaggcaaggataaaagataaattgagagttgttcctttatttgaaacattggatgatttgattaatgcaaaaccaataatgctaaatttattttcgcaaaaatggtatagaaaattaattaaaaacaatcaggaggtaatgataggttattcagattcaagcaaagatgccggaaaaatttgtgctagttggcatcaatataaggcgcaagaagaaatagttaagttaggtagaaaatttggagtaaacgttactttttttcatggcagaggaggctcaccaggaagaggtggaggaccaatccaagctacgttgagatctcaacctccaaattcagtaaatggaaaaattagaattactgaccaaggtgaagttatacaacaaa

SEQ ID NO: 276588 - DNA, 883 bp, Unknown
  Bacterial polypeptide expressing nucleotide sequence isolated from the Sargasso Sea
atacttgctgacgaaccttctgaatgtttaggtgcctatgtgatttcaatgaccacttctgcatctgatattttggcagtttcatttcttcaaaaagaagcaaaaataaagcataaattaagagttgttccgttatttgaaacgttagatgatttagtcaatgcaagtcaaataatcaaaaatttgttttcaaaaaaatggtacagaaaattaataaacaataaacaagaagtaatgataggttactctgactctagtaaagatgcaggtaaaatatgtgcaagttggcatcaatataaagcgcaggagcagattgttaaattagcaaaaaaatatagcgttaatgctagtttttttcatggtagaggaggttcgccaggaagaggcggaggaccaattcaagcaactctaagatctcaaccaccaaattctgtaaatgggaaaataagaattacagaccaaggtgaagttattcagcaaaaatatggttatgaaccaattgctgaatataatttgtgtagttacatcggggcagtaactgaggcaacattaaatccaccaccaaaaccaaaacctgattggaggtcactaattgaaaaaatgtcagatatttcaaaaagttcatacagaaaaaacatcaatcaaagttcagaatttataaaatattttaaaaatgtcacaccccatcaagcgcttggtaaattatctattggatccagaccatcaaaaagaaagaatttagataatattaaaagtttacgagctataccttgggtattcgcatggacacagattagattaatgttacctgcgtggttaggtagcgctgaagctttaagatatgcttatataaaaaagtttagaaggactttaatagatatga

SEQ ID NO: 276589 - DNA, 956 bp, Unknown
  Bacterial polypeptide expressing nucleotide sequence isolated from the Sargasso Sea
aactaaaaatatagataaagttgaaaacttatattacaaatcagtaacggaatttacctatgatcttgaactgattaaaaatagcctgattagtacagatttaacttgtgaggcagttgatacattacttactcaagttcatatttttggcttttctctagcaagtttagatattcgtcaggaaagtacaaggcatagtgatgctatacaagagcttacaaattatcttgatttgccagtgctttatgaccagatgtctgaggaagagaaaattaaatggctcatagaggaattaaatacaaaaaggcctctaattccctcagatgttaactggacaaaaaccacggaggaaaccttttcagtttttaaaatggttaggagactacagcaagaatttggaagtcgtatttgccattcatatgtaatttctatgagtcatagtgcttctgatttgcttgaagtgcttttactggcaaaagaaatgggacttcttgatcaaaattcccaaaagtcaaaattattagtcgttcctctcttcgaaactgttgaagaccttaaaagagccccaaaagtaatggaaaagttgtttgaattagatttttacagatctttattgccaaaagttggagaatcttttaaacctcttcaagaattaatgcttggatattctgatagcaataaagattcaggttttgtttccagtaattgggaaattcatagagctcaaatagcgcttcaaaatcttgcaagtagaaataatattttgctaagactttttcatggtaggggcggttctgtaggtagaggtggaggcccagcctatcaagcaatattggctcaaccaagcggtactttgaaaggacggataaaaataacagaacaaggtgaggttttagcttcaaaatatagtcttccagaactggctttgtataatcttgaaactgttactacagctg

SEQ ID NO: 276590 - DNA, 880 bp, Unknown
  Bacterial polypeptide expressing nucleotide sequence isolated from the Sargasso Sea
gagattcaccaggcgcagatcgccctgcaaaccctggccagcagccacggtgtggccctacggctgttccacggccggggtggatcggtgagccgcggcggcggcccggcctaccaggccatccttgcccagcccagcggcacactgcagggccggatcaagatcaccgaacagggtgaggtgctggcctccaagtacggcctgccggaacttgccctctacaacctggaaaccgtcacgacggcggtggtgcagaacagcttggtgaccaaccagctggatgccaccccgagctggaaccagttgatgagccgcgtggccaagcgctcccgcgagcattaccgggccctggtccacgacaaccccgatctggtggcgtttttccagcaggtcaccccgatcgaggagatcagcaagctgcagatctccagccgtccggctcgccgcaagaccggcgcccgggatctctccagtctgcgggcaatcccctgggtgttcggctggacccaaagccggttcctgctgccgagctggttcggtgtgggcaccgccctggcggaggaggtcaacgacgaccctgagcaactggacctgctgcggcgactgcatcagcgctggccgtttttccggatgctgatttccaaggtggagatgacgctgtccaaggtcgatctcgacctggcgcaccactacatgagcagcctcggcaacccggagcagcgcgatgcctttgaaggcatcttcaaggtgatcgccgatgaatacggccgcaccctgaagctggtgctcgaaatcaccggtcagagccgcctgctgggggccgatcagaacctgcagctgtcggtggatctgcgcaaccgcaccattgttcccctgggct

SEQ ID NO: 276591 - DNA, 787 bp, Unknown
  Bacterial polypeptide expressing nucleotide sequence isolated from the Sargasso Sea
gcaaatattaataaaagattaagagtagtcccattatttgaaactttagatgacttaaaaaatgcaaaatcaataatggaaaatttattttcattaagctggtacagaaaattaataaaaaataatcatgaaattatgattggatattcagattcaagtaaagatgctggaaagctttccgccagttggcaccaatataaacttcaagaggaaattgttaagttaggaaaaaaatataaaatagatcttacatttttccatggcagaggtggatctgctggaagaggaggtggtccaattcaatccactcttagatctcagcctccaggatctgtaaatggtaaaattagaattacggatcaaggtgaaatgatacaacaaaaatatggctatgaaccaatagcaaaatataacctctgcagttacataggtgcggtaatgcaagcaacacttaatccaccaccaaaaccaaaagatagttggagaaatttaattgaggacatgacacagatttcgacaagatcttacagaaaaaatattcgagaaaatacagattttattagatactttaaaactgtaacaccccatcttgcacttggaaaattatcaattggatcaagaccttctaaaagaaagaacgttgataatattaaagggttaagagcaattccatgggtttttgcatggacacaaataagattaatgttaccagcatggcttggaacaggtgaggcattaaaatactcttcagttaaaaaatttaaatctatattagttgatatggaaa

SEQ ID NO: 276592 - DNA, 916 bp, Unknown
  Bacterial polypeptide expressing nucleotide sequence isolated from the Sargasso Sea
cagtgctgggcccggtctggctttagaagccgcacctatccggttttcgtcctggatgggtggagacagggacggtaacccttttgttactgccaaagtcacccgtcaggtgctgctgctaagtcgctggaaagccgctgatttattcagccgtgacctggatgtgctggccaacgaattgtcgatgaatcaggttaatgatgcggtacgtgctgtagtaggtgatgtatcagaaccttaccgtaagctgctgaatgatttccgccataaattactgcacaccagagactggctgaccgaagccttaaaacatgacagattacaacgaccagacgatttgatttggcataaccagcaactgctggagcctttgctactttgttatcagtctttactcgattgcaaaatgcaggtggtggctgaaggcttattaaaagataccatccgccgcgcttatgcttttggtttaaccttgctgaagctggatgtgcggcaggaatctggtcgtcatactgccgtattcagcgagtttacccgttatctgggtattggtgattatgcagaatgggatgaatcaacccgtcaggctttcttattaaacgagctgagcagcaaaagacctttattcccgcgcaactggtcgccaagccctgaagtgaaagaagtgctggatacctgtgacatagtggctcgtcacggacctgaagctttatctacttatgttatttctatggccggtaaaccctcagacgtgctggctgtgcaattactgttgaaagacgctggtattactttcccaatgcgggtagcacctttgtttgaaaccctggcggatttaccaatgcgccggaatgtatcagcaagttgctggccatcgattggtacagaggttatatccacggtcgtcaggaagtga

SEQ ID NO: 276593 - DNA, 911 bp, Unknown
  Bacterial polypeptide expressing nucleotide sequence isolated from the Sargasso Sea
tctgaaaaagagagaataaaatggcttatagatgaattaaatactaaaaggcctttaattccatctgaagttagctggactaaaagtactgaagagacgttttcggtttttaaaatggttaaaagactgcaagaagaatttggcagccgtatttgtcattcatatgttatctcaatgagtcatagtgcatctgatttgcttgaagtcatccttttggcaaaagagatgggacttattgatcaaggttcccaaaagtcaaaattactagtagtccctctttttgaaactgttgaggatcttaaaagagctccagaagtaatggagcaattatttcaattagatttttatagatcattattaccaaaagttggagaaagttttaaacctatacaagaattaatgttaggttattctgatagtaataaagattctgggtttttatctagtaattgggaaattcatagggctcaaattgctcttcaaaatctctcaagcaaatacaatatattattgaggcttttccatggtaggggaggttcagtaggtagaggaggaggtcctgcttatcaagcgatattagctcaaccaagcggtactcttaaaggaagaataaaaattacagaacaaggagaagttttagcttctaaatatagtcttcctgagttggcattgtataatttggaaactgtgacaactgcagttatccagaatagtttggtaaataatagacttgatgcgacgccagaatggaatcaattaatgactagattggcagaaacctcgagaattcaatatagaaaattagtacatgagaatcctaatttgcttacttttttttcagaggtaacgccaatagaggaaattagtaaattgcaaatatccagtagaccctgcagaagaaaaaaaggtgc

SEQ ID NO: 276594 - DNA, 965 bp, Unknown
  Bacterial polypeptide expressing nucleotide sequence isolated from the Sargasso Sea
cgtgcgtcaggattccgagcgacatgccgatgtatttagcgaactcactcgctaccttggtcttggtgactacgcacagtggagcgaagccgacaagcaagctttcttgttgcgtgaacttagctcaaaacgcccacttttccctgctcaatgggatgcatcggatgacgtaaaagaagtacttgatacctgtaaggtaattgcaaaacacagcaaacacggctttggtatttacattatctcaatggcaagtgagccgtcagatgtcatggccgttcagctgctacttcaagaaagtggtgtagattggccaatgccagtggcgccattgttcgaaacgctagacgatttgaacaactctcctgacgtaatgcgtaaattgctgtctatcgactggtatcgcggttacgtaaaaggtcgccaattcgttatgattggttactcagattcagcgaaagacgccggagcactggctgcgggctgggcacagtatcagtcgcaagaagcattggttgccattgcagaagaattcgacgtaagcctaaccctattccacggccgtggtggcacaattggtcgcgggggattacctgcacatgctgctatttactcacagcctcctggctcactagacggcggcttccgcgtaactgaacaaggcgaaactattcgctataaattcggtatgcctaagctagcaaaacgcagcctaggtatttacgccagcgccattattgaagccatgttattcccgcctccagcaccaaaagaagaatggcgggagcttataactgcaatggcagcccaaggtcgcgataactaccgtgcaaccgtgcgtcacgataaagagtttgtaccttacttccgtgtagcaacgccagagcaagagttaggcaaactaccactaggtagccgcccggcgaagcgaaaacacaaggcggtattgagagcctacgtgcgattcc

SEQ ID NO: 276595 - DNA, 849 bp, Unknown
  Bacterial polypeptide expressing nucleotide sequence isolated from the Sargasso Sea
tttaactaaaattatcagatcttattcaatgaaaaaatgttctaaaaaaataattaataaagttggtaaatcttttgaaccgtatagggtttttttgagaccattgagagataagatgagaatgacccacagatcaatagagcagcatctggttaataaaagacctttaaatagaaaaatattattaagctcgacagaggaaattttaaaaccattgagaaccgtaagagagtcactagaggaaaatcaaaatgaaaatattgcaagtggagagttactggatttaatgagaagggctaaatgttttggtataaatttggctagactagatataagacaggaatcatcaagacatagccaattaattgcagaatttgtaaaaaagaaatttaaaaaaaattataataaatttactgaagaggaaaaaataaattttcttaaatcaaaaatagtaaacaaaaaaaatatcattaataaatttaagtttacaaatcgagaaaataatgaggtctggtctactttcaaaaccctcgcagatgaaccatcagaatgcttaggtgcatatgtaatttcaatgactacttctgcatctgatattttatcagttttatttttacaaaaagaagcaaatatcagaaataagttgagagtcgtacctttgttcgaaacactagatgatttaataaatgctaagtccattatgcaaagtcttttttctaaaatttggtacaaaaacctcattaacaataagcaagaagtaatgatagggtattcagactcaagtaaagatgccggtaaaatatgcgcaagttggcatcagtataaagctcaagaagatatagttaaatt

SEQ ID NO: 276596 - DNA, 916 bp, Unknown
  Bacterial polypeptide expressing nucleotide sequence isolated from the Sargasso Sea
aagagataaaatgagattaactcatagatctattgaacagtatttgattagtaaaaaacctttaaataaaaataatcttttaagttcaaaagaagaaattttaaaaccactaagagtagttagagagtcattagaacaaaatcaaaatgaaaatattgccagcggtgaacttctggacctaatgagaagagcaaaatgttttggagtgaatttagcaagattagatattagacaagagtcatctagacatagacaagtgattgctgaacttataaaaaagaaattcagaaaagattattacagttttacagaaaatgaaaaaattcattttctaaaatccaaattggtttcaaataaaaatattataaataaatttaagttttctaataaagaaaataatgaagtttggtcaacttttaaaatattagctgacgaaccttcagagtgtttaggcgcatatgtgatttcaatgacagcttctgcatctgatattttgacagttttatttttacaaaaagaggcaaggataaaagatagattgagagttgttcctttatttgaaacattagatgatttaattaatgcaaaaccaataatgctaaatttattttcgcaaaaatggtatagaaaattaattaaaaacaatcaggaggtaatgataggttattcagattcaagcaaagatgctggaaaaatttgtgctagttggcatcaatataaggcacaagaagaaatagttaagttaggtagaaaatttggagtaaatgttactttctttcatggcagaggaggctcaccaggaagaggaggaggaccaatccaagctacattgagatctcaaccgccccattcagtaaatggaaaaattagaattactgaccaaggtgaagttatacaacaaaaatatggatatgag

SEQ ID NO: 276597 - DNA, 948 bp, Unknown
  Bacterial polypeptide expressing nucleotide sequence isolated from the Sargasso Sea
ccgcagtcagttaggggatgcagtgctggagcgggtagagcaaatccggctgttgtccaaagcagcacgtcagggtgaagagttgcaggctgacaaactaaagcaggtactgcatagtcttagtgacgatgaactgttaccggtagcgcgggcttttgcccagtttcttaatttggctaacctggctgagcagcaccacactatcagccgtattggccatgccagcattgaaaagcccgagccgctacaagagctgttcagtttgcttgaagacaaaaaactcgacaatgctaaagtggatcaggctgtggccagtttatccattgagttggtgctaacagcccatcccacagaagtatcccgccgtaccctgatccataaactgaccgaaattgccgcctgtttggctgagctggaacatgagttgagcccggcacagcagcaggccgtcgagctgcgtttaagtgagctgattgcccaggcctggcatactaatgaaatccgtgaacagcggccaacgccggtggatgaagcaaagtctggtttcgccgtgattgaaagctcgttatggcgtgccatccccgattttctgcgtgaactggatgccaaactgttaagtgccaccggcaagggactggcgctggatgcggctccggtaaagttttcgtcctggatgggtggagaccgcgatggcaacccctttgtgacgtcaaaagtgactcgccaggtactgttactcagccgctggaaagcggcggatctgttttcgcaggatttggatttactcagcagcgaattatcaatgtttcaggccagcccggcattgcgtgacattgcaggcgacagcagtgagccgtaccggcaggtactgaacacgttgcgtagcggtttactgcgcacccgcgactggctgactgaagcattaaagcatgaccggctgcagcgggc

SEQ ID NO: 276598 - DNA, 826 bp, Unknown
  Bacterial polypeptide expressing nucleotide sequence isolated from the Sargasso Sea
accttgggtgaaacaatcaaaaatcaattgggtcaagagtggttagaccgtattgaaaagattcgtaaaggcggccgagcttcttatcagggagacgctacgtgtagcgaagaactgaaagaaactttcaaaacaatgtctgacagcgatttgcttactgttggccgtgcattcgcacaattcttgaacttaggcaatattgctgagcaagaatacaacgcagcaatgaacgttgatgcgtcgatagatgcactatttaagcacctagataaagctgatttgacagctgaaaaagtacaagatgccgtagcaaagctaaacattgaccttgtacttaccgcgcacccgactgaggttacgcgacgtacacttattcacaaacataaagagttggcgaactgccttcaggcaattcaccaggaatcgcttaatgatgttgagcgtaagaaaattgaaacccgcatagctgaccttattgcgcaggcttggcacaccgaagaaattcgttcggtaagacctacgcctgttgacgaagctcgctggggtttttctgttatcgaaaactcactgtgggaagcagtgcctgacttcatgcgcgaacttgatgaccgcctgaatgaagattatgacgtatcactgccactagatgcgtcacccgttcagtttagctcttggatgggcggcgacagagacggcaacccatttgtaacgtcaaaagtgactgagcaagttctattgcttgccagaaagcgtgcagccaagctttttgctattgatcttgatcgcttgcaagttgagctttcaatgtacgactgcaacgacgcgt

SEQ ID NO: 276599 - DNA, 845 bp, Unknown
  Bacterial polypeptide expressing nucleotide sequence isolated from the Sargasso Sea
ccatgccgaagccgtcgcggaaatggtggagtatctggggctgggtgattactcgtcctggccggagcagcagcgccaggagttcctgttgcgtgaactgcagggccgccggccgctggtgcccagaaactgggaaccctccgagcccgtcagggaagtgcttgcaacctgtgaagtcgtggcacaacaaaccccggaagcgctgggctcttatgtgatttccatggccagcacgccgtcggatgtgctgagtgtgatcctgctgctgcgggaagccggcatgaagttcccgatgcgggtggtgccgctgttcgaaaccctgagcgatctgcagggcgcgccggacagcatggccgccctgtacgaggtggactggtatcgcgaatactgtcagggccgtcaggaagtgatgatcggctactcggattcgtccaaggacgcaggccagctgatggccgcctgggcccagtaccaggcccaggagaagctgacccgggtggctggccagtatggcgtgcacctgaccctgttccatggccgcggcggtacggtaggccggggcggtggccctgccaaccgggcgatcctgtcccagcccccggggtcagtaaacggcagtttccggattaccgagcagggcgagatgatccgcttcaagttcggcctgcctcggctggcggtgcagagcctgaccctgtacaccacggcggttatcgaggccaccctggcgccgccaccggagccggaagacagctggcgcgaaaccatggactggctgactgaaaggtccctgaaggcctatcgggatgtggttcgggagaatccggattttgtgccttatttcc

SEQ ID NO: 276600 - DNA, 823 bp, Unknown
  Bacterial polypeptide expressing nucleotide sequence isolated from the Sargasso Sea
gaaaaaactgcgtacccagctgatggaaacgcaggcctggctggaagctcgcctgaaaggacagaagctgccgaaacctgccggcctgattacccagaacgaacagctgtgggaaccactttatgcctgctataagtcgctgcagtcctgcggcatgggcattattgccaacggcgaactgctcgataccctgcgccgcgtgaaatcgttcggcgtaccgctcgtgcgtatcgatattcgtcaggaaagcacccgccataccgaagctctgggagagatgacccgttatctcggtatcggcgattacgaaagctggtcagaagccgacaaacaggctttcctgatccgcgaactgaactccaaacgcccgctgctgccacgtcagtgggagccgagcaatgaaacccgcgaagtgctcgacacctgccgggtgatcgccgaagcgccgcacggatccatcgccgcttacgtgatctccatggcgaaaacgccatccgacgtgctggcagttcacctgctgctgaaagagtccggtattggcttcgccctgccggttgcgccgctgtttgaaaccctggacgatctgaacaacgccaatgacgtcatgacccagttgctgaacatcgactggtaccgcggctttattcagggcaaacagatggtcatgattggctattccgactcagcgaaagacgccggcgtgatggccgcctcctgggcgcagtatcaggcacaggacgcgctgatcaagacctgcgaaaaagccggtattgaactgacgctgttccacggtcgtgggggttccatcggtcgcggcggcgcc

SEQ ID NO: 276601 - DNA, 878 bp, Unknown
  Bacterial polypeptide expressing nucleotide sequence isolated from the Sargasso Sea
aacttggatattgggaatagttctcacagcacatccaacagaagttaagagaagaacactatttcaaaaatacgcaaatttaaccactttgatggaacaacgtcatctttataaaaaatacccctcaaagattattgaaatagatcgaaaactgtattcggagatagccattatttggaaaactgatgaattaaaaagaaccaaaccatcagcacttgatgaagctaaatggggcttggctgtaatagaagatagtttgtgggatacaattccaagagtttataaaaggttaaatgatattttcagaaaaaatttaaataaagaccttcctagaaattttaatcctattcaatttggttcgtggatgggtggagatagagatggaaatccaaatgttacatctgaagtaacaaaaaaagtaattttattttcaagatggcaagctgcaaagttatacgaaagagaactcacaaaattaattcaagatttgtcaatggaagaatgttcacaatcaatcaaaaaagttactggaaatagttttgaaccttatagagtttatttgaggcctttaagagataaagcaagaagaacgcatcaactaattgaggcatatataaattataataaagcattagatgaaaataaattattaaaagataagtacgaaattataaatccattaagagaagttagaacttccctgaacatgaacaaaggtcaacatatagcaaatgcagatttgttggatttgataagaagagttagatgttttggaataaatttagcaagattagatatcagacaagagtctgatagacatgaaaaacttttaaatgaaatatttaaaaagaaaaataaaattaattattcacaattac

SEQ ID NO: 276602 - DNA, 934 bp, Unknown
  Bacterial polypeptide expressing nucleotide sequence isolated from the Sargasso Sea
aagaaataatttactatctgataatgggtggaaatttgaattagagggagaaaacgataacaaaaatctagataaagttgaaagcttatattacaagtcagtcaacgaatttacttatgatctcgaattaattaaaaatagtctcaatagtacagatttaacttgcgattctgtaaacaccttacttactcaggttcatatttttggattttctttagcaagtttagatattcgtcaagagagtacaaggcatagtgacgctatacaagagcttacaaattatcttgatttatctatgcaatatgaccaaatgtctgaagaagagaaaattaaatggcttatagaagaattaaatacaaaaaggcctttaattccatctgatgttaactggacaaaaactacagaagaaactttttcagtttttaaaatggttaagagactccagcaagaatttggaagtcgtatttgtcattcttatgtaatttcaatgagtcatagtgcttctgatttgcttgaagttctcctactggcaaaagaaatgggacttcttgatcaaaattcacaaaagtcaaaattattagtagttcctcttttcgaaactgtagaagaccttaaaagagcaccagaagtaatggaaaacttgtttaaattagatttctataagtcattattgccaaaagtaggagaatcttttaaacctttgcaagaattaatgcttggatactctgatagtaataaagattcaggttttgtttctagtaattgggaaattcatagagcccaaatagctcttcaaaatctttcaagtagaaataacatattgctaagactttttcatggcagaggtggatctgtagggagaggaggaggaccagcctatcaggcaatattagcccaaccaagcggcactttaaaaggccgaataaaaataaca

SEQ ID NO: 276603 - DNA, 931 bp, Unknown
  Bacterial polypeptide expressing nucleotide sequence isolated from the Sargasso Sea
aatgcttggatattctgatagcaataaagactcagggtttgtttctagtaattgggaaattcatagagcccaaatagctcttcaaaatcttgcaagtagaaataacatattgctaagactttttcatggaagaggcggttctgtaggtagagggggaggaccagcctaccaggcgatattggcacaaccaagcggtactttaaaagggcgaataaaaataacagaacaaggtgaagtattggcttcaaaatatagtcttcctgaactggctttgtataatctagagacagttactactgctgttattcaaaatagtttggtgaataataggcttgatgccactccagaatggaatcaattaatgtcaagacttgcagaaacatccaggtctcactacagaaaattagttcatgaaaatccagatttattaaatttttttcaggaggtcactccaatagaagaaataagtaaattacaaatatctagtagacctgccagaagaaaaaaaggtgctaaagatttgtcaagtttaagagctattccatgggtatttggttggacacaaagtagatttcttttgccaagttggtttggagtaggaaccgcattatcatccgaattaaattctgacccacaacaaattgaattattaagagttctccatcaaagatggccattttttaggatgctcatatctaaggtagaaatgacattgtctaaggttgatttggaagttgccaaatattatgttgacactcttggcagtaaagaaaataaagattcttttgatgttatttttgaagtaatttctaaagaatataatcttacaaaatctttaatacttgaaattactggtaaaaataagcttcttgaatctgatagagacttgaaatcatcagttagcttgagaaataagacaatatcccactag

SEQ ID NO: 276604 - DNA, 892 bp, Unknown
  Bacterial polypeptide expressing nucleotide sequence isolated from the Sargasso Sea
aaaggtttaccaaaaaattttaatccatttgagtttggttcatggatgggaggagacagagacggcaatccaaatgtcacttcaaaagtaactaaagaagtaattttgttatcaagatgggaagcggcgaaattatatgaaaaagaattaacaaaattaattagatctttatctatagaaaaatgttcaaaaaaaatactgtctaaagttggaaattcttttgaaccatatagagtttttttaagacctttaaggaataaaatgcgtctaactcataagttgatagagcagcatttagttaacaaagttccattagatcaaaaaaaacttttatcttccagggaagagatcttgaaacctttaagagtagtaagagaatcattggaagaaaatcaaaatgagaatattgcgagtggcgatttattagatttaatgagaagagctaaatgttttggaattaatttagcacgattagatattagacaagagtcatcaagacattcacaattaatttcggaatttttaataagaaaatataaaattaattataataaaatgagcgaagataaaaaaataaaatttttatcttcaaaaattaaatcaaaaagaaatttaattaataagttttcatttaaaaataaagaaaataaagaggtatggtcaacatttaaaattttatctgatgagccaaaagaatgtttaggtgcatatgtgatatcaatgacttcatcagcatcagatatattgactgtagcttatcttcaaaaagaagcaaatatcaaagacccacttagagttgttcctctctttgaaactctagatgatttgataaatgcaaaacccataatgcaaaaattattttccttaaattggtatagaaaatcaatttaat

SEQ ID NO: 276605 - DNA, 781 bp, Unknown
  Bacterial polypeptide expressing nucleotide sequence isolated from the Sargasso Sea
atagaacaatattttattaataagacacctttagataaaaatattttattaagttcaactgaagaaattttaaaacctttgagggtcgtaagagaatctttagaacaaaaccaaaatgaaaacgtcgcaagtggggaacttctcgatctcatgcgaagagcaaaatgttttggaataaatttagctagactagatattaggcaagaatcttcaagacatagacaattaattgccgaacttattaaaaaaaaatttaataaaaattattataatttcactgaggaagaaaaaattaattttttaaaatctaaattaacttcaactaagagctatattaataaatttaaattttctaataaagagaacaatgaagtttggtctacttttaaagtacttgcagatgaaccttcagagtgcttaggagcatatgtaatttcaatgactacgtctgtgtcagatattttgtcagtttcatttctacaaaaagaggcaaaaataaataataaattaagagtagttcctttatttgaaacattagatgatttgattaatgcaaaatcaataatggagagtttattttcaaaaaaatggtacagaaaactaattaataataaacaagaagtaatgataggatattcagactctagtaaggatgcaggaaaaatatgtgctagctggcatcaatacaaagcccaagaagaaatagtcagattaggaaaaaaattcgatgtaaatgttactttttttcatggaagagggggctctcccggtagaggtggcg

SEQ ID NO: 276606 - DNA, 784 bp, Unknown
  Bacterial polypeptide expressing nucleotide sequence isolated from the Sargasso Sea
gattagtacagatttaacttgtgagtctgtaaacaccttacttactcaggttcatatttttggtttttctttagcaagtttagatattcgtcaagagagtacaaggcatagtgacgctatacaagagcttacaaaatatcttgatttatctgttcaatatgaccaaatgtctgaggatgagaaaattaaatggcttatagatgaattaaatacaaaaaggcctttaataccatctgacgttaactggacaaaaactacagaagaaactttttcagtttttaaaatggttaagagactacagcaagaatttggaagtcgcatttgtcattcttatgtaatttcaatgagtcatagtgcatctgatttgcttgaagttcttctactggcaaaagaaatgggacttcttgatcaaaattcacaaaagtcaaaattattagttgttcctctttttgaaactgtggaagaccttaaaagagcaccagaagtaatggaaaagttgtttaaattagatttctatagatcattattgccaaaagtaggagaatcttttaaacctctgcaagaattaatgcttggatattctgatagcaataaagattcagggtttgtttctagtaattgggaaattcatagagcccaaatagcacttcaaaatctctcaagtagaaataacatattgctaagactttttcatggaagaggtggttctgtagggagaggaggaggaccagcctatcaggctatattggctcaaccaagcggcactttaaaagggcgaataaaa

SEQ ID NO: 276607 - DNA, 1000 bp, Unknown
  Bacterial polypeptide expressing nucleotide sequence isolated from the Sargasso Sea
aaattattaaataaatcgataaaagaaaaaaaattttttatagataaaataaaaataaaagataaagaaaataaagaagtttggaatactttcaaacagatagcaaaaactccaattgagtgtttaggagcttatgtaatatcaatgacttctacagcatccgatattttatctgtatattttttacaacaacaggcaaaaatgaagaatttgataagagttgtcccactttttgaaactctagatgatttaaaaaacgctaatgatgtaatgaaaaatttatttaagcttagttggtatagaaaaatgataaattcgaaacaagaagttatgattggatattcagactcaagcaaagatgctggaaagttatctgcgagttggcatcaatacaaacttcaagagaagcttagaagtttagctaaaaaacacaagatagatcttgtattcttccatggcagaggaggatctccaggaagaggaggtggtccaattcaggcaaccttaaaatcacaaccttcaggaactgtaaatggaaaaattagaattacggatcaaggtgaggtaatccaacaaaagtatggttataaacctttagctgaatataatttatgtagttatatcggtgctgtaatggatgcttctttaaatccaccaccaagatcaaaaaataattggcgtgaattaatccaaaaaatgtcagaaatttccacatccacatacagaaaatatttaaatcaaagtcaagattttattcgttactttaaaacagtcacaccacataaatcacttggaaaactttcaattggctcaagaccaacaagaagaaagaaagttgacaacatccaaagtttaagagcaattccctgggtatttgcttggacacaaattagactgatgttaccagcctggcttggtacaacagaggcattaagatatggatcaattaaaaagtttaaaaaaacactgactgatatggagagaaattggcccttacttg

SEQ ID NO: 276608 - DNA, 863 bp, Unknown
  Bacterial polypeptide expressing nucleotide sequence isolated from the Sargasso Sea
agataaagttgaaaacttatattacaaatcagtaaacgaatttacatatgatcttgaactaattaaaaatagcctgattagtacggatttaacttgtgaggcagtaagtactttacttactcaggttcatatttttggattttctttagcgagtttagatattcgtcaagaaagtacaaggcatagtgacgcaatacaagagctcacaaattatcttgacttatctgtacgatatgaccaaatgtctgaggaagagaaaattaaatggcttgtggacgaattaaatacaaaaaggcctttaattccctatgaagtcaactggacaaaaaatacagaagaaacattttcagtttttaaaatggttaagagactgcagcaagaatttggaagtcgaatttgtcattcttatgtaatttcaatgagtcatagtgcatctgatttgcttgaagttctcttactggcaaaagaaatgggacttcttgatcaaaagtcacaaaagtcaaaattattagtcgttcctcttttcgaaactgttgaagaccttaaaagagcacctgaagtaatggaaaagttgtttaaattagatttttacagatcattattgccaaaagttggagaatcatttaaacctcttcaagaattaatgcttggctattctgatagtaataaagattcggggtttgtttctagtaattgggaaattcatagagcccagatagctcttcaaaatcttgcaagtagaaataatatatttctaagactatttcatggaagaggcggttctgtaggtagagggggaggaccagcttatcaggcaatattggctcaaccaagcgggactttaaaagggagaataaaaataa

SEQ ID NO: 276609 - DNA, 886 bp, Unknown
  Bacterial polypeptide expressing nucleotide sequence isolated from the Sargasso Sea
aaaatcaataaagtttcatctaataataaaattaagctcactttatttcatggccgaggcggatcagttggccgaggcggaggacctgtttatgctcaattattatctcaacctcctggaacagttaatggcagaactagagttactgaacaaggagaagttatccaacaaaaatatagctccgagtcgttggctgaatacagcttaggtacttatattggctcagttttagaagctacattatctccaccaataaaacctaaaaaaaattggataaaattaatggagcaaatgagtattgtttctagcaaggcatatagaaattacctaaatgatgatataaattttttaaaatattatgaaacaattacaccgcagaatattcttggaaaattatacattggttctagacctgcaaaaagaaaaaaatctcatgaaataaaaaacttaagagctattccatgggtttttgcttggactcagataagattattattaccagcatggttaggcattacagaagctattgaaattgcttcaaaatctaaaaatagatcaacattaaatcaaatgattagtaaatggccttttttttatgaaatgatggatatgcttgatatggttctaactaaaactgatcaaagagtaattaagttttatgaagaatgtcttgctgatgatgatcttaagaaagttggaaatgatataagacaaaaactatcttcacttataattttagataaaaagataatgcccaaacatattttaaatcaaagaaaagaatttagaaaatctattaagataagagatacttatgcagaaatacttaatttactacaagccgatatcatgaaaaaaatgaataaaaaaaataaagatgaagtac

SEQ ID NO: 276610 - DNA, 748 bp, Unknown
  Bacterial polypeptide expressing nucleotide sequence isolated from the Sargasso Sea
acagatttaacttgtgaggcagtaaataacttacttactcaggttcatatttttggattttctttggcaagtttagatattcgtcaagaaagtacaaggcatagtgatgcgatacaagagctgacaaattatcttgatttatctatgctctacgatcaaatgtctgaggaagagaagattaaatggcttgtagatgaattaaacacaaaaaggcctttaattccctctgacgttaactggacaaaatctacagaagaaaccttttcagtttttaaaatggttaagagactgcagcaagaatttggaagtcgtatatgccattcttatgtgatttcaatgagtcatagtgcatctgatttgcttgaagttcttttactggcaaaagaaatgggacttattgatcaaagttcacaaaaatcacaattattagtcgttcctctgttcgaaactgttgaagaccttaaaagagctccagaagtaatggaaaagttgtttaaattagatttttatagatcactattaccaaaagttggggaatcatttaaacctcttcaagaattaatgcttggatattctgatagcaataaagactcagggtttgtttctagtaattgggaaattcatagagcccaaatagctcttcaagatcttgcaagtagtaatgatatattgctaagactttttcatggaagaggtggttctgtaggtagaggaggaggaccagcttatcaagcaatattggctcaac

SEQ ID NO: 276611 - DNA, 868 bp, Unknown
  Bacterial polypeptide expressing nucleotide sequence isolated from the Sargasso Sea
gagctgaaaaaccgccgaccactgctgccggggcatttcaagcccagtggtgaaaccgaagaggtgttggcgacttgccgtgaagtggcgcgggcaccggcggcgtccctgggttcttacgtgatctccatggccggtgcagcctccgatgtgctggcggtgcaactgctgcttaaagaagccgggttgcaacgaccgatgcgcgtggtgccgctgtttgaaaccctggccgatctggacaatgccgggccggtgatcagccggctgttggcgctgcacggctaccgcgcgtggctacatgggccgcaggaagtgatgatcggttactccgattcggccaaggacgccggcactaccgcagcggcgtgggcgcagtaccgtgcccaggaaaccctggtgcaggtttgccgtgagcaggatgtcgagctgctgttgtttcacggtcgtggcggtacggtggggcgtggcggtggtccggcgcatgcggcgattctgtcgcagccgcccggttcggtggcggggcgtttccgcaccaccgagcagggtgaaatgattcgtttcaaatttggcctgccggatatcgccgagcaaaacctcaatctgtacctggctgcggtgctggaagccaccttgttgccgccacccagcccggagccggcctggcgcgacctgatggacaaactggccagcgatggcgtcagtgcctaccgcgcagtggtgcgtgagcatccgcagtttgttgcctatttccgccaggccacgccggagcaggaactgggccgattgccgctgggcagccgtccggccaagcgccgcgagggtggggtggaaagtctgcgcgccattccatggatctttgcctggaccc

SEQ ID NO: 276612 - DNA, 811 bp, Unknown
  Bacterial polypeptide expressing nucleotide sequence isolated from the Sargasso Sea
atgaaaagtatttgtaaacatttaggtttaggtgattttgaaaaatggccagaagaaaaaaaaatttcttttttgtctaaagaatttaaatcaaaaagacctttagtatcaaaaaatatttctttagataaagaagacaaagaaacttggtccacatttaaaatgatttcgaaattaccaagagaatgtttaggggcttatattatttcaatgtcatctaaggcgtctgatattttaactgtattggttttacaaaaagaagctggaattaaatcgtgcttaagaacagttcctttatttgaaactttaaatgatctcgaaaatgcacatcatgttatgaaagaaatttacagaatatcttggtacttaaaatattttaaaaataaacaagaggtaatgattggatattctgattcaagtaaagatgcaggaaagttagctgctagttgggctcaatactgcactcaagaaaagttacaagcgttatccaataagtataaagttgatcttacattatttcatggaagaggcgggtctgttggaagaggcggaggaccaatttatgaagcattactatctcaacctccaggaacagttaatggcagaacacgtgtaactgaacaaggagaaattatacaacaaaaatatgcaacagaatctttagctgagtacagtcttggtacttatattggatctgtgttagaggcaactttagcgcctccagttaaaccaaaaaaaaattggcgtgaactaatggatgctatgagtgcagtttctactaatgcctatagaaacaacttttttaataaag

SEQ ID NO: 276613 - DNA, 831 bp, Unknown
  Bacterial polypeptide expressing nucleotide sequence isolated from the Sargasso Sea
agacgcaggtgcacttgctgcgggctgggctcaataccaatcacaagaagccttggttgcgattgctgatgagtttgacgtaagcctgacgctattccacggccgtggcggtacaattggtcgtggtggcttgccagcacatgctgccatttactctcagcctcctggctcgctagacggcggcttccgtgtaactgagcaaggcgaaactattcgctataaattcggtatgcctaagctggctaaacgcagcctaggtatttacgccagcgccataattgaagccatgttattcccgcctccggcaccaaaagaagaatggcgagagcttataactgcaatggcagcccaaggtcgtgacaactatcgtgcaaccgtgcgtcacgataaagagttcgtaccttacttccgtgttgcaacgccagagcaagagttaggcaaactcccactaggtagtcgcccagcgaagcgtaagccacaaggtggtattgagagcctacgtgcgattccatggatatttgcttgggcacaaacccgtttggtactgccaagctggttaggcgttatgcgcgctatcgatagcgtgaagacaccggaaaatgaaaaagtggttaacgaaatgttcagcgaatggccgttctatcgttcacgtctttcaatgctagacatggtgttccataaagccgatccgcgtatcagtgaagcttatgatgagcgcttagtacccaaagagcttaaacactttggtgaagctctgcgtgccgagcttaaagaaagcatctcgtcgctactggctataaccggtgacggcgacatcatgaagaacgaccc

SEQ ID NO: 276614 - DNA, 831 bp, Unknown
  Bacterial polypeptide expressing nucleotide sequence isolated from the Sargasso Sea
tagagtttttttaagacctttaagagataaaattcgattaactcatagatctattgaacaacatttagtcaataaaaaatctttaaatcataaagaattagtaagttctcgagaagaaatattaaaacccttaagagtagtaagagagtctcttgagcaaaaccaaaacgaaaatatagctagtggtgagttgttagatttgatgagaagagctaaatgttttggtattaatttagcaagattagatatcagacaagagtcttctagacacagtcaattgataaatgaatttgtaaaaagaaaatataataaaagttatttaaaatttagtgaagataaaaaaatagaattcctaaaaaaacatattcttacaaaaaaaaatcaaataaatgatttacaaataagaaataaagaaaataaagaagtttggtctacttttaaaattctagctaatgagcctagtgaaagtttaggagcctatgttatatcaatgacaacctcagcttctgacatattatctgtagtatttttgcagaaggaggcaaaaattaaagataaattaagagtggttcctttatttgaaactttggatgatcttattaattcaagatcaataatgcagactttattttcacaaaaatggtatagaaaattaattaataataaacaagaggtgatgattgggtattcagactccagtaaggacgctggaaaaatatgtgctagctggcatcagtataaggcccaagaggaaatagtgaatttggcaaagaaatttaaaatagaggtaattttttttcatggccgaagcggatccgcaagaagaggtgg

SEQ ID NO: 276615 - DNA, 899 bp, Unknown
  Bacterial polypeptide expressing nucleotide sequence isolated from the Sargasso Sea
aaattatcttgatttatctgtccattatgaccaaatgtctgaggaagagaagattaaatggctaatagatgaattaaatacaaaaaggcctctaattccatctgacgttaattggacaaaaactacagaagaaaccttttcagtttttaaaatggtcaagagactacaaagagaatttgggagtcgcatttgtcattcttatgtaatttcaatgagtcatagtgcatctgatttgcttgaagttctcttactggctaaagaaatgggacttcttgatcaaaattcacaaaagtcaaaattgttagttgttcctctttttgaaactgtagaagaccttaaaagagcaccggaggtaatgggaaagttgtttaaattagatttttatagatctctattgccaaaagtgggagaatcttttaaacctctgcaggaattaatgcttggatactctgatagcaataaagattcggggtttgtttctagtaattgggaaattcatagagcccaaatagctcttcaaaatctctcaagtagaaacaacattttgcttagactttttcatggaagaggtggttctgtagggagaggaggaggaccagcctatcaggcaatattggcccaaccaagcggcactttaaaaggacgaataaaaataacagaacaaggtgaagttttagcgtctaaatatagtcttcccgaactggctttatacaatcttgagactgtcactacagcggtaattcaaaatagtttggtaaataatagacttgacgctactccagaatggaatcaattaatgtctaggttggcagaaacatcaaggtctcactatagaaaattagtgcatgagaatcctgatttgttaaatttttttcaagaggtcactccaatagaagaaa

SEQ ID NO: 276616 - DNA, 829 bp, Unknown
  Bacterial polypeptide expressing nucleotide sequence isolated from the Sargasso Sea
aatgaaaaaatattgctaaattcacgagaagaaattttaaaaccattaagagttgttagaaaatctttggaagaaaaccaaaatgaaaatttagcaagtggtgaattattagatttaatgagaagagctaaatgttttggaataaatcttgctagattagatataagacaagagtcatccagacattcccaattgatagcagaatatataaaaagaaaatataaacaaaactattataaatggagcgaaaggaaaaaaattaattttttagcaaatcaaattaaaaagaagagaaacttattaactaattttgaatttaaaaataaagaaaataaagaagtttggtcaactttcaaaacaatttctaaacaaccagatgaatgccttggagcatatgtcatttcaatgacctcgtctatttctgacatagtaactgtctcatttttacaaaaagaagcgcaaatcaaaaataaattaagagttgttccattatttgaaactttggatgatctaataaactcaaaagccattatgcactcactttttcaagaaaaatggtacagaaaattaataaataacaaacaagaagtgatgattggttactcggactctagtaaagatgctggtaaaatatgcgcaagttggcatcaatataaagcacaagaggaaatagttaaacttgcaaaaaaatataaaatcgatgtaactttttttcatggaagaggtggatcagctgggagaggaggtggtccaatacaagctacacttaggtctcaacctccatactctgttaatggaaaaataagaattactgatcagggagaagtta

SEQ ID NO: 276617 - DNA, 887 bp, Unknown
  Bacterial polypeptide expressing nucleotide sequence isolated from the Sargasso Sea
cgagttgctgctgttcatggtcgcggtggcaccgtgggccgtggcggtggccctgcgcatgcggcgatcctgtcgcaaccgccgggctcggtggccgggcgtttccgcaccaccgaacagggcgagatgattcgcttcaagttcggcctgccggacatcgccgagcagaacctcaacctctacctggcggcagtgctggaggccacgctgctgccgccgccggcgcccgagcccagctggcgggcgatgatggaccgtctcgccagtgccggtgtgcaggcttaccgtggcgtggtgcgcgagcacccgcagttcgtcgagtacttccgccaggccacgccggagcaggaactgggccggttgccgctgggcagccggccggccaagcggcgcgcgggcggcgtggagagcctgcgggcgattccgtggatcttcgcctggacccagacgcgcctgatgctgccggcctggctgggctgggagcaggcgctggggcaggccctggcggggggcgatggcgagctgctcaaacacatgcgcgagcactggccgttcttccgcacgcgcatcgacatgctggagatggtcctgagcaaggccgacgccagcatcgcggcactgtacgacgagcggctggtcgagccggccttgcagccgctgggtgggcaattacgcgacctattgtcgcaggcgtgctccgccgtgctggaactgaccggccagtctcgcctgctcgcgcacagtcccgagacgctggagtcgatcagcgtgcgcaatacctatctcgatccgctgcacctgttgcaggccgagttgctggcccgctgccggctccgcgagcaggcgccggagagccctctcgagcaggcgttgctggttagcgtggc

SEQ ID NO: 276618 - DNA, 824 bp, Unknown
  Bacterial polypeptide expressing nucleotide sequence isolated from the Sargasso Sea
tttacgggtcactgaacaaggtgagatgatccgctttaagtttggtctcaatggcttagcgcagcgcagtctggccttgtatgccagtgctgtactggaaggggtattgttaccgcctcctgtgccagagcaaagctggcgcgagctgatgcagcaactggcaaccgcctcctgcgaagcttaccgcgccgtggtgcggcatcacccggattttgtgccttatttccgcgctgctacgccagagctggaattaggacagttgccactgggcagtcgtccgcctaagcggaatcctaatggcggtgttgaaagtttacgtgccattccatggatttttgcctggtcgcaaaaccgcctgatgttaccggcctggttgggtgctggtaatgcgctggctgttgttgttgagcaaggaaaaaccgagttattggctcagatgcgggcacaatggccatttttcgccacccgtttgtcgatgctggaaatggtgtatttaaaagcggatgcagaaattgccgcctattacgatgaaaaactggtgccggagcatttgttgcctttaggtttacaattgcgtcagcagctggctgcagatactgctttgctgttaaagctgatccaaagcgatacgctgatggccaatgaagtctggatccgtgagtctattatgctacgaaatacttatgtcgacccgctgcatatactgcaggtggaattattaaaccgggtgcggcatgcgcctgaaacggtcaacgacagtattaaacgcgctttgatggtgactatcgccggtatagcagctggtatgcgtaactcgggttaag

SEQ ID NO: 276619 - DNA, 197 bp, Unknown
  Bacterial polypeptide expressing nucleotide sequence isolated from the Sargasso Sea
cgattatgagcgccatcaactgatgcgccgcctgcgccagcttatcgcacagtcctggcatactgatgaaatccgtaaacaccgtcccagcccgttcgacgaagccaaatggggctttgcggtggtgaaaacagtctgtggaaaggtgtgcctaactatcttcgcgagcttaacgaacagctggaagcgaacctgaa

SEQ ID NO: 276620 - DNA, 1055 bp, Unknown
  Bacterial polypeptide expressing nucleotide sequence isolated from the Sargasso Sea
taaaccatcaccatttgatgaggctagatggggattggccattattgaggatagtctgtgggatacagttccaaaagtttatagaaaattaaattctatatttgtaaaaaatatgggtaaaaatttaccaaaaaactttaatcctattgtatttggttcatggatgggtggtgatcgagatggcaatcccaatgttacttcagaagtcacaagaaaagtaattttactctctagatgggaagccactaaattatacgaaaaagctctcactaaaataataagatcctattctatggaaaaggcttcaaaaaaaatcttaagtaaagttggtaaatcatttgagccttatagagtttttttaagacctttgagagacaaaatgagaattacccatagatctattgaacaacacttggtgcataataagccgttagatcaaaaaaaattattaagttctcgagaggaaattcttaaacctttaagagttgtaagagagtctttagagcaaaatcaaaatgagaatattgctagtggtgaattgttagatttaatgaggcgagcaaaatgttttgggattaatttagctagattagatataagacaagagtctgcaagacataaacaattgatatctgagtttgttaagacgaagtataaaaaaaattattcaaattttactgaaaaagaaaaaataaaatttttaaagaaattcataacttctaaatctaataaaattagaaattttcaatttaaaaataaagaaaataaggaagtatggacaacctttaatacattatctaaagagccgccagagtgtttaggtgcatatgtaatatctatgactacctctgcttcagatattttatcagtatctttcttacaaaaagaggcaaatataaaaaacaaattaagagtagttcctttatttgaaactttagatgatcttgttaatgcaagatccatagtggaaaccctgttctcacaaaaatggtatagaaaactgatcaatcatgaacaggaggtaatgattggatactcagactcaagtaaggacg

SEQ ID NO: 276621 - DNA, 1201 bp, Unknown
  Bacterial polypeptide expressing nucleotide sequence isolated from the Sargasso Sea
ttacttaataatttaataaaacaaaaaaaaacttttgttaacaaaattaaattaagagacaaagagaatttagaagtttggaaaacatttaagcaaatatctaaagagccagagcaatgtatgggcgcttatgtaatttcaatgacttcaaaagcatctgatattttatctgtttatttattgcagttacaggctgatacaaagaatttgttaagagtggtaccactttttgaaactttagatgatttaaagaatgccaaaggtgttatgcaaaatttatttaaacttccttggtatagaaaaattatcaattcaaaacaagaggtaatgattggatattcagactctagtaaagatgcaggaaaactatccgcaagttggcatcagtataaactgcaagaagaacttagaaatttagctaaaaaatataaaatagatcttgtatttttccatggaagaggaggatctccaggaagaggaggaggaccaattcaggcaactcttaaatctcaaccatctggaacagtaaatggaaaaattagaattactgatcaaggagaggtgatacagcaaaaatatggatacaaacctttagctgaatacaacctgtgtagttatatcggtgcagtaatggaggctactttaaatccacctcctagatctaaaccaaattggcgagagcttattcaaaaaatgtctgagatttctacatctgcttaccgaaagtatttaaatcaaagtgaagattttattagatattttaaaactgttacaccgcataaatctcttggaaaactcgcaattggttcaagacccactaagagaaaaaatgttgataatattcaaagtttaagagctattccttgggtatttgcatggacacaaattagattaatgcttcctggttggcttggcacaactgaggctttgagatatggatcaattaaaaagtttaaaaaaactctaacagacatggagaggaactggccttattttgtatcaacaatggatattttggacatggtgatttcaaaagttgatcctgaaatatcagttatttatgaaaataatttagctgatcaatctttgataagaattggaaaaagattaaggtttcaatttgatgcattggtcaaattgcacaataaaattaccccaaaagaagttataaaagagaggaaagaatttagaaaagcgatat

SEQ ID NO: 276622 - DNA, 2689 bp, Unknown
  Bacterial polypeptide expressing nucleotide sequence isolated from the Sargasso Sea
catgaaaaaaagagatctatattacgagcgtataccaactaaatttttcagggaaaatgttaaatatctgggtaatattttagggagagttatcaaagaacaagaaggtcaaaagttttttgaattagttgaaaaagttagaaaattatcaaaagctaacaaaataaattctaaaaataatcaaactaatgaaaaagtaattaaagcaattaaaaaactgagcccaaaaaattcatttaaattaactagagcattcacacattttatgaattttataaatttagctgatttaattgatgcttctagaaagcttaatgaatatgaaaatagtaataagaaaatttcaaacaacaacatatttatagaggaaatatttgaggatctctttagaaataaaaaaatttcagaaacaaaaatatataataccgccaaaaacttgaaaattggaattgtattgactgcacacccaaccgaagtaaagagaagaactcttattcaaaaatatcacagtataattgaaattcttgaacaaagagatctgcttaaaaattttcaatcaaaattagtagttttggagaaaaaactttttgatgagttaactattatttggaatacggatgatttaaaaagaattaaaccatctccattcgatgaagcgagatggggacttgcaataattgaggatagtttgtgggatacaattccaaaagtttatagaagattaaattcaatttttgtgcagaacatgaataaaggtttgccgaaaaattttaatcctattgaatttggatcttggatgggaggagaccgtgatggtaacccaaatgttacagctgatgtcaccagaaaagtaattttactatcaaggtgggaggctgcaaagttgtacgagaaagcacttactaaaataataagatcttattctatggaaaaatgttcgaaaaaaattcttaaaagtgtagggacatcttttgagccttatagagtttttttaaggcctcttagagataaaatgaggatcacgcatagatcgatagaacaacatcttgttaataaaaaacctttaaatcacaacaatttattgagttctcgagaggaaatattaaagcctttaagagttgtaagagaatctttagaacaaaatcaaaatgaaaatcttgctagtggcgaattattagatttaatgcgaagggcaaagtgttttggtattaatcttgcaagattagacataagacaagagtcttcaaggcatagtcagttaattagtgaatatgttaaaaagaaatataaaaaaaattatttaaaatttagtgaaaacgaaaaaattaaatttttaaaaaaacaaatactctctaaaaaaaatcaattaaataaatttcaattttcaaatagagaaaataaagaagtttggtcaacttttaaaattttagctaatgaacctagtgaatgtctcggagcttatgtaatatcaatgactaattcagcttcagatttgttatctgtaatatttttacaaaaagaggccaatattaaaaacaagttaagagtagtcccattatttgagactttagatgatttaattaatgccaaagaaataatggagaaattattttctcaatcatggtacagaaaagttattaaaaatgagcaggaggtcatgattggttattcagactcaagcaaagatgcaggtaaaatttgtgcaagttggcatcagtataaagctcaagaggaaataattaaattaagtaaaaaatataatattaatgtaactttttttcatggaagaggtggatctcctggacgaggaggtggcccgatacaatcaacattaagatcacaacctccaaactctgttaggggaaaaataagaattaccgaccaaggtgaagtaattcagcaaaagtatggttatgagccattagcaaaatataatttatgtagttacataggtgcagtgactgaagccaccttaaaaccatcacctgttccaaaagctagttggagatcattaattgagaaaatgtcagagatatcaaaaaattcttatagaaaaaatattaatcaaagttctgattttataaaatactttgaaactgttacgcctcacaaagctcttggtaaactttcaataggttcaaggccctcaaaaagaaaaaatattgatactataaaaagtttaagagcaatcccttgggtgtttgcttggacacaaattagacttatgctgcctgcatggcttggaagtgcagaagctttaagatattcatatataaaacaatttagaaaaactttatttgacatggagagaaactggccattttttaattcaatgcttgatatattagacatggtgattactaaagcagatcctgagatatcaaaaatttacgaagagcatttagcagatgaaagtctaaagagagttggaaaaaaacttagatttcaatttgatgttattaaaaaactaaataaaaaaattacgcctaaagaaataattgctgcaagaaaacaatttagaacatcaataggtgtaagaaatatttattctgaagttttgaacatagttcagcctatcgcaataaaaaaaattaagacaattaaaaataaaaaagataaagaatatttgaatgatactttgttgacttcaatagcaggaatcgctgcagcaatgaaaaatactggataa

SEQ ID NO: 276623 - DNA, 1121 bp, Unknown
  Bacterial polypeptide expressing nucleotide sequence isolated from the Sargasso Sea
tctgcaagaattaatgcttggatattctgatagtaataaagattcaggatttgtttctagtaattgggaaattcatagagcccaaatagctcttcaaaatctctcaagtagaaataacatattgctgagactttttcatggaagaggtggttctgtagggagaggaggaggaccagcctatcaggcaatattggctcaaccaagcggcactttaaaaggacgaataaaaataacagaacaaggtgaagttttagcttctaaatatagccttcccgaactggctttgtacaatcttgagactgtaactacagcggtaattcaaaatagtttggtaaataatagacttgacgctactccagaatggaatcaattaatgtctaggctggcagaaacatcaaggtcacattacagaaaattagtccatgagaatcctgatttgttaaatttctttcaagaggtcactccaatagaagaaataagtaaattacagatatctagtaggcctgctagaagaaaaaaaggtgcaaaagatttgtcaagtttaagagctattccatgggtatttggttggacacaaagtagatttcttttgccaagttggtttggagtaggcactgcattgtcatctgaattaaattcagatccacaacaaattgaacttttaagagttctgcatcaaagatggccattttttaggatgcttatatctaaggtggaaatgacattgtcgaaggtagatctcgaagttgctagatattatgttgatactcttggcagtaaagaaaataaagattcttttgatgatatttttgaagtaatttctaaagaatataatcttacaaaatctttaatacttgaaattactggcaaaaacaagctactagaatctgatagagacttgaaatcatcagtaagcttgagaaataagacaattattccattagggtttttacaggtttcacttctaagaagattaagagaccagacgagacaacctccaataagcgaattcattatcgataaagatgaatctagaagagcttatagcagaagtgaacttttgaggggagcacttttaactattaatgggatagcagctggcatgagaaatacaggttgat

SEQ ID NO: 276624 - DNA, 1414 bp, Unknown
  Bacterial polypeptide expressing nucleotide sequence isolated from the Sargasso Sea
gagaaaaataagtgggctcataaatgaattagatacaaagaggcctttaattccttctgacgttaactggacaaaaactacagaagaaactttttcagttttcaaaatggttaagagactgcagcaagaatttggaagtcgtatttgtcattcttatgtaatttcaatgagtcatagtgcatctgacttgcttgaagttcttttgctggccaaagaaatgggccttctttatcaaaattcactaaaatccaaattattagttgtccctctttttgaaactgttgaagatcttaaaagagccccagaagtaatggaaaagttgttccaattagatttttatagatcattattgccaaaagttggagaatcttttaaacctttacaagaattaatgcttggatattctgatagcaataaagattcagggtttgtttctagtaattgggaaattcatagagctcaaatagcgcttcaaaatcttgcaagtagaagcaacattttactaagactttttcatggaagaggcggttctgtaggtagagggggaggaccggcatatcaagcaatcctagcgcaaccaagtggtactttgaaagggcgaataaaaatcacggaacaaggtgaagttttagcttctaagtatagtctgcctgaacttgctctttataatcttgaaactgttactacagctgttattcaaaatagtttggttaataatagacttgacgctactccggaatggaatcaattaatgtctaggctggcagaaacatcaagatctcactacagaaaattagttcatgagaatcctgatttgttgaatttctttcaggaagtaaccccaattgaggaaatcagtaaactacagatttctagcaggcctgcacgaagaaaaaaaggtgcaaaagatttgtcaagtttaagagctattccatgggtttttgggtggacacaaagtagatttcttttgccaagttggtttggagtaggtactgcattatcatctgaactaaattcagatccacaacaaattgaattattaagagttctgcatcaaagatggccattttttaggatgcttatatctaaggtagaaatgacattatctaaagtggatttagaagttgctagatattatgttgacactcttggaagtaaagcaaataaagtttcttttgataatatttttgaagttatttctaaagaatataatcttacaaaaactttaatactcgaaattactggtaaaaataagctccttgaatctgacagagatttaagatcatcagtaatcttgagaaataagacgatcattccattgggatttctgcaggtttcacttttaagaagacttagagaccaaacaagacaacctccagttagcgaatttttaattgacaaagatgaatgctag

SEQ ID NO: 276625 - DNA, 2638 bp, Unknown
  Bacterial polypeptide expressing nucleotide sequence isolated from the Sargasso Sea
atgtatgcgtcgttaagatcgaacgtgagtatgttagggcagatcctgggcgatacaatgcgcacccacctcggtgattctttcctcgagaaggttgagcaaattcgtaaactcgcaaaagactcccgccgtggcgatgaagcggcacgggagcaaatgctagaactgctcaccgcactccccgatgaagagttagtgccttttgccaaagccttcaaccaattcctcaacttagcaaacttatccgaacaatttcataccattagccgtaactgcgatgagctggtttgcgtaccggatccagtcgaacagttgcttggccgcatgctgaatggccgtatcgatcaaaccaagatgttggattgcttaaaaacgctggatatcgacttagtcctcaccgcgcatccaacggaaatctctcgccgcacactgatccaaaaatatgctgcgattgtggattgcctcgccgagcaagaaaacaatcaactgtcggacagagagcgccgccaaattaacctgcgtctgcgccagttaatcgcccagatttggcacaccaatgaaattcgccgtgaacgccctacacctgtggatgaagcccgctggggattgtccaccattgaagaatctctctggcatgctgttcccgactttttaaggcagctcaacgatcaagtgcaagatcgcactggccagcaattgcctatcgatatcgcgccagtacgcttctcaagctggatgggtggcgatcgcgacggcaacccctttgtgaccgctaaagtcacccaagaagtgctagatcgtaatcgccatgccgccgcccgtttattcctcaaggacatagtgttgctggttggcgagttatcgatggaagaagccaacagcgagctgatggcgtttaccaacaatagctgtgaaccctatcgttttgtgctgcgctcattaagacaaaaactgcgcgacaccatagattacttaaacgcccgcatcgagggccataatcctgaagtggataaatcggcgctgatttggcaagaaagcgatctgaaagcgccgctagagatgctgtataagagtttatgtgactgcggcatgcgtttgattgctaacggtttactactcgacattctgcgccgactcgcttgttttggcatccatatgttaaggctcgacatccgccaagacgccggccgtcactgcgatgtacttgcagagttaacccgctatctaggtatgggtgactttaatcattgggatgaaactgaaaaacaagccttcttactgcgtgaactcagtaaccgtcgtccgctgatcccaagcaactggcaaccttccgccgacgtagccgaagtgcttaacacttgccgcttaattgctaaacatcctgctaaggccttgggctcctatgtcatctcgatggcgagcaagccttcagatgtattaaccgtattattactgctcaaagaaaccggctgcactcatccaatgcgcgttgtgccgctatttgaaaccttaagcgacttaaataacgccgccgagtgcattaccgcactgctcgatatcgactggtatcgtggttacaccaaaggcatgcaagaggtgatgatcggctattctgactcggccaaagacgcgggtgtaatggcagccgcttgggcacaataccgtgcacaggagcagttagtcgccgtctgtaaacaggctggcgttaagctgacgctgttccatggtcgtggtggcagtattggtcgcggcggcggcccagctcacaaagcgattctgtcacaaccacccggctcagttgatggtcgtattcgcgtcaccgagcaaggtgagatgatccgctttaagttcggcctgcctaaattggcggtgcaaagcttagccctgtacacctcagcggtgttagaagcgaccttgcttccaccgcccgagcctaagcaggaatggcgcaattgtatggaacgaattgctgaggagtcagtgagtgcttaccgcggtattgtccgtgaagagccggattttgtgccttatttccgtgcagccacaccggaagttgaactgggcaaactaccattaggcagtcgcccagccaaacgccgtgtcgatggtggtatcgagagcttacgtgccattccttggatttttgcttggtcacaaaaccgcttaatgttgccagcatggctcggcgccggtgaagcattacaggctgcctgccaacgtggcgaaatgggcttactacaggatatggagcgcgaatggcccttctttagcacacggatttccatgctggagatggtatacgccaaggcggaacctaatttggcgcgttactatgaaacctgcttagtaccgaccaatctacatcacttaggcgaaactttacgccagcgtttagatctcggcattaaagtggtgctggagctgactaaatcagataccttaatggcgcatacaccgtggaatcgcgaatcagtcaaactgcgcaatccctatatcgatccattaaacttcctgcagaccgagttattggctcgtacccgcaaggaaacaaccgaagctcccgcttccgaacacgtgcagctcgccttaatgctgacgattgccggtgtcgcggcgggcatgagaaacacaggttaat

SEQ ID NO: 276626 - DNA, 2122 bp, Unknown
  Bacterial polypeptide expressing nucleotide sequence isolated from the Sargasso Sea
atggcaaaacgacttaaacataaaattgcaaatattgagctttcaaaattagttagtttattaggaaaaatattaggagtagttgtaaaagaacaagaaggtaaactgctttataacaaaattgagcaaataagatatttatctaaagcaagcagaggggctaaaagtaaacaaaaaataaaattaaatgaaactaagcaatttagaaaattgataagtagcattagcaaattaaacccatcacaatcattaataatagcaagatcttttagtaaatttttaaatttttcaaatttagcagagtcactagataatgttcacaaggtagaagagggtaaaattcaacaagctagaggtaacgacgaatttactttacttgaggaggtgatagaaaaactcttgaagaagaaaaaaatatcaaaagaaaaattttataatttatctaaaagcttaaatatagaacttgtacttacagcacatccaactgaagttaaaagaagaacacttatacaaaaatatacaaaggtaaatgatattttagaaaaatttaataaatcaagaatttttaagataaaaaatatagaaaaagaaaataaaattttagaaaaaaaacttcatgaacaaattacatcaatttggaaaactgatgagcttaaaagatcaaaaccaactcctgttcaagaagcaaaatggggtctggcagtcattgaggatagtttatggaattctattccaaaaatttgttctagattggatgaagcagttcaaagatattcaggcaaacaattaccaataaactattcaccgtttaaatttggatcatggatgggtggagatcgagatggcaacccaaatgttaatcataaaatcactaaagaagtaatattgttatcaagatgggaggctgcaaatttgtatgagaaagaaataacaaaaattatacaagatctctcaatgcatgaatgttctaacgaaatcaaaagaaaaacaggcgaaagtcaggaaccttatagggtttatcttagaccggttagaagtaaattacaaaaaactcaaaaggaaatcgaactttatttgctcaaaagaaaaaaatttaatgataaattaattgtgaattctataaatgaaataataaaccctttagtagtagtttataactctctgtgtaaaataaaatgtaaagcgttagcagatggatcagttttggatttaattagaagagcttatgcatttggtcttaatcttgcaaaattagatataagacaagaagcctcaagacatacagatataataagtaaaatttataaacataagtttaaaaaagattatttgaaaattgatgaaaaagaaaaaatatcttttttaattaaatctctcaagtcaaataaaaagatttttaataaaagaataaaatttacaaaagatgaaaaagaaacatgggaaacgttcaatatgctatcacatacaccatatgagtgtttgggagcttatataatttcaatggcctcgtctgcctcagacattctatctgtaatgcttttgcaaaaagaagcaggaatgaagcaatatttaagaattgttccattgtttgaaacattacaagatttgaataactccgagttagttatgaaagagatctacaaaattaagttttatttaaaaaaatttaaaaatcttcaagaagtaatgattggctactctgactcaagcaaagatgctggaaaatttgctgcagcatgggcgcagtatcgcgcacaagaaaacttacaaaacttgtcaaataaatttaaagtaaaattaacgttgtttcatgggagaggaggatcagtcggaagaggtggtggaccgatttatcatgcattactatctcaaccaccaggaactgttaatgggagaactcgagttacagaacagggagaaataattcaacaaaagtatgcaactgagtcattggctgaatatactttaggtacatatttaggttcagtagttgaggcatctttatcaccaccacctaaaccaaaaagtcagtggagacttttaatggagaagatgtgtgaaatatcaaaaaattcctacagaaaaaatttaatggataaagaatttttagattattatttta

SEQ ID NO: 276627 - DNA, 2543 bp, Unknown
  Bacterial polypeptide expressing nucleotide sequence isolated from the Sargasso Sea
tatggctagatttttaagaaaacacgaagcaataacagacagacagcttcgcacaactataaaattattaggcacccttctcggtagagtaataaaaactcaagctggaaaacaggtgtataatgctgttgaaaaattaagaaaagggtttattggactgagagaaaacaaaaatagttctaagcatgatcaattaattagatatattgggaaacttaacagaaatacattaacagacgtaattagatcctatagcaaatattttgcacttgccaatgttgccgaagaagcatttcagcatatcaacagagaaagaatactcaagtctggatatgattcctgggaaggctcctttgatagtactttgagagattttgtaaatcaaaatattaataaagtgaatctccaaaaactactagatcatttgaaatatattcctgtctttactgctcatccaacagaagcaaaacgtcgtagtgagatgcatttaatgagacgtattttttctatgatattggaattacaacaatataaggggcaatctatcaaaaaagaagagttgttagaaaaacttgaatcagaaatattaattttatggaaaactgacgaagtaagattaaagaaacctactgtaatagatgaagtcgaaaatggcttatactactttagaacttccctatttaaggctgttcctcaaatttatagtgacctagaaaaagcagtatcacgaacatacaaagataatcatgttacaaaaaaaatcgttgtgccaagtttcattcgatttggatcatggattggcggagatagagatggtaacccatttgttacatcggacgtaacttgccaagctgtatatatgcatgctgaaactgttatcacagaatatattgaaagaacaaaagatctatcaaaatatttaacacattctattcaacatacagatttatcaaaagattttttagactcattgtctatagatgatgaactttcacgagatgtatttaaagataattctcaagactttataaaagaaccatatagaagaaaattaaaatttattgaatttagattaactgaatcacttaaaacaataagtgatcataaaaataaaaatccagaacaaaagagaactcatgcttataagaatgaacatgagcttttaaaagatttatatttaattagagattctctaatatatgacaaagatgaaaaattagtaggttttcaattaaaagatttaattagacttgtggaaacatttgggttttttctagtaaatcttgatataagagaggaatctactaaacatagcaatgctattcatgaaattataaatgttctaactaaagaagattatttatcactaaatgaaaataaaagagttagctgtctagagtctttaatcaagagtgattctaatattgattcaatttatatgacattgtcagatgatacgaaaaaagtagttgatgtatttttaacaatggtcaaactacgtaaacaaattagtaaggaagcttttggtcattatataatttctatgacacatgaagctagtcatgtactagaggttttagctttagctaaactttctggaatggttaaaaaagataatgataaaggatggattagcgctgtaaaagtttcaccattgtttgaaaccattgatgacctttctagaattagtcacatacttgagaacctacttgataattcattatatgctgaagtacttaaaaatagtaataatcgtcaggagataatgcttggatattcagattcttgcaaagatggagggattctctcatcatcatggaatctctataaggctcaaaaagaaattactgaaattgcgaataaatattcaatagaatgtaggatgtttcatggtcgaggcggtacagttggaagaggtggtggccctactcataatgccatagttgctcaacctgctggcacagtgaatgggatgataaaaattactgaacaaggcgaagtcttatcttacaaatatgcctcttatgaaactgctgtttatgagcttgaaacagctattggcggtctcatgaaagctagccaacatctagtgaccgaaaatcttaaaacagataatgtgattgaaaaaaatatggaactaatgtctcagagaggagaagaacattatagggagctgacagataaaacacctggattaattgattacttttatgaggcaacacctgtgcaagaattaggacaactaaatattggttctagaccctctcatagaaatacagctgatagatcaaaacagtcaattagagcaataccatgggtttttggatggtctctttctaggcacactttgcctgcatggtatgggctggggtctgccttgcaaaagatcttagatagcaacgaaaagaacctaaatcttttgcagaatatgtataaaaaatggccatactttaaagttttactagctaatgtcagaatggctctcgctaaagcagatctaaacatagctagagattactcagaactcgcaaaagatcaaaaat

SEQ ID NO: 276628 - DNA, 1429 bp, Unknown
  Bacterial polypeptide expressing nucleotide sequence isolated from the Sargasso Sea
gaaattttaaaacctcttagagtagttagagagtcgcttgaacaaaatcaatgcgagaatattgccagtggagaacttcttgatttaatgagaagagccaagtgttttggtataaatttagcaagattggatatacgccaggagtcagctaggcacagtcaattattagatgaatattttttaaaaaaattcaataaaagatactataaattaagtgagatagataaattaaaattttttaaatcaactttaacttcaaaaagaaactttataaataaatttaactttaaaaataaagaaaataaagaagtttggtcaacatttaaaatattatctaatgagccaaaagagtgtttaggtgcatatgtcatatcaatgactacatctgcttcagatattttatcagtttcttttttgcaaaaagaagcaaaaattaaagataaattgagagtggttcctttatttgaaactttggatgacttaataaattcaaaaaaaataatggaaactttattttctcaaagctggtatcgaaatcttataaaaaataatcaagaagttatgataggttattccgactcaagtaaagatgctggtaaaatatgtgcaagttggcatcaatataaagcacaagaagagattgttaagttagcaaaaaaatataaaattaatatcacattctttcatggaagaggtggttcagctggcagaggaggagggccaattcaagcaactcttaaatctcaaccaccatattctgttaatggaaatattaggattacagaccaaggtgaagttattcaacaaaaatatgggtatgaaccattagctaaatacaatttatgtagttacataggagctgtaacagaggcttctttaaatccgccaccagtaccaaaaaaaaaatggagaaatctaattgaaaaaatgtcagaaatttcaaaaagttcttatagaaaaaatataaatcaaagttcggaatttattaagtatttcaaaactgttacaccacacgttgctcttggtaaactatcaattggatctagaccatcaaaaagaaaaaaaactgataatattaaaagtttgagagcaattccttgggtttttgcctggacacaaattagattaatgttaccagcttggcttggcagcgctgaagctcttagatattcatatattaaaaaatttagaaaaaccttatttgatatggaaaagaattggccttttttcaattcaatgcttgatattttagatatggttatttccaaagctgatccaaatatatctaaaatttatgaacagtatttggctgatgaaaacctaaaaagggttggtaaaaaattaaggtttcaatttaaacagattaaaagattaaataccaatattacacctaaagaaatcttaaataatagaaaaaaatataggacat

SEQ ID NO: 276629 - DNA, 1708 bp, Unknown
  Bacterial polypeptide expressing nucleotide sequence isolated from the Sargasso Sea
tatgacaaaaaaaattgaactttcatctactattcatctcttaggagaaatattaggtagtgttataaaaaaacaagaaaacactgctattttcgataagattgaaaagattagaactctatcaaaaaatagtagaggaagtaatgaaggtttaaataaacaatcatttaaaaaattaaaaaatcaaatttcaaatcttacttcgacagaaaccttaattatagctaaatcatttagtaggtttttagatttttctaatattgctgaatcattgtatagtattcacaatattcatgatcatgttattcgtaaaactcaagagactaatgaaatagtaattttagaagaagcgttattagatgttcaaaaaaatccaaatgtttctaaaaataaattttttaatgtagcaaaaaatataagtattgatttagttttaacagctcaccctacagaagttaaaagaagaacactgattcaaaaatatgccaatgtaaataatatattagacgaattaaataatatacaaattcttaaaaaacaaaatattaagagagaaaaaggaatacttgaaaaaaaattaaaagaagaaattacttcagtatggaaaacagatgaaataaaaagatctagacctacggctgttgaagaagccaaatggggtttggctgtaattgaggactcactctggaattcaattcctaaaatatgttcaagatttgataatgcagttaataaatttactaataaaaacttacctattaattattctccaatcaaagttagctcttggatgggtggagatagagatggaaatccaaatgttacatctaaaacaactatggaagtagttttgttatctagatgggaagcagcgagcttatatgagaaagaatttactaaattaattcaaagtttatcattatttgattgctcaaaaaaaataaaaaaacaagtaggtaaaacttgggaaccatacagagtttttttaagacctattagaaataagttacaacaaactcaaagagaaatagaagatgctcttttagagaaaagagaacctaaaaaaaaattattagttaattctataaatgaaattcttgatcctttaaatgaagtttataattctttatgttcagtaaaatgtgatattatagctaatggcttagttctcgatataataagacttagtcatacttttggattaaatttagcaaaattagatattagacaagagtcatcaagacatacttcattattaaatacaatttgtaagaaattagcattaaaggaatatacaaaattatcagaacaagaaaaaattaaatttttaactagagaatataaatctaaaagaccactaatacctaacaaaattaaatttaataatactgataaagaaacatgggaaacttttaaaatgattgctaatacttcaaacgaatttttaggagcttatgttatttctatgacatctaaagtttctgatattttaggtgttttactattgcaaaaagaagctggagttaaaaaccccttaagaatagtgccactgtttgaaacattatcagacttacaaaattcatctaaaattgtagataatttatttaaaaatagatggtacacaaatattttttcaaatgagcaagaaataatgattggatattcagactcaagtaaagatgctggaaaatttgcagctagttgggct

SEQ ID NO: 276630 - DNA, 2212 bp, Unknown
  Bacterial polypeptide expressing nucleotide sequence isolated from the Sargasso Sea
tttgtggagaacagatgaggtaaggttaaaaaaaccaactgtaatagatgaggtagagaatggactatactatttcagaacgtcgctgtttaaagcaataccagaagtatataaagatcttgaaaaggctatcaaaagaatatatcactcaaactctgtgaaaatcccaagctttattaaatttggatcatggataggtggcgatagagatggaaatccatttgtaacaccagaaattacaaaagaggctgtttatatgcatgctgagacagcaatactagaatacattagaagggctcagagtttatcaacattactaacgcactcggtacaacttactaacccatcagatgactttatcaaatcttcgcaggaggatttaaaatatttagatggagcgctagaagattctactcaagattttgctaaagaaccatacagacgaaaattaaaaatagtgagatatagattaaaacagaagttacaagacattcgaaatttaagaaatcaaactgaaaaatcagtgaatcatgcttatgcatccgagagggaattattaagagatttgtaccttataagagattctctaatttctgatgaagatgccatacttttagattacggcctgaatgatttcatacgacttgttgagacttttggatttcatttagtcagtttggatataagagaggaatctacaaaacatactaatgcgatttctgaagtattagatttagaggggtatggtgattataaagctttaaaagaggatgagcgaataaacttactggttaagttaattagttcagataaaacaattgataatatttatgaaaaacttacagatgaatcaaaaaaagtattagatgtatttagagtaatgaatgaattgaggactgaagtaagtgatagagcgctaggtaactatataatttcaatgactcatgatgccagtcatatatttgaggttatagcacttgctaagttgaacggtctagttaatcatgattcagataaatatcaatcctttattcaggtaacgcctttatttgagactattgaggatttagatcgtattgaagagattcttgaaaatctatttggcaacgagacttatcgttcactaattacagagaatgactcaagaaaattacaagaagttatgcttggttattcagattcttgtaaagacggagggattctctcatcttcttggaacttatacaaagcacaacaagaagttttggggatatcagagaaatataatatagagtctaggctgtttcatggcagaggaggaaccgtaggtagaggtggaggcccaacccataatgctatacttgctcagcctaataaaacggtgaatgggatgataaaaattactgaacaaggagaagtattgtcatacaaatatgcggttccacagtctgcctcttatgagcttgaacttgcggttggtggattaatgaaagctagtaaacatcttatagtagaagacagttcatcaaacgataaattcgaagatattatgaagacaatggcaaaattaggagaagaaaagtatagaaaattaacagatgaaaaagagggtataatggattatttttatgaggcgactcctgttcaagaactcgctgagttaaacattggctcaagaccatcacataggaaaaaaactgagagatcgaagtattcaattcgggcaattccatgggtctttggatggtcattgtctagacacactcttccagcctggtatggattaggaagtgccctgagaagaacgattgaaaaaaataataattccattgataatctcaagagaatgtatagcgaatggcctttttttagagttctcgtagaaaatattcagatggctcttgctaaagccgacttagatattgcaaaagattatgcagaattagtggaaaataaagtagcagcgaaagaaatcattaatgacatttctgaagaatatgattcaacggtcgctatgttgttatccatcgtggagtctcaagctcttttatctgagaataaaaagttatctatatctctagatagacgaaaaccttatttagacccactaaattacatacaggtgatgctaattaagaagcataggaatctcagcgaaaaaaatgaggatatatttgatatgttgctgagaactattcacgctatcgctattggtatgagaaacacgggctga

SEQ ID NO: 276631 - DNA, 2455 bp, Unknown
  Bacterial polypeptide expressing nucleotide sequence isolated from the Sargasso Sea
atgaagaaaagagatctttactatgagcgaataccaacaaagcttttaagagaagatattagattattaggaacttttctaggaagagttatcaaagatcaggaaggtagagctttttttgaaattgttgaaaaatttagattattatcaaaaaatactttatcagataaaaataaaagtaaaattttttcaaaaatttcgaaagaagtaaaaaaactttctcctaaaaatacatttaaattaacaagagcattttcacatattttaaatttaatgaatttagctgagtcattagatgcatctagaaagttaaatgaatttgaaaatccatattttaaaagtaaaaatcaaaatcttttcattgaagatataatagaaagtttatttaaaaataaaaaaatttcggataaaaaaatttacgaacaagccacaaaacttgatataggcattgtacttaccgctcatcctactgaagtaaaaagaagaactttaattcaaaaatatgccaatttaattgaaattatggagcaaagacatctttataaaaaatatccgtctaagattatagaattagatagaaagctctactcggaaattgcaataatatggaaaacagatgaacttaaaaggactaaaccatctccattagatgaagcgaggtggggtttagctgttatcgaggatagtctatgggacaccattcctaaagtttataaaagacttaacgacatattcagaaaaaatttaaagaaagatttaccgcgtgattttaatccaattcaatttggatcatggatgggtggagatagagacggaaatcccaatgtaacagctgaagttacaaaaaaggtaattttattttctagatggcaagctgcaaaactatatgaaaaagaacttactaaattgatacaagatttatcaatggcagaatgctctacaaaaattaaaagagcaacaggaaatagctatgaaccttatagagtttatttgagaccaattagggataaggtaagactaacccatcaattaattgaaaatcatttaaataacggtgcagatttagatgaaaaaaaattaattcaaaataaaaatgaaataactcttccactaagagaagtaaggaaatcattaaaagcaaaccgaggagagtatattgcaaatgcagacctattagatttaatgagaagagtcaggtgctttggaattaatttagcaagattagatataagacaagaggctgatagacatgaaaaacttttaaacgaaatttttaaaatgaaaaaaaatataaaatattcctctttaactgaagtagaaaaagtaaaattattaaataaatctataaaagaaaaaaaattttttgtagataaaataaaaataaaagataaagaaaataaagaagtttggaatactttcaaacagatagcgaaaacaccaattgagtgcctaggtgcatatgtaatatcaatgacctcaacagcatctgatattttatctgtttattttttacaaatgcaggcacaaaacaaaaatttattaagagttgtgccactttttgaaactttggatgatttaaaaaatgctaatagtgtaatgacaaatttatttaaactttcatggtatagaaaaatgattaattcaaagcaggaagtaatgattggatattctgactccagtaaagatgctggaaaattatctgcaagttggcatcaatataaacttcaagaggagcttagaagtttagctaaaaaatatagaataaatcttgttttcttccatggtagaggcggatctccaggaagagggggtggacctattcaggctactttaaaatctcaaccttcaggaactgttaatggtaaaattagaattaccgatcaaggagaggtaattcaacaaaagtatggttataaacctttagctgaatataacctctgtagttatattggctctgtaatggatgcttctttaaatccgcctccaagatcaaaatcaaattggcgtgatttgattcaaaaaatgtcagaaatttcaacatcctcatatagaaaatacttaaatcaaagtgaggattttattcgttacttcaaaacagttacgccacataaatcactaggaaaacttgcaattggatcacgaccaaccaaaagaaagaatgttgataatattcaaagtttaagagctatcccttgggtgtttgcttggacacaaattagattaatgttacccgcttggctaggtacaactgaagcattgaggtacggatcaatcaaaaagtttaaaagaacaatgactgacatggaaagaaattggccatattttgtatcaacgatggatattttagatatggtaatttcaaaggtggatccagaaatatcagttatttatgaaaataatttagctgatgcatcactaaaaagaattggtaaaaaattaagatttcaatttgagg

SEQ ID NO: 276632 - DNA, 1743 bp, Unknown
  Bacterial polypeptide expressing nucleotide sequence isolated from the Sargasso Sea
cgagcatcgtgcgtcacaaggaggaactctctgaacctctgatcgcgtgttacgaatcgttgatcgaagtcggtgacgcgcaggtcgccaacgcgtacctcttggacgtcattcgtaaggtgcagtgtttcgggatgggattggtcaagctcgacatcagacaagagagcgatcgacacgccgaggcgattgacgcggtgacgcgattcgtcggtttgggatcgtatctcgaatggagcgaagagaagaagattgaatggttgacgagcgagttggagaataagcgtccgttgcttccgaccgatctcgagtgttcggcggaggtcaaggaggtgttggacacgtgcaagatgattgcgcgtcttcagcaaacttgtccgggatctctcggcacgtacgtcatctcgatggcgacgtgcgcgagcgacgtgctcgccgtcgtattgttacagcgcgagtgtggatgcagacgagaagatctcttgcgcgtggcgcctctgtttgaacgtctcgacgatttgaacgacgccccgagagtgttgcgtcagctcttctccgtgtcgtggtatcgcgagcacatcgccggattccaagagattatgattggatactcagacagtgggaaggacgccgggcgcatggccgcggcgtgggcgctgtacgacggacaagagcgcgtcgtggaggcgggtaaggaattcggcgtcgccctcacgttgttccacggtcgaggcggcaccgtcggtcgaggcggcggtcccgcgcacatcgccatgctgtcgcaaccgccgggcaccgtcaacggtagcatcagggtgacgattcagggtgaagtgatcgagacggactttggtgagaaggaaaactgcttccacacgcttgatttgtacacggcggctgttttggagcacacgctcaagccgcccgcgctcccgcgcgacgagtggcgccaagtgatgaacaaaatgagcgagtactcgtgcgcgcattatcgaaagacggttttccaaacgcccgaattcgtcggttactttgcgcaagccactccaggagccgagctcggttctctgaacattggttcgaggcccgccaagcggaaacccaacgccggcgtgacggcgcttcgagccattccttggatcttcgcgtggacgcagtcgcgattccaccttcccgtctggctcggaatctcggcctcgttcaagcgtctcatagaggaaggccatctcgagacgctcagggacatgtacaaaaactggccgttctttgaggtgacgattgacttggtcgagatggtgctcgccaaggcggatcctgtcgtcgtcgaatattacgaacgcgcgctcgtcgatccttctctccatgagttcgggtcgaaacttcgccaagagcttcaggagagcatcgattgtcttctctccgtctccgagcacatcggcttgctcgcgaaacccgaaaaagttgaggcgacggacgccgcgcgggtgcaccaaaatttggcgtacaagctcttcaagcgttcgctctacatcactcctctcaacgtgtgccaggtgagatacctcatcgcggctcgcgcgcttgagaacgaagaagacggcgataagctcagcatggaaaagctgagaatcacacttctggagggctaccctttccaagactacaattacagaggagcggttaacgacgtcttgaagataaccatgaagggcatcgccgccggtatgcaaaataccgggtaaa

SEQ ID NO: 276633 - DNA, 3058 bp, Unknown
  Bacterial polypeptide expressing nucleotide sequence isolated from the Sargasso Sea
ttgactcgagctttcccaaggaaacccatcgtgaagtcttccggatcggcgcgtacggcgcgccgcaatgctgccctgtcctcctccgacgcctcgacggacaccgtcgccaccgccgcgaacggccgtgcgaaaacggcaacgaaaccgaaagacccgatacgtcagacaaaacgcacgacgaaagccgccggcccggctgcccgcaccgcgacccgcccggccgccgcgccgaagtccggcacgcgcacgcgcgacgacaaggacggcccgctgttcgacgacatccgcttcctcggccgcctgctcggcgacgtggtgcgcgagcaggaaggcgacaccgtgttcgacgtcgtcgagacgattcgccagaccgcggtcaagttccgccgcgaggacgacaacgaagccgcgcagacactcgagaagaagctgcgcaagctgacgccggagcagacggtgagcgtcgtgcgcgcgttcagctatttctcgcacctcgcgaacatcgcggaagaccgccaccacaaccgccgccgccgcatccacgcgctggccggctcggcgtcgcagcccggcacggtcgcgtacgcgctcgaacagctgaagacgaccggcaacgcgtcgaagcgcctgctgcagcgcttcttcgacgatgcgctgatcgtgccggtactgaccgcgcacccgaccgaagtgcagcgcaagagcatcctcgacgcgcagcacgacatcgcgcgcctgctcgccgagcgcgaccaggagctgacgagccgtgagcggcagtacaacgaatcgatgctgcgcgcgcgcgtgaccgcgctgtggcagacccgcatgctgcgcgactcgcgcctgacggtcggcgacgagatcgagaacgcgctgtcgtactaccgcgcgacgttcctcgacgaactgcccgcgctgtacggcgacatcgaggccgcgctcgccgagcacggcctgtccgcgcgcgtacccgcgttcttccagatgggcagctggatcggcggcgaccgcgacggcaacccgaacgtgacggcggcgacgctcgacgaagcgatcaaccgccaggccgcggtgatcctcgagcactacctggaacaggtgcacaagctcggcgccgagctgtcggtgtcgaacctgctggtcggcgcgaacgacgccgtgaaggcgctcgcggcagcttcgcccgaccagtcgccgcaccgcgtcgacgagccgtaccgccgcgcgctgatcggcatctacacgcgcctcgccgcaagcgcgcgcgtgcgtctcggcgaaggcacggtgccggtgcgcagcgcgggccgcggcgcgccgcccgtgcgcgcggtcccgtacgcggattccgaagcattcgttgccgacctgaaggtgctgaccgcgtcgctcgacgaacaccacggcacgtcgctcgccgcaccgcgcctcgcgcctctggtgcgcgcggccgaagtgttcggcttccatctcgcgagcatcgacctgcgccagagctccgacatccacgaagccgtggtcgccgaactgttcgcccgcgcgggcgtcgaggccgactacgcagcgctcgccgaggaagacaagctgcgcgtgctgctcgccgccctggccgacccgcgtccgctgcgcctgccgtacttcgaatactcggcgctcgcacagagcgagctcggcgtgttcgagaaggcgcgcgaagtccgcgcgcaattcggcgcacgtgcggtacgcaactacatcatttcgcatacggaaaccgtcagcgacctcgtcgaggtgctgctgcttcagaaagagacgggcctgctcgaaggcgcgctcggcgtcccgggcggcgatgcgaagaacagcctgatggtgatcccgctgttcgagacgattcccgatctgcgcgacgccgcgcgcatcatgcgcgaatacttcgcactgccgggcatcgacgcgctgatcgcgcaccagggcgccgagcaggaagtgatgctcggctattcggacagcaacaaggacggcggcttcctcacgtcgaactgggagctgtatcgcgcggaactcgcgctcgtcgacctgttccgcgaccgcaagatcacgctgcgcctgttccacggccgcggcggcacggtcggccgcggcggcggcccgacctaccaggcaattctgtcgcagccgccgggcaccgtgaacggccagatccgcctgaccgaacagggcgaggtgatcgcgagcaagttcgcgaacccggagatcggccgccggaacctcgagacggtcgttgccgcgacgctcgaagcaacgcttctgccgcagaacaacgcgcccgcgcaactgcccgcgttcgaggccgcgatgcagacgttgtccgattcggcgatggccgcgtaccgcgcactcgtctatgaaaccccgggcttcaccgactacttcttctcgtcgacgccgatcaccgagatcgccgagctgaacatcggcagccgcccggcctcgcgcaagctgcaggatccgaagcagcgcaagatcgaggacctgcgcgcgattccgtggggcttctcgtggggccagtgccggctgctgctgacgggctggtacggcttcggcagcgcggtgagtgcgtatctcgacggcgcgcaggacgacgccgaacgcacgaagcgcgtcgcgctgctgaagaagatgaacaagacctggccgttcttctcgaacctgctgtcgaacatggacatggtgctcgcgaagaccgacctcgcagtggcgtcgcgttacgcgcagctggtttccgaccgcaagctgcgcaagcacgtattcgagcggatcgtcgcggaatgggagcgcacgtcgcaggcgctggcggaaatcaccgggcacgaaggccgcctcgcgaccaacccgctgctcgcgcgctcgatcaagaaccgcttcccgtatctcgatccgctgaaccacctgcaggtcgagctgatcaagcgccaccgtgcaggcgacacgaacgcgcggctgcgccgcgggattcacctgacgatcaacgggatcgcggccggcctgcgcaacaccggctgat

SEQ ID NO: 276634 - DNA, 2641 bp, Unknown
  Bacterial polypeptide expressing nucleotide sequence isolated from the Sargasso Sea
aatgttaaaaagagacctctactatgaaagaatacccacaaaatctcttagagatgatgttcgatttttaggaaacatattaggaagagtaattaaagaacaagagggacagaaattctatgatctagttgaaaaaattagattactttccaaagcaaatattgccaacaaaaatcgtaaagatccatttaaaaaaattttaaacgaaattaaaaaattaccaccacatttattatttaaattaactcgcgcatttaatcattttatgaacttttataatttggctgagtcaattgatgcttctagaactctagatctttatgagaacgttaaacaggagaaaaaatttcaaaatattttcatagaagaaatatttgaaaattttttcaaaaataaaaaaatatctaataataaaatttataatattgcaaaaagtctaaatataggaattgtactcacggcacatccaaccgaagtaaaaagaagaactttgatacagaaataccattctttaacagaaatattagaacaaagaaacttacttaaaaattatccctcaaaattaaaagttttagatcgtaaggtttttgacgaaatcacaattatatggaatacagacgaaatcaaaagatctaaaccaactcctgcagaggaggcaagatggggactagcaattattgaagatagcctgtgggatacaattccaaaagtttatagaagattaaatcaaatatttgaaaaaaatatgggtaaaggtttgcctaaaaattttaatcctattgagtttggatcgtggatgggtggtgatagagatggcaatccatttgttactgcagaagttactaaaagagttattttgttatcaaggtgggaggcagctaaactttatgagaagtcaatgacaaagttaattagatcttactctatggaaaaatgttcaaaaaaaatattaaaaactacaggaagaacattcgagccttatagagtttatctaagacctttaagggataaattaagaaaaacacatagagcaatagaaggttacttggcaaacaataaaccattgaatgaaaaagatctactatcagagagagaagaaattttaaaaccattgagagttgtaagagaatcgttagaacaaaaccaaagtgaaaatatagcaagtggtgatttattagatttaatgcgaagagctaagtgttttggaataaatcttgcacgacttgatataagacaagagtcttcaagacattctcaattattagcagaatatataaagaaaaaactaaaccagaattattctacttgggatgaggaccaaaaaattaactatttatcgaacaaaatgcaaagtaaaaatgtattaaaaaattttcaatttaaaaataaagaaaataaagaggtttggtctacttttaaagtattagcaagtcaacctaaggagtgcttaggagcatatgtaatctcaatgacatcttcggcctctgatatattatcagtcatgttttttcaaaaagaagcaaaaattgagaatagacttagagtagttcctcttttcgaaacacttgatgatctgataaatgcaaaaccaataatggaaaaacttttttcattaaaatggtacagaaaagatattaataacaagcaagaaattatgattgggtactctgactcaagtaaagatgctggaaagctttctgcgagttggcatcaatttaaattacaagaagaaataattaaacttgctaaaaaatttaaaatagacgttacattttttcatggaagaggagggtctgcaggaagaggtggtggaccgatacaagcaacactgagatcacaaccagctggatcggtcaatggtaaaattcgaataaccgatcaaggagaagtaatacagcaaaaatatggttatgagcctttagcaaaatataatctgtgcagttatataggatctgttatggaagctactttaaacccacctccaaaaccaaaagacagttggagacaattaattcaaagtatgtctgagatatcaacaagttcttatcgaaaaaatataaatcaaagttcagattttataagatattttaaaaccgtaactcctcatatggcactagggaaattatcaattggctctagaccttctaaaagaaaaaatgttgataatataaatagtttaagagctattccttgggtttttgcctggacacaaattagattaatgttacccgcttggttaggtaccgctgaggccttaagatattcatctataaagaaatttaaaaaaacacttattgatatggaaaaaaactggccttattttaattcaacaatggacttgcttgacatggtaatttctaaggtagacccagaaatatcaaaaatttacgaaaaaaacctagctgatgataaacttatcagagttggaaaaaaattaagatttcaatttgatgctgttaaaaaattgaatgatcaaataacaccaaaagaaatttttaaacaaagaaaaatttttagaggtccagcaattattagaaacatatattctgaaatccttaatgtgtttacagcagtagtgatgaataaaactttaaaaagaaattttaataaaaagataaaaaagattttaatgattgcatga

SEQ ID NO: 276635 - DNA, 1261 bp, Unknown
  Bacterial polypeptide expressing nucleotide sequence isolated from the Sargasso Sea
attacagaaatactttgaagaaagagagttatttaaagatcacgctataaaaataaaatctttaaataaaaaaattcatgatgaatttaccattatctggaatacagatgacttgaaaagatcaaaaccgtctccagccgatgaagcgcgatggggtcttgcaataatagaggatagtctttgggaaactattccaaaagtctacagaagactcaatgatatatttttgaaaaatatgggtaaaggtttgccaaaaaattttaatcctattgagtttggatcatggatgggaggtgatagagacggaaatccaaatgtaacttcaaaagtaacaaaagaagttttgttattatcaagatgggaagcggcaaaattgtatgaaaaagaacttaccaaattaattagatcatattcaatgaaaaagtgttcaaaaaaaattcaaaaacttacaggaaaatcatttgaaccttacagagttttcttaagacctttaagagataaaatgcgatttactcatcgagcaattgaacagtttatagtgaacaaaaaacctttagactataacaaattgctaaactcaaaagaagaaattttaaaaccccttagaattgtccgtgaatctttagaggaaaatcaaagtgaaaatatcgcaagcggtgaattattagacttaatgagaagagcaaaatgttttggaattaatttagcaaaactagatattagacaagaatcatctagacactcacaattaattaatgaacttgttcagaaaaaaaataaacacaattatttaaaatggagtgaggaggaaaaaattaaatttttatcatctaagatgaaaaaaaaattcaatttcatcaaaaattttaattttaaaaataaagaaaacaaagaagtttggtcaacatttaaaattttatctgaagagccacctgaatgtttgggggcttatgttatttcaatgacatcatctgcatctgacattctctctgttttatatttgcaaaaagaagcaaatattaagaatagattaagagttgtcccattatttgaaacattagatgacttaattaatgcaaaatcaataatggccagcttgttttcattaaagtggtacagagatttaataaaaaataaacaagaagtcatgattggatattcagactcaagcaaagatgctggaaaaatttgtgcaagttggcatcaatataaggctcaagaagaaattattaaaattgcaaaaaaatataaaatagatgta

SEQ ID NO: 276636 - DNA, 2461 bp, Unknown
  Bacterial polypeptide expressing nucleotide sequence isolated from the Sargasso Sea
ttgaaaggatttaaaatttatccacatttcaatactttatctggaacaataaatctccttgctagtgaattgggaaatgttatcaaagaacaggctggagttaagtattttaagctagttgaggatatcagagtaagttcaaaagagtatagaagaacaaataattctaaatatttaaataaggtatataaaaaattaaaaaacttagaacctagtgaaatactaattgttactaagtcgtttacgttattcttttatttatcaaatatcgctgagcaagtatttagaggctcatttgatataaagataaatagaaagaatactatttctaagaatgaagatatttttttctttccagttttcactgctcatcctacagagagcgcccgacagtctacattaaagaaaatctacaggataggagagatagtatctttaaacgaatcagaagatcttgatgaaatcaacaacttgattacgaaactttggtacacaagagaaataagatctaataaaccaaacccaatagatgaggtaaagtcgttaatttattaccttgatattttatacaggaatgtttatgaagatattaatgaagaattgaggaaagaagatcttatagataaaaatatcataagatttggtacttgggttggtggtgatagagatggtaatcctaatgtaaataataagatcactgaggaatcattaaaaatttattcaaatcaaattattgggatatataaagaaaaaataatcaaactttctgacgaatttagcatttcaaataaatacacagacataccaaaaggtcttaatgataggattaatgaatattctacaattttaaaaaaagaacactctcattattctttaataaattttgatgaaccatttcgaatatttttatctttaatattccacaggttagataattttcaaaacacagcttcaggatataagtcctttacagaattcaaagaagatattgaattatttaataaatctgtctctgaatgttttaaacataagtccccaaataaaaatatattaaaatttattgattatatagatgagtttgaatttcacggtgtttccatggatattagagaagattcgtctgtattaaaaaatgcatcttctaaagaatataaagagtttataaatcttttaaaaaagattccagaatggaaagcactatacggatctaaagtaataaattcaataattttatctatgacaaaagatgaagaagatattttaaatttatttaaattatgcaagaaatacatagttaatgttcaagacataccaatgttggttccattattggaacaaatagatgatttgcaaagaggtgatgccatacttaatggtttgctatccagtaaacaatataaagatcatttaattaaaaactttaaatctactcaggagataatgcttggttattcagattcaaataaagatggagggattgtatcttctcaatggaatgtttataaagctcagatctctttatttaaaactggtaagaagaatcaaattaatacaatattttttcatggtagagggggaacaataagcaggggtggcggtcctacatataattcgattctttctcaacctgatgggactattactaatcaaattagatacacggaacaaggagaggtaatttctgataaatactcaacatcaaatcttgctaaagaaaatcttaaattaggagcttatgcttttttaaaagcaagaaaaggaaagataataaataataaagatgaatataaattcatcgaggaattatcagatatatccactaaaaaatacaaaaacttgattaatgatccaaatttatttcgatatttcgaaacagtgacacctgtaaatcttttatcgatcttaaatatcggatctaggcctgcaaagagaactaaggaaagcacttcacaaagctatagagcaattccctgggtttttggatgggctcagacaagacaaactatcactggttggtatggttcgggtactgctttattagagctaattgataaatatggaattaattttttaagaaaacaatacaaaacttcatctttttttagagatttattaagcaatattgaaatgactatagttaaatctgacctcaagatatcagaaatttatataaacgaattattaactgaagatatgaaatatatatttgaagatatttctgaggaagcaaacaaggtaagggagtctgtaaaacaaattaccagaaatcgtgaattattagacagcaatgaaatactaaagacaacattgaaaataagaaatacatatttagacccactttcattaattcaaatactattaatgaaaaaattagttaaaaaagaaattactgaagaagaaaagacctcactcttattgtcaataaatggactggccgctggattaagaaacacaggctaga

SEQ ID NO: 276637 - DNA, 1766 bp, Unknown
  Bacterial polypeptide expressing nucleotide sequence isolated from the Sargasso Sea
tttaggtaatattttaggaaaagtcataaaagagcaagagggaaaaaattttttcaatttagttgaaaaaataagaagactatctaaagctaataataagagcttaaatactaagcaaacaaatagaaaagtaataaaagcaattcaagatttagatccaaaaaatacttttaaattaactagagcctttactcatttcatgaattttattaatttagctgaactcatagatgcttctagaagtttaaatgagtatgaaaataacaaaaaaaaaatttctaatcataatttatttattgaagaaatatttgagggtttatttaaaagtaaaaatctttctgataaaaaaatatatgatacagccaaaaatttagatattggtattgttttaactgcacatccaactgaagttaaaagaagaactttaattcaaaagtaccataagattatagaaattttggaacaaagagatcttttgaaagcatttccatcaaaattagaaatattagataaagaactttttgatgaattaacaataatttggaatacagatgatttaaaaaggtctaaaccatcaccttttgatgaagctaggtggggactagcgataatagaggatagtctgtgggataccattccaaaagtttacagaagattaaattcaatttttttaaaaaatatgaataaaaatttacctaaaaattttaatccaattcaatttggatcttggatgggaggcgatagagatggaaaccccaacgttaccgcagatgtcacaagaaaagtaattttattatcaagatgggaagctgcaaaattatatgagaaagctttaactaagataattagatcttattcaatggataaatgctcaaaaaaaatccaagctaaagttggtaaatcttatgagccttatagagtttttttaaggcctctaagagataaaatgagaataacacatagatctattgaacaatatttagtgaataaaaaacctttagatcgcaataaactattaactacaagagaggaaatattaaaacctttaagaatagtaagagagtctttagagcaaaatcaaaatgaaaatcttgcaagtggcgaattattagatttgatgagaagagccaaatgttttggtataaatcttgcaagattagatattagacaagagtcttcaagacatagccaactgatctcagaatttgttaaaaagaaatataaaaaaaattactcaaaaatgagtgaaaatgaaaaaattcagttcataaagtccaaattattatctaaaaataatcatataaataaatttcattttagaaatagagaaaataaagaagtttggtcaacatttaagattctagctgaagaaccaactgaatgtttaggtgcatatgtcatttcaatgacaaactcagcttcagatattttatctgtatcttttttacaaaaagaggcaaatataaaacataagttaagagttgtcccattatttgaaactttgaatgatttaataaattctaaagaaattatgaaaagcttattttctcaaacttggtacagaaaattgattcataacaaacaggaagttatgataggatattcagactcaagtaaagatgctggtaaaatttgcgctagttggaatcaatataaagctcaagaggaaataatcaaattaggaaagaaatttgggattgagataatattttttcatggtagaggaggctcggcaggaagaggtggtggtcctatacaagctactt

SEQ ID NO: 276638 - DNA, 1243 bp, Unknown
  Bacterial polypeptide expressing nucleotide sequence isolated from the Sargasso Sea
tcttgccctagcgaagctttgcggattgatttctttgaaagaggggaagcttacagcatccatacaagtaacacctttgtttgagacaatcgatgacctgacaagaatagaggagattttggaagatctattcagtaatgatacatatacaaatttacttggtagctatgagaatagtaaattgcaagaagtcatgcttggctattctgactcatgtaaagatggaggcatactttcatcatcatggagtctatacaaagcacaacaacaagttctagatatctcaaaaaaatatcatattgagtgcagactgtttcatgggcgcggaggaacagttggtagaggcgggggaccgacgcataacgctatcttagcccaacctaataaaacagttagaggcatgattaagattacagaacaaggtgaggtgttatcttataagtatgcggtgccgcaatctgcatcttatgagctcgaacttgcaattagcggcttaatcaaagcaagtaaacatctcgtaattgacgatacagtttgtacaaataactttgaagaaattatgagtgaaatgtccattgttggtgaaaaaaaatacagagatcttacagatgataaagagggtattatggattatttctacgaggctactccagttcaagaattggccgaacttaatattggatcaagaccatctcatagaaaaaaaactcaaagatcaaaatactcgataagagccattccttgggtatttggctggtcactttctaggcataccttacctgcgtggtacgggcttggttcagcgctcaatcaaatggttgctagtgatcaatcaagtatggataaattaaaaacaatgtattcagagtggccattttttcgggtattgctcgataacatccaaatggcacttgcaaaatctgatttaggcattgccagagattactcgctgctcgtaaaagatagaaatgcggccaatcaaattattgatgatatagaaaaagaatttgaatcgactgttcagactttattgagaattgttggctcagatcaacttttatctgataacactaaattatcattatcactgagcagacgacagccatatctagatccgctaaattatattcaagtaatgttattaaaagctcatcgtgagatacctgatgaggatacagttaatcttgacccattgctgaggactattcatgctattgcaactggcatgaaaaatactggatag

SEQ ID NO: 276639 - DNA, 1248 bp, Unknown
  Bacterial polypeptide expressing nucleotide sequence isolated from the Sargasso Sea
aatgttaaaaagagacctctactatgaaagaatacccacaaaatctcttagagatgatgttcgatttttaggaaacatattaggaagagtaattaaagaacaagagggacagaaattctatgatctagttgaaaaaattagattactttctaaagcaaatattgctaacaaaaatcgtaaagatccatttaaaaaaattttaaacgaaattaaaaaattaccaccacatttactgtttaaattaactcgcgcatttaatcattttatgaacttttataatttggctgagtcaattgatgcttctagaactttagatctttatgaaaatgtgaaacaagagaaaaaatttcaaaatattttcatagaagaaatatttgaaaattttttcaaaaataaaaaaatatctaataataaaatttataatattgccaaaagtctaaatataggaattgtactcacggcacatccaaccgaagtaaaaagaagaactttgatacagaagtaccattccttaacagaaatattagaacaaagaaacttacttaaaaattatccttcaaaattaaaaattttagatcgtaaagtttttgatgagatcacaattatatggaatacagatgaaattaaaagatctaaaccaactccagcagaagaagcaagatggggacttgcaattatagaagatagcttgtgggatacaattcctaaagtatacagaagattaaatcaaatatttgaaaaaaatatgggtaagggtttgcctaaaaattttaatcctattgagtttggatcatggatgggtggtgatagagatggcaatccatttgttactgcagaagttactaaaagagttattttgttatcaaggtgggaggcagctaaactttatgagaagtcaatgacaaagttaattagatcttactctatggaaaaatgttcaaaaaaaatattaaaaactacaggaaaaacattcgagccttatagagtttatctaagacctttaagagataaattaagaaaaacacatagagcaatagaaggttatttaacaaacaataaatctttaaatgaaaaagatttactatcagaaagagaagaaattttaaaaccattgagagtagtaagagagtcattagaacaaaaccaaagtgaaaatatagctagtggtgatttattagatttaatgcgaagagctaagtgttttggaataaatcttgcacgacttgatatcagacaggagtcttcaag

SEQ ID NO: 276640 - DNA, 2185 bp, Unknown
  Bacterial polypeptide expressing nucleotide sequence isolated from the Sargasso Sea
atgctcaaaagagatttatattatgaaagaattccaactaaagctttaagagatgatgttcgttatttaggaaatattcttggaaaagttattaaagaacaagaaggtcaacaattttttaatttagttgaaaaaataagattattatcaaaggctaatgtagcaaataaaaatcaaaaaaatccatttaaaaaaatttcctctgaaattaaaaaattagatgcagaaaagttatttaaattaaccagagcttttaatcattttatgaacttttataaccttgcagaatcaattgatgcaacaagaacacttgaccaatatgaaaataaaaaaattgataataaacttaataatatttttattgaagaaatttttgaaaatttttttaaagataagaaaattccaaataataaaatttataatattgcaaaaagtttaaatattgggatagttttaactgcacatcctacagaggtaaaaagaagaactcttatacaaaaatatcacacacttactgaggttttagagcagagaaatctattaaaagactatccatctaaaattaaaattttagataaaaaaatgtatgatgaaattacaatcgtttggaatacggatgaaattaaaagaacaagacctacacctttcgaggaagcaagatggggacttgcaataattgaagacagtttgtgggaaacaattccaaaagtttatagaagattaaatcaaatattcgttaagaatatgaagaaaggacttccaaaaaactttaatcccattgaatttggttcttggatgggtggagacagagatggaaatccttttgttacatcagctgtaacaaaagaagttattttactttcaagatgggaggcagctaagctatatgaaaaagctcttacaaagatcataagatcattttcaatgcaaaaatgttcaaaagaaataactaaagcaacaggaaaatcttttgaaccttatagagtttatttgagaccattaagagacaaaattagaaaaacacacagagccatcgaacaacatttggtacaaaaaatgccgctggatgaaagtaaattaatttcatcaagagaagacatactcaaaccattaagagtggtaagaaaatctttagaagaaaatcaatgtgaaaatattgcaagtggcgaacttctggatttaatgagaagaacaaaatgttttgggataaaccttgcaagacttgatataagacaagagtcatcacgtcattcgcagcttatttcagaaatagttagaaaaaaatataaacaaaactatgaaacctggaatgaggaaacaaaaataaattttttatcaaaaaaacttaaaggtaaaaattttattaaaaactttaaatttagaaataaggaaaataaagaaacttgggatacttttaaaattttagcatctcaaccaaaagaatgtcttggtgcttatgtaatatcaatgacgtcttcagcatcagatatactttcagttatgcttttgcagaaagaagctaatattaaaaatattttaagagttgttccattatttgaaacattagaagatcttattaatgctaaaccaattatgaaaagtctattttcattgaaatggtataaaaaattaataaaaaatgaacaagaaataatgattggttactcagactcaagcaaagatgctggaaaactttcagcaagctggcaccaatataagttacaggaggaaattcataaactttcaaaaaaatttaaaattaatgtttcattttttcacggcagaggtggctcggcaggacgtggcgggggaccaatacaagctaccttaagatcacaaccaccaaatacagttcaaggaaaaattagaataaccgatcaaggagaagtaatacaacaaaaatatggatatgaacctttagctaaatataatctttgtagttacataggatcagttatgcaagcaacactaaatccgcctcccgaacctaaaaagagttggagggatttaatccaaaaaatgtcagaggtatcaactagcgcttatcgaaaaaatataaatcaaagcactgactttataagatattttaaaactgttactccacacatggctcttggaaaattatttattggatcaagaccatctaaaagaaaaaatgtagacaatataaagagtctaagagcaa

SEQ ID NO: 276641 - DNA, 1771 bp, Unknown
  Bacterial polypeptide expressing nucleotide sequence isolated from the Sargasso Sea
atgaacgaaaagtacgccgcactacgcgccaacgtaggcatgctgggtcaactgctgggcaagtccatcaaggatcatcagggacaggccttcctcgacaagatcgaaaccattcgccagctggccaaatcctcccgcaaaggcaatgagacagaccgggaacgtctgctcgataccctgcgcaacctgagcgatgacgagctgctgccggtggcccgcgccttcagccagtttctcaacctggccaacgtggccgaacagttccacaccatctcccgtcgctgcgaagagcaggtctgcaccccggatccgctcgagcagatgttcgacaagctgaaagcctccaacctgtcgcaggaatccatcatccaggccgtgcgcgagctggacatcgatctggtgctgaccgctcaccccaccgaggtgacccgtcgcaccctgatccacaagcacgtgcagctcaacgactgcctcgaggcgctggaactctccgatctgctgccccgcgagcgggacaagatcctcaatcgcatcgaacagctggtcaatcaggcctggcacaccaacgagatccgcgaacagcgcccgaccccggtggacgaggccaagtggggcttcgccgtggtggaaaacagcctgtggccggccatccccgaattcatgcgcaatctggacgagcggctgcaacaccacctgggtgtgcggctgccgctggatgccgcgccggtcaagttcacctcctggatgggtggtgaccgcgacggcaaccccttcgtcaccgccaaggtgaccgccgaagtgctggagctgggccgctggatggcggtgagcctgttctacaaggacatcaaggagctcacctccgagctctccatgtccgactgcaccgacgccgtgcgcgagcgggtcggtgatcaccccgagccttaccgcgcgctggtacgcgagctgcgcgaacagctgcgcgaaacccaagagttcctcaccgccaaggtgcagggccaggcgagcgagagccgggatctggtcaagaccaccgcccagctgcgcgagccgctggagctctgctaccactccctgcacgcctgcggtatgggcaacatcgccgacggcatgctgctggacgtgctgcgcaagctggcctgcttcggcatccatctggtcaagctggacatccgccaggatggcgagcgccacggccaggtcttctccgagctgacccgctacctcggcatgggtgactacgccgagtggagcgaagatgacaagcaagccttcctgctcaacgaactcaactcccgccgcccgctcatcccgaccgactgggagccgagcgacgagacccgcgaaactctggatacctgcaaggtcatcgcccagcacgatcccgatgccttcggcatctacatcatctccatggccggcgcaccgtccgacgtgctggcggtgcaactgttgctgaaagaggccggctgcaagttccgcatgccggtcgccccgctgttcgagacccaggaagacctgatggcgggcaccgccgtgatggagcgcctgctgtcggtggactggtatcgcggctacatccagggccgtcagtacgtgatgatcggctactccgactccgccaaggacgcgggcatgatggccgccggctgggcccagtacgctgccatggaatccctggtggcactggccgaggccaacaacctgcgcctcaccctgttccacggccgtggcggtaccgtcggccgtggtggcgcgcctgcccatc

SEQ ID NO: 276642 - DNA, 1645 bp, Unknown
  Bacterial polypeptide expressing nucleotide sequence isolated from the Sargasso Sea
tatctaatcaaagattcattaatttctgataatgataatatcttaaacgacttttgcctaaatgatttcattagactagtcgaaacatttggtttctatctggttaatcttgatatcagagaggaatcaactaaccacactaatgcaatttcagaaatattcaaaaatcacaataacattgaatatgatcaactcgatgaatcatcaaggattgcctctctagagaagattattaaatctgatttgactcttgatgatatctactcacctctttcggatgaaacaaaaaaagtactggatgtatttacagttatgaaagaactgagaaatgaagtaagtgagcatgcgtttggaaactatgtgatatcgatgactcatcatgcgagtcatgtctttgaagttctagccttagcgaagctttgtggtttgatctctttgaaagaaggaaagcttgcagcatcaatacaagtaacacctttatttgagacaatcgatgacctaacgagaatagaggaaattctggaagatttattcagtaatgatacgtatataaatttaattggcagctacaagaacaaaaaattacaagaagtcatgcttggttactctgattcatgtaaagatggtggaatactttcatcctcatggagtctatataaagcacaacagcaagtcctggatatctcaaaaaaatatcaaattgagtgtaggctatttcatgggcgcggagggacagttggaagaggcggaggacctacgcacaatgctatcctagcccaacctaataaaacggtcagaggtatgattaagattactgaacagggtgaagtgctatcttataagtacgcagtgccacaatctgcatcttatgagctcgagcttgcaattagtggtttaatcaaagcaagtaaacatctcgtgattgacgatacagtttgtacaaataattttgaagaagtcatgagtgaaatgtccatagttggtgaaaaaaaatatagggatcttacggatgataaggagggtataatggattacttttatgaggcaactcctgttcaagaactagccgagttgaacattggatcaagaccatcccatagaaaaaaaactcaaagatcaaaatattcgataagagccataccttgggtatttggctggtcactctcaaggcataccttgccggcatggtacggccttggttcagctctgaataaaatggttgccagtgatcaatccagtatgggtaaattaaaagaaatgtactcagagtggccattttttcgggtattgctagataacatccaaatggcacttgctaaatctgatttaggtattgctagagattactcactactcgtaaaagacagaaatgccgcaaatcaaattattgatgacatagaaaaagaattcgaatcgactgttcaaactttactaaaaattgttgacgcagatcaacttttatctgataacactaaattgtcattatcactgagtagacgacaaccataccttgatccgctaaattatattcaagtaatgttattgaaagctcatcgagagatacctgatgaggatacagttaatctagacccgttattgaggactattcatgctattgctactggcatgaaaaataccggataga

SEQ ID NO: 276643 - DNA, 1561 bp, Unknown
  Bacterial polypeptide expressing nucleotide sequence isolated from the Sargasso Sea
atagttttgaccgcacatccaactgaggtaaaaagaagaactttaattcaaaaatatcataaaattattgaaatacttgaagacagagaattgttaaaaaattacccctcaaaattaaagattctcgaaaaccaactttttgatgagcttacaattatttggaacacagatgatttaaaaagaataaaaccttctccttttgatgaagctagatggggtttggcaattatagaagatagtttatgggacacaattccaaaagtttatagaaaattgaattctatttttgtgagaaatatgaataaaaatttacctaaaaattttaatccaattgtatttggttcatggatgggtggtgatcgagatggaaacccgaatgtgactgctgaggttacaagaaaagtaattttattatctaggtgggaagcagcaaaattatatgaaaaaggcctaactaaaataataagatcttattcaatggaaaagtgctcaaaaaaaattttgaaaaaagttggtaattcgtttgaaccctatagaattttcttaagacctttaagagataaaatgagaataacgcatagattaattgagcaacatttagttcaaaaaaaacctttggatcaaaaaaaattattaagttctcgtgaggaaatacttagacctcttagagttgtaagagaatctttagaagaaaatcaaaatgagaatattgcaagtggagatttattagatttaatgagacgagctaaatgttttggaattaatcttgcaagattagatataagacaagaatcttcaaggcataaacaattaatctccgaattggtcaaagcaaagtataataagaattattcaaattttagcgaaaaagagaaattaaattttctaagattatcaatcaattctaaatctaaaaaaataggaaattttcaatttagaaataaagaaaataaagaagtttggtctacatttaaaactttatctaaagaaccaccagaatgtttaggtgcatatataatttcaatgactacatctgcctctgacatcttatctgtttctttcttacaaaaagaggctgaaataaaagataaattaagggtcgttcctttgtttgaaacattgaatgatctgattaatgcaaaatctataatggaaaatttattttcccaaaattggtatagaaaattaattaattataatcaggaggtaatgattggatactcagattcgagtaaagatgctggaaaaatatgtgctagttggcatcagtataaagcccaggaggaaattataaaacttggaaagaaattcaaaattaagataacattttttcatggacgaggagggtcacctggtagaggaggaggcccaatacaagctactttaagatctcaacctcctaattctgtgaatggcaatataagaattaccgatcaaggtgaagtaattcagcaaaaatatggatacgaacctttagccaactacaatctatgtagttacataggtgcggttactgaaagcacattaaatcctccacctattcccaaagaagaatggagaa

SEQ ID NO: 276644 - DNA, 2686 bp, Unknown
  Bacterial polypeptide expressing nucleotide sequence isolated from the Sargasso Sea
atgataaaaaaaattgaactttcaactactattcatctcttaggagaaatattaggtagtgttataaaaaaacaagaaaacactgctatttttgataagatcgaaaagattagaactctttcaaaatatagtagaggaagtaatgaaagattaaataaccaatcatttaaaaaattaaaaaatcaaatttcaaatcttactgcgacagaaacgttaattatagctaaatcatttagtagatttttagatttttctaatattgctgagtcattgtatagtattcaaaatatccatgatcacgttattcgtaaaactcaagagactaatgaaatagtaattttagaagaagctttaatagatgttcaaaaaaatccaaatgtttctaaaaataaattttttaatgtagcaaaaaatataaatattgatttagttttaacagctcatcccacagaagttaaaagaagaacattgatccaaaaatatgccaatgttaataatatattagatgaactaaataatttacaaattcttaaaaaacaaaatattaagagagaaaaaggaattcttgaaaaaaaactaaaagaagaaattacttcagtatggaaaacggatgaaataaaacgctctagacctacagctgttgaagaagctaaatggggtttggctgtaattgaggactcactctggaattcaattccaaaaatatgttcaagatttgatagtgcagttaaaaaatttactaataaaaacttacctattaattattctccgatcaaaattagctcatggatggggggagatagagatggcaatccaaatgtaacctctaaaacaactatggaagtagttttgttatccagatgggaagctgcgagtttatatgaaaaagagtttaccaaattaattcaaagtttatcattatttgattgttcaaaaaaaataaaaaaacaagtaggtaaaacttgggaaccatacagagtttttttaagacctattagaaataagttacaacaaactcaaagagaaatagaagatgctcttttagagaaaagagaacctaaaaaacaattattagttaattctataaatgaaattcttgatcctttaaatgaagtttataattctttatgttcagtaaaatgtgatattatagctaatggcttagttctcgatataataagacttagtcatacttttggattaaatttagcaaaattagatattagacaagagtcatcaagacatacttcattattaaatacaatttgtaagaaattagcattaaaggaatatacaaaattatcagaacaagaaaaaataaaatttttaactagagaatataaatctaaaagaccactaatacctaacaaaattaaatttaataatactgataaagaaacatgggaaacttttaaaatgattgctaatacttcaaacgaatttttaggagcttatgttatttctatgacatctaaagtttctgatattctaggtgttttactattgcaaaaagaagctggagttaaaaaccccttaagaatagtgccactgtttgaaacattatcagacttacaaaattcatctaaaattgtagataatttatttaaaaatagatggtacacaaatattttttcaaatgagcaagaaataatgattggatattcagactcaagtaaagatgctggaaaatttgcagctagctgggctcaatattgtgctcaagaaaaattatgttcagtagctaataagcataaaataaaattgaatttttttcacggaagaggggggtcagttggtagaggtggaggcccagtttatgcagcacttttatctcaaccaccaggcactgtaatgggaatgactagagtaactgaacaaggagaagtaatacaacaaaaatatggatctgagtctatggctgaatatagtttagggacctatataggagcagtacttgaagcaactttatcccctcctagcaagcctagtaaggaatggaggacattaatagattcaatgagtattatttcaagtaaggcatatagacattatttattagaagatgaagattttttaaaatattttgataaagtcaccccaaagaatattattggcaaattatatataggatcgagaccttctaagagaaatgcttcaaaagatattaaaagtttaagagctataccttgggtttttgcctggacacaaattcgaatgttattaccagcatggctgggcacatatgaagctttaaattttgcttcaaaaggaaaaaataaaaaaattttagatgaaatgattaaaaactggccatttttttatgaaatgatggatatgttagatatggttttaataaaaacagatcaacgagtaattagatattatgaagaatgtttagcaactcctgaattaaaaaaaattggaaatgaattaagggcgaaacttactgaattaattgaaattaataaaaaaatcattcctaataatataataaatcaaagaaaagctttcagaaaatcaatcaaactaagaaatacctatgcagaaattttaaacttacttcaggcagatataatgaaaagattaaacaagaaaaatataaatacaaaaagcaaaaaaatactaatggatgcaatgattgttactatttcaggtatttcagcttcaatgaaaaatacaggttaaa

SEQ ID NO: 276645 - DNA, 2671 bp, Unknown
  Bacterial polypeptide expressing nucleotide sequence isolated from the Sargasso Sea
atggcaggtaatgtggcagacaatgtgaccgacatgtatgcgtcgttaagatcaaacgtgagtatgttagggcagatccttggcgatacaatgcgcacccacctcggtgattctttcctcgagaaggttgagcaaattcgtaaacttgcaaaagattcccgccgtggcgatgaggcggcacgggagcaaatgctagaactgctgaccgcactccccgatgaagagttagtgccttttgccaaagccttcaaccaattcctcaacctagcaaacttatccgaacaatttcatactattagccgtaactgtgatgagctggtttgtgtaccggatccggtcgaacagttgcttggccgtatgcttaatggccgtatcgatcaaactaagatgttggattgcttaaagacgcttgatatcgacttagtcctcaccgcacatccaacggaaatctctcgccgcacactgatccaaaaatatgcggcgattgtggattgcctcgccgagcaagaaaacgatcaattatccgatagagaacgtcgccaaattaatctgcgtctgcgtcagttaattgctcagatctggcacaccaatgaaattcgccgtgagcgcccaacgccagtggatgaagcccgctggggattatcgacgattgaagaatctctctggcacgccgtccccgactttttaaggcagctcaacgatcaagtacaagagcgcactggccagcaattgcctatcgatattgcaccggtgcgcttctcaagctggatgggtggtgatcgcgacggtaacccctttgtgaccgccaaagttacccaagaagtgttagaccgtaatcgccatgctgcggcacgtttattcctcaaggatatagtgttgctagtgggtgaactgtcaatggaagaagccaatgatgaattaaaggcttataccaacaatagctgcgaaccctatcgttttgtgctgcgctcattaagacaaaaactgcgtgacaccatagattacttaaatgcccgcattgagggccacaatcctgaagtggataagtcgacgctgatttggcaagaaagcgatcttaaagcgccgctagagatgctgtataagagtttatgtgactgcggcatgcgtttgattgctaacggtttactactcgacattttacgccgcctcgcttgttttggtattcatatgcttaggctcgacattcgccaagacgccggccgtcactgcgatgtccttgcagaattaacccgctatctaggtatgggtgactttaaccattgggatgaaaccgaaaaacaagccttcttactgcgcgaactcagtaaccgtcgtccgctgatcccgagcaactggcaaccttccgccgatgtagccgaagtgcttaacacttgccgcttaattgctaaacatcctgctaaggcgttgggctcctatgtgatctcgatggcgagcaagccttcagatgtgttaaccgtattattactgctcaaagaaactggctgcacacatccaatgcgggttgtgccgctatttgaaaccttaagcgacttaaataacgccgccgagtgcattaccgcactgctcgatatcgactggtaccgtggttataccaaaggcatgcaagaggtgatgatcggctactccgactcagccaaagatgcgggtgtaatggcagccgcttgggcacaatatcgcgcgcaggagcagttagtcgccgtctgtaaacaggctggcgttaagctgacgctgttccatggtcgtggaggcagtattggtcgtggcggcggccctgctcacaaagcgattctgtcacaaccacccggatctgttgatggtcgtattcgcgtcaccgaacaaggtgagatgatccgctttaagttcggcctgcctaaattggcggtgcaaagcttagccctgtacacctcggcggtgttagaagcgaccttgcttccgccgcccgagcctaagcaggaatggcgcaattgtatggagcgcattgctcaggagtcagtgagtgcttaccgcggtatcgtccgtgaagagcctgattttgtgccttatttccgtgcagccactccagaggttgaactgggcaaactaccattaggcagtcgcccggcaaaacgccgtgtcgatggcggtatcgagagcttacgtgccattccttggattttcgcttggtctcaaaaccgcttaatgttgccagcatggctcggcgccggtgaagcattacaggctgcctgccaacgtggcgaaatgggtttgctacaggatatggatcgcgaatggcccttctttagcacgcggatttccatgctggagatggtgtacgccaaggcggaacctaacttagcgcgttactatgaaacctgcttagtaccacccaatctccaccacttaggcgaaactttacgccagcgtttagatctcggcattaaagtggtgctggagctgactaaatcggataccttaatggcgcatacaccgtggaatcgcgaatcagtcaaactgcgcaatccctatatcgatccattaaacttcctgcagaccgagttattagctcgtacccgcaaggaaacaaccgaagctcccgcttccgaacacgtgcaactcgccttaatgctgacgattgccggtgtcgcggcgggcatgagaaacacaggttaat

SEQ ID NO: 276646 - DNA, 619 bp, Unknown
  Bacterial polypeptide expressing nucleotide sequence isolated from the Sargasso Sea
ccggactttgtgccctacttccgcgccgccacccccgagatggagctcggcaagctgccgctcggctcgcgtccctccaagcgcaagcccaacggcggggtcgagagcctgcgcgccatcccctggatcttcgcctggacccagaaccggctgatgctgccggcctggctcggtgcccacaaggggctgcagcaagccatcgccgatggccagaagggcgtgctggaagagatgagccgccagtggcccttcttccgcacccgcctcgagatgctggagatggtgttcctcaaggctgacgtctggctggccgagtactacgacacccggctggtgcccaaagagctgtggggcctcggcaaacagctgcggcaggagcttgccgactccatccaggtggtgctggagctgcgcccgcagggcgacttgctcgacgaccagccctggatcaaggagtccatcaagctgcgcaacccctacacagacccactcaacgtgctgcaggtcgagctgctgggccgctcgcgcaaccatgccgagaccctgcatcccgagctggatcaggcgctgatggtcaccatcgccggtattgccgccggtatgcgcaacacgggttgat

SEQ ID NO: 276647 - DNA, 2448 bp, Unknown
  Bacterial polypeptide expressing nucleotide sequence isolated from the Sargasso Sea
ccccaccgagattgttcgccatacgggtgcgccacaagcaccgccgcgtagcccatctgattcagcgcctggaagggctcaccgacgagaacgacagcttcgacgatcgccaaggtctccgccaacagctgcttgaggagatccgcgtctggtggcgcaccgatgagctgcaccagttcaagccatcagtgctggatgaggtggattacgccctgcactttttccagcaggtgctcttccaggcgatgcccctactgcatgaacgcatccgtaaggcactgcaggattcctaccccgacgtcaccccaccggaggacggcttctgcaccttcggctcttgggtgggctcggatcgcgatggcaatccctctgtcacgcctgagatcacctggcgcaccgcctgctatcagcgccagctgatgctggagcgctacctcagctcagtgcgcaatctgcgcaaccagctgagcatctccatgcaatggagtcaggtgagtccggcgctactggaatccctggaaatggaccggctccgcttccctgagatctacgaaaagctggcagctcgctacaggcttgagccctaccggctgaagctctgttatgtgctccaaaggcttgaactaacccatgagcgcaatgcccaattagcggaattgggatgggaatcacctcccagtgccactgaaccagaggagcaggcgctgagcagcctggctccgcaacaggagttgcactacagcacctaccaggacttccgcagtgacctggaactggttcgcagcagtctggaagccacaggcctgagctgcgaaccgctgaatcgcctgctgagccaggtgcagatctttggcttctgcctggcctccctcgacattcgccaagagagcacccgccacagcgaagccctcgctgagctgactcgctatctgcagctaccgcaggactacgaggccatgaatgagcctcaacgggtggagtggctgttggagcagctgcagacccgacgtccactaattccgactggaccgctttggagtgatgccacagcggaaacatttgccgtcttccaaatgctgcgacggctccaggaggaattcgggcagcggatttgccgcacctatgtgatctcgatgagtcacaccgagtcggatctgctggaggtgctgctgcttgccaaggaagccggcttggtggatccggtggaaggcaccacacgcctgcaggtcattccgctatttgaaacggtggaagatctgcgctgcgcccctgaggtgatgggcgcgttgttggcacgccccttctacaagcgactgctggagaacgaggaggtgccactgcaggaggtgatgctcggctactccgacagcaacaaggattcgggattcctatccagcaactgggaaatccatcgagcgcaaatcgccctacaagcgctcagcagtaagcacgacatcagcctgcgcatcttccacggacgcggcggctcggtgagtcgcggcggcggtcctgcttatcaggcgattttggcgcaaccgagcggcaccctaaaaggccgaatcaaaatcaccgaacaaggagaggtgctggcttccaagtacgccctaccggagctcgctctctacaaccttgagacggtcaccacagccgtgctccagaacagcctgctctctagcggcgtggacgacacgcccagctggaatgaactgatggagcggcttgcctcacgctcacgtcagcactaccgcgcgctggtgcatgaacacccggacctggtggcgttcttcgaacaggtcaccccaattgaagagatcagcaagttgcagatcagctcaaggcctgcgcgtcgtcgcacaggcgccagggatctgtcttccctgcgggccatcccctgggtgtttggttggacccaaagccgtttcttgctgcccagctggtttggcgttggtgcagcaatctccgatgagatgggtgatgacacggaaggcctggagaccctccgcaccctttatcagcgctggcctttcttccgcatgctgatcagcaaggtggaaatgacgttggccaaggtggatctctccctggcgaagtactacgtcgactcccttggcagtgcggaccgtgctgatgcctttcaagaaatcttcgccaccatcgctgcggaatacagcctcaccaaggaactggtgctcaagatcacgggccatgaacgcttgctcgatggcgatccccctctgcaactctcggtggagctgcggaaccgcacgattgtgcccttgggcttcttgcaagtggccctgctacgccgtctacgcaaccagaaccgccagccccctatgaatgaatcggatctggccgacacccgcacctacagccgtggagaactactgcgtggcgccttgctaaccatcaacggaatcgccgctggcctgcgcaacaccggctgag

SEQ ID NO: 276648 - DNA, 1051 bp, Unknown
  Bacterial polypeptide expressing nucleotide sequence isolated from the Sargasso Sea
tttaataaatttcaacaacagtcaagaaataatgcttggttactcagattcaaataaggatggtggaattgtttcttcgcaatggtcagtatataaatcacaaattgccttatttagtactggtcagaaacatgatataaatatttcattttttcatggtagaggtggaactataagtaggggaggtggaccaacttataattcaattttgtcacaacccaaaggaacaatcaaaaatgcaataagatacactgaacaaggcgaagttatatctgataagtactcaacagccaatcttgcaatagaaaatttaaaacttggtttatttgcattctttaaagcaaataaaactaagaatcatgaaataaaatatgaacattcttttcttgatgagctttctaaattatcttctcaaaaatataagtctttgattaatgatgaaaatttaatttactattttgaatctgtaacgccagtaaatctcttatctatcttaaatattggatcaagaccttctaaaagatctaaagtaagttctgttaaaaactatagagcaataccttgggtctttggttgggcacaaactcgacaaacaattacaggttggtatggttcaggttcagctttagaagaattaataaataaatttggaataaatgaagtaagaaaaatttacaactcatcttcattttttcaaaacttattaagcaatattgaaatgacattagccaaaacagatttaaatatctcaaggttttacacagaaaatcttgttgaaaaagaaattagttacctatatgagaatattgttgaagaatcattgaaagtagaaagtgctataaagagaattactaagtcaaaagaattacttgattcaaataaaattctgaaaaatactttagcaatcagagatacttatcttgatcctttatcactcattcaggttttattattgcaaaaattacagaagaatgaattaacagactatgaaaaaacttccttacttctttcagtaaatgggttagctgctggcttgagaaatactgggtga

SEQ ID NO: 276649 - DNA, 1273 bp, Unknown
  Bacterial polypeptide expressing nucleotide sequence isolated from the Sargasso Sea
cgtctttcaaccgggaagacttttgaaccttatagagtttatttaagacctctaagaaataaaatgagaataactcatacacatatagagcaacacttaaatcataataaacctttagaccaaaaaaaacttttgtcaaatagggaagaaatccttaaaccattaagagtagtaagagagtctttagaaaaaaatcaaagtgaaaatattgcgagtggcgaattactggaccttatgaggagagcaaaatgttttggaataaatttagcaagattagatattagacaagaatcttctcgacatacccaagtaatttcagaagttgtcaaaaaaaaattaaaatctaactatgataaatggacagaacaaagaaaaataaaatttctaatttcaaaaattacctctaaatctaaatttttttcagataaaattatttctaataaagaaaataaagaagtatggaaaacatttaaagtacttgctgacgaaccaccagaatgtttaggagcttatgttatatctatgacatctaaagcctcagatatcttggcagtttctcttttgcaaaaagaagcaggtattaaaaataagttaagagtagttccactttttgaaaccttagatgatttaaaaaatgcaaaatcaacaatggactcacttttttcaataaaatggtacagaaaatacatcaaaaatgaacaagagataatgattggttattctgactcaagtaaagatgctggtaaattatcagcaggttggcaccaatataaacttcaagaagaattaactcaattaggtaaaaaatataaaatagaaattattttttttcatggacgaggaggatcagccggtagaggaggtggtccaattcaagctacattaaaatctcaaccaccaggatctgtaaatgcaaaaattagaattacagaccaaggtgaggttattcagcaaaaatatggttatgaaccattagcaaaatataatctttgtagttatttaggagctgtaatggaggctacattaaatcctccaccaaaaccaaaggaaagttggagaaaattaattgaaaaaatgacattaatttcaacagattcatacagacataatattaacgataattctgattttattagatatttcaaaactgttacaccacatgtatcacttggtaaactttcaattggctcaagaccatctaagagaaaaaatgttgataatattcaaagtctaagagcaataccttgggtatttgcatggacacagataagac

SEQ ID NO: 276650 - DNA, 1378 bp, Unknown
  Bacterial polypeptide expressing nucleotide sequence isolated from the Sargasso Sea
ttgaagatagtttatgcggaaacaattccaaaagtatacagaagattaaatcagatttttgtaaaaaatatgggaagaggtcttcctaaaaattttaaccctatagaatttggttcatggatgggcggagatagagatggaaatccatttgtaacttctgaagttacaaaggaagttatattgctttccagatgggaagctgcaaaactttatgaaaaagccatgacaaaattaataagatcatactctatggtgaagtgttcaacaaaaatatcacgagtgacaggcaattcattcgaaccctatagagttttcctaagaccattgagagataaactaagaactactcatagagaaatagaacaacacttaataaataataagccattaaatgaaaaaaaattactttcatcaagagaggaaattttaaaaccacttagagtagtcagggagtccttagaagagaatcaaagtgaaaatattgctagcggtgaactacttgatttgatgagaagagccaaatgctttggcattaacctagcaagacttgatataagacaagaatcatcaagacattctcaattattgtcagaatttataaaaaaaaaatataaaattaattacaataatttaaacgaggataaaaaaattaaatttttatctaataaattaaaaagtaaaaatattataaaaaattttaaatttaaaaataaagaaaataaagaagtatggtctacgtttaaaatgttggcatcccaacctcaagaatgtttaggagcatatgttatatcaatgacatcttcagcctcagatatactttcagtaatgtttttacaaaaagaagctaatattaaaaataaactaagagttgttccattatttgagacgttagatgatttaattaatgccaaaccgataatgcagaaacttttttcattaaaatggtacaaaaaaataatcgatagtaagcaagaaataatgattggatactccgattcaagtaaagatgccggtaaattatcagcaagctggcatcagtataaattgcaagaagaaataataaaactatctaaaaaatataaaataaatgttaatttttttcatggcagaggaggttctgcaggcagaggaggaggtccaattcaagcaacactaaggtctcaaccccctaattcagtcaatggaaaaataagaattactgatcagggtgaagttatccaacaaaaatatggttatgagccactagctaaatataatttgtgtagctatataggttcagtaatgcaagcaacgttaaatcctcctcctcagccaaaaaatgaatggagaaagttaattcaaaaaatgtcggaaatttcaacgagctcatatagaaaaa

SEQ ID NO: 276651 - DNA, 1243 bp, Unknown
  Bacterial polypeptide expressing nucleotide sequence isolated from the Sargasso Sea
atttcatggtgttactttagatattcgtcaaaattcttcagttattaattcaaaaaaaggaaaaatatataaagacttcattaatttaattaaagaaatacctcaactacagaatacttatggccagaatgtattcaattcaattatcttatccatgactaaatcacaccaagatttgttaaatttatttaatttatgcagttcattgattccagataaaaatattccatcacttacacctctaattgaagaaatacaagaattacaatcatcagatatgatacttgatgagatgctaaaaaataaaaaatacaataaatttataaagaatttaaaaaggaataaccaagaagttatgcttggttactcagactcaaacaaagatggtgggataatcgcatcacaatggaatgtttataaagcccagatttcgctatttaatatagctaagaaaaataatattaatattaatttttttcatggtagaggtggcacaataagtaggggtggtggtccaacatatgattcaataatgtctcaaccaaaaggaactatttcttcgcaaattagatatacagaacaaggagaagttatatcagataaatactctactcactatttagcttttgaaaatcttaaattaggttctgcagcttttattaatacttcttcaagcactcttgaatcaaaattgaaatatgaaaatatatttgaagagttatcacataattcctattcaaaatacagaagtcttatagataagaataatctcataaactattttgagaatgttacacctgtaaacttactatcaacattaaatatcggctcaagacctgtaaaaagatctaataaaattacttcattagataactacagggctattccgtgggtatttggctgggcccaaacacgcagtacactaacaggctggtatggtgctggaacagcatttgaaagtcttattaataaatatggaatacagaaagttagaagtatttatgaaacatctaacttttttcaaaacctaattagcaatattgagatgactgtatttaaatctgatttaaaaatttctaaattatacgttgatgaactagtaggggaggaatatcaagatatttatgaagatatattgattgagtcaaaattagttataaaaatgattaaacaaataaaacaaaattctgaacttttaaatgacaataaagttctaaaaaatactctaaatataagaaatgcc

SEQ ID NO: 276652 - DNA, 1699 bp, Unknown
  Bacterial polypeptide expressing nucleotide sequence isolated from the Sargasso Sea
tatggagcaaagacatctttataaaaaatatccatctaagattatagaattagatagaaagctttactcggaaattgcaataatatggaaaacagatgaattaaaaaggactaaaccatctccattagatgaagcgaggtggggtttagctgttatcgaggatagtctatgggacaccattcctaaagtttataaaagacttaacgacatattcagaaaaaatttaaagaaagatttaccgcgtgactttaatccaattcaatttggatcatggatggggggagatagagatggaaatcctaatgtaacagctgaagttacaaagaaggtaattttattttctagatggcaagctgcaaaattatatgaaaaagaacttactaaattgatacaagatttatcaatggaagaatgctctacaaaaattaaaagagcaacaggaaatagctatgaaccttatagagtttatttgagaccaattagggacaaggtaagactaacccatcaattaattgaaaatcatttgaataacgatgcagatttagatgaaaaaaaattaattcaaaataaaaatgaaataactcttccattaagagaagtaagaaaatcattaaaagcaaaccgaggagagtatattgcaaatgcagacctattagatttaatgagaagagtgaggtgctttggaattaatttagcaagattagatataagacaagaggcagatagacatgaaaaacttttaaacgaaatttttaaaaagaaaaaaaatataaaatattcttctttaactgaaatagaaaaagtaaaattattaaataaatctataaaagaaaaaaaattttttgtagataaaataaaaataaaagataaagaaaataaagaagtttggaatactttcaaacagatagcgaaaacaccaattgagtgcctaggtgcatatgtaatatcaatgacctcaacagcatctgatattttatctgtttattttttacaaatgcaggcacaaaacaaaaatttattaagagttgtgccactttttgaaactttggatgatttaaaaaatgctaatggggtaatgacaaatttatttaaactttcatggtatagaaaaatgattaattcaaagcaggaagtaatgattggatattctgactctagtaaagatgctggaaaattatctgcgagttggcatcaatataaacttcaagaagagctaagaagtttagctaaaaaatataaaatagatcttgttttcttccatggtagaggtggatctccaggaagaggaggtggacctattcaggctactttaaagtcacaaccttcaggaacagttaatggtaaaataagaattactgatcaaggggaggtaattcaacaaaagtatggatataaacctttagctgaatataacctttgtagctatatcggctctgtaatggatgcttctttaaatcctccgccaagatcaaaatcaaattggcgtgatttgatacaaaaaatgtcagaaatttcaacatcctcatacagaaaatacttaaatcaaagtgaggattttattcgttactttaaaaccgttacacctcataaatcacttggaaaacttgcaattggatcaagaccgaccaaaagaaagaatgttgataacatccaaagtttaagagctattcctttgggtatttgcttggacacaaattag

SEQ ID NO: 276653 - DNA, 1609 bp, Unknown
  Bacterial polypeptide expressing nucleotide sequence isolated from the Sargasso Sea
ttccaacaaaaatatttttattgaagaaatatttgaaggtttttttaaaaatagaaaaatatcaactaataaaatttacgatatagcaaaaaatttaaatataggaattgtattaaccgctcatccaacagaagtaaaaagaagaactttgatacttaagtaccacaaaattattgaaataatggaacagagagatttgttaaaaaaatatccttttaaattaaaaatattagataaaaaattattcgatgaatttacaataatttggaatactgacgaattaaagagatcgagacccacgccaccagatgaagcaaggtggggtcttgcaattattgaagatagtttgtgggaaacaattccaaaagtttacaggaggttaaatgatatttttgtaaaaaatataggaaaaggattaccaaaaaattttaatccaattgaatttggttcgtggatgggtggagatagagatggtaacccaaatgttactgccaaagtaactaaagaggtaattttattatcacgatgggaggcagctaagttatatgaaaaagaattaaccaaattaatcagatctttatcaatagataaatgttcaaaaaaaataatttcaaaaactggcaaaacttttgagccttatagagtttatttaagaccattaagaaacaaaatgcgacttactcataaattaattgaacagcacttagttgaaaatattcctttagatcaaaaaaagcttttgtgtaacagagaggaaattttaaaacctttaagggtagttagagagtcacttgaagaaaataatagtgaaaatattgccagtggcgatttattagatttaatgagaagagctaaatgttttggcattaatttggcaagactagatataaggcaggagtcatcaagacattcacagctcattgctgaattattaaaaagaaaatataaatttaactataataatttgagcgaagataagaaaataaaattattgtcttcaaaaattaaatcaaaaataaatcttataaataaattttcttttaaaaataaagaaaataaagaagtgtgggaaacatttaaaattttatcaaatgaaccaaaagaatgtttaggcgcctatgtaatttctatgacttcagcagcctcagatattttgtctgttgcatttctccaaaaggaagcaaaaattaaagacttactaagaatagttccgttatttgaaactttggaagatttgataaatgctaaatctataatgaaaaaattattttcattaaattggtatagaaaaatgattaataataaacaagaagtaatgattggttattcagattcgagtaaggacgcaggaaaattatctgcaagttggcatcaatataaagcccaagaagaaattataaaacttgcaaaaaaatataaaatcgatgttactttttttcatggtcgtggaggatctgctggtcgtggaggaggccctatccaagcaactttgagatctcaaccaccaaattcagtaaatggaaaaattagaatcacagatcaaggcgaagtaatacaacaaaaatatggatatgagccaatggctaaatataatctttgtagttatata

SEQ ID NO: 276654 - DNA, 1201 bp, Unknown
  Bacterial polypeptide expressing nucleotide sequence isolated from the Sargasso Sea
gatgtactggctgtgcagttactgctgaaagatgctggtattactttcccaatgcgggtagctcctctgtttgaaaccttggccgatttaaccaatgcgccggagtgtatcagtaagttgctggccattgattggtacagaggctatatcaacggtcgtcaggaagtgatgattggctactctgactcagccaaagatgccggtgcttttgctgccgcctgggctcagtacagtgcgcaggaagctttggtcgctatttgccagcaagccaaagtacaactgactttattccatggccgtggcggcactataggccgtggtggtggtccggcgcatgccgcgattttatctcagccacctggttcattggctggtggtatgcgggtgactgagcaaggcgaaatgatccgctttaagtttggtttaaatggcctggcacagcgtagtttagctttgtacgccagtgctgtgctggaaggggtattgttaccgccaccggtaccagagcaaagctggcgtgagttgatgcaacaattggcaacagtgtcttgtgaagcttaccgcgcagtggtgcggcatcacccggattttgtgccttatttccgtgctgccacaccagagctggagctgggccagttaccactgggcagtcgtccgcctaagcggaatccaaatggcggcgtcgagagcttgcgtgctattccatggatttttgcctggtcgcaaaaccgcctgatgttaccggcctggttgggtgctggtaatgcgctggctgttgttgttgagcaaggaaaaaccgagttattggctcagatgcgggcacaatggccatttttcgccacccgtttgtcgatgctggaaatggtgtatttaaaagcggatgcagaaattgccgcttattatgatgaaaaactggtgccggagcatttgttgcctttaggtttacaattgcgtcagcagctggctgcagatactgctttgctgttaaagcttatccaaagcgatacgctgatggccaatgaagcctggatccgcgagtctattatgctgcgaaatacttatgtcgacccgctgcatattttgcaggtggaattgttaaaccgggtgcggcatgcgcctgaaacagtgaacgacagtattaaacgcgctttgatggtgactattgccggtatagcagctggtatgcgtaactcgggttaat

SEQ ID NO: 276655 - DNA, 2971 bp, Unknown
  Bacterial polypeptide expressing nucleotide sequence isolated from the Sargasso Sea
atggaatctattcgacagataaaaaataataatgtggatttgataagtaacaatgatccacttgataaaaatcgtcttcttatcgaagatctctgggaatctgtgctcagagaagaatgcccaaatgatcaagcagagagattgatacaacttaaagaattaagttattcaaaacaaattgatggcgatagttcaaaaacttttaaaaatgaaatagttgatattgtaaattctatggatttagcagaatccatagcagcagcaagagcgttttcattgtattttcaactcgtgaatattttggaacaaagagttgaggaagatagatatattcaaagcttcaccaataaggatgttcaaaaatcgcccgacaatcttgatccttttgctccagcattggctagacaaaatgctccagtaacttttagagaattattttacaggctgaggaaattaaatgtaccaccaggaaaattagaggagttattgcaggaaatggatattcgtttagtttttactgcacacccgaccgagatcgtaagacatacgattcgacataagcaaacaagagtagcaaatttgttaaaaaaaatacagattgagcaatttctaacaaaagaagaaaaaaattctctaaaaaaccaattaaaagaggaagtaagactttggtggagaacagatgaattgcatcaatttaaaccttcagttttagatgaagttgattatgccttgcattattttcagcaagttttatttaatgcgatgcctcaattgaggggcaggatcgctgaagcacttaccgaaaattatccagatgttcagttgccctcagaatctttttgtaacttcggttcatgggtaggatctgatagggacggtaatccatcggtcactccggagataacatggagaactgcttgctaccaaaggcagttgatgttggaaagatatattattgcgacgtctaatcttagagatcaattaagtgtgtcgatgcaatggagtcaagtcagttcttccctattagagtcactcgaaactgacagggttaagttccctgaaatatatgaagctagagctacaaggtatagatcagaaccctacagattaaaattaagttatattttagaaaaactaaggttaacacaagaaagaaataatttattagctgatagtgggtggaaatttgacttggagggagaaactgataagaaaaatctagataaagttgaaaacttatattacaagtcagtaaacgaatttacttatgatctcgaactaattaaaaatagcttgattagcacagatttaacttgtgagtccgtaaacactttacttactcaggtccatatttttggattttctttagcaagtttagatattcgtcaagagagtacacggcatagtgacgctatacaagagcttacaagttatcttgatttatctgttcaatatgaccaaatgtctgaggaagagaaaattaaatggcttatagacgaattaaatacaaaaaggcctttaattccatctgacgttaactggacaaaaactacagaagaaactttttcagtttttaaaatggttaagagactacagcaagaatttggaagtcggatttgtcattcttatgtaatatcaatgagtcatagtgcatctgatttgcttgaagttctcttgctggcaaaagaaatgggacttcttgatcaaaattcacaaaagtcaaaattattagttgttcctctttttgaaactgtggaagaccttaaaagagcaccagaagtaatggaaaagttgtttaaattagatttctatagatcattattgccaaaagtaggagaatcttttaaacctctgcaagaattaatgcttggatattctgatagcaataaagattcagggtttgtttctagtaattgggaaattcatagagctcaaatagctcttcaaaatctctcaagtagaaataacatattgctaagactttttcatggaagaggtggttctgtagggagaggaggaggcccagcctatcaggcgatattggctcaaccaagcggcactttaaaagggcgaataaaaataacagaacaaggtgaagttttagcttctaaatatagtcttcccgaactcgctttgtacaatcttgagactgtaactacagcggtaattcaaaatagtttggtaaataatagacttgacgctactccagaatggaatcaattaatgtctaggttggcagaaacatcaaggtctcattacagaaaattagtgcatgagaatcctgatctgttaaatttctttcaagaggtcactccaatagaagaaataagtaaattacagatatctagtaggcctgctagaagaaaaaaaggtgcaaaagatttgtcaagtttaagagctattccatgggtatttggttggacacaaagtagatttcttttaccaagttggttcggagtaggcactgcattgtcatctgaattaaattcagatccacaacaaattgaattattaagagttctgcatcaaagatggccattttttaggatgctcatatctaaggtagaaatgacattatctaaggtggatttggaagttgctagatattatgttgatactcttggcagtaaagaaaataaggattcttttgatgatatttttgaagtaatttctaaggaatataatcttacaaaatctttaatacttgaaattacttgtaaaaataagctcctagaatctgatagagacttgaaatcttcagtaagcttgagaaataagacaattattccattagggtttttgcaggtttcacttctaagaagattaagagaccagacaagacaacccccaataagcgaatttatgatagataaagatgaatctagaagggcttacagcagaagtgaactattgaggggagcacttttaactattaatgggatagcagctggcatgagaaatacaggttaat

SEQ ID NO: 276656 - DNA, 1607 bp, Unknown
  Bacterial polypeptide expressing nucleotide sequence isolated from the Sargasso Sea
agaaagcgacctgaaagcgccgctagagatgctgtataagagtttatgtgactgcggcatgcgtttgattgctaacggtttactgctcgacattctgcgccgactcgcttgttttggcatccatatgttaaggctcgacatccgccaagacgcaggccgtcactgcgatgtacttgcagagttaacccgctatctaggtatgggtgactttaaccattgggacgaaaccgaaaaacaagccttcttactgcgtgaactcagtaaccgtcgtccgctgatcccgagcaactggcagccttccgccgacgtagccgaagtgcttaacacttgccgcttaattgctaaacatcctgctaaggcgttgggttcctatgtgatctcgatggcgagcaagccttcagatgtattaaccgtattattactgctcaaagaaaccggctgtactcatccaatgcgcgttgtgccgctatttgaaaccttaagcgacttaaataacgccgccgagtgcattaccgcactgctcgatatcgactggtatcgtggttacaccaaaggcatgcaagaggtgatgatcggctattctgactcggccaaagacgcgggtgtaatggccgccgcttgggcgcaataccgtgcacaggagcagttagtcgccgtctgtaaacaggctggcgttaagctgacgctgttccatggtcgtggtggcagtattggtcgcggcggcggcccagctcacaaagcgattctgtcacaaccgcccggctcagttgatggtcgtattcgggtcaccgagcaaggtgagatgatccgctttaagttcggcctgcctaaattggcggtgcaaagcttagccctgtacacctcagcggtgttagaagcgaccttgcttccgccgcccgagcctaagcaggaatggcgcaattgtatggagcgaattgctgaggagtcagtgagtgcttaccgcggtattgtccgtgaagagcctgattttgtgccttatttccgtgcagccactccggaggttgaactaggcaaactaccattaggcagtcgtccagcaaaacgccgtgtcgatggcggtatcgagagcttacgtgccattccttggatttttgcttggtctcaaaaccgcttaatgttgccagcatggctcggcgccggtgaagcattgcaggccgcctgtcaacgtggcgaaatgggcttgctacaggatatggagcgcgaatggcccttctttagcacacggatttccatgctggagatggtatacgccaaggcggaacctaacttggcgcgttactatgaaacctgtttagtaccgaccaatctacatcacttaggcgaaactttacgccagcgtttagatctcggcattaaagtggtgctggagctgactaaatcagataccttaatggcgcatacaccgtggaatcgcgaatcagtcaaactgcgcaatccctatatcgatccattaaacttcctgcagaccgagttattggctcgtacccgcaaggaaacaaccgaagctcccgcttccgaacacgtgcaactcgccttaatgctgacgattgccggtgtcgcagcgggcatgagaaacacaggttaat

SEQ ID NO: 276657 - DNA, 1276 bp, Unknown
  Bacterial polypeptide expressing nucleotide sequence isolated from the Sargasso Sea
atgaacgaacaatattccgcgttgcgtagtaatgtcagtatgctcggcaaagtgctgggagagaccatcaaggatgcgttgggagagaacattcttgatcgcgtagaaacaattcgaaagctgtccaaatcatctcgcgctggcaatgaaattaatcgccaggaattgctcaccacactgcaaaatctgtctaacgacgagctgctgccggttgcccgcgcatttagccagttcctgaatctggccaacaccgccgagcagtaccacagcatttcgccaaaaggcgaagccgccagcaacccggaagtgattgctcgcactctgcgtaaactgaaagagcagcccaacctcaatgacgccgccatcaagaaagctgtagaatcactctctctggagctggtactcaccgcccacccgaccgagatcactcgtcgtacgctgatccataaaatgggtgaagtgaacgcctgcctcaagcagcttgataacaaagacctcgtcgattatgaacgcaaccaactgatgcgccgtctgcgtcagctcattgctcagtcctggcatacggatgaaatccgcaaactgcgcccaagcccggttgatgaagccaaatggggattcgcggttgttgaaaacagcctgtgggaaggtgtgccgaactacctgcgcgagctgaatgaacaactggaagagcatcttggatataagctgccggttgattttgtcccggttcgatttacctcctggatgggcggcgaccgtgacggcaacccgaacgtaacggcggatatcacccgtcacgtgctattgctcagccgctggaaagcgacagatctgttcctgaaagacatccagtttctgatttctgagctgtcgatggtggatgccactccggaactgatggcgctggtaggtgaagaaggcgcagctgaaccataccgctacctgatgaaaaccctgcgttctcgtctgatggcgacccaggcctggcttgaagcccgtctgaaaggcgagaaattgccgaaacctgcgggacttctcacccaaaacgaacagctctgggacccgctttacgcgtgctaccagtctctacaggcctgtggtatgggcatcatcgccaatggcgaattgctcgacaccctgcgccgcgtgaagtgtttcggcgtgccgctggtgcgtattgatattcgtcaggaaagcacccgtcatactgaagccttgggcgaactgactcgttatctgggcattggcgactacgaaaactggtcggaagcagata

SEQ ID NO: 276658 - DNA, 1456 bp, Unknown
  Bacterial polypeptide expressing nucleotide sequence isolated from the Sargasso Sea
atgagattaacgcatagagcaatagaaaatcatcttgtaaggcacaaacctctagatcaaaataaattattatcatcaagggaagaaattttaaaacctttaagagtggtaagagattctcttgaaaaaaaccagaatgaaaatatagcaagtggtgaattacttgacttaatgagaagagcaaaatgttttggtataaatcttgctagactagatattagacaggaatcatcaagacactcgcaattactttatgagttcatcaaaaagaagtacagagctgattattataaatggtcagaaaagcagcgaataaattttttatcaaaacatttaaaaacaaataaaaaaatcattaaaaatttcagatttaagaatagagaaaatcttgaagtttggtccacttttaagattctagctgatcaacctgaggaatgtttaggtgcatatattatttcaatgacatcgtcagcctctgatattttagcagtttcttttttacaaaaggaagcaaatataaataaaagattaagagtagttccattattcgaaaccctagatgacttaaaaaatgcaaaatcaattatggaaaatttattttccttaagctggtatagaaaattaattaaaaataatcacgagattatgattggttactcagactcaagtaaagatgctggaaaactttctgcgagctggcatcaatataagcttcaagaggaaattgttaagttagggaaaaaatataaaattgatctcacattttttcatggtagaggtggatctgcaggaagagggggtggtccaattcaatctactcttagatctcagcctccaggatccgtaaatggtaaaattagaattacggatcaaggtgaaatgatacaacaaaaatatggctatgaaccaatagcaaaatataacctctgcagttacataggtgcggtaatgcaagcaacacttaatccaccaccaaaaccaaaagatagttggagaaatttaattgaggatatgacacagatttcgacaagatcctacagaaaaaatattagagaaaatacagattttattagatactttaaaactgtaacaccacatcttgcacttggaaaattatcgattggatcaagaccatctaaaagaaaaaatgttgataatataaaaggacttagagcaataccatgggtttttgcttggacgcaaataagattaatgttaccggcatggcttggaacaggtgaggcattaaaatactcttcagttaaaaaatttaaatctatattagtcgatatggaaaggaattggcctttctttaattcaacaatggatattttggatatggtgatttcaaaagttgatcctgaaatttcagaggtttacgaacaaggattggcagatgctaaacttaaaaaagttggtgataaactaagattgcaatttgataatataaaaaaat

SEQ ID NO: 276659 - DNA, 2701 bp, Unknown
  Bacterial polypeptide expressing nucleotide sequence isolated from the Sargasso Sea
ttttcattatattttcaactagtaaatattttggaacaaagagtggaggaagatagatatatacaaagctttaccaataagaatgttcaaaaatctcccgataatctcgatccttttgccccagcattggctagacaaaatgctccagtaacttttagagaattattttataggctgaggaacttaaatgtacctccaggaaaattagaggagttattgcaggaaatggacattcgtttagtttttactgcacatcctaccgaaatagtaagacatacgattagacataagcaaaccagagtcgcaaatctgttaaaaaaaatacaggttgaggaatttttaacaaaagaagaaaaaaattctctaaaaactcaattaaaagaggaagtaagactttggtggagaacagatgaattgcatcaatttaaaccttcagttttagacgaagtagattatgctttgcattatttccagcaagttttatttaatgcaatgcctcaattgagaggcagaattgcagaagcactcaccgaaaattatccagatgttcagatgccctctgaatctttttgcaatttcggttcttgggttggctccgatagggatggtaatccatcggtaactcctgaaataacttggagaactgcttgctaccaaaggcagttgatgttggaaagatatattattgcaacatctaatcttagagatcaattaagtgtctcaatgcaatggagtcaagtaagttcttctctcttagagtcattagaaacagatagggttaagttcccagaaatctatgaagctagggcgacaagatacagatcagaaccttatagattgaaattaagttatattttagaaaaattaaggttaacacaagaaaggaataatttattatctgatagtggttggaaatttgacttagagcgagaaattgataccaaaaatatagataaagttgaaaacttatactacaaatcagtaaacgaatttacgtatgatctcgagctaattaaaaatagcctaattagtacagatttaacttgcgaagcagtaaacaccttgctgactcaggttcatatttttggattttctttagcaagcttagatattcgtcaagaaagtacaaggcatagtgacgctatacaagagcttacaaattatcttgatttatatgttcaatatgaccaaatgtctgaggaagagaaaattaaatggcttatagccgaattaaatacaaaaaggcctttaattccctctgacgtcaactggacaaaaactacagaagaaaccttttcagtatttaaaatggttaaaagactgcagcaagaatttggaagtcgtatttgtcattcttatgtaatttccatgagtcatagtgcatctgatttgcttgaagttctcttgctagctaaagaaatgggacttcttgctcaagattcacaaaagtcaaaattattagtcgttcctctttttgaaactgttgaagaccttaaaagagcaccggaagtaatggaaaagttgtttaaattagatgtttacagatcattattgccaaaagttggagaatcttttaaacctcttcaagaactaatgcttggatattctgatagcaataaagattcaggttttgtttctagtaattgggaaattcatcgagcccaaatagctcttcaaaatcttgcaagtagaaatgacatattactaagactttttcatggaagaggcggttctgtaggtagagggggaggaccagcctatcaggcaatattagctcaaccaagcggtactttaaaagggcgaataaaaataacagaacaaggtgaagttttagcttctaaatatagtcttcctgaactggctttgtacaatcttgaaaccgttaccacagctgtgattcaaaatagtttagtaaataacagacttgacgctactccggaatggaatcaattaatgtctaggctggcagaaacatcaaggtctcactatagaaaattagtgcatgagaatcctgacttgttaaatttctttcaagaagtcacgccaatagaagaaataagtaaattacagatatctagcaggcctgctagaagaaaaaaaggtgcaaaagatttgtcaagtttaagagctattccatgggtatttggttggacacaaagtagatttcttttgccaagttggtttggagtaggtacggcattatcagctgaattaaattcagacccacaacaaatcgaattattaagagttctgcatcaaagatggccattttttaggatgcttatatctaaggtagaaatgacattatctaaggtggatttggaagttgctagatattatgttgacactcttggcagtacagaaaataaagattcttttgatgttatttttgaagtaatttctaaagaatataatcttacaaaatctttaattcttgaaattactggtaaaaataagcttctcgaatcagatagagacttaaaatcttcagtaagcttgagaaataagacaatcatcccattgggatttttgcaggtttcacttttaagaagacttagagaccaaacaagacaacccccaattagtgaatttcttatggataaagatgaatctacaagagcttatagtagaagtgaactattaaggggggcacttttaactattaatggtatagcagctggtatgagaaatacaggttgat

SEQ ID NO: 276660 - DNA, 1381 bp, Unknown
  Bacterial polypeptide expressing nucleotide sequence isolated from the Sargasso Sea
ctgaaggaagaaaaaattaattttttaaaatctaaattaacttcaactaagagctatattaataaatttaaattttctgataaagagaacaatgaagtttggtctacttttaaagtacttgcagatgaaccctcagagtgcttaggagcatatgtaatttcaatgactacgtctgtgtcagatattttgtcagtttcatttctacaaaaagaggcaaaaataaataataaattaagagtagttcctttatttgaaacattagatgatttgattaatgcaaaatcaataatggagagtttattttcaaaaaaatggtacagaaaactaattaataataaacaagaagtaatgataggatattcagactctagtaaggatgcaggaaaaatatgtgctagctggcatcaatacaaagcccaagaggaaatagtcagattaggaaaaaaattcgatgtaaatgttactttttttcatggaagagggggctctcccggtagaggtggcggaccaattcaagctactttaagatcgcaacctccaggttcagtaaatggaaagattaggattaccgatcagggtgaagttattcagcaaaaatatggctatgaaccaatagctgaatataatctatgtagttacataggtgctgtaactgaagcaacattaaatcctccacctactcctaaacaaaactggagatcactaattgaaaaaatgtccgatatttctaagagttcatatagaaaaaatattaatcaaagctcagaatttattaaatatttcaaaactgtcacacctagtgcagctctaggaaaactatcaattggatcgagaccatctaaaagaaaaaatgttgataatattaaaagtttaagagcaataccttgggtatttgcttggacgcagattagattaatgttacctgcgtggttaggtagcgctgaggctttaagatatgcttatataaaaaagtttagaaggactttaatagatatggaaaaaaattggccctttttcaattcaatgttagatatacttgatatggtaattacaaaagctgatcctgatatttcaaaaatttatgaaaaatatttagcagatgatgcactaaaaaagattggaaaaaaacttagatttcaatttgaagtaataaaaaaattaaataaaaaaattactacaaaagaagttattttaacacgtaaacaattcagaactttaataactgtcagagctatatactctgaagtactaaatattatccaaccaatagttatatataaacttaaaaaaaacaaaattatgtctgacaaaaaatatttaaatgatgctcttttaacatcaatagctggaatatcagcagccatgaaaaatacaggttaaa

SEQ ID NO: 276661 - DNA, 1451 bp, Unknown
  Bacterial polypeptide expressing nucleotide sequence isolated from the Sargasso Sea
gcaatttctaacaaaagaagaaaaaatttctctaaaaacccaattaaaagaggaagtaagacttggtggagaacagatgaattgcatcaatttaaaccttcagttttagatgaagttgattatgccttgcattattttcagcaagttttatttaatgccatgcctcaattgaggggcaggatcgctgaagcacttactgaaaattatccagatgttcagttgccctcagaatctttttgtaacttcggttcctgggtaggctctgatagggatggaaatccatcggtcactcctgatataacatggagaactgcttgctaccaaaggcagttgatgttggaaagatatattattgcgacgtctaatcttagagatcaattaagtgtgtcgatgcaatggagtcaagtcagttcctccttattagagtcactcgaaactgacagggtcaagttccctgaaatatatgaagctagagccacaaggtatagatcagaaccctacagattaaaattaagttatattttagagaaattaaggttaacacaagaaagaaataatttattagctgatagtgggtggaaatttgacttggagggagaaactgacaacaaaaatttagataaagtggaaaacttatattacaagtcagtaaacgaatttacttatgatttagagctaattaagaatagcttaattagcacagatttaacttgtgagtctgtaaataccttacttactcaggttcatatttttggattttctttagcaagtttagatattcgtcaagagagtacaaggcatagtgatgctatacaagagcttacaaattatcttgatttatctgttcaatatgaccaaatgtctgaggaagaaaaaattaaatggcttatagacgaattaaatacaaaaaggcctttaattccatctgacgttaactggacaaaaactacagaagaaaccttttcagtttttaaaatggttaagagactacagcaagaatttggaagtcgcatttgtcattcttatgtaatttcaatgagtcatagtgcatctgatttgcttgaagttctcttactggcaaaagaaatgggacttcttgatcaaaattcacaaaagtcaaaattattagttgttcctctgtttgaaactgtggaagaccttaaaagagcaccagaagtaatggaaaagttgtttaaattagatttctatagatcattattgccaaaagtaggagaatcttttaaacctctgcaagaattaatgcttggatattctgatagcaataaagattcagggttcgtttctagtaattgggaaattcatagagcccaaatagctcttcaaaatctctcaagtagaaataacatattactaagactttttcatggaagaggtggttctgtagggagaggaggaggaccagcctatcaggcaatattggctcaaccaag

SEQ ID NO: 276662 - DNA, 1336 bp, Unknown
  Bacterial polypeptide expressing nucleotide sequence isolated from the Sargasso Sea
aaatcttttgtagataaaataaatattcgagataaagaaaacaaagaagtatggaatacttttaaacaaattgccaaagagccaactcaatgtcttggtgcttatgtaatatcgatgacgtctaaagcatccgatattttatctgtttattttttacaaatgcaggcacaaacaaaaaatttattaagagttgtgccgctttttgaaactctagatgacttgataaatgccaatagtgttatgacaaacttattcaaactttcttggtatagaaaaatgattaaatcaaaacaagaggtaatgattggatattcagactctagcaaagatgctggaaaattatctgcgagttggcatcaatacaaactgcaagaagagcttagaaatttagctaaaaaatataaaatagatcttgttttctttcatggtagaggtggatctccaggaaggggaggtggtccaattcaggctactctaaaatcacaaccttctggcacggttaatggaaaaattagaattactgatcaaggagaagtaattcagcaaaagtatggttataaacctttagctgagtataatttatgtagctatataggtgctgtaatggatgcttctttaaatcctccaccaagatcaaaaactaattggcgtgaattaattcaaaaaatgtcagaaatttctacatcttcatatagaaaatatctaaatcaaagtcaggattttattcgttatttcaaaacagttacgccacataaatcactaggaaaacttgcaattggatcaagaccaaccaaaagaaagaatgttgataatattcaaagtttaagagctataccttgggtgtttgcttggacacaaattagattaatgttacctgcttggcttggcacaactgaagcattgagatatggatcaatcaaaaagtttaaaagaacaatgactgacatggaaagaaattggccatattttgtatcaaccatggatattttagatatggtaatttcaaaggtggatccagaaatatcagttatttatgaaaacaatttagctgatgcctcattaaagagaattggtaaaaaattaagatttcaatttgatgcattggtcaaattgcataataaaattactcctaaagaagtggtaaaagagagaaaagaatttagaaagtctttatttataagaaacaattatactgagatgttaaatatactacaggcaaatgtaatgaataaactaacaaataaaaaatataaaaatttagataaaaaatttcttgaagatgctttaatgacatcgattgcaggtatttctgctgcgatgaaaaatactggataaa

SEQ ID NO: 276663 - DNA, 1549 bp, Unknown
  Bacterial polypeptide expressing nucleotide sequence isolated from the Sargasso Sea
aatcaaagtgagaatatagctagtggagaacttttagatctaatgagaagggcaaaatgctttggaattaatttagcaagactagatataaggcaagaagcatctagacactctcaactaataactgaaataataaaaaataaatatggccaagattataattcttggaacgaagaaaaaaaaataaaatttctctcacaaaaattgaaaggtaaaaattttataaacaaatttaaatttaaaaatagagaaaataaggaagtttggtctacttttaaggttctttcaagtcaacctaaagaatgtttaggtgcttatgttatatcaatgacttcaagtgcatcagatatactatcagttatgttattacaaaaagaagcaaacataaaagataggttaagagtcgttcctttatttgaaacattagatgatttaataaatgctaaacctataatgaatagtttattcaaattaggttggtataaaaaattagtaaatagtaatcaggaaataatgattggttattcagactctagtaaagatgctggaaaactgtcagccagctggcatcaatataaattacaagaggaaatcttgaagttatctaaaagatataaaattgaagtaactttctttcatggaagaggagggtcagcaggaagaggtggaggaccaattcaggcaactctaagatcgcaaccaccaggatccgttaatggtaagattagaattacagatcaaggtgaagtaattcagcaaaaatatggatatgagccgttagcaaaatataatttgtgtagctatataggatctgtaatggaagcaacattaaacccaccaccattgccaaaaaatcagtggagaaatctgatccaaaaaatgtcagaaatttcaaccagttcttatcgtaaaaatattacaccaaattctgaatttataagatactttaaaactgttacacctcacatggcattaggtaaattatcaattggatcaagaccttcaaaaagaaaaaatgttgacagtattaaaggcctaagggcaattccatgggtatttgcttggacacaaattagattaatgctaccagcttggctgggtactgcagaagctttaagatattcttctataaaaactttcaaaaaaacattaacagacatggaaaaaaattggccttactttaattcaacaatggatttattagatatggttttatctaaagttgatccagaaatatcaaaagtttatgaggataatttagctgatgcatctttgaaacgtgtaggaaaaaaacttagatttcaatttgatgcagttaaaaaacttaatcacgatataacaccaattgaaatattaaaacaaagaaagatttttagaggacctgcgattgtaagaaatgtctactctgaagttttaaatgttctacaagctgttgtaatgaataagttatccaaaaaaaaacttaaaaaacacgcaaaaaatgaacttaatgatgcgttaatgactagtattgccggaatctctgcagctattaaaaatactggttaat

SEQ ID NO: 276664 - DNA, 797 bp, Unknown
  Bacterial polypeptide expressing nucleotide sequence isolated from the Sargasso Sea
gatgacgaaatcaagagatggtgtttattggttttcaaattttggaaacggtgtgtggaaatatgatccaatatcaataagaaatcttacaacaaacgatagtattccacagtctaatatgaattctatgataatggataaggataataatatgtggattgccacggggaatggattgctaaaaataaaaaatgaaaaagtagagaagatatatagcatgaaagatggtttaagagataatacaattacggatatagacatcgatgattatggcactttgtggatcacaacgccacgaggactttccacatacaatggaagaacttttaaaaattataccataaaagatggatttccatcaaatcagatgccatccgtaaccattgataacaatggtttggtgtgggtattgacgactaaaggactttgttcctttgatggatctaatgttgaggtatatgatgaaaaaaatggtatttacaatctcaataatggacaaagtctttcagaaatatctgctcatcctgatggttcaatctatattggacaatacggtggaggcctaactgtatttaaggatggaattggaaaaagatatggtgctgaagatggattagttgatcaaagaattcaccatttggatattgattcagaaggaaattgttggctagcaactgatggatcgggagtagttaaatttaatggaaaagatttttttaggtataccaccaaagatggccttgcagcccctgagacattttatgtttatatagatgactatgataaaatatttgtgg

SEQ ID NO: 276665 - DNA, 447 bp, Unknown
  Bacterial polypeptide expressing nucleotide sequence isolated from the Sargasso Sea
gcacagctcgcgtgtgggacatgcgatcaggggagtgcacgcacaagttcgacgtcgtcggcgagtgcaacggctgcgccttcttcccgagcgggacggcggtcgccgccggcacgcagaacggcagcgtcttcctctttgacctccgggcgcaagcggcgctgcaaaagtacagccggaaaaacaaccacgtgacggcggtcgacttttcccagtcgggccgcaccatgtacgtcgcctacgaggacgggcacgtctgcctgtgggaccccctcgcctcgtcggagtcggggtacgccaagaaggttgcggcgcacgtgaagaaccagaaccacgactcacgaatgcgtgtcatctcctgcatgcagatgtcacccgacgggacgtgcctcgcgacgggcgcgttcgacgccacaatttgcctctgggggccggggaagtcctagg

SEQ ID NO: 276666 - DNA, 892 bp, Unknown
  Bacterial polypeptide expressing nucleotide sequence isolated from the Sargasso Sea
cgggtgaaaagttcatccccctcgctggaatcacgccgcgctgcaaagatcgattggctgaatgccacctttgaccatccagccatgagcctgcacggcctggtgcagttcatcagcaccttgatggacggcatggtcaccgcgcaaatggacggcggcctcttcggcttcacagagcgccaccgcatgaccgcgcacctccctgacgggtcgcgcgttgaaatcggctccatcgccctcggcggcgaaagccaaaagggccggtggctgctgcagctcaacggcaagggctgcggcctcatcaacgactggcccagcctgcaggagcttctgcagggcctgcaggccgaactatcacgcgtcgacctggctgtcgatttccttgagggtgaatacacggtagacgacgccgtgaccctctacgaccagggcgcattcatcaatcgtgggcgaaaccctcagctggacatacagggcgcctggcacgaaagcggcacgaagggacgaaccatgtacgtcggaaagctcaagaacggcaagacgctgtgtgtctatgaaaaagggcgccagcaaaacatgccagacagcaactggacccgcttcgaagtgcggttgggcaaccgtgatcgcgtcatccccctggacgtgctcacagatccagaccgctacttcaccggcgcttatccagccctctcgcacatgctggaagccgcagccgaagccatccccaccgtgcaggaagaaaccaaaggcagcttggcccacgggctgtaccacctggagcgctgctacggcaaatacatgcaccaggcgctggaaatcacaggctgcacctccgccgaactcatcgaagaggtgcgcgttatcggaatgcccaagagggtagacccag

SEQ ID NO: 276667 - DNA, 247 bp, Unknown
  Bacterial polypeptide expressing nucleotide sequence isolated from the Sargasso Sea
atgagtaaaaaagatttagaaaattgggtaactgaggtagccaaactgacggctccagaaaaagtacattggtgtgacggtagcgaagaagaaaaaaagttcctgatagcagaaatgttaaaaactggtgatctattaaaattaaatgaaagcactcatccaaattgctttctacatagatcagaccctaatgacgtggctagagtggaacagctcacatttatttgtagtagaacaaaaggatgat

SEQ ID NO: 276668 - DNA, 256 bp, Unknown
  Bacterial polypeptide expressing nucleotide sequence isolated from the Sargasso Sea
ctgatcgctccgccggctttcgtcaaacatcgcaagctgatcgactgggtgtcgcgcatcgcggcgctcacggagcccgagcgcgtcgtgtggtgtgacggttcgcaggaagaaaacgacgcgctgtgccaggcgatggtcgaccagggcacgctcaagcgcctgaacccggcgaagcgccagaattcgtatctcgcgcaatccgatccgtcggacgtcgcgcgcgtcgaggatcgcacgttcatctgcaaaaaaa

SEQ ID NO: 276669 - DNA, 395 bp, Unknown
  Bacterial polypeptide expressing nucleotide sequence isolated from the Sargasso Sea
tatgtctacatcaaatacagagcttcagagttgggttgaggaagtttcagaaatgaccaagccagacaatatttactggtgcaatggttcaaaagaagaatatgaagaattcatccaacaaatgcttggaactggagacttgatgcaactcaatgaagaaacttttccaaattgttacttgcatagatcagacccatcagatgtagcgagagttgagcatttaacttttatctgtacagaagattcagaggatgccggtccgaataataattggatggatccaaaagaagctcatcagaagcttgatcagttgtttgaaaattgtatggaaggtagaaccatgtatgtcattccttactgcatggggccaataggctcggaactttcgagatgtg

SEQ ID NO: 276670 - DNA, 502 bp, Unknown
  Bacterial polypeptide expressing nucleotide sequence isolated from the Sargasso Sea
tctacaatgggttcagaagcgacagctgcagctattaaccaagcttcaataagaagagatccttttgcaatgttacctttctgtggatataatatggcacagcattggaggcattggttagatttaggtcataaatatacccaaagttctccaaaaatatttagagtaaattggtttagaaaagatagtaatggtaattttatttggccaggctttggtgaaaatatgagaatattaaaatggattgtagatagagttaagggtaaagtagaagcaaaaagtaatagttttggtttagtaccgtattttgaagatattgtttggaatggtttagaatttgataatgaaaaattttcatctttaatagaggttccaaaaactgaaggactaaaagaaattaatgaagtaaaagaacattttgatagatttggtgactttattcctaatgaattagaatctcaaagaatagaattagaacaaagattaaataaagaattataaa

SEQ ID NO: 276671 - DNA, 451 bp, Unknown
  Bacterial polypeptide expressing nucleotide sequence isolated from the Sargasso Sea
aatgtcgaaagggatccaatggcgatgaaacctttctgtggttacaactttggtgattactgggcacactggctcagtttttcttctcggtcggacaaacttccacctattttccatgtgaactggtttaggaagggaggggatggtaagtttttatggcccggcttcggagagaatattagagttctggagtgggtactagccaggtccgctggaaaagtagaaggaaccaagtctgcgattggatatcttccaaaatctggggagctgaacttagatggattgaatcttcagccaggtgctactgagtcgttattatctgttgacagagattcatggaagaaagagattgaagatattaaagaatatttttcgagttttggtgcccggctccctgccgcgctaaccgaccgagctgaattgattaagaacgcgctcgggagcgtctagc

SEQ ID NO: 276672 - DNA, 453 bp, Unknown
  Bacterial polypeptide expressing nucleotide sequence isolated from the Sargasso Sea
caatgctgccgttctgcggttacaatatggcggactattggcgccattggctgaagctgggcaaaggcctcgctcatcctcccaaaatttttcgggtgaactggtttcgaaaggatgacaaaggaaaatttatttggcccgggtttggcgaaaacatgcgggtcttgaaatggattgttgatcgtgtgaatggcacggtcgatgcagcggaaagtccctttggccacatgcctcgccatcaggatctgaactggcacgggttggatttccatgttgatgatttcagcgacatcatggatattgaccgggctaggggtctggaagaggccgaagctcagacagagctgttcgaaagcttcgaagatcgattgcctcctgaaatggaaacccagcgccaagccttgaaagaccgtctcgcgaagtcgtcagatcagtggcaggtggccggctgat

SEQ ID NO: 276673 - DNA, 349 bp, Unknown
  Bacterial polypeptide expressing nucleotide sequence isolated from the Sargasso Sea
atgtctacatcaaacaaagaacttcagagttggattgaggaagtctcaaagatgaccaaaccagagagtatctactggtgcaatggttcaaaagaggaatacgaagaattcatccaaaaaatgcttgagactggggacttaatgcaactcaatgaggaaacttttccaaattgctacctgcatcgatcagatccatcagatgtagccagagttgagcatttaacttttatctgtactgaagattcagaggatgcaggtccgaataataattggatggatcctaaagaagcgcatgagaagcttgatgacttgtttgacaactgcatggaaggcagaactatgtatgtca

SEQ ID NO: 276674 - DNA, 823 bp, Unknown
  Bacterial polypeptide expressing nucleotide sequence isolated from the Sargasso Sea
tggtagtcaaagtttcactaagcgtacgatagtgggagattttgttggtgcaaatactgtctatgctattgatttggatagggatggagacatagatgttttaggaacagcaggaggaagtgataatgacattgcctggtttgagaataatggtagtcaaagtttcactgaacgtaccattgaaggaaatttttctggagcccattcattatacccgatagatatggatagcgatggggatatagatgttgtaggagtaggcactgttgatgatattgcctggtttgagaataatggtagtcaaagtttcactgaacgaacaattaattcaactatttctggacccatttcagtatatgctgcggatattgatagtgatggggatatcgatgttgtagcagcagcaagccaatctgatgatattgcctggtttgagaataatggtagtcaaagttttactgaacgtgtcatagaaggaaattttgatggagcaaaatcagtatatgttaaagatattgatggagatggggatatggatattgtagcagcagcagatgaagatgatgatattgcctggtttgagaataatggtgctcaggatttcactgaacataccattgaaggaaattttgatgcagcaaggtcagtatatgttgcggatattgatagtgatggtgatatcgatgttgtaggagcagcaaactttgatgatgatattgcctggtttgaaaataatggtagtcaaagttttactgaacgcaccatagatggaaattttgatggaccttattccgtatatcccgcggatatagatggtgatggg

SEQ ID NO: 276675 - DNA, 388 bp, Unknown
  Bacterial polypeptide expressing nucleotide sequence isolated from the Sargasso Sea
tggaagcactggatagagatgggtaaaaaaataaaaaatcctccaaaaatattccatgttaactggtttagaaaaaatgatgaaaataaatttctatggcctggatttggagaaaacattagagttctggaatggataataaatcgaacaaatggaaaagcaacagctaacacaactccaataggacacactccaaatctttcttcactttgtacagatggactagatatagatgaaaaaactctaaaagaactaacacaagttacacctgaaggatgggctcaagaactcgaaaatactagttcctatctagaaaaatttgctcccaaagtaccacaggaacttaaagaagaattacaaaaaataaaaaactctcttcttatttaaa

SEQ ID NO: 276676 - DNA, 582 bp, Unknown
  Bacterial polypeptide expressing nucleotide sequence isolated from the Sargasso Sea
cagccatagtctttgggggcagaagaagtgaattggcaccattggtatccgagtcaaaggattggaaccacggtgttcttgtcggcgctagtgttggctcagaaaccactgctgctgcaataggcgaagtgggagtgatcagaagagatcctatggccatgaagccattttgtgggtataactttgcagattattggacacattggcttagtttttcagaacgctctgacaatcttccaaagatcttccatgtgaactggtttagaaaaaatgagaacggattcatttggcctggattcggtgataatttaagagtccttgagtggatcataaagcgttgcaacaacgaaattgatgctcaagaaacacccatcggcttccttccaaaatcagaagatatcaatacttctggattaacaattacggacgaagcaatggaagaacttgtgcttgttgataatcaaaaatggatcgatgaaatggctggtatcagagagtattttgaagagtacgaagaaaggcttccggagaagttgcttgaggaacatgcgaaagtcattgaagcacttaatgctgagtaac

SEQ ID NO: 276677 - DNA, 460 bp, Unknown
  Bacterial polypeptide expressing nucleotide sequence isolated from the Sargasso Sea
atgtctacatcaaatacagagcttcagagttgggtcgaggaagtttcagaaatgaccaagccagacaatatttactggtgcaatggttcaaaagaagaatatgaagaattcatccaacaaatgcttggaactggagacttgatgcaactcaatgaagaaacttttccaaattgttacttgcatagatcagacccatcagatgtagcgagagttgagcatttaacttttatctgtacagaagattcagaggatgccggtccgaataataattggatggatcccaagcaagctcatcagaagcttgatcagttgtttgaaaattgcatggaaggcagaaccatgtatgtcattccttactgcatggggccaataggctcggaactttcgagatgtggagttgagataactgacagccacctatgtagttgcgaatatgtatctgatgacaaggatgggtgat

SEQ ID NO: 276678 - DNA, 384 bp, Unknown
  Bacterial polypeptide expressing nucleotide sequence isolated from the Sargasso Sea
cacattggcttagtttttcagaacgctctgataatcttccaaagatcttccatgtgaactggtttagaaaaaatgagaacggattcatttggcctggattcggtgataatttaagagtccttgagtggatcataaagcgttgcaacaacgaaattgatgctcaagaaacacccatcggtttccttccaaaatcagaagatatcaatacttctggattagcaattactgatgaagcaatggaagaacttgtgcttgttgataatcaaaaatggatcgatgaaatggctggtatcagagagtattttgaagagtacgaagaaaggcttccggagaagttgcttgaggaacatgcgaaagtcatcgaagcgcttaatgctgagtaac

SEQ ID NO: 276679 - DNA, 508 bp, Unknown
  Bacterial polypeptide expressing nucleotide sequence isolated from the Sargasso Sea
tgttcttgtcggtgctagtgttggctctgaaaccactgctgctgcaataggcgaagtgggagtgatcagaagagatcctatggccatgaagccattttgtgggtataactttgcagattattggacacattggcttagtttttcagaacgctctgacaatcttcctaagatcttccatgtgaactggtttagaaaaaatgagaacggattcatttggcctggattcggtgataatttaagagtccttgagtggatcataaagcgttgcaacaacgaaattgatgctcaagaaacacccatcggcttccttccaaaatcagaagatatcaatacttctggattaacaattacggatgaagcaatggaagaacttgtgcttgttgataatcaaaaatggatcgatgaaatggctggtatcagagaatattttgaagagtacgaagaaaggcttccggagaagttgcttgaggaacatgccaaagtcatcgaagcgcttaatgctgagtag

SEQ ID NO: 276680 - DNA, 646 bp, Unknown
  Bacterial polypeptide expressing nucleotide sequence isolated from the Sargasso Sea
tctggctaaaaataatcctaaatattctaaccttgcagattcaccaagcggagtcccaatttctgcaattgtttttggaggaagaagaagtgaattagctccgcttgtctatcaatccaaagattggaatcatggggttttagttggcgcaagtgtaggctcagagaccactgcagctgctgcaggtgaagttggcatagtaagaagagacccaatggcaatgaagcctttttgtggttataactttgccgattactggactcattggttgagcttctcctcaaaatctgaaagattaccaaagattttccatgtgaattggtttagaaaaaatgatcaaggctttatttggccaggatttggtgacaatctcagagtgttggagtggatcattaagcgttgccagaatgaagctgatgctattgatactccgataggttttctccctaaaccggaagatattgatacctcaggtttagatatcactagagagtctatggaagaattattctatgttaataaagatcaatggctcaaagagatggaaagtattagagagtattttctagaatacggtgatcgtatgcctgagatgcttctaaatgaacatagaaaagtcgtcagtaaattagaacaatcagactaa

SEQ ID NO: 276681 - DNA, 586 bp, Unknown
  Bacterial polypeptide expressing nucleotide sequence isolated from the Sargasso Sea
tatgtctacatcaaataaagagcttcagagttgggttgaggatgtttcaaagatgaccaaaccagagaatatctactggtgcaatggttctaaagaagaatacgaagaatttattcaaaaaatgcttgggacaggagacttaatgcaactcaatgaggaaacttttccaaattgctacctgcatcgatcagacccatcggatgtagccagagttgaacatttaacttttatctgtacagaagatgcggaggatgcaggcccaaataacaattggatggatcctaaagaagcgcatgagaaacttgatgatttgtttgaaaactgcatggaaggcagaaccatgtacgtcattccatactgcatgggaccaataggttctgagctctcaagatgcggggtcgaaataacagatagcccatatgttgttgctaacatgtatttaatgacaaggatgggtgatgaggcacttgcaaggattgaaagagagggaggattcgttaaagggattcactctacaggtgaccttgatcctgagaaaagattcatcatgcatttcccagatggaaaaaattatcagaagtattgg

SEQ ID NO: 276682 - DNA, 577 bp, Unknown
  Bacterial polypeptide expressing nucleotide sequence isolated from the Sargasso Sea
ctcgtttttggcggcagaagaagtgaactggcaccattggtatacgaatcaaaaaattggaatcatggtgttcttgttggagcgagtgtgggctctgaaaccactgctgctgcaataggagaagtaggtgtcatcaggagagatcccatggccatgaagcctttttgtgggtataactttgcagattattggacacattggttaagcttctcagagcgttctaataacctaccaaagatctttcacgtgaattggtttagaaaaaatgaaagtggattcatttggcctggtttcggagataacttaagagtcctagagtggattattaagcgttgcaataatgaaattgatgctctagaaacaccgattggctaccttccaaaatcagaagatatcaatacttctggattaacaatttcagatgatgcgatggaagagctagtgtttgttgacaatcaaaaatggttggatgaaatggctggtatcagagagtattttggagagtacgaagagagacttccagaaaaattgctcgaggaacatgctaaggtcattgaagcactcaatgctgagtaaa

SEQ ID NO: 276683 - DNA, 532 bp, Unknown
  Bacterial polypeptide expressing nucleotide sequence isolated from the Sargasso Sea
agcaaaagactggactcacggggtgtttttaggggcttctatggcctctgaaaccacagcagctgctactggtaaaacaggcattttaagacgagatcctatggctatgaaacccttttgtggttacaactttgcaagctactgggaacactggttaagctttagtaaacaagaagcaaagcttccacgtatttttcatgttaactggtttagaaaagatgaaagaggtgaattcatctggccaggtttcggtgaaaacatgcgtgtgcttgagtggattttaggacgttgccaaaataagcttgcagcatctgaaaccccaattggttttgtaccaaagcttgaagacctcaatcaaaaaaacctaaagatgagtgaggattcacttaaaacgcttatgcaagtagagcctaaaggctggcacaacgaaatcaaagaacttggcagctatcttgatagctttggtgagaaacttccacaagccattaaagaaaagcaaaaagctatcataaaagagcttgaaaatagctaa

SEQ ID NO: 276684 - DNA, 496 bp, Unknown
  Bacterial polypeptide expressing nucleotide sequence isolated from the Sargasso Sea
gccagtgtgggctctgaaaccactgctgctgcaataggagaagtaggcatcatcaggagagatccgatggccatgaagcctttttgtgggtataactttgcagattattggacacattggttaagcttctcagagcgctctaataacctaccaaagatcttccatgtgaattggtttagaaaaaatgaaaatggattcatttggcctggattcggagataacttgagagtcctggagtggattattaagcgttgcaataatgaaattgatgctctagaaacaccgattggctaccttccaaaatcagaagacatcaatacttctggattaacaatttcagatgatgcgatggaagaactagtgtttgttgacaatcaaaaatggttggatgaaatggctggtataagagagtattttggagagtacgaagaaagacttccagaaaaattactcgaggaacatactaaggtcattgaagcacttaatgctgagtaaa

SEQ ID NO: 276685 - DNA, 496 bp, Unknown
  Bacterial polypeptide expressing nucleotide sequence isolated from the Sargasso Sea
atggctacagaaaacaagaaactgcagcaatgggtcgaggatatggtggcactttgccagcccgataacgttgtttggtgtgatggctcaaaggatgaatggtcaagaatgtgggacatattagtaaagggcggtactgcaaaaaaactagacgaaaaaaaacgccctaatagctactacattcgttctgttccagccgatgttgcgcgtgttgaagaccgtacttttatctgctctgaaaaagaagaagacgcaggtccgactaataattggtgcgaacctgctgaaatgagggaaacattaaataaattattcactggttgtatgaagggacgtactatgtatgtcattccatttagcatgggtccgattggatccgacattgcgaaaatcggagtagaaatttctgattcaccatatgttgtcacaaatatgcacatcatggcccgcgttggcaaaaaagtactagatgttttaggcgcagatggtgattttg

SEQ ID NO: 276686 - DNA, 903 bp, Unknown
  Bacterial polypeptide expressing nucleotide sequence isolated from the Sargasso Sea
gggatggaaagttgaaacaattggggacgacatcgcgtggatgaaattcggtgaagatggtcagctgtatgccataaatcctgaggcagggtttttcggagttgcacctggcacaggtcaagaaaccaatccgaacgctctagctaccctgtccggaaattgtgtatttacaaatgtcgccgaaactgacgacggcgatgtttggtgggaaggacttagcgacgaggcgccggctcgtttgattgactggaaaggccagacctggactcctgaatccgagagtcctgctgcccaccccaacgctcgatttactgtgcctgcttcccaatgcccatcgatcgcaccttcctgggaagatccagctggagttcctatatcggccattcttttcggcgggcggcgagcaaccaccgtccctctggtcgcagaagctcttagctgggaacacggggtctttttggggtcagtgatgtcatctgaaaagactgccgcagccgcgggaaccgtcgggcaagttcgccgcgatccattcgcgatgctgccattttgcggctacaacttcggtgattatttccaacattggcttgatatcggagatcaccccggggcaaatctgccgaaactcttctacgtaaattggttccgtaaaaatgatgagggaaatttcatctggcctggatttggcgaaaatgcgagagttttgaaatgggttttagaacgcatcggcggaacaactgaagccgttgaaactgcgatcggaatggtgccgaagcctgaagatttagacgtctcgggactcgaccttgagcccgaagaactccaaactctcttggccgtaaatgaagatgagtggaaaagcgagcttgcgctgatcgaagaacattatgagtcgatggcgaaaga

SEQ ID NO: 276687 - DNA, 888 bp, Unknown
  Bacterial polypeptide expressing nucleotide sequence isolated from the Sargasso Sea
aggtgaccttgatcctgagaaaagattcatcatgcatttcccagatgaaaaaattatcagaagtattggatctggctatggaggtaatgccctactcggaaagaaatgtcatgcattgagaattgcgagttatcaagcactagaagaaaaatggcttgctgagcatatgctgattgttgaaatagaaaatccacagggtgaaatctttaatatagctgcagcattcccatcagcttgtggaaaaacaaatcttgccatgttaattccacccgatgaatacaaaggatggaaagtgagaacaattggtgatgatattgcttggcttcatatggatgatgctggtcaaatatgggctattaatccagaagctggttattttggcgtggttcctgggacgaatgaggatgataatgaaaatgcatacaaggctattcaatcgaatgcaatattcaccaatgtagggttaacagataataatgagccttggtgggaaggcagaaaagacggcaaccctgtcatagactggaaaggcgatagaatcgagcaaggtgaagatgcagtcttcgctcatcccaactctagattcactgtctcagcaaagaataatcccaaatattcagatctcgctgactcttcaaatggtgttccaatctcagccatcgtttttggcggcagaagaagtgaactggcaccattggtatacgagtcaaaagattggaatcatggtgttcttgttggagccagtgtgggctctgaaacaaccgctgctgcaataggagaagtaggcgtgatcaggagagatcccatggccatgaagcctttttgtgggtataactttgcagattattggacacattggttaagcttctcagagcgttctaataacct

SEQ ID NO: 276688 - DNA, 826 bp, Unknown
  Bacterial polypeptide expressing nucleotide sequence isolated from the Sargasso Sea
tatgactcgggtcggttcagcagtgattgatgagttgggagaggatggagcttttgttccttgtattcattccgtcgggaagccgctcgtggatggggtagaagatgtcccatggccgtgtaatcctgaaaatctttatatcgcgcattttccggcttcaagagagatctggagtttcggctctggctacggtggcaacgctcttcttgggaagaagtgttttgccttgaggatcgcgtcgaccatggcaagagacgaaggttggcttgccgagcacatgttaattttgaaaataacgagcccacagggcgctcaccgttatatcgcgggagcttttcctagtgcctgtggaaagactaatctggcaatgttgattccatctatgcccggatggaaagtcgaaacggtgggtgacgacatttgctggatgaagtttggagaggatgggcaactctatgctattaatccagaagcaggattttttggggtggcgcctgggacaggtatggatacaaatcccaacgcgatgttgaccctgcacggtaattgcatttttaccaatgtcggagaaaccgatgaaggcgatgtatggtgggaagggatgacttccgagccgcctgaccatctaattgactggcgaggaaatgactggacacctaataacgatagtccagctgctcatcccaacgccaggtttacagtgtctgctgcccagtgcccggcaatcgcggatgaatgggaagacttacggggagtgcccatcagcgcaatactctttggaggtagacgagcgacggtcgtgccgctggtgaatgaagcgaacagc

SEQ ID NO: 276689 - DNA, 744 bp, Unknown
  Bacterial polypeptide expressing nucleotide sequence isolated from the Sargasso Sea
gtggccagagttgaacatttaacctttatctgtacagaagattcagcagatgcaggcccaaataataattggatggatcccaaagaggctcatgcgaagcttgatgatttatttgaaaattgtatggaaggcagaaccatgtatgtcattccttactgcatgggcccaattggctcagaactctcaagatgtggcgtcgagataactgacagtccatatgttgttgcaaatatgtatctcatgacaaggatgggtgatgaggcactttcaagaattgaaaaagagggagggttcgtcaaagggatacactctacaggtgatcttaatcctgataaaagattcatcatgcatttcccagatgaaaaagttattcgaagcatcgggtctggctatggtggcaacgccctactcggaaagaaatgtcatgcattgagaattgcgagttatcaagcattagaagaaaaatggctcgctgagcatatgctgattgttgaaattgaaaatccacaaggtgaaatctttaatatagctgcagcgttcccatcagcttgtggaaaaacaaatcttgccatgttgattccaccggatgaatacaaaggatggaaagtgagaacaattggtgatgatattgcatggcttcatatggatgatgctggtcaaatatgggccattaatccagaagcaggttattttggtgtggttcctgggactaatgaagatgacaatgaaaatgcatataaggct

SEQ ID NO: 276690 - DNA, 913 bp, Unknown
  Bacterial polypeptide expressing nucleotide sequence isolated from the Sargasso Sea
tacttttatctgtacagaagatgcggcggatgcaggcccaaataacaattggatggatcccaaacaagctcatgaaaaacttgatgatttgtttgaaaactgcatggaaggcagaaccatgtacgtcattccatactgcatgggaccgataggttcagagctctcaagatgcggggtcgaaataacagatagcccatatgttgttgctaacatgtatttaatgacaaggatgggtgatgaagcactgtcaagaattgaaagagagggaggattcgttaaaggaatacactccactggtgatcttgatcctgaaaaaagatttatcatgcattttcctgaagaaaaaaccattcgaagtataggttctggatatggcggcaatgccctactcggtaaaaaatgtcatgctttgagaatagcgagttatcaagctctggaagaaaaatggcttgctgaacatatgctgattgttgaaattgaaaatccagagggtgaaatcttcaacatagctgctgcattcccatcggcttgtggaaaaacaaatcttgccatgttaattccccctgatgaatacaaaggatggaaagtgagaaccatcggtgatgatatcgcttggttgcatatggatgattctggtcaaatatgggccatcaatccagaggcaggctatttcggtgtggttcctggaacgaatgaagacgacaatgaaaatgcctataaagcaattcaatcagatgcgattttcaccaatgtgggattaactgataataatgagccttggtgggaaggtaagaaagatggtaatccggttatagattggagaggcaataaaattgagcagggagaggacgccgtttttgcacatcccaactctagattcacagtttcagcaaagaataatcccaaatactct

SEQ ID NO: 276691 - DNA, 825 bp, Unknown
  Bacterial polypeptide expressing nucleotide sequence isolated from the Sargasso Sea
atgaaaatgcatacaaggctattcaatcgaatgcaatcttcaccaatgttggtctcacagataataatgaaccttggtgggaaggcagaaaagacggcaacccagtcatagactggaaaggcgacaaaatcgagcaaggcgaaaatgccgtttttgctcatcccaactccagattcaccgtctcagctaagaataatccaaaatactctgatctcgccgactcttcaaagggtgttccaatctcagccatcgtctttggcggcagaagaagtgaattggcaccattggtatacgagtcaaaggattggaaccacggtgttcttgtcggtgctagtgttggctctgaaaccactgctgctgcaataggcgaagtgggagtgatcagaagagatcctatggccatgaagccattttgtgggtataactttgcagattattggacacattggcttagtttttcagaacgctctgacaatcttcctaagatcttccatgtgaactggtttagaaaaaatgagaacggattcatttggcctggattcggtgataatttaagagtccttgagtggatcataaagcgttgcaacaacgaaattgatgctcaagaaacacccatcggcttccttccaaaatcagaagatatcaatacttctggattaacaattacggatgaagcaatggaagaacttgtgcttgttgataatcaaaaatggatcgatgaaatggctggtatcagagaatattttgaagagtacgaagaaaggcttccggagaagttgcttgaggaacatgcgaaggtcatcgaagcgcttaatgctgagtagc

SEQ ID NO: 276692 - DNA, 682 bp, Unknown
  Bacterial polypeptide expressing nucleotide sequence isolated from the Sargasso Sea
aataaaaaattgcagcaatgggtagatgacaagataaaactttgtcagccagatgacgtcgtttggtgtgatggctcagaggaagagtggtcaagaatgtgggacattctagttaaaggcggaactgcaaaaaaactcgacgaaaataaacgtcccaatagttattacattcgctctgttccagctgacgtggcacgagttgaagatcgcactttcatctgctctgagaaggaagaagatgcaggacctacaaataattggtgcgcaccaactgaaatgcgaggaacattagataaattattcactggctgcatgaaaggacgcactatgtatgtcataccgtttagcatgggtccaattggttctgatattgcaaaaattggagtagaaatttctgactctccttatgttgtaactaatatgcatatcatggcccgtgttggtaaaaaagtcttagatgttttaggtacagatggtgaatttgttccttgtctgcattcagtaggagcaccattggctgaaaatgaaaaagatgtgccttggccgtgtaaccctgataatcgatatattgttcactatccggaaactcgagaaatctggtcatttgggtcaggttatggaggtaatgcgctacttggtaaaaaatgtttagcattacgaatagcatcgacaatggcaagag

SEQ ID NO: 276693 - DNA, 897 bp, Unknown
  Bacterial polypeptide expressing nucleotide sequence isolated from the Sargasso Sea
aatgcgcgccacgctgcagcccctgtttgatggctgcatgaagggccgcaccatgtacgtggtgccctttagcatgggcccgttgggcagccacattgcacacatcggcgtggaactgaccgacagcgcttatgtggccgtgaatcagcgcctcatgacccgcatgggcaaggccgtgtacgacgtgctgggcgtggaaggcgagttcgtgccttgcatgcacaccgtgggcgcgcccctggccgaaggcgagaaggacacgacgagctggccttgcaatcccaaggtcaagtacatcgtgcactaccccgaaacgcgcgaaatctggtcctacggctcgggctacggcggcaacgcgctgctgggcaagaagtgcctggccctgcgcatcgcctccaccatgggccgtgaccaaggctggctagccgaacacatgctgatcctgggcgtgaccaacccccaaggcaagaagtaccacgtggcagcggccttccccagcgcgtgcggcaagaccaacttctccatgctggtgccgcccgaggcgggctttgccggctggaaggtcaccaccatcggtgacgacattgcctggatcaagccccatgccgacggcaagatgtacgccatcaaccccgaggctggctactttggcgtggcccccggcaccaacatgcacaccaaccccaactgcatgcgcagcctggacaaggacgtgatcttcaccaacgtggccctgacggacgacggcgacgtgtggtgggaaggcatggaaaaggacaccggcaagctgcccgatcacctgatcgactggcaaggcaaggactggacgccccagatcgccaaggaaaccggcgccaaggctgcgcaccccaactcgcgcttcaccgtggctgccca

SEQ ID NO: 276694 - DNA, 745 bp, Unknown
  Bacterial polypeptide expressing nucleotide sequence isolated from the Sargasso Sea
gcacttagttgactggaagggaaatgattggacacctgaatctgatacgcctgctgctcatcctaatgcgcgtttcaccgcgccagctgcacaatgtcctgtaattgctgatgaatgggaagaccctaaaggtgtgcccattagcgcaatactttttggaggacgtcgtgcgactactgttccattagttacggaagcgttggattggaatcatggtacttttattggaaccatcattgcttctgaaatgacagctgcagcatttggtgctattggacaattacgtcgtgacccaatggcaatgcttccattttgcggttataacatggccgactactggggacactggttgaatatgggtaagaaaaaaggcgcagtattacctaagatcttttacactaactggtttcgtaaaaatgatgctggtaaattcatgtggcctggttttggtgagaatagccgcgtattaaagtgggtatttgagcgctgtgtagactcggccgatgcaattgacacgccaattggtaaaatgccaactttagatgggattgatttcagtgatttagagatggatgaagctgataaagcaaatctattgcgagttgatattgaaggctggttacaagaactgccaggtattgaagagtactatgatagttttggggatcatctaccggaagaattacgtggacaaattaaggcattaaaagaacgtcttgaatcagcaaaacaagcggttgcgtaa

SEQ ID NO: 276695 - DNA, 895 bp, Unknown
  Bacterial polypeptide expressing nucleotide sequence isolated from the Sargasso Sea
ttcccatcagcttgtgcaaaaacaaatatggcgatgatgatcccatcgcttccgggatggaaggttgaaactattggggacgacatcgcatggatgaaatttggtgaagatggtcagctgtatgcaataaatcctgaggcaggatttttcggagttgcccctggcacgggccaagagaccaacccgaacgctctagctactctctcaggaaattgtgtctttactaatgtcgccgaaaccgacgacggggatgtttggtgggaagggcttagcgacgaggcgccagctcgtttagttgactggaaaggccagacctggactcctgaatctgagagccctgctgcccaccccaacgcccgattcaccgtacctgcttcccaatgcccgtcgatcgcgccttcgtgggaagacccggccggagtccccatatcagccattcttttcggcggccggagagcaaccaccgtccctctggtggcggaggcgcttagctgggaacacggcgtctttttggggtcagtgatgtcatctgaaaagaccgctgcagctgcaggaaccgtcggacaagttcgccgcgatccattcgcgatgcttccattttgcggctacaacttcggtgattatttccagcattggctcgatatcggagatcaccccggcgcaaatctgccgaagctcttctacgtaaactggttccgcaaaaatgacgacgggaatttcatctggccaggattcggcgaaaatgcgagggttttaaaatgggtcctggaacgcattggcggaacaaccgaagctgttgaaaccgccatcggaatggtaccgaaacctgaagacttggatgtctcgggacttgatctcaagccggaggagctccaaaccctattggctgtaaatg

SEQ ID NO: 276696 - DNA, 881 bp, Unknown
  Bacterial polypeptide expressing nucleotide sequence isolated from the Sargasso Sea
ggagcattccctagtgcttgcggtaagacgaacttggccatgttggtgcccactattcccggctacacagttgaaacagtcggagatgatatttgttggatgaaatttggagatgatggacagctgtacgccattaatccagaggctggtttttttggcgttgccccaggaacgggtatgagcacgaatcccaatgcgatgttggccttagatgagaattgcatttttacgaatgttgcagaaaccatggatggggacgtttggtgggaggggatgacgagtgaggcgccagatcagcttatcgattggcgaggtcaaaactggacgcccagctctgaagcgcctgcggctcatccgaatgctcgatttacggtttcagccgcccaatgtcccgtcatagctgatgagtgggaggagctaaaaggtgttccaatcagtgcgatattgtttggtggtcgtcgagcaactgtagttccgttagttaatgaagcgacgtcctggaatcaaggcacattctttggttctattgtttcctccgaaaaaaccgcggcagcaagtggcactatcggagaattgagaagggaccccatggctatgctgcctttttgtggttacaacatggctgattattggcaacactggattgatatgggaaaacgtgaaggagccaggcttcccaaaatcttctatgtgaattggtttagaaaaaacgagcagggtggatttatctggccaggattcggtgaaaactccagagttttagagtggatattcaaacggtgtgatggttctgtggatgcggttgagacgcctatagggttgctacccactttggacggcctcaatcttgatcaacttgggctttctgaggacgcgatagc

SEQ ID NO: 276697 - DNA, 512 bp, Unknown
  Bacterial polypeptide expressing nucleotide sequence isolated from the Sargasso Sea
catgaatcaacccgtgatgcagggcgtgcccgcattgaacgtgcccgattacgtgaaacacccgcgcctggtcgcgtgggtgggcgaggtggcggcgctcaccaagccggagcgcatcgtctggtgcgatggttcgcaagaggaatacgaccgcctgtgcgccgagatggtggccgccggcacgatgaagcagctcaacccggccaagcgcaagaactcgtacctggcgctgtcggacccgtcggacgtggcacgcgtggaagaccgcaccttcatctgctcacagaagaaggaagacgccggccccaccaacaactggacggccccggccgagatgcgccagacgctgaacggcctgtttgacggcagcatgcgcggccgcacgctgtatgtggtgccgttctcgatgggcccgctgggctcgccgatcgcgcacatcggcgtggagttgtcggacagcccgtacgtggccgtcaacatgcgcatcatgacccgcatgggtcgcgcggtgt

SEQ ID NO: 276698 - DNA, 873 bp, Unknown
  Bacterial polypeptide expressing nucleotide sequence isolated from the Sargasso Sea
gtcacctggagatggtcacaagcgctttgaacacctccttcatcgctccatgcaaggacgaacgctctatgttgttccatactgtatggggcctgtcgactctcccttttcacgttttggggttgagctgactgatagtccctatgtcgtggcgaatatgaaaattatgacccgtatgggaaaggtagcactcgataagatcgaaaaagaagggaaaccttttgtaaaaggggttcactcgaagggtgatctgtcgctcgaaaatcggatgatcttacactttcctcaggagtcgatgataaaatcgatcggatccgggtacggcggcaatgctcttcttggtaaaaagtgccatgccttgaggattgcgagttatcaagcaaagtctgaggggtggcttgcagagcacatgttgattgtcggcgtagagaatccagagggtaaagtgcactatatagcagctgcatttccttcggcctgtggaaaaacgaatttagccatgttgattcctcccgaggagtataaaggttggaaagtttggactgtcggcgatgatatcgcgtggcttcatctgggagatgacgggcggatgtatgccgttaatccagaagccggattttttggtgtggcccctggaacctcgaattcgacgaatcctaacgcactcagtatgttgcaaaaggatgcaatctttacgaacgtggcgttgactgaggacaaaaaaccatactgggagggtctttctggctgtcaggctgcctgggactggcaaggtatgccgtataagggttctggcgctgcggcgcatccaaactctcgcttcacggtttcctcgaagcagtgcccatcttattcgtcgtcagccgaaaatcc

SEQ ID NO: 276699 - DNA, 892 bp, Unknown
  Bacterial polypeptide expressing nucleotide sequence isolated from the Sargasso Sea
gaaatgaaaaatccacaaggtgaaatttttaatatagctgcggcatttccatcggcatgcggaaaaacaaatcttgccatgttgattccaccggatgaatacaaaggatggaaagttagaacgattggtgacgatattgcttggcttcatatggatgatggtggtcaaatatgggccattaatccagaagcaggttattttggtgtggttcctgggactaatgaagatgataatgaaaatgcatacaaggctattcaatcgaatgcaatcttcaccaatgttggtctcacagacaataatgaaccttggtgggaaggtagaaaagacggcaacccagtcatagactggaaaggcgacaaaatcgagcaaggcgaaaatgcagtttttgctcatcccaactccagattcaccgtctcagccaagaataatccaaaatactctgatctcgctgactcttcaaagggtgttccaatctcagccatcgtctttggcggcagaagaagtgaattggcgccattggtatatgagtcaaaggattggaaccacggtgttcttgtcggcgctagtgttggttctgaaaccactgctgctgcaataggcgaagtgggagtgattagaagagatcccatggccatgaagccattttgtgggtataactttgcagattattggacacattggcttagcttttcagaacggtctgacaatcttccaaagatcttccatgtgaactggtttagaaaaaatgaaaatggattcatctggcctggattcggagacaatttgcgagtccttgagtggattctaaagcgttgcaacaacgaaattgatgctcaagaaacacccatcggtttccttccaaaatcagaagatatcaatacttctggattaa

SEQ ID NO: 276700 - DNA, 937 bp, Unknown
  Bacterial polypeptide expressing nucleotide sequence isolated from the Sargasso Sea
cgggagcgttccaagtgcctgcggtaagaccaacctggccatgttggtgcccactattcccggctacacggttgaaacagtcggagatgatatttgttggatgaaatttggagacgatggacagctgtacgccattaatccagaggctggtttttttggcgttgccccaggaacgggtatgagcacaaatcctaacgcgatgttggccttaaatgagaattgcatttttacgaatgttgcagaaaccatggatggggacgtttggtgggaggggatgacgagtgaggcgccagatcagcttatcgattggcgaggtcaaaactggacgcccagctctgaagcgcctgcggctcatccgaatgcccgatttacggtttcagccgctcaatgtcccgtcatagctgatgagtgggaggagctaaaaggtgttccaattagcgcgatattgtttggtggtcgtcgggcaactgtagttccgcttgttaatgaagcgacttcctggaatcaaggcacattctttggttctattgtttcctccgaaaaaaccgcggcagcaagtggcactatcggagaattgagaagagatcccatggctatgctgcctttttgcggttacaacatggccgattattggcaacactggattgatattgggaaatgtgatggagccaggcttcccaaaatcttctacgtgaattggttcagaaagaacgaacagggtggcttcatctggccaggattcggtgaaaactccagagtattagagtggatattcaaaagatgtgatggcgctgtggatgcggttgagacgcctatagggttactacccactttggacggtcttaatctagatcagcttgggctgtccgaggacgcgatagcttctctgttgcgtgtagacgcggacggtttggatggccgaactgcctttgattga

SEQ ID NO: 276701 - DNA, 766 bp, Unknown
  Bacterial polypeptide expressing nucleotide sequence isolated from the Sargasso Sea
atgacttccgagccgcctgaccatcttattgactggcgaggcaatgactggacacctaataacgagactccagctgcccaccccaacgctagattcacggtgtctgcggcccagtgcccggcaatcgcggatgaatgggaagacttacaaggagtgcccatcagtgcaattctctttggaggtagacgagcaacggtcgtaccgctggtgaatgaagcgaatagctggaatcaaggaaccttctttgggtcgattgtcgcatccgaaaagactgccgcggcgtcgggaagtattggtgaactgagaagggatccgatggctatgctgccgttttgcgggtacaacatggctgactactggcagcactggattaccatgggtaagcaagatggtgccaaaatgcctggaatctattacgtcaactggtttcgaaaagacctggaaggcggttttatttggcctggttttggagaaaattctagggtgttggagtggatcttcaatcgctgtgaagggaccgctgaagcggtagaaacgccgataggcagattgcctactctcgatggcctagatttttcgggtctggatttatcgccggatgagattgcgacgcttcttaaggtggacgttgagggctggctttcagagattcctttgattgaagagtactacaagagctttggtgatcaggttccttcagagctctggcaagaactacagttacttaaggaacagttagaaaccgccaaggtaggagcagcttagc

SEQ ID NO: 276702 - DNA, 677 bp, Unknown
  Bacterial polypeptide expressing nucleotide sequence isolated from the Sargasso Sea
tggtgtacaggaactcaagaagaatatcaaagtcttacacagtatatggtagaaaacaaacagctaaaaaaactaaatgccaccactcatccaaactgttttcttcacctctcaaaccccaatgatgttgcaagaactgagcatcttacatttgtttgtaccaaagaaaaagaagatgttggtcccaacaacaactggatagatgaagacacagcaaactcacaagtaagagaacttttcaaaaactctatgaaaaacagaactatgtatgtaattccatactgcatgggaccactaaactcaccttactctcgtctgggtgtacaaattacagatagtccctatgttgttataaacatgaagcacatgacccgcatgggagacgctgcacgtaaagctatagagtctggaaaaagttttgtaagaggtcttcatggcctaggagacctatctctagagaaaagacgtataatgcactttcccaatcaagaaatgattgccagcttcagctctggatatggcggcaatgctctattaggaaaaaaatgtcatgcgctacgcattgctagctggcaagccaaacaagaaggttggttagctgagcacatgctcatagtaggactagaaagccctcaaggagaaaaacactatgttgctgctgcctttccttctgcatg

SEQ ID NO: 276703 - DNA, 614 bp, Unknown
  Bacterial polypeptide expressing nucleotide sequence isolated from the Sargasso Sea
gcatgtggaaaaactaatttagccatgctcatcccccctaaatcacacaaaggatggaaaatatggactattggtgatgatattgcatggctccatcttgacaagacaggtcaaatgcgagcaatcaatccggaggcaggttattttggagtagcaaaaggaactaatgaggcgacgaataaaaatgcatttgacatgattaagaaggataccattttcaccaacgttggtttaactaaaaacaatgagccatggtgggaatctaaagatattggtgaaccagcaattgactggaaaggcagagaatttaatagcgataatggtcctgcagcgcatccaaactcacggtttaccgtttccgctaaaaataacccctcgtattcttcgctcgccgaggctccagatggagttccaatttcagcgatagtttttggcggaagaaggaaaaaattagccccacttgtatatgaggctaaaaactggaaacacggtgtttttattggagctggtatggcatctgaaacaacagctgctgcaactgttaaaaagggtgtactccggagagacccgatggcgatgttgccattttgtgggtataacttcgctgactattg

SEQ ID NO: 276704 - DNA, 880 bp, Unknown
  Bacterial polypeptide expressing nucleotide sequence isolated from the Sargasso Sea
aaacattggggaatctggaagtatttgatgacacaacatgagcggttaaatcagtggatagaacaaattaagactctatgccagcctgattcgataagagtgtgtgatgggagtccagaagaatatgcagagatgatgggcctgctcgaaggggcaggtgtggcgaagccgcttaatcctgatcttcgtccgaacagttatctagttaggtcagatcctgccgatgtggcgagagtcgaaagtagaaccttcatttgcagtgattcgcctgaagaggcagggccaacaaataattggtctgaaccaaatcaaatgcgagaaacgttaaacggcctgtttgaaggttgtatgcgtggtcgcactatgttcgttataccgttcagcatgggcccggtgggctccccgatagcgcatatcggagtcgagatctccgattctccttacgttgttgcgagtatgcacattatgactcgggtcggctcagcagtgattgatgagttgggagaagatggagcttttgttccttgcgttcattccgtcggcaaaccgctcgtggatggggcagaagatgtcccatggccatgcaatcctgagaatctttatatcgcgcattttccagcctcaagagagatctggagttttggctctgggtacggcggaaacgctcttcttggcaagaagtgttttgccttgaggatcgcgtcgaccatggcaagagatgaaggttggcttgccgagcacatgttaattttgaaaataactagtccacagggcgctcaccgctatatcgcaggagcttttcctagtgcctgtggaaagactaatctggcaatgttgattccatctatgcccgggggaaagtcgaaacggtgggtgacga

SEQ ID NO: 276705 - DNA, 867 bp, Unknown
  Bacterial polypeptide expressing nucleotide sequence isolated from the Sargasso Sea
aatgctgaaacacgagcgtctcgctgactggctagaagaaatcagatctctttgtgagcctgattcacttgttatatgtaatggaagcaccgaagaatataaccagatgatgaatcttcttttgaaatccggggcagccagaaaactcaatgaaacaaaaagacccaacagttacctagttcgttctgatcctgctgatgttgctagggtcgagagcaggacttatatttgctccgagagcgaaggtgaagccggccccaataataattgggaaaaccccaaaataatgaaagcgactctgcatgggttgtttaaaggttgcatgcgaggaagagtgatgtatgtaatacccttctcgatgggacccgtgggttctccaatcgctcacattggcgtagaaattacggactcgccttacgtagtggcaagtatgcacattatgactagagtaggggaaaaagttcttgaaaagcttggcggagacggggactttgttccttgcgttcactcagttggagtgccgctcgatagtgaggacaaagactcgatctggccatgcaatccagagagcctttatgtagctcactttcctgaaacaaaagaaatctggtccttcgggtcgggctatggcgggaatgcgctcttgggaaagaaatgctttgcattgagaatagcttccactatggcaaaagagcaaggctggcttgccgaacatatgctaatactcaagcttactaacccagaaggtacttccagatatatcgccggagccttcccaagcgcttgcggcaagacaaatttagcaatgcttattccaactattccagattggaaggtggagacggtaggcgacgatatatgttggat

SEQ ID NO: 276706 - DNA, 1066 bp, Unknown
  Bacterial polypeptide expressing nucleotide sequence isolated from the Sargasso Sea
catcagaagcttgatcagttgtttgaaaattgcatggaaggcagaaccatgtatgtcattccttactgcatggggccaataggctcggaactttcgagatgcggagttgagataactgacagcccatatgttgttgcaaatatgtatctgatgacaaggatgggtgatgaggcgctttcaagaattgaaaaagagggaggattcgtcaaaggaatccactccacaggtgaccttgatcctgacaaaagattcatcatgcatttcccggatgaaaaagttattagaagcatcggatctggctatggcggtaacgccctactcggaaagaaatgtcatgctttgagaattgcaagttatcaggcgcttgaggaaaaatggctagctgaacatatgctgattgttgaaattgaaaatccacaaggtgaaatctttaatatagctgcggcatttccatcggcatgcggaaaaacaaatcttgccatgttgattccgccggatgaatacaaaggatggaaagtaagaacgattggtgacgatatcgcttggcttcatatggacgatgctggtcaaatatgggccattaatccagaagcgggttattttggtgtggttcctgggactaatgaagatgataatgaaaatgcatacaaggctattcaatcgaatgcaatcttcaccaatgttggtctcacagataataatgaaccttggtgggaaggcagaaaagacggcaacccagtcatagactggaaaggcgacaaaatcgagcaaggcgaaaatgccgtttttgctcatcccaactccagattcaccgtctcagctaagaataatccaaaatactctgatctcgccgactcttcaaagggtgttccaatctcagccatcgtctttggcggcagaagaagtgaattggcaccattggtatacgagtcaaaggattggaaccacggtgttcttgtcggtgctagtgttggctctgaaaccactgctgctgcaataggcgaagtgggagtgatcagaagagatcctatggccatgaagccattttgtgggtataactttgcag

SEQ ID NO: 276707 - DNA, 1870 bp, Unknown
  Bacterial polypeptide expressing nucleotide sequence isolated from the Sargasso Sea
atgaatcatccctcattcgaaggacagcccaacgtcgaggtgtccgcagcggcgccctcgtgggtcaagcaccgaaaattgatcgactgggtccagcgcgttgccgccatgaccaggcccgataagatcgtatggtgcgacggttcacaggaggaatacgaccgcctctgcgcccagatggtcgaggccggcaccctcaagaagctcaatcccgccaaacgtcccaattcttatctcgcatggtccgatccgtcggacgtggcgcgtgtcgaagaccgcaccttcatttgcgcgcagcgtcgtgaagatgccggccccaccaataactggatggaacccgccgaaatgcgcgcgacgctcgacggcctgttcgacggtgccatgcgcggtcgcaccatgtacgttgtgccgttttcgatgggcccgctcggttcgccgatcgcgcacattggtgtcgagttgagcgacagtccgtacgtggtgaccaacatgcgcatcatgacgcgtatgggccgcaaagtgtacgacgtgctaggcgaagacggcgagttcgtgccgtgcgtgcattccgtcggcgcgccgctcgcggcgggcgagaaagacgtgccgtggccgtgcaacaagaccaaatacatcgttcatttccccgagtcgcgcgaaatctggagctatggctcgggctacggcggcaatgcgctgctcggcaagaagtgcttcgcgctgcgcatcgcctccaccatgggccgcgccgaaggctggctcgccgaacacatgctgattctcggcgtgacgtcgccggaagggcgcaagcatcacgtcgcggcggcgtttccgtcggcgtgcggtaagaccaacttcgcgatgctgatcccgccggaaggcctgaacggctggaaaatctccacgatcggcgacgacattgcgtggatcaagccgggtaaggacggccgcctgtatgcgatcaatcctgaggccggctatttcggcgtcgcgccgggcacgagcgagaaaaccaacttcaacgcgatggcgacgctgaaggaaaacgtcatcttcacgaacgtcgcgctgacggacgacggcgacgtctggtgggaaggcatgaccgacgagccgcccgcgcatctgatcgactggcagggcaaggactggacgccggcgagcgcgaaggaaagtgggcgcaaggccgcccacccgaacgcacgcttcacggcgccagcctcgcagtgtccgtcgatcgatgccgactgggagaacccggcgggcgttgcgatcgacgcgttcatctttggcggccgccgttcgacgaccgtgccgctcgtcaccgaagcccgcaactgggttgaaggcgtctacatggcggcgaccatgggctcggaaaccaccgcggcggcggcggggcagcaaggcgtggtgcgccgcgatccgttcgcgatgctgccgttctgcggctacaacatgagcgactacttcgggcactggctgaaaaccggtgagcgtctcgagcaactgaacgccaaactgccgaagatcttctgcgtcaactggttccgcaagggtccggacggcaagtttgtctggccgggctttggggagaacatgcgcgtgttgagctggatggtggggcgcatcgagggcaaggcgcagggccaggagcatgcgttcggcgtgtcgccgcattatgaggacatcgactggagcggcctcgagttcagccgcgagcaattccagcaggtgatctcggtcgacgacgcggcctggcgggacgagcttgaactgcatgccgaactctttgatacgttgcagcaaggtctgcctcctgctttgaccgaggcaaaacgcgcgtttgaagaaaaactcgctgcgtgac

SEQ ID NO: 276708 - DNA, 840 bp, Unknown
  Bacterial polypeptide expressing nucleotide sequence isolated from the Sargasso Sea
catgacagttaataatttatttttaaaacaatgggtagacgaaattgaaaagctttgtaaacctaagaatgtctattggtgtgatggatctcaagaagaatatgatagactctgtgaagaaatggttgaagctggaactttcataaggctaaataaagaaaaaagacctaactgctttttagcacgttctcatccaagtgatgtcgctagagtagaagataggacattcatttgtacttcgcagcaagaagatgtaggaccgacaaataattggtccgatattaatacaatgaaaaataaactagattcgttatttgaaggatgtatgtccggtagaactatgtatataataccattttcaatgggtcctttaaattctcctatttctcatattggaattcaaatttcagatagcccttatgtagttgtaaatcaaagaataatgacaagaatgggaaaagaagttctagatatattaggagaaaaaaataactttataaaatgtatgcattcagttggtatgcccctagagaataatcaagcggatataagctggccatgtgctccaaaccctgaagataagtatatagttcatttccctgaagagagatctatatggtcttatggttctggatatggaggtaatgcacttttaggtaaaaaatgctttgctttaagaattgcatctaaaatggcaaatgaagagggatggctagcagagcatatgttgattttaggcttagaagatcctaatggcgaaactacttatgttggtgctgcatttccaagtgcctgtggaaagacaaatttagctatgatgatgcctcctgagggttttga

SEQ ID NO: 276709 - DNA, 1018 bp, Unknown
  Bacterial polypeptide expressing nucleotide sequence isolated from the Sargasso Sea
atgtctacatcaaataaagagcttcagagttgggttgaggatgtttcaaagatgaccaaaccagagaatatctactggtgcaatggttctaaagaagaatacgaagaatttattcaaaaaatgcttgagacaggagacttaatgcagctcaatgaggaaacttttccaaattgctacctgcatcgatcagatccatcggatgttgccagagttgagcatttaacttttatctgtactgaagactcagaggatgcgggtccgaataataattggatggatcctaaagaggctcatgagaagcttgacgacttgtttgaaaactgcatggaaggcagaaccatgtatgtcattccttactgcatgggacccatagggtcagaactctcaagatgcggggtcgaaataacagatagtccatatgttgttgcaaacatgtatctgatgacaaggatgggtgatgaggcacttgcaaggattgaaagagagggaggattcgttaaagggattcactctacaggtgaccttgatcctgagaaaagattcatcatgcatttcccagatgaaaaaattatcagaagtattggatctggctatggaggtaatgccctactcggaaagaaatgtcatgcattgagaattgcgagttatcaagcactagaagaaaaatggcttgctgagcatatgctgattgttgaaatagaaaatccacagggtgaaatctttaatatagctgcagcattcccatcagcttgtggaaaaacaaatcttgccatgttaattccacccgatgaatacaaaggatggaaagtgagaacaattggtgatgatattgcttggcttcatatggatgatgctggtcaaatatgggctattaatccagaagctggttattttggcgtggttcctgggacgaatgaggatgataatgaaaatgcatacaaggctattcaatcgaatgcaatattcaccaatgtagggttaacagataataatgagccttggtgggaaggcagaaaag

SEQ ID NO: 276710 - DNA, 1804 bp, Unknown
  Bacterial polypeptide expressing nucleotide sequence isolated from the Sargasso Sea
atgacacaacatgagcggttaaatcagtggatagaacagattaagactctatgccagcctgattcgataagagtgtgtgatgggagtccagaagaatatgcagagatgatgggcctgctggaaggggcaggcgtggcgaagccgcttaatcctgatcttcgtccgaacagctatctagtcaggtcagatcccgccgatgtggcgagagtcgaaagtagaaccttcatttgcagtgatgcgcctgaggaggcggggccaacaaataattggtctgaaccaaatcaaatgcgagaaacgttaaacggcctgttcgaaggttgtatgcgtggtcgcactatgttcgttataccgttcagcatgggcccggtgggctccccgatagcgcatatcggagtcgagatctccgattctccttacgttgttgcgagtatgcacattatgactcgggtcggctcagcagtgattgatgagttgggagaagatggggcttttgttccttgcgttcattccgtcggcaaaccgctcgtggatggggcagaagatgtcccatggccatgtaatcctgagaatctttatatcgcacattttccagcttcaagagagatctggagttttggctctgggtacggcggaaacgctcttcttggcaagaagtgttttgccttgaggatcgcatcgaccatggcaagagatgaaggttggcttgccgagcacatgctaattttgaaaataacgagcccacagggcgctcaccgttatatcgcaggagcttttcctagtgcctgtggcaagactaacctggcaatgttgattccatctatgcccggatggaaagtcgaaacggtgggtgacgacatttgctggatgaagtttggagaagatggacaactctatgctattaatccagaagcaggattttttggggtggcgcctgggacaggtatggatacaaatcccaacgctatgttgaccctgcacggcaattgcatttttaccaatgtcggagaaaccgatgaaggcgatgtctggtgggaagggatgacttccgagccgcctgaccatcttattgactggcgaggaaatgactggacacctaataacgagacgccagctgctcaccccaacgctagatttacggtgtctgcggcccagtgtccagcgatcgcggatgaatgggaagacttacaaggagtgcccatcagcgcaattctctttggaggtaggcgagcaacggtcgtaccgctggtgaatgaagcgaacagctggaatcaaggcaccttctttgggtcgattgtcgcatccgaaaagacggccgcggcgtcgggaagtattggtgaactgagaagggatccgatggcaatgctgcctttttgcgggtacaacatggcggactactggcagcactggattacgatgggtaagcaagatggtgccaaaatgcctggaatctattacgtcaactggtttcgaaaagaccaggaaggcggttttatttggcctggttttggagaaaattctagagtattggagtggatcttcaatcgctgtgaaggtaccgctgaagcggtagaaacgccgataggcagattgcctacgctcgatggcctaaatttttcgggtctggatttatcgcaggatgaaattgcgacgcttcttaaggtggatgttgagggctggctttcagagattcctttgatcgaagagtactacaagagcttcggtgatcaggtcccgtcagagctctggcaagaactacagttacttaaggaacagttagaaaccgccaaggtaggagcagcgtagc

SEQ ID NO: 276711 - DNA, 892 bp, Unknown
  Bacterial polypeptide expressing nucleotide sequence isolated from the Sargasso Sea
atgtctacatcaaacaaagaacttcagagttggattgaggaagtctcaaagatgaccaaaccagagagtatctactggtgcaatggttcaaaagaggaatacgaagaattcatccaaaaaatgcttgagactggggacttaatgcaactcaatgaggaaacttttccaaattgctacctgcatcgatcagatccatcagatgtagcaagagttgaacatttaacttttatctgtactgaaaattcagaagatgcaggtccgaataataattggatggatcctaaagaagctcatgagaagcttgacaacttgtttgacaactgtatgaaaggcagaaccatgtatgtaattccttactgcatgggacccataggatcagaactctcaagatgtggagttgagataactgacagtccatatgttgttgcaaatatgtatctaatgacaaggatgggtgatgaggcacttgcaaggattgaaaaagagggaggattcgtaaaagggattcactcaacaggtgatcttgatcctgaaaaaagattcatcatgcatttcccagatgaaaaagttatcagaagtatcggatcaggctatggtggtaatgccctactcggaaagaaatgtcatgcattaagaattgcgagttatcaagcactagaagagaaatggcttgctgagcatatgctgattgttgaaatagaaaatccacgaggtgaaatctttaatatagctgcagcattcccatcagcttgtggaaaaacaaatcttgccatgttgattccacccgatgaatacaaaggatggaaagtgagaacaattggtgatgatattgcttggcttcatatggatgatgctggtcaaatatgggccattaatccagaagcaggttatt

SEQ ID NO: 276712 - DNA, 1453 bp, Unknown
  Bacterial polypeptide expressing nucleotide sequence isolated from the Sargasso Sea
gatggattcttctgaaaaagcaggtgataaagtaagagaatgggtctccagtatggcagagattttgaagcctgactcagtccattggtgcaacggatccaagtcagagtatcactccctatgctcggtaatgctggattctggcacaataatgaagcttgacgaggaaaagcggcccaatagttttttagctaggtcggatcccatggatgttgcaagggttgaggaccggacttttatttgctcaaaaaacaaagaagatgcgggtcccaccaataattgggttgatccaaaagagatggcagaaaagctaggagttttatttgacggtagcatgcggggtcggaagatgtatgttattccttttagcatgggtccgttaggatctgatatatctcatattggaatacaattaaccgactcaccctatgttgctgcaagcatggcaatcatgacccgggtgggcagtgatgttttattagagcttgctgagaaagaatttgtaccgtgtgttcactcagttggtgcaccgcttgagaatggggagcaggatgttccatggccctgtaatgatattaaatatattgttcactatccagaggatcgctcgatatggtcttttggttcaggttatgggggaaatgctctcttagggaagaagtgtttttctttgaggatagcatctgtaatggctagagatgagggttggctagcggaacatatgttaattttgggtatagaaaacccagagggtgaaaaaatttatgtagcagcagcttttcccagcgcgtgtggtaagacaaatttggctatgttggttcctccggaaggatttgacggttggaagataaccacagtaggggatgacatcgcttggattaaaccaggcgcagatggtcgtctgtatgctattaatccagaggcgggctattttggagtagttcctggcacatcttataaatctaatcccacagcaatgcacatgatggaacgggatacgatctttactaatgtggctttgactgatgacggtgacgtctggtgggaaggtatgggtattgagcctccaaagcacttgattgactggaaaggaaacgattggacacctaagtcgcccgattcggcagcccatcctaacgcaaggtttacctgctctgtacagcagtgtcctagcgtggatccagaatgggataatccagagggtgttccaataagtgcattcatatttggtggcaggttaagtcatacttttccgctagtttttcagtcatttgattggaaacatggagtctatatggctgctacgatgggttcagagggcacagcagctgcggttaaccaagctgcgataagacgtgatccaatggcaatgcttccattttgtggttataacatggcagattattgggcgcactggctaagtatgaaaacgaagttcaaagttaccgggtat

SEQ ID NO: 276713 - DNA, 1030 bp, Unknown
  Bacterial polypeptide expressing nucleotide sequence isolated from the Sargasso Sea
tttaatatagctgcagcattcccatcagcttgtgaaaaaacaaatcttgccatgttgattccacccgatgaatacaaaggatggaaagtgagaacaattggtgatgatattgcttggcttcatatggatgatgctggtcaaatatgggctattaatccagaagctggttattttggcgtggttcctgggacgaatgaggatgataatgaaaatgcatacaaggctattcaatcgaatgcaatcttcaccaatgtagggttaacagataataatgagccttggtgggaaggcagaaaagacggcaaccctgtcatagactggaaaggcgatagaatcgagcaaggtgaagatgcagtcttcgctcatcccaactctagattcactgtctcagcaaagaataatcccaaatattcagatctcgctgactcttcaaatggtgttccaatctcagcgatagtctttggcggcagaagaagtgaactggcaccattggtatacgagtcaaaagattggaatcatggtgttcttgttggagccagtgttggttctgaaacaaccgctgctgcaataggagaagtcggagtcatcagaagagatccaatggccatgaagcctttttgtgggtataactttgcagattattggacacattggttaagcttctcagagcgttctaataacctaccaaagatcttccatgtgaattggtttagaaaaaatgaaaatggattcatttggcctggattcggagataacttaagagtcctagagtggattattaagcgttgcaataatgaaattgatgctctagaaacaccgattggctaccttccaaaatcagaagacattaatacttctggattaacaatctcagatgatgcgatggaagaactagtgtttgttgacaatcaaaaatggttggatgaaatggctggtataagagagtattttggagagtacgaagaaagactcccagaaaaattgctcgaggaacatgccaaggtcattgaagcgcttaatgctgagtaac

SEQ ID NO: 276714 - DNA, 1828 bp, Unknown
  Bacterial polypeptide expressing nucleotide sequence isolated from the Sargasso Sea
gctgatcgctccgccggctttcgtcaaacatcgcaagctgatcgactgggtgtcgcgcatcgcggcgctcacggagcccgagcgcgtcgtgtggtgtgacggttcgcaggaagaaaacgacgcgctgtgccaggcgatggtcgaccagggcacgctcaagcgcctgaacccggcgaagcgcccgaattcgtatctcgcgcaatccgatccgtcggacgtcgcgcgcgtcgaggatcgcacgttcatctgcgcggcctcgcgcgacgacgtcggcccgaccaacaactggatcgagcccgccgaaatgcgcgagacgctcaacggcctgttccgcggctcgatgcgtggccgcacgctgtacgtcgtgccgttttcgatgggcccgctcggctcgccgatcgcgcacgtcggcgtcgaactgtccgacagcccgtacgtcgtcgtgaacatgcggatcatgacgcgcatgggccgcgaggtgtacgacgtgctcggcgaggacggcgagttcgtgccgtgcgtgcacagcgtcggccatccgctcgaagccggccagcaggacgtgccgtggccgtgcaacccggtcaagtacatcgtgcatttccccgaaacgcgcgaaatctggagtttcggctcgggctacggcggcaacgcgctgctcggcaagaagtgtttcgcgctgcgtatcgcgtcgacgatgggccgcgaccagggctggctcgccgaacacatgctgatcctcggcgtgacgtcaccggccggcaagaaatatcacgtcgcggcggcgttcccgtccgcgtgcggcaagaccaacttcgcgatgctgattccgccgcagggcttcaaaggctggaaggtcacgacgatcggcgacgacatcgcgtggctgaagccgggccgcgatggccgactctatgcgatcaatccggaagccggtttcttcggcgttgcaccgggcaccggcgtgaagaccaacccgaacgcgatctcgacgctcacagaaaacgtgatcttcacgaacgtcgcgctgacggaagacggcgacgtgtggtgggaaggtctgaccgacacgccgcccgcgaagctgaccgactggcagggcaacccgtggacgccggaaatcggcaaggaaacgggccgcaaggccgcgcatccgaattcgcgcttcacggcgccggccgcacagtgcccgtcgatcgacgacgattgggagaatccggccggcgtgccgatcgacgcattcatcttcggcggccgccgttcgacgaccgtgccgctcgtgaccgaggcgcgcgactgggtcgaaggcgtgtacatggccgcgacgatgggttcggaaaccaccgctgcggcagtcggccagcagggcatcgtgcgccgcgatccgttcgcgatgctgccgttctgcggctacaacgtcagcgattatttcgcgcactggctgacactcggcaagcagctcgaaggcgcgggcgcgaaactgccgaagatctactgcgtgaactggttccgcaaggatgcgaacggcaagttcgtgtggccgggcttcggcgagaacatgcgcgtgctgaagtggatgctagatcgtctcgaaggcacgggcggtggcggcgagcatgcgttcggcgtgtcgcccgcgtatgaggacctgcactgggacgggctcgatttcacgcgcgagcagttcgatgctgtgacggcgatgaacgccgatgaatggcgcgaggaactgaagctgcacgcggcgctgttcgatacgctgaagctgcggctgccggccgaaatgaccgacacgatgaagaagatcgagcagcgcatcggcgcctga

SEQ ID NO: 276715 - DNA, 1426 bp, Unknown
  Bacterial polypeptide expressing nucleotide sequence isolated from the Sargasso Sea
tatgtctacatcaaatacagagcttcagagttgggttgaggaagtttcagaaatgaccaagccagacaatatttactggtgcaatggttcaaaagaagaatatgaagaattcatccaacaaatgcttggaactggagacttgatgcaactcaatgaagaaacttttccaaattgttacttgcatagatcagacccatcagatgtagcgagagttgagcatttaacttttatctgtacagaagattcagaggatgccggtccgaataataattggatggatccaaaagaagctcatcagaagcttgatcagttgtttgaaaattgcatggaaggcagaaccatgtatgtcattccttactgcatggggccaataggctcggaactttcgagatgtggagttgagataactgacagcccctatgttgttgcgaatatgtatctgatgacaaggatgggcaatgaggcactttcaagaattgaaaaagagggaggattcgtcaaagggattcattccacaggtgaccttgatcctgacaaaagattcatcatgcatttcccggatgaaaaagttattagaagcatcggatctggctatggcggtaacgcccttctcggaaagaaatgtcatgctttgagaattgcgagttatcaagcgcttgaggaaaaatggttagctgaacatatgctgattgttgaaattgaaaatccacaaggtgaaatttttaatatagctgcggcatttccatcggcatgcggaaaaacaaatcttgccatgttgattccaccggatgaatacaaaggatggaaagttagaacgattggtgacgatattgcttggcttcatatggatgatggtggtcaaatatgggccattaatccagaagcaggttattttggtgtggttcctgggactaatgaagatgataatgaaaatgcatacaaggctattcaatcgaatgcaatcttcaccaatgttggtctcacagacaataatgaaccttggtgggaaggcagaaaagacggcaacccagtcatagactggaaaggcgacaaaatcgagcaaggcgaaaatgcagtttttgctcatcccaactccagattcaccgtctcagccaagaataatccaaaatactctgatctcgctgactcttcaaagggtgttccaatctcagccatcgtctttggcggcagaagaagtgaattggcgccattggtatatgagtcaaaggattggaaccacggtgttcttgtcggcgctagtgttggttctgaaaccactgctgctgcaataggcgaagtgggagtgattagaagagatcccatggccatgaagccattttgtgggtataactttgcagattattggacacattggcttagcttttcagaacggtctgacaatcttccaaagattcttcccatgtga

SEQ ID NO: 276716 - DNA, 1750 bp, Unknown
  Bacterial polypeptide expressing nucleotide sequence isolated from the Sargasso Sea
atgtctacatcaaacaaagaacttcagagttggattgaggaagtctcaaagatgactaaaccagagagtatctactggtgcaatggttcaaaagaggaatacgaagaattcatccaaaaaatgcttgagactggggacttaatgcaactcaatgaggaaacttttccaaattgctacctgcatagatcagatccatcggatgtagccagagttgagcatttaacttttatctgcactgaagattcagaggatgcaggtccgaataataattggatggatcctaaagaagcgcatgagaagcttgatgacttgtttgacaactgcatggaaggcagaaccatgtatgttattccttactgcatgggaccaataggatcagaactctcaagatgtggagttgagataactgacagtccatatgttgttgcaaatatgtatctgatgacaaggatgggtgatgaggcacttgcaaggattgaaagagagagaggattcgttaagggaattcactctacaggtgatcttgatcctgagaaaagattcatcatgcatttcccagatgaaaaagttatcagaagtatcggatctggatatggtggtaatgccctactcggaaagaaatgtcatgcattaagaattgcgagttatcaagcactagaagaaaaatggcttgctgagcatatgctgattgttgaaatagaaaatccacagggtgaaatctttaatatagcagctgcattcccatcagcttgtggaaaaacaaatcttgccatgttgattccacccgatgaatacaagggatggaaagtaagaacaattggtgatgacattgcttggcttcacatggatgatgctggtcaaatatgggccatcaatccagaagcaggttattttggtgtggtgccaggaacgaacgaagatgataatgaaaatgcatataaggctattcaatcgaatgcaatcttcaccaatgtaggtttaacggataataatgagccttggtgggaaggcagaaaagatggcaatccagtcatcgactggaaaggtgatagaatcgagcaaggtgaagatgcagttttcgctcaccccaactctagattcactgtctcagcaaagaataatcctaaatattctaatctcgctgactcttcaaagggtgttccaatctcagccatcgtctttggcggtagaagaagtgaattggcgccattggtatacgagtcaaaagattggaatcatggcgttcttgttggagccagtgtgggttccgaaacaactgctgctgcaataggagaagtaggtgtcatcaggagagatccaatggccatgaagcctttttgtgggtataactttgcagattattggacacattggttaagcttctcagagcgctctgataacctaccaaagatcttccatgtgaattggtttagaaaaaatgaaaatggattcatttggcctggattcggtgataacttgagagtcctagagtggattatcaagcgttgcaacaatgaaattgatgctcaagaaacaccaatcggctatcttccaaaatcagaagacatcaatacttctggattaacaatttcagataatgcgatggaagagctagtgcttgttgacaatcaaaaatggttggatgaaatggctggcatcagagagtattttggagagtacgaagaaagacttccagaaaaattgctcgaggaacataccaaggtcattgaagcactcaatgctgagtaat

SEQ ID NO: 276717 - DNA, 836 bp, Unknown
  Bacterial polypeptide expressing nucleotide sequence isolated from the Sargasso Sea
cgaagatgataatgaaaatgcatacaaggctattcaatccaatgcaatcttcaccaatgttggtctcacagataacaatgaaccttggtgggaaggcagaaaagacggcaacccagtcatagactggaaaggcgacaaaattgagcaaggcgaaaatgcagtttttgctcatcccaactccagattcaccgtctcagctaagaataatccaaaatactctgatctagctgactcttcaaagggtgtcccaatctcagccatcgtctttggcggcagaagaagtgaattggcgccattggtatatgagtcaaaggattggaaccacggtgttcttgtcggcgctagtgttggttctgaaaccactgctgctgcaataggcgaagtgggagtgatcagaagagatcccatggctatgaagccattttgtgggtataactttgcagattattggacacattggcttagcttttcagaacggtctgacaatcttccaaagatcttccatgtgaactggtttagaaaaaatgaaaatggattcatctggcctggattcggagacaatttgcgagtccttgagtggattataaagcgttgcaacaacgaaattgatgctcaagaaacacccatcggtttccttccaaaatcagaagatatcaatacttctggattaacgattacggatgaagcaatggaagaacttgtgcttgttgataatcaaaaatggatcgatgaaatggctggtatcagagaatattttgaagagtacgaagaaaggcttccggagaagttgcttgaggaacatgccaaagtcatcgaagcgcttaatgctgagtaac

SEQ ID NO: 276718 - DNA, 257 bp, Unknown
  Bacterial polypeptide expressing nucleotide sequence isolated from the Sargasso Sea
tatgaaacctttaaacaaaataattactaacaaagacacttcatttaatcctatatggataatgagacaggcaggtcgatatttacctgagtttagggagatcagaaaaaataatcctgattttattaatttatgtttaaatgataatttatcatctgagataacattacaaccattaaagaggtttgatattgatgctgctataattttttcagatattttaatgttaccttatggtttgggtcaaaaagtaaatt

SEQ ID NO: 276719 - DNA, 154 bp, Unknown
  Bacterial polypeptide expressing nucleotide sequence isolated from the Sargasso Sea
gaaagaagatcaataaaagaaaggatagataatactttcaataaaattaaaggcaggaaatatattcttaatttgggtcatgggattttacctgggactccagaagaaaatgctcaaacattttttgaacatggaaaaaaacttacttactagt

SEQ ID NO: 276720 - DNA, 364 bp, Unknown
  Bacterial polypeptide expressing nucleotide sequence isolated from the Sargasso Sea
atttatgaaccaacatttaatattgttgagtattcaaaagaattgggcgctcctataatatgtttcccaagaggaataaaagattataaaaaatattgtgatatagtaaaaccagatgcagttaatatagattatgaagtcgatccaaaaaaaataattaaggatattcaaatacctgttcaaggaggtttagaccctaaaattttgctaactgataaaatcaatcttaaaaaagaggtagaaaaatatttaatcacatttaatgatcatccttatatttttaatctgggacacggaattttacctgagacaaaaatagatttagtagaagaattaattgaaattgtaaaaaattataaatgaa

SEQ ID NO: 276721 - DNA, 163 bp, Unknown
  Bacterial polypeptide expressing nucleotide sequence isolated from the Sargasso Sea
atgagcccaattcaagaatgtataaaaaatagaaatacaaaagtaaactctgtgtggttaatgaggcaggctggaagatacttaccagaatttagagacataagatctaagaacactgatttcattaaattatgtttgaatgaaaaattatcgtcagagataa

SEQ ID NO: 276722 - DNA, 555 bp, Unknown
  Bacterial polypeptide expressing nucleotide sequence isolated from the Sargasso Sea
tatgaaacctatacacaaaataattattaataaagatacttcatttaatcctatatggataatgagacaagcggggagatatttaccagaatttagagaaattagaaaaaaaaattctaattttattaatctatgtttaaatgataaattatcatcagagataactttacaacccttaaaaagatttaatttagacgctgcaataatattttcggatattttaatgttaccttatgggctgggtcaaacagtagaatttgaaaaaaattttggtcccaaattaggtaaaataaacttagatgtaatttccaaaattgatgagattgattttgtagaaaaaatacaccgcgtatataaagcaataaaaaaagttagttcggacccaattttaaataataaaaataccatcggatttgttggagctccatggacattgttagtctatatgattaatcaacagtctcctaagaaaaatttaaaaaaaggtttttttgaagatgaatttttaattaatagaattttattaataatagagaaatttttaaaagttcacat

SEQ ID NO: 276723 - DNA, 369 bp, Unknown
  Bacterial polypeptide expressing nucleotide sequence isolated from the Sargasso Sea
attatatatattccccaactctaaatttagttaaatatatcaaatctcttaacgtacctgttatctgctttcctaggaacattaagaactatacagattattctaaaattacaaaaccagatgtaattaacattgattataatattgatcctgaagaaatccgaaaaaaaatagatattgttgttcagggggggttagatccgaaaattttattatcaaacaaagatcaattaaaaaagagtgcaaaaaggtacttggatgtttttaaagatcacccatatatatttaatcttgggcacggtattttaccaaataccaagcctgaaatgattgattatttaataaaatttgtaaaaagttaccgatagg

SEQ ID NO: 276724 - DNA, 459 bp, Unknown
  Bacterial polypeptide expressing nucleotide sequence isolated from the Sargasso Sea
aggtacatattcataaccaatttaagagcggagcaaccattattcaaatttttgacagttgggctggactagtaaataaagaagatttagaaaaatttatttataaaccaactattagccttgttaaatttataaaatcattaaatattccagtaatttgttttccaagaaacgttgaaaattataaggaatatgtagaaacagtaatgcccgatgctgtaaatattgattataatgtagatccacaaaatattcttaaaaatataaacattccagtacaaggaggtttagatccacaaattcttttaacagataaagaaaatttaaaaaaaaatgctttaaaatatttagaaatttttaaagatcatccctatatatttaatcttggacatggcgtgcttcccgctacagacccaaatatgatggactacttagttaaattagtgaaagatttttaaa

SEQ ID NO: 276725 - DNA, 331 bp, Unknown
  Bacterial polypeptide expressing nucleotide sequence isolated from the Sargasso Sea
atgagtctacttaaggattgtattaataaaaaaaaaatatcaagcattccaatatggtttatgagacaggcaggtagatatttgccagagtttagagatattagatctaaaaatacagattttattaaattatgtttaaaccctcatttatcaaaagaaataactatacaaccattaaaaagatttaaaattgatgctgctataatattttctgatatattatttattccttatgctcttggacaatcagttgaatttgaaaagaattttggtcctaaacttggtgaattagattatgatcgtgttctaaatacgccagatgcaagatatt

SEQ ID NO: 276726 - DNA, 367 bp, Unknown
  Bacterial polypeptide expressing nucleotide sequence isolated from the Sargasso Sea
ttatatttataaaccaacttacaatattgttgattatataaaaaaattaggggtacctgtaatttgttttccaagaggaataaaaaattataaagaattttgtaaaattgttaaaccagatatggttaatattgattataatgtagacccaaaaaaaatagcaaatgaaatagatttacctatacaaggaggactagatcctaagattttgctgactgataaagataaagttaaaaatgaagtagaaaaatatcttacaatttttaaagatcacccatatgtatttaatttagggcatgggattttacccgaaactaaaattgagttagtggaacaattaattaagattgtaaaaaatttcaaatga

SEQ ID NO: 276727 - DNA, 810 bp, Unknown
  Bacterial polypeptide expressing nucleotide sequence isolated from the Sargasso Sea
acgctgccataattttttcagatattttaatgcttccatatggtttaaaccaaaaagttgaatttaaaaaaggaattggacctatattaggagatttaaatttaaaaaatatcttaaatataaatgaaagcgattttattgataaattacaaccagtatataaattggttaacttgattaaaaacaatgatcttacaagaaacaaaaatacaataggttttgttggtgccccttggacacttttagtttatatgataaatcaaaaatctccaaagtcaggattaaagagtgatttttttaaagacaaaaattttatagacaaagttttaaaagttattgaaaaattcttaaaattacacattagaaatcaaattgaaagtggtgcacaaattattcaaatttttgacagttgggccggcctgttagatgaaaaagatttgcctaattatatatatgaaccaacaataaggttagtcgaatatacaaaatctttaaatgttccaacaatatgttttcccaaaggtataaaaaaatataaagattattgtgaaaccgttaagcctgatgctatttgtattgattatgaagctgatcctaaggaaattttaaaagatataaaaattcctattcaaggaggaatggatccaaaaattttattaacagataaagataatttaagaaaaggagcaaaaaaatatttagaaatttttaaagaccatccttatatatttaacttggggcatggagttttacctgaaaccgatccaaaaatgatggactatcttgtcaaaatggtgaaagactattaaa

SEQ ID NO: 276728 - DNA, 301 bp, Unknown
  Bacterial polypeptide expressing nucleotide sequence isolated from the Sargasso Sea
tttcctagaggcataaaagattacacaagtttttgtgagattgttaaacccgacgctgtgaacatagatttcgatgttgatccaaagaaaatagtcaatgaaatcaaaataccaatacaaggcggtcttgatccaaaaatattattaactgatcaaaaaaccctaaaaatagaagttgaaaaatatcttggtatttttaaagatcatccatacatttttaatttgggtcatggaatacttcctgagactaaaattgaaatggttgaagaattaatcaagattgtaagaaattttaaatgat

SEQ ID NO: 276729 - DNA, 811 bp, Unknown
  Bacterial polypeptide expressing nucleotide sequence isolated from the Sargasso Sea
ggcagctataattttttcagatattttaatgataccttacggtttgggacaaaagattgaatttaaaaaaggagttggacctattttaggagatataaatttaaataatataatcaatacaaccaaaatagaattcactaaaaaactatcaccagtttacgaaggtattaaaaaagtaaaaagtaatttaaatcagaaagcccttataggatttgttggagcgccttggacattattattgtatatgcttaacaaaggatcaccaaaaaataattttgatttcaataaaattaataaagaagtctcgataaattcattacttaaaaaaataggagaaatgatatgtttacatgttgataaacaaattaaagctggagctaacataatacaaatttttgattcgtgggcagggcttttacctaaagaagaactttcaaaatattgttatactccaatttcaaaaattgtagagcacattaaatcgaaaaatactcctgttatatgttttccaaaaggaataggagaaagctacatcgacttttgctccatagtaaaaccagattgtatcagcatagattatgatatcgatccacaatggataagagataagttaaatggtttgcctatacagggaggcctagatccaaaaatattattatcagacaaagaaaaaataaaaaaaagtgtggaatattatttaaacatattcaaagattacccttatatatttaatttaggtcacggagtcttgcccgaaataaaaccagagacgattgaatatattattcaacttgttagaaataaaaaataa

SEQ ID NO: 276730 - DNA, 721 bp, Unknown
  Bacterial polypeptide expressing nucleotide sequence isolated from the Sargasso Sea
ttgagaaattgtattgaaaagaaaacaacttcttatacacccatttggtttatgagacaggctggaaggtatttgcctgagtttagagaaataagaaaaaaaaatccagactttataaaattatgtttaaacgaaaggttatcagctgaaatttcacttcaaccaattaaaagattcgacttagatgcagttataatattttccgatatcttaatgataccatatggtcttggacaaaaaattgaattcaaaaagggaattgggccgattttgggagatttaaattttaacgttattcttaatacaaaaccaaatgattttattgaaaaattatctccagtatatgaagcaataaaaagagtaaaaaaagaagcaaaagataaaaaccttatcggctttgttggggctccttggacattattaatgtacatgttgaataaaaaatctccaaaaaacaactttgatataaataaaattattaaaaataaaagtttaatgagagatttaattataaaattagaagatataatttttttacatacgaaagaacaaattaaagctggggcggatattattcaaatatttgattcttgggctggtttattaccaaaaaacaaactttcagagtactgttatattcctacttcgaagatagtaaaaaatataaaatcattagaaattccagtgatatgttttccaaaaggaatggagaaaattatat

SEQ ID NO: 276731 - DNA, 203 bp, Unknown
  Bacterial polypeptide expressing nucleotide sequence isolated from the Sargasso Sea
aatgaaaaattctaaatttataaaggctcttaaccttcaagaaaactcaactccaccagtatggtttatgcgacaagcaggcaggtacctgccggaatatcaagaaattagaaaaaattacacgaattttttagatatgtgcaaacagcctaaaacatgtgcagaacttgccttgcagccaattgatcgctttgatttagatg

SEQ ID NO: 276732 - DNA, 700 bp, Unknown
  Bacterial polypeptide expressing nucleotide sequence isolated from the Sargasso Sea
cacgatacattggcgtccagtctatgagactgtacggattttatcaaaagaattgcccgaagagacaacacttattggttttgcaggagctccatggacggtcgccacttatatgattgccggaagaggtactccggatcaaaagccagcgcatgatttaaaaaataataatatattagcttttgaaaatttgattgagattttgacaaaagcaaccattaaatacttgtctgcacaaattgatgcgggagctgaggtggtaaaaatatttgatagctgggccggttctttgaaaggagatgatttttataaatatgctcttgagccgacaaaaaagatagtaatggagttaaaagccaaatatcccacggtgccaataatagctttcccgagacaggcgggcgattattacaaaggctttttaaaatccacaggtgcagactgtctcgctattgacgatagtataagttcagcatgggctgctaaatatttacaaaaggatggttgtatacagggaaatttaaattcttctcatatggtctcaggtggtcaaaatatgattgatgaaattgaaactatagtttcagatttgtcacaaggtcctcatatatttaacttaggtcatggtattacccctgaagccaacccagataacgttgccctaatgatagaaacaattagaaactttaaacgttcctga

SEQ ID NO: 276733 - DNA, 322 bp, Unknown
  Bacterial polypeptide expressing nucleotide sequence isolated from the Sargasso Sea
atgaaacctttaaataaaataataattaataaagatacttcctttaatcctatatggattatgagacaagcaggaagatatctaccagaatttagagaaattagaaaagaaaatcctaattttattaatttgtgtttaaatgacgatttatcttcagaaataactctacaaccattaaaaagatttgatctggatgctgcaataatattttcagatattttaatgcttccttatggattaggtcaaaaagtggaatttgaaaaaaattttggaccaaaattaggggaactaaatttaaatgaaattgctaaaactgatgaaa

SEQ ID NO: 276734 - DNA, 439 bp, Unknown
  Bacterial polypeptide expressing nucleotide sequence isolated from the Sargasso Sea
tttcaatggagctagtataattcaaatttttgacagttgggctgggcttgcatcagaagaccagttagaaaaatatatttataggaccacaaaggaattggttgagtatacaaaaaatttaggggtagaggtaatttgttttccaagaggaataaagtcatacaaaaaatactgtgacttagttaaaccaagcgcaattaatattgattatgaagtagatccatttaaaattgcaaaaactataaacattcctattcaaggaggaatggatccaaaatgtttattactagataaagacgagatgttaaaaaatgcaaaaaaatatctagatgtatttaaagatcacaactatatatttaatcttgggcatggaatgataccagaaacaaatccagaaaatgtgaagattttagttaattttgtaaaagactttagatga

SEQ ID NO: 276735 - DNA, 529 bp, Unknown
  Bacterial polypeptide expressing nucleotide sequence isolated from the Sargasso Sea
cttgaatgaaaatttttttgaagacaaatatttaattgataaagttcttaaaattttagataaatttttaaaaatacacattaaaaatcagattgaaaatggtgctcagataattcaaatctttgatagttgggctggtctgctaaaagaaaaagatttacctcattacatttatgaccccaccttaagcttggttaattatactaaatccttaaatgtgcccgttatctgctttccaagaggtattaaaaattacaaaaattattgtgaaattattaaaccagacgcaatttgcattgattatgaggttgatccagtcaaaattaataaagaaataaacattcctgttcaaggtggaatggacccaaagcttttgctttctgataaagaaaacttaaaaaaagaaacaacgaaatatttagatatatttaaagatcatccatatatatttaatttagggcatggcgttcttccagaaacggaccctaatatgatggattatttagtaaaaactgtgaaagattattaa

SEQ ID NO: 276736 - DNA, 358 bp, Unknown
  Bacterial polypeptide expressing nucleotide sequence isolated from the Sargasso Sea
atgtccaatattaaagaagttattattaataaagaaacaagtatcaaacctatatggataatgagacaagctggaagatacctaccagaatttagagaaatacgaagtaaaaataaagattttatcaaattgtgtttaaatgaaaaattatcaacagaaataactcttcaacctttaaaaagatttgagttagatgcagccatcatattttcggatattttaatggtaccttatggtttaaatcaaaaagttgaatttaagaaaaattttggacctttattaggaaatttaaatataaatgatatttcgaagataactgaaaaaaactttactgaaaaaatttaccgcaatttataaa

SEQ ID NO: 276737 - DNA, 655 bp, Unknown
  Bacterial polypeptide expressing nucleotide sequence isolated from the Sargasso Sea
atccaagagaatttgaacaaacagacagcactaattggttttgccggtgctccttttacagttgcattgtatatgattgaaggtcgcggtggtaccgaaggtactaaggtacgatgtatggctgctgagcatccggaaatgttttcgaagttaatcgatattctatgtgatgctacaagctcctatttaattgaacaggttaaccatggtgccgaagcactacagttgtttgatagttgggctggcttgcttccagagagccaatttcgtcaatgggttattgagccaaatcgccgcattgtagaggcagtacatgctgttcatgccgatgtgccgattatagggtttcctcgtaatgctggtgtcttatataaggattttgttagagaaacaggggtgcaaggcatcagtatcgattctactgtgcctttgtcttgggccgtggaaaccttgcaacctatgtgtacagtgcagggtaatcttgataaccatattttgcgaagcggtggcgttataatggaaaaagaagttcgttctatcgttaatgcactgggtaatggaccgtttatattcaaccttggacacggtattttaccatcaacaccacctgagcatgtaggtcgtgttgttgatataattcgcggcttggtctagt

SEQ ID NO: 276738 - DNA, 673 bp, Unknown
  Bacterial polypeptide expressing nucleotide sequence isolated from the Sargasso Sea
ctgaaaaaattgtcacctgtttatgatgctattaaaattactaggaaaaaactaaataaaaaaaaatctttaatatcttttgttggagctccttggaccttatttgtatacatgtctggattaaaaaaaagtaaaaaaaaaatctcaacgtataattttaaaaaaaacaacaaagttattgcgtgtttaactgattacatatgccttcatatcgaaaaacaaattcaagccggagcaaacgttgtccaaatatttgactcctgggcaggtcttattccgcaacaacaccttttagaatattgttatttacctaataaaaagattgtatctttttgtaaaaaaaaaagaatacctgtaatctgctttccaaaagggataaaaagaaaatattacgattttaataagatcgtcaaacccgatggacttaatattgattatgatatcgatccagagtgggcaaaaagaaatttaaaaaatacttctttacaaggtgggatggatcctaaaatactattaggtagtaagaaaaaaattttgaaagaggcaaaaagatatatggacgtttttaaaaatgttccttatatatttaatttaggtcatggtttgcttccaagcacagatccaagaaagttaaaaatgttaattaattttataagaaagtataaatgttaag

SEQ ID NO: 276739 - DNA, 253 bp, Unknown
  Bacterial polypeptide expressing nucleotide sequence isolated from the Sargasso Sea
aatgagacaagctggtagatatttgcctgaatttagagaaataagaaaaaaaaatcaagattttataaaactatgtttaaatgaaactttatcttccgaaattactttacagccaattaaaagatttgattttgatgctgccataattttttctgatattcttatgattccttatgccttgaatcaaaatgttaaatttgaaaaaggttttggacctaaattaggtaatttaaatttagatataattaaagaa

SEQ ID NO: 276740 - DNA, 691 bp, Unknown
  Bacterial polypeptide expressing nucleotide sequence isolated from the Sargasso Sea
tatgactcctatccaagaatgtatccgtaataaaaataacaaggttagtccaatttggattatgagacaagcaggaagatatttaagtgagtttagagagatcagaaaaaaaaatcctgattttataaaattgtgtttaaatgaaaatattgttccagaaataactttacaacctttaaaaagatttaattttgatgctgctataattttttctgatatattaatggttccatatggtttagggcaagatgttactttttctaaaggttttggaccaaagttaggaaaaattaatatagatgaaatatctaaagtaaaaccaattgaatttactaatagagttcaaactgtttataaagcaattcaaataacctcaaaaaacgaattattaaaaaataaagatcttattggatttgttggagctccgtggactttattagtatatatgattaataaaatttccccaaaaaataacttaatagaaaatttttttgaagataaaattttaattaaagaattaattcaagtagtaaaaaattttataaaaatacatattgaacaacaaattaaaaatggctcaacaataatacaaatatttgatagttgggctggtcttttaaatgaaaaagatttaaacgaatatgtttatgaaccaactaaagagattgttaattacgtaaaatctttagat

SEQ ID NO: 276741 - DNA, 171 bp, Unknown
  Bacterial polypeptide expressing nucleotide sequence isolated from the Sargasso Sea
acccaaaaatattactaactgataaaaaaactctcaaaactgaagttgagaaatatctaaatattttcaaagatcatccatacatctttaatttaggccacggaatacttcctgagacaaagattgaaatggttgaagaactaattaagactgtaaaaaactttaaatgaa

SEQ ID NO: 276742 - DNA, 247 bp, Unknown
  Bacterial polypeptide expressing nucleotide sequence isolated from the Sargasso Sea
tatggttaatattgattatgatgtagatccaaaaaaaattgcaaatgaattagatttacctattcagggagggcttgatcctaaaattttattgactgaaattgataaagtgaaacaagaagcagaaaaatatcttaccatttttaaaaaccatccgtatgtatttaatttagggcatgggattttgccagaaacaaaaattgatttagtgaaagaattattcaaaactgtaaaaaatttcaaatga

SEQ ID NO: 276743 - DNA, 226 bp, Unknown
  Bacterial polypeptide expressing nucleotide sequence isolated from the Sargasso Sea
agtcgatccaaaaaaataattaaggatattcaaatacctgttcaaggaggtttagaccctaaaattttgctaactgataaaatcaatcttaaaaaagaggtagaaaaatatttaatcacatttaatgatcatccttatatttttaatctgggacacggaattttacctgagacaaaaatagatttagtagaagaattaattgaaattgtaaaaaattataaatgaa

SEQ ID NO: 276744 - DNA, 238 bp, Unknown
  Bacterial polypeptide expressing nucleotide sequence isolated from the Sargasso Sea
tatgaaagatacattaacagaatgcattattaacaaaaatacctcttacattcctatttggtttatgagacaagcaggaagatatttaccagagtttagagaaataagacaaaataatcaaaatttcataaaattatgtttgaatagtgagcttgttaatgaaattacgttacaacctttaaaaagatttgatttagatgcagctataattttttcagatattttgatgattccttat

SEQ ID NO: 276745 - DNA, 484 bp, Unknown
  Bacterial polypeptide expressing nucleotide sequence isolated from the Sargasso Sea
tttttaatcatagagaaattcctaaaaatacatataaaaaatcaagttaatagtggagctgaagtaatacaaatttttgatagttgggcaggtttattaaacaacaaagatattccaagttatatttttgagccaactttaaatttagttgattttacaaaatctttaaagataccagtaatatgttttcctcgaggtataaaaaattataaagaatattgtgatatcgttaatccagatgccatttgtatagattatgaagtcgatccaacattaataaaaaaagaaattaaaatacctgttcaaggtggtatggatcccaaggtattattaactgataaagaaaaccttaaaaaagaagcaaaaaaatatttagatatatttaaagatcatccatatatttttaatttaggccatggtgttttgccagaaacagaaccaaatatgatggattatttggttaagatggttaaagattactaaa

SEQ ID NO: 276746 - DNA, 467 bp, Unknown
  Bacterial polypeptide expressing nucleotide sequence isolated from the Sargasso Sea
tatgaaacctttaaacaaagtaataataaacaaggacacttcgttcaatcctatatggattatgagacaagctggtagatatttaccggaatttagagaaataagaaaagaaaatcctaattttatcaatttgtgtttggatgacgacttatcttcagaaataactttacaaccattaaaaaggtttgatctggatgctgcaataatattttcagatatcttaatgcttccttatggattaggtcaaaaagtagaatttgaaaaaaactttgggccaaaattaggggaactaaatctaaatgaaattgctaagattgatgaaatcgactttgtcgaaaaaatacatcgtgtgtataaagcattaaagaaagttagctcagacatcagtttaaaagaaaaaaacactattggttttgcaggtgcaccatggacattattagtttatatgattaatcaacaatccccta

SEQ ID NO: 276747 - DNA, 745 bp, Unknown
  Bacterial polypeptide expressing nucleotide sequence isolated from the Sargasso Sea
aaaaaactttggtcccttgcttgatgatattgacttagatatttttaaaaaaatagaagaagtaaattttactaaaaaattaaattctatatatgagtctttaaaattaacctcaagaaacagtttacttaataataaagatttaattggttttattggtgcaccatggaccattttagtttatatgcttaataaacaatcacccaaaaaaaaaatcactagtagtttgtttaacaatgaaaaacttattaatgaactattaattttaataaaaaaatttttaaaaattcatataaaaaatcaagttgaaaatggtgcatctataattcaaatatttgatagttgggctggtcttgtggaagaaaaaaaaatatctaaatacatatatgatcctacttcggaaatagtcgaatatgttaagtctttaaatgtgcctgcaatatgttttccaagggaaataaaagattataaagaattttgtgaagctacaaaaccagatgctgttaatattgattataacgttaatcctaaagaaattaccaaaaatataaaaattcccgttcaaggcggattagatccaaaaattttacttaccgataaagaaacattaaaaaaagagacattaaaatatttagagatttttaaaaatcatccctatatttttaatcttggacacggagtattgccagaaaccaatccagaaatggtagaatatttagttaaaacagtaaaagaatataaatga

SEQ ID NO: 276748 - DNA, 361 bp, Unknown
  Bacterial polypeptide expressing nucleotide sequence isolated from the Sargasso Sea
tatgagacaagccggtagatatttacctgagtttcgagaaataagaaaaaaaaatccaaattttataaaactttgtttaaatagtaatttagtaaaagatattactatacagcctttgaaaagatttgatcttgatgcagcaataatattttctgatattttaatgataccttatggtttaggacaagaagtagaatttaaaaaaggctatggaccagagctaggagatccggatccggaaaaaatacttagcataggctctgaggattttattaaaaaaataaccccagtttatgaaggaataaaacaagttaaaaaagaaataaaagaaaaaaatttaattggatttgtaggtgctccc

SEQ ID NO: 276749 - DNA, 709 bp, Unknown
  Bacterial polypeptide expressing nucleotide sequence isolated from the Sargasso Sea
aatgtttttagatgtgaatgaaagagaatttactcaaaaattaaatccagtctataaagcaatagagttaacaagaaaaaacctagataaagaaaaatctttaattgcttttattggagctccttggacactgatattttacatgcttagtattaaagataaaaaaaatgaaataaatttaaaaaaattaaatgaaaaaaatattgttataaataaaattttaaataaattaattaattttctatgtacccatattgataaccaaataaacgcaggagcagacgtggttcaaatatttgactcttgggctggaaaaataccagacaaaaatattaaagattattgttttataccaaacgcaaagatagttgagttttgtaaagaaaagaaaatatctaacatttgttttcccaagggaattaaaaaaaaatatgaggattttaataaaattgtaaaaccagatgggataaatctagattacaaaatagatcccatgtgggcaaaaaataacttaaaggatgttgtgttacaaggtggattagatccaaaaatattattgaaatccgagaaagaaatgttggagggagcgacgaaatacattcagatttttaaagatatcccctatgtttttaatttgggtcatggtttacttccagaaacagatcctgatagagtaaagaaattaattgaattttataggaactattaa

SEQ ID NO: 276750 - DNA, 348 bp, Unknown
  Bacterial polypeptide expressing nucleotide sequence isolated from the Sargasso Sea
cttgcctaataaaaaattcatcaatgctatagagagaaagccgcaggcctgtcctcctatatggctaatgcgtcaagcagggagatatcacgaccattaccaaaacttaaaaaaagatcactctttcgaagagctctgtaaaaaaccaaaacttgctgctgaaactgctatgggacctattaacgaatttgattttgacgttgcaattctattcagcgatatattatttccccttgaagcacttggcatggacttgtcttataaccctgggcctcaatttgaccttcacttaaacgaggataatgctgaaagcttaatcattaaccaaaaccctataaactttatgga

SEQ ID NO: 276751 - DNA, 712 bp, Unknown
  Bacterial polypeptide expressing nucleotide sequence isolated from the Sargasso Sea
gcaaccagttactagatataaatttgatgcggcaattatattttcagacatccttatggtaccatgggcgttaaaccaaaaggtacgatttcaaccaaatgccggccctttacttgacccattggatattcctagatcgattaatcaaaaattaataaataaacttccaataaaattagcgcctgttgccaaagccatccgactaacaaaagaaaatttatctccaaaaactgcccttattggatttgctggtgccccatggaccatcatgacctatatggcggaaggtggaacatcccgtgattttacaaaagcgcgcgggtgggcgtggcagtatagaaaaggaacagatgcgcttttagacagcttaattgaatcaaccgtatgttttttaaccttacaggctgaagctggggctgacgttttaatgttgtttgatagctgggcaagtgcggtgccggcggctcaacgtcgctggttggtgatagacccgatccgaaaaattgtagatgggttgcgaaaaaatggtcacaagcagcctgttattggatttccaaaaggtataggcgaagggttgctatcttatgtggaacaggcagatgttaatgcggtgggtctagatcaaggggtcgatccggtttgggttgacaaaaatttaccaaaaaattttcctgtgcagggtaatttagatcctttaagtctagtgcaagcg

SEQ ID NO: 276752 - DNA, 598 bp, Unknown
  Bacterial polypeptide expressing nucleotide sequence isolated from the Sargasso Sea
atgtcaccattaagagaagtaataattaacaaacgaactgctattaatccaatatggataatgagacaagctggaagatatttgccagagtttagaaaaattagaaaacaaaacccagactttattaaattatgcctgaacgaagccttgtcttctgaaataactttgcagccactaaagagatttgatcttgatgctgctattattttttctgatattttaatggttccatacggtttaaatcaaaatgttgaatttaaaaaaaactttgggccaacattgggagatttaaatttagaaaatattgtaaaaataaatgagatcgattttattgaaaaagttaatcctgtttataaagcgataaatttagtgagcaaaagtcaaactacgaaaaataaaagcacgataggctttataggagccccctggacgctcttggtgtatatgattaaccaaaaatcacctaaacttaaattaaaacaagatttttttgaagatgctttattgataaataaggttttagttattttagaaaagtttttaaaaattcatattaaaaatcaaattgataatggtgctgaaataatacaaatttttg

SEQ ID NO: 276753 - DNA, 205 bp, Unknown
  Bacterial polypeptide expressing nucleotide sequence isolated from the Sargasso Sea
aagtaaaagtataaaaattccagttcaaggaggcctagatccaaaaattttgttttctgatcaagaaaatctaaaaaaagaggttttgagatatctagacatatttagggatcatccgtatatttttaatctaggtcacggtatattacctgaaacagatccgttgatggttgaatatttagtaaatactgtgagggactattag

SEQ ID NO: 276754 - DNA, 211 bp, Unknown
  Bacterial polypeptide expressing nucleotide sequence isolated from the Sargasso Sea
atgacaccattacatgaagtaataataaataataaaacaactattaatcctgtttggataatgagacaagctggaagatatttgccagaatttaaagaaataagaaaaaaaaatccaaattttatcgagttgtgcctaaatcacaaattatcttcagaaataacactccaacctattaaaagatttgaccttgatgctgcaataatatttc

SEQ ID NO: 276755 - DNA, 789 bp, Unknown
  Bacterial polypeptide expressing nucleotide sequence isolated from the Sargasso Sea
atattttaattccaccatatggtttgggtcagaaagtagaatttaaaaaaaattttggacctttattaggagatttagagttagataaaataagttctattaaagaagatcagtttactaataagttaatggcagtttataattctataaaaatagtatcacaaaacaagcttttaaaagataaagatacaataggatttgtaggagctccttggacagttttagtttatatgctcaataaacaatctccaaagaaagattttaatataagtatatttgaaaatcaaaatcaaatagataaaatttttaatattttagataaatttttaaaaatacatattaaaaatcaaattgataatggggcaaccataatacaaatatttgatagttgggcaggattagtagatgaaaaaaacattaataaatatatttataatccaacatcaagcttagttaaatttactaattctttaaaagttccggttatatgttttccgagaaacataaaaaattataaaaattatgtagataatgttaaaccagatgtggttaatattgattacgaggttgacccaaaaaaaatagcaagtgaaataaatattcctatacaagggggtttagatccaaaaattttacttaccgataaaaaaaaaattagaaatagtgctttaaattatcttaatatatttaaagatcacacctatatatttaatctgggacatggagttttacccgaaaccgatcctataaatgttgaatatttagtgaaaactgtaaaagaattttaaa

SEQ ID NO: 276756 - DNA, 919 bp, Unknown
  Bacterial polypeptide expressing nucleotide sequence isolated from the Sargasso Sea
acctgaattcagagatataagagctaaaaatcctgattttattaaattatgtttgaatgaaaaactatcaacagaaattagtttacaacctttaagaagatttgaccttgatgcaggaataattttttcagatattttgatgttaccttatggactaggacagagtgtagaatttaaaaagaattttgggccagaactcggcgaggtgcaaattgaaaacttatctaatcaatcagaagctcaatttattaaaaaattattacccgtttataatttaataaacaatatgtctaaaagtgaaataattaaagaaaaagatttatttggttttgttggcgcaccttggacattattagtttatatgattaatagaatgtcaccaaaaaaaaaattaaataaaaatttttttaataataaagatctaattgataagttactaaaagttatagtaaaatttactaaaattcatttaaaacatcaggttcgtgcaggagcaactataatacaaatatttgatagttgggcaggtctagttgatgaaaaagatttagaatattttatatataaaccaacacgagaaattgttaatttttctaaatctttaaatgttccagttatttgttttccaagagaaattaaagattataaaaaatttgtagaaactataaatccagatgtcgtcagcattgattataatattgatccaaaagatatatcagatactatccaaatacctattcagggtggtttagatccaaagatattattatccaataaagaaaatcttaaaatagaggcaaaaagatatctagatatatttaaagatcatccttatatctttaatttaggccatggagtattgccagagacagatccgaacatggtagattatttggtaaaaatggtaaaagattattag

SEQ ID NO: 276757 - DNA, 480 bp, Unknown
  Bacterial polypeptide expressing nucleotide sequence isolated from the Sargasso Sea
gctacctgtgcacacatataaaaaatcaaatcaatgctggagcagacgtggttcaaatatttgactcttgggcaggtttaattccagaagaagatgttaaaaatttttgttatataccgaataagagaattgttgatttttgtaaaagtaagaaaatagtaacaatttgctttcccaaaggtctaaaagaaaattatgaagcttttaacgattttgtcaaacctgatgggattaatctagatgctgatttagatccccaatgggctagagataaacttaaaaatgttgtccttcaagggggcttagacccaaaggtattattaaaaactgatgaggatattttaaaaggagtggcgaaatacgtaaaaatttttaaagatatcccatacgtttttaatcttggtcatgggttacttccagaaacagatcctgataaagtaaaaatgttaattaatttttataggaattataatgaataaa

SEQ ID NO: 276758 - DNA, 565 bp, Unknown
  Bacterial polypeptide expressing nucleotide sequence isolated from the Sargasso Sea
atgagacctttacacaaaataataattaataaagatacttcatttaatcctatatggattatgagacaagctggtagatatttaccagaatttagagaaataagaaaagaaaatcctaattttataaatttatgtttaaatgacaatttatcctcagagataaccttacaacctttaaaaagatttaatttggatgctgcaataatattttcagatatcttgatgttgccatatggattaggtcaaaaagtagaatttgaaaaaaactttgggccaaaattaggaaaactaaatttaaatgaaattgctaaaaccgatgaaattgactttgtagaaagaatacaccgtgtatacaaggcaataaaaaaagttagctcgaatactagtttaaacaataaaaatactattggttttgttggtgctccttggacattgttggtctatatgatcaatcaacagtcacctaaaaaaaatttaaaaaaagatttttttaaagataaatttttaattaatagaattttattaataattgaaaaatttttaaaaattcacataaaaaatcaaa

SEQ ID NO: 276759 - DNA, 409 bp, Unknown
  Bacterial polypeptide expressing nucleotide sequence isolated from the Sargasso Sea
ttttgatagctgggcgggattggtaaataaagatttaagtaaatatctatacgaacccacaacttctttggttgaatatacgaaaagtctaggggtacctgttatttgctttcctagaggaatttcagactacaataaattttgtgatgaagttagaccaaatatgataaacatagactataatatcgaaccaaaagatttattaaataaaataaaaataccaattcagggtggcttagatccaaaaatactacttacaaacagagaaaatctaaatttagaagtaaacaaataccttagagtctttaaagatcatccttatgtattcaatttgggccatggtattttgcctgaaacaaaaatagagatggtacacgaattaataaaaattgttagagattttacataa

SEQ ID NO: 276760 - DNA, 409 bp, Unknown
  Bacterial polypeptide expressing nucleotide sequence isolated from the Sargasso Sea
tttgatagttgggcagggacttgtggatcaaaatttagataagtatatatataaccctacatcagatattgttgaatatgtaaaaaatttaggtgtacccgtaatatgttttcctagatgcattaaagactataaaatttattgtgaaatagtcaaacccgatatggttaatattgattataatgttgacccgaaaaaaattattaaagagattaaaatacctattcaaggtggcctagatccgaatgttttattaaccgacaaggaaaaccttaagaaacatgctgaaaaatacttaaatatatttaaagatcatccgtatgtgtttaacttaggacatggaattttacctgaaacaaaaattgaattagtagaagaactaattagcattgtaagaaattataaatga

SEQ ID NO: 276761 - DNA, 219 bp, Unknown
  Bacterial polypeptide expressing nucleotide sequence isolated from the Sargasso Sea
tatgaaacctttaaacaaagtaataattaacaaagacacttcattcaatcctatatggattatgagacaggctggtagatatttaccagaatttagagaaataagaaaagaaaatcccaattttattaatttgtgtttaaatgatcatttatcctcaaaaataactctacaaccattaaaaagatttgatctggatgctgcaataatattttcagatat

SEQ ID NO: 276762 - DNA, 257 bp, Unknown
  Bacterial polypeptide expressing nucleotide sequence isolated from the Sargasso Sea
taaacacaatatggtgaatattgattataatgttgatccaaaaaaaataattaatgaaatacaaataccaatacaaggaggattagacccaaaggtgttattaaccgacaaggaaaatttacatcgagaagcaattaaatatcttcaaattttcaaagatcacccatatgtatttaatcttgggcatggtattttaccagaaacgaagattgaaatggtagaagaattagtaaaaacgattaggggttttaaataat

SEQ ID NO: 276763 - DNA, 406 bp, Unknown
  Bacterial polypeptide expressing nucleotide sequence isolated from the Sargasso Sea
tatgaaacctttaaataaagtaataactaataaagatgcctcgttaaacccaatatggattatgagacaggcaggtaggtatttaccagaatttagagaaataagaaaagaaaatcctgattttatcaatctatgtttaaatcataatttatcctcaaaaattactctacaacccttaaaaagatttgatttagacgctgcaataattttttcagatattttaatgcttccatatggattgggtcaaaaagtagaatttgaaaaaaattttggaccaagattaggagaattaaatttaaataaaattgttaagattgatgaagttgactttgtagaaaaaatacatcctgtatataaggcaattcaaaaagttagctcagacacaaacttgaataataaaaatatg

SEQ ID NO: 276764 - DNA, 710 bp, Unknown
  Bacterial polypeptide expressing nucleotide sequence isolated from the Sargasso Sea
attacattacaacctctaaaaagatttaaacttgatgctgctataattttttctgacatattaatgttgccatttggattaggtcaaaaagttgaatttaaaaaaaattatggcccttcccttgaagatttagacttaaataaattattaaatgttaaagatgaagatttttctaataaattaaaaccagtatatgaggcaattaatattgtatcaaaagataagcttttaaatgaaaaagatcttttcggatttgttggtgctccttggacaatatttgtatatatgttaaataaaaaatcaccaaaattagctaaagatcttaaaaattctatttttaacaaaatacaaaataaagaaatgcagaatcttttacatattatagtaaaatttttaaaaacacatattaaaaaccaggtagaaagtggagcttcaataattcaaatttttgatagttgggctggattattagaagaaaaatcgtatgaagattacatatataatccaacaatagaattggtaaattacactaaaaaacttggggttcctgtaatatgttttcctagaaatattaaaaattataaaaaattctgtgaaatagtaaatcccgatgctgtcaatatcgattatgaaatagatcctaatattatacttaaagaaatcaaaattcccgttcaaggaggattagatccaaaaatattacttggtga

SEQ ID NO: 276765 - DNA, 492 bp, Unknown
  Bacterial polypeptide expressing nucleotide sequence isolated from the Sargasso Sea
atataaataaatatctcagttcacatattcaaaaccaaattagaagtggagctaacgttatacaaatttttgatagttgggcaggactagttagcgataataatttagaggaatatatttacaaaccaactaaaactttaattaaagttacaaaatcttttaaggttccttgtatatgttttccaagaaatattaaaaattataaagaatatacccaaataattaagccagatgtaataaacattgactataacgctaatccaaacgaaataattaaaaatatagaaattccaatacaaggaggcatgaatcctaaagttttgttatctagtaaaaaaaatttagagaaatttactaattattatcttcgtgtttttgaaaatcatccatatatattcaatttaggacacggtgtccttcctcaaactgacccgactatgatacaatatttaataaagttagtgagaaggtttaatgaaagatcatcctaaa

SEQ ID NO: 276766 - DNA, 730 bp, Unknown
  Bacterial polypeptide expressing nucleotide sequence isolated from the Sargasso Sea
tatgagacaagctggaaggtatttgcctgaatttagaagaataagaaaaaagaatcctaattttattaaattatgtttaaataaaaatttatcttcaataataacattacaaccattaaaaaggtttgatttaagtgcagctattattttttctgatattttaatgataccttacggtttagaacaagaagtaacttttaaaaaagactttggtccacaattaaatagtttggatttagaaaaaatatcaaaagttagtaaaagaaagtttaaaactaaattacaacctatttataattcgattagaaaggttaaaactaataatttaataaaaaataagaatttaattggttttgttggagcaccatggacactgttagtttatatgattaataaaaaatctcccaaaaataaaattaattctaacttatttgaaaataaattattcattaataaagttttaaaaataatagaaaaatttttatttttacatatagaaaatcaaattaattcaggagcagatgttattcaaattttcgacagttgggctggaataattaagaaaaaagatataccaaaatatatatatgaacccactgcaagaattgtgaaatttattaagtcaaaaaaaattccagtcatatgttttcctagaaatattagaaattataaagaatatgtaaagtttgttaagccagatgctatttctatagattattttgtagaccca

SEQ ID NO: 276767 - DNA, 358 bp, Unknown
  Bacterial polypeptide expressing nucleotide sequence isolated from the Sargasso Sea
aaaaatttggttagcttttgtaaagacaatgaaatacctgtaatttgttttcccaaaggattgaaagataattacaaaaaatttgcagagaaagtaaaaccaaatgcaataaatattgaccaagaaattgatccattatgggtgaaaaataatcttaacgaagtatgtatacaaggtggaatggacccaaaatttcttttaagaagtgaaaaagaaatactagatgaaacggacagatatttagatatttttaagaataatccctacatatttaatcttggtcatggtattctgcctgaaacgaaccccgatattgtaaaaaaaattgtagataaggttaacctggttgtaagatgaa

SEQ ID NO: 276768 - DNA, 733 bp, Unknown
  Bacterial polypeptide expressing nucleotide sequence isolated from the Sargasso Sea
ttgcagctacaatgcccaagccccataaaacaattaactgacaaaatatttgactctccagaaacaattcagatcgggactattaaacctgcaaaaactgtttctcaccatttatacccaattaatgaaaaaatgaagaaagacgctttattgaaaatcctgaattctactgccactggccaaatactaatattcactagaacaaaattcagaactaaaaaagtttttgcagaattagataaaaacaactttagagttgtcgcactacagggcaatatgtctcaaaataaaagaatgcaatcaatgaatgggtttaaacagggaaaatatgacatcttagttgcaactgatatagcttctaggggaattgatgtatctaatgtaactcacgtaatcaattatgacatgcctacaaccgtagacacttatattcatagaattggcagaaccggaagagcttctaaagaaggtgaagcatatacatttatgctacctgaagattcaggaatggtaaaacgtatagaaaaagtcttgggagaaaatatagaaaaacgatttctagaagactttaattatggtgatatgaaagtatttgattcaccaaaacaattacataaatctaacagatttaaaagacaaactaacttcaaaaaaacctctacaaaacaatctcgcacaagaaatcagtcaaaaaattataggccctcatccaaaaaacaaagcaatgtataat

SEQ ID NO: 276769 - DNA, 776 bp, Unknown
  Bacterial polypeptide expressing nucleotide sequence isolated from the Sargasso Sea
tggtcagaatgtagaatttaggaaaaattttggacctttcttaggacccataagcatagaagagataaaagattttgataaaaagtcttttaacaaaaaattagatcctgtttataaatctataagaaaagtaaaagaggaggaaattttaaaaaacaaagatttaataggatttgttggcggcccatggacaatacttgtttacatgcttaatagatattcaccaaaaaataaattacgaaaaattttttccgataaactattaataaaagatatgttaaaatatattaacagatatataagtttacacattcaaaaccaaattaaaagtggagctaatattatacaaatttttgatagttgggcgggcttagttgaagataaaaatttagatgaatatatttatcagccaactaaaattttaacaaaggtaattaaatctttcaagataccttgcatatgttttccaaggaacattaaaaattataaagattatatccaaacaattaaaccagatgcaattaatattgattataatgtagatcctaacaaaataataaaaaatataaaaattcctatacagggaggaatggatccaaaaattttattatctagtaaaaaaaatttagaaaaactaactaattattaccttagtgtttttgaaaatcatccatatatatttaacttagggcatggtgttcttcctcaaacagaccctaatatgatacaatatttaataaatttagtaagaaagtttaatgaaagatcatcctaaa

SEQ ID NO: 276770 - DNA, 342 bp, Unknown
  Bacterial polypeptide expressing nucleotide sequence isolated from the Sargasso Sea
tatgacaccattgcatgaagtaataataaataaaaagacaattattaatcctgtctggataatgagacaagctggaagatatttgccagaatttaaagaaataagaaaaaaaaatccaaattttatcgagttatgcctaaatcacaaattatcttcagaaataacactccaacctattaaaagatttgaccttgatgctgcaataatattttcagatattttgatgttaccatatggattaaatcaaaaagttgattttaaaaaagactttgggccagttcttggtaatttagatataggcacaatgtctaagatagatgaaatagattttgttgaaaaaat

SEQ ID NO: 276771 - DNA, 604 bp, Unknown
  Bacterial polypeptide expressing nucleotide sequence isolated from the Sargasso Sea
actacatttttatttatgtttagaggaaatgagatcgatcgaagttttcattcagctatcaaatatttttactctaataaaaaagatagtttaaaaataatggattctataacagaagcttcaattgaatatttgaacaatcaagttaattcaggaattgattgtttccagctttttgaaacttattgtggaattattccttccgaactatacataaaagatatcatgccttacagtaaaaaaatattagaaaagtcaaaggagctaaaccagccaacaattttttttccaaaaaattttaatgaaggcttgaaagttattaataaagatctttgtgattttgttggtattgacgccaatgtgtctcttgattttgctcgaaaaattgtagataataatgttggtttacaagggaatatggatcctaaaactttttatttaagctatgatgaaatagatgattatttagatagcttaattaattttggatcaaaaaatcaaaattggatttttaatttagggagaggttttatgccagatattgatcatagaaaagttaagtatgtagtcgatcaaattaaaactataaattggaatagataaa

SEQ ID NO: 276772 - DNA, 189 bp, Unknown
  Bacterial polypeptide expressing nucleotide sequence isolated from the Sargasso Sea
tatgagtaaattgttaaattgtttaataaataaagataattcttgtgtaccggtatggttcatgagacaagcaggtagatacctaccagaattcaaagaaataagatccaaaaatcaaaattttctagaactatgttttaatagtgacttggcttacgaaattacattacaaccgataaaaagatttaa

SEQ ID NO: 276773 - DNA, 310 bp, Unknown
  Bacterial polypeptide expressing nucleotide sequence isolated from the Sargasso Sea
ggctttcctagaaacaccaatcttgcatgttataaaaaatattcaaatatagataagcttgactgtattaccttagactataatttccctttagatgaaattaatgagctaaatgataaaattgtttttcaaggaaatctggatcctaaacatctattaaaagactcccaaaatcttagtcagaagattgaagaaatattgtttgcttttagagaaagaccacatattttcaacttaggacatggagttttacccgagacatcaatcgagaaagttgagaaaatgctcttacagataaggtcaacatgaa

SEQ ID NO: 276774 - DNA, 497 bp, Unknown
  Bacterial polypeptide expressing nucleotide sequence isolated from the Sargasso Sea
agatttacttaatataatcgataaatttaccaaacttcatattaaaaatcagataaaaaatggagcaactttaattcagatttttgacagctgggctggcttattaaaaaatgataatgaaatatctgaactaatatattctccaactaagagcttggttgattatgtcagatccctaaatgttccagtgatatgttttccgagaaatattaaaaattatgaattgtactgtaaaatagtatctcccgacattatcagtatagattatgaaattgatcctaaaaatatattaaaaaaaataaatattcctatccagggagggcttgatccaaaagtattgcttgctgaaaaagatattttaaaaaaagaagctataaaatatttaaatatttttaaagatcatccatatatatttaatttaggacacggtgttttacctgaaacaaaaccagacacgattgaatatcttgttaatttagtaaaagactttaaatgaa

SEQ ID NO: 276775 - DNA, 750 bp, Unknown
  Bacterial polypeptide expressing nucleotide sequence isolated from the Sargasso Sea
aaaaagattttggtcctattctaaatgaaatagatatcaagaaaattttaaaaactaacgaaattgaatttactaaaaacttactgcctgtttacgattcaatgaaaattatatcaagcaatgaaatagttaaaaacaaagatacaattggttttgtgggcgcaccatggactcttctagtttatatgcttaataaaaaatcacccaaaaaagaaatttctaaagaaattttagataataattcactagttaaaagtttacttaatattattgtcagatttacaaaattgcatattaaaaatcagatagataatggggcaacattaattcagatttttgatagttgggctggtttattaaaagaaaaacatgaaatatctgaactgatatataatcccactttaagtttagttgattatgttaaatcactaaacactccagtaatatgttttccaagaggtattaagagctatgaattatactgtaagatagtttcacctgacgcaattaatatagattacgcagttgatccaaaaaatatagagaaaaaaataaaaattcccgtccaaggaggtcttgatcctaaaatattactttcagataaagaaaatttaaaaaaagaaactttaaaatatttaaatatttttaaagatcatccctatatctttaatttaggacatggagttttgcccgagacaaaaccagaaatggttgaatatttagttaacttagtaaaagattttaaatgaa

SEQ ID NO: 276776 - DNA, 592 bp, Unknown
  Bacterial polypeptide expressing nucleotide sequence isolated from the Sargasso Sea
atgaacaaacttctagactgtataaataacaaaaatatatcagttactcctatatggtttatgagacaagccggcaggtatcttcctgaatttcgagaaattagaaaaaaaaatatagattttattaaactttgtttaaatagtgatttagtaaaagagattacaatacagcccttaaagagatttgaaattgatgcagcaataatattttctgatattttaataattccatatggtttaggacaagaggtaaattttaaaaaaggctatggacctatcttgggtgagttaaaattagaaaacataataaaaaccaaagatataaattttattgaaaaaataaatccagtttacgatggaattaagaaagtaaaaaaagaattaaaaaataaagatctaataggatttgtgggcgcaccttggacattattgctttatatgattaacaaacaatcaccaaaaaaaaactttatttttaaggatattattaaagataaaatactaactagtaagttaattacaaaattagaagagatcatatgtttacatgctgaaaaacaaatagaggctggagcaaacataatacagattt

SEQ ID NO: 276777 - DNA, 392 bp, Unknown
  Bacterial polypeptide expressing nucleotide sequence isolated from the Sargasso Sea
taatccaagtaatttaaatgaatattgctttcagccaaatttagatttagtaaatttttgtaaaaaaaacaaaattgcttcgatttgctttccgaaaggaataaaaaatcgttattatgattttgtaaatgtggtgaagccagatggcattagcatagatagtcaaattgatcccttttgggctagtgagaagttaaagaatgtcagcatacaaggaggcatgaacccagaattattgctaatggaagacagcatagttttagatgaagttgaaaaatatttggactcttttaaagataatgcctacatttttaacctaggtcatggtatcttaccaaagaccaatccagagattataaaaaaaatcgttaacagagtacaaaaaaaatgaa

SEQ ID NO: 276778 - DNA, 193 bp, Unknown
  Bacterial polypeptide expressing nucleotide sequence isolated from the Sargasso Sea
aatgacaccaataaaaaattgtatattaaacaaagatacaagctttaatccaatctggcttatgagacaggcaggaaggtatctgcctgaatttagagaaattagaaagaaaaatacaaattttatagaattatgtttagattcaaaattatcagaggaaataacactacaaccaatcgatcgattcgatttt

SEQ ID NO: 276779 - DNA, 568 bp, Unknown
  Bacterial polypeptide expressing nucleotide sequence isolated from the Sargasso Sea
aatgaagaaaattaataagtgtttagttaataaagattgctcatcattacctatttggtttatgagacaagcaggaagatacttacctgaatttcgtgaaataagaagtaaaaaccaaaatttcatagaattatgtcttaatagtgaattatcgtcagagattacattgcaacctctaaaaaggttcgacttagatgccgcaattatcttctcagatattttaatggtaccctacggtctaggccaaaatgtaaattttgtaaaaaatgaaggaccagaaatgtcaaaatttaatttatctgtttttttaaagagtagcaaagaaagcttcacaaaaaaattaaatcctatttatcaagcaatttcaaaaacaagaaagagactgaataacgaaaaatcccttatatgttttattggcgctccatggacattgttgttctatatgtttaatggaaaaaaaaatcctaattttataaaagataagagtgtcgattttaaaattattttagaaagattaaatgaatacttaatcttacatgtcgaaaatcaattcaatgcgggtgccgat

SEQ ID NO: 276780 - DNA, 244 bp, Unknown
  Bacterial polypeptide expressing nucleotide sequence isolated from the Sargasso Sea
tatgactcctatccaagattgcataattaataaaaatacaaaatcaaaacctttgtggattatgagacaggctggaagatatctccctgagtttagagaaattagagctaaaaacactgatttcattaaattgtgtttaaatgaaagtttatcgtcagaaataacaatacaaccaattaaaagatttaattttgatgctgcaataattttttcagatattttaatgttaccatatggtttgggt

SEQ ID NO: 276781 - DNA, 169 bp, Unknown
  Bacterial polypeptide expressing nucleotide sequence isolated from the Sargasso Sea
tatgaacagactactgaactgtataaatggcaagagtcctggcgatacaccagtatggtttatgagacaagctggaagatatttacctgagtttatggaaataagaaaacaaaataccgattttgtaaagctttgcttaaatagtgatttagctaaagaaattacaata

SEQ ID NO: 276782 - DNA, 163 bp, Unknown
  Bacterial polypeptide expressing nucleotide sequence isolated from the Sargasso Sea
atgaaagattcaaaatttttaagagctttagacttgaaatcaaatactattcctccggtttggtttatgcgtcaagcaggcagatatcttcctgagtatcaaaaaataagaaaaaattattcaaattttctagacatgtgcaaagaacctaagacatgcgcgg

SEQ ID NO: 276783 - DNA, 553 bp, Unknown
  Bacterial polypeptide expressing nucleotide sequence isolated from the Sargasso Sea
taataaaaagtcaccaaaacaagatttaaatgaaaatttttttgataacaagttattgattagtgaagttcttaaaattttagataagtttttaaaaatacacatcaaaaatcagattgataatggtgctcaattaattcaaatttttgatagttgggctggtttattaaatgaaaaagatctgccttattttatttatgagcccacattaaatttagttaattatattaaatctttaaatgtgcctgttatatgttttccaagaggtattaagaactataaagaattttgtgaaattatcaaaccagacactatttgtattgattatgaagttgatccagtgaaaattaataaagaaataaaaattcccgttcaaggtggaatgaatccaaagattttactttctgataaagaaaatcttaaaaaagaaacaataaaatacttaaatatattcaaagatcatccatatatatttaatttagggcatggcgttttaccagagacagacccaaatatgatggattatttaataaaaacagtgaaggattattaa

SEQ ID NO: 276784 - DNA, 491 bp, Unknown
  Bacterial polypeptide expressing nucleotide sequence isolated from the Sargasso Sea
aaataaacttaatgaatatctttgtgaacatatagacaaacagtttgaagcagggtctgatgtagttcaaatttttgactcatgggctggattaattcctgaaaatgaaatttcaaactattgtttcgatccaaataaaaaattagtagatttttgtaaagaaagaaaattgccagtgatttgttttcctaagggaataaatcagaaatataaagatttcttgaacaaagttaaaccagatggtttaaacattgattacgacatcaaaccagagtgggcaaagcaaaatttaaccaatgtgtgtttgcaaggtgggatggacccaaaaatattatttcaagaagaagaaaaagtattctcagaggtggacaaatacttaaacatgtttaaagatagtccttatatatttaatcttggacatggtttgctaccagaaacaaatcccgacgttcttgataaaataataaaaagagttaattcttacaaatgaa

SEQ ID NO: 276785 - DNA, 815 bp, Unknown
  Bacterial polypeptide expressing nucleotide sequence isolated from the Sargasso Sea
taatcaagatttcatcaaactttgtctaaatgaaaatttatcctctgaaattactcttcaaccaattaaaaggtttggatttgatgcggccataatattttcagatattctaatgcttccctacgcaattaatcaagaagttaaatttgagaaaggttttgggcctaaattggggaatttagatatagaaaaaattagtgaaacaagtgaggaagattttactaaaagactgaggcctgtctacaaagcaatttcacaagtatcacaaaataatctattaaataatagagacatgattggatttgttggagcaccttggacaatacttgtttacatgttaaataaaagctctccgaaaaatggattgtcaaaaaatttctttgatgatcattccataataaaaattttattagaaaatatagaaaaatttcttaaacttcatattgaaaatcaagtaaatgcaggtgcaaatgttatacaaatatttgatagttgggctggtcttttaggagataaaatcacagagtatatttataacccaacatttaatatagttgagtatgtaaaaaaattgggtgtacctgtaatatgttttccaagaggaataaaagattacaaaaaatattgtgagattgtgaaacctgacgcagttaatatagattatgaggttgatccaaaaacaataattaaaaatattaaaataccagttcaaggtggtttagaccctaaagttttattaactgataaaattaaccttaaaaaagaggtagaaaaatatttaataacatttaacgatcacccttatatatttaatt

SEQ ID NO: 276786 - DNA, 277 bp, Unknown
  Bacterial polypeptide expressing nucleotide sequence isolated from the Sargasso Sea
aaaaatttttgtgagattgttaaacctgatgctgtaaatatagattacgatgttaacccaaaaaaaattgttaatgaaattaaaataccaattcaaggcgggctggatccaaaaatactgttaactgatcaaaaaactcttaaaacagaagttgaaaaatatctaaatatttttaaagatcacccatacatttttaatttaggccacggaattctccctgagactaaaattgaaatggttgaagaattaattaagattgtaagaaattttaaatgac

SEQ ID NO: 276787 - DNA, 637 bp, Unknown
  Bacterial polypeptide expressing nucleotide sequence isolated from the Sargasso Sea
acaaaaaaaaaattaaatgaaaaaaaaaaagatactataggttttgttggtgctccatggaccttattattatacatgttaaatagaaaatctcctaaagatggaaactttaatgtattctcaaaaaacagagatgtagttaatattttaaatatattagacaagtttttgaagatacacatcgaagcacaaatcgaaagcggtgcatctataattcaaatctttgacagttgggccggtcttgttccagaaaaagatctggattattatgtttacaagccaaccaaaagcttagtagattttataaaaaataaaaaagtcgtctcaatttgctttccaagaaacattggtaattacaaaaaatttgtagagaatgttaacccagatataattaacatcgattataatgtggacccttcaattataagagatacaattgatatcccagttcaaggtggtttcgatccacaaattttacttcaaaacaaagatattgtaagagatgaagtgacaaaatatttaaaaacttttgatcaaaaaagatatatattcaatttaggacatggtgttttaccggaaacaaacccagatatggttaaatacttagttgaaatagttaggagttttaatggatagt

SEQ ID NO: 276788 - DNA, 311 bp, Unknown
  Bacterial polypeptide expressing nucleotide sequence isolated from the Sargasso Sea
agttatttgttttccaagagggattaaagattacaaaaacttttgtaatatagttaagcctgatgccataaatatagactacgatgtcgatccaaataaaataataaaagaaataaatatacctgttcaaggcggtcttgatccaaaaatattattatcagataaagaaaatctaaaaaaggaagttgaaaagtatctaagtatttttaaagatcatccatatgtttttaacttaggacatggaatacttcctgagacaaaaattgaaatggttgaagatttaattaagattgtaagaaactttaaatgac

SEQ ID NO: 276789 - DNA, 571 bp, Unknown
  Bacterial polypeptide expressing nucleotide sequence isolated from the Sargasso Sea
tatgtcagacattaagagagttattgaaaataaaaaaacagatttaaatcctatatggattatgaggcaagctggaagatatctgccagagtttagagagattagaaaaaaaaatactgattttattaaactatgtttaaattctagtttagcagctgaaataactttacaaccgttaaaaagatttaacttagatgcagccataatcttctctgatatattgatcttaccttacggtttgaaacaaaaagtagaatttaagaaaaatgttggacctattcttggtgacttaaatcttgatcaagcatttgaagttactgaaaatgattttattcaaagagttgatcctgtttataaagctataaatttggtaagaaataataatttaacagaaaacaagtctactataggttttgttggagctccctggacattacttgtttatattctaaataaacaatctccaaaaataaaactcaaagaaaaattttttaaagacttttctattattgaaaatacattaaagataatagataaatttttaaaaattcatattaaaaatcaaattgat

SEQ ID NO: 276790 - DNA, 883 bp, Unknown
  Bacterial polypeptide expressing nucleotide sequence isolated from the Sargasso Sea
tatgagtaatttaaagaaaatattgaatgaaaaaataaattgtaaatcggtctggtttatgagacaagcaggtcgttaccttcctgaatttagagaaataaggtctaaaaatacaaattttattgaattatgcttaaatagtgaattaagttctgagattactcttcaacctataaaaagatttaatttagactctgctattattttctctgatattttaatggtgccttatgccttagggcaaaaagtagtatttaataaaaaccatgggccaaagttaagttcattcgatatggaatcttttatgaataacgatgaaaaagaatttacaaaaaaattaaaaccaatttataaagcaattcaaatcacaaaaaaaaaactgaatagggagaaatcattaataggttttattggagctccatggacattattagtctacatgctagatttaaaaaaaagtaaaaacaaaatagatttagctacattagaaagtaaaaaacttgatttgccacaaataattaatcagctaataaaatatttgtgcttacacatccaaaatcaaataaatgcaggtgcagatgttattcaaatatttgattcatgggccggcttaattccagacgaataccttaatagttattgttttatacccaatgctaaaattacggaattttgtaaagaaaaggaaattccaaatatatctttccctagaggtattaaggaaaaatataaaagctttaatgattttgttaaaccagatggcataaacctagatcctcttattgagccacaatgggcaaagaaaaatttaaaaaatgttgttttgcaaagaggcttagatccgtctgtaatgttaaaatccgagaaggaaataataagagga

SEQ ID NO: 276791 - DNA, 535 bp, Unknown
  Bacterial polypeptide expressing nucleotide sequence isolated from the Sargasso Sea
tttaataaaattatttgagaatgaagatttagtgggaaggctgttaaataaacttgtagatacaatctgtctccatattaaaaaacaagttgaggcaggagcaaacataattcaaatattcgactcatgggccggtttattacctaaagacaaactttcaacttattgttacgacccaacattcaaaatagttgaatacacaaaatcattaaaagtacctacgatttgtttcccaaaaggaattggagagaactacgaaaatttttgctctatagttaagcccgattgcattagcatagactacaacatagatcctaattggataaaagataagtcgggaggaataacaatacaaggaggaatggaccccaaaatccttttaaccgatagaacagaaataaagaaaaatgttgaaaaatttattaaaattttttctgggtatccgtatatttttaatttaggtcatggcgttctacccgaaaccaaaccagaggacataaattacatcacgcagataattaaaaaaaacaaataa

SEQ ID NO: 276792 - DNA, 470 bp, Unknown
  Bacterial polypeptide expressing nucleotide sequence isolated from the Sargasso Sea
cttgccaaataaaaaatttaaaaacgcattagaaagaaaacctcaggactgtccgccgatatggctcatgaggcaagctggtaggtatcacgatcactatcaaagtctaaaaaaagattatactttcgaggacctttgtaaaacaccaaaacttgcagctgaaacggcaatggggcctatcaatgaatttgattttgatgtggctattttattcagcgacatattgttccctcttgaagcacttggtatggatctctcttataatccaggacctcaatttggccttcacttaaatgaagataatgctgaaagcctactaataaatcaaaacccaataagctttatggaatttcagggtgaagcgatagagcgaactattgaaagattacccactgaaaagtctttaataggctttgttggtgggccttggactttaattgcctacgcatgcaatatcagtaaagattcaa

SEQ ID NO: 276793 - DNA, 361 bp, Unknown
  Bacterial polypeptide expressing nucleotide sequence isolated from the Sargasso Sea
tatgagaccattgaatcaaataataatcaataaggatacctcatttaatcctatttggattatgagacaagcaggtagatatctaccagaatttagaaaaattagagaagaaaatccgaattttattaacttgtgtttaaacgatgatttatcttcaaaaataactctgcaacccttaaagagatttaatttagacgcagctataatattttcagatattttaatgcttccatatggattgggtcagaaagtagaatttgaaaaaaattttggtcctaagttaggtgaatttaatctaaacgaagttgccaaaattgatgaaattgattttgtagagaaattcatcgtgtatatagggtaa

SEQ ID NO: 276794 - DNA, 592 bp, Unknown
  Bacterial polypeptide expressing nucleotide sequence isolated from the Sargasso Sea
gccatggacattaatgatttatatgttgaaactaaagaaaagagataacactattaatttaaaagtgttagaagagaaaaagctagaaataaatatcatacttaataaattagatgattatttaaaaattcatatagaaaatcagtataaagcgggagccgatgtggttcaaatctttgactcttgggctggattaataccaaaaaaatatctaaattattattgttatatgcccaataagaaacttgtggagttttgtaaaaagataaatcttcctgttatctgttttccaaaaggcattaagaaaaactatttagaatttttaaaaatagtgaaaccaaatgggttaaacatagattatgatgttaatcctctttgggctaaaacgaaccttaaaaatgtttgtttacagggaggcatgaacccaaaaattttacttaaagataaaaggaaaatatttgatgaggtagataagtacttaagaatttttaaaaaaaaaccttatatttttaatttggggcatggtcttcttccaaaaacagatccaaatattttaaaagatgttatttatagggtaaaatcattcaaatga

SEQ ID NO: 276795 - DNA, 172 bp, Unknown
  Bacterial polypeptide expressing nucleotide sequence isolated from the Sargasso Sea
gatcctaaaattttattaacagacaaagaaactctgaaaaaggaagcctctaagtatttagaaatctttaaagatcatccatatatatttaatcttgggcatggtattttgcccgagactaatccagaaatgctagaaaacttaatcaaaattgtaaaaaattttaaatgat

SEQ ID NO: 276796 - DNA, 601 bp, Unknown
  Bacterial polypeptide expressing nucleotide sequence isolated from the Sargasso Sea
gctgtttacatggtccaaggtaaaagtgatagagactgtccactttgtgagaaattatgcttatcaatgtcgctccgcattttcggaattaattgatttaataactgaggctaccactaaatatttacttgggcagattaagcatggagctgaagtcatacagatttttgacagctgggctggcgtgttaagtgacgaagaattcgaggcttgggtaatagagccaacgcggaaaatagtaaaacgtataaaaaaagaggcgcctgatgtagctattataggatttccaagattgtcaggaactaaatatgtagattttgtaaagggaactgatgtagatggtgttaatcttgatgaaacggttccgttagagtgggcagcagaaaatattcaaccactggcaactgtacaaggcaacttagacaataatttgttgttagctggcggcggcaggttaattgatagagtggagaaaatcttggatacatttaaagaaaaaccttatatttttaatcttggacatggtgtgttacccaaaactcctgttaataatttacaaactgtaatagatcttattaagcgtcaaaggataaaagagtga

SEQ ID NO: 276797 - DNA, 385 bp, Unknown
  Bacterial polypeptide expressing nucleotide sequence isolated from the Sargasso Sea
gtgtatttacccgatagagaaaatagtagctggagttaaaagtgtatttccaaatatacctattattattttccctcggttggcaggtcacagatacatagcgatagcagatattgaaggtgttacagcggttagtgttgatcacactctatcaacagactggatctctaaaaatttgcaaaataaggttgttgtgcaaggaaatttagatccggtgtttctccttacgggaggggctgccatgaaggatgaagtgaaaagaatattagagggcttgtctggccgtcccttcatttttaatctcggccatggtgtgttgcccaatacaccaacagataatgtatcggaattatgtgaaatggtttctgtttatagacggagttag

SEQ ID NO: 276798 - DNA, 772 bp, Unknown
  Bacterial polypeptide expressing nucleotide sequence isolated from the Sargasso Sea
ccacttggacaagaagttaattttataaaagaaagaggtcctcattttagtgaatttgatcaaaaaacattttttaataatactgagaaaactttttctaataaattaaaaccagtttataaggctattgagataacaagaagaaggcttaataagaaaaaatctttaatatcatttattggagctccttggacattattgatttatatgtttgatattaaaatagataatgaagtcaatttaattaaattaaacaataaaagaaatcaattagaggaagtaataaacgaattgattaaatatttatgtcttcacatccaaaaccaaataaatgctggtgctgatgttatccaaatatttgactcctgggcaggattaatcccagtaaaaaacttaaatgactattgctatttacccaatgctagaattatagaattttgtaaaaaaaagggtataccaaacatttgctttccaaaaggattaaataaaaattacaaagattttaataaattagtaaagccaagtggaataaatttagatccattaattgatccttcttgggcaaaggaaaatttgaaagacgtcgtgttacaaggtggattaaatccaaatattttattaaagcctgaatatgagatgttcaaagaagcgacgaaatatgttcagactttaaaagatattccctatatatttaacttaggtcacggtttacttcctgaaacagatcctgataaggtagataaactagtaaaattttataggaatttttaat

SEQ ID NO: 276799 - DNA, 449 bp, Unknown
  Bacterial polypeptide expressing nucleotide sequence isolated from the Sargasso Sea
taaaaatcaaattgataatggggccgaggtaattcaaatctttgatagttgggccggtctattaaatgaaaaagatttaccaaattttgtatttataccaactctcaatttagtcgaatatattaagtctttaaaggttcctgttatatgttttccaaggggaataaaaaattataaaaatttttgtgaaattgtaaaaccagactgtatttgtattgactatgaagtagatccaataaaaattagtaaagaagttaaaatacctattcaaggtggtttagatcctaaaatattattaactaataaagttaatttaaaaaagaatatacacaaatatttagatgcttttaaagatcatccatatatctttaatttaggtcatggagttttaccagaaacagatcctaatataatggattatttagtaaaaactgtgaaagattattaaa

SEQ ID NO: 276800 - DNA, 331 bp, Unknown
  Bacterial polypeptide expressing nucleotide sequence isolated from the Sargasso Sea
ataaaagacattcctattattggttttcctagaaacactaaccttgtgtgttataaaaaatattcaaatatagataagcttgactgtattactttagactataattttcctttagataaaattaatgagctaaacgataaaattgtttttcaaggaaacctggatcctaaacacctattaaaagactcccaaaaccttagtcagaaaattgaagaaatattatttgcttttagagaaagaccacatatttttaatttaggacacggggttttacccgagacatcaattgagaaggttgagcaaatgctcttgcagataaggtcaacatgaa

SEQ ID NO: 276801 - DNA, 268 bp, Unknown
  Bacterial polypeptide expressing nucleotide sequence isolated from the Sargasso Sea
tgggcgaactccacttgatattgcgcgtatgcggcttgggtcagaagcagtccttcagggaaaccttgatccagctatttgcttcgcttcggaaaaagtaatttcaaatgaggtatcagacatccttgcgagaaataagaatcaccctgggcacatctttaacctcggtcatggcgttttgcctgaaactaatcccgaggttcttgaaaaggttgttgagcaagttcactcatacccacttaattttggggaaagaaatggctcttaa

SEQ ID NO: 276802 - DNA, 784 bp, Unknown
  Bacterial polypeptide expressing nucleotide sequence isolated from the Sargasso Sea
atgctacccatatggattgaaccaaaaagtcgaatttcaaaaaggttttggtcctaaattagaaaaattagatttaaataaaatagctaaaattgacgaaattgattttttaaaaaaaatacatcaaatttataaaataataaaaaaagtaagtttagatcctatcacaaaatataaaaatacaattggttttataggtgctccatggacgttgttggtttatatgatcaatcaacaatcacctaaaaaacaattaaaagaaaacttttttaaggataaatttttaattaatagagttttattaataattgaaaagtatttgaaaattcatattaaacatcaaattgaaaacggagctaatattattcaaatttttgatagttgggctggattattagaagaaaaagatttaccaaactatgtttatactcctactctaaatcttgttaactatgttaaatctttagatgtaccagtaatttgttttccaagagaaataaaaaattataaagaattctgtgatattgttaaaccagatgctgttaatattgattacaacgttaacccaaaacaaatcattaaggatataacaattcctatacagggtgggttagatccgaatattttattaactgataaagaaaaaataaaaaaagaaacaacaaaatatttggaaatttttaaggatcatccttatatctttaatcttggacatggagtattacctgaaactaatccagaaatggtaaaatacatggttcaaattgtaagagaatataaatga

SEQ ID NO: 276803 - DNA, 808 bp, Unknown
  Bacterial polypeptide expressing nucleotide sequence isolated from the Sargasso Sea
aaacaattaagatctaaaaaccaaaattttttaaaattatgtttaaatagtgatttagcttcggaaataacgttgcagccaatgaaaagatttaatcttgatgctgcaattattttctcagatatattagtaataccttatgcattaggccaaccgatagattttggaaaagcagaggggccaagaaattcaaatataaatataaataagctattagaaacaagtgaaaaaaatttcctttcaattcttcaacccatatataaagcaataaataagactaaaatctcgttgaacaaggataaatctttaatcgcttttgttggtgctccttggacattaatgatttatttgtataatcttaaagagaagaaagaatctaacaaaaaaatatccataaataacaaaagtgaaattaaactagttctaaaaaaactagatgagttcttaaagattcacattgtcaatcaaaaagaagccggagctgatgtaatacaaatctttgactcctgggctggattaataaaagatgaagatttaaatgagtattgttacaaacctaataaaagtttaattgatttctgtaaagaaattaagataccgtctatttgcttcccgaaaggattaaaggaaaactacaaaaattttttaaaagaagtaggaccagatgcaataaatattgattacaacatagatcctacatgggcaaagaatagttttggagatatttgtattcagggggggatgaatccagagatactttttagagatgaaaagatagtattagaagaagtggagaaatattggaaat

SEQ ID NO: 276804 - DNA, 238 bp, Unknown
  Bacterial polypeptide expressing nucleotide sequence isolated from the Sargasso Sea
caagaaattgaccctatatgggctagagaaaaccttagagaaatttgtattcagggcggattagatccaaaattacttctaaaaagtgaaaaattagtaatagaggaaactgataagtatttagagattttcaagaataatccctacatatttaatttaggacatggtattctacctaaaactaatccagacataattaaaaaaattgtagacaaggttaatttaataaaaagatgaa

SEQ ID NO: 276805 - DNA, 318 bp, Unknown
  Bacterial polypeptide expressing nucleotide sequence isolated from the Sargasso Sea
aatgaataaattatctgagtgtataattaataaagaatcttctttcatgcctatatggtttatgagacaagcaggaagatatttgccagaattcagagaaataagaaaaagcaatcaaaactttatcaatttgtgcttgaacacaaaacttgtaactgaaataacaatgcagcctttaaatagatttgacttagatgctgccattattttttctgatattctaatgataccatatggacttggtcaacatgtagagtttaaaaaaggatacggccctaatctaggcaacttagattcagataaaatattaagcacaga

SEQ ID NO: 276806 - DNA, 471 bp, Unknown
  Bacterial polypeptide expressing nucleotide sequence isolated from the Sargasso Sea
atacgcaaaagctacatatcaaaaaccaagtttcaaaaggtgcgtcagtaatccaaatttttgatagttgggctggtctattaaatcaagataaatatgaggactatatttataaacctaccaaagaacttgttgaattcataaaaagtttaggagttgaagcaatatgttttccaagaaatattaaatcatataaggaattttgccaaactgttaaacctaatgctatatgtattgactatgaggtggatccaatagaaatcgctgaaaaaatagaaatacctattcaagggggtatgaatccaaattttttgttgttagaaaaaaatgaaatgttaaaaaatgctcgtaagtatttagaaatatttaaaaatcataaatacatttttaatctaggacatggcgtcataccccagactaatcctgaaaatgtaaaaattttagttgattacgtgaaagagtttaaatgaa

SEQ ID NO: 276807 - DNA, 427 bp, Unknown
  Bacterial polypeptide expressing nucleotide sequence isolated from the Sargasso Sea
atgagacaggcaggtagatatttaccagaatttagagagattagaaaagaaaataaagactttattaaactatgtttaaatgaaaagatttcggaagttataacgctacagccaattgaaagatttaattttgatgccgcaataattttttcagatatcttaatgacaccatatggaatgggtcaagaagttaaattcaaaaaaaactttggccctgagcttggagagatagatttaaaatatattataaatttaggtgaagatgagtttactagtaaactttcacctatttataaattgttaagaaatttaaaaaataatgaaaaattaaatggaaaagatttaataggttttgttggtgcaccctggacacttcttgtttatatggttaacaaagtattctccccaaaaataggtttatcatata

SEQ ID NO: 276808 - DNA, 792 bp, Unknown
  Bacterial polypeptide expressing nucleotide sequence isolated from the Sargasso Sea
atattttaatgctaccgtttggtcttaatcagaatgtaaattttattaaaaattttggtccagagttaggggagtttaaaatggaagaaatgttaaaaataagtgaaaataattttaaagaaaaattattaccaatttataattcaataaatattacatcaaaaaatgaattaataaaaaataaagatttaattggatttgtaggagcaccttggactttgttgctttatatgataaataaaaaatctccaaaaaataaaattaaaaataattttttttctgacaatctattaattaaccaattactcgaaataattcagaaatttttaaaaattcatattaaaaatcaaatagaaaatggagccactataatacaaatttttgatagctgggcgggactgctagaaaaaaaaaaattttcaaaatttatttatgacccaactgaaaatttagttaattacacaaaatctttaggggtacctgtaatttgttttccaaaaggaattaaaaattataaggaatattgtgaaattgttaagccggatgtaattagtattgattatgaagtggacccaaaattaataagaaatcaaataaacattccggttcaaggaggtttagatccgaaaattcttttaaccgaaaaagaaaatataaaaaaaaatgtgttaaattatttaaatatttttaaagaccacccttatatatttaatttgggccacggtgttttaccagaaactaatcctaaagatatgagttatctagttgaaatagtaaataattttaaatgaa

SEQ ID NO: 276809 - DNA, 295 bp, Unknown
  Bacterial polypeptide expressing nucleotide sequence isolated from the Sargasso Sea
atgttattagatacattaataaaaaaaaatagaagctatactcctatttggtttatgagacaatcgggaagacatttaacagaatataaaaaacttagaaataaagaacaaaactttattaatttttgtctaaacgaaaaattagtaattgaatcatccttgttgccattaaaatattatgatttagatgctgcaatacttttctcggatattttaattataccttggttgcttggtcaaaaagtagattttaaacaaaatcatggacctttattagcacccaataaattttgat

SEQ ID NO: 276810 - DNA, 223 bp, Unknown
  Bacterial polypeptide expressing nucleotide sequence isolated from the Sargasso Sea
tatgacacctttacatgaagtgataattaaaaaaaatactaaaataaatcctatatggataatgagacaagcaggcagatatttacctgaatttagagaaattagatctaaaaatacggattttataaaattatgtttaaacccaattttatctaccgaaattactcttcaaccattaaaaagatttgatcttgatgcagcaattattttttcagacatatta

SEQ ID NO: 276811 - DNA, 406 bp, Unknown
  Bacterial polypeptide expressing nucleotide sequence isolated from the Sargasso Sea
atgtctaacattaagaaagttattaaagagaaaaaagcaaatttaaatccagtatggattatgagacaagcaggaagatatctgccagagtttagagaaattagaaaaaaaaatactgattttattaaactatgtttaaattctagtttatcagctgaaataaccttgcaacctctaaaaagatttgacttagatgcagccataatcttttctgatatattaattttaccttacggtttgaaacaaaaagtagaatttaaaaaaaatgttggacctgttcttggtgatttaaactttgaccaggcacttgaagttactgagaaggattttattgaaagagttgatcctgtttataaagctataaatttggtaagaaataacaatctaacagaaaacaaatctacca

SEQ ID NO: 276812 - DNA, 415 bp, Unknown
  Bacterial polypeptide expressing nucleotide sequence isolated from the Sargasso Sea
aatgagtatatttatagaaaccctcaacaaaaaacaaaccgactctaaccctatatggctaatgagacaggcgggaaggcacttaccagaatatagaaaaataagatctaactatccaaatttaatggatatgtttctaaacccagacgaagttgcaaatatcacacttcaacccgttaaacgatacaatctagacgctgcaattattttttcagatattttaatggttccttacacactacaaggatcggttgtgttcaacgaaggcggcaaagggcctattattaatatagagtttaataaggagcaaaaaatagaaaaagcagaaccagtttttaacgccataaagaaagtaaaagaaaaatccaccaccccacttatcgggtttgccggaaggccttggacaactattttt

SEQ ID NO: 276813 - DNA, 471 bp, Unknown
  Bacterial polypeptide expressing nucleotide sequence isolated from the Sargasso Sea
tatgaatactcttatacaaaactgtatcaacaacaagtcttctaagacacccatatggttaatgagacaagccggtagatacttgccagaatttagatctataagaaaagaaaatcaggattttattaaactatgtttgaattccaaattagcttcagaaataactattcagccaatcataagatttgattttgatgctgctatagttttttctgacattcttttagtcccacatgttcttggtcaaaaagtaaattttaaaaaagattttggacctgatttacaaaagataaatttaaatacgctgaatgaggctaaaaaagaagattttcttaaaaatttaaaccctgtttatgaaacgattaaagaaacaaaaaataaattgtcatcaaatagtaaagatataatcggttttgtgggtgctccatggactttgttgttgtatatgcttaatagaaaatcccccaaaga

SEQ ID NO: 276814 - DNA, 253 bp, Unknown
  Bacterial polypeptide expressing nucleotide sequence isolated from the Sargasso Sea
tatgactcctattaatgaagtaataattaataaaaaaacagatttaaatcctatctggataatgagacaagcagggagatatttacctgaatttagagaaataagatcaaaaaacactgatttcatcaatctttgtctgaatgataaattagcatcagagataaccttacagccactaaaaaggtttgaacttgatgcggctataattttctccgatattttaatgttgccctacggtctaaaccaaaaagtt

SEQ ID NO: 276815 - DNA, 172 bp, Unknown
  Bacterial polypeptide expressing nucleotide sequence isolated from the Sargasso Sea
tgatcctaaaattttattaactgacaaagaaacacttaaaagagaatctaaaaaatacctgaatatttttaaagatcatccatatatctttaatttaggccatggaatacttcctgaaacaaaaattgaaatggtggaagaattaattaaaattgtaagaaattttaaatga

SEQ ID NO: 276816 - DNA, 814 bp, Unknown
  Bacterial polypeptide expressing nucleotide sequence isolated from the Sargasso Sea
atcattttttcagatattttgatggttccatatgctttaggccaagatgtaaaatttacaaaaggtttaggacctcagctaggtgattttgatttaaatgtgtttttgaagaacaaaaaaaataattttacgactaaacttagtccgatttataaagcaatagatattacaagaagaaatcttcttaaaagtaaatcgcttatttcttttataggcgcaccgtggacacttattgtatacatgtttaaaattaaagagagtaaagaaaaaataaatttacaaaagtttcatgataataaaaatttacttgatcaaataatagaaactctaattagctttttgtgtacgcacataaaaaaccaaataaatgctggagcagatgtaatacaaatttttgattcttgggcaggtttaattccaaaacataatttaaatgactattgttatataccaaacgcaaaaattttaaatttttgcagaaaacaaaaaatacctgtcatttgctttcctaaaggaataaaagaaaaatatgaagactttaacaaaattgttaagccaaatggaattaacttagactcagaaattgatcctttatgggcaagagaaaaattaaaaaatgtagtgatacaaggaggccttaaccccagtatattattaaaagctgatgagaatattattaaaggggcgactaaatacattcaaactttcaaggatactccctatgtttttaatttaggtcacggtttacttcctgaaacagatcctgataaagtaagtagattaataaaattttataggaattttgatggataaa

SEQ ID NO: 276817 - DNA, 289 bp, Unknown
  Bacterial polypeptide expressing nucleotide sequence isolated from the Sargasso Sea
attaaagattataaaaatttttgtgaaattgttaaacctgacgccgtaaatatagattatgatgttgacccaaagaaaatactcaataaaatcaaaataccaatccaaggtggtcttgacccaaaaatattattaactgaccaaaaaactcttaaaatagaagctgagaaatatcttagtatttttaaagatcacccatacatttttaatttgggccatggaatacttcctgagactaaaattgaaatggttgaggaactaatcaagattgtaagaaattttaaatgac

SEQ ID NO: 276818 - DNA, 439 bp, Unknown
  Bacterial polypeptide expressing nucleotide sequence isolated from the Sargasso Sea
taagtcaggagcgagcattattcaaatttttgatagttgggcagggttagtgaaaaagagagaccttgaaagaaacatatatgatccaaccaaaaaagttgttaaatttatacgttcattaaaaattccggtcatctgctttccaagaaatatagacaattataaagaatttactgatgaaacaaaaccggatgccattaacatagattatagaattgacccaatcaaaataatcaaagatataaaaattccagtccagggaggtctcgatcctcaaatattattaacaaatagaaaaaacattaagattcaagctcaaagatacttagatatatttaaaaaccatccttacatatttaacttgggacatggagttcttccacaaactaatcctgatatgttagaatatttaataaatttagttaaaaacgttaaatga

SEQ ID NO: 276819 - DNA, 367 bp, Unknown
  Bacterial polypeptide expressing nucleotide sequence isolated from the Sargasso Sea
tatttatacgatccaacttcatctctagttaactatacaaagagtttaggggtaccggtgatctgttttccaagaggtataaccgattataaccaattttgtaaaatcgtgaagccaagcatgatcaatatagattatgacgtcgatccaaaaaatttaattaaaaatatagatttacccatacaaggtggattgcaccctgaggcattattaacaaacaaagctcatttaaaaaaggaagtaattaaatatttagagattttcaaagatcacccttatgtatttaaccttggacatggtattcttccagaaacaaaaattgagatggtagaagaattggtaaaaatagttagagactttaaatgat

SEQ ID NO: 276820 - DNA, 202 bp, Unknown
  Bacterial polypeptide expressing nucleotide sequence isolated from the Sargasso Sea
gaaatcaaaataccaatacaaggtggccttgacccaaaaatattattaaccgatcaaaaaactctcaaaacagaagttgaaaaatatttaagcatttttaaagatcatccatacatttttaatttaggtcacggaatactccctgagaccaaaattgaaatggttgaagaattaatcaagattgtaagaaattttaaatgac

SEQ ID NO: 276821 - DNA, 427 bp, Unknown
  Bacterial polypeptide expressing nucleotide sequence isolated from the Sargasso Sea
aatacaaatttttgattcctgggctggcttattacctaaaaataaattatcaaattattgttatattccaatactaaaaattgttgaacatataaaatctaaaaatattcctgtgatttgttttccaaaaggaattggtaatagttatgttgatttttgcaacacggttaaacctgattgcataagcatagattatgatgttgacccattattaattaaagaaaacgtgaatggtattaccgtacaaggtggacttgatcctaaaatattattaaaagaaaaagaggtaattaaaaaaaatgctgaaaaatatcttaatatatttaaagattacccttatatatttaatttaggccatggtgttttaccagaaattaaacctgaaacaatcgaatatataatcagattagtaagagataaaaaataa

SEQ ID NO: 276822 - DNA, 622 bp, Unknown
  Bacterial polypeptide expressing nucleotide sequence isolated from the Sargasso Sea
aattggatttagtggagcattttggaccttactatcatatttaatagaaggtagaggaagcaagacttatcataatgccaaaatattcacctataatgagccagataaatttgaaaaagtaaaaaacataatctgtaaagcaatagctatacatcttaaaaaccaaattaaggcaggttgtgacgttataaaaatatttgatagctgggcaggtatattaactccagatcaaatagataacttggttatagagccatataaggtaattctaaatgaattaagagaagtaaatgctaagaaaatatgttttccgcgcggtataggcgataaatataaggaattctgcaagctagattttgatatatatgctttggactatacctcagagatatctatagctgcagatattcacaaaaattacggtaaaataacccaaggaaatttggacccagctattctttatgcaaaagataaaaatgtaatcgctaaagaaatagataaaattttaaacgctacaaaagaaataccccatatatttaatttagggcatggtataatgccagaaacgcctatagataatgttgagtatatgattgactatataaggaaggaaagaggctaa

SEQ ID NO: 276823 - DNA, 145 bp, Unknown
  Bacterial polypeptide expressing nucleotide sequence isolated from the Sargasso Sea
atgaggcccatatctaattgtattaaaaatcaagataccaaatctaaccctatatggttaatgaggcaggcaggaagatatcttccagagtttagagaaagtagaaaaaaaaatcaggattttataaaactttgtctaaaatagt

SEQ ID NO: 276824 - DNA, 551 bp, Unknown
  Bacterial polypeptide expressing nucleotide sequence isolated from the Sargasso Sea
aataaacaaacaaacagatttaaatcctatttggattatgagacaagctggaaggtatctacctgaatttcgtgaaataagatctaaaaatgcagattttataaaattatgtttgaatgaaaatttatcatcagaaattacattacaaccacttaagagatttgatttagatgccgcaataattttttcagatattttaatggttccttatggtttaaatcaaaaagttgaatttaaaaaaaattttggtccattattaggagacttagacttagatgaaattaacaaattagatgaaattgattttgttgaaaaaatctatcctgtttataaagctataaaacaagtaagtaataacgatattacaaaagataaaagcactataggttttgtgggcgctccctggactcttatggtttatatgattaataaacaatcacctaaattaaatttaagagatgactttttcaaagatgtttttttgataaacagaattcttgtcatattggaaaaatttttgaaagttcatattaaaaatcaagtagataatg

SEQ ID NO: 276825 - DNA, 960 bp, Unknown
  Bacterial polypeptide expressing nucleotide sequence isolated from the Sargasso Sea
aatgatcagagaaaacgtgaccgaaaatctattcttaaaaacaattaagggccataaacagcaccgcacacctgtatggatgatgcgccaagccggacgatatttggaagaataccgtactgtccgtaacacccagaaagatttcatatcattttgtcttaatcctgagcaggcgtcagcagtcaccctgcagccaatttctagatatggatttaatgcagctattatattttcagatattcttatggtcccatgggcattggagcaaaatgtccgatttaaaccaaatattggacctttactcgacccattagacattcccgggtcaattgataaaaaattaattgatgaactaccaaataaattagcgccggtgggcgacgccatccggattacaaaagcgaatttatcacgagaaactgcccttatcggattcgcgggtgcaccatggactattatgacctatatggccgagggcggatcttcacgagatttttcaaaaacccgaggatgggcatggcaatatcgcaaagaagtcgacgcacttttggatagtttgattgaatcgacaatatcttttctgatcttacaagccgaagcaggggtggatgcgttaatgctgtttgatagctgggcaagtgtggtaccagcgacccaacgtcattggttggtaatagaacccaccagaaagatcgtcggtggattgcgtaaaaaaggttacaaacaacctgttattggatttccaaaaggtattggcgaggggttgatatcttatgtcgaacagtcatctgttgatgttattggactggatcatggtgttgacccggcatgggttgatcgtaatttgccaaaaaattttccagtccaaggtaatttagatccattaagtttgctgccagctgggccggagatggtgagggatattgaacacattcttgacgcttttgcgtcgcgcccaca

SEQ ID NO: 276826 - DNA, 214 bp, Unknown
  Bacterial polypeptide expressing nucleotide sequence isolated from the Sargasso Sea
tatgaaacctttaaacaaagtaataattaacaaagatacttcgttcaatcctatatggattatgagacaggctggtagatatttgccagaatttagagaaataagaaaagaaaatcctaattttatcaatttgtgtttaaatgatgatttatcttcagaaataactctacaacccttaaaaagatttgatctggatgccgcgataatatttcag

SEQ ID NO: 276827 - DNA, 417 bp, Unknown
  Bacterial polypeptide expressing nucleotide sequence isolated from the Sargasso Sea
ttcaaatttttgatagttgggcaggacttgtggaagaaaaaaaattatctaaatatatatatgatcctactttagacattgttgagtatgttaaaactttaaatacaccagttatatgttttcctagaaatataaaaaattataaagaatacgtaagaatagttaaaccagacgcattaaatattgattataacgtagaaccagaaaaaataagagaagaagtggatatagttgttcaagggggtttagatccaaaatttttattaggcgacaaagaaactctaaaaaaagaagctttaaagtatttaaatatatttaaagatcatccttatatctttaatttaggacatggagttttgccagagacagatcctaacagtatagaatatttggtaaagttggttaaaaacttttaaa

SEQ ID NO: 276828 - DNA, 791 bp, Unknown
  Bacterial polypeptide expressing nucleotide sequence isolated from the Sargasso Sea
actaatggttccttatgcactaggtcaaaaagtaagctttattaaaaatcaaggacctattttagagacctttaatactcagaaatttttaagcaatgataaaactaatttcactcaaaatttacaacctgtttataaggcaataaaaataaccagagaaaaattagataaaaagaaatcactcatatctttcattggtgctccgtggactttattagtttatatgcttagagcgaaacaggataaagacgaaattaatttaaacaaaataaaggagagagattttgaagttaatcttataatagataaattacacgattatctttgtgttcatatagaaaatcaaattaatgctggtgctgatatagttcaaatttttgactcatgggctggctttttatctcctaaagatttacctcgcttttgctatacaccaaatttaaaaattgtagagttttgtaaaaaaaagaaaattcctgtaatttgttttcctaggggtataaaagaaaattacaaagagtttaataatgtagtaaagccaaatggattaaatatagattatcatattgaccctaaatgggctgagataaatcttaaagatactgttattcaaggcggcttaaatccaaatgctttattattaccagagcaagatatgattaaaaatgctaaaaagtatttagacgcattcgatggattgccttatatttttaatctaggtcatggtatgcttcccaaaacagatccaaaaaaagttgaaacactaattaaattttatagggaatattaaa

SEQ ID NO: 276829 - DNA, 340 bp, Unknown
  Bacterial polypeptide expressing nucleotide sequence isolated from the Sargasso Sea
atgacaccaattaataaagtaattaagaacaaagatgttaaagttaatcctatatggattatgagacaagctggaagatatcttcctgagtttagagaaataagatctaaaaatacagattttatcaaattatgcttaaatgaagaattatcatctgaaataaccctacaacctttaaaaagatttgatcttgatgcagcaataattttttctgatattttaatgctacctcatgggttaggccaaaaagttgaatttgaaaagaattttggaccaaagttaaataaaatagatttaaatgaaattgttaaaattgatgagattgattttgtaaaaaaaa

SEQ ID NO: 276830 - DNA, 247 bp, Unknown
  Bacterial polypeptide expressing nucleotide sequence isolated from the Sargasso Sea
tatggtaaatattgattacaatgttgatcccaaaaaggcagtgaaagaaataaaaatacctattcaaggtggattggatccaaaagtattattaagtgataaagaaaacttacataaagaagtaataaaataccttcaaatttttaaagatcacccttacgtatttaatcttggacatggtattttgccagaaacaaaaattgaaatggttgaagaactagtaaaaatagttagagaatttaaataa

SEQ ID NO: 276831 - DNA, 787 bp, Unknown
  Bacterial polypeptide expressing nucleotide sequence isolated from the Sargasso Sea
cctccggtttggttcatgaggcaagctggaaggtatcatgaccactaccaagctttaaaaaaagatcatactttcgaggagctttgtaaaaatccattacttgcagcagagacagctatgggtcccattaatgaattcgattttgatgtagccatactctttagcgacatattatttccacttgaagcgcttggtatggacctgtcttataacccaggaccgcaatttggtctccacctaaatgaagagaatgctaatagccttcttgtgaatcagaatcctattagctttatgaattttcaaggcgaagcgatagaaagaaccattgaaagacttccgaaagaaaagtcattaataggctttgttggtggaccctggactttaatatcttatgcttgcaacataaataaagattctagacagataaatttaaataatttccaaataggtctattggataatgtgatactgccattgctgaaggaaaatataaaattgcaattgaatgctggagccgaagttgtgatgatctttgactctgccgcgcaccaactagatgaagaagatttcagtatctacctagacaagacctttaattcattggctaaagaattcccaaacaaagtgggctattacgccaaagatggcattaactacgaaaccataattgcgaaacaagatgatcatgaaattgacttagcaggaatgggtctagactccaatattgatattagagattacttcaaaaaaactacaaaatggttttgttcagggcaatttcagtgaa

SEQ ID NO: 276832 - DNA, 704 bp, Unknown
  Bacterial polypeptide expressing nucleotide sequence isolated from the Sargasso Sea
ttatcttcctgaatttcgaaaaataagatctcaaaaccaaaattttattaaattatgtttgaatagtaatttaagctcagaaataacacttcaacctataaaaagatttaatcttgatgctgctataatattttcagatattttaatcatcccacacgcactaaatcaaaaagttacatttatcgaaaactatggtccaaaactagatgaatttaataaagaaaaattcttagatgtaagcgaagaagagtttatcaaaaaactagatccagtttacaaagcaattgaaataaccagaaaaagtctagataaaagcaagtccttaataggtttcatcggagctccttggacactactattttatatgtttaattacaaaaaagatacaaatggaatagaaataaataaaattgaaaactatattaatataaatttagttttagataagttaaacaaatttctgtgtttgcatatcaacaatcaaatagatgctggtgctgatattattcaaattttcgactcgtgggctggtttaataccggaaaaatatataaacgatttttgttatattccaaacgcaaaaataattgaattttgtagaaataagaaaattataaatatttgttttccaaaaggaattaaaaaaaaatacgaaaaatttaatcaagttgttaaaccaaatatgtataaacttagattctgaa

SEQ ID NO: 276833 - DNA, 706 bp, Unknown
  Bacterial polypeptide expressing nucleotide sequence isolated from the Sargasso Sea
tgatattttaaaagtaactgaaaatcaatttacgaataaattagatcctgtgtacaaattaataaacatttcttctagagataatttacttcaagaaaaagatttattcggtttcgttggggcaccatggacaattttagtttatatgataaatcaactttcaccaaaaaaagaattaaagaaagatttttttgatgatcaaatattaattgaaaaattacttacaatcatagttaaatttttaaaactacatataaaaaatcaaatcagcagtggcgcaacaattattcaaatttttgatagttgggcaggtctggtagaagaaaaaaaattagattttttaatatataaaccaactttagatctagtaaattttgtcaaatctttaaacgtgcctgtgatatgttttcctagagaaataaaagattacaaaaagtttgttaataatgttaagccagatgtggtaaatattgattacagcgtagatcctaaagaaattgtaaaaaatatagaaattcctgtacaaggtggtttagaccctaaagtacttttgactgataaagataatattaaaaaaaatgcaattaaatatatggaaatttttaaagatcatccctatatttttaatttagggcatggtgttttgccagaaacaaatcctgatatggttaaatatttagttaacactgtaaaagattttaaatga

SEQ ID NO: 276834 - DNA, 297 bp, Unknown
  Bacterial polypeptide expressing nucleotide sequence isolated from the Sargasso Sea
tatgtctaacattaaaaaggttattaaagataaaaaaacagatttaaatcccatatggattatgagacaagctgggagatatctaccagaatttagagaaattagaaaaaaaaatactgattttattaaattatgtttaaactccaatttagctgctgaaataaccttgcaacctcttaaaaggtttgatttggatgcagccattattttttccgatatattaattttaccatatggtttaaatcagcaagtagaatttaaaaagaattttggccctattcttggtgattttaacat

SEQ ID NO: 276835 - DNA, 535 bp, Unknown
  Bacterial polypeptide expressing nucleotide sequence isolated from the Sargasso Sea
tatgaaacctttaaacaaagtaataattaacaaagatacttcgttcaatcctatatggattatgagacaggctggtagatatttaccagaatttagagaaataagaaaaaaaaatcctaattttattaatttgtgtttaaatgacaatttatcttcagaaataactttacaaccattaaaaagatttgatctggatgctgcaataatattttcagacatcttaatgcttccttatggattaggtcaaaaagtagaatttgaaaaaaactttgggccaaaattaggggaattaaatctaaatgaaattgctaggactgatgaaattgactttgtagagaaaatacatcgtgtgtataaagcattaaaaaaagttagcgcagattctagtttaaaaaataaaaatactatcggatttattggtgctccatggacactattagtttatatgattaatcaacaatcacctaaaaaaaaattgaaaaaggatttttttaaagatgagtttttaataaacagaatattattaattattgaa

SEQ ID NO: 276836 - DNA, 541 bp, Unknown
  Bacterial polypeptide expressing nucleotide sequence isolated from the Sargasso Sea
agaaataaactctaatctattaaacgaaaaaaaagttaatataaaaaaaatcttagataaactaattaaatttttatgtatccatatacaaaatcaaacaaacgcaggagctgatattgtacagatatttgattcttgggctggattaattcctgataattatattaacgattattgttttatacctaatgctaaaatagttgagttttgtaagaaagaaaaaattcccaatatttgttttccaaagggcataaaagaaaaatataataattttaatcaaatagtaaaaccagatggaattaatttagattatgatatagatcctttgtgggcaaaaaaaaaattaacaaacactgttattcagggagggctagacccaaaaattttattaaaatctgataaagaaatgtttgaaggggcgacgaaatatatcgagatgtttaaagatattccttatgtttttaatttaggtcatggtttacttccagaaacagatcctgatagagtaaaaaaattaattgaattttataggaattattaa

SEQ ID NO: 276837 - DNA, 592 bp, Unknown
  Bacterial polypeptide expressing nucleotide sequence isolated from the Sargasso Sea
atgagtcccttagcaaactgtattaaaaatcaagacactagatccaaccccatatggttaatgagacaagcaggaaggtatcttccagagtttagagaaattagaaaagaaaaccaagactttataaaactttgcttaaacagtgacttagcatctgaaatcaccctacaacctattaaaaggtttggatttgatggagctgtaatattttcagatattttaatgttaccttatggccttggtcaaaaagtagaatttgaaaaaaattttggacctagattaggagatatagatttagaaacaataaaaaatgtcgatgaaataagttttactgaaaaaatttataaagtttataaagcaatcgaaaagacgtcaaaagatcctttaatgatcaatagggatatgattggatttgttggagctccttggacaatactagtttacatgattaataaatcttctcctaaaaaaggtttatcgggtgaattctttaaagatgattttttaattaatagattactaggaataatagagaaattcttaaagcttcatataaaaaatcaaattgaggccggagctcaagttattcaaa

SEQ ID NO: 276838 - DNA, 696 bp, Unknown
  Bacterial polypeptide expressing nucleotide sequence isolated from the Sargasso Sea
ataaaatatttttagaaacgttaaatcctgtttatcaagctattgacattacgagaaaaaaattaaataaaaaaaaatctcttatatcttttataggtgctccttggaccctactggtttacatgttgaatttgaaaactgagcagtcttacataaatttagataagctaaaaaaaaacgagaaaaaaattctacaaattattgatatactaattaagtatttatgttcgcacatagaaaagcaagtcgattcgggagcagatgtagttcaaatatttgattcttgggccggaatgatacctaaagggaagcttcaagatttttgttataaaccaaacgcacaaattgttgaattttgcaggaataaaaagatacccaatatttgttttccaagaggcattaagcaaaactatgaaaaatttaacaatcttgttaaacctgacggaattaacttggatccagaaattgatcctagttgggcgaaaaaaaaattaaaaaaagtcgtaattcaaggtggtctagatccaaaaatattacttaaatctaatagagaaataatatcagcagcgacgaaatacataaatacttttaaaggtattccttatgtttttaatttagggcacggtttacttcctgaaacggatcctgataaagtaaaaaatctgataaatttttataggaactacaatggataaa

SEQ ID NO: 276839 - DNA, 133 bp, Unknown
  Bacterial polypeptide expressing nucleotide sequence isolated from the Sargasso Sea
atgaattataataataagaaattgttaaaaactttacagggtgataagttcaattcacctcctgtttggttaatgcgtcaagcagggagatatctaccagaatacagagaagtaagaaagacaagcaggtagt

SEQ ID NO: 276840 - DNA, 555 bp, Unknown
  Bacterial polypeptide expressing nucleotide sequence isolated from the Sargasso Sea
cttgcctaataaaaaattcataaatgccataataagaaagccacaggcctgcccgcctatatggctcatgagacaagccggtcgatatcatgatcactatcaaagcttaaagaaagatcatacgttcgaagaactttgtaaaaaacctatactggcagctgaaacagctatgggtcctattaacgaatttgattttgacgtagcgattctgttcagcgatatattatttcctcttgaagcgcttggtatggacctatcttataatccaggacctcaatttggactccatctggacgaagataatgccgagagccttctcgtaaaccaaaatcctatcaactttatggagtttcagggagaagctattgaaagaaccattgaaagactacccagtgataagtcattaataggttttgtcggtggaccctggaccttgattgcatatgcatgcaacattagtaaagattctagggaattaaattttaataatttccaaataggccttctagataacgtgattcttccactgctaaaagagaatgtagaattacaatt

SEQ ID NO: 276841 - DNA, 566 bp, Unknown
  Bacterial polypeptide expressing nucleotide sequence isolated from the Sargasso Sea
taaaagccttatcggttttgtgggggcaccgtggactatcctaatttatatgctaaaccgtcagtcaccaaaaaaaaaattgtcaaatgatcttcataatattgataaaaaaaaatcattatcgaaaataataactaaatatttaaaaattcatattaaagaacaagttaaatctggagcaacagttatacaaatttttgatagttgggcaggtcttgcaactaaagatgatattaaatctataatatataattgttcacctgatctagtcgagtttacaaagtcccttggcgttccagcgatatgttttccaagagaaatagaaaactataaagaatatgtatctgaagttaaccctagtgccgtaaacattgattataatatagatataaattatatttcaaaaaatatagatatccctgttcaaggaggattagatcctaaattccttttatcagacaaagaaaccctgaaatctgaagctttgaaaatattagatatttttaaagactatccatatattttcaatttaggccatggtgtccttccaaagacagatccaaata

SEQ ID NO: 276842 - DNA, 121 bp, Unknown
  Bacterial polypeptide expressing nucleotide sequence isolated from the Sargasso Sea
gatgacaaaaaaaattttaaaggctctcgctggcgaaaagcagaaaatacctccaatatggatgatgcgacaagccggtcgttatttgcctgaatatcgtgaaacaagagcacaagcaggt

SEQ ID NO: 276843 - DNA, 673 bp, Unknown
  Bacterial polypeptide expressing nucleotide sequence isolated from the Sargasso Sea
gttgacagagttaaacaagtttatgaagctataaaaaatgtaagtaataatgatattttaaaaaataaaaatactattggatttgtcggtgctccttggaccatattagtttatatgataaatcaacaatctcctaaaaaagaattaaaaaaagatttttttgaaaatagagatttaattaataacgttttattaattattgagaaatttttaaaaattcatattaaaaatcaaatagatagtggtgcaaatgtgattcaaatatttgatagttgggcaggattattagaaaataaggatttgccatattatgtgtataatccgactctcaatttagtagaatttgttcaatctttaaatatacctgtcatatgttttccaagaaatattaaagattataaaaaatattgcgattttgtaaaacctgatgcgatctgtatcgactatgaagttgatccattattaattagaaaggaaataaaaataccggttcagggaggaatggatccaaaggttttattaactgatagagaaactttaaaaaaagagacaaaaaaatacctagatatatttaaagatcatccctatatctttaatttagggcatggcgttttaccagaaacagaacctggtatgatggaatatttagtaaaaatggtgaaagactattaat

SEQ ID NO: 276844 - DNA, 277 bp, Unknown
  Bacterial polypeptide expressing nucleotide sequence isolated from the Sargasso Sea
tataaagagtttgtagagatagttaaacccgatgcaataaatattgattataatgtagatcctttaatgatatgtaaaaatataaaaatccccgttcaagggggcttagatccaaaaattttattaacagataaagaaaatttaaaaaaagagactctaaagtatctagatatattcaaagatcatccgtatatctttaatcttggtcacgggatactgccagagactaatccagatatggttgaatatttaataaagacagtaaaagattattaaa

SEQ ID NO: 276845 - DNA, 226 bp, Unknown
  Bacterial polypeptide expressing nucleotide sequence isolated from the Sargasso Sea
atgggtgctattaaagattgtattaaaggtaataaaataggaagtattcctgtttggtttatgagacaagcaggaagatatttgcctgaatttagagaaataagatccaaaaataccaatttcattaacttatgtctaaacccaaaactttctaaagaaataagcattcaaccacttaaaagatttaatctagatgctttaattatattttctgacatctttttat

SEQ ID NO: 276846 - DNA, 447 bp, Unknown
  Bacterial polypeptide expressing nucleotide sequence isolated from the Sargasso Sea
aaaatcaagtagatgcgggcgcaagcataattcaaatttttgatagctgggctggtttgatagagaaaaaagatttagataaatatttatatagtaccaatgaagagttagttgaatatacaaaatcccttggtgtatctgttatatgctttccaagaaatattaaagactataaaaaatttgttagctcagttaaacctagcgcaattaatattgattacaatgtgaatccaaaagatatagtgaaagatatagatttaccaatccaaggagggttagatccaaaaatattattaacagacagggaaaatttaaaaaaagaggcaaaaaagtatttagaagtatttagagaacacccatacatatttaacttaggtcatggagtgttaccagatacagatcctttgatggttaaaagtttaattgatattgttaaggatgcttgat

SEQ ID NO: 276847 - DNA, 405 bp, Unknown
  Bacterial polypeptide expressing nucleotide sequence isolated from the Sargasso Sea
aatgaggcaagctggaagatatttacccgaatttcgtgagataaggagtaaaaatcaagattttataaaattgtgtcttagtgaaaatttagcgtctgaaataaccttacaacctttagtaagatttaattttgatgctgcaattattttttcagatattttaatgttaccatatggtctaaaccagaaagttgagtttgaaaaaaattttggtccaaagttaggcaatttaaatctagatgaattaaagaatattgatgaagtagatttttcttttaagttaaattctgtttataaggcaattaacataacatcaaatatgataaacaaagatgaaaaagacttaatagggtttgttggtgccccatggacaattttagtatacatgattaacaaaatctctcc

SEQ ID NO: 276848 - DNA, 351 bp, Unknown
  Bacterial polypeptide expressing nucleotide sequence isolated from the Sargasso Sea
tatgacaccattacatgaagtaataacaaataataaaacaactattaatcctgtctggataatgagacaagctggaagatatctgccagaatttaaagagataagaaaaaaaaatccaaattttatcgagttgtgcctaaatcacaaattatcttcagaaataacactccaacctattaaaagatttgatcttgatgctgcaataatattttcagatattttgatgttaccatatggattaaatcaaaaagttgattttaaaaaaaactttgggccagttcttggtaatttagatataggcacaatgtctaagatagatgaaatagattttgttgaaaaaatttatccagt

SEQ ID NO: 276849 - DNA, 802 bp, Unknown
  Bacterial polypeptide expressing nucleotide sequence isolated from the Sargasso Sea
attagaaaagataatccaaattttataaatttatgtttaaatccacaattagttaatgaaatcacattacaacccttaaaaagattcgatcttgatgcagctataattttttctgatattttgatgacaccatatgggttagggcaaaatgtagaatttaaaaaaggagtaggccctatccttggtgatttaaatatagattctttacttaaaaccaacacagctgattttataaaaaaactattacctgtttacgaaggaataaaaaaagtaaatgacaatttaaagggaaaagatcttataggttttgtgggagctccttggacactcttagtttatatgttaaacaaaaaatctccaaaaaaagattttaattttaatataattaatgaagataaaaacttaatcaacaaattattaaaaaaaattgaagaaatgttatgcttacatattgataaacaaatcgaagcgggggctaatataattcaaatatttgattcatgggcaggactattacctaaaaaagaattggcaaaattttgttatatacctaccaaaaaaatagtagaacatgttagaccatccaaggttccggtaatatgttttcctaaaggaatcggggaggatggatatatagatttttgtgctgaggtaaagccaaattgtattagtattgatagcgaggttgatgcaaaattaataaaagaaaaattaaatggattaccaatacaaggcgggctagaccctaaaattcttttgggagataaagaaaaaattaaaaaaaatattaaaattatcttaa

SEQ ID NO: 276850 - DNA, 658 bp, Unknown
  Bacterial polypeptide expressing nucleotide sequence isolated from the Sargasso Sea
gatgaaatcgacttcgtcgaaaaaatacatcttgtatataaagcaataaaaaaagttagttcagacgaaactttagaaaacaaaaataccattgggtttgttggtgccccatggacactattagtttatatgattaatcaacagtcacctaaaaaaaacttaaaaagagatttttttaaagatgagtttttaataaacagaattttattaattatagaaaagtttctaaaaattcatataaaaaaccaaattgataatggtgcaaatattatccaaatctttgatagttgggcgggcttattagatgaaaaagatttacctaactacgtttattctccgactttaaatttagtaaattatgtaaagtctttaaatgtaccagtgatatgtttccctagagaagtaaaaaattataaagaattttgtgaaattgttaaacctgatgctattagcattgactataatgttgatccaaaaaaaatacttagagatataaaaatacctattcaaggtggtttagaccctaaaattttgttaacagacaaagaaactttgaaaaaagaagcttcaaaatatctcgatatttttaaagatcatccatatatattcaatttaggacacggagtgcttccagaaacagatcctaatatgtttgaat

SEQ ID NO: 276851 - DNA, 408 bp, Unknown
  Bacterial polypeptide expressing nucleotide sequence isolated from the Sargasso Sea
tatctcggcaggacttcgagcagtttgttaggccacatcttaaaagattattggagaatctttcgggaagagtgccgattatctactttgggacgggtaaccaacatttattagcatctctctcagatctatcaatcgatgtctatgcctttgactggcgaaccccaatgagagccacttgggatgagttggcctgtcggtcggtacaaggaaatttagacccgatcgtactttgttctgatcaaaacacgatcaaaaaccagtcccagcagttattggacagtgttggaggcaggcccggtcatatatttaatcttggtcacgggattattcctgagaccccggtggataatgtgaaatatttggtcgattgggtccatcaaacgacagagagttctacaggttaaa

SEQ ID NO: 276852 - DNA, 892 bp, Unknown
  Bacterial polypeptide expressing nucleotide sequence isolated from the Sargasso Sea
aaaatttgtaaatctgtatggtttatgagacaagcaggtagatatttacctgaatttagagaaattagatcacaaaatcaaaattttatggatctttgtcttaatagtgaattaagctctgaaataacattacaacctattaaaagattcaatctagattctgctattattttttctgacattttgacggttccctatgccctaaatcaaaaagtggaatttatagaaaacagaggtcccatattagaagagtttaattttaaaaaatttttaaataatgataatatttcttttacacaaaaattacacccagtttataaagcaattcagaaaacaagagagaatctagacaaaaagaaatctctaataggatttataggcgctccctggactttattaatttatatgctgggagcaaaagagagtaaaaaaattgactataaaaaaattaaaataaaagaatttgaagttaatttaattctcaataaactgcatgattatctttgtgcacatattgaaaaccaagtagatgcaggagccgatgttatacaaatttttgactcttgggcaggattaatattaccagaagatcttcctaactattgttatattccaaattcaaaaatcgtaaatttctgcaaagaaaaaaaaataccagtgatgtgtttcccgaaaggattaaataaaaattataaggagtttaataatgtagttaaaccagacgcaataagtcttgactacgatatcgaccctctctgggttaaacaaaatttaactgatgtagttttacaaggtggattggacccaaaattactattatcttccgaaaatgaaattttagatggcgcaaaaaaatatttagatatattcaaaaaatttgcctttatatttt

SEQ ID NO: 276853 - DNA, 250 bp, Unknown
  Bacterial polypeptide expressing nucleotide sequence isolated from the Sargasso Sea
tttgattggcgtactccgcttgtaacaacgtgggagctgcttggctgtaaggctgtacagggtaatttggatccaatcatattatgcgcagagcaacgcgcaatcggccagcaggcaggtcagcttttgcacgaagtggcgggtcgcggtggtcatatctttaacttaggtcacggcatcattccagaaacgccggtggataatgtcaagttcttagtggactttgtgcatcaaaacagcgcccgataaa

SEQ ID NO: 276854 - DNA, 854 bp, Unknown
  Bacterial polypeptide expressing nucleotide sequence isolated from the Sargasso Sea
atatttaccagaatttagagaaataagaaaaaaaaatactgattttattaaattatgtttgaatgagaatttagcatctgaaattaccttacaacccttaaaaagatatgatttcgacgcggctataatattttctgatattttaatggttccatttggattaaatcaaaaagtagaattcaaaaaaaattttggtccattattaggggaaataaatttaaatgaaatttctggattgaatgaaattgattttattaaaaatattcagccggtttataaagctataaaattagtaagtaataatgatctcactaaaaacaaaagtactataggttttgttggagcaccctggacattattagtttatatgattaacaagaagtcacctaaattaaaactaacagataatttttttaatgatgatttactaattaataatatattaaaagttttagataagtttttaaaggttcacattaaacatcaaattaatagtggagctgaagtaatacagatttttgatagttgggccggacttttagaaaaagaaaggttatcaaaatatatttataatcctaccctaagtttggttgaatttattaaatcattaaatgttcctgttatatgttttccaagaggaattaaagattataaaaattattgcgagattataaaaccagatgttatttgtatcgattatgatgtagatccaattatgattgaaaaagaaataaaaataccagttcagggaggaatgaacccaaagattttactgaccgacaaagaaactttaaaaaaggaagcaaaaaaatatttagatatatttaaagatcatccttacatttttaatctcg

SEQ ID NO: 276855 - DNA, 439 bp, Unknown
  Bacterial polypeptide expressing nucleotide sequence isolated from the Sargasso Sea
cgccttgcaatattcgattcgtgggcggacttgttaagcgcacaagaactagaaatattttccctacaatatacaaaaaagattactcaaaagttaaaaagtgatccgattacaaaaaatattccaattattttatttgaaaaggatcctaagcagaaaataactgatcttatatttgatgatctgtcctgcataagtctgcactggaaaaatgatattgaggctatatccaaaagtgtaaaaaataatattgcaattcagggaaatttaaatcctatgatattaagtaaatctgatgagattattcatcaagaggtgcaacgaatatgctctataatgtgtgaatatcccgggtttatattcaaccttggtcacggaattactccagacattaatccccaaaaagtacagacaatgatcaaagcagcaagagaataga

SEQ ID NO: 276856 - DNA, 265 bp, Unknown
  Bacterial polypeptide expressing nucleotide sequence isolated from the Sargasso Sea
atgagtcccataactaactgtattgaaaaacaagataccaaatctaatcctatatggctgatgaggcaagcaggaaggtatctgccggagtttagaaaaattagaaaagaaaaccaggattttataaaactttgcttaaatagtgacttagcttctgagattactctgcaacctattaaaagatttgggtttgatggagctgtaatattttctgatattttaatgttgccttatggacttggtcaaccaggtagaattaaaaaaa

SEQ ID NO: 276857 - DNA, 532 bp, Unknown
  Bacterial polypeptide expressing nucleotide sequence isolated from the Sargasso Sea
gatgatgaaaaaaggttatctatcctttttgatacattaatagcatcaacagtcacatatttaaaaaatcaaattgaagctggagctgaaattatacaactatttgatagttgggctggagtacttgatgatgatcaatttaaaaaatggtctatagaaccaacaagaaaaattgttgctgaattaaaaagtacatatcctaatatacctataattgggtttccaagagatgtgactgtgcataatgcattattatacacaaaaaagactggagttgattgtataagcttagactataatataaaggtgaatgaaatgaaaaatatacagaaaaccattcccgttcaagggaatcttcatccagatattttaatagagggaggaactaaaatgagagattcctccctagaaattatgggaaatatggataacggctcacatatatttaatttaggacatggtatattaccccaaacacctatacaaaatgttatcgaccttatcgatatagtaaaaaattataaaaaatgaa

SEQ ID NO: 276858 - DNA, 598 bp, Unknown
  Bacterial polypeptide expressing nucleotide sequence isolated from the Sargasso Sea
atgaaaccattaaacaaagtaataataaacaaggatacttcgttcaatcctatatggattatgagacaggctggtagatatttaccagaatttagagaaataagaaaagaaaatcctaattttatcaatttgtgtttaaatgacgacttatcttcacaaataactctacaaccattaaaaagatttgatctagatgctgcaataatattttcagatattttgatgcttccttatggattaggtcaaaaagtagaatttgaaaaaaactttgggccgaaattagaggaactaaatctaaatgagattgctaagactgatgaaattgattttgtagagaaaatacaccgtgtgtataaagcattaaaaaaagttagttcagatattagtttaaaagaaaagaacactattggttttgtgggtgctccatggacattattagtttatatgattaatcaacaatcacctaaaaagaatttgaaaaaggatttttttaaagatgagtttttaataaacagaatattattaattattgaaaaatttttaaaagttcatgtaaaaaatcaaattgataacggtgcgaatgtaattcaaatttttt

SEQ ID NO: 276859 - DNA, 217 bp, Unknown
  Bacterial polypeptide expressing nucleotide sequence isolated from the Sargasso Sea
atgactcctatccaagactgcatacaaaacagaaatactaaaataaagcctatttggataatgaggcaggctggaagatatctaccagaatttagagaaattagatcaaaaaatacagattttatcaaattgtgtttaaatgaaaatttagtaggagaaattacattacaaccaattaaaagatttaattttgatgctgcaataatttttttctgat

SEQ ID NO: 276860 - DNA, 124 bp, Unknown
  Bacterial polypeptide expressing nucleotide sequence isolated from the Sargasso Sea
tatgactgataaaaaactgattaagacactgcatgggcaaaccaataaggcgccgcctatatggtttatgcgtcaagctgggcgatatttaccagaatatcgagctaccagacaaaaagctggt

SEQ ID NO: 276861 - DNA, 742 bp, Unknown
  Bacterial polypeptide expressing nucleotide sequence isolated from the Sargasso Sea
aagaattttggcccagagttaggtcctattaatttagaaaacatttttaatattaatgaaaaagattttttaaataaattatatcctatttataaatcaataaaaaaagttaaagaaaatgaattaactaaaaataaagatgtaataggatttgttggagccccatggacattattagtttatatgattaataaacattcacccaaaaaagaattaataaaagatttttttaaagataaatttttaattaataaaatattaataattttagaaaaatttattaaaatccatattgaacatcaagtaaaaaatggagcaacaattatacagatatttgatagctgggcaggattgttagatgaaaaagatcttcctaattatgtttatacaccaacattaaatttagttaactatgttaaatctttaagtgtgcctgtaatttgttttcccagaggaattaaaaattataaaaaattttgtgaatttgttaaaccagatgtaattagtattgattatgatatagatccaatttctatatctaaggaaatacaaataccagtgcaaggcggccttaatccaaaaacattattagcagataaagaaagtttaaaaaaagaagctttaaaatatttagatatttttaaagaccatccatatatatttaatttagggcatggagttatgcctgaaaccaacccaatgcaagttgattatttggttaaacttgtaaaagattattaaa

SEQ ID NO: 276862 - DNA, 145 bp, Unknown
  Bacterial polypeptide expressing nucleotide sequence isolated from the Sargasso Sea
tatgagtctaattgctaagtgtataaaaaataaagataaaactataaaacctatttggttaatgaggcaggcaggaaggtatttgccagaatttagagatataagaataaaaaatccagattttattaaattatgtctcaataaa

SEQ ID NO: 276863 - DNA, 454 bp, Unknown
  Bacterial polypeptide expressing nucleotide sequence isolated from the Sargasso Sea
atgactccaatccaagactgtataaagaataagaatactaatttaaatcctatttggattatgagacaggctggaagataccttcctgagtttagagaaataagaattaaaaatcctgattttgttaaattatgtttagatgaaaatttatcttcagaaataacattacagccaattactagatttaattttgatgcagcaataattttttctgacattttaatgttacctcatggtttgggacaagttgttaaatttgaaaaaggattaggacctaaattaggtgaattagatttagataaattagaaaatattaatgaagacgaattttccagaaaattaaaccctgtttataaagctatatctaaaacgtctgctaatcctgttttaaaaaataaagatttaataggttttgtcggagcccccatggacaattttagtttatatgattaat

SEQ ID NO: 276864 - DNA, 630 bp, Unknown
  Bacterial polypeptide expressing nucleotide sequence isolated from the Sargasso Sea
acaaaaaagatttaatcggttttgtaggcggtccttggaccttattaatttatatgcttaataaaaattcacctaaaaagaaattaaaaaaaattttatctgataaacctttaattttagatatgattaaatacattagtgtttttttagagcagcatattaaatatcaagttaaaagtggagtggatataattcaaatatttgatagttgggcaggattagttgaagaaaatgatctagaagattttatttataatcccacaataaaattggtgaagtttataaaatcaatcaataaaccttgcatatgttttccaagaaatataaaaaactattatgaatacactaaaatagtcaaacccaatgttataagtattgactacaatgttaatccagaaaaaattgctgaaaaaataagtatacccgtccagggaggtatggaccctaaagttttgttaacaaataaaaagaatttagaaaaagccgcaaattactatttgaatgtttttaaaaatcacccttatatattcaatttaggacatggagtactcccgcaaacagacccagatatggtagactatttaattaaaataataaaaaaatttaatggaaaatcatccaaaaattaac

SEQ ID NO: 276865 - DNA, 312 bp, Unknown
  Bacterial polypeptide expressing nucleotide sequence isolated from the Sargasso Sea
tatgagtcccttaactaattgtattaaaaataaagatacgaaaactaatcctatatggttaatgagacaagctggaagatatttacctgaattcagagaaattagaaaacaaaatcaagactttataaaactttgtttaaatactgatttagcatctgaaattactctacaacctattaaaaggtttggatttgacggagctgtaatattctcagatattttaatgttaccatatggacttggtcaaaaagtagaattcgaaaagaattttggacctaggttaggaaaaaataaatttagaaaagataaaaa

SEQ ID NO: 276866 - DNA, 559 bp, Unknown
  Bacterial polypeptide expressing nucleotide sequence isolated from the Sargasso Sea
tatgatcaacaaacaatctcctaaattaaaattaaaaaatgatttttttaaagataatttcctaataaatagaattttaattattcttgaaaagtttttaaaagttcatattaaaaatcaaattgaaagtggagcacaaataattcaaatctttgatagttgggcaggtttattaaatgaaattgatttacctaattatgtttatattcccacatataatcttgttaattatgttaaatcactaaatgtgcctgtaatatgttttccaagaggtataaaaaattataaggactattgtgaagtagtaaagccagacgcaatctgtattgattacgaggttgatccaattaaaatcattaaagaaataaaaatacctgtccaaggtggattagatcctaaagttttattaacagataaagataatattaaaaaagaagcaacaaaatatttagaaatatttaaggatcatccgtatatatttaatttagggcatggtgttctcccagagacgaatcctgatatgatggattatctaattaaaacagtaaaagattactag

SEQ ID NO: 276867 - DNA, 279 bp, Unknown
  Bacterial polypeptide expressing nucleotide sequence isolated from the Sargasso Sea
aatttgtagaagaagtgaaaccagatgcaattaatattgatcaagatattgatcccctgtgggcaagagacaacttgaacaaaatatgtatacaagggggaatgaatcccaaccttctcctcaaaagccaggaagaagtattaaaagaaaccgagcggtacatagatattttcaagaacgacccctacatatttaatctcggacatggtattctaccacaaacaaatccaaacgttataaaaacaattgtagataaagtgaatttaataaaaagatgaa

SEQ ID NO: 276868 - DNA, 773 bp, Unknown
  Bacterial polypeptide expressing nucleotide sequence isolated from the Sargasso Sea
atctaaaaatccagattttattaaactatgtttaaatagtgatcttagctctgaaattactctacaacctattaagcgatttaatttagacgctgcaataattttttcagatattctaatggttccctttgggttaggacaggaagttaagtttataaaaggcaaaggaccaaaactatcagaatttaatttaaaaaattttatgaataataatagaaatgattttactaataaattaagtccagtttatgaagcaataaaaaaaactagaaaaaaattaaacaaagaaaaatctcttatttcctttataggggcgccatggacattgatagtttatatgatgggactgagacaagataaaaaaaatcttaatttaaataaaataaaaaatagtgattttgataaaaatttaatactagataaattaaatgagtatctttgttttcatatagagaaccaactaaatgctggcgctgatgtagtacaaatttttgattcatgggcaggattaataccaagcgaagagttagatagctattgttataaacctaatttaaaaatagtagaattttgtaaaaaaattggtctgcctgttatctgctttccaaaaggtattaataaaaaatacaaagaattcttagatatagtaaaaccagatggtttaaacatagattacgatatagatcctctctgggctaaagaaaatctaaaaaatgtttgtctacaaggagggatggatcctaaaattttgtttgaggatgaaaagaagatat

SEQ ID NO: 276869 - DNA, 602 bp, Unknown
  Bacterial polypeptide expressing nucleotide sequence isolated from the Sargasso Sea
tatgagtccgttaatagattgtattaaaaagaagaaaactagaaatagtcccatatggattatgagacaggcaggaagatatttacctgaattcagggaaattaggaaaaataatccagactttataaaactttgtttaaattccagactttcatcagaaatcacgctacaaccgttaaaaaggtttaacttagatgcagcaattattttctctgacattttaatgattccattgggtgtaaaacaggacgtaaaatttaaaaaaaattttggaccacaactcggagatataaatctcaaaacaattaaaaatgtttcagaagaagaattttcaaatattttatcccccgtttatgatgcaattaatattacgtcacaaaatgatattttaaaaaataaagatctatttggatttgtaggcgctccatggacgattttagtatatatgttaaataaaaaatcgccaaaaaaaaaacttaataataatttttttaataataaagaattgatttataatttaattaaaataataactaaattcacaaaacttcatttaaaaaaccagatagatagtggtgcaacaatagttcaaatatttgata

SEQ ID NO: 276870 - DNA, 325 bp, Unknown
  Bacterial polypeptide expressing nucleotide sequence isolated from the Sargasso Sea
aaatcactaaatgtacccgtgatatgtttcccaagagaaattagaaattataaagagtttgtagagatagttaaacccgatgcaataaatattgattataatgtagatcctttaatgatatgtaaaaatataaaaatccccgttcaagggggcttagatccaaaaattttattaacagataaagaaaatttaaaaaaagagactctaaagtatctagatatattcaaagatcatccttatgtttttaatcttggtcacgggatattgccagagactaacccagatatggttgaatatttaataaagacagtaaaagattattaaa

SEQ ID NO: 276871 - DNA, 644 bp, Unknown
  Bacterial polypeptide expressing nucleotide sequence isolated from the Sargasso Sea
agccatatcgaaaactacaataagtctaaaaggtaaaaataaatctttaatcggttttgtcggagcaccttggactatacttgtttacatgattaataaacagtctcccaagaaagaattatcaaagagtctaagtaatgagaaagttaaattagatttattaaaaattattcttaattacacaaaaatacacatcagagagcaaatcaaacatggtgcagatttaattcaaatttttgatagttgggctggattagcctcaaacggggatattaaaaaatatatttatgagagcaccacagaactagtagaatttacaaaatctttaaatgttcctgttatatgttttcctagggaaattaaaaattatagagaatatgtagatgttgtaagacctagcgttgtgaatattgattataacgttaatataaaagaaatattaaaacaaatttcaatacccattcaaggaggattggatccaaagtatctattagacgatactgatatactgagaagtgaaagtttaaaaatattaaatatgtttaaagatcacccatatatttttaatttaggtcatggtgtccttccacaaaccgatccaaatatggtagaatatctagttaatttagttaaagattattaaa

SEQ ID NO: 276872 - DNA, 926 bp, Unknown
  Bacterial polypeptide expressing nucleotide sequence isolated from the Sargasso Sea
  misc_feature (845)..(845): n is a, c, g, or t
  misc_feature (911)..(911): n is a, c, g, or t
aataattaacaaaaaaacagatataaatcctgtatggataatgagacaatcaggaaggtatttacctgaattcagagagatccgaaaaaagaatagtgattttatcaaactgtgtttaaatgaaaatttagcatctgaaataacattacaacctcttaaaagatttgatttagatgcagctataatattttctgatattcttatgttaccgtatgggttaaatcaaaaagtagaatttaaaaaaaattttgggccaattttaggtgattttaaacttgatgaggcatcgagattagatgaaattgattttgttcaaaaaatatatcctatttataaagctataaaatttattaacaacagcagccttactaacaacaaaagcacaatagggtttgttggtgcaccatggactttgttagtttatatgataaataaacagtcccctaaattaaatttaaaaaaagatttttttaaagataattttcttattaataggattttatctttattagacaaatttttaaaaattcatattaaaaatcaaattgataatggagctgaagtaattcaaatttttgatagttgggctggattactagatgaaaaagatcttccaaattatgtttatataccaactttagagttagttaattatacaaaatctttaaacgtaccagttatatgttttcctagaaatattaaaaattacaaaaatttttgtgaaatagtagatcctgatgtaatttgcattgactatgaaataaatcctaaacaagtgataaaagaaattaaaatcccgatacaaggtgggttagatccaaaaactttattaacagataaagaanatttaaaaaaagaagcaacaaaatatttagatattttcaaaaatcatccatatatttttaatttangtcatggcgttttac

SEQ ID NO: 276873 - DNA, 726 bp, Unknown
  Bacterial polypeptide expressing nucleotide sequence isolated from the Sargasso Sea
aaacaaaaatattaaaaaatatcaacatttcacaaaaacttgaacctttaaagacatcaatatcaattttaagaaaagaactaccacaatctacaagtttaattggttttgctggtgctccatggacactagcttgttatatgattgaaggccaaactagtaaagattttattaatacaagaaaagctctctgggattcaaataaatggttcatggaattaatagatatattatctatttatattgctgagaaacttgaaatgcaagcaaatgcaggagccgatgtattaatgctatttgattcttggtctcatatgatacccagtaatttttttaggaaatgtgccattgacccaacagccaatattattagcatgttaaagtcaaaaaatgttacaaaaccaataattggcctgccttttaaagcaggttcttctctaatagattactcatatgaaagcaatgttaattgtatagctctggactggactgttaatttaaattgggcaattaaaaatttaaattcttcaatcgccatccaaggaaatcttgatccggcttcactaattccatttaatagtggtcatttagaaaatattgttctttctattttgaatattatgaaagataataaatttatttttagcgttggccatggattaactccagattgtaaaattaaaaatgtcagaagagttattgacattgttagaaactataaatgaa

SEQ ID NO: 276874 - DNA, 295 bp, Unknown
  Bacterial polypeptide expressing nucleotide sequence isolated from the Sargasso Sea
atgaaacctttaaacaaaataattacaagtaaagatacttcaatcaatcctatatggattatgagacaagcaggaagatatcttccagaatttagagaaattagaaaagaaaaccctaattttgtcaatctttgtttaaatgataatttatcttcagaaataaccctgcaaccattaaaaagatttgatctagatgctgcaataatattttcagacattttaatgcttccatatggattaggtcaaaaagtagaatttgaaaagaattttgggccaaaattaggtgaattaaatc

SEQ ID NO: 276875 - DNA, 553 bp, Unknown
  Bacterial polypeptide expressing nucleotide sequence isolated from the Sargasso Sea
atgagacaagcaggaagatatcttccagaattcagagaaattagatctaaaaaccaagattttataaagctttgtttaaacagtgaattaagctccgaaataactttacaacctattaaaagattcgatctggactcagcaataattttttctgatattttaattgttccttatgcgcttggacaaaaaattaattttagaaaagatcacggacctaaacttgacgactttttactagagaatcttttagataataatgaagaaagttttacaaaaaaattagaacccgtttataaggcaattggaataacaagaaataaattagacaaaaaaaaatctttaatttcgtttgtcggggcaccatggacactgttaatttatatgataggtgtgaaaaataaagaaagagtaaacttagaaaaattaaataataaagatttggatattgataaaattttgggagaattaatcaaatacttatgtatccatatcaaaaaccaaataagcgctggagcagatgttgttcaaatatttgactcttgggctgggttag

SEQ ID NO: 276876 - DNA, 904 bp, Unknown
  Bacterial polypeptide expressing nucleotide sequence isolated from the Sargasso Sea
ttgcacgagaccttttgtagtgctttggagcaggaccgaggcttgacggaggcccaacgtataagttgtgagagcggtcctcgaacggcgcgggagccgcgcttcgtgcaagaatttacggtctcggaattgaagtacaagatgcctttttatgattcggaatttcctccttgtgatggccgaccgggcccagatggcttggatccgaccgatccgctgacggcggaaaattggactgttgggtgcgtgccgcgggaactgcgggcgggcgaggcgttctgcgggcgggtgcacccctaccctcccggctgcgggccgcacatggccgaatttattgcgacctctctagctagaagtgagaggcgccgtttccagatgacctcgccttttggctatgactactacctgtcgttggcgacgctgcgggatgctgataatgataccttggtcgatgcgtatctggctggcatggcaccggtggcgggcatgctcgcggagacgctgaggaatttaacggatttgaatgagacgctgcgagcgagtcgagaaacgcatttgcacgcgcgacgagctctcgcgcatgctagaggcgctcatagagtcgccaccgaagcgctgtacgatgcggaatacagactgaaaagtttgagggacgcggtgtcttctgcctttgtggaagcaggctcgttcgtctcgcagaaacggttaagtccagcggacgcggtccgggacgccgcaatcctgttcccgcccataccgcctacactgcgcggttctaggaaggctcttgaggaagcaattgatgataccaacagagccgacgagctgctgcacgcgggtgatttgctcttggacgacgcgcagatcctccacggccacgcgcggccgcaggcggaccacctcg

SEQ ID NO: 276877 - DNA, 439 bp, Unknown
  Bacterial polypeptide expressing nucleotide sequence isolated from the Sargasso Sea
atgaagcctctaaacaaagtaataattgagaaagacacttcattcaatcctatatggattatgagacaggcaggtaggtatttaccagaatttagagaaataagaaaagaaaatcctgattttattaatttgtgtttaaacgatgatctatcttcagaaataactctacaaccattaaaaagatttgatttagacgctgcaataatattttcagatatcttaatgcttccttatggtttgggtcaaaaaatagaatttgaaaaaaactttggacctaaattaggaaaattaaatttaaatgaaattgctaaaattgatgagattgattttgttgaaaaaatacatcgtgtatataaggcaattaaaaaaattaacctaaaccctattttaaaaacaaaaatactattggctttgtcggtgctccatggacattattagt

SEQ ID NO: 276878 - DNA, 367 bp, Unknown
  Bacterial polypeptide expressing nucleotide sequence isolated from the Sargasso Sea
atatatttatatacccactcttaatattgtagagtatgtaaaagaactaggtgttcctgttatttgttttcctagaggcataaaagattataaaaatttttgtgaaattgttaaacccgacgctgtaaatatagattacgatgttgatccaaagaaaatagttaatgaaatcaaaataccaatacaaggtggtcttgacccaaaaatattattaactgatcagaagactcttaaaatagaagttgaaaaatatcttggtatttttaaagatcatccatacatttttaatttaggtcacggaatacttcctgaaactaaaattgaaatggttaaagaattaatcaagattgtaagaaactttaaatga

SEQ ID NO: 276879 - DNA, 595 bp, Unknown
  Bacterial polypeptide expressing nucleotide sequence isolated from the Sargasso Sea
gttggggctccatggaccctcttactatacatgcttaacagaaaatctcccaaaggagggaaattttaatatttttccaaaagataaatatattaataatattttgattaagttagatgaattcttaaaaatacatattgaagctcaaattaaaagtggtgcatctataattcagatctttgacagttgggccggacttcttccagaaaaagatctaaattatttcgtttataaaccaattaaaagtttagttgattttattagacaaaaaaaaacaatctcaatttgttttccaagaaacatcaatagttataaaaaatttgtagacaatgtaaatcccgacataatcagtattgattataatgttgatcctttaattattagagatactgttgatattcccatacaagggggtcttgatccaaaaattttacttcaaaataaagaaattgtgagaaatgaagtgacaaaatatttaaaaactttcgataaaaaaagatatatattcaacttaggacatggagttttaccggaaacaaacccggatatcgttagatatttagtagacgaagttaggagttttaatggacagtaa

SEQ ID NO: 276880 - DNA, 280 bp, Unknown
  Bacterial polypeptide expressing nucleotide sequence isolated from the Sargasso Sea
tatgagtcccttaactaactgtataaaaaataaagacactaaaattaatcctatatggttaatgagacaagcaggaagatatttacctgaatttcgagaaataagaaaagaaaatacagattttataaaactttgtttaaatagcgatttagcatctgagataactcttcaacctataaagagatttgggtttgatggtgcagtcatattttctgatattttgatgttaccatacggacttggtcaaaaagtagaatttgaaaaaaattttgggcaaagc

SEQ ID NO: 276881 - DNA, 193 bp, Unknown
  Bacterial polypeptide expressing nucleotide sequence isolated from the Sargasso Sea
atgactctcataaaagattgtatatcaaaaggaaataccacaacagtacctatttggttgatgaggcaagctgggaggtatttgcctgaatttagaaaaataagaaaaaaaaacccaaattttattaatttatgtttaaataagaagctatcttccataattacattacagcctttaaaaagattgatttaga

SEQ ID NO: 276882 - DNA, 248 bp, Unknown
  Bacterial polypeptide expressing nucleotide sequence isolated from the Sargasso Sea
aatgaataaactatctgattgtataataaatagaaactcatcttatataccaatatggtttatgagacaggctggaagatatctgccagaattcagagaaataagaaagcaaaaccaaaattttattaagctttgtctcaatactaaacttgttaaagaaattactttacaaccaataaaaagatttgatttagacgcagctattattttttcagatatattaatgataccttacggtttagggcaga

SEQ ID NO: 276883 - DNA, 685 bp, Unknown
  Bacterial polypeptide expressing nucleotide sequence isolated from the Sargasso Sea
aatgtcgcttgataatcaccttctactaagagctatcagaaaagagccagtggaaagaactcctgtatggataatgagacaggctggcagatatttgccagagtatattaaactgaaaaatcaagctggtggttttatgaatctgataaaaaaccctgaacttgcttgtgaaattacattacaaccacttgaacgcttcaatcttgatagtgcaattatattctcagatattcttgtaatcactgaattgttcggcattgagttagaattcattgagaaagtaggaccagtattgagtaagactttaagaacagaagacgatctcaaaaaaataaatactgattttgactttgaaaaagttggttatgtttataaaacaactaagttacttaaaaacgaacttaataataaagtacctcttattggatttattggcagtccatggacagtagcaacttatataattgaaggaaactctacaaaaaatttttcaaaagttctcaatatactaaaaaatgataagatttttttgaaatcgttactagatatgataacaaaagcaagtattaatcatttagagaggcaaataaaatctggtgttgatgttacaatgatttttgatacatggggtggccttttagagggaggcttgtacgaggaattttcattgcagtacatcaatact

SEQ ID NO: 276884 - DNA, 508 bp, Unknown
  Bacterial polypeptide expressing nucleotide sequence isolated from the Sargasso Sea
ttaagtatagaaaaagtaatagaaaagttaataaaatttttatgtgttcatattaaaaaccaaatagattcaggcgctgatgttctacagatttttgactcttgggccggttcaataccaagtgatagtattaaaaaatattgctatttacctaatgcaaaaatagttgagttttgtaaaaaaaggaaaatcccatcaatttgctttccgaaaggacttaaagaaaaatatcgtgaatttactaatactgtaaaaccagatggtatcaacatagatccagaggttgatccttcctgggctaggaaagaacttctagacgttgtaatacagggaggtttagacccccaagtgctactcaagtctgacgaggaaatatttagagaagcatcaaaatatttatatacttttaaagacaaaccttatgtttttaatttaggtcacgggttacttcctgaaacagatcctgataaagtagataaactaattaaattttataggaactattaat

SEQ ID NO: 276885 - DNA, 615 bp, Unknown
  Bacterial polypeptide expressing nucleotide sequence isolated from the Sargasso Sea
cttgcctaataagaaattcataaatgctatagagagaaagccccaggcatgtcctccgatatggcttatgaggcaagctggacgatatcatgatcactaccaaagtttaaaaaaggatcatacttttgaagaactttgtaaaaagcccatccttgcagccgaaactgcgatgggacctattaacgaatttgactttgatgtcgcaattctattcagcgacatattattccctctcgaagcgcttggtatggatttatcctacaacccagggcctcaatttggtcttcacctaagcgaagacaatgctgaaagcttactgataaatcaaaaccctataagctttatggaatttcaaggtgaagcgatagagcgaactattgaaagattacccattgaaaagtctttaataggctttgttggtgggccttggactttaattgcctacgcatgcaatatcagtaaagattccagaaatatcaatttcaataattttcaaataggtcttctagataacgtgattcttccactgcttaaagagaacgtagaattacaattgaatgcgggagctgaggtggtaatgatctttgactcgactgcccatcaacttgccgaaga

SEQ ID NO: 276886 - DNA, 268 bp, Unknown
  Bacterial polypeptide expressing nucleotide sequence isolated from the Sargasso Sea
cttgcctaatactaaatttacaaattctcttaacaggactcctcaaaaaggtcctccggtttggttcatgaggcaagctgggaggtatcacgatcactatcaagctttgaaaaaagatcatactttcgaggagctttgtaaaaatccattacttgcagcagagacggctatggggcccattaatgaattcgattttgatgtagccatactctttagcgacatattatttccacttgaagctcttggtatggacctgtcctataaccca

SEQ ID NO: 276887 - DNA, 1054 bp, Unknown
  Bacterial polypeptide expressing nucleotide sequence isolated from the Sargasso Sea
aatgtcgcttgataatcaccttctactaagagctatcagaaaagagccagtggagagaactcctgtatggataatgagacaggccggtagatatttgccagagtatattaaactgaaaaatcaagctggtggttttatgaatcttataaaaaaccctgaacttgcttgtgaaattacattacaaccacttgaacgcttcaatcttgatagtgcaattatattctcagatattcttgtaatcactgaattgttcggcattgagttagaattcattgagaaagtaggaccagtattgagtaaaactttaagaacagaagacgatctaaaaaaaataaatactgattttgactttgaaaaggttgattatgtttataaaacagctaagttacttaaaaccgaacttaataataaagtacctcttattggatttattggcagtccatggacagtagcaacttatataattgaaggaaactctacaaaaaatttttcaaaagttctcaatatattaaaaaatgataagatttttttgaaatcgttgctagatacgataacaaaagcaagcattaatcatttagagaggcaaataaaatctggtgttgacgttacaatggtttttgatacatggggtggccttttagagggagacttgtacgaggaattttcattgcagtatatcaatgctattcattcttcacttaagtcttacaagaaacctatgatttactatataagaaatccatatacgaaattagtgaacatccaaaagcttgatgttgatgtagttggtatagattcttctattacaataagtgagtttaataaagggactggagacaaattctgtgttcaaggtaatttagatgtagaaatactaaaattgagcaataacaaaattgaagaagaagttattaaaattttgtcaaacattaacaatacaactggacatatattcaacctaggaacaggtattacaccagatatagacccagctaaattaaaaacattaattgatgtattggcaaaagtaagtcctagatatactattaaatag

SEQ ID NO: 276888 - DNA, 514 bp, Unknown
  Bacterial polypeptide expressing nucleotide sequence isolated from the Sargasso Sea
ggaaaatattaatataaatcaaattttaaataatctaattaaatttctatgtattcatattgataaccaaataaatgctggcgcagatgttgttcaaatatttgactcttgggcgggattggtgccagataaaaatattaaagattactgttttattccaaatgcgaaaatagttgaatattgtagaaaaaataaaatcgccaatgtttgttttcccaaggggattaaaaaaaaatatgaggagtttaatagaattgtagaaccggacggaataaacttagattacgacgtagaccctttatgggcaaaaaaaaaattaaaaaatgtagtattacaaggtgggttagatccaaaaaaattactaatatcggagaaagaaatgctggagggagcgacgaaatacattcaaatatttaaagatattccatatgtttttaatttgggccatggtttacttccagaaacagatcctgatagagtaaaaaaactaattgaattttataggaactactaa

SEQ ID NO: 276889 - DNA, 496 bp, Unknown
  Bacterial polypeptide expressing nucleotide sequence isolated from the Sargasso Sea
tatgacacctattagaaatacaataattaataaaaatacaactatttctcctatatggtttatgagacaggctggtagatacttacctgagtttagaagtattagaaaaaaaaataaaaattttattaaactttgtttagatagtgatctagcttcagaaataactttacaacctcttaatagatttaatttagatgcggcaataattttttcagacattttaatggtgccttacggtttaaatcaaaaggtagaatttaaaaaaaattttggtcctactttaggaaatttagatataaataatttatcaaaaatcagtgaaaatgattttaaaaaaaaattaaatcctatttataaattaattcaaaaaacaaaattaaataatattacaaaaaataaagatataattggttttatcggtgcaccatggactctagctctttatatgattaacaaagtatcaccgaaaaaaaatgaaattaataatgttttaaat

SEQ ID NO: 276890 - DNA, 982 bp, Unknown
  Bacterial polypeptide expressing nucleotide sequence isolated from the Sargasso Sea
acaaaaaattcctccaatttggttaatgagacaggcagggagatatcattctcattatcaaaatttaaaaaaatcttatacatttgaagagctttgtaaatcacctaagcttgcggcagagacggccatgggaccaattgaagactttgatttcgatgttgccatattattcagtgacattttatttccattagaatctttaggaatgaatttaaaatacgatccgggacctaaattttctgagttattaacctcagaaaattataaaaaactattcaatcagcaattacctattcaatcacttagctttcaagccgaagctatagaaagaactattgaaaaacttccaaacgataagtctatgattggttttataggcggaccatggacactagtttcttatgcgatgggaaaaaataaaaaaaatgcaattgatgtacttacagaatttgactggaatattattaatgatcaaataattcctttattgagagaaaatatttcaatccaaattaaagcaggggctgaagtagtaatgatttttgattcggccgctaatcaattgaacaaactagattttgccaaatatataaaaatagtttttgaagaactagtaatgaattttaataataaggttggttattatgcaaaagatggagttgattattctctgatagaaaaaataaagaaagaatccttaattcccttagcaggattaggaatagactctaatcactcattaggaaattatttttctaattcaagagaaggttttattcaaggaaattttgatgaaaaggttatgacccaaccacagaatattatggaaaaaaaattagataagtttattgaagaagcttcttcattttcttcagagcaaagagttggttgggtttgcggtttaggacacggagtgctgaagactacacctgaagataatgtaagactttttgtaaaaaaaattagagaatcattcgcatga

SEQ ID NO: 276891 - DNA, 574 bp, Unknown
  Bacterial polypeptide expressing nucleotide sequence isolated from the Sargasso Sea
atgagtatatttataaaaacgcttaggggtcaaagaacaaacccaacaccagtttggttaatgagacaagcggggaggcacttgcctgaatatataagtatcagaaaacagtttgcaaaccttatggatatgtttcttgatccctcgacaatacttgaagtttccctgcagcctgtaaacagatacggtatggatgcctgtattgtgttttcagatatcttaataatcccttttgcatcgggctcaagtgttagttttatagatgggcagggccctgtaataaagtttaatgagaacatgagttataatcttgaaaaaaccctacctcttgcgaaaggaataaaaaaaatcaaagaaagcactagagtccctctaataggttttgctggcggagcatggacgacactgttttattgtttatatgaaaagaatgaacgtcaaaatctaaaattcgaagatgttgtaaaaaaggcttcacaaatagacaatttaatcgagcaaatgacacttgcgattattcaacacgcagaaatgcaaattgatagtgggattgatgcctttcaaaatatttgag

SEQ ID NO: 276892 - DNA, 166 bp, Unknown
  Bacterial polypeptide expressing nucleotide sequence isolated from the Sargasso Sea
atgacaccaattaaaaactgtattgtaaataaagatacaactacaaacccaatatggttaatgagacaagccggaaggtacttgcctgaatttagagaaataagaaaagaaaatcaggattttataaaactatgtttaaattctgatctagcctctgaaatactct

SEQ ID NO: 276893 - DNA, 508 bp, Unknown
  Bacterial polypeptide expressing nucleotide sequence isolated from the Sargasso Sea
atgacaccgctacatgaagtaatagtaaataaaaaaacaaccactaatccgatatgggttatgagacaggctggtagatatttaccagagtttagggaaataagaaaagaaaattctgatttcataaaattatgtttgaatgaaaaattatcatctgaaattacacttcagccaattaaaagatttaatttggatgctgcaataattttttctgatattttaatgttgccttatggtttaaatcaaaaagtagaatttaaaaaaaattttggaccaattttagaagagcttcaattagatgtttccctgaaggtaagtgaagaaaatttcgtaaataaaattaaacctgtttataaagcaataaactatataagtaaaaacgaacttattgaaaacaaaaataccattggttttgtaggagcaccttggacattacttgtttacatgattaaccttcagtctcctaaaaaaggtttaaaagagaatttttcaaggacaatgatctaat

SEQ ID NO: 276894 - DNA, 304 bp, Unknown
  Bacterial polypeptide expressing nucleotide sequence isolated from the Sargasso Sea
atgtctccaatcgaagaagtaataataaataagaaaagtaacgttaatcctatttggataatgagacaggccgggagatatctgccagaatttagagaaattagaaaacaaaatcctgattttattaaattgtgccttaacgaaaaattatcaagtgaaatcactcttcagcctttaaaaagatttgatctagatgcggcaataatcttttctgatattttaatgttaccatatggtttaaatcaaagtgtggagtttaaaaaaaatatgggcccattacttggtgaaatagatttaaaaaaaa

SEQ ID NO: 276895 - DNA, 556 bp, Unknown
  Bacterial polypeptide expressing nucleotide sequence isolated from the Sargasso Sea
atgagtaatcttacagaaatcttaacaaaaaaaaatatttgtaaatctgtatggtttatgagacaagcaggtcggtatttacctgaatttaggaagatcagatctcaaaaccaaaattttattaatctttgcttaaacagcagtctaagttctgaaatcactttacaacctattaaaagatttgacctagacgctgcaataatattttcagatatattgatggtaccatatgctctaaatcaaaaagtgaaatttgaaaaagatcatggtccaatattgtcaaagtttgatattaatatttttttaaaaaatgataattctagttttattgaaaaactcaatcctatttatgaggcaattaaattaacaagagaaaatttagataaaagaaaatctttaatatcttttgtaggggctccatggactttattagtttatataataggcgctaaaaaaggtaataatgtcattgacttcaatattataaaaaaaaggaaaaaagaaattaaaattatcttagataaattgaacgattacctttgtttacatatgaaaa

SEQ ID NO: 276896 - DNA, 418 bp, Unknown
  Bacterial polypeptide expressing nucleotide sequence isolated from the Sargasso Sea
tatgtcaccaataagtaaagtaattattaataaagataccaatataactcctatctggataatgagacaggcaggtagatatttgcctgaatttagagaaataagaaaaaaaaatactgattttattaaattatgtttaaatgaaaaattatctgcagaaataactttacaaccattaaaaagatttaatttagatgcagctataattttttctgatattttgatgttaccttatgggttaaatcaaaaagtagaatttaaaaaaaattttggtcctttactaggtgaattaaatttagacgaagtatctaaattaaatgaatttgattttgttaaaaaaataaactctgtctataaagcaataagcctagttagtaaaaatgaaattataaaaaataaaagcgtaataggttttgta

SEQ ID NO: 276897 - DNA, 674 bp, Unknown
  Bacterial polypeptide expressing nucleotide sequence isolated from the Sargasso Sea
catgattcgcgcggcgagaggcgagcgcgtcgagcgcacgccggtgtggttgttcagacaggctgggagacacctgcccgagtacaacgagtacaaggcgacgacggggaaaaactttctcgaactcttggcggatcccaaggacgtggccgaggtgacgatgcaacccattcgacgatacaacttggacgcggcgatcctgttcagcgacatcttggtcatcgcggaggcgttgaacatcgaggtggagatgccgggcgggaagggaattttggtgccgaatccgttgaagggaccggaggacatgtccagagtgccggaatcgatcgatgtcaacgaaaagttgtcgcacgtgctcgcgagcgtcaaggagatcaacgaacagatcgaaaaggaggatttgggtgtgccgttgattggtttcagtgcggctccgtggacgctcatgtattacatggtgggcggctcgtcgcgtaaaaacaccgacgtgggcatgaaatggttgaatgagcatccgaaagaggctcaaaagttgttggacatcttgacggacgtcgtcattgattacctcgacgcgcaagtcaaggctggcgtgcacatggtgcaagttttcgaagccatgtgcgagcacatcaccgaggacagcttttacgagtttgccatgccgtgcatga

SEQ ID NO: 276898 - DNA, 478 bp, Unknown
  Bacterial polypeptide expressing nucleotide sequence isolated from the Sargasso Sea
tatgagtcccttaactaattgtataaaaaataaagacactaaaactaatcctatatggttaatgagacaagcaggaaggtatttacctgaatttcgagagataagaaaaaaaaatacagattttataaaactttgtttaaatagtgatttagcatctgaaattactcttcaacctataaagagatttggatttgatggtgcagttatattttccgatattttaatgttaccatacggtcttggtcaaaaagtagaatttaaaaaaaactttggaccaaagcttggagaaatagagttagataatattaaaaatgttgatgaaattaactttacagaaaaagtttataaagtttacaaagcaatttccaaaacttctcaggattctttaatgagtaataaagacatgataggatttgttggagctccatggactattctcgtatacatgattaatagatcatcgccaaaaaaaggtcta

SEQ ID NO: 276899 - DNA, 656 bp, Unknown
  Bacterial polypeptide expressing nucleotide sequence isolated from the Sargasso Sea
tttatcgaaggaattgcctagagaaactacgcttatagggtttgctggtgcgccttggactgtggcgacttatatggttgccggacgtggtacccctgatcaggcgccagcacatcttttaaaaaatgaaaatccagaattgtttgataatttaattaatcttcttgttgagggaacagtagaatatttatctcatcagataaatgcaggagctgaagttataaaaatatttgacagttgggctggatctttaaaaggaaatgattttgacaaatacgcacttgagccatgtaaaaagattatttcagcacttaaagttaagcatcctaacatcccgattatagcatttcccagacaagctggagaccgctatgttggatttgcaaagcaagctagagccgattgtgtggccttagatgaatctgtttctgcagaatggatcagtcaaaatattcaggtggatggctgtgttcaaggtaacttggcatcgtcccatatggtttctggaggtagcgccctaattgaggagacgaaaagaatagtgaaagcgctttccaatggtccacatatttttaatcttggtcatggaattacgcctgacgctgatcctcgaaatgttcagataatgatagatacaattcgcaacgctgagtaat

SEQ ID NO: 276900 - DNA, 1021 bp, Unknown
  Bacterial polypeptide expressing nucleotide sequence isolated from the Sargasso Sea
cttgcctaataaaaaattcataaatgctatagagagaaagccacaggcctgtcctcctatatggcttatgcgtcaagcaggcagatatcatgctcactaccaaaacttaaaaaaggatcacactttcgaggaactctgtaaaaaaccaaaacttgctgctgaaactgctatgggccctattaacgaatttgattttgacgttgcaattttatttagcgatatattatttccccttgaagcgctcggtatggacttatcttataacccagggcctcaatttggccttcacttaaacgaggataatgctgaaagcttaatcattaatcagaatcctataaactttatggaatttcaaggtgaagcaatagaaagaactatcgagagactgcccaatgaaaaatcattaataggctttgttggcggaccttggactttgatagcttatgcatgcaatatcagtaaagagttaagaaatattcatttgaatgattttcaaataggacttctagataacgtgattcttccgcttctaaaagaaaatgttgaattgcaattaaatgctggagccgaagttgtcatgatctttgattccactgctcatcagctcgcagaagaagatttaaatatttacctaggcaagacttttaatatgttagtcaaagaatttcctagtagggttggctactatgccaaagacggtgttaactacgaaactataattgcgaatcaagatgaacctcaaatactcctagctggaatgggtatagactctaatgttgatctaagagattactttaaaaaaacttcaaatggatttgtacaaggtaattttagtgagcacttcttaacccttccccatgatcaatttttgacaaaattagatattttcatagaacaaatgtcagtgctatcaccagaagaaagatcgggttgggtttgtggactaggccatggagttctgaaaacaacgcctcaggaaaatgtcaaagaatttgtacagagaattagggcatccttttaa

SEQ ID NO: 276901 - DNA, 649 bp, Unknown
  Bacterial polypeptide expressing nucleotide sequence isolated from the Sargasso Sea
ttgcctaatactaaattcttaaattctcttaacagaactcctcaaaaaggtcctccggtttggttcatgaggcaagctggaaggtatcatgaccactatcaagctttaaaaaaagatcatactttcgaggagctttgtaaaaatccattacttgcagcagagacagctatgggtcccattaatgaattcgattttgatgtagccatactctttagcgacatattatttccacttgaagcgcttggtatggacctgtcttataacccaggaccgcaatttggtctccacctaaatgaagagaatgctaatagccttcttgtgaatcagaatcctattagctttatgaattttcaaggcgaagcgatagaaagaaccattgaaagacttccgaaagaaaagtcattaataggctttgttggtggaccctggactttaatatcttatgcttgcaacataaataaagattctagacagataaatttaaataatttccaaataggtctattggataatgtgatactgccattgctgaaggaaaatataaaattgcaattgaatgctggagccgaagttgtgatgatctttgactctgccgcgcaccaactagatgaagaagatttcagtatctacctagacaagacctttaatt

SEQ ID NO: 276902 - DNA, 132 bp, Unknown
  Bacterial polypeptide expressing nucleotide sequence isolated from the Sargasso Sea
acgaaacatataaaatactatctaagtataaagattatccaggatatatatttaatcttggtcatgggattacaccagatataaatccagataatgtgaaatatcttacagatatagtgagggaattttagt

SEQ ID NO: 276903 - DNA, 685 bp, Unknown
  Bacterial polypeptide expressing nucleotide sequence isolated from the Sargasso Sea
atgaccccaattaaaaattgtattgtaaataaagatactaaaactaatcctatttggttaatgagacaagctggcaggtatttacctgagtttaaagaaataagaaaagtaaatcaagattttataaaactttgtcttaatgaaaaattatcttcagaaattacattacaaccaataaaaagatttgggtttgacgctgcaataatcttttctgatattctaatgcttccttatggattgggtcaaaaagtagaattcaaaaaaaactttggaccaaaccttggcgatctaaacataaataaattaaaaggtataagcgaagaagatttctcaaattcacttaatactgtctataaatcaattcatattacttcaaaaaatgaactaatgaaaaatagagatatgataggatttgttggagcaccatggacaatccttgtatatatgattaataaaatttcaccaaaaaaaaatttatcaagtaacttttatagcgatgattctctgataaataatttattagtaattatagaaaaatttctaaaaattcatataaaaaatcaagttgaagcaggagcaaatattattcaaatatttgatagttgggctggtttattagaatataagattccagaatatatttataatccaactttaagaattgttgaatataccaaagaattag

SEQ ID NO: 276904 - DNA, 462 bp, Unknown
  Bacterial polypeptide expressing nucleotide sequence isolated from the Sargasso Sea
taaaaactcatattaaaaaccaagtagatgctggagcgacaataattcaaatatttgatagttgggccggaatggtcaaatccgactttgataaatatttatacaatccaactttatccttagttaattatactaagagtttaggcgtcccagttatttgttttccaagaggtataacagactatagtcaattctgtaaaattgttaagccaagcatgattaatatagattatgacgtagatccaaaaaatttacttaaaaatgtagacatacccatacaaggtggattgcaccctgaggcgctactaacagataaagcgaatttaaaaaaagaagtaaataaatatttagaaatttttaaagatcatccttatgtatttaaccttggacatggcattcttccacaaacaaaaatagagatggttgaagaattagtaaaaatagttagagactttaaatgat

SEQ ID NO: 276905 - DNA, 607 bp, Unknown
  Bacterial polypeptide expressing nucleotide sequence isolated from the Sargasso Sea
ttgcatgaagtaataacaaataataaaacgactattaatcctgtctggataatgagacaagctgggagatatttgccagaatttaaagagataagaaaaaaaaatccagattttatcgagttgtgtctaaatcacaaattatcttcagaaataacactccaacctattaaaagatttgatcttgatgctgcaataatattttcagatattttgatgctaccttatggattaaatcaaaaagttgattttagaaaaaactttgggccagttcttggtaatttagatataggcacaatgtctaagatagatgaaatagattttgttgaaaaaatttatccagtttacaaagccatcaaatctgtaagctcagaaatgacttctaagaataaaaatacaattggtttcgttggagcaccctggaccctcctggtttatatgattaatcaacaatctcctaaaaaaaatgttaagaaaaatttttttgaagatgactttttaataaacagaattttattattaatcgaaaagtttcttaaaattcatattaaaaatcaaagtgaaaatggtgctgatgtcatacaaatctttgatagttgggcgggatgtt

SEQ ID NO: 276906 - DNA, 324 bp, Unknown
  Bacterial polypeptide expressing nucleotide sequence isolated from the Sargasso Sea
aatgggtcaagatttaccactactactttctgccgcattaggtaaaaaagtaaataggcctccagtatggatgatgaggcaagcaggaagatatatgaaaatctatagagatttaagggagcgttacccaagctttagagagaggtctgaaaatccagaactatcatatgagatttcaatgcagccttttcatgctttcaaaccggatggtgtgatccttttttcagatattctcacacctcttccagggatgggtataaattttgaaataatagaaagtaaaggtccaattattgaggacccaataaaaactcttaatcaggt

SEQ ID NO: 276907 - DNA, 364 bp, Unknown
  Bacterial polypeptide expressing nucleotide sequence isolated from the Sargasso Sea
atgggtcaagatttaccactactactttctgccgcactaggtaaaaaagtaaataggcctccagtatggatgatgaggcaagcaggaagatatatgaaaatctatagagatttaagggagcgctacccaagctttagagagagatcggagaatccagaactatcatatgagatttcaatgcaaccttttcatgctttcaaaccggatggcgtgatccttttttcagatattctcacccctcttccagggatgggaataaattttgaaataatagaaagtaaaggtccaattattgaggacccaataagaactcttaaccaggtagaaaaattaaaagaattaaatccaagtgagagtttaggtt

SEQ ID NO: 276908 - DNA, 916 bp, Unknown
  Bacterial polypeptide expressing nucleotide sequence isolated from the Sargasso Sea
aatgaggcaagctggtagatatttaccggaatttagaaaaataagaaaattaaatcctgattttataaaattatgtttaaatgcaaatttatctactgaaataacacttcaaccccttaaaagatttaatttagatgctgctataattttttcagatattttaatgttaccatatggattgaatcaaaaagtagaatttaaaaaaaattttggtccattattaggagatttaaatttagaaaccttttctaaattaaatgaaaaagattttactcaaaatattaaacaagtttataaagcaataaaattagtaagcaacaatcaattaacaaaagaaaaaaatacaataggctttatcggagctccctggacattattagtttatatgattaataaacgatctccaaaattaaaattaaaagataattttttcacaaatgatttattaataaatgaaacattaaaaattttagaaaaatttttaaaaatccatattaaaaaccaaataaatagtggtgctgacataattcaaatttttgatagttgggcgggtttactaaataaaaaaaacttgccgaaatatatttatgatccaacttccaaattagtagattatgtaaagtctttaaatgttcctgttatatgtttccctagaggtattaaagattataagaattattgtgagattgtaaaaccagacgctatttgtattgattatgatgtagatcctttgcgaataagaaaagaagttcaaataccagttcaaggtggattagatcctaaaattttattaacagataaagaaacactgaaaaaagaaactcaaaaatatttagatatatttaaagatcatccatatatatttaatttaggtcatggtgttttaccggaaacagatccaaatatgatggattat

SEQ ID NO: 276909 - DNA, 418 bp, Unknown
  Bacterial polypeptide expressing nucleotide sequence isolated from the Sargasso Sea
tatacaaatctttgatagttgggctggattgttggaggaaagagattatccaaattatatttatacaccaactttaaacctagttgattacgtaaaatcactaaatgtacccgtcatatgtttcccaagggaaattagaaattataaagagtttgcagagatagttaaacccgatgcaataaatattgattataacgttgatcccttgatgattagcaaaaatattaaaattccggtacagggcggtttagatccaaaaattttgttaacagataaagaaaatttaaaaaaagagactctaaagtatctagatatattcaaagatcatccgtatatctttaatcttggccacgggatactgccagagactaatccagatatggttgaatttttaataaagacagtaaaagattattaa

SEQ ID NO: 276910 - DNA, 682 bp, Unknown
  Bacterial polypeptide expressing nucleotide sequence isolated from the Sargasso Sea
atgagtcctattaaagaatgtataaaaaaaaagaaagtaaatattagtcctatatggattatgagacaggccggaagatatttgcctgagtttcgaaaaataaggaagaaaaatccagattttataaaattatgtttaaataaaagtattgttccagaaataacacttcaacctttacaaagatttgattttgatgcagcaataattttttctgacatattaatgttaccgtatggtatgggtcaaagcgtaaaatttactaagggttttggtccctctttaaatagaactagtattgagttaatgaaatcagtaaataaagatgattttattaaaaaactaaatccagtttataaatctttaaatatagtttcaaaaaaaaaaatattgaaaaataaagacttaattggatttataggagcaccctggacaatctttgtatatatgcaaaatagacaatcaccaaaaaaaactaaagcgttaaataattttccttttaaaaaaacttttacgcaagcagaagaaattaaagctattaaaattataactagttttttaaaattacacattaaaaagcaagtagaaaacggagcaactcttattcaaatttttgatagttgggcagaattactaaaaactgaaaaagctagagaaaaatttatatataagccaaataaagagc

SEQ ID NO: 276911 - DNA, 406 bp, Unknown
  Bacterial polypeptide expressing nucleotide sequence isolated from the Sargasso Sea
attaagtccccaagactatgatatttttgctggcccttatcaaaaaaaagttgttgacatcgttaaagaagaattcccagatactccgataatattgtatatatcgggcagtgctggggtattagaaagaatggctaaaactggtgtagatataatttcactagactggactgtagatattgaggaggcctgcaaacgaatccctacaggaattggaatacaaggaaatgttgatccaggtatattatttggaaataaagactcaataaaagagagaatcgataatactttcaataaagtgaaagagagaaaatatattcttaatttaggtcatggaattttaccaggcacaccagaagaaaatgctcaaacattttttgaacatggaaaaaaactaacttattaa

SEQ ID NO: 276912 - DNA, 925 bp, Unknown
  Bacterial polypeptide expressing nucleotide sequence isolated from the Sargasso Sea
agaaaacttaaagaaagtcataatttttatgacatgatgaaagatcctgaattatcttcggaggtaactttattaccgattaatgacttaggggttgatagtgctattcttttctcagacatactagttattccagatgctttaggtctagatctaatatttaccaaaaatggtccaaaatttacaaatgctttaaacagtgaaagctttaatcatttaaactttgatcctcagaaattagaatatatatatacaaacattgaaaaaactgttgaaaataaaaacacaacacctttaattggtttttgcggtggtcctttaacaacctttatgttcatgtttagaggagatgaaactcaaaaaagctttaaagatgctatcaagtttttctacaataatagaaaagaaagcatgaaaattattgaacaaataacgaaagcttctatagtttatgtagagaatcaaattaaaagtgggattcagtgttttcagctctttgaaacatattgtggaagtataccatatgatctttataaagaatgcatattaccatattcaaaaaaaatacttaatagcgcaaaagaattaggttgccctacaatattttttccaaaagacttttcattaggactaaaatatatcaataaagatatatgtgattttgtaagtatagactggaccatgaaattagaagatgccagaaatttagttgataaaaacgtaggattacagggtaatatggatcctcgaattttctactatgatgagttaaaaattgaaagttatttagaatcactttcaagttttggtaaaaataatcatgattggatttttaatctaggtcatggttttttacctgatattgattataaaaaagttcaaaacgttgtgaattggataaaaaataaaaactggaatagataaa

SEQ ID NO: 276913 - DNA, 935 bp, Unknown
  Bacterial polypeptide expressing nucleotide sequence isolated from the Sargasso Sea
gtttcgaaaaataagacagaaaaatccagattttataaaattatgtttaaataaaagtattgttccagagataacactacaacccttaaaaagatttgattttgatgcagcaataattttttctgacatattaatgttaccatatggtttgggccaaaatgttaaatttacaaaaggttttggtccatcattagataaaaccagtattgagttaatgaagtcagtaaataaagatgattttattaaaaaactaaatccagtctataaatctttaaatatagtttcaaaaaacaaaatattgaaaaataaagacttaattggatttataggagcgccctggacaatattagtatatatgcaaaatagacaatcaccaaaaaaaactaaagcgttagataattttctctttaaaaaaacttttacacgagcagaagaagttaaagctattaaaattataactagttttttaaaattacacattaaaaagcaagtagaaaacggagcaaccgtgattcaaatctttgatagttgggcagaattactaagaactgaaaaggctagagagaaatttatatataatccaaataaagagcttgttgattatactaaaaaacttggggttccagtaatatgttttccaagaggagtagaaaattataaaagattctgcaatattgtaaaacccgatgcagtaagtattgattacaatgttagcccaaaaaaaataattaaacaaattaacatacctatacagggtggactagaccccaaagttttattaggagataaaaataaaataaaaaaagaggcccttaaatatctagagatttttaaagatcacccatatatatttaatttaggtcacggaattctgcctgaaacagatccagaaaaagttaaatacttagttaatttagttaaagattttaaatgaa

SEQ ID NO: 276914 - DNA, 532 bp, Unknown
  Bacterial polypeptide expressing nucleotide sequence isolated from the Sargasso Sea
cttgaaaaaagatttttttaaagatgaatttttaataaatagaattttattaattatagaaaaatttttaaaagtgcatattaaaaaccaaatcgataatggtgcaaatataatccaaatatttgatagttgggcaggactattagaagaaaaagagttacctaactatgtttattctccaactttaaatttagtaaattatgtaaaatctttaaatgtgcctgtgatatgttttcctagagaaataaaaaattataaagaattttgtgatattgtaaaacctgatgctgttagtattgattataaagttgatccaaaaaatatacttagagacataaaaatacctattcaaggtggcttagatcctaaaattctattaacagacaaagaaacattaaaaaaagaagcatctaagtatttggaaatttttcgtgatcatccttatatatttaatcttggtcatggtattttgcccgaaacaaaccctgaaatggttgaaaacttaattaaaattataaaagattttaaatga

SEQ ID NO: 276915 - DNA, 856 bp, Unknown
  Bacterial polypeptide expressing nucleotide sequence isolated from the Sargasso Sea
tattaatttatgtttaaatgaagatttgtcttcagaaataactctacaacctttaaaaagatttgatttcgacgcagcaataattttttcagatattttaatgcttccatatggattaggtcaaaaagtagaatttgaaaaaaactttggtccaagattgggtgaattaaatttaaatgaaattgctaagattgatgaaatcgattttgtagaaaaaatacatcgcgtatatagagcaataaaaaaagttagctctgacattaacctaaaaaataaaaatactattggttttattggtgctccatggacattactagtttacatgattaaccagcagtctcctaagaagaatttgaaaaaagatttttttaaagatgattttttaataaacagaattttattaattattgaaaaatttttaaaggtgcatattaaacatcaaattgataatggcgcaaatataatacaaatatttgatagttgggcaggcctattagaagaaaaggatttacccaactatgtttatgccccaactttaaatttagtaaactatgtaaaatctttaaatgttccagtgatatgcttccctagagaaataaaaaattataaagaattttgtgatattgttaaacctgacgctgtaagtattgattataacgttgatcctaaaaaaatacttagaaatattaaaatacctattcaaggcggtttagaccctaaaattttattaacagacaaagaaactttgaaaaaggaaacctctaattatttggaaatctttaaagatcatccatatatatttaatcttggacatggtattttgcctgaaaccaatctagatatggtagaaaattta

SEQ ID NO: 276916 - DNA, 784 bp, Unknown
  Bacterial polypeptide expressing nucleotide sequence isolated from the Sargasso Sea
attttggcattcaagcagggtgaaggcccacagcttgaggccatcagagatgcttcaggtctcggcaagctttcgcttgaaggcattcatgacacccttggcccgatctatgagacggtttccaaactttcaagcgccattccgtccagtacagcgctgatcggctttgccggtgcgccctggaccgttgcgacctacatggtggaggggaaaggctccaaggactttccgaatatccgccgctttgcctatggcgatccagaaggctttgccaaactgatcgacatcgtggttgaggccaccacgcaatatttgctgaaacaggttgaggcaggtgccgaatgcattcagctgtttgaaacctggggcggggttttgtcggaaaccggctttaatcgctgggtgatcgagccgaccaaacagattgttgcaaatttgcgcgccgtgcacccggatctgccgattatcggcttcccgcggggctgtggcttacatctggtggatttcaaacagaaaaccggcgtgaccgcggttggccttgatagtggggtcaagctcgactgggtggcggaaaatcttcagaaactggggccggtgcaaggcaatcttgacccgatgctgttgatcacgggcggtgatccgatgtttgatgaagccaaacgcatccttgatacgctgggcaaagggccgttcatctttaaccttggccatggcattacgccggaaacgccgcctgagcatgttggccagctggtcgacttcattcggaattacaaaggataaa

SEQ ID NO: 276917 - DNA, 754 bp, Unknown
  Bacterial polypeptide expressing nucleotide sequence isolated from the Sargasso Sea
gttgaatttaaaaaaaattttagggccaatattaggaaatttagatatcacttcggtatctaagatagatgagatagattttgttcaaaaaattcacccagtttataaagctataaaatctgtaagttcagaaatgaatttgaagaataaaaatacaataggttttgtcggagcaccatggacgcttcttgtttacatgattaaccaacagtctcccaagaaaaatgttaaaaaagatttttttgaagaccagtatttaataaatagaattttattaattattgaaaaatttttaaaaattcatattagaaatcaaattgagaatggtgcaaacgtgatacaaatatttgatagttgggctggattattagaagaaagagattatcctaactacatttatacacccaccttgaacttagtagattatgtaaaatcattgggtgttcctgtaatttgttttccgagggagattaaaaactataaagagttttgcgaaatagttaaaccagatgtagtgaatattgattataatgttgatcctttaatgataagtaaaaatattaaaatcccagttcaaggaggattggatccaaaaattttattaacggatcaagaaaatctcaaaaaagaaattttaaaatatttagacatatttaaagatcatccatatatttttaatttgggccatggtattttgcccgaaacagacccagtaatggttgaacacttaataaatactgtaagggactattag

SEQ ID NO: 276918 - DNA, 478 bp, Unknown
  Bacterial polypeptide expressing nucleotide sequence isolated from the Sargasso Sea
ttgattacaaaatttttaaagattcatatcaaaaatcaaataaaagcaggcgctaaaattatacaaatatttgatagctgggcaggacttgtggatcaaaatttagataagtatatatatagccctacattagatattgttgaatatgtaaaaaatctaggagtacccgtaatatgttttcctagaggcattaaaaactacaaaatttattgtgaaatagtcaaacctgatatggttaatattgattataatgttgacccaaaaaaaattattaaagagattaaaatacctattcaaggcggtctagatccgaatgttctattaactgacaaggaaaaccttaagaagcatgctgaaaaatacttgaatatatttaaagatcatccgtatgtgtttaacttaggacatggaattttacctgaaacaaaaattgaattagtagaagagctaattagtattgtaagaaattataaatgaa

SEQ ID NO: 276919 - DNA, 448 bp, Unknown
  Bacterial polypeptide expressing nucleotide sequence isolated from the Sargasso Sea
attaaagctggggcaaatataattcaaatttttgactcctgggctgggctgataccagaaaaagatttgcacgatttttgttacaatccaaataaaaaattagttaagttttgtaaagataaaaaaatcccagttatttgttttcccaaaggtattaataaaaaatatgtagaatttgaaaaaattgtaaaacctacatgcttgagcttggatcacgatgtagatcctgaatggatttcaaaaaatattaaaaatacatgtttccaaggtggaatgaaccctaaagcattactaaaagacgagaaaaaaatattttatgaggttgataaatatttaaatatatttcaagatactccctatatatttaatttaggccatggtattttgccggaaacaaatccagaaattttaacaaaagtaattaaaagagtaaaaaattttaaatgaa

SEQ ID NO: 276920 - DNA, 968 bp, Unknown
  Bacterial polypeptide expressing nucleotide sequence isolated from the Sargasso Sea
attggtgtcagatactttaataaatcaagtttttaaaaataaaaactcttctattccaatttggtttttacggcaggctggaaggcatatacccgaatattttcaaattagagaaaatgaaaaaaattttatcaatttttgtttaaatgaagatttaattattagaagtacaaccttaccattgaagtattatgatcttgatgctgctattatattttctgatatcttaatgataccctgggctatggatagaaatgtcaaatttactaaaaattttggtccttctttaaaacctatgatccctaatgaaactaaatttcttaaaaatatatctttaagttctaaacttgaacctcttaaaaattcaataagttttctacgagataatttaccaaaatctttaagtttaattggttttgctggggctccttggactttagcttgttatatgatcgaaggaacaggaagtaaagatttcattaacactaggaaagctctttggggttcatttaagtggtttatggaactaattgaaactcttattatttatgttgctgataaattagaaatgcaagctagagctggggctgacattttaatgatttttgactcttggtctcatatgatacctaataatttttttgatgattgtgctattaatccaacggctaaaatagtagatattttaaggtctagaaaaatttttgtacctgtaattggatttccatttaaagcaggtgcatctattgtaaaatattcttttgaaagtaaagttgattgtattgcattggattggtctgtaaatttaagttgggcaataaagaatcttaacaaagaagttgctttacaaggtaatcttgacccagcttctctcattccgtctgaaagtgattacttaagagagaatgtattaactattttagataaaatgaaagatagaaagtttatatttaatgttggtcacggtt

SEQ ID NO: 276921 - DNA, 391 bp, Unknown
  Bacterial polypeptide expressing nucleotide sequence isolated from the Sargasso Sea
tatgactccaatacaggaatgtatcaaaaataaaaatactagaataacacctatatggttaatgagacaagctggcaggtaccttcctgagtttagggaaattagatctaaaaatccagattttatcaagttatgtctaaatgaaaacttatcttcaaaaattactctacaaccaattgatagatttaaatttgatgctgctataattttttcagatattttaatgttaccatatggcctgggacaagaagttaagtttgagaaaaattttggacctaaattaggagatttaaacatagatacaatcttaaaaacaaatgaagatgactttagtaataaattaaattctatttataaattaatatctaaagtatctaaagatcctaattta

SEQ ID NO: 276922 - DNA, 844 bp, Unknown
  Bacterial polypeptide expressing nucleotide sequence isolated from the Sargasso Sea
cccgatttttataaaattatgtcttaacgaaaaattatcaagtgagatcactttacaacccttgaaaagattcgatttggatgcagcaataattttttctgatatcttaatgctaccatatggtttaaatcaaattgttgaatttaaaaaaaacgtaggcccattacttggtaacttagacctaaaagaaatttcgaatattgaagaagttgaatttgtagaaaaactatctcccgtttatgaattaattaaattagttagtaattctcaatttactaaaaataaaactaccataggatttgttggagcaccgtggactttattagtttatatgataaataaaaaatcaccaaaattaagcttgaatgaaaatttttttgaagacaaatttttaattgataaaattctaaaaattttagataaatttttgaaaatacacattaaaaaccagatagataatggtgcccagataattcaaatttttgatagttgggctggtctattaaaagaaaaagacctaccttactacatttatgaccccactctaagcttggttaattacattaaatctttaaatgtgcctgttatctgttttccaagaggtattagaaattacaaagattattgtgaaattattaaaccagacacaatttgtattgattatgaggtagacccagtaaaaattaataaagaaataaacattcctgttcaaggtggaatggacccaaaggttttgctttctaataaagaaaacttaaaaaaagaaacaacgaaatatttagatatatttaaagatcatccatacatatttaacttagggcatggcgtcttccagaaacggacc

SEQ ID NO: 276923 - DNA, 796 bp, Unknown
  Bacterial polypeptide expressing nucleotide sequence isolated from the Sargasso Sea
tatgtgcaaggagccaatgacttgcgcagaattggtacttcaaccaattgaacgatatgaactcgatgcttctattttattttcagatatcttgacagtaccagatgcatttaacctgggcttatattttgctgaaggagagggtcctcgattccaaaatccgatatcctcaaaaaaacaagttgatgatttaaatgaatttgatgttaatgatttgagttatgtttttaagacggttgaggaaactaaaaaaattcttcctcataatttgcccctaattggattttgtggaagtccatggaccttagtggcatattccatagagggcagtggctcaaaaacttttcagaagaccaaaaaattcatgatagaaaatgaagcctctatttttagattactagaggtttatacaaatgcttgtttcgaatatctaaaacaacaagttatgtccggtgtaaatgcgctgcagatatttgattcatgggccgaccttttggatgcgagtcaattgagaaaattttcctttagttatactcaaaaattaattgatttgttaaagcatgatgaaacaacaaaagacatacccttaattgtctttgagaaaagtccagtcttacctttttcagataatccatttaaaaacgttcaatgtttaagcttgcatttcacagaaaatcttaaaaaatctagggataagctactaaataagtatgccattcaaggcaatcttgatcctagaatacttttacttggtgagaatgagattattaccgaagtaagaaaaatatgtaacata

SEQ ID NO: 276924 - DNA, 423 bp, Unknown
  Bacterial polypeptide expressing nucleotide sequence isolated from the Sargasso Sea
aggtaattcaaatttttgatagttgggcaggattactagatgataaaattcctgaatatatctatatacccacattaaatattgtagaatacgttaaacaattaggtgtgcccgtaatttgttttccaagaggtattaaagattataaaaatttctgtgaaatagttaaaccggatgcagtaaatatagattatgatgttgatccagaaaaaatagtaaaagaaataaaaattcccatccaagggggacttgaccctaaaatattattgactgataaagaaattcttaaaaaagaagtagaaaaatatcttcatatttttaaggatcatccatacatatttaatttaggtcatggaattctaccagaaactaaaattgaaatggttgaagacttgattaaaatcgtacgaaactttaaatgag

SEQ ID NO: 276925 - DNA, 895 bp, Unknown
  Bacterial polypeptide expressing nucleotide sequence isolated from the Sargasso Sea
tatagtcaataacaatacagatataaatccaatttggctaatgagacaagctggtagatacttaccagagtttagaaaaattagaaaaaaaaataaagactttattgaattgtgtctgaatagaaaaatagttccagaaataactttacaaccacttaaaagatttaattttgatgctgctattattttttctgatattttaatgattccatatgcattaggtcaaaatgttactttttcaaaaggcttgggacccaaacttggtgatattaatttaagtaaaatttcaaaaattaaagcagataaattttcaaatattctcaaaccagtctatgagtccctagaaataatttcaaaagataaattacttaaaaataaagatttaattggttttgttggagctccatggactttattagtttatatgattaataaaatttcaccaaaaaaaagtttaaaaaaaaattttttcgatgataaaaaaacaatacacaaacttatcaaaattattaataattttataaaaatacacatatcaaaccaaattaattatggcgcaacaatcatacaaatatttgatagctgggctggtttagttaaagaagaagatatagaaaattatatttataaaccaactaaagaaattgtagattatactaaaaaattaaacgtacctgttatatgttttccaaggggaattaaaaattataaaaaatttgttaattttgttaatccaaatgctataagcattgattatgatattgatccaaaacaaattttgaaagatattaaaataccagtgcaaggaggtcctaatcctaaaattttacttggagataaaaatcaattaaaaaaagaagcttctaaatatcttaaaatatttaaagatcatcct

SEQ ID NO: 276926 - DNA, 832 bp, Unknown
  Bacterial polypeptide expressing nucleotide sequence isolated from the Sargasso Sea
tataaaaagatttaatttagatgctgcaataattttttctgatattttaatggttccatttggtttaaatcagacggttgaatttaaaaaaaattatggacccatccttggtgattttgttctagataaaaccttgaaagttgaagagaacgattttgaatgttctttgtcacccgtttataaagctatgaaaaatatatcaaaagacaaaagcttaggtaataaagatattataggttttgttggggccccttggactttattggtttatattcttaataaaagttctccaaaaaatggcattgatcataaaattatagaagatgaaaaatatataaatcaaattttaaacatattaataaagtttttaaaattacacattaaaaatcaaattaacaatggagcaacagtaattcagatatttgatagttgggctggactggttgaagataaaggattggaaaatttagtatattcaccaactcatgaattaaccaaatatataaaaacttttaatgttccagttatatgttttccaagaaatataaaaaattatagaaattttgttgctaatgtcaaacctgatgcggttaatatagattatagcgttaatccagatgaaatagctgataagattgatattccgattcaaggaggaatggatccaaaaatacttttaactgatagggaaaatttaaagaaggaagcagaaaaatacttaaatgtttttaaagatcacccttacatatttaatcttggacatggtattttgccagaaacaaaaattgaaatggtagaagaattaataaaaatagttagagattttaaataa

SEQ ID NO: 276927 - DNA, 743 bp, Unknown
  Bacterial polypeptide expressing nucleotide sequence isolated from the Sargasso Sea
tatgaacagacttatagattgtataactcataaaaaatcttctggtattccaatatggtttatgcgacaagctggtagatatttacctgaatttcaagagataagaaaaaaaaatcaaaatttcataaaactttgtttaaacagtaatttagtaaaagatataaccatacagcctttaaaaagatttgatattgatgcagcaataatattttctgatattttaattataccttatggcttgggccaagaagttgaatttaaaaaaggttttgggccaatattaggaaacataaatttagaaaaaattattaatacaaatcccaaagattttatcaataaaataaaccctgtttacgatggattaaaaaaagttaaagaagaaataaaagaaaaagctttaatcgggtttgttggagccccatggaccttgcttctttatatgattaatggaaagtcccccaaaaaaaattttaattttaacgaaattaataaagataaatctttagttattaaattaatgaaaaaaatagaagaaacaatttgtttacatgttgaaaaacaaatagaggcaggagcaaatgtaattcaaatttttgactcttgggcaggtttgttgccagaaagagaactacaaaactattgttatatgccaactcgcagaattgtagatcatataaaatctctaaatataccagtgatttgttttcctaaaggcataggaaaaaattatattaattttaatt

SEQ ID NO: 276928 - DNA, 754 bp, Unknown
  Bacterial polypeptide expressing nucleotide sequence isolated from the Sargasso Sea
aatgaagaatgtattgaaagactgcatagaagggaaaaagacctcttatacacctatttggtttatgaggcaggctggtagatatttacctgaatttagagaaataagaaaaaaaaatccagattttataaaactatgtttaaaccccgatcttgttaatgaaattacattacaaccattaaaaagatttgatctagatgcagctataattttttctgatattttaatgattccttatggtttaggacagaaagtagaatttaaaaaaggaattggaccaattttaggagaaataaatttagataaaataattaatacagatccagctaattttattaaaaaattattacccgtttataaggggattgaaaaagttaaaaataatttaaaagaaaaagagcttataggatttgttggagcaccttggactttgttgttgtatatgttgaacaaaggatcaccaaaaaataattttgattttaataaaattattaaagacaaatcagtaattaatatattattaaataaaatagaagaaatggtatgtttacacattgataaacagattgaagctggagctagtgtaatacaaatttttgactcttgggctggacttttacccaaaaaagaactttcaaaatattgttatacaccaattacaaaagttgttgagcatacaaaaagaaaaaaaataccagtaatttgtttccccaaaggaattggagaaaactatgttgatttttgttcagtagta

SEQ ID NO: 276929 - DNA, 646 bp, Unknown
  Bacterial polypeptide expressing nucleotide sequence isolated from the Sargasso Sea
tatgagtcccttagcaaactgtattaaaaatcaagacactaaatccaatcctatatggttaatgagacaagcgggaagataccttccagaatttagagaaatcagaaaagaaaatcaagactttataaaactttgcttgaacagtgatttagcgtccgaaattactctgcaacctattagaaggttcggatttgatggagctgtaatattttcagatattctaatgttaccttatggacttggtcaaaaagtagaatttgaaaaaaattttggacctaaattaggaaatatagatttagaaataataaaaaatgttgatgaaataagttttactgaaaaaatttataaagtttataaagcaatcgaaaaaacttccaaagaccctttaatgagcaatagggatatgattggatttgttggagctccatggacaattttagtttatatgatcaataaatcttctcctaaaaagggtttatctaatgaattttttagagatgattttttaattaatagacttttaggaataatagagaaattcttaaaagttcatataaaaaatcaaattgaggccggagcccaagttattcaaatttttgacagctgggctggattattggaggataaaattccagaatatatctaa

SEQ ID NO: 276930 - DNA, 496 bp, Unknown
  Bacterial polypeptide expressing nucleotide sequence isolated from the Sargasso Sea
atgggttcaataaagaattgtataataaataaagatacaaaatacaaaccaatttggttaatgagacaggcaggtagatacttacctgagtttagagaaattagaaagaataatacagatttcataaagttgtgtttaaataaagagttatcaactgagataacaattcaacctttgaaaaggtttaattttgatgctgcgataattttttcagatatcttgatgctaccatatggattgggtcagaatgttacttttcagaaaaacttaggaccaagattgggcaatgtagaattagataaaatactacaaatttctgatgaatcttttacaaagtctttagagaatgtttacgctctagtaaataatgtttcaaaacatcaaatattaaaaaataaagatttaataggatttgctggagcaccatggactatacttctatatatgttaaataaaatatcacctaaaaaaggactgtccgaaaagtttttatgaa

SEQ ID NO: 276931 - DNA, 634 bp, Unknown
  Bacterial polypeptide expressing nucleotide sequence isolated from the Sargasso Sea
atgacacctataaaaaattgtattttaaataaagacacaagttttaatcctatttggctcatgaggcaggcaggaaggtatctccctgaatttagagaaatcagaaaaaaaaatacaaattttataaagctatgtttaaactcgaaactctcagaggaaataacgctacaaccaattgatagatttggtttcgatgctgctattattttttctgatattcttatgttaccttatggacttggacaaaaagtggaatttaaaaaaaattttggtcctagccttggaaaaattaatttagataaatttgttaaattaaatgatgaatttttgaccaataaactatcaccaatatatgacttattaaaaaatttaagaaggaacgaaaaaattaaaaataaagacttaataggcttcgtaggagctccttggacattgttagtttatatgataaacaaagtttcaccgaaaaatggtctctccaatactttttttgaagacgcttttttaataaacaatttattgagtattttagataaatttatcaaaatacatatcaaaaaccaagtaaatgcaggagcaacaataatacaaatatttgatagttgggcaggtttaataaaaactggattttgat

SEQ ID NO: 276932 - DNA, 370 bp, Unknown
  Bacterial polypeptide expressing nucleotide sequence isolated from the Sargasso Sea
atgagtcctttaaaggaatgtattttaaataaaaatactaagataaaacctatatggttaatgagacaagccggtagatatttacctgaatttagagaaattagagctaaaaatcctgattttataaaattatgtttaaattcaacattatcatctgaaataactcttcaacctttaagaagatttgattttgatgcgggaataattttttcagatatattaatgttgccatatggtttagggcaagatgtaaagtttaaaaaaaattttgggcctgaacttggagaaatagaaattgaaagtttttctaatcaaactgaagaaaattttattaaaaaattaaatcctatatataatttattaaatatta

SEQ ID NO: 276933 - DNA, 563 bp, Unknown
  Bacterial polypeptide expressing nucleotide sequence isolated from the Sargasso Sea
aaaagactttgagaagacattaggctttttagaatcaaatcaaaaagatgttcatgatttattaacaaaatatacagacgcatgctttttgtacttaagaaagcaagtgcagtcaggcgctgatgtgattcagatatttgattcttgggcaaatctactaacaaaggaagatcttattgaattttcttttaattatataaattctttgatctcagctttaaagcttgatcctataacaaaaaatattccagttattatttttgctcgaaatccaaaatgtaacatcgaagaattaattaatacttctgctgactgcataagtctgttctggtcaatgaatgatttgaattttgaggtagctaaaaataaggtcgctatccagggaaaccttgatccaaaaattctacttgaaagtgatgaaacaataaaaagggagacctataaaattcttgaaagatttaaagaatatcctggttatatttttaatttgggacatggaataactccagatattagtcccgataaaattaaatatttaacaaatattgtcagagagtattagt

SEQ ID NO: 276934 - DNA, 823 bp, Unknown
  Bacterial polypeptide expressing nucleotide sequence isolated from the Sargasso Sea
aagatcaatttagatgcagcaataatattttccgatattttgatggttccatatggtctaggtcaaaaagttgagtttaaaaaagattttggtcctatgttaggagatcttgatttaaattacgtagataaattaaatgaagaaatgtttacttcaaaattatccccagtttataaaatgataaataatctttctacaaatgaagttttaaataaaaaagatttatttgggttcgtgggtgctccatggacattactaatttatattttaaataaaaaatctcctaaaaaacaaattgaaaataaagacatagaaaatcaaaaaattgttaataatttattaaaaataatagacaaatatttaaaaattcatattaaaaatcagattaaagctggcgcttctgtaatacaaatatttgatagttgggctggaatagtagaagataaaaatttaaaaaattatatatacgagcccaccaaaagccttgttgattttacaaaatctttgagtgttccggttatttgttttccaagaaacattaaaaattataaagaatatgtagattttgttttaccggacggtgtaaatattgattataccattgatccagaagtaatagctaaagatataaatataaccattcaaggaggtattaagccagagcttttattgaatgataagcaaatgttaaaaaatgaaattttaaaatatcatgaaatttttaaagaccattcatacatttttaatttaggacatggagttcttcccgaaacaaatcctgaaatagtaagatattttgtagaaacaataaaagagctttaaa

SEQ ID NO: 276935 - DNA, 713 bp, Unknown
  Bacterial polypeptide expressing nucleotide sequence isolated from the Sargasso Sea
tatgagttccataagcaactgtattaaaaataaagatactgaatcaaatcctatatggttaatgagacaagcaggaagatatcttccagagtttcgagatattagaaaaaaaaaccaagattttatcaaactttgtctaaatagtgatttggcatcagaaattactcttcaacccattaaaaggtttggatttgatggagctgtaatattttcagatattttaattttgccctatggacttggtcaaaatgtaaaatttgaaaaaaattttggacctaaattaggaaacatagatctagaaaaaataaaaaacatcgatgaagtaaattttactgaaaaagtttataaagtctataaagcaatctcaaaaacatcaaaagaccccttaatgaagaaaagggatatgattggatttgttggagctccgtggaccattcttgtttatatgattaataaatcttctcctaaaaaaggtttatcaaatgaattttttaaagatgattttttaattaatagacttctaggaattatagaaaaatttttaaaacttcatataaaaaatcaaattgaagcaggagctcaagtcattcaaattttcgatagttgggctggattattggaagataaaattccagaatatatttatataccaacccttaacattgttgaatatataaaaaaactaggagttcctgttatttgttttcccagag

SEQ ID NO: 276936 - DNA, 523 bp, Unknown
  Bacterial polypeptide expressing nucleotide sequence isolated from the Sargasso Sea
catgactgaattgaatcgaaattttatagctgcacttaacagagagactcagaaaactccacctatatggataatgaggcaggctggcagatatcttcctgagtacaggaaggtaagatcaaatttcaaaaattttctagatatgtgtaagactcctgaaatttgctgcgagttagttttacagcctatagaaagatatgattttgatgctgcaattattttttcagacatcttaacgattcctgatgctctcggtctaggagtttcttttgtagagggaaaaggtccagtcttttcgaatcctattaaaagacctgaagatatttctaacatgataaattttaatccagacagtcttgactatgtatacaagactgctgaactaacaagaaaagagttaaatccgagcattccattaattggatttgctggaagtccatggactcttgcagcatattcaattgagggaagtagttccaaaaactttaatctaacaaaatcatttatagaaaatcattctgat

SEQ ID NO: 276937 - DNA, 490 bp, Unknown
  Bacterial polypeptide expressing nucleotide sequence isolated from the Sargasso Sea
tagactattaggaattattgaaaaatttttaaaaattcatattaaaaatcaagttgatgctggggctaaagtaattcaaatctttgatagttgggcaggattattgaatgataaaattcctgaatacatttatatacccacatttaatattgtagaatatgttaaacaattaggtgtacctgtaatttgttttccaagaggtattaaagactacaaaaatttctgtgaaatagttaagccagatgcaataaatatagattatgatgttgacccggagaaaatagtaaaagaaataaaaattcctatacagggcggacttgatcctaaaatattattaactaataaagaaattttaaaaaaagaagtggaaaaatatcttcatatttttaaggatcatccgtacatatttaatttaggacatggaatcttaccagaaactaaaattgaaatggtcgaagatttgattaaaatcgtaagaaactttaaatga

SEQ ID NO: 276938 - DNA, 537 bp, Unknown
  Bacterial polypeptide expressing nucleotide sequence isolated from the Sargasso Sea
gatgagcgacactctgcccctgcttctgcgtgcagcccgcggtgaagcggtggagcgtcctccggtctggatgatgcgtcaggctgggcgttacatgaagatctaccgggatctgcgcgacaagtaccccagctttcgcgaacgctccgaaaaccctgatctctcctatgagatctccatgcaaccgtttcacgccttcaagccggacggcgtgatcctgttctccgacatcctcacgccgctgccggggatgggcatcgatttcgacatcatcgaaagcaagggtccgcagatcggtgatccgatccgctccatggatcaggtgaacgccctgcgcccgctgaaccccagcgagtcgatgccatttgttggtgaggtgctgggacgtctacgcgaaagcgtcggcaacgaggccgctgtgcttggttttgtcggcgcaccctggaccttggcggcctacgtcgtggaaggcaaaagcagcaagaactacgcggtgatcaaggccatggccttccgcgaaccagagctgctgcacaa

SEQ ID NO: 276939 - DNA, 757 bp, Unknown
  Bacterial polypeptide expressing nucleotide sequence isolated from the Sargasso Sea
tatgacaccaatacatcgagtaataaaaaacaaaacaacatctatatcacctatatggtttatgagacaggctggaagatatttgcccgaatttagagaaataagaaaatcaaatccaaattttattaatctctgtttaaatgaaaaaattactccggaaattacgctacaaccattaaatagatttaacttagatgcagcaataatattctctgatattctaatggtcccacatggtcttaatcaaaaggttgagtttaaaaagaattatgggccatcactaggtgacctagaacttaaaaagattttagagataaaagaagacgaatttaacaacaaactcctacctgtctataaggcaatagacattgtttcaaagaacgaaattacaaaaaataaagatgttataggatttgtgggtgccccatggactatacttgtttatatgttgaacaaaaaatctccaaaattagaaattgatataaataaaactatatttgataaattcaaagaagctgaactggaaatgattttaaaaactgtcattaaatttttaaaaattcacataaaaaaccaaatagataatggagcttcattaatacagatttttgatagttgggcaggcttactaaatgaaaaactttatagtaagtatatttttaatccaactatagaattagtagagtttacaaaaagtttaaacgtgccagtaatatgttttccgcgcaatatcaaagattataaaagattttgcgaa

SEQ ID NO: 276940 - DNA, 881 bp, Unknown
  Bacterial polypeptide expressing nucleotide sequence isolated from the Sargasso Sea
tccagattttataaaattatgtcttaatgaaaaactatcaagtgagattactcttcagcctttaaaaagatttgacttagatgcagcaataattttttctgatattttaatgttaccatatggtttaaatcaaaatgtcgagtttaaaaaaaatgtgggtccattacttggtgaactagatttaagaaaaatttcaaaagttgaagaaattaactttgttgaaaaactttctcctgtttacgaattaattaaattagtaagtaattctcaatttacaaataataaaaccactataggctttgttggagcaccatggaccttattagtgtatatgatgaataaaaagtcaccaaaactaaatttaaatgaaaatttttttgaggataaatttttaatcgataaagttcttaaaatcttagacaaatttttaaaaatacacattaagaatcagattgataacggtgctcagataattcaaattttcgatagttgggctggcctgctaaaagaaaaagatttacgttattatatttatgaccctacattgagtttggttaactatataaaatctttaaatgtgcctgttatttgttttccaagaggcattaaaaattataaagatttttgtgaaattgttaaaccagacacaatatgtattgattatgagattgacccaataaaaattagtaaagaaataaaaattcctgtgcaaggtggaatggatccaaagtttttgctttctaataaagaaagcctgaaaaaggaggcaacaaaatatctagatatatttaaagatcacccatatatatttaatttgggacacggtgttttaccagagacagaccctaatatgatggattatctagtaaaaactgtgaaag

SEQ ID NO: 276941 - DNA, 502 bp, Unknown
  Bacterial polypeptide expressing nucleotide sequence isolated from the Sargasso Sea
tttttaatagatgaattgttagaaattatagaaaagtttttaaaaattcatatcaaaaatcaagttcaatctggtgctggagttattcaaatttttgatagctgggccggcttgttagaagataaattgcccgaatatatttatagacctacttcaaatgttgttgaatatgtaaaacagcttggagtccctgttatttgttttcctagaggaattaaaaattataaatatttttgtgaaatggttaaacctgatgcagtaaatattgattatgacgttaatcctaagaaaatagttaaagatataaatattcctattcaaggaggaatggacccaaaaatactattaaccgaccaaagaacgcttaaaaacgaagttgaaaagtacctcagtatttttaaagatcatccatatatatttaatttgggtcacggaatactccctgaaacgaggatagaaatggttgaagatttaataaaaattgtaagaaactttaaatgat

SEQ ID NO: 276942 - DNA, 547 bp, Unknown
  Bacterial polypeptide expressing nucleotide sequence isolated from the Sargasso Sea
aatgtcaccaaaaaaatctctctctaatgaaatttttaatgataaattatttataaaaaaattgttatcagcaatagagaaattccttaaaattcatattgaaaatcaaataaaagcaggtgcaacaataatacaaatttttgatagttgggcaggattactagaagataatatctctaaatttatttatgaaccaacatttaatcttgtgaatcacgttaaaaaattaaatgtgccagttatttgctttcccagaggaataaaagattataaaaacttttgtgaagctgttaaacctgacatggtaaacattgattataatattgatcctaaaaaaatagttaatgaaatacaaatacctgtgcaaggaggattagatccaaaagtattattatctgacaaggaaaacttacatatagaagtaataaaatatttacaaatttttaaagaccacccttacgtatttaatctcgggcatggtattttaccagaaacaaaaattgatatggttgaagaactagtaaaaacagttagagattttaaataa

SEQ ID NO: 276943 - DNA, 850 bp, Unknown
  Bacterial polypeptide expressing nucleotide sequence isolated from the Sargasso Sea
tctgaaattactcttcaaccaataaaaaggtttgattttgatggtgcggttatattttcagatattttaatgttgccttatgggctcggccagaaagtagaatttaaaaaaaattttggccctaaacttggtgaattagaattagagaaaattaaaaatatagatgagataaattttacagagaaagtttataaagtttataaagctatctcaaaaacatctaaagatcctttaatggttaacaaagacttgatcggttttgtaggagcaccttggactatccttgtttatatgatcaataaatcttccccaaaaaaaggtttatcagaatttttttttaaagatgattttctaataaatagattattgagtattatagaaaaatttttaaaacttcatataaaaaatcaagttgatgctggcgccaaggtaatacaaatttttgacagttgggcaggattattaaatgataaaatcccagagtatatttatatacctacattaaacatagttgattatgtaaaacagctaggaatacctgttatttgctttcctagaggtatcaaagattataaaaatttctgtgatattgttaagcctgatgctgtaaatatagattatagtgttgatcctaaaagtatagtaaatgaaattaaaataccagttcaaggaggtcttgaccctaaaattttattaacagatcaagatactcttaaaagagaggtcgagaaataccttaatatttttaaagaccatccatatatatttaacttaggacatggcatacttcctgaaactaaaattgaaatggttgaagatctaattaagatcgtaagaaactttaaatgac

SEQ ID NO: 276944 - DNA, 784 bp, Unknown
  Bacterial polypeptide expressing nucleotide sequence isolated from the Sargasso Sea
ccaattaaaagatttggatttgatggtgcaatcattttttctgacatactgatgttgccatatggaattggacagaaagtagagtttgagaaaaattttggacctaaacttggggatttaaatttagaagaattagaaagcattaatgaagttgaatttactaaaaaactccaacctgtttataaagcaattaatataacttctagagacaaattattagaaaaaagagatatgataggatttgtgggagctccatggacaatactagtttatatgattaatagaatgtcaccaaaaaaaaatctttctgaaaatttttttgatgatgaaattttaataaataaattattaaatattattgaaaagttccttaaaattcatattaaaaatcaagttgatgctggtgcaaatataatacagatatttgatagttgggctggtttattagataataaattattagattatatttataaaccaacttacaatattgttaactttacaaaaaaattgggagttcctgtaatttgttttccaagaggaataaaaaattataaagaattttgtgaatatgtaaaaccagatatggttaatattgattatgatgtagatccaaaaaaaattaaaaatgaattagatttacctattcaaggaggattagatcctaagattttgttgacagataaagaaaaaattaaaaatgaagtagaaaaatatcttacaatttttaaagatcatccttatgtatttaatttaggtcatggaattttacctgaaactaaaa

SEQ ID NO: 276945 - DNA, 793 bp, Unknown
  Bacterial polypeptide expressing nucleotide sequence isolated from the Sargasso Sea
tccgacattttgatgttaccatatggtcttggtcaaaaggtagaatttgaaaaaaactttggaccaaggcttggagaaatagaattagataatattaaaaatgttgatgagattaattttacagaaaaagtttataaagtttacaaagcaatttccaaaacttcacaggatcctttaatggataataaagacatgataggttttgttggagccccatggactattcttgtttacatgattaatagatcatcaccaaaaaaaggtctgacagacgaattttttgaagatgaatttttaattaacagactattaggaataattgaaaaattcttaaaagttcatataaaaaatcaggttgaggccggggctaaagtaattcaaatttttgatagttgggcaggattactaaatgataaaattcctgaatacatttatattcctacattaaatattgtaaaatatattaaacaattaggtgtgcctgtaatttgttttccaagaggcattaaagactacaaaaatttctgtgaaatagttaaaccagatgcaataaatatagactatgatgttgatccagagaaaatagtaaaagaaataaaaattcctatccaaggcgggcttgaccctaaaatattattgactgataaagaaattcttaaaaaagaagtggaaaaatatcttcatatttttaaggatcatccatatatatttaatttaggacatggaattttgccagaaactaaaattgaaatggttgaaaacttaattaaaatagtaagaaactttaaatgat

SEQ ID NO: 276946 - DNA, 885 bp, Unknown
  Bacterial polypeptide expressing nucleotide sequence isolated from the Sargasso Sea
attcaattccagtttggtttatgagacaagcaggaagatatttaccagagtttagaaaaataagatctaagaatacagattttattaatctttgtttaaatcctgagctatctaaagaaataacactacaaccattaaaaagatttaatattgatgcagcaataattttttctgatattttgttgataccttatgcattaaatcaaagtgttgaatttaaaaaaaattttggaccaaatcttggatttttaaattttgaagagctattaaagattacagaagaagaaattataaaaaaacttaacccgatttatgaattaattaaactaacttctaaggacgaaattattaaaaataaagatcttataggttttgtaggcgccacatggactatattggtatacatgctgaataggcaatcaccaaaaataataaacaaagaagttctagagcacccaaatggcaaaactctcatgagaaaaataatagatacacaaaaacttcatataaaaaaacaagttgaaagtggggcatcaattatccaaatatttgatagttgggctggccttttaaatgaagataaattagaggaatatatatataaacctacatttgagattgttgagtttactaaaaatctaggtgttaaaactatttgttttccaagatctattaaatcatacaagaagtattgtgatatagttaaacctgatgcgattagtatagattatgaagttaacccaactaagattgcagaaaaaattgatatcccaatacaaggtggaatggatccaaaatacctattgttagaagaaaaagacatgctaaaaaatgcgaaaaaatatttagaaatttttagtaatcataagtatatttcaacttagg

SEQ ID NO: 276947 - DNA, 467 bp, Unknown
  Bacterial polypeptide expressing nucleotide sequence isolated from the Sargasso Sea
aatgttaaaaaacgatctgttaattcgtgcacttaaaggggagattgtctcaagaccccctgtttggatgatgagacaagctggaaggtatcttccagactttatgaaattaaaaaataagtacgatttttttacaaggtgccaaactcctgagcttgcaactgaaattacattaatgccgataaaacaattaggtcctgatgctgctattttgtttagtgatattttagttgttcttcaagcaatgaatgttaatgttgaaatgaaagatggaatcggtccttggatttctaaacccattacaaacaaaagagatttatcaaatatcatagttcctaatattcaagaaaagcttggatacgttttagaagctatcaaaatgactcaaaaagaattaaataatagtgtaccattaattggttttgctggatctccatggacacttctttgctatgctgttcaaggac

SEQ ID NO: 276948 - DNA, 331 bp, Unknown
  Bacterial polypeptide expressing nucleotide sequence isolated from the Sargasso Sea
aaaaaatgttccaaaaattgttttcgctaaaggcggcggactctggctcgattccctagctaaattggaaataaatggattaggcttagattggtcaattgatttagcaagggcaagggctattgttggagaaaagatagccttacaaggcaatcttgatcctgctgtcatgctaactgaccctcaaacagttaagttagaagccagaaaagttctaaaaagtatcgggaatagaagaggatttatcttcaacctgggccacggaatcacaccggaagttgaccctaggcatgtagaagtgttagtagacacagttcattcctatcgctaa

SEQ ID NO: 276949 - DNA, 396 bp, Unknown
  Bacterial polypeptide expressing nucleotide sequence isolated from the Sargasso Sea
aatgaaacccatagaacaagttataattgaaaataatacaagtattaaacccgtttggttcatgagacaggcgggtcgctatttgccagaatttagaaatataagattaaaaaataaagattttattaaactttgtttaaatgcggatcttgttccagaaattactcttcagcctttaaaaaggtttgagatagatgctgcaataatattttctgatatattaatgattccttatgctattggtcaaccggtgagatttcagaaagactttggaccaattctaggaagtttagacaatgttaaaaataatgatttaactgaacataaatttatcaacaaacttaatcctgtatataaagccatatcgaaaactacaataagtctaaaaggtaaaaa

SEQ ID NO: 276950 - DNA, 647 bp, Unknown
  Bacterial polypeptide expressing nucleotide sequence isolated from the Sargasso Sea
agcaatttccaaaacttcccaggaccctttaatgggtaataaagacatgataggttttgttggagctccatggactatccttgtatatatgattaatagatcatcaccaaaaaaaggtcttacaagtgaattctttaaagatgatttcttaataaatagactattacaaatcattgaaaaatttttaaaagttcatataaaaaatcaagttgaggctggggctaaagtaattcaaatttttgatagttgggcaggattattagatgataaaattcctgaatatatttatatacccacattaaatattgtagaatatgttaaacaattaggcatacctgtaatttgttttccaagaggtattaaaaattacaaaaatttctgcgaaatagttaaaccagatgcagttaatatagactatgatgttgatccagaaaaaataataaaagaaataaaaattcccattcaggggggacttgaccctaaaatattattaactgataaagaaattcttaaaaaagaagtggaaaaatatcttcatatttttaaggatcatccatacatatttaatttaggacatggcattctaccagaaactaaaattgaaatggttgaagacttgattaaaattgtaagagactttaaatgac

SEQ ID NO: 276951 - DNA, 310 bp, Unknown
  Bacterial polypeptide expressing nucleotide sequence isolated from the Sargasso Sea
tatgacaccattaaacaaagtaatagttaataaggatacaagtataaatcctatatggataatgagacaagcaggcagatatttgcctgaattcagagaaattagatctaaaaatactgattttataaaactgtgtttaaacccgactttatctactgaaattactcttcagccattgagaagatttgactttgacgctgccattattttttcagatatattaatgttaccatatggtttaaagcaaaaagtagaatttaaaaaaaattttggtcctatattaggcaaacttaatttagaagaaatttct

SEQ ID NO: 276952 - DNA, 721 bp, Unknown
  Bacterial polypeptide expressing nucleotide sequence isolated from the Sargasso Sea
ttcatagctgcacttaatagagagattcagaaaactccgcctatatggataatgagacaggctggcaggtatcttcctgagtataggaaggtaagatcaaatttcaaaaattttcttgatatgtgtaagactcctgaaatttgctgcgagttagttttacagcctatagaaagatatgattttgatgctgcaattattttttcagacatcctaacgattcctgatgctctcggtctaggtgtttcttttgtagaggggaaaggtccagtcttttcgaatcctattaaaagaccagaagatatttctaacatgataaattttaatccagacagtcttgactatgtatacaagaccgctgaacttacaagaaaagagttaaatccgagcattccactaattggatttgctggaagtccatggactcttgcagcatattcaattgagggcagtagttccaaaaactttgatctaacaaaatcatttatagaaagtcattctgatgatgctcataaatttcttgagatcctggctgatgcttgttttgaatatctaaaaaggcaaattgttagcggagtagatgcaattcagatatttgactcttgggctaatcttctttcagaagaacaatatctggaatactctttgaaatatataaagaaaattctcaaaaaattgtcagaagatcctgaaacaaatcaaactccaacaatagtttttgcta

SEQ ID NO: 276953 - DNA, 295 bp, Unknown
  Bacterial polypeptide expressing nucleotide sequence isolated from the Sargasso Sea
tttggtgatggcctaatacaatatgcagaagaaagtggagttaacgccattggaattgatcatggtgttgatccgagatgggcagataaaaatttaccgaaaaatatggcaattcaggggaatttagatcctttgtctttgatatcagggggcgaggcgatgctgcgtaatatcgattatattcttgaatcatttcacgataggccacacattttcaatctgggccacggtattactccaccaacacccgtggaaaatgtccaaataatgattaatcacatacgggctagttagg

SEQ ID NO: 276954 - DNA, 424 bp, Unknown
  Bacterial polypeptide expressing nucleotide sequence isolated from the Sargasso Sea
aatataatacagatatttgatagttgggctggattattaaatgataaattatcagattatatttataaaccaacttacaatcttgttgaatacacaaaaaaattaggagtacctgtaatttgttttccgagaggaataaaaaactataaagaattttgtaaaattgtaaaaccagacatggttaatattgattatgatgtagacccaaaaaaaattgcaagtgaaatagagttgcctatacaaggaggactagaccctaagattttgttaaccgataaagataaagttaaaaatgaagttgaaaaatatcttacaatttttaaagatcatccatatgtatttaatttagggcatggaattttacctgaaaccaaaattgagttagtgcagcagttaattaatattgtaaaaaatttcaaatgaa

SEQ ID NO: 276955 - DNA, 497 bp, Unknown
  Bacterial polypeptide expressing nucleotide sequence isolated from the Sargasso Sea
aatgggtcaagatttaccactactactttctgccgcattaggtaaaaaagtaaataggcctccagtttggatgatgaggcaagcaggaagatatatgaaaatctatagagatttgagggaacgttacccaagctttagagagaggtctgagaatccagaactatcatatgagatttcaatgcagccttttcatgctttcaaaccggatggtgtgatccttttttcagatattctcacacctctcccagggatgggcataaattttgaaataatagaaagtaaaggtccaataatagaagacccaataagaactcttaaccaaatagaaaatttaaaagaattaaatccaagtgagagtttagcttttgttgggcaagttcttgcttcactaaaaaaagatgtaaaaaatgaggcaactgttttaggttttgttggcgcaccttggactcttgctgcatatgtagttgaaggtaaaagcagtaaaaattattctttaa

SEQ ID NO: 276956 - DNA, 868 bp, Unknown
  Bacterial polypeptide expressing nucleotide sequence isolated from the Sargasso Sea
gaaaggaaaaatagctcttacacacctatttggtttatgagacaagctggtaggtatttgcctgaatttagagaaataagaaaaaaaaatactgattttattaaattatgtttaaatcctgatttggttaacgaaataactattcaacctttaaaaaggtttgatcttgatgctgcaataattttttcagatattttaatgataccatttggtttgggacaaaaagtagaatttaagaaaggaattggtccaatattaggagaaattaatttagaaaatataataaatacagatccagcagaatttgttaaaaaattatcacctgtttataaaggaatagaaaaagttaaagatagtttgaaagaaaaagaattaataggatttgctggtgcaccttggactttattattatacatgcttaataaaggatcaccaaaaaatagtttcgaatttagtaaaattaataaagataaatctttagttgagaagctgctaaaaaaaatagaagaaatgatatgtttgcatgtcgataaacaaatagaagccggagctaacataatacaaatttttgattcttgggctggtcttttgcccccaaaagagctttcaaagttttgtactattccaaattcgaaaattgtggaacatattaaatctaaaaaaattcctgtaatttgttttccaaaaggaattggtgaaaattatattgatttttgtaaagaggttaagccagactgtataagtatagattatgaagttgatcctcgatggataaaagaaaaaataaatggcgttcctgttcaaggaggtttagatcctaaaatattacttactgataaagaaaatattaaaaaaaatacagataagt

SEQ ID NO: 276957 - DNA, 616 bp, Unknown
  Bacterial polypeptide expressing nucleotide sequence isolated from the Sargasso Sea
catgagacaagcaggtagatatttacctgaatttagagaaattagatcaagaaatacagattttataaaattatgtttaaactcgattttgtctacagaaattactctccaaccattgaaaagatttaattttgatgcagcaattattttttcggacatattaatgttaccatatggtttaaatcaaactgtagaatttaaaaaagattttggtcctattttaggcaagctcgatttatatgaaatatctaaagtgaaagaaattgattttgttggaagagttaaaaaaatttatgaagctataaaaaatgtaagtaataatgatattttaaaaaataaaaatactattggatttgttggcgcaccttggaccattttggtttatatgataaatcaacaatctccaaaaaaatacttaaaaaaagatttttttgagaataaagatttaataaataatgttttattaattattgaaaaatttttaaaaatccacatcaaaaaccaagtagatagtggtgcaaatgtaattcaaatattcgatagttgggcaggattgttagaagaaaaagatttaccatactacatatataacccaacactaaatttggtaaaattg

SEQ ID NO: 276958 - DNA, 769 bp, Unknown
  Bacterial polypeptide expressing nucleotide sequence isolated from the Sargasso Sea
gggctcggtcaaaaagttgagtttaagaaaaattttggtcctaacctcgaagacttggatatcgataaattactagaaattgatgaagagaaatttacaaaaaatttatctccaatatatcaacttctaaccaatttaaaaaaaagtgaagatctgaaaaataaagacataattggttttgtaggagctccttggactttgcttgtatacatgataaataaagtctctccaaaaaatggtttgataactaattttttttctgacataggtttaattaatcactctttaaaaatcttggataaatttattaaaatccatattaaaaaccaagtaaatgctggagctaccataatccaaatatttgacagctggtctggattgatcaaatccgattttgataaattattatacaatccaactctatctttagttaattatactaaaagcttaggggtcccagtgatttgttttccaagaggtataacagactacagtcaattttgtaaaattgttaaaccaagcatgattaacatagattatgacgttgacccaaaaaatttactaaaaaatatagatatacccatacaaggtggattgcacccggggacactactaacagataaagtgcaattaaaaaaagaagtaaacaaatatttagagatttttaaagatcacccttatgtatttaaccttggacatggtattctaccagaaacaaaaattgagatggtagaagaattggttaaaatagttagagactttacatgat

SEQ ID NO: 276959 - DNA, 625 bp, Unknown
  Bacterial polypeptide expressing nucleotide sequence isolated from the Sargasso Sea
atgagtcccttaactaactgtattaaaaataaagatactaagtcaaatcctatatggttaatgagacaagcaggaagatatcttccagaatttagagaaattagaaaagaaaaccaagactttatcagactttgtctaaatagcgatttggcatcagaaattactcttcaacctattaaaagatttggatttgacggagctgtaatattttcagatattttaatgttaccctatggtcttggtcaaaaagtagaatttgaaaaaaattttggacccaaattaggagatatagatctagaaagaataaaaaatgtcgatgaagtaagttttactgaaaaaatttataaagtttataaagcaatcgaaaaaacgtctaaagaccctttaatgagcaatagggatatgattggatttgttggagctccttggacaatactagtttacatgattaataaatcttctcctaaaaaaggtttatcgggtgaattctttaaagatgattttttaattaatagattactaggaataatagagaaattcttaaaacttcatataaaaaatcaaattgaggccggagctcaagttattcaaatttttgatagttgggctggattattacaagata

SEQ ID NO: 276960 - DNA, 494 bp, Unknown
  Bacterial polypeptide expressing nucleotide sequence isolated from the Sargasso Sea
catgagtgacgccctgcccctgctgttgcgcgccgcccgtggggagcaagtggagcgtcctcctgtctggatgatgcgtcaggccggccggtacatgaagatctaccgggatctgcgcgataagtacccctccttccgcgaacgctcagagaaccccgatctctcctatgagatctcgatgcagccgtttaacgccttccagcccgacggcgtgatcctgttctccgacatcctcacgccgctgcccggcatgggaattgatttcgacatcatcgaaagcaagggcccgcagatcaacgacccgatccgcagcctggcccaggtggaagcgctgcggccgctagtgccgaccgaaaccatgccatttgttggtgaggtgctcggcaggctgcgcagcagcgtgggcaaccaagccgccgtgctgggttttgtgggcgccccttggaccctggccgcctatgtggtggaaggcaaaagcagcaagaactatgcgg

SEQ ID NO: 276961 - DNA, 506 bp, Unknown
  Bacterial polypeptide expressing nucleotide sequence isolated from the Sargasso Sea
tccaaataaaattaaaaatttaattcaaatattgaacaagtatttaaaaatacatatatttaatcaagtaaaatctggagcttctacaatacaaatttttgatagttgggcagggctattagataataaatatttaaatgattttgtttatttaccaacatctgaattagttgaatttactaaatcattaaatgtgcctgtaatatgttttccaaaaggtattaaagattataaaaattactgtaaagaagtaaatccaaatgtaataaatatcgattatgaagttaatcctagtaaaattaaaagtgatataaatatttgtgtgcaaggtggctttaatcctaaaatattacttacagacaaggaaaacattaaaaaagaagcaaaaaaatatttagatatatttgcagatggatcatatatatttaatttaggacacggtattttaccagagacaaatcccgacatggtagaatatttagtaaattttgttaaaaactattaaa

SEQ ID NO: 276962 - DNA, 682 bp, Unknown
  Bacterial polypeptide expressing nucleotide sequence isolated from the Sargasso Sea
atgagtcccataattaactgtattaaaaataaagatattaaaactaatcccatatggttaatgagacaggcaggaaggtatttacctgaatttcgagagataagaaaaaaaaatacagatttcataaaactttgtttaaacagtgatttagcatctgaaataactcttcaacctataaagagatttgattttgatggcgcagtaatattttctgatattttgatgttaccatatggtcttggtcaaaaagtagaatttaaaaaaaactttgggccaaaacttggggaaatagaattagataatattaaaaatgttgacgaaattaactttacagaaaaagtttataaagtttacaaagcaatttccaaaacttcccaggatcctttaatggataataaagacatgataggatttgttggagctccatggactattcttgtttacatgattaatagatcatcaccaaaaaagggtctaacaggcgaattctttaaagatgaatttctaataaatagactattaggaattattgaaaaattcttgaaagttcatataaaaaatcaagttgaagctggggctagagttatccaaatttttgatagttgggcaggattattagatgataaaattcctgaatacatttatatacctactttaaatattgtagaatatgttaaacaat

SEQ ID NO: 276963 - DNA, 398 bp, Unknown
  Bacterial polypeptide expressing nucleotide sequence isolated from the Sargasso Sea
gatgagtgacactctgcccctgcttctgcgtgcagcccgcggtaaagcggtggagcgtcctccggtctggatgatgcgtcaggccgggcgttacatgaagatctaccgggatctgcgcgacaagtaccccagcttccgcgaacgctccgaaaaccctgatctctcctacgagatctccatgcaaccgtttcacgccttcaagccggacggcgtgatcctgttctccgacatcctcacgccgctgccggggatgggcatcgatttcgacatcatcgaaagcaagggcccccagatcggtgatccgatccgctccatggatcaggttaacgccctgcgcccgctgaaccccagcgagtcgatgccatttgttggtgaggtgctgggacgtctgcgccaaa

SEQ ID NO: 276964 - DNA, 908 bp, Unknown
  Bacterial polypeptide expressing nucleotide sequence isolated from the Sargasso Sea
taaggtcacgttcctggaactgtgcaagaatccagaactttctgctgaagttatgttggcaacagtggatcgacttggtgtcgatgcagcaattatttttagtgacttgttgccactattgcagccgatgggcctcgatttggaattcactcctggcgaaggtcccgtcattcataatccacttcgtacccgtacagatctcgatcgatttcacgagcttgttgatgtcgattcactcagctttgtttttgagacagtacgtacaacacgtgccggccttcaaaaagaattgccagtcattggttttgcgggagctccatttactttggctggatatgccatagaaggaggaacaagtcgcaactggctgcataccaaacgatttatgttgactgatcctgatgggtggcatgaactcatggaacgacttgcaaggacgattggtagatatcttcatgctcaatttgatgctggagcgaatgcggtgcaggtctttgatagctgggtaggttgtctctcaccagaacactaccgtgaattcgttttgccccatagtcggactgtctttgaatcaatagctggacgtggaccgattatccatttcgcagcaggcaatccagcgttattaccacttgcggctgaagctggtggtacggtcatgggtattgattggcgaactgagttggatcatgcctggcagcaggtgggttatgatcgaggtgtgcagggtaatctcgacccggctgtactgcacacaactcccgacgttgtacgtcgtcgtacggaagatattcttgcacgtgttgcgggacgtcctggtcacatcatgaatcttggtcacggcatattgccagagactccagttgaaaatgtattggagttcatttcgaccgttaaacaaaaataaa

SEQ ID NO: 276965 - DNA, 709 bp, Unknown
  Bacterial polypeptide expressing nucleotide sequence isolated from the Sargasso Sea
ttaactcaatgggcaaaaatagatgaaattgattttgttcagaaaatttatccagtttataaagctataaaatctgtaagtttagaaatgaattctaaaaataaaagtacaataggctttgttggggcaccttggacgttgcttgtttatatgataaatcaacaatcgccaaaaaataatgttaaaaaagatttttttaaagataacttcttaataaacagacttttgctgattatcgaaaaatttcttaaaattcatattaaaaatcaaattgaaaatggcgctaatgttatacaaatttttgatagttgggcgggattacttgaggaaagagattacccaaattatatttacacaccaactttaaatttagttgaatacgtaaaatcattaaaagttccggtgatttgttttcctagagaaattaaaaattataaagagttttgtgaagtagttaagcctaatgctgtaaatatagattataaggttgaccctttaatgatcagtaaaaatattaaaattcctgtacagggtggcttagatccaaagatcttgttaacagataaagaaaacttgaaaaaagaggtcctaagatatttggatatatttaaagatcatccatatatttttaatcttggccatgggatcctaccagaaactaatcctgatatggttgaatttttaataaagacagtgaaagataactaaa

SEQ ID NO: 276966 - DNA, 715 bp, Unknown
  Bacterial polypeptide expressing nucleotide sequence isolated from the Sargasso Sea
atgaaacctatagacaaagtaatagttgataaagatacttcatttaatcctatatggattatgagacaagcaggaagatatctgccagaatttagaaaaattagaaaagaaaatcctaatttcattaacctttgtttaaatgataatttgtcttcagaaataacccttcaacctttaaaaagattcaatctagacgctgcaataatattttcagatattttaatacttccatatggattaggtcaagaagtagaatttaaaaaaaattttgggccgaggttaggagaattaaatttaaataaaattgcaaaaattgatgagattgattttatagagaaaattcatcgtgtgtatagggcaataaaaaaagttagttcagatcaagttttaaacgataaaaacaccattggatttgttggtgctccatggactttattagtttatatgatcaatcaacaatctcctaaaaaaaacttaaaaaaagatttttttaaagatgagtttttaataaacagaattttattaattatagaaaagtttctaaaagttcatataaaaaatcaaattgataatggtgcaaatattatccaaatctttgatagctgggcgggcttattagatgaaaaagatttacctaattatgtttattctccgactttaaatttagtaaattatgtaaaatctttaaatgtaccggttatatgtttccctagag

SEQ ID NO: 276967 - DNA, 414 bp, Unknown
  Bacterial polypeptide expressing nucleotide sequence isolated from the Sargasso Sea
aatgggtgagaatttaccacttttactttctgctgccttaggaaagaaagttaataggcctccagtatggatgatgagacaagcaggcagatatatgaagatttacagagatttaagagaacgctacccaagctttagggaaagatctgagaacccagaactttcttatgaaatttcaatgcaaccttttttggctttcaagccagatggtgtaattcttttttcagatatacttacccctcttcctggaatgggaatcaactttgaaataatagaaagtaagggtccaataatagaagatccaataagaaatattcaccaaatagaaaatttaaaagaattaattccgaacgaaagtttaagttttgtaggagaagtcctttcatcattgagaaaagatgtaaaaaatgaagc

SEQ ID NO: 276968 - DNA, 531 bp, Unknown
  Bacterial polypeptide expressing nucleotide sequence isolated from the Sargasso Sea
tatgactcctattcagaaaacaataataaataaaaaaacatctaataaacctatttggttaatgagacaagctggtaggtatttacctgaatttaaaaaaattagaaaattaaatcctgattttataaaattatgtttaaatgaaaatttatcttctaaaattactttacaacccttagaaaggtttgaattagatgctgctataattttttctgatattttaatggttccttggggcttaaatcaaaagattgaatttaaaaaaaattttggtccaaacttaggtcctattaatttagaaaaaatatctaatgttaatgaaaaagattttttaaaaaaattatatcctatttataaatcaataataaaagttaaagaaaatgtattaactaaaaataaagatgtaataggatttgttggagctccatggacattattagtttatatgattaataaacactcacctaaaaaaaaattaataaaagatttttttgaagataaacttttaattaataaaatattaataatttt

SEQ ID NO: 276969 - DNA, 516 bp, Unknown
  Bacterial polypeptide expressing nucleotide sequence isolated from the Sargasso Sea
catgactgaatttaatcgaaattttatagctgcacttaatagaaagactcaaaaaactccacctatctggataatgaggcaggctggcagatatcttccagagtacaggaaagtaagatcaaatttcaaaaattttcttgatatgtgtaagactcctgaaatttgctgcgagttagttttacagcctatagaaagatatgattttgatgctgcaattattttttcagacatcctaacgattcctgatgctctcggtctaggagtttcttttgtggagggaaaaggtccagtcttttcgaatcctattaaaaaaccagaagatatttctaaaatgataaattttaatccggacagccttgactatgtatacaagactgctgaactaacaagaaaagaattaaatccaagcactccactaattggatttgctgggagtccatggactcttgcagcatattcaattgagggaagtagttccaaaaactttgatttaacaaaatcatttatagaaagtca

SEQ ID NO: 276970 - DNA, 719 bp, Unknown
  Bacterial polypeptide expressing nucleotide sequence isolated from the Sargasso Sea
taacttaaatttagataaaattaaagcaacaacaaatgaggaatttactaatagacttaaaccagtttataatgcaataacacgaacatcccaaagtaatttattaaatgataaagatttaataggatttgctggcgcgccgtggacaattttggtttacatgataaataaaatgtcgcctaaaaatggtttaccagaaattttttttgatgatcctaatttgataaatgatttattaaacacaatagaaaaatttgtaaaattacatattaaaaaccaaataaatgctggtgccaatgtgatacaaatatttgatagctgggctggattattggaagatagaatttctgaatatatataccaaccaacatttaacattgttgaatatgtaaaaaaattaggcgtacctataatctgttttccaagaggaataaaagattataaagaattttgtgagatagttaagcctgacatgattagtatagactatgcagtagatccacatgaaattgtaaaaaatataaaaatacctgttcagggtggtttggaccctaaatttttattaagtgataaagacaatcttaaaaaagaagttgaaaaatatttaacaatattcaaagatcatccttacacgtttaatttaggacatggaattttacctgaagcaaaaatagatttggtaacaacattaataaataccgtaagaaaatttaaatgaa

SEQ ID NO: 276971 - DNA, 781 bp, Unknown
  Bacterial polypeptide expressing nucleotide sequence isolated from the Sargasso Sea
tatagctgcacttaatagaaagactcaaaaaactccacctatctggataatgaggcaggctggcagatatcttccagagtacaggaaagtaagatcaaatttcaaaaattttcttgatatgtgtaagactcctgaaatttgctgcgagttagttttacagcctatagaaagatatgattttgatgctgcaattattttttcagacatcctaacgattcctgatgctctcggtctaggagtttcttttgtggagggaaaaggtccagtcttttcgaatcctattaaaaaaccagaagatatttctaaaatgataaattttaatccggacagccttgactatgtatacaagactgctgaactaacaagaaaagaattaaatccaagcactccactaattggatttgctgggagtccatggactcttgcagcatattcaattgagggaagtagttccaaaaactttgatttaacaaaatcatttatagaaagtcattccgatgatgctcataaatttcttgagattctagctgatgcttgttttgaatatctaaaaagacaaatcgtcagcggagtagatgtaattcagatatttgactcttgggcaaatcttctttctgaagaacaatacctagaatactctttgaaatatataaaaagaattcttaaaaaattatcagaggatcctgttacaagcaaaactccaactatagtttttgctagagatccaaaatgtaatcttaatgaaaataaattagatggtctaagttgttatggcatgttt

SEQ ID NO: 276972 - DNA, 421 bp, Unknown
  Bacterial polypeptide expressing nucleotide sequence isolated from the Sargasso Sea
atgttagaagaacaacacataagccgctacgaaaaagcagcccataaccaagcaacagatcgtcccccaatctggttcatgcgacaagctggaagatatctaccagagtatcaaacattaagaaaaaaacatggattccaaaccatgatcagaaccccagagattgcgactgaaatcacactacaacccatcgatcgattcggtgtggatgccgccatcttattctccgatatcttagtaactgctgaagccatgggccttcatttagaatatatcgagaaaaaaggacctgtcttcaaagaccccgtccgaacacaaaaagatatcgatagtttaagtatcgatgcaagcagcttacagtatgttagtgaggcgattcattgccttcttcctgaacttcaaaagcgagaagtcccataat

SEQ ID NO: 276973 - DNA, 531 bp, Unknown
  Bacterial polypeptide expressing nucleotide sequence isolated from the Sargasso Sea
tgcatcgcctgctgagccatttcgccgaatcgattgccagctacctgcgctaccagatcgattccggtgcccaggtggttcagatgttcgattcctgggccggtcagctcagcccggccgactacgacaccttcgccgccccgtatcaacgccgcgtcgttgaactggtgaagcagacccacccggacacccccttcatcctctacatctccggcagcgcaggcgtgatcgaacggatggctcagacaggtgtggacatcatttccctggactggaccgtcgacatggctgaagcctgcgcgcgcctgccccaacacatcggagtccaggggaacgttgatcccggtctgctgttcggaacgccagaggcaatcagggaccggatcgacgacaccgttcgcaaggcacgcggccgtcgccacatcctcaaccttggccatggaatcctgccgggaacccctgaagccaacggacgcgccttctttgaggctggtaaatccgtgatggatcgcatcggggctgccgcttgag

SEQ ID NO: 276974 - DNA, 760 bp, Unknown
  Bacterial polypeptide expressing nucleotide sequence isolated from the Sargasso Sea
aagccagatatcattgcaaccaataaatagatttgatttcgacttcattattcttttttctgatatattagtaatacctcattgtcttggacaaaatgtgcagttcaaggaaaatattggacccatattgaagcctataaaatttagagaactttcttcttctattgaaaattcaatggcaaaactttcacctgtgtttgatactttgaaaatactaaaaaagaaaaaaaaagaaaaaaaaattattggtttttgtggtggaccattcacagttctgaattacatgatcgagggcgggacctccaaaaaacataaaaaaattcttgagtttataaaagaagaagacaaagcgaaatgctatatcgagaaaatattagagttttctatagagtacttaaagcgacaaataaaaagtggagcagatatgttacaaatcttcgattcctgggcaggtctactagaaccaaaagaatttgaaaaatttataataaaaccaagtatagaaatttccaaagagataaagaaaagttacccggaaataccattaattttttttccaaggggatcaaaaagaaaaataacaaagtttatagatgaggtgaaatgcgatgtaatttcattagacgaaataactaatgatgatatacaaaactgtaagaaaaaaaaaataattattcaaggaaatttgagcccaacaatattattaaaaggtgggaaaccacttatagaagaagtaaaaaaaatatggaaaggtaaaaga

SEQ ID NO: 276975 - DNA, 371 bp, Unknown
  Bacterial polypeptide expressing nucleotide sequence isolated from the Sargasso Sea
cttttttcaatctttgatcaaagaagtcccggttattcatttcggcacgggtaatccagcgcttttgcggttaatggccgccgcgggaggagatgtaatggctctagattggcgtgctccgcttaacgagtcgtggaatgatttgggttgtaaatcaatccaaggtaatttagatcccgtcgctctcttcgggagtgaaaaatccgttataaaagccgcaaaggaaatcttagacgatgttgcggggaagcccggacatatcttcaatctaggccatggaatccttcctcagactcctctggaaaatgttaagaccctggtaagagtagttaaagactatagttctgaggttaaaaccaggcaccaatagc

SEQ ID NO: 276976 - DNA, 505 bp, Unknown
  Bacterial polypeptide expressing nucleotide sequence isolated from the Sargasso Sea
tatgacaccaattaataactgtatcaaaaataaagatacaaaagtaaaacccatatggctaatgagacaagccggaaggtatttacctgaattcagagaaataagaaaaaataaccaagattttgtaaagctttgtttaaatgagaagttatcatcagaaataactttacaaccaataaagaggttcggttttgatgcagctataattttttcagatattctaatggttccctatggtttaggtcaacaagttgtgtttgaaaaaaattttggacctagactaggacaattaaacataaaactaattgaaaataccgctgaagaaatttttactggaaaactagaacccatttataatctaatttcaaatatatcgaaaaatgaattactaaaaaatagagatctaataggatttgtcggcgcgccctggacaattcttatttacatgataaataaaatgtctccaaaaaaaaaattatctgaggatttttttaaagatgatgat

SEQ ID NO: 276977 - DNA, 526 bp, Unknown
  Bacterial polypeptide expressing nucleotide sequence isolated from the Sargasso Sea
aaggatttttttaaagatgagtttttaataaatagaattttattaattattgaaaaatttttaaaagtacatatcaaaaaccaaattgataatggcgcaaacgtaatacaaatatttgatagctgggcaggtttattagaagaaaaagatttacccaactatgtttatgccccaactttaaatttagtaaactttgtaaaatctttaaatgttccagtgatatgtttccctagagaaataaaaaattataaagaattttgcgacattgttaaacctgacgctataagtattgattacaacgttgatcctaaaaaaatacttagagatattaaaatacctattcaaggcggtttagaccctaaaattttattaacagacaaagaaactttgaaaaaggaagcctctaattatttggaaatctttaaagatcatccatatatatttaatcttggacatggtattttgcccgaaactaattcagaaatggtagaaaatttaattaaaattgtaagagattttaaatgat

SEQ ID NO: 276978 - DNA, 586 bp, Unknown
  Bacterial polypeptide expressing nucleotide sequence isolated from the Sargasso Sea
aatgaatgattcaaaatttttaaatgctttagagctaaaaccaaattcaactcctccaatatggttcatgcgtcaagcaggcagatacctccccgagtatcaagaaattagaaaaaactattcaaattttcttgatatgtgtaaagaacctaaaacatgcgcgaagttagcattgcaacctatcgagcgatttgatcttgatgcgtcaattttattttcagatattttgacaataccagatgcattagatcttgggcttgccttccatgaaggagaaggtcctaaattcagtaacccaatctcaaaacccgaggatattaacaccctaatctcatttgacgaaaacacactatcatatgtattcaatgctgtagaggaaacaaaaaaattactgcctgcagaccttccattgattggattttgtggtagcccatggactctagcagcatattcaatcgaaggtggtggttcgaaagattttaaaaaaacaaaaaatttcatgcaagatcatccatcagcattgcatgattttctggaaattctttgtgatgcttgctatcggtatttaagacaacaagtcttaagt

SEQ ID NO: 276979 - DNA, 662 bp, Unknown
  Bacterial polypeptide expressing nucleotide sequence isolated from the Sargasso Sea
tatgaacagactgttgaactgtataaatgacaagaaaaccagagatatccctgtctggtttatgagacaagctggaagatatttgcctgagtttatggaaataagaaaacaaaatactgattttgtgaaactttgcttgaacagcgatttagctaaagaaattacaattcaaccaattaaaagatttgatttagatgcggcaataattttctcagacattcttatgatcccttatggtttgggtcaaaatgtaaatttcaaaaaaggttacggaccacaattagatgaactccaaatagatattttaactaaagtagataataaaatatttactaataatcttaaaccaatctacgaagcaataaaaaaagtaaaaaaagaaatagaaaaaagaagcttaataggttttgtaggagctccttggacattatttttatacatggttaacaaacaatcaccaaaaaaaaattttaattttaacgaattaattaaaaacaatgcgcttacaaaaagattatataaaaagttagaagaaattatatgcgttcatatcaaaaaccaggttgatgcaggtgccaatataatacaaatttttgattcttgggcaggtctacttccagaaaatcacctaaaagattattgttatgaaccaactaaaaaaa

SEQ ID NO: 276980 - DNA, 427 bp, Unknown
  Bacterial polypeptide expressing nucleotide sequence isolated from the Sargasso Sea
tatgagtcctttaaagaaatgcattttagaaaaagcaactaaacctactccaatatggttgatgaggcaagctggtagatatttaccagaatttagagaaataagattaaaaaatcctaatttcattaatctttgtttaaatgataacctatcatcagagataaccttgcagccattaaaaagatttgattttgatgcggcaattattttttctgatattttgatgttaccttttggtattgggcagaatgtagaatttataaaaaattttggtccggttttaggtgaattaaatttagaagaatctttaaatgtaactgatatacacttcacaaaaaaattatacccagtatataaagctattagaaaagtttcagaagatagaattttacataataaagatctaatcggttttgttggtgctcca

SEQ ID NO: 276981 - DNA, 694 bp, Unknown
  Bacterial polypeptide expressing nucleotide sequence isolated from the Sargasso Sea
tatgagtcctattaaagaatgtataaagaaaaaaaaggttaatacaaatcctatttggatcatgagacaggcaggaaggtatttacctgaatttcgaaaaataaggaaaaaaaatccagattttatcaagctatgtttgaataaaaatattgtaccagaaataacattacaacctttgaaaagatttaattttgatgctgcaataattttttccgacatactaatgttaccatatggtttaggtcaaaatgtaaaatttaccaaaggttttggtccatctttagataaaaccagtattaaattaatgaaatcagttaataaagtagaattttctaaaaaactaagtccggtctataaatctttaaatatagtttcaaaagataagatattaaaaaataaagacctgatcggatttgtaggtgcaccttggacaatattagtatatatgcaaaatagacaatcaccaaaaaagactaaagcattaaataatttttcttttaaaaaaacttttacccaaacggaggaaataaaagccattaaaataataactaattttttgaaattacatattaaaaagcaagtagataatggagcaaccgttattcaaatctttgatagttgggcagaattgttaagaactgaaaagactagagagaaatttatatataagccaaataaagagcttgttgattat

SEQ ID NO: 276982 - DNA, 891 bp, Unknown
  Bacterial polypeptide expressing nucleotide sequence isolated from the Sargasso Sea
aaaaagaacacgaattttatagaattatgcttaaacgaagaactctcagagataataacactacagccattagatagattcaaatttgatgctgctataatcttttcagatattttaatgataccttttggtatggggcaaaaagtagaatttcaaaagaattttggacctaggcttggagagattaacaaagaagaaatgtttaacttaacggaaacttatttttcagacaaattacaaccaatatataaactaataaataacgtaaaaagaaatgaaaaattaaaaaataaagatgtaatcggatttgtaggagcaccatggactttgcttgtttatatgattaataaagtttccccaaaaaatgggttatcaaaattcttctttaaagacacaagtttgataatagatattttagaaatattagacaaattcattaaattacatatcaaaaatcaagtagaggcaggggcaacaataattcaaatttttgatagttgggcaggattaattgaaaatgattttgacaaatatttatataaaccaacttcttcactagttgattataccaaaaaacttggtgtacctgttatttgttttcctagaggtatctctgattacaaagccttttgtaaggttgtaaaacctagcatggttaatatagattataatgttaatttaaaaaatattattagtgatatagagatacccatccaaggaggacttgacccacaaatcttattaacaaataaggatatgcttaatctagaggtaaacaagtacttagaagcatttagagatcgcccttacgtatttaatttaggccatggtatccttccagaaacaaaaatcgaaatggtagaagagttagtaaaaattgtaaggaatttt

SEQ ID NO: 276983 - DNA, 548 bp, Unknown
  Bacterial polypeptide expressing nucleotide sequence isolated from the Sargasso Sea
atcatctccaaaaaaaggtctcacaggagcattctttaaagatgaatttctaataaatagattattaggaattattgaaaaatttttaaaagtgcatataaaaaatcaaattgaagccggggctaaagtaattcaaatttttgatagttgggcaggattattagaagataaaattcctgaatacatttacatacctacattaaatattgtagaatatactaaacaattaggtgtgcctgttatttgctttccaagaggcattaaagattacaaaaatttttgtgaaatagtcaaaccagatgcagttaatattgactatgatgtagatccagaaaaaatagtaaaagaaatcaaaattccaattcagggagggcttaaccccaaaatattattgagtgataaagaaactcttaagaaagaagttgaaagatatctcaatatttttaaggatcatccatatatatttaatttaggacatggaattctaccagaaactaaaattgaaatggtggaagagttaattaaaattgtgagaaattataaatgaa

SEQ ID NO: 276984 - DNA, 419 bp, Unknown
  Bacterial polypeptide expressing nucleotide sequence isolated from the Sargasso Sea
tatgactccaattcaagaaagtattcttaataaaagtaacaaactagttcctatatggataatgagacaagctggtagatatttaccagaatttagagagataagatcaaaaaaccctaattttataaagttgtgcttaaatgaaagtttatcttcagaaataaccttgcaaccaatcaaaagatttgattttgatgccgcaataatattttctgatatattaatgttaccatacggtttaggacaagaagttaaatttgaaaaaggtctaggtcctaaattaggtaaattagatttagatttaattgcaaatgtaactaaagatgagtttactagaaaattaaaaccaatttataattcgatatcaaacatagcttctaatccattatgtaaaaataaagatacaaattggctttgta

SEQ ID NO: 276985 - DNA, 421 bp, Unknown
  Bacterial polypeptide expressing nucleotide sequence isolated from the Sargasso Sea
tatgactaaaattagagattgtataataaataaagaaacaacttataaacctatatggttaatgagacaggcaggaagatatttacctgaatttcgtgaaattagaaaaaaaaatcaaaattttattaacttatgtttaaatgataaattatcttcagaaataactctacagcccctaagaagatttaattttgatgcagcaataattttttctgatattttaatgctgccatatggcttgggtcaaagtgttgaatttaaaaaaaattttggtccattgcttggagacttaaatttagaaaaattatctaaagttaatgagtctaagtttattaataaactaaatccaatttataaaaccataagcattgttaaaaagaatgaagttctaagaaataaagatctcataggatttgtagga

SEQ ID NO: 276986 - DNA, 807 bp, Unknown
  Bacterial polypeptide expressing nucleotide sequence isolated from the Sargasso Sea
aatagtgatttagcatctgaaattactttacaacctattagaagattcggatttgatggagctgtaatattttcagatattttaatgctaccatatggacttggtcaaaaagtgcaatttgaaaaaaattttggacctaaattaggagaaataaacttagaaaagataaaaaatgtcgacgaaataagttttacagaaaaagtttataaagtttacaaagcaatctcaaaaacgtctaaagaccctttaatgaagaatagagatatgattggatttgttggagctccgtggactatcttagtttatatgattaatcagtcctctcccaaaaaaggtttatcaagtgatttttttaaagatgattttttaattaatagattgctaggaataatagagaaatttttaaaactgcatataaaaaatcaagttgaggccggagcccaagttattcaaatctttgatagttgggctggattattagaagataaaattccagagtacatatacatacctactcttaatgtcgttgaatatgtaaaaaaattaggtgttcctgttatttgttttcctagaggtattaaagattataaaaatttttgtgaaattgttaaacctgacgcggtaaatatagattacgatgttgacccaaagaaaatagtcaatgaaatcaaaataccaatacaaggaggtcttgacccaaaaatattattaactgataaaaaatctcttaaaatagaagttgaaaaatatcttgatgtttttaaagaccacccatacatttttaatttaggtcacggcatactccct

SEQ ID NO: 276987 - DNA, 823 bp, Unknown
  Bacterial polypeptide expressing nucleotide sequence isolated from the Sargasso Sea
tatgtctccaattgaagaagtaataataaataaaaagagtaatattaatcctatttggataatgagacaagctggaagatatttgccagaatttagagaaataagaaaacaaaaccctgactttattaaattatgtctcaatcaaaagttatcaagtgaaattactttacaacctttaaaaagatttgatctggatgctgcaataattttttctgatatactaatgttaccatatggtttaaatcaaaacgttgtatttaaaaaaaatatgggtccattgcttgatgagctagatctagataaaatttcaagtgttgaggaagttaattttgtaaaaaaactctctcctatttatgatttaattaaattagtgagtagttctgagtttactaataacaaaactacgattggctttgttggtgcaccatggactttgttagtctacatgattaacaaaaagtcaccaaaactcgatttgaatcaaaatttttttgaaaataaattattaatcggtgaagttcttaaaattttagataagtttttaaaaatacacgttaaaaatcagatcaataatggtgcacaattaatccaaatttttgatagttgggctggtttgttaaaagaaaaagatttaccttactatgtttatgagccaacattaagtttagttaactatattaaatctttaaatgtgcctgttatttgttttccaaggggtattaagaattataaagatttttgtgaattcattaaacctgacaccatttgtattgattatgaagttgatccagtaaaaattaataaagaaataaaaattcctgta

SEQ ID NO: 276988 - DNA, 622 bp, Unknown
  Bacterial polypeptide expressing nucleotide sequence isolated from the Sargasso Sea
taaattcacggataaaaaaagcacaattggatttgttggtgctccttggacaatacttgtatatatgcttaataaacaatcacctaaacaacacttaaagatacattttttcaatgataaaccattaataataaaactacttacactcatagaaaaatttttaaaattacacataaaaaaacaaattgagaacggagctgatgttattcaaatatttgatagttgggcgggattagttgataaaaaagacttatctttttatatttataatcccactttaaatttagtaaatttcactaaatcttttaatgtaccagtaatttgtttccctagaggtataaaagattacaaaaaattttgtgatagtgtaaaacccgatgtaataagtattgattacaatgtggaccctaagaaaatttgtgaagctattaatataccggttcaaggaggactagaccctaaagttcttttaacagattatgataatttgaaaaaagaaagcagtaaatatttagatgtattcaaagatcacccttatatatttaatctaggtcatggtatactgcctgaaacaaagccctcaatggttgaggatttagtgaaaattgtaaaagattattaa

SEQ ID NO: 276989 - DNA, 371 bp, Unknown
  Bacterial polypeptide expressing nucleotide sequence isolated from the Sargasso Sea
aatggagaaaataaaacaagttattgaaaatagagatgtcaaaatcaagcctatatggttgatgagacaggcaggaaggtatctacctgaatttagaaaaattagatcaaaaaaccaaaacttcatagagttgtgtttaaatgaaacattagttcctgaaataaccctccaacctttaaaaaggtttgatctagatgccgcaattattttttcagatattttaatgctacattatggtttaggtcagtcagttaaatttaaaaaagattttgggtctatgttaggagatattaatgaagtagatctaaaatatgttaccgagaaagattttataaaaaatcttgaaccctgttataaatctatgaataatt

SEQ ID NO: 276990 - DNA, 814 bp, Unknown
  Bacterial polypeptide expressing nucleotide sequence isolated from the Sargasso Sea
agatgcagcaataatattttctgatatcttgttagtaccttttgctttaggccaatctgtaaaatttaaaaaagatttcggacctttattaggtaaaatagattttaataaaatgtcaaaaacaaatgaaatacagtttatagacaaattaaaacctgtttataacgctataaaaaaaacaaaaaataaagaggaattaaaaaataaagatctaataggatttgtaggagcgccatggacaattctcatttatatgttaaatcaaaaatctcctaaaaacgaagatattgactataagctaaaagatggaaaatttattgatgatttattaaaaattattgtacgatttcttaaagttcatatcaataatcaaatcgaaaatggtgcaacaatcatccaaatatttgatagttgggctggccttttaaataaaaaagattacgaaaaatatatatacaaccctaccaaagatttagttagttttgtgaagtctaaaaacataccagtcatatgttttcccaaagggattagtgattatgaaaattatgtaaatttggttaaaccagatgttattagtatagattatgaagttgacccaaaaataatttccgaaagaatagatataacagtccaaggcggattaaatcctaattttttaattagtgacagagaggaacttaaaacaaatgtcaaaaaatatttagatatatttaaggataaaccatatatttttaatcttggtcatggagtgttgccaaatactgatcctagcatggtagattatttagtaaaattagttaagaattactcatga

SEQ ID NO: 276991 - DNA, 824 bp, Unknown
  Bacterial polypeptide expressing nucleotide sequence isolated from the Sargasso Sea
cgccgcgaagggcctccccgtggaccgcccccccgcctggatgatgcgccaggctggccggtacatgaaggagtaccgcgacctcgccgtgaaggttccctccttccgcgagcgctccgagaacaccgacctcatcgtcgagatcaccctccagccgttcagggcgttcaagcccgacggcgtgatcctcttctccgacatcctcaccccgcttcccgcgatcggcatccccttcgagattgacgactacaaggggcccatcctcgaccagcccatccgcaacgccgaggggctcaagatgatgcacgacctcgacctcgacatgctccccttcgtcggggaggcgctcaccacgcttcgcaaggaggtgggcgacgaggccgcggtgctcggattcgtcggcgcgccctggaccctcgccacctacatcgtcgagggcggcagctcctccacgtacaagacgatcaagtctatgaccatgacggagcccgaggttctgagatccatcctgagcaaggttgcggacgcggtcggcgactacgtcgggtaccagatcgacgcgggcgcgcagtgcgtgcagatcttcgactcctggggcgggcagctccccccgcacatgtgggagcagtggtccaagccgtacatccagcaggttgtcgacaaggtgcgggcgacccacccgggtacgccgctcaccctctacgccaacggctccggcggtctgctcgagcgcatggccaccaccggcgtggactgcatcgggctggactggaccatcgacatggaggacggtcgcaggagggtgggagacaaggcggtgcagg

SEQ ID NO: 276992 - DNA, 544 bp, Unknown
  Bacterial polypeptide expressing nucleotide sequence isolated from the Sargasso Sea
tcaccaaaaaaaaacttatctgaaaatttttttgatgatccttccttaataaatagtctattagacttaattgttaaatttcttaaagttcatattaaaaatcaagtagaagctggtgcaaatgtaattcaaatttttgatagctgggctggtttattggataataaaatagaagatttgatttatttacctaccacaaatcttgtcgaatatacaaaaaaattgggagcttctgttatttgttttcctagaggaataaaagattataagaaattctgttatgaagtaaaaccagacatgattaatattgattatgaagtttcacccaaaaaaataattgatgaaatagatttgcctgtacaaggaggattggatccaaaaattttattaactgaaaaagaaaatgttgaaaaggaagtaaaaagatatttattaatttttaaagaccatccttatgtattcaatttgggtcatggaatattgcctgaaacaaaaattgatttggttaacgtgctgataaataccgtaagaaattataaatgaa

SEQ ID NO: 276993 - DNA, 223 bp, Unknown
  Bacterial polypeptide expressing nucleotide sequence isolated from the Sargasso Sea
tatttggtagataataatgtaggtattcagggaaatatggatcccagaatcttatactatgatttagataagattgaaaaatatttacaatcatgcgttgagtttggatcaaataataatgattggatttttaatcttggtcatggttttttaccagatattgattacaaaaaagcccagtttgtggtagaatggattaaaaaaactaattggaatagataaa

SEQ ID NO: 276994 - DNA, 932 bp, Unknown
  Bacterial polypeptide expressing nucleotide sequence isolated from the Sargasso Sea
atatttgccagagtttagagaaataagaaaaaaaaatcaaaattttattgaactttgtcttaatagtgatttatcttcagaaattactttacagccattaaaaagatttaatttagatgctgctattatcttttcagatattttaatgcttccttttggattgggtcaaaaaatagaatttaaaaaaaattatggacctctccttgaagattttaattttaaaaatatagaaaatttaaatgaagaaaaatttacttcaaaattattaccaatatataaaatcttaaataaagttaaatctgacaaaattttaaaaaataaagacctatttggatttgtaggagctccatggactttactagtttacatgttaaacaaacaatctccaaaaaaagaaattgatagtaaaatttttaacgataaaagtgttataaatgatttattaaatctaatagaaaaatatttaaaaattcatataaaaaatcaagttgaaaatggtgcatcgattatccaaatttttgatagttgggctggtttagtaaaaactaaagaattagaaaaatttatatataaacccacaaagagcattgttgctttcaccaaatctttaggagttccagttatatgctttcccagaaatataaaagattataaagaatatgttgatagcgtatctccagatggaataaatattgattataatatagatcctgaaattatagcaaaagatataaacattgctattcagggaggaatagatccccagtttttattaaaagaaaaagatttattaaaagaggaaattttaaaatattataaaatatttaaaaatcattcttacatttttaatcttgggcatggtgttttaccagaaacaaatccagataatgtaaaatattttgtaaaacaattagagcattataaatgttaga

SEQ ID NO: 276995 - DNA, 610 bp, Unknown
  Bacterial polypeptide expressing nucleotide sequence isolated from the Sargasso Sea
atgagccccttaactaactgtataaaaaataaagacactaagatcaatcctatatggctaatgagacaagcaggaagatatttgcctgaatttcgagagataagaaaaaaaaatacagattttataaaactttgtttaaacagcgatttagcatctgaaataactcttcaacctataaagagatttgggtttgatggtgcagtaatattctctgacattttgatgataccatatggtcttggtcaaaaggtagaattcgaaaaaaattttggaccaaagcttggagaactagaattagataatattaaaaatgttgatgaaattaattttacagaaaaagtttataaagtttacaaagcaatctccaaaacttccaaggatcctttaatgaataataaagacatgataggatttgttggagcaccatggactattcttgtatatatgattaacagatcatccccaaaaaaaggtcttgcaagtgaattttttgaagatcaatttttaataaatagactattacaaatcattgagaaatttttaaaagttcatataaaaaatcaggttgaggccggggctaaagtaattcaaatttttgatagttgggcag

SEQ ID NO: 276996 - DNA, 683 bp, Unknown
  Bacterial polypeptide expressing nucleotide sequence isolated from the Sargasso Sea
aatgaactcagattcttcatttctaaaagcattaaataaagaaagtctccctacacctcccatatggtacatgcgtcaagctggacgatacatgccagagtatcaaaatgttagaaaaaaatttaaaaattttttagatatgtgcaaagagccagatatatgttgtgaacttgcgttacagcctattaatgcatttgaattggatgctgcaatcctattctcagatatcttaacaatccctgactcttttggtcttggtgtggagtttattgaaaaagagggtcctgcttttaaaaatcctattaataacagtacagatattaaaaatctcaatcactttgatcctgaaagtttagattatgtgtacatggcagttaataatattaaaaactctctgccagaaaatataccgttaattgggttctgtggaagcccttggactttagctgcatattcaatagagggaagatcatcaaaaaactttcagaagacactaagttttttagaatcaaatcaaaaagatgttcatgatttattaataaaatatacggacgcatgctttttgtacttaagaaagcaagtacagtctggtgctgatgtgattcagatatttgattcttgggcaaatctacttacaaaggaagatcttattaaattttcttttaattatataaattctttga

SEQ ID NO: 276997 - DNA, 746 bp, Unknown
  Bacterial polypeptide expressing nucleotide sequence isolated from the Sargasso Sea
tatgagacaagctggaagatatttgcctgaatttagagaaataagaaaaaacaaccaagattttataaaattatgtttaagccctaaacttgttgaggaaataacgttacagcctactaatagatttgatttggatgctgctattattttctcagatatattaatgataccttatggcctggggcaacaggttaaattcgagaaaggcaaaggaccaatacttggtaaattggatataaatagcactttaaatataaaagacgacgaatttatcaagaaaatgtacccagtgtatgaagccattcgcaatgtaaaaagaaaagtaaaaaataaaagcgttataggctttgttggagccccatggacgttattagtttatatgttaaaccaacaatcgccaaaaagagattttaattttaaaacagttattaaagataactcaattgttattaaattattaaaaaaaattgaagaaacagtctgtttgcatatagacaaacaaactcaggcaggagcagatataatccagatatttgactcctgggcaggattattacccaaggacaaattaagccagttttgttttgcccctaaccaaaaaattatgaaacacacaaataataaaaaaatcccaacaatttgttttcctagaggaataggaaaaagttatcgtgatttctgtcattcagtaaaacctgattgcataaatatagactacgacgttgatcctaactgggcaaaagcga

SEQ ID NO: 276998 - DNA, 397 bp, Unknown
  Bacterial polypeptide expressing nucleotide sequence isolated from the Sargasso Sea
tatgcatcaaaaatattctactatacaagttaaaaaaatagcaaaagcagtcagagaaaaatatcccaatatacctataatttactacagtaaaaactttcagtttttagataaagaagcaaataaatatttaaattgcttaagtctaaattcaaatattagtttaaaagaacaaaaaaaacattttggtggtgatatttgtttacaaggtaacctggatccttacttattagtagaaggaggagaatatatggttaaagaagtcacaaatattttgtcagaaatggaaaatgatttttttattttcaatttaggtcatgggattctccctcaaacaccagttgaaaatgtatttaagctagtagaaatagtaaaaaactttaaaaagaaggtttaa

SEQ ID NO: 276999 - DNA, 772 bp, Unknown
  Bacterial polypeptide expressing nucleotide sequence isolated from the Sargasso Sea
atgaatacccttatacaagattgcataaataacaaatcttccaaaacacctatatggttaatgagacaagcagggagatatttgccagaattcagatctataagagaaaaaaatcaagattttatcaaactttgtttaaatacaaaattatcatctcaaataacaatacaaccaattaataggtttgattttgatgctgctataattttttctgatattctattagttccacatgcactcggtcagcaagtaaaatttaaaaaaaattttggacctgatttgaataagtttaatttaaatatattaaatgatgttaaaaaagaagactttcttaaaaaacttaatcctgtttataaaacagttcaagaaacaaaaaaaaaattatctataagtaataaagatattataggttttgtaggagccccatggacccttttagtgtacatgcttaacagaaagtccccaaaggaaggaaactttaacgtttttccaaaagatgaatatattgataatattttgattaagttagatgaattcttaaaaatacatattgaagctcaaattaaaagtggtgcatctataattcagatatttgacagttgggccggacttgtttcagaaaaagatctagattatttcgtttataaacctataaaaagtttagtggattttattagacaaaaaaaaataatctcaatttgttttccaagaaacatcaatagttacgaaaaatttgtagacaatgtgaatccagacataattaatattgatt

SEQ ID NO: 277000 - DNA, 684 bp, Unknown
  Bacterial polypeptide expressing nucleotide sequence isolated from the Sargasso Sea
tatgagtccaattcaaaaatgtataaaaaacaaagatacaaaaattaatactatttggttaatgagacaggctggaagatacctgcctgagtttagagagataagatctaaaaatccagactttattaaattatgtttaaatgaaagattatcttcggaaataacacttcaaccattaaaaagatttaatttagatgcagcaattattttttctgatattttaatgttaccttacggtttgggtcaaaatgttaaatttgaaaagaattttggaccaaggttagacaaactgaatgttgatgatatttcaaaagtaactgataatcaatttacgaataaattaggccctgtatacaaattaatagatatttcttctaaaaataatttacttaaaaaaaaagatttattcggttttgttggggcaccatggacaattttagtttatatgataaatcaactttcaccaaaaaaagaactaaagaaagattttttcaatgatcaaacattaattgaaaaattacttacaaccatagttaaatttttaaaactacatataaaaaatcaaatcaacagtggtgcaacaattatccaaatttttgatagttgggcaggtttagtagaagaaaaaaaattagatttattaatatataaaccaacattagatctagtaaattttgtaaaatc

SEQ ID NO: 277001 - DNA, 357 bp, Unknown
  Bacterial polypeptide expressing nucleotide sequence isolated from the Sargasso Sea
tatgggtgtacttaaagattgtttaaagaataaaaaagtttcttctaccccagtttggtttatgagacaggcgggaagatatctacctgagttcagagatattagatctaaaaatcaaaactttattgagttatgtttaaattcaaatttatcaaaggaaattactttacagcccttaaaaagattttccctagatgcagcaattattttttctgatatacttttgataccttatgctttaggtcagaatttagaggttgaaaaaaattttggtccgaagcttggaaatctagatcttgaaaaagttttaagtgtcacagacaaagaaattttagaaagattaaatccagtttacaa

SEQ ID NO: 277002 - DNA, 659 bp, Unknown
  Bacterial polypeptide expressing nucleotide sequence isolated from the Sargasso Sea
tatgaatactcttatacaagattgcatagataataaattttctagaactcccatatggttaatgagacaagctggtagatatttgccagaattcagatctataagagagaaaaatcaagattttattaaactgtgtttaaatactaaattatcatctgaaataacaattcaaccaataactaggtttgattttgatgctgctataattttttctgacattctgttagttccatatgcactcggtcaacaagtgaattttaaaaaaaattttggacctgatttaaaaaagcttgatttaaaagtactaaataatgttaaaaaaaaagattttcttaaaaaactaaatccagtttatgaaacagttaaagaaacaaaaaaaaaattatctataagcaataaagataccataggttttgttggagctccatggacacttttattatacatgcttaacagaaagtccccaaaaaaaggaagttttagtgtttttccaaaagatgaatacatcaataaaattttaatgaagctagatgaattcttaaaaatacacattgaagctcaaattaaaagcggcgcatctataattcagatctttgatagttgggccggacttcttccagaaaaagacttagagtattacgtctataagcccatcaaaa

SEQ ID NO: 277003 - DNA, 382 bp, Unknown
  Bacterial polypeptide expressing nucleotide sequence isolated from the Sargasso Sea
ctctttaaaaccaataaaaaaaatagtgagtgaaataaaaaagaagcaccccaacataccatttatagtattcccaagatcagttaatacaacatatagtaatttttctaatcaggaatgctttgacgttttggccgttgaccaatttttagaccgaaagtggatcgctgaaaatattcaaccaaaaaagattatccagggaaatctagatcccctttttctaacacaaaaaaaagatacgctaataaaggaattaaaaaaggttactgaagattttaaaacttacccatatgtatttaatcttggacatggaataactccagacgctaaagttgaaaatgtggaattagtagttaattacatcaaaggaataaaattttag

SEQ ID NO: 277004 - DNA, 578 bp, Unknown
  Bacterial polypeptide expressing nucleotide sequence isolated from the Sargasso Sea
aatgagtcccttacaaaaatgtatctttaataaggataagtcaattaaaccaatttggttgatgagacaagcaggtagatacttaccagaatttagaaaaataagacaaaagaataaaaattttgttagtttatgtttaaataaaaaacttgtaccaaaaataacattacaacctattaaaagatttaattttgatgcagcaataattttttcagatattttaatggttccgtatggtttgggtcaaaaattaaaatttacaaaaggctatggtcctgaattgggagattttaataaagatttaatatttagtaataataaaaatgattttaaaaataaattaaatccaatttatgaatcaattaaaataacctcaaataacaatcttctaaaaaataaagaccttattggatttgtaggagctccatggaccttgttagtctatataattaataaaaaatcaccaaaaaaaaatattaaaaataactttttcttaaaagcaaataacctcgatggaattttagatttactcatagaatttttaaaaattcatataataaatcaagttaaaagtggtg

SEQ ID NO: 277005 - DNA, 418 bp, Unknown
  Bacterial polypeptide expressing nucleotide sequence isolated from the Sargasso Sea
aatgacaccaataaaagaatgtttgataaacaaaagtactaagattaatccagtatggctgatgaggcaagctggtagatatttgccagaatttaagaaaattagaaaagcaaacccagactttattaagttatgtttggatcacattttagctgaagagataacattacaaccaataaaaagatttggttttgatgctgcaataatattctcagatatactaatgataccacatggtatgggtcaaacagttgagtttaaaaaaaactttggcccaagtctaggagctcttgaattaaataagctcgcaagtgtaagtaagaaagatcttacagaaaaattatctcctgtatatcaattattgtctaatcttaaaaatagtaatgatcttaaaacaaagatttatttggtttcgtag

SEQ ID NO: 277006 - DNA, 445 bp, Unknown
  Bacterial polypeptide expressing nucleotide sequence isolated from the Sargasso Sea
aatgactccaattcaaagatgtattgttgaaaaaaagagtaatctaaatcctatatggttaatgaggcaagcagggaggtatttacctgaatttcgcgaaataaggagtagaaatcaagattttataaaactgtgtcttagtgaaaatttagcgtctgagattaccttacaacctttagagagatttaattttgatgctgcaattattttctcagacattttaatgttaccatatggtctaaatcagaaagttgagtttgagaaaaattttggcccaaggttaggtaatttaaatttagatgatctaaagaatattgatgaggtagatttttcttttaagttaaattctgtttataaagcaatcaatataacatcaaataagattaacaaggatgaaaaagatttaatagggtttgttggtgctccatggacaatcttaaaaaag

SEQ ID NO: 277007 - DNA, 727 bp, Unknown
  Bacterial polypeptide expressing nucleotide sequence isolated from the Sargasso Sea
ttggatcaaataattataaacaaagatacttcatttaatcctatttggattatgaggcaagcaggaagatatctgccagaatttagagaaattagaaaagaaaatcccaattttattaatctatgtttaaacgacgatttatcttcaaaaataactctacaacccttaaaaagatttagcttagacgcagctataatattttcagatattttaatgctgccatatggattgggtcagaaagtagagtttgaaaaaaattttgggcccaagttaggtgaattaaatttaaacgaagttgccaaaattgatgaaattgattttgtagagaaaattcatcgtgtgtataagacgataaaaagggttagttcagatccatccttaaatgataagaataccattggatttgttggtgctccttggacattattagtttatatgatcaatcaacagtcacctaaaaaaaacctgaaaaaagatttttttaaagatgagtttttaataaacagaattttattaatcatagaaaaatttttaaaggttcatataaagaatcaaattgataatggagcaaatgtaattcaaatttttgatagttgggcaggcttattagatgaaaaagatttacctaattatgtttattctccgactttaaatttagtaaattatgtaaaatctctaaatgtaccagtgatatgtttccccagagaagtaaaaaattataaagaat

SEQ ID NO: 277008 - DNA, 783 bp, Unknown
  Bacterial polypeptide expressing nucleotide sequence isolated from the Sargasso Sea
tttgattttgatgctgcaattatcttttctgacattttaatgctgccttacggtttaggacaggatgttaaatttgaaaagaactttgggccaaaattaaatcctatgaaaattgaagaaatgataaaagttactgaaaaagaatttgtagataaattaaatccaatttataaattaataaatattacttctaaaaacaatttattacacaataaagatttgtttgggtttgttggagctccttggactgttcttgtctacatgattaatcaaatatcgccaaaaaaagatctcaaaaaagatttctataatgataagtcattaataaataacttaatgaatctaattttaaaatttttaaaaatacatattaaaaaacaaattgaaagtggagcatcaattatacaaatttttgacagttgggcaggtctagttgaggaaaaaaatttagaatattttatttataagcccacactagaacttgtaaattttattaaatcattaaatgtccctgttgtatgttttccaagggaaataaaagattataaaaaatttgttaacgttgtaaaaccagacgtagtcaatatcgattatagcgttgatccaaaaagtattttaaaagatataaaaataccgatccaaggaggcttagatccaaaggtcttgctaactcaaaaagaaaatattaaaaaaaaagtagaggaatatttaaatatttttaaagatcatccatatatatttaatttgggccatggcatactcccggatacaaatcctgaaata

SEQ ID NO: 277009 - DNA, 708 bp, Unknown
  Bacterial polypeptide expressing nucleotide sequence isolated from the Sargasso Sea
tatgagtttgtttcttaaatgtatatctggccaaccaatagaaaggcctcctgtctggttcatgcgtcaggccggaaggtatttaacggagtatcgtaacacaaggaagcgcgctgggtcattcttaaacttatgttataattctgatctagctacagaagtaacattgcagccaatagatagatttggttttgatgcagctattttatttgctgatattttgttaatattagatgctctaggagttaaggttcaatttgttgaaggtcaaggacccttactagatcccattaaaaataaaagagatatagaaaagattagtaacatagaattaatacatgaaaaactattccccgtttacgaaacagttagaaaactaaaaagacagttacctagcttcattcctttaatagggttcgcaggagctccttggacacttgccacatatcttataaacgggaaaggagaacacgggtctttgacagcaaagaggttttcaattgaaaataatgaagaatttgaagaaattatgaaattaataactaacgcaacgattgaatatttattaatgcagataaaagcaggtgcagatgtaataaaaatttttgatagttgggcaggtgcattgaatgccgatatggttctgcgttactcgttgaaccctattagaaaaatagtaagagaaataaaaagcaaacacccagaaat

SEQ ID NO: 277010 - DNA, 676 bp, Unknown
  Bacterial polypeptide expressing nucleotide sequence isolated from the Sargasso Sea
catgagacaagcaggtagatatttgccagaatttagggaaattagaaaaaaaaatcctaattttattgatctatgtttaaatgaagatttgtcttcagaaataactctacaacctctaaaaagatttgattttgacgcagcaataattttttcagatattttaatgcttccatatggattaggtcaaaaagtagaatttgaaaaaaactttggtccaagattaggcgaattaaatttaaatgaaattgccaagacagatgaaatcgactttgtagaaaaaatatatcgtgtatatagggcaataaagaaagtcagttctgacattaacctaaaaaataaaaatactattggttttatcggcgctccatggacattattagtttacatgattaaccagcagtctcctaagaaaaatttgaaaaaagatttttttaaagatgagtttttaataaatagaattttattaattattgaaaaatttttaaaagtgcatatcaaaaaccaaattgataatggagcaaatgtaatacaaatatttgatagttgggcaggcctattagaagaaaaggatttgccgaactatgtttatgcaccaactttaaatttagtaaattatgtaaaatctttaaatgttcctgtaatatgtttccctagagaaataaaaaattataaagaa

SEQ ID NO: 277011 - DNA, 815 bp, Unknown
  Bacterial polypeptide expressing nucleotide sequence isolated from the Sargasso Sea
tatggacatgtttcttgatccctcaacaatacttgaagtttccctacagcctgtaagcagatacggtatggatgcctgtattgtgttttcagatattttaataaccccttttgcagcgggctcaagtgttagttttatagatgggcagggccccgtaataaagttcaatgagaacatgagctataatcttgaaaaaactcttcctcttgcaataggaataaaaaaaattaaagaaaatacagatgtccccctaatagggtttgctggcggagtatggacgacactgttttattgtttatatgaaaaaattgaacgtcagaaactaaaacctgaagacattacaaaaaagacttcacaaatagacaatttaatcgagcaaatgacacgtgcgattattcaacacgcagaaatgcaaattgattgtggggttgatgcttttcaaatatttgaatcagcggcagaacatttggatgacgaacagttcaataaatggtgtattcaacctacaaataaaattattgagagtataaaaaaaataaaagacattcctattatcggttttcccagaaatactaatcttgcatgttataaaaaatattcaaatatagataaacttgactgtattaccttagactataattttcctttagataaaattaatgagctaaatgataaaattgtttttcaaggaaatctagatcctaaacaccttttaaaagactctcaaaatcttagtcagaagattgaagaaatattgtttgcttttagagaaagaccacatatttttaatttaggacacggggttttgcccgaga

SEQ ID NO: 277012 - DNA, 652 bp, Unknown
  Bacterial polypeptide expressing nucleotide sequence isolated from the Sargasso Sea
gcaattcaaaaaactagaaaaaaacttgacaaaaataaaagtttaattgcttttgttggggctccatggacgctattaatttatctattgggtttaaaaaaaaataatcgactagataaaaaattattacagagcaaagaagatgaaattaaaaaaatctttttaaaactagacgaatttctgaaatatcacatctttgcccaaaaagaagcgggagctgatataatacaaattttcgactcgtgggccggattaatcgacaaagaaaaattaagagactattgtattagcccaaataaaagtctggttgagttttgtaaaaaaaaagaaattcctgttatttgttttccaaaaggcttaaaagaggattacaaatcttttgttgatattgtaaaacccaactgtataagtattgattatgaagttgatccgaagtgggcaaaagaaaatttaaaagatatatgtatacaaggtggtatggatccgcatttgcttttaaaaaatgagaaagaagctctagaagaagtagataaatatttaaatatatttgaaaataattcttatatattcaatttgggacatggaattttaccgcaaaccgacccagagataataagacgaattgttaataaaattagaaaaaaaaaatgaa

SEQ ID NO: 277013 - DNA, 781 bp, Unknown
  Bacterial polypeptide expressing nucleotide sequence isolated from the Sargasso Sea
aagaaaaaaatttaaaaattttttagatatgtgcaaagatgctgatgtttgttgtgagttagcactccaacctttgaatgcatttaaacttgatgctgcaatattattttctgatattttaacaataccagatgccatgggtatagaggtaacatttgaagaaaataaaggcccaatttttaaaaatccaatcgaatcagttgatgatataaataaaataaagccatttaatccagatgaactttcctatgtttatcaagcagtaacaaacataaaaaatgctatcccaggaaatattccattaattggtttctgtggaagcccatggacattagcggcatattctattgaaggtaaatcttcacaagaatttaataaaactatgaacttcattagtaataataaagatgaaactcatttatttttaacaaaattaactgatgcctgttttttatatctaaggaaacaggttcaagcaggagcagatattattcaaatttttgattcttgggccaatcttttaaataaggaagatcttgaaatattttctatcaattatataaaatccctgatatatgctttaaaacaagatcctgtaacatctgatattccaatcattcttttttctagaaatccaaaatgtgatgataatactcttattgaaacctctgcagattgtattagtttgtattggtcaatggaaaactttaaccttgatcatgcaaagggcaaaatagcaattcagggtaatttaaacccaaaaatcttattagaatcaaaa

SEQ ID NO: 277014 - DNA, 760 bp, Unknown
  Bacterial polypeptide expressing nucleotide sequence isolated from the Sargasso Sea
caagaagttaaatttgaaaaaggcttaggtcctaaattaggtaaattagatttagatttaatctcaaatgtaaataaagatgaatttagtagaaaattaaatcctgtttataagtctatattaaacatatcttctaatcctatatgtaaaaataaagatataattggttttgtgggagcgccctggacaatcctagtttatatggttaataaaatgtcaccaaaaaaaaatctctctaaagaaatttttaatgacaaattatttataaacaaattattatttataattgaaaaattccttaaaattcatattgaaaatcaaattaaagcaggagcaagtataattcaaatttttgatagttgggcaggattattagaagataatatttctgaatttatttataaaccaactcttaatcttgtaaaccacgttaagaaattagatatacctgttatttgttttcctagaggaataaaagattataagaatttttgtgaagttgttaagcctgattcgataaacattgattatagtgttgatcccaaaaaaataattaaagatattaaaataccaatacaaggaggattagatccaaaaacgttattaaccgataaagaaaatcttcgtaaagaagtaacaaaatatctccaaattttcaaagaacacccctacgtatttaatcttgggcatggtattttgccagaaacaaaaattgaaatggtcgaagaactagtaaaaatagttagagattttaaataat

SEQ ID NO: 277015 - DNA, 592 bp, Unknown
  Bacterial polypeptide expressing nucleotide sequence isolated from the Sargasso Sea
tgttggtgctccatggacattattggtttatatgattaaccaacagtcacctaaaaaaaacctcaaaaaaaattttttcaaagatgaatttataataaatagaattttactaattattgaaaaatttttaaaagtgcatatcaaaaaccaaattgatagtggcgcagatataattcaaatattcgatagttgggcaggcttattagaagaaaaagatttacctaattacgtttatactccaactttaaatttagtaaattatgttaaatctttaaatgtgccggtgatatgctttcctagagaaataaagaattataaagaattttgcgatattgttaaacctgacgctgttagtattgattataatgttgatttaaaaaaaatacttagagatgtaaaaatacctatacaaggcggtttagatccaaaaattcttttaactgataatgaaaatttaaaaaaagaagcttctaattatttggaaatttttaaagatcatccatatatatttaatcttggacatggcattttacctgaaactaatccagaaatggtaaaaaacttaatcaaaattgttaaagactttaaatga

SEQ ID NO: 277016 - DNA, 481 bp, Unknown
  Bacterial polypeptide expressing nucleotide sequence isolated from the Sargasso Sea
atgaacgaaactactcctttactacttcgtgccgctcgcggagaaagtgtagaaaggcccccggtttggatgatgcgacaagcggggagatacatgaaggtatatcgcgacctgcgtgataatcatccaagtttcagggaaagatccgaaaatcccgatctttcttatgaaatttcaatgcaaccttttaaagcttttcaaccagatggagtgatacttttctcagatatcttgactcctcttcccggaatgggaattaactttgacatcgttgaaagtaaaggacccttaataaatgatccaataagaaccctcaagcaggttaaagacctaaatccccttcaaccagaacaaagcatgtcttttgtaggggaagtcctcgggaggctaagggaaagcgttggaaataaggctgcagttcttgggtttgtgggtgctcccatggactcttgctgcatatgttgtagaggggaaaagtagc

SEQ ID NO: 277017 - DNA, 783 bp, Unknown
  Bacterial polypeptide expressing nucleotide sequence isolated from the Sargasso Sea
aaacttaaaaataaatatgatttttttactcgctgcagaactccagagttagtttctgagataacccttttgccaattgatcaaataggaactgatgctgcgattatttttagtgatatattggtcgtccttcaagcaatgaatattgaagtagagatgaagccaaattttggaccatttattcctaatcccatcgattcaaaagaaaaagtgaaaaatttaataaccccaaatgttagggataaacttggatatgtgtttgaagctatcaagataactaaaagggatctaaatgatagagtccccctaataggatttgctggctctccttggactcttttttgttatctagttcagggtagtggttcaaaaactttcgacaaatccaaaggattcgcttttgcaaatccaaaagaaaccgaaataattcttgaaaagataaccttgacgaccattgaatatttgaagggacaaattgatgcaggagcagatgttgttcaaattttcgattcatgggggggacttttatcaccatctgattacagtgaattttctcttaagtatattaatagaatagtatcggcaattaagaactacgcccccgttattatttttggaaaaggatgttggtttgctttgaatgaaatggttaaaactggagcttctggtctaggaattgattggagttgctctgcaagaaatgcacgatatttgtctggtgggaatataactctgcagggaaactatgatccagccaaattactttccccaattcaaaaatca

SEQ ID NO: 277018 - DNA, 361 bp, Unknown
  Bacterial polypeptide expressing nucleotide sequence isolated from the Sargasso Sea
gatgcgccaagctggtagatacttaccagaataccgaaaaatacgccaaaatagcacatttttagatatggtgtataaccctgaaattgcctgtgaaattaccatgcagcccattcgccgattcggttttgatgcggccattttattttcagatattctagttaccccacaagcactaggaatggaactaacatttacaagtggcattgggccccaatttccaacaccaattcgatctcaacaagatgtggataactttgtggataactttgattgcttaaatccgatttatgaaaccattcgaatgttgcgtaaggaattacctgacaccaccacattaatttggctttgccggggcgcc

SEQ ID NO: 277019 - DNA, 789 bp, Unknown
  Bacterial polypeptide expressing nucleotide sequence isolated from the Sargasso Sea
tatgaaccccataactaactgtattaaaaataaagatactacatttaatcctatatggctaatgagacaagcaggaagatatcttccggagtttagggaaattagaaaagaaaatcaagactttataaagctttgcttgaataatgatttggcgtctgaaattactctacaacctattagaaggtttggatttgatggagctgtaatattttcagatattttaatgttaccttatggccttggtcaaaaagtagaatttgaaaaaaattttggacctaaattaggagatatagatttagaaacaataaaaagtattgatgaaataagttttactgaaaaaatttataaagtttataaagcaatcgaaaaaacctccaaagaccctttaatgaccaatagggatatgattgggtttgttggagctccttggacaatattagtttatatgattaataaatcttctcctaaaaaaggtttatcggataaattttttaaagatgattttttaattaatagattactagtagtaatagaaaaattcttaaaactacatataaaaaatcaaattgaggccggagctcaagttattcaaatttttgatagttgggctggattgttagaagaaaaaattccagaatatatttatatacctactttaaatattgtagagtatgtaaaaaaactaggagttccagttatttgttttccaagaggtattaaagattataaaaacttctgtgaaattgttaaacctgacgctgtaaatatcgattacgatgttgacccaaa

SEQ ID NO: 277020 - DNA, 505 bp, Unknown
  Bacterial polypeptide expressing nucleotide sequence isolated from the Sargasso Sea
tttttaaacattctaacttcagcttgttttttatatttaaaagaacaaataataagtggagcagatgctgtgcagatatttgattcctgggcaaatttgttaaaaggagaagcttatgatcaattttctctgaattacattaaaaaattattatcaatgttaaaaaaagatccaattactaaaaatacaccaataattctctttgcaagggacccttcatgtgatctaaataattttttaatccctgaattagattgcttgagtttatttacctcagctgacatcaatgatgcaatgaatactttcaatggaaaaatggctattcaaggaaacctaaaccctaaaatacttctcgaatcggatgcaatacttgttgatgcggtaaaacaactaagtgattcctttcaagattatcctggatatatatttaatttggggcatggtattactcccgatatcaatcctgaaaaagttgctgtaatgcttgatgcgctgagaagttaat

SEQ ID NO: 277021 - DNA, 310 bp, Unknown
  Bacterial polypeptide expressing nucleotide sequence isolated from the Sargasso Sea
aggcggtcagtggctgtcgcgaatctcacaaatcggatgcgatgccctgggttgtgactggaccacctctcttagggaggctcggcgcctggtgcaggaccgggtagcactacagggcaacctcgacccggcagtgctcaatgcctctcctgagaagatccgctcacccgttcgggacgttctcgaagattatggaacaggtcccggccatgtcttcaacctgggtcacggtattacgccggggattgatcctgagaatgtcaaggttctggtggactctgtccacgaattgagtcgaaccccgatttga

SEQ ID NO: 277022 - DNA, 772 bp, Unknown
  Bacterial polypeptide expressing nucleotide sequence isolated from the Sargasso Sea
tatggacttggtcaaaaagttgaatttgaaaaaaattttagggcctaaattaggggatataaatttagaaaaaataaaaaatattgacgaagtaaactttactgaaaaagtttataaggtttataaagcaatctcgaaaacatcaaaagatcccttaatgcataatagggatatgattggatttgtcggagctccttggacaattttagtttatatgattaataagtcttctcctaaaaaaggtttatcaagtgatttttttaaggatgactttttaataaatagattactaggaataattgagagatttttaaaacttcatataaaaaaccaagttgaagcaggagctaaagtaatccaaatttttgatagttgggctggattattagaagaaaaaattccagagtatatttatatacccacattaaatattgtagagtatgtaaagaaattaggtgttcctgtaatttgttttcctaggggtattaaagattataaaaatttttgtgaaattgttaaacctgatgctgtaaatatagattatgatgttaatccaaagaaaattgttaatgaaatcagaataccaatacaaggtggtcttgatccaaaattattattgaccgatcaaaaaactcttaaaatagaagttgaaaaatatcttaatatttttaaagatcacccatatatttttaatttaggtcacggaattctccccgagaccaaagttgaaatggttgaagaattaataaagattgtaagaaattttaaatga

SEQ ID NO: 277023 - DNA, 720 bp, Unknown
  Bacterial polypeptide expressing nucleotide sequence isolated from the Sargasso Sea
tatgagtacagaaagtttatatttaaatgctgcaaaatgtaaaaaaacagagcgacctccaatttggatgatgcgtcaagcaggacgttacttaccggaatatcgagaattacgcaaaaaatattcattcatggaaatgatgcatactcctgaactggctgctgaagtcaccattcaacccattacccgctttggaatggatgctgcaattatgttttctgacattcttattacagcccaggcactgggttcagatctagattttgttgaaggaaaaggccctgttttaagtaacccaatcacttcagaagagagtttcaatactctattgaaaaaaaaagatgtcagtattttttcatctgtagaaaccgaaataaagatacttaaaaaagaattaggaaatacagcactcattggctttgcaggagcaccatttacggtggcctcctacatgatagaaggtggcagcagcaaagatcttaaaaaaacaaaacagtgcatgctaaataatccaaccctatttaattcaattatttcagaacttgaatcaattactatagattacctaaacaaacaaatcgctgctggagtcgatgccttacagttatttgattcttggacaaatacgttgtcatggaatgattttaatgagatatcctcaaaaccactacaacggattattcaatccttagataacccaaaaaatatccctattacaat

SEQ ID NO: 277024 - DNA, 346 bp, Unknown
  Bacterial polypeptide expressing nucleotide sequence isolated from the Sargasso Sea
atgccggtgacgcggtgtgagagcggtgatgtcgtcccgctcatggtgcgcgcggcgaggaacgaaaaagtggagcgcgcgccggcgtggatgatgcgtcaggctgggaggtacatgaaggagtatcgagacgtggcggtcaagcacccgggctttcgagagcgaagcgagacgacggatttgatttgtgagattacgttacagccgtttcgagcgtttcaaccggacggggtgattctgttcagtgacatcctgacgccgtttccggcgttcgggatcgattttgagattgatgattacaaagggccgatgctggagaagacgattcgaagcgccgaggattgaa

SEQ ID NO: 277025 - DNA, 831 bp, Unknown
  Bacterial polypeptide expressing nucleotide sequence isolated from the Sargasso Sea
cagcctataaagagatttgggtttgatggtgcagtaatattttctgatattttgatgttaccatatggtcttggtcaaaaggtagaatttgaaaaaaattttggaccaaagctcggagaaatagaattagaaaatattaaaaatgttgatgagattaattttacagaaaaaatttataaagtatacaaagcaatttccaaaacttcccaggatcctttaatggataataaagacatgataggttttgttggagctccatggactattcttgtttacatgattaatagatcatcaccaaaaaaaggtctaacagatggattttttaaagatgaatttctaattaacagactattaggaattatagaaaaattcttaaaagttcatataaaaaatcaggttgaggcaggggctaaagttattcaaatttttgatagttgggcaggattactagatgataaaattcctgaatacatttatatccccacattaaatattgtagaatatgttaaacaactaggtgtgccagtaatttgttttccaagaggtattaaagactacaaaaatttctgtgaaatagtaaaaccagatgcaataaatatagattataatgtcgatccagaaaaaataataaaagaaataaaaatccctatccaagggggacttgacccaaaaatattattgaccgataaagaaattcttaaaaaagaagtggaaaaatatcttcatatttttaaggatcatccatatatatttaatttaggacatggaattttaccagaaactaaaattgaaatggttgaagacttgattaaaatagtaagaaactttaaa

SEQ ID NO: 277026 - DNA, 682 bp, Unknown
  Bacterial polypeptide expressing nucleotide sequence isolated from the Sargasso Sea
atggataatatttttttaaacactcttaatggaaagctagaagaaagacccccagtttggtttatgagacaggcaggaagaattttaccatcctacaggagactcaaagaagctcataaattttatgatatgatgaaagatgctcagctaacatcaaaagttaccatgttacccattgatgatttaggggttgatgcagcaattctattttcagatatattggtgattccagatgcacttggattagacttggtttttacagataatggtccaaaatttgttaatgcaattgaagaaggaattagacctaatttaaactttaatcctgaaaagctggaatatatatataataatattcgacaaactgttaaagacaagcaaaagactccattgattggtttttgtggaggaccattgactacatttttatttatgttcagaggtaatcagaaccaaaaaagctttaaaaatgctgtcaaatatttttataaaaatagaaaagaaagcatcaaaattattgagcaaatcacacaagcatcaattgaatatgttgaaaatcaaattaaaagcggaattcaatgttttcaactttttgaaacatattgtggtagtattccctacgatttgtacacagaattaatacttccatactcaaaaaaaatattaaatagtgcaaaaaaat

SEQ ID NO: 277027 - DNA, 801 bp, Unknown
  Bacterial polypeptide expressing nucleotide sequence isolated from the Sargasso Sea
taattttttctgatattttgatggtaccgtatgggcttggacaaaaagttgaatttgaaaaaaattttgggccaaagttaggtgaattaaatttagaaaatatttataaaaaagacgataatagttttactaaagaattagataaagtttataaaactatttctaaaacatcaacaaatcccttaatgaaaaataaagatatgataggatttgtaggagccccgtggactattcttgtttatatggtaaatcgttcatcaccaaagaatggtttaaaaaataatttttttaatgacaaatctttacttaacaaactattagaaataatagtaaaatttttaaagctacatattaagaatcaagtagatgcaggagcagaagttattcaaatcttcgatagttgggcaggattgttagaagacaatatgtctgattatatttatatgccaacgtttaatattgtagaatacgtgaaagaattaggaatcccagtcatatgcttcccgagaggaataaaaaattataaaattttttgtgatactgtaaaaccagatgcagtaaatatagattatgatgtagacccaaggaaaattgtaaaagaaataaatattcctattcaaggtggtcttgaccctaaaatattacttacagataaagtaaatttaaaaaattctgtccaaacttatctaaatatttttaaagatcatccctatatatttaatctaggacatggaatattacctgagacgaaaattgagttagtagaaaatttgattgaaattgtaagagattttaaatgat

SEQ ID NO: 277028 - DNA, 683 bp, Unknown
  Bacterial polypeptide expressing nucleotide sequence isolated from the Sargasso Sea
gacttatgagacagtcaggttgtgtcgcgacaaactatctccggataaggctttaatagggtttgcaggctcaccatggacagtagctacttacatgatagagggcggtgcatcaaaaaactacgctaaagtcaaaagctgggcgtataaagatgaacaaagcttcaatactttaataaatataataacgacagccactatagatcatttgagtgcgcaaatagataacggcgcagatgcagtgaagttatttgattcatgggctggagtgttgtcaccaagtcaatttgctaaatgggttgtaaaaccaaccagagatatagtggaagcaattaagtggaaacaccccactgttaaggtgattggctttccgaagggggctgggcaccagtatatagactatgtgaataaaactggtgtagatgccgtagcgattgatacgagtattgacctgagctgggctgcgaaagaattagatgaaagggtagtgattcagggaaatatggatcctatttcactgatagttggaggagaacctatgttatatcaagccagctctatagtcacagacatgaaggatcgcccacacatttttaatttaggtcacggtgtcttgccggaaacaccgccagaaaatgttgaggctctcgccatattcttacgtaatctaggggaaggctaac

SEQ ID NO: 277029 - DNA, 505 bp, Unknown
  Bacterial polypeptide expressing nucleotide sequence isolated from the Sargasso Sea
taagttatttataaaaaaattattatctttaattgagaaattccttaaaattcacattgaaaatcaaataaaatcaggtgcaactataatacaaatttttgatagttgggcaggattattagaagataatatttctaaatttatttacgaaccaacccttaatcttgtaaatcatgttaaaaaactagatgtacctgttatttgttttcccagaggaatcaaagattataaaaatttttgtgaggctgttaaacctgacatggtaaatattgactataatgttgatcctaaaaaaataattaatgaaatacaaataccagtacaaggaggattagatccaaaagtactattaacagataaggaaaatttacatatagaagtaataaagtatcttcaaattttcaaagatcacccttacgtttttaatcttggacatggtattttgccagaaacaaaaattgaaatggtagaagaactagtaaaaacagttagagattttaaataa

SEQ ID NO: 277030 - DNA, 304 bp, Unknown
  Bacterial polypeptide expressing nucleotide sequence isolated from the Sargasso Sea
tatgactccaataataaactgcattgtaaatatggacactcgttcaaatcctatatggttaatgagacaagcaggaagatatttacctgaatttcgagaaataagaaaaaataatcaagactttattaaactttgtttaaatgaaaatttatcttctgaaattactctacaacccattaagagatttgactttgatgctgccataattttttctgatattttaatgataccatttgctattaatcaggacgtaaaatttgaaaaaggttttgggccccaattaggaaaattaaatatagatgct

SEQ ID NO: 277031 - DNA, 257 bp, Unknown
  Bacterial polypeptide expressing nucleotide sequence isolated from the Sargasso Sea
ttatggcatgtttacttcgattgatccaagcagtgctataagtgtatttgaaggtactcatgcacttcaaggtaatttagacccaaagattcttcttgaggaagattcagtgatcaaagaaagtgctttaaaaatgctgtcagaatttaaagactttccgggctacatttttaacttggggcacggcataacaccagatataaatccagataaggtaaaagtcttgcttgaagctataagggagtctgaaagttagt

SEQ ID NO: 277032 - DNA, 865 bp, Unknown
  Bacterial polypeptide expressing nucleotide sequence isolated from the Sargasso Sea
aatgaaaatttgtcatctgaaataacattacaacctataaaaagatttgattttgatgcagcaataattttttctgatattttaatgttgccatatggtttgggtcaagaagtaaaatttgaaaaaggtttgggtcctaaactgggtgaattagatttagatttaattgcaaatgtaaataaagatgaatttagtaaaaaattaaatcctatttataaatctatatcaaacatatcttctaatagtatatgtaaaaataaagatataattggttttgtgggagcaccgtggacaatcttagtttatatgattaataaaatgtcaccaaaaaaatctctatcaaaagaaatttttaatgataaattgtttgtaaaagaactattatctgtaattgagaaattccttaaaattcatattgaaaatcaaataaaagcaggtgcaaccttaatacaaatttttgatagttgggcaggattattagaagataatatttctaaatttatttatgaaccaactcttaatcttgtaaaccacgttaagaaatttgatgtgcccgttatttgctttcctagaggagtaaaagattataaaattttttgtgaaattgttaaaccagacatggtaaatattgactataatattgatcctaaaaaaataattaatgaaatacaaatacccgtgcaaggcggattagatccaaaaatactattaaccgataaggagaacttaaatacagaagcgataaagtatctccaaattttcaaagatcacccttacgtatttaatcttggacatggtattttaccagaaacgaaaattgaaatggtgcaagaactagtaaaaacagttagagattttaaataat

SEQ ID NO: 277033 - DNA, 649 bp, Unknown
  Bacterial polypeptide expressing nucleotide sequence isolated from the Sargasso Sea
tatgagacaagctggaagatatctgccagagtttagagaaatcagaaaaaaaaatactgactttattaaactatgtttaaattccaatttgtcagctgaaataactttacaaccccttaaaagatttgacttagatgcagctataatcttttctgatatattaaccttaccttatggtttgaaacaaaaagtagaatttaaaaaaaatattggacctatcctcggtgatttaaacattgatcaagcttttgaagttactgaaagtgattttattgaaagacttgatcccgtttataaagctataaatttggtaagaaataataatttaacagataataagtctactataggttttgttggagctccttggacattacttgtttatattttaaataaacaatctccaaaaataaagctcaaagaaaatttttttaaagatttttctattattgaaaaaactttaaagataatagataaatttttaaaggttcatattaaaaatcaaattgatagtggtgcagagattatacaaatttttgatagttgggcaggactattagaagataaggattatgatttttacatctttaatccaacttgttccttagttgaatttactaaatctttaaatgttccagtgatttgtttt

SEQ ID NO: 277034 - DNA, 625 bp, Unknown
  Bacterial polypeptide expressing nucleotide sequence isolated from the Sargasso Sea
atgaggcaagcagggagatatttgccagaatttagagaaattagaaaagaaaatcctaattttattaatctatgtttaaatgaagatttgtcttcagaaataactctgcaacctctaagaagatttgattttgatgcagcaataattttttcagatattttaatgcttccatatggattgggtcaaaaagtagaatttgaaaaaaactttggtccaagattgggtgaattaaatttaaatgaaattactaagattgatgaaatcgactttgtagaaaaaatacatcgtgtatatagggcaattaaaaaagttagctctgaaattaacttaaaaaataaaaatactattggctttattggcgctccatggacgttattagtttacatgattaaccagcagtctcctaagaagaatttaaaaaaagatttttttaaagatgagtttttaattaacagaattttattaattattgagaaatttttaaaagtgcatattaaaaatcaaattgataatggcgcaaatataatacaaatatttgatagttggtcaggcctattagaagaaaaagatttacccaactatgtctatgcaccaactttaaatttagtgaactatgtaaaatctt

SEQ ID NO: 277035 - DNA, 907 bp, Unknown
  Bacterial polypeptide expressing nucleotide sequence isolated from the Sargasso Sea
gagtttagagaaattagaaaaaaaaaccaagacttcataaagctttgcttgaataatgatttagcgtctgaaattacactacaacctattaggaggtttggttttgatggagctgtaatattttcagatattttaatgttaccttatggccttggccaaaaagtagaatttgaaaaaaattttggacctaaattaggagatatagatttagaaacaataaaaaatgtcgatgaaataagttttactgaaaaaatttataaagtttacaaagcaatcgaaaagacgtccaaagaccctttaatgagcaatagggacatgattggatttgttggagctccttggacaatactagtttacatgattaataaatcttctcccaaaaaaggtttgtcgggtgaattctttaaagatgattttttaattaatagattactaggaataatagagaaattcttaaaacttcatataaaaaatcaaattgaggctggagctcaagttattcagatttttgatagttgggctggattactagaagataaaatcccagaatatatttatgtacctacccttaatattgtagattatgtaaaaaaactgggagttcctgttatttgttttccaagaggtattaaagattataaaaacttttgcgaaattgttaaacctgacgccgtaaatatagattatgatgttgacccaaagaaaataatcaatgaaatcaaaatacctatacaaggcggtcttgacccaaaaatattattaactgatcaaaaaactcttaaaatagaagttgaaaaatatcttggtttttttaaagatcacccatacatttttaatttaggtcacggaatacttcctgagactaaaattgaaatggttgaggaactaatcaagattgtaagaaatt

SEQ ID NO: 277036 - DNA, 538 bp, Unknown
  Bacterial polypeptide expressing nucleotide sequence isolated from the Sargasso Sea
gatgagtgactccctgcccctgctgctgcgtgccgcgcgcggtgaatcagtggagcgtcctccggtctggatgatgcgtcaggcaggccggtacatgaaggtctaccgggaccttcgcgaccgtcatcccagcttccgggaacgctcggagaaccccgatctctcctacgagatctccatgcagccattcgaggcgttccagcccgatggcgtgattctgttctccgacatcctcacgccgctgccgggcatggggatcgacttcgacatcgtggagagcaaggggccgcagatcaacgacccgatccgcaacctgtcccaggtggaggccctgaagcccctgatccccggcgagagcatgcccttcgtgggcgaggtgctcggtcggctgcgggagagcgtcggcaaccgggctgccgtgctcggcttcgtgggcgccccctggaccctggccgcctacgtggtggaaggcaagagcagcaagaactacgccgtgatcaaggcgatggcgttccaggaacccgcgctgctccacaga

SEQ ID NO: 277037 - DNA, 601 bp, Unknown
  Bacterial polypeptide expressing nucleotide sequence isolated from the Sargasso Sea
catgattggctttgttggggctccttggacaatacttgtttatatgatcaattgttcttcaccaaaaaatggtcttaataaaaatttttttaatgatgagttattaataaaagaaacaatgaaaataattgagaaatttttaaaattacacataaaaaaccaagttgatgccggggcaaatattatacaaatttttgatagctgggcaggattaatagatagtaaaattgatgactacattctaaatccaacttttaatcttgttgaatatacaaagaaactaggcgtacctgtaatttgttttccaaggggaataaaaaactataaaaatttttgtgatattgttaaaccggacgctgtgaatattgattatgacgttgaccctattaatattgtgaaagaaatacaaattccagtccaaggaggacttgatccaaaaatattactctccgacagagaaaatttaacaaaatctgttaaacattatttaaacattttcaaagatcatccttatatatttaacttaggtcatggaatattacctgaaactaaaattgaaatggtagaagtgatggtgaaaactgtaagagaatttaaatga

SEQ ID NO: 277038 - DNA, 427 bp, Unknown
  Bacterial polypeptide expressing nucleotide sequence isolated from the Sargasso Sea
caacgttattcaaatctttgatagttgggcaggtttattagaggaaaaagatttaccaaattatgtttattcgccaactcttaatttagttgattatgtaaaatctttaaatgtaccagttatatgtttccctagagaaataaaaaattataaaaaattttgtgaaatcgttaaacccgatgctatcagcattgattacaatgttgatccaaaaaatatacttagagatataaaaatacctatacaaggcggtttggacccaaaaattttgttaacagataaagaaatattaaaaaaagaggcttccaaatatttggaaattttccaagatcatccatatatatttaatctcggccatggtattctaccagaaacaaatccagaaatggttgaaagcttaattaaaattgtaaaagattttaaatga

SEQ ID NO: 277039 - DNA, 925 bp, Unknown
  Bacterial polypeptide expressing nucleotide sequence isolated from the Sargasso Sea
tatgggcattttaaaagattgtatagaaaataaagaaattaatagtattccagtttggtttatgagacaagcaggcagatacttaccagaatttagagagataagaaaaaataacacaaattttatcgatctttgcttaaattctgctctttctaaagaaatcacattacaaccccttaaaaggttcccccttgatgctgcaataattttttcggacattcttttaataccttatgcactaggtcaaaaagtagagttcgagaaaaattttgggccaaaacttaataagcttgatttggataatctatttaatattacagataaggaaataataagtaaattaaaaccagtttacgaattaataaaaataacgtctaaggatgatgctttaaataataaagatttaataggttttataggagcaacctggacacttttagtttatatgataaatggacaatcacccaaaaaaaacatagatcaaaatatctataaaatctcaatacataaagaactaataaagaaaataattcatgctcaaaaattacatataaaaaatcaaattgacagcggcgcaagtgtgatacaaatatttgatagctgggctggacttttaaataaagataagtatgaagattacatctataaaccaacaaaagaactagttgaatatactaatagcttaggcgttaatgtaatatgttttccaagaaacatcgactcttacaaaaaatattgtgatatagtgaaacccaatgcaattagcattgattataaaacagatccaacaaaaattgcagacaacatcgaaattccaatccaaggcgggatggatccaaaatgtttattggtagataaaaatgaaatgttagaaaatgctcggagttatctagacatatttaaaaaatacaaatatattttttaa

SEQ ID NO: 277040 - DNA, 667 bp, Unknown
  Bacterial polypeptide expressing nucleotide sequence isolated from the Sargasso Sea
atgaatgatacattaagaaaatgcattaaagaaaaaaaaacaacttatactcctatttggtttatgagacaggcaggtagatatttgccagaatttagagaaataagaaaaaataatcaggattttataaagctttgtttaaacccagatctagttagtgagataacattacaaccccttaaaagattcgatttagatgctgctataattttttctgatattttaatggttccgtatggtctgggtcaaaaagtagaatttaaaaagggtttcggaccagtattagaagaaataaatttagataaaataataaatacagaccctagagattttgttcaaaaattattacccgtttataaaggcatagaaaaagttaaaaaaacattaaagaaaaaagaacttataggttttgtaggagcgccctggactttattactttatatgttgaataaagagtctcctaaaaataattttaattttaataaaataaataaagataaatttttaattaataaattattaaaaaaaatagaagaaatgatatgtttgcatatagataaacaagtagatgcaggcgccaacataattcaaatttttgattcttgggcaggtttattgcctgaaaaggagctacctaattattgttatattcctactttaaaaattg

SEQ ID NO: 277041 - DNA, 670 bp, Unknown
  Bacterial polypeptide expressing nucleotide sequence isolated from the Sargasso Sea
cttggataaagtttttctaaaagcttgtcggggcgaagcaactccctacactccgatatggttaaatcgtcaagcgggtcgatacatgcctgaataccatgtggtaaagggaaagatgaccagcctcgagtttttcaagaatccagaaaaagccgcgattgccacactcgatgctcaacgaatcttaaatactgatgctgccattatgtttgcggatttgttgcctatcatggagcccatgggtttagagctcgactacgttgagaaagtaggtccagtattttctaatcccgtgcgttcgcaaaaagacgtagagaaattaagagttgtggaagcagaggttgggacaccttacatagagcatacggtaaagaatatcctctcagaattgccaaaagagatagccttgattggtttcgctggcgctccttttacgcttgcctcttatgctattgagggagggtcttcgaggaactacatctttgtaaaaaagatgatgtatcaaaaaccggaactttgggatttgttgatttccaagttagttgatcaggttagcagttatcttaatctccaaatatcagcgggtgtcgaggccgtccaactttttgacacttgggtggggaatttatctcggcaggacttcaagcagtttgttagaccacatcttaaa

SEQ ID NO: 277042 - DNA, 256 bp, Unknown
  Bacterial polypeptide expressing nucleotide sequence isolated from the Sargasso Sea
tatgaacaaacttaaagattgcatagtcaataaaaatacctcaaatactcctgtatggtttatgagacaggcgggtaggtacttgccggaatttcaaaaaataaggaaagaaaatccagattttattaaactttgtttgaatagtgatttagtcaaagaaattaccatccaacctttggatagatttgatcttgatgctgcgataatattttcagatattttaataataccttatggtttaggacaaaaagttgag

SEQ ID NO: 277043 - DNA, 430 bp, Unknown
  Bacterial polypeptide expressing nucleotide sequence isolated from the Sargasso Sea
aatttttgattcatgggctgatcttctagatgcaagtcaattaggaaaattttcctttacttatactcaaaaattaattgacttgttaaagcatgatgaaataacaaaagacatacctttaattgtctttgagaaaaatccaatcttaccattttcggataatccatttaaaaacattcaatgtttaagcttgcatttcacagaaaatcttaaagattctagggataaactcctaaataagtatgccattcaaggcaaccttgatcctagaatacttttacttggtgagaatgagatcattaccgaagtaagaaaaatatgtaacacaatgaaagattatcctggctatatttttaatctaggtcatgggataacccctgacattgatccagaaaatataaaacttatgattgaagcaattagagactaa

SEQ ID NO: 277044 - DNA, 816 bp, Unknown
  Bacterial polypeptide expressing nucleotide sequence isolated from the Sargasso Sea
tatgagacaagctggaagatatttgcctgagtttagaaaaattagatctaaaaatagtaattttattaatttatgtttagatgttgacttaagttcggaaattacaatacaacccattaaaagatttgacttagatgccgcaataattttttctgatattctattagtaccatacgcgatgaatcaagaggtaaaattcaaagaagatataggtccggttttgtcagattttagtttaaagaagtttaacctcatcaaaactagcgattttaaagaaaaactttctcccgtttataaatcattaaccaaaacaaggaaaaatttaaactcagaaaaatcactgatagctttttcgggtgcaccatggacattattggtttatatgcttaatttaaaaagctccgaaaacagattaaacgaaacttttttttcaaagaaaaaacttctaaaccaaacaattaataagttaaccgaatttatctgtttacacttagataatcaaattaatgctggagctgatattatccaaatttttgactcttgggcaggattaattccatatgagagtttagatgaatattgcattaaaccaaatatgaaaattgtaaactattttaaaaagaaaggtgttcctgtcatatgctttcctaaaggtttgaaaaataattataaaaaatttaatgatgttgtttctcctgatggtctcaatattgattatgaaattgatcctatttgggcaagagaaaatctttttaatacttgtttgcaaggtggaatgcatccagaaattttgttaggagatgaaaaagtcataat

SEQ ID NO: 277045 - DNA, 721 bp, Unknown
  Bacterial polypeptide expressing nucleotide sequence isolated from the Sargasso Sea
ttttaatataaataagtttatagggacaaaaaaagaagactttatttttaagttaaacccggtttacgaagcaataaagaaaacaaaaaaaaaattaaaaaaagaagtttctcttatctcttttattggggcaccgtggactttaataatatatcttctaaaccttaaaaaaggtggattattaaacaaaacaaaatttaatgataaaaaagaaattataaattctatatttaaaaaactcatggagtttcttaaaattcatattctttaccaaaaagaagcgggcgcggacatattacagatatttgactcatgggcgggtttaattcctcggaaaagtcttaaagaatattgttatgatcccaataaagaattggtcgacttttgcaaagaaataaaaataccgtcaatttgttttccaaaagggttgcaaaaaaattatattgattttaacagaattgtgaaaccaaatgcaattaatatagatcaagatatagatccagaatgggctaagaaaaatttaaaaaaagtaattatccaagggggaatgagtccaaaaattttattaaacgaggaaaatgaagttatgaaagaagttgataaatttttaaagatttttaaagatagtccgtatatttttaatttaggacacggtattctccctaatactaatcctgaaattataaataaaattatagaaagagttaaaattgtaaaatga

SEQ ID NO: 277046 - DNA, 663 bp, Unknown
  Bacterial polypeptide expressing nucleotide sequence isolated from the Sargasso Sea
aatgaccccaattcaaaaatgtattattgaaaaaaagattaatctaaaccctatgtggttgatgagacaagccggaaggtatttacctgaatttcgtgaaataaggagtaaaaatcaagattttgtaaaattgtgtcttagcgaaaatttggcgtctgagataactttacaacctttagaaagatttaattttgatgctgcaattattttctcggacattttaatgttaccatatggtcttaatcagaaagttgagtttgaaaaaaattttggtccgaagctaggtaatttaaatctagatgacttaaagaatattgatgaggtagatttttcttttaagttaaattctgtttataaggcaattaaaataacatcaagtaagattaacaaaaaagaaaaagatttaatagggtttgttggtgctccttggacaatcttagtttacatgatcaacaaaatctctcctaaaaaaaaacttaaagaagatttttttaaagacgaatttttaattaatcgattattatctattatcgataaatttctcaaaattcatattaaaaatcaagttgaggcaggtgccacgattatacaaatatttgatagttgggctgggctgcttgaaagtaatatacccgaatatatatacataccaacattaagtct

SEQ ID NO: 277047 - DNA, 457 bp, Unknown
  Bacterial polypeptide expressing nucleotide sequence isolated from the Sargasso Sea
aatgacaccaataaaagaatgcttgataaataaaagtactaaaattaatcctatatggttaatgagacaagccggaagatatctgccagagtttagagaaattagaaaaaaaaatcctaattttattgaattgtgtttgaaccctcatttatcagaggagataacgttacaacctataaaaagatttaattttgacgctgcaataatcttttcagatatattaatggtcccatatggtatggggcagtctgtagagtttaaaaaaaacttaggtcctaatttaggaaattttagaatgactgacattcaaaaaactactgaaaatgactttaaaaataatttattaccaatatataaattattatcaaatctaaaaaaaagtaaagacctgaacaataaagatttaataggttttgttggagctccgtggacattattagtttatatgtttgaataa

SEQ ID NO: 277048 - DNA, 730 bp, Unknown
  Bacterial polypeptide expressing nucleotide sequence isolated from the Sargasso Sea
tatggactcggtcaaaaatgttgagtttaagaaaaattttggacctaatcttgaagatttggagatagataagttactagaaattgatgaagaaaattttacaaaaaatttatctccaatatatcagcttctaatcgatttaaaaaaaagtgaagatttaaaaaataaagacataattggttttgtaggagctccttggacactactcgtatatatgataaacaaggtctccccaaaaaatggtttaataaacaatttcttttcagacacaagtttaatcaataatttgttaaaaattttagataaatttactaaaacccatattaaaaaccaagtaaaagctggggcaactataatccaaatatttgatagctggtctggattgatcaaatccgattttgataaatacttatataatccaactttatctttagttaattataccaagagcttgggggtaccagtgatttgttttccaagaggaataagagactacagtcagttttgtaaaatcgttgagccaagcatggttaacatagactacgacgttgacccaaaaaatttacttaaaaatatagatatacccatacaaggtggattacaccccgaggtactattgacaaataaagcgcacttaaaaaaagaagtaaataaatatttagagatctttaaagatcacccttatgtatttaaccttggacatggtattcttccagaaacaaaaaattga

SEQ ID NO: 277049 - DNA, 463 bp, Unknown
  Bacterial polypeptide expressing nucleotide sequence isolated from the Sargasso Sea
cgttagtggcgtagatgcaattcagatatttgactcttgggcttttcttctttcagaagaacaatacctagaatattctttgaaatatataaagaaaattcttaaaaaattatcggaggatcctattacaagcaaaactccaactattgtttttgctagagatccagaatgtaatcttaatgaatttaaattagataatcttagttgttttggcatgtttacttcgattgatccaagcagtgctataagtgtatttgaaggcactcatgcccttcaaggtaatttaaacccaaagattcttcttgaggaagattcagtgatcaaagagagcgctttaaaaatgctgtcagaatttaaagactttccgggctacatttttaatctagggcatggcataacaccagatataaatccagataaggtaaaagtcttggttgaagctataagggagtctggaagctag

SEQ ID NO: 277050 - DNA, 336 bp, Unknown
  Bacterial polypeptide expressing nucleotide sequence isolated from the Sargasso Sea
ccataattctgttcactaagaatgggggtcagtggttgtcgcagattgctgatgcaggtgctcatgcaattggccttgattggaccatcgaaataggagcggcgaaaaaactagtaggaacaaagtgcgctctgcaaggtaacatggacccatcaattttgttctcgtctccaaaaacaattcgcgaggaagtgggccgcattttgtcagattttggcaaacagaatggacatgtttttaacttaggccatggtattgcgcccggagtaaatcctgatcatgtaaaagtttttgttgactcagttcatgaaatctcagcccagtatcacatttgag

SEQ ID NO: 277051 - DNA, 619 bp, Unknown
  Bacterial polypeptide expressing nucleotide sequence isolated from the Sargasso Sea
tctgccgcattaggtaaaaaagtaaataggcctccagtatggatgatgagacaagcaggaagatacatgaaaatctatagagatttaagggagcgttacccaagctttagagagaggtctgaaaatccagaactatcatatgagatatcaatgcagccttttcatgctttcaaaccagatggtgtgatacttttttcagatattctcacacctcttccagggatgggtataaattttgaaataatagaaagtaaaggtccaataattgaagacccaataagaactcttagccagatagaaaatttaaaagaattaaatccaagtgagagtttaagctttgttgggcaagttctttcttcactaaaaaaagatgtaaataatgaagcaacagttttaggttttgtaggcgcaccttggactcttgctgcatatgtagttgaaggtaaaagcagtaaaaactattctttaataaaatcaatggcttttaaagaaccagatttacttcacaaacttcttgatcattttgcaaaatctattggtgaatatcttaaatatcaaataaaatctggagcacaagtagtacaaaaatttgattcatgggcaggacaactaagcccac

SEQ ID NO: 277052 - DNA, 772 bp, Unknown
  Bacterial polypeptide expressing nucleotide sequence isolated from the Sargasso Sea
catgagtaaggatcgtttaattttaagaacaatacgacgagagccaaccgaacgaaggccgctttggataatgcgtcaagctggacgttacttgcctgaatatcgaaaattaagagaaacatattcctttaaagcgctatctcaatcgccggaattgtcaacagaagtgactttgcttcccctggaacgttacccactagatgcagctattgttttcgcagatatcatgagcccactcccagctttgggaattgaatttgattttgatccgggtccagttgtagcaaacccaattcgcaatcaaaaagatgttgatttgctcatacctcctgacccagaaaaactcgcatctgaagttataactacacttcaccaaacgcgttccgctatttcagaagatattgcattactaggtttctgtggcgcgccatggacattagctgcatatctagtggaaggtagaggagtgaaagatttccctaccctgcgagcatttgccgctgcacaacctgatgccttggactcgcttttaaaaaaattatctgatgccatggctacgtaccttatcaatcaagcaagtgctggtgctgatgctgttcaaatatttgactcatgggctgggattctttctcttcatgattgggaacgacttattcgcccacacctacatagtctgctccagaaggtaggtgatgcaggtattcccagaattctatttcttcaaaatgcaccgcatttggtagatgcctatgcaagcctttcctgcagaggt

SEQ ID NO: 277053 - DNA, 886 bp, Unknown
  Bacterial polypeptide expressing nucleotide sequence isolated from the Sargasso Sea
gaaaaaaaaaatcaaaattttattagtttatgtttaaatacaaaattagtacttgaaataactttacagccaattaaaagatttgatttagatgcagctataattttttctgatatattaatgataccatatggttttggacaaaatgttgtttttaacaaaggacttgggcctgaacttggtataattgataaaagtaatctttctaatattaatgaaaaagacttcaaaagaaaacttaatcctatttataactcaataaagattacatcaagaaatgaaatactaaaaaacaaagattttattggttttgtaggtgctccatggactctacttgtttacattattaatagggcatcaccaaaaaaaaatctaaaaaaaaattttttcgctgataaatcttttattgatgaattgctaaaattattgataaaatatattaagattcacattttaaatcagataaaaagtggcgcaactataatacaaatttttgacagttgggctggactattagaagaggaggatttagaaaaatatatatatgctcctacgaaagaagttgttgattttataagaacattaaatgttccatctatttgttttccaagaaatattaaaaactataaaaaatttgttaatatggttaatccagatgtaataagtattgattacaatgttgatccggagaaaatatcagaagaaattgatatacctgtgcaaggcggtttaaatccagaaaaattgctagaagataaagctactttaaaacaagaggtgaaaaaatatttaaaagtttttaaaaatcatccttatatatttaatttaggacatggtgtcctgccagaaacaaaccccaatatgggtagaatatttaataaagttt

SEQ ID NO: 277054 - DNA, 811 bp, Unknown
  Bacterial polypeptide expressing nucleotide sequence isolated from the Sargasso Sea
atgaggcaagctggtagatatttaccagaatttagagaaattagaaaaaaaaatactgattttattaaattatgtttaaatgaagaattatcttcagaaattactttacaaccacttagaagatttaattttgatgctgctataattttttctgatattttaatgttaccgtatggtttaaatcaaaaagtagaatttaaaaaaaatttcggaccattattaggtgatttaaatttgaatgaaatttttaaattaaatgaagataattttattaaaaaacttagttctgtttataaagcaataaatttagttagtaaaaatgaacttacaaaaaataaaagcataataggctttgtaggagcgccatggactcttttagtttatatgattaataaacaatcccctaaattaaaattaaaaaatgacttttttaaagataatgtattaatagaaaaagtattaaatattttagaaaaatttttaaaaatacatattaaaaatcaaataaacaacggtgctcaaataatacaaatttttgatagttgggcaggtttgttaaaagatgctgatttaacaaaatatatttataacccaactttttcattagtagaatttaccaaatctttaaacgttccggttatatgttttcctcggggtattaaaaattataaaaattattgtgaaattgtaaagccggacgctatctgtatagattatgagatagatccacttcaaattaaaaaagatattaaaattccagttcaaggtggaatggatcctaaaattttattaactaataaagaaaattaaa

SEQ ID NO: 277055 - DNA, 997 bp, Unknown
  Bacterial polypeptide expressing nucleotide sequence isolated from the Sargasso Sea
cttgaaaacattttaaaaaaaaggctatcttgtaaatctgtttggtttatgagacaagcaggtagatatctaccagaatttcaagaaattagagaaaaaaataaaaattttatagatttgtgtttcaatagtaaactgagttcagaaataacacttcaaccaattagcagatttaatttagattcagccataattttttctgatattttattagtaccatatgctttaggtcaaaaagtatcttttattgaaaatttagggccagaattgacaaagttaaatattaataaatttttacaaattagtgaaagcaatttttataaagttttaaaacctgtgtacaaggcaatcgaaataacaagaaaaaaattagaaagagaaaaatctttaatctctttcgtgggagctccatggacattgctagtttatatgcttgatcttaagaaaggaaaaaaagaaatagatacatctaaattagagagcagcgatataaagatcgatgcgattttagacaaattaaccaattttttatgtttgcatattaaaaatcaaatagacgcaggagcaaacgtggtacagatttttgactcgtgggctggcttcataccggaaaaaaaaattaatgaatactgttttgcacccaataaaaaaattgttgaattctgcaaaaaagagaaaatacctaacatttgctttccaaagggacttcaaaaaaaatatttagaatttaataatattgttcaaccggatggaataaacatagactacgaaatagagcctttgtgggctaaggaaaatttaaaaaatgttgttattcaaggtggtttacatcctgaagcacttttaaaaacggaagaagaaatgtttaaagaagcgacaagatatattcaggtctttaaagacactccttacgtttttaatttaggtcatggcttacttcctgaaacagatcctgatagagtaaaaagattaattaaattttataggaacttttaat

SEQ ID NO: 277056 - DNA, 949 bp, Unknown
  Bacterial polypeptide expressing nucleotide sequence isolated from the Sargasso Sea
atgagacaagcaggtagatatttgcctgaatttagaaaaatacgatctcaaaatcaaaatttcatcaatctttgtttagatagtgaactaagttctgaaataactttacagccaatcacaagattcgatttagactctgctattattttttctgacattttaattgttccttatgcattaaatcaaaaagtagaatttttaaaaaatcaaggaccattattagaggaatttaattttaaaaaattcttaaaaaacgatacaaattcttttactcaaaaattacaaccagtttataaagcaatccaaaaaacaagggagaaattagataaaaaaaaatctttaataggatttgttggagccccatggacactgttaatctatatgttaggtgcaaaagagagtaaaaaagagattaattatagtaaaattaagataaaagaatctgaaataaatctaattcttgataaacttcacgattatctctgtgctcatattgaaagtcaaattaatgctggagctgatgtaatacaaatttttgactcttgggcgggattaattttaccggatgatttgtcaaattattgttacactccaaatttgaaaatcgttgaattttgtaaagaaaaaaggattcctgtaatatgtttcccacgcggcataaataaaaattacaaagaatttaatagtgtagtaaaacctgatgggattaatttagattatgatgttgatccttattgggcgaagcaaaatttattaaacgtagttttacaaggaggtttagatccaaagatattattgcttgatgaaaatgaaatttttgatgccacaaaaaaatatttggatatatttaaagacttgccttatatttttaatttgggtcacggtttgcttcctgaaacagatccaaataaagtaagtaaattagttaaattttatagagaatactaga

SEQ ID NO: 277057 - DNA, 973 bp, Unknown
  Bacterial polypeptide expressing nucleotide sequence isolated from the Sargasso Sea
tatgacacctattgaagaaataatcatcaataaaaaaacttcattaaatcctatttggattatgaggcaagcaggtagatatttatcggaatttagggaaatacgaaaatctaatccagattttataaaattatgtttaaattctaagttggcagccgaaattacacttcagccattaaaaagatttaatttagatgctgcaataatattctcagatattctgatattaccttatggctgcaaccaaaaagttgagtttaaaaaaaattttggtcctatgcttggtgatttaaatttagatgatttatctaaggtaactgaaagcgattttacttcaaaaattagccctgtttatgaagcaattaatttagttaaaaatgataagcttactgaaaataaaagcactatcggttttgtgggggcgccttggacattattggtttacatgattaacaaacaatcacctaagttaagtctaaataatgatttttttaaagataaagctttaattcagcagacgttaaaaattattgaaaaatttttaatggttcatattaaaaatcaaattaataacggtgctgaaataatccaaatttttgatagttgggcaggattattaagtgataaagatcttgatttttatgtttataatccgacatactctttggtaagttttgtaaagtctttaaaaattccggtgatatgtttcccgagaaacattaaaaactataaaaaatattgtgaaattgttaaaccagatgtgatttgtattgattataatgtggacccattaggaattgaaaaagaaatatctattcctgtacaaggaggcatggatcccaaaattttacttactgataaagaaaaccttaaaaaagaggcagagaaatatttagatatttttaaaaatcatccatatatatttaatctgggtcatggagttttaccagagacagatccaaatttaatggat

SEQ ID NO: 277058 - DNA, 943 bp, Unknown
  Bacterial polypeptide expressing nucleotide sequence isolated from the Sargasso Sea
atgagacaagctggcagatatttaccagaatttagagatataagaaaatcaaatccaaattttattaaattgtgtttaaattcaaaattatcaattgaaataactctccagcccctgaaaagatttgatttagatgccgcaattattttctcagatattttaatgttaccctatggtttaaaccaaaaagttgaatttaaaaaaaactttggtccatctttaggagatcttaatttggaagatatatcgaacacagatgaaaaaaattttacagaaaagcttagccctgtttataaagcaattaatttagttaaaaaaaacgatttaacaaaaaataaatccacaattggttttgttggagctccttggactttgctagtttatatgattaataaacaatctccaaaattaaatttaagtaatgatttttataaagactcttttttaataaaaaaaattttgaatgttttagataaatttttaaaaatacatattaaaaatcaaattgataacggagcagaaattattcaaatttttgatagttgggcgggcctactggaagaaaaagatttaccaaattatgtttatactccaactttaaatttagttagttatgttaaatctttaaatgtaccagtgatatgttttcctagggaaataaaaaattataaagaattttgtgatattgttaaacctgatgtcgttagtattgattataatgttgatccaaaaaaaatacttaaaaatataaaaatacctatacaaggtggtttagacccaaaaattttattaacagacaaggaaactttgaaaaaggaagcttcaaaatatcttaatatttttaaagatcatccatatatttttaatcttggacatggtgtattaccagaaacaaaaccagagatggttgaatatttagtcaatgttgtaaaaaattattaat

SEQ ID NO: 277059 - DNA, 295 bp, Unknown
  Bacterial polypeptide expressing nucleotide sequence isolated from the Sargasso Sea
tatgaatacccttatacaagattgcataaataataaatcttccaagacacccatatggttaatgagacaagcgggaagatatttgccagaattcagatctataagagaaaaaaatcaagattttatcaaactatgtttgaatactaaattatcatctgaaataacaatacaaccaattgatagatttgattttgatgctgctataattttttctgacattctgttagttccatatgcacttggccaacaagtaaaatttaagaaaaatttcggacctgatttaaaagaaggttga

SEQ ID NO: 277060 - DNA, 871 bp, Unknown
  Bacterial polypeptide expressing nucleotide sequence isolated from the Sargasso Sea
atgtctgaatttaatcgaaattttatagctgcacttaatagaaagactcaaaaaactcctcctatatggataatgaggcaggctggtagatatcttcctgagtacagaaaagtaagatcaaatttcagaaattttcttgatatgtgtaagacacctgaaatttgctgcgagttagttttacagcctatagaaagatatgattttgatgctgcaattattttttcagatatcctaacgattcctgatgctctcggtctaggagtttcttttgtagagggaaaaggtccaatcttttcgaatcctataaaaagaccagaggatatttctaacatggcaaattttaatccggacagtcttgactatgtatacaaaactgctgagctgacaagaaaagaattgaatccaagcattccactaattggatttgctggaagtccatggactcttgcagcatattcaattgagggcagtagttccaaaaattttgatctaacaaaatcatttatagaaaatcactctgatgatgcccataaattccttgatatcctggctgatgcttgttttgaatatctaaaaaggcaaatcattagtggcgtagatgcaattcagatatttgactcttgggctaatcttctttcagaggagcaatacctagaatattctttgaaatatataaagaaaattcttaaaaaattatcggaggatcctattacaagcaagactccaactattgtttttgctagagatccaaaatgtaatcttaatgaatttaaattagatgatctaagttgttatggcatgtttacttcgattgatccaagcagtgctacaagtgtatttgaaggcactcatgcccttcaaggtaatttag

SEQ ID NO: 277061 - DNA, 376 bp, Unknown
  Bacterial polypeptide expressing nucleotide sequence isolated from the Sargasso Sea
gggccgtatcaaaaaaaggtagttgacattgtaaaagcggaatacccagaaacaccagtaattctttacatttcaggaagtgctggtgtcatagaaagaatggcaaaaactggagtcgatataatctcattagattggacagtagatattgaagaggcttgtaagagaatccctagcgggataggaattcaaggtaatgttgacccaggcattttattcgggaacaaagaatcaataaaagaaaggatagataatactttcaataaaattaaagacagaaaatatattcttaatttgggtcatgggattttacctgggactccagaagaaaatgctcaaacattttttgaacatgggaaaaaactcacttactagt

SEQ ID NO: 277062 - DNA, 941 bp, Unknown
  Bacterial polypeptide expressing nucleotide sequence isolated from the Sargasso Sea
tatgaacgccgatcctgattccccggaaaaaaaagagccagccgctggcagcgtcgaagactccctttttatgagggcatgtcgcctcgaaccggtatctcgtccaccagtttggctgatgaggcaggcgggtcggtatcttccggaataccaagccattcgcaataaggtcacgttcttggagttatgcaaaaacccagaactttctgctgaagttatgttggcaacagtggatcgacttggtgtcgacgcagcgattattttcagtgacttgttgccactcctgcagccgatgggcctcgatttggaattcgctactggggaaggcccagtcattcataatccacttcgtaaccgcacagatctcgatcgatttcatgagcttgttgatgttggtccactcagttttgtttttgaaacagtacgtgcaacccgtgccggtcttcaaaaagacataccagtcatcggttttgcgggagctccattcacgttagccggatacgccatcgagggaggaacaagtcgcaactggttacataccaaacgatttatgttgactgatcctgatgggtggcatgaactcatggaaagacttgcaaggacgatcggcagatatcttcatgctcaattcgatgctggagcaaatgcggtgcaggtttttgatagctgggtaggttgtctctcaccagagcactaccgtgaatttgttttaccccacagccgtacggtctttgaatcgctagctgggcgaggaccgataattcattttgcagcaggcaatccagtgttactgccacttgcggccgaagctggtggcacagtcatgggtatcgattggcgcactgaactcgatcatgcctggcagcaggtgggttatgatcgaggtgtgcaaggcaatctggacccagcggtactgcatactactcctgatgttgtgcgtc

SEQ ID NO: 277063 - DNA, 820 bp, Unknown
  Bacterial polypeptide expressing nucleotide sequence isolated from the Sargasso Sea
tttggacgcagcaataattttttcagacatattaatgataccttatggactaggtcaaaaagtagagttcaaaaaaggatttggacccattttaggcgatataaatattgataaaataattaatacgagtccagaagattttattcgaaaattatctccagtgtacgaaggaattaaaaaagtaaaaagtaatttgaagggaaaaaatcttattggatttgcaggcgctccatggacattaatattatatatgctcaacaaaacatctcctaaaaataattttaactttgataaaattagtgagaataaatctataaacattgaactaataaaaaaaatagaagaaatgatatgtttgcatgtttctaaacaaatagaagcaggtgcgaacgtaatacaaatttttgattcatgggctggacttttgcctaaagaagaactttcgaattattgttatagtccaactttaaaaattgttgagtatattaaatccaaaaatattccagtaatttgttttcctaaaggaatcaaagagaattatttagatttttgttcaatagttaagcctgattgcatcagcatagattacgaagttgatccaaagtgggtaagagaaaaatttcatggtataccagtacaaggaggactagatccaaaaatattactaatggataaagaaaaaataaaaaaaagtactgaaaattatcttaatatatttaacgattatccttatatatttaatttgggtcacggggttttgcccgagattaaaccagaaacaatagaatacattgttgggcttgtaagaaataaaaaataa

SEQ ID NO: 277064 - DNA, 688 bp, Unknown
  Bacterial polypeptide expressing nucleotide sequence isolated from the Sargasso Sea
tatgacaccaattaagaactgtattgttaacaaagatacaaccaaaaatcctatatggttgatgagacaagcaggaaggtatttaccagaatttagaaaaataaggaaagagaaccaagattttataaagttatgtttaaatagtaatctggcttctgaaataactctacaacccataaaaagatttggatttgatggtgctgttatattttcagatatcttaatgttgccatacggacttggacaaaaagtagaatttaaaaaaaatttcggacctaaattgggagaaatagatttagaaaatattgaaagtctagatgatattaatttttctaaaaagattcataaagtatacgaggctatatccaaaacatcaattgatccaataatgaataataaagatatgatcggttttgttggagctccatggactatactcgtgtatatgattaataaatcatcaccaaaaaaaggtttaacagataattttcataaagataatgtttttatatctagattattagcaataatagaaaagtttttaaaacttcatataaaaaatcaggtggaagcaggagcaaaaataattcaaatttttgatagttgggctggattattagaagataaacttcccgaatatatttacaaccccacatataatattgttgaatatgtaaaaaaactagga

SEQ ID NO: 277065 - DNA, 988 bp, Unknown
  Bacterial polypeptide expressing nucleotide sequence isolated from the Sargasso Sea
atgagtatatttatagatacacttaagggtcaaaaaataaaaccaacaccagtttggttaatgagacaagcaggaaggcatttgcctgaatatataagtatcagaaaacagtttacaaaccttatggatatgtttcttgatcctttgacaatatttgaagtttctttgcagcctgtaaacagatacggtatggatgcctgtattgtgttttcagatattttaataaccccttttgctgcgggctcaagcgttagtttcattgatggacagggtcccgtaataaaatttaatgagaacatgagttataatcttgaaaaaaccttacctcttgcaacaggaataaaaaaaattaaagaaaatacaagtgtccctttaataggatttgctggcggagcatggacgacactgtattattgtttatatgaaaagaatgagcgtcaaaatctaaaattcgaagatgttgtaaaaaagacttcacaaatagacaatttgatcgagcaaatgacacttgcgattattcaacacgcagaaatgcaaattgattgtgggattgatgcctttcaaatatttgagtcagcagcagaacacttgaatgacgaacagttctacaaatggtgtattcaacctacaaaaaaaattattgagagtataaaaaaaataaaagacattcctattattggctttcccagaaacaccaatcttgcatgttataaaaaatattcaaatatagataagcttgactgtattaccttagaccataattttcctttagataaaattaataagctaaacgataaaattgtttttcaaggaaacctggaccctaaacatctattaaaagactctcaaaatcttagtcagaaaattgaagaaatattgtttgcttttagagaaagaccacatatttttaatttaggacacggggttttacccgagacatcaatcgagaaggttgagcaaatgctcttacagataaggtcaacatgaa

SEQ ID NO: 277066 - DNA, 1012 bp, Unknown
  Bacterial polypeptide expressing nucleotide sequence isolated from the Sargasso Sea
tttgaacaataattattacctaaaggcattacatcaaaaaaatgaagcattaaatgtgccagtctggttattgcgtcaggctggtagatatttaccagaatatatggaaattagatcaaaatttcctgatttttttgagatgatcaagactcctaaaatttgcaaagagctcactttacaaccattaagaagatttccattagatgcggctataacatttactgatattctgactattcctgaagcaatgggtgtggatattgaatttataaaaggtcagggtccagtctttgctgattcgattaataataatcctaaacttactttaaatgagtctaattacttagaaaagctagactatgtttttgaagctacgcaattaataaaaggtgagattgatgtccccttgataggcttctcaggaagtccttggactttatttgtatatcttttttacggcagatcaccaagaaactatgaaattataaaatcatacataagcaatgaaccagaaaatacacacgctattttgaaagctttaactaatgcaattaaagaatatatttctgcccaaattaaatcaggtgctgattgtatccagatatttgattcatggggcggaattcttagtgatcaatataatgaattttcgctgaattatataaatgaggtgcgagctagtctaagtaaagatatcccgatgattctttatgctaaaggcactagtgttaatggattgttgccagacactaaaatagattgttttaatctcgactgtgatgaaaatattgatgactatattgatatgccattaacagtacagggcaattttgatccgaaagattttcataaagaggatgcggaattaatagatcttgctgattatatatttgaaaaataccatacaaaacaaaattatatatttaatgttggtagtggaattacgcctgatatagatccagataaggtatctttatttcttgaaaggttacgtctttttaattctaaataa

SEQ ID NO: 277067 - DNA, 792 bp, Unknown
  Bacterial polypeptide expressing nucleotide sequence isolated from the Sargasso Sea
ctctgggtcaagaagtaaattttataaaaggcaagggacccaaacttatgccaataagagaaatgtcggatatccatgaactttcaatagagaaaatagaagataaccttacaccagtctttgaagcgatagccggggtgagggctaaattaaaatccgacaaaacattgatagggttttccggagcgccctggactctagcctgttacatggtagaaggaggtggtagcaaggattttgaaaggactagaatatgggccaagacctcaccagaagaattcaatacattgatagatttattaaccaacagtatttcgcggtatttagtccagaaaattaagcacgggtgcgatgtaattcagattttcgatagttgggcttcagtgctagacagcgaagggtttgataaatgggtaatcagacctactagtaaaataattaaaaatgttagagaaatttatcccgattatccaataatcggttttccgagaggagctggggtaaactatttaagataccatgcagaaacgggagtttctggcgtgtcgtttgattcaggtgtccctttgacgtggattagggataatattcaagccaatacgacggtccagggtaacctggataatacggtattactagctggcgggcgccaattggatgaacaggtaagcaaaattcataaaattttgggcaagggaccatttatattcaacctaggacatggggtcctccccaagaccccgataggtaacattgaaagagttataaatattctcagggaaaagaagtaat

SEQ ID NO: 277068 - DNA, 471 bp, Unknown
  Bacterial polypeptide expressing nucleotide sequence isolated from the Sargasso Sea
catgaataatcctgatccattatttcttagagcccttaataaaaacaaactcagcacccctcctatttggtatatgaggcaagcaggaaggtatatgccagaatatagaaaagttaggaaaaaattcaaaaattttcttgatatgtgtaaaaatcctgatgtttgttgtgagttagctatgcagcctctcaatgcatttgagcttgatgcagcaatattattctctgatatccttacgattccagatgcatttggtttgggtgtaaaatttattgaaaaagaaggtcctgtttttacaaatccaatagaatcaacatccgatattaataatctaattccttttgatcctgaaagtctcgattatgtttataaagctgtttcaaatattagaaatgccttaccagaagatattcctttaattggtttttcaggaagtccatggactttggcggcatattcaattgaaggaaa

SEQ ID NO: 277069 - DNA, 519 bp, Unknown
  Bacterial polypeptide expressing nucleotide sequence isolated from the Sargasso Sea
cactagaaaaattactggatttatacacagatgcttgctttaaatatctaaaacaacaggtcatatcggggataaacgccatacaaatatttgactcttgggcagatcttcttgatgaagatcaatttaaaaaattttcagtcaaaccaactaaaaatttagtaaaaatgcttaaaaacgataatgtcacaaaaacaataccaattatactgtttgaaaaagctcctcccataaagcctcatgatattgtttttgatggtattgcgggtatgagtctccatcatactgactctctaaaaaatacaaagttgagatttttaaataactttgcaatacaaggtaacttgaatcccagtattttgactgaatctgatgaagatatagataaacatacctgtgaaatcttgagtgaaatgaaaggatatccaggatttatctttaacttagggcatggaattacaccaaatattcatcctgaaaaaattcaagttatgattgattcaataagaaatttttagc

SEQ ID NO: 277070 - DNA, 301 bp, Unknown
  Bacterial polypeptide expressing nucleotide sequence isolated from the Sargasso Sea
attgcaaaatacttataacaaaaaatttcacaatgctttaaataaagaagagcaaaaagtaccccctatttggctgatgagacaagctggtcgataccataagcattatcgaactttaaaagaaaagtattcttttgagcaattatgcaaagagcctgagcttgcttgtgaagtgactctaggacctatagcagagtttgactttgatgctgcaatactattcagcgatatactttttcctttagattatttagggatgggcttgaaatttaaacccggccctattttgaaagaaatttaa

SEQ ID NO: 277071 - DNA, 575 bp, Unknown
  Bacterial polypeptide expressing nucleotide sequence isolated from the Sargasso Sea
ttccaaaaactttgatttaacaaaatcatttatagaaagtcattccgatgatgctcataaatttcttgagattctagctgatgcttgttttgaatatctaaaaaggcaaatcgtcagcggagtagacgcaattcagatatttgactcttgggcaaatcttctttctgaagaacaatacctagaatactctttgaaatatataaaaaaaattcttaaaaaattatcagaggatcctgttacaagcaaaactccaactatagtttttgctagagatccaaaatgtaatcttaatgaatttaaattagatgatataagttgttatggcatgtttacttcggttgatccaagcagtgctataagagtatttgaaggctctcatgcccttcaaggaaatttagacccaaagattcttcttgaggaagattcagtgatcaaagagagtgctttaaaaatgctgtcagaatttaaagactttccgggctatatttttaatctagggcatggcataacgccagatataaatccagataaggtaaaagtattggttgaagctataagggaatctggaacctagt

SEQ ID NO: 277072 - DNA, 541 bp, Unknown
  Bacterial polypeptide expressing nucleotide sequence isolated from the Sargasso Sea
catgaatgaatccactcctcttctattaaaagctttaaataaagaaaagcttcctattccaccaatttggtatatgagacaagctggaagatatatgcctgaatataggaaaattagatctaaatttaaaaactttctagatatgtgtaaaaatcctgaggtatgttgtgaattggcattgcaacctataaaagcttttaatttagatgctgcaatattattctcagatattcttacaataccagatgccttaggtcttgatgttgaatttattgaaaatgaaggccctgtttttaaaaaatcaattaaaagcgttaaggatattaaaaacttaaaaccatttgaccctgacgatctttcatatgtatataaggctgtaaataatattaaaagtgttctacctaatgatatacctttgattggtttttctggaagtccatggactttagctgcatattctattgaaggccgatcatcaaaagactttaaaaaaactatcaattttataaaaaaaaataaagatgaatcacatttatttctt

SEQ ID NO: 277073 - DNA, 439 bp, Unknown
  Bacterial polypeptide expressing nucleotide sequence isolated from the Sargasso Sea
attaaagcaggcgcaagtataatacaaatttttgatagttgggccggactactagaagaaaatatttctgattatatttatgaaccaacctcaaatcttgttaaccatactagaaaattaggcgttccagttatttgttttcctagaggtatagaaaattataataatttttgtgaagtagttaaaccagatatgataaatattgattacaatcttgatcctaaaaaggcagttaaagaaataaaaatacctattcaaggggggttagatccaaaagtactattaactgataaggaaaacttacataaagaagcaataaagtatcttcaaatttttaaagatcacccttatgtgtttaaccttggacatggtattttacctgaaacgaaaattgaaatggtagaagaattagtaaaattagttagagattttaaataat

SEQ ID NO: 277074 - DNA, 1003 bp, Unknown
  Bacterial polypeptide expressing nucleotide sequence isolated from the Sargasso Sea
ttgcaaaatacctataacaaaaatttttttaatgccttaaataaagttgaacaaaaaattcctccaatttggtttatgagacaggctggtcgatatcatcaacattacagaaaattaaaagaaaaatattcttttgaacaattatgtaaagagcctgagcttgcttgtgaggtaactcttggacctattgttgaattcgattttgatgctgcaatattgtttagtgatattctttttcctttagattatttaggtatgagtttgaagtttaatcctggaccaatatttgaaaaaaatttaagttcaaaaatgatatccgaatttaatattgatgaatttgaaagttttatagattttcagaatatatctctaaaacatattagaaatgaactatcaaatgataaatccttaattggatttactggtggacctgtaaccttatactattttgcaacgaggaataatcctgtatcacaaacactatttcaacaaaccctgcccgttttagaaatgttaatacaaaaaaatatacaaattcaattacaaaatcacattgatttgttaatgatatttgatactgaggctaataaactaaatgataaagattttgatgaattcgttattccttttttagttaaaatttcaaatagttatccaaataaaattggatatttcactaaagaaatttctcaaactaaatttaataaattacaaaatttaaaaaatttaaaacttacagttttaggcactaatttggaggttttcactgaattaccaaagacacatttatctttacaggggaatttttcaaatgatttgttagctatggaggacactaaatacttttctgattatattgataaatatattgagaaatgcttacagagtgagccttctcatagatctgggtggattgctagcctcgatcacggtgtaaaaaaaactactcctgaggctaatgttcatttattcatagaaaagataagaactaagttatcataaa

SEQ ID NO: 277075 - DNA, 623 bp, Unknown
  Bacterial polypeptide expressing nucleotide sequence isolated from the Sargasso Sea
tgctggaagtccatggactcttgcagcatattcaattgagggaagtagttccaaaaactttgatctaacaaaatcatttatagaaagtcattctgatgatgctcataaatttcttgagatcctggctgatgcttgctttgagtatctaaaaaggcagatcattagcggagtagatgcaattcagatatttgactcttgggctaatcttctttcagaagaacaatatctggaatactctttgaaatatataaagaaaattcttaaaaaattatcagaggatcccattacaagcaaaactccaactatagtttttgctagagatccgaaatgtaatcttagtgaatttaaattagatgatcttagttgttatggtatgtttacttcaattaatccaagcagtgctataagagtatttgagggctctcatgctcttcaaggtaatttagaccctaagatccttcttcaggaagattcagttatcaaagacagtgttataaaaatgttgtcagaattcaatgactttccgggctatatttttaacttgggacacggtataacaccagatataaatccagataaggtaaaagtcttggttgaagctataagagaatctggaagctagt

SEQ ID NO: 277076 - DNA, 1039 bp, Unknown
  Bacterial polypeptide expressing nucleotide sequence isolated from the Sargasso Sea
atgaatgaatccaccccgctcttattaaaggcattaaataaagaaaaactttccacaccaccaatttggttcatgaggcaagctggacggtatatgcctgaatataggaaggttagatcaaaatttaaaaactttatggatatgtgtaaggatcctgacgtatgttgtgagttagccatgcagccaataaatgccttcagtctagatgcagcaatattgttctcagatatcctgacaatacctgacgcttttggattgggcgttgaatttattgaaaataaaggccctgtttttaaaagcccaattaaaagtaaagatgatattcataatttgattagatttaatccagaaaatctttcatatgtatatcaagctgttgctaatataaaaagagcattaccagaaaatattcctttgataggtttttgtgggagtccttggacattagctgcatattctattgaaggtcattcttcaaaggatttcaaaaataccatcaattttataacgaaaaatacagaagcctctcatttacttctttccaaattaactgatgcatgtttcctttatcttagaaagcaagttcaagctggtgctgatgtgatacaaatttttgattcttgggctaatattttagatgctcaacagttgaatgaattttcatttaattacataaggcctttaattacagctttaaaaaatgatcctgtcacatcaaatactccggttattttgtttgcaagaaatcctaaatgcaattctaagtcgatccttcaaacctctgcagactgcattagtttatattggtcaatgaatgactttgatcatagtttagcaattgggaaaacagcacttcaaggaaaccttaatccagaaatattattagagtcaaaagatataattaaaaaagaaacatacaaaatactagataagtttaaagattttcctgggtatatatttaatctcggtcacggattaacgccagatatatgtcctgacaaagtgaagtatttaactgaaatagttagagagtactagt

SEQ ID NO: 277077 - DNA, 640 bp, Unknown
  Bacterial polypeptide expressing nucleotide sequence isolated from the Sargasso Sea
aatgaatcgaaatttcatagctgcacttaatagagagattcagaaaactccgcctatatggataatgagacaggctggcaggtatcttcctgagtataggaaggtaagatcaaatttcaaaaattttcttgatatgtgtaagactcctgaaatttgctgcgagttagttttacagcctatagaaagatataattttgatgctgcaattattttttcagacatcctaacgattcctgatgctcttggtcttggtgtttcttttgtagaggggaaaggtccagtcttttcgaatcctattaaaagaccagaagatatttctaacatgataaattttaatccagacagtcttgactatgtatacaagactgctgaactaacaaggaaagagttaaatccgagcattccgctaattggatttgctggaagtccctggactcttgcagcatattcaattgagggaagtagttccaaaaactttgatctaacaaaatcatttatagaaagtcattctgatgatgctcataaatttcttgaaatcctggctgatgcttgttttgaatatctaaaaaggcaaattgttagtggagtagatgcaattcagatatttgactcttgggctaatcttctttcagaagaacaa

SEQ ID NO: 277078 - DNA, 601 bp, Unknown
  Bacterial polypeptide expressing nucleotide sequence isolated from the Sargasso Sea
tatgataggttttgttggggcgccatggactatactggtatatatgataaataaatcatcaccaaaaaagggtttatcagataagttctataaagataatcttttaatatctagattattggtaataattgaaaagtttttaaaacttcatataaaaaaccaggttgaagcaggagctaaagtaattcaaatttttgatagttgggctggattgttagaggataaacttcctgaatatatctacaaccccacatttaacatcgttgaatatgtaaaaaaactaggagtgcctgtaatttgttttccaagagggatcaaagattacaaaaatttttgtcagatagtgaaacctgacgctgttaatatagattataatgttgatccaaaaaaaatagtcaaagaaataaaaatacctgtgcaaggtgggcttgatccaaaaatattattaactaataaagaaacccttaaacaggaagtcgaaaagtatctaaatatttttaaagatcatccatatatttttaatttaggacatgggatactccctgagacaaaaattgaaatggtagaagatttaattaatattgtgagaaactttaaatga

SEQ ID NO: 277079 - DNA, 582 bp, Unknown
  Bacterial polypeptide expressing nucleotide sequence isolated from the Sargasso Sea
aatgaaccccataactaattgtattaaaaataaagatgctacatataatcctatatggttaatgagacaagcaggaagatatcttccagagtttagggaagttaggaaagaaaaccaagactttataaaactttgcttgagtagtgacttagcatctgaaattactctacaacctattagaaggttcggttttgatggcgctgtaatattttcagatatcttaatgttaccttatggtctaggtcaaaaagtagaatttgaaaaaaattttggacctaaattaggagatatagatttagaaacaataaaaaataatgatgaaataagttttactgagaaaatttataaagtttataaagctatcgaaaagacgtccaaagaccctttaatgaccaatagggatatgattggatttgttggagctccttggacaattctagtttatatgattaataaatcttctcctaaaaagggtttatcgaatgaattttttaaagataattttttaattaatagattactaggaaaaagagagaaattcttaaaacttcatattaagaatcaaattgaggcaggagctca

SEQ ID NO: 277080 - DNA, 1006 bp, Unknown
  Bacterial polypeptide expressing nucleotide sequence isolated from the Sargasso Sea
aatgactcctattaacgaagtaatactaaataaaaaaacttctataaatcccatttggattatgaggcaagctggtaggtatttacctgaatttagagaaataaggtctaaaaatacgaattttatagagctatgtttaaatgaaaaattatctactgaaataactttacaacctctaaaaagatttgacttggacgctgcaataattttttctgatattttgatgcttccatatggtttaggtcaaaaagtagagtttaaaaaaaattttggtccaattttggaaaagataaatcttgatcaaattagtaaaattgatgagatagattttgtagaaaaaattcataagatatataaaatattaaaaaatgtaagtgaaaataatcttttagttaataaaaatacaattggatttgtaggagcgccctggactcttttggtctatatgatcaatcagcagtctccaaaaaataaacttaaaaaagatttttttaaagataagtttttaataaatagagttttattaattattgaaaaatttttaaagattcatataaaaaatcaaattgataatggtgcaaatattattcaaattttcgatagttgggctggtttgttggaagagaaagatttgcctaattatgtttattctccgactttaaatttagtaaactatgtaaaatctttaaatgtaccagtgatatgtttccctagagaaataaaaaattataaagaattttgcgaaattgttaaacctgatgttgttaatatagattataatgtagaccctaaagaaattgcctcaaatataaagattccaatccaaggagggttagatccaaaaattttattaactaacaaagaaactcttaaaaaagaaacaactaagtatttagagatttttaaaaatcatccctatatttttaaccttggacatggtgttttacccgaaactaaccctgaaatggtagaatatttggttaaaatagtaaaagattataaatga

SEQ ID NO: 277081 - DNA, 448 bp, Unknown
  Bacterial polypeptide expressing nucleotide sequence isolated from the Sargasso Sea
atgaataacatatttctaaatactttgaatggtgaggtagaaaaaagacctccagtttggttcatgagacaagcaggacgaattttaccatcatatagaaaactcaaagaaagtcataaattttatgatatgatgaaaaatgctgagatgacatctaaggtaacacttttgcctatcgaagaccttgatgttgatgctgctattcttttttctgatattttggtgattcccgatgcattaggaatggatttaattttcactgaaaatggtccaaaatttgctaatgcaattcaagatggagtaaaacctagacttaatttcaaaccagaaaagttggaatacatatacaaaaacatcaaacaaaccattaatgacaagaaaaatactccattaattggtttttgtggaggacccttaacaacatttttatttatgttcagaggaaatg

SEQ ID NO: 277082 - DNA, 599 bp, Unknown
  Bacterial polypeptide expressing nucleotide sequence isolated from the Sargasso Sea
aatgaacgaaactactcctttactactccgtgcagctcgcggagaaaatgttgaaaggcccccagtttggatgatgagacaagcggggagatacatgaaggtatatcgcgaccttcgtgataatcatccaagcttcagggaaagatccgaaaaccccgatctttcttatgaaatttcaatgcaaccttttacagcttttcaaccagatggagtgatacttttttcagacatcttgactcctcttcctgggatgggaattaactttgacatcgttgaaagcaaaggacccttaataaatgacccaataagaagcctcaaacaggttaaagatcttaaaccccttcaaccagaagaaagcatgtcttttgttggggaagtccttggaaggttaagggaaagcgttggaaacaaggctgcagttcttgggttcgtaggtgctccttggactcttgctgcatatgttgtagaggggaaaagcagcaaaaattatgcagttataaaagcgatggcattccaagagccagaactactacatcaacttttaaatcactttgcagaatcaattgcaaactatttgtcctatcaaattcaatctgggg

SEQ ID NO: 277083 - DNA, 784 bp, Unknown
  Bacterial polypeptide expressing nucleotide sequence isolated from the Sargasso Sea
atgtctgacataagagaagtaattataaataaaaaaacaaatttaaatcctatatggattatgagacaggcgggaagatatttaccagaatttagagaaattagaaaagaaaatcctgattttattaatttatgtctaaataaagaactatcagcagaaatcacactacaaccacttaaaagattcaatttagacgcagctataattttctcggacatattaatgttaccttatggattaaaccaagaagtagaatttaaaaaagattttggtccattgttgggaaaattagacttaaataaaatttcaaaaatagatgaaattgattttatccaaaaaattttaccagtttacaaagcaattgatatagttagtaatcaccaacttacaaaaaacaaaagcacgataggttttgttggtgctccatggactttattagtctatatgattaatcaacagtctccaaaaaaaaaattaaaagaaaatttttttaaagatgaatttttaataaatagaattttattaattattgaaaaatttttaaaaattcatattaaaaatcaaattgacagtggagcaaatattattcaaatttttgatagttgggcgggtttattaaatgaaaaagatttaccaaattatatttatacacctacattaaatttagttaattatattaagtcattaaatactccggtaatatgttttccaagaggaataaaaaattataaggagttttgtgaaattatcaaaccagacgctattagtattgattataatgtag

SEQ ID NO: 277084 - DNA, 163 bp, Unknown
  Bacterial polypeptide expressing nucleotide sequence isolated from the Sargasso Sea
ggccattgagacccgcatcgacgactgtgtgcgcaaggcccgtggtcggaagcacatcctcaacctgggacacggcattctgccgggaacacctgaggagaacggcgctgccttcttccgctcgggcaagagcgtgatggaccgcatcggggccgtcgcttga

SEQ ID NO: 277085 - DNA, 279 bp, Unknown
  Bacterial polypeptide expressing nucleotide sequence isolated from the Sargasso Sea
aatgaaaccaattgaaaactgtattgtaaataaagatacatcaaaaaaccccatatggttaatgagacaagcaggaaggtatttacctgagttcagagagttaagagcaaataatcaagattttattaaactttgcttaaatgaaagtttatcttccgaaattactctacaaccaattaaaagatttggctttgatgctgctataattttttctgatattttgatgataccttttgcaatcaatcaagaagttaagttgagaaaggtttggaccaaagt

SEQ ID NO: 277086 - DNA, 824 bp, Unknown
  Bacterial polypeptide expressing nucleotide sequence isolated from the Sargasso Sea
aaggtttggatttgatggagctgtaatattttcagatattttaatgttaccttatggccttggtcaaaaagtagaatttgaaaaaaattttggacctaaattaggagatatagatttagaaacaataaaaaatgtcgatgaaataagttttactgaaaaaatttataaagtttataaagcaatcgaaaaaacgtctaaagattccctaatggccaatagagatatgattggattcgttggagctccttggacaatactagtttacatgattaacaaatcttctcctaaaaaagggttatcgaatgaattttttaaagatcattttttaattaatagattactagtagtaatagagaaatttttaaaactacatataaaaaatcaaattgaggccggagctcaagttattcaaatttttgatagttgggctggattattagaagataaaattccagaatatatttatatacctactttaaatattgtagagtatataaaaaaactaggagttcccgttatttgttttccaagaggtattaaagattataaaaacttttgcgaaattgttaaacctgatgctataaatatagattacgatgttaacccaaagaaaatactcaatgaaatcaaaataccaatacaaggaggtcttgacccaaaaatattattaactgatcaaaaaactctcaaaatagaagttgaaaaatatcttggtatttttaaagatcacccatacatttttaatttaggtcacggaatactacctgagactaaaattgaaatggttgaggaactaatcaagattgtaagaaattttaaatgaa

SEQ ID NO: 277087 - DNA, 397 bp, Unknown
  Bacterial polypeptide expressing nucleotide sequence isolated from the Sargasso Sea
atgagtgagactctcccccttctgcttcgcgcggcccgcggcgagcaggtggagcgtcctcccgtgtggatgatgcggcaggccggcaggtatatgaaggtctacagggacctacgcgaccgctacccctccttccgggaacgatcggagaatcctgatctgtcctacgagatctcgatgcaacccttcgaggccttccagcccgatggggtgattctcttctccgacatcctcacgcccctgcctggcatcggcatcgatttcgacatcgttgagagcaagggcccccagatcaacgatccgatccgcacgatggctcaagtggaggccctgcgccccctccagccggcggaatcgatgcccttcgtcggtgcggtgctgggccggctgcgccaga

SEQ ID NO: 277088 - DNA, 487 bp, Unknown
  Bacterial polypeptide expressing nucleotide sequence isolated from the Sargasso Sea
aaaattactgaaacaacaatttcctatttaaaagaacaagtaaactctggagtaaatgctattcaaatttttgattcctggggtggcttactctctccaatagattatgaggttttttcttggaaatatatagatcaaataattaaggaattaagtcctttaattcctgtcattgtttttggaaaaggatgttggtttcacctaaataaaataagtaaatctaaagtttcagctattgggattgattggacttgttccgcaagaaacgctcgatatttaactggaggaaaaattactcttcaaggaaaccttgacccttcaaaactattatctccaataaatgaaattaaaaaatctgttaaaaatatgattgatgagttcggcaaagataattacatagtcaatttgggacatggaatactgcctaatacccctgttgataatgcaaaagcatttattgattcagtcaaagaatataattcttaat

SEQ ID NO: 277089 - DNA, 1012 bp, Unknown
  Bacterial polypeptide expressing nucleotide sequence isolated from the Sargasso Sea
ttgaaaaataatcactacctcaacgcattacatcaaaaaaatgaagcattaaatgtgccagtctggttgttgcgacaagcgggcagatatttaccagaatacatggaaattagatcaaaatttcctgatttttttgcaatgattaaaactcctgagatttgcaaagagttaactttacaacctttaagaagatttcctttagatgcagccataacatttactgatattttgacaattcctgaagcaatgggtgtagatattgaattcataaaaggtcaaggaccaatatttgctgactcgatcagaaataactcaaaacttaaattaaatgagtctaacttcttagaaaggctagattatgtatttgaagccacacaattaataaaaagtgaaattgatgttcctttaataggtttctcaggaagtccttggacattatttgtgtaccttttttatggtaaatcgcctagagattatgaaatcattaattcatatatagagaatgagcctgagaatacgcatgctattttaagtgtcttgtctaatgcgattaaagaatatatttctgcacaaattgaatctggagctgactgtatacagatatttgattcgtggggagggatacttgaagaacaatataatgaatactcattaaaatatataaatgatataaggaatagtttgagtaaagacattccaatgattctttatgcaaaaggcactaaagtaagcaacctactaccacacactgaagtaaactgtttcaatcttgattgtgaagaaaatattgataactacattgatatgccattaactatacaaggcaattttgatccaaaagattttcataaagatgattcagagttaatagatcttgctgattctatttttgaaaagtatcacacaaagaaaaactatatatttaatgttggtagcggcataacacccgatatagatccagataaagttggtttatttcttgagagattacgtctttttaattctaaataat

SEQ ID NO: 277090 - DNA, 685 bp, Unknown
  Bacterial polypeptide expressing nucleotide sequence isolated from the Sargasso Sea
atgaacagacttattgattgtattactaaaaacaactctggaaatactccagtatggtttatgagacaagcaggaagatatttacctgaattcatgaaaataagaaaacaaaattcagattttattaaattgtgtttagatagcgaattagccaaagaaattacaatacaacctgtaaagaggtttgatatagacgcagcaataatattttctgatattttaatggtaccgtatggtcttggtcaaaatgtaaagttcaaaaagggacatggtccgttgttagaagaaatgaatccaaagaaaataatggaggttgatgacatagaatttactaaaaaactcaaacctgtttatgttgcaatacaaaaagtaaaaaaggagatcaaaggtaaaagtttgatcggatttgttggggcaccttggacattacttttatatatgttcaaccttgaatcaccaaaaagaagttttaattttgataaaataacaaataacaaagatttaaatgatgatttaattgaaaaattgattaacataatttgtttacatattaaaaaccaagttgaggctggtgcaaatgtaatacaaatttttgattcttgggccggtcttcttccccaggaacaactcgaaaagttttgttataaaccaacaaagaaaattgttaattttacaaaatcactta

SEQ ID NO: 277091 - DNA, 367 bp, Unknown
  Bacterial polypeptide expressing nucleotide sequence isolated from the Sargasso Sea
gatgtccggcgtctccgcctcctcgcatctcgccccccgcgcgcgtctccgcgacgcgcgcgatcgcgcccacgctcgcggtctcccctcgcgagccgcctcgcgtcgcgtcgtcgcgcgcgcgggcggtgacgcgagcggtgtcgatccgttgatgcttcgggcgattcgcggcgagagcgtcgagcgtccgcccatctggatgatgcgtcaggctgggagatacatgaaggtgtatcaagacttgtgcaagaagcacacgacgtttcgggaacgaagcgaaacggtggatctggcggtggagatctcgttgcagccgtaccgggcgtttaaaccggacggtgtgattctgttcagtgatatttga

SEQ ID NO: 277092 - DNA, 493 bp, Unknown
  Bacterial polypeptide expressing nucleotide sequence isolated from the Sargasso Sea
aatcttttaaatataatgaaaaagtttttaaaattacatattaaaaatcaaatagaaagtggagcaactataatccaaatatttgatagctgggctgggctggtagaagaaaaacatttatcagagtatatttataatcctacattaaatttagttaattatattaaaagctttaataccccagttatatgttttccaagagagatcaaaaactataaagaattttgtagtacggttaatcctgatgtaatcagtatcgattacaatgtaaatcctgaagaaatattaaagaatattaatataccaattcaaggaggtctagatccaagaattttacttgaagataaagaaactgttaaaaaacacgctttaaaatatctacaaatttttaaggatgttccttatatttttaatttaggacatggaatactgccagaaacaaaacctgaaactgtagattatcttgttaaatttgttaaagacgcaaaataat

SEQ ID NO: 277093 - DNA, 1018 bp, Unknown
  Bacterial polypeptide expressing nucleotide sequence isolated from the Sargasso Sea
atgacacccattcaatcttgtattgttaataaaaataatactaaaaatccaatttggtttatgagacaagcaggaagatatttgcctgaatttagagaaataagaaaagaaaatcaaaattttatagaattatgtttaaataaaaatttaacaccagaaattactttacaaccattaaaaagatttgaacttgatgctgcaataattttttctgatattttaatgttaccatatggattagggcaaaatgttgaattcaaaaaaaattatgggccgtcacttgaagatttagatttaaataaattattaaatgttaaagatgaggatttttctaataaattaaaaccagtatatgaagcaattaatattgtatcgaaagataaacttataaataaaaaagatctttttggatttattggtgctccttggacaatatttgtttatatgttaaataaaaaatcaccaaaattagctaaagatctaaaaaattctatttttaataaaatacaaaataaagatattcagaaacttttacagattatagtaaaatttttaaaaatacatattaaaaatcaggtagaaaatggagctacaataattcaaatttttgatagttgggccggattgctagaagaagattcatatgaggattacatttataatccaacaatagaattagtaaattatactaaaaaacttggggtccctgcaatatgttttcctagaaatattaaaaattataaaaaattttgtgaagtagtaaatcccaacgctgttaatattgattatgaagtagatcctaaaattatatttaaagaaataaaaattcctattcaaggaggattagatccgaaaattttacttggcgataaagagcaattaaaaaaagaagcaaataaatatttagaaatatttaaagatcacccatatatatttaatttgggacacggtgtattacctgaaacagatcctaatagggtagattatttagtgaaattaattaaagattttaaatgaa

SEQ ID NO: 277094 - DNA, 1003 bp, Unknown
  Bacterial polypeptide expressing nucleotide sequence isolated from the Sargasso Sea
tatgaaaccattacacaaagtaataatcaacaaagatacttcatttaaaccaatatggatcatgaggcaagctgggagatatttgccagagtttagagaaattagaaaagaaaatactaattttattaatttatgtttaaatgacgatttatcctcagaaattactttacagcctctaaaaagatttgatctagatgctgcaataatattttcagatatcttaatgctcccatacggactaggtcaaaaagtagaatttgaaaaaaactttggaccaaaattaggaacactgaacttagatgagattgccaagattgatgaaattgattttgtggaaaaaatacaccgtgtatataaagcaataaaaaaagttagcacagatcctattttaaataataaaaataccattggctttgttggtgctccatggacattattagtttatatgattaatcaacaatcacctaaaaaaaatttaaaaaaagatttttttaaagatgaatttttaataaatagaattctattaattattgaaaaatttttaaagattcatatcaaaaatcaaattgataatggcgcaaatgtaattcaaatttttgatagctgggcaggcttgttagaagaaaaagatttgccaaactatgtttatgccccaactttaaacttagtaaattatgtaaaatctttaaatataccggttatatgtttccctagagaaataaaaaactataaagaattttgtgatattgttaaacctgatgctgttaatatcgattataatgttgatccaaaaaaaatacttagagatattaaaatacccatacaaggtgggttagacccaaaaattttgttaacagacaaagaaactttaaaaaaagaagcttcaaaatatctcaatattttcaaggatcatccatatatatttaatttaggacatggtgtgcttccagagacagatcctaatatgtttgattatttaataaaaacagtaaaaaactattaa

SEQ ID NO: 277095 - DNA, 915 bp, Unknown
  Bacterial polypeptide expressing nucleotide sequence isolated from the Sargasso Sea
agtttagagaaataagaaaacaaaatccagattttattaaactttgtcttaatgaaaaattatctagtgagattactttgcaacctttaaaaagatttaatttagatgcagcaataattttctctgatattttaatgttaccatatggtttaaatcaaaatgttgaatttaaaaaaaatataggtccattactcggtaatcttgatttagaaaaaatatctaatatagaagaaattgacttcgttgaaaaactttcagctgtttataaattaattgaattagttagtaattcgcaacacactaaaaataaaactaccataggttttataggagcaccttggactttgttggtttacatgataaataaaaaatcgccaaaattaagcttaaatgataatttttatgaagataaatatttaattgataaagttttaaaaattttagataaatttttaaaaatacatattaaaaatcaaattgatagtggggctcaaataattcagatttttgatagttgggctgggttattaaaagaaaaagatttatcttattatatatataatcctacattaagtttggttaattatgttaaatctttaaacgtgcctgttatttgtttcccacgaggaataaaaaattataaagattattgtgaaattgttaaaccagatacaatttgtattgactatgaggtcgatccaataaaaattaataaagaaattaaaattcctgtgcaaggcgggatggatccaaaggttttactttctgataaagaaaatttaaaaaaagaggcaataaaatatttagatatatttaaagatcacccatatatatttaatttgggacatggaattttgccagaaacagatccaaatatgatggattatttagtgaaaactgtgaaagattattaat

SEQ ID NO: 277096 - DNA, 676 bp, Unknown
  Bacterial polypeptide expressing nucleotide sequence isolated from the Sargasso Sea
atgcctgacggcaagacactcttcgaaaaagcagcccgagggataaggacggagcgcaccccagtatgggtgatgcgtcaagctggtcgttacctccccgagtatagagcactgagaaagacagtcgattttctgacggccacaaaaacacccgagatcgcggcacagataacactacagccgatcgacagattcgagctcgacgcagcgatccttttcgccgatatcatgactccgcttgaaggtatgggtgtaccgatccgcttcgcaccgggacctataatcgagtcacctatacggtcccagaaggacgtagatggtcttcgtccgctcgatccggacgaaggtgtcccattcgttctagacgctcttagcatagtccggtcagagcttccaaaagacaggtcgctgatcgcattcgcaggcgcacccttcacactgttctgctacctggttcaaggaggtggctccaaggactttatggatgccagaagcttcctcagaggtgatcccgaagcctccgacgctcttctgaacttgctgggtacatcgatgatccactatctgcgtgctcaggcgcgtgcgggggccgacgccctcatgctttttgactcctgggtcggtcttcttgatgagaagttgtatagggcccggatccagccagttatgaagaata

SEQ ID NO: 277097 - DNA, 900 bp, Unknown
  Bacterial polypeptide expressing nucleotide sequence isolated from the Sargasso Sea
tatgagtcccataactaactgtattaaaaataaagatactaaaaccaatcctatatggttaatgagacaggcaggaagatatctaccagagttcagaaaaataagaaaagaaaatcaagatttcataaaactttgtctaaatagtgatcttgcttctgaaattactcttcaaccaataaaaaggtttgattttgatggtgcagtcatattttcagatatcttaatgttgccttatggtctcggtcagaaagtaaatttcgaaaaaaattttgggcctaagttgggtgaattagagttagaaaaaattaagaatatagatgagataaattttacagagaaagtctataaagtatataaggctatttcaaaaacgtctaaagatcctttaatggttaacaaagatatgatcggtttcgtaggtgcaccttggactattcttgtttatatgattaataaatcttctccgaaaaaaggattatcagaatttttttttaaagatgattttctaataaatagattattgagcattatagataaatttctaaaacttcatataaagaatcaagttgatgcaggggctaaagtaattcaaatttttgacagttgggcaggattattaaatgataaaataccagagtatatttatatacctacattaaatattgttaattatgtaaaacaactaggaatacctgttatttgttttccaagaggtataaaagattataaaaattattgcgatattgttaagcctgatgctgtgaatatagattatgatgttgatcctaaaagtataataaataaaattaaaataccagttcaaggaggtcttgaccctaaaattttattaacggatcaggatactcttaaaagagaagttgagaaataccttaatatttt

SEQ ID NO: 277098 - DNA, 862 bp, Unknown
  Bacterial polypeptide expressing nucleotide sequence isolated from the Sargasso Sea
gacggtgtgatcatgtttagcgatatcttgacgccgttgccggcgctcgggatcgagttcgatgtggtgaagggtaagggaccggtggtggaaccggtgcgcacgatggcggacgtcaacgcgatgaaacagctcgatgatccggactcgcagttgccgttcgttcgggagattctcagcacgcttcgaaaggagatcgatggacagtccaccatgctcggtttcgttggatctccgtggacgctcgcggcgtacgccatggagggttccagcgacagacacttgatgacgacgaagcaaatcatgacgcaagatccagagacgcttcacgcgttcttgtccaagttggcggacgcgctcggcgtgtacgtgtgccaccaaatcgatagtggtgcgcaagtagtgcagatcttcgattcctgggcgcaccacctctctccgcagcaattcctcgagttttcccacccgtacaacgagcgcatcatcgcttacgtcaaggaacgacacccggagacgccgctcattttccacgcgaacggtggcgtcggtaagctccacgagctcaagaagtccactgcggacgtcattggtttggattggaacacgagcatgagcgaagcgagagccatcctcggccccgatcgcgtcttgcaaggtaacatggaccccatgtacctcttcgcgagtccggatcgcattagagaggaggtggcgaagaacgtgaaggacgcgggcaacggtaagcacatcttgaacgtcggacacggggtggctcaaggcactccggaagagaacgtcggtcacttctgcgacgctgcgcgtgcgtcattatatgccgaggttggcgccccggcgcgttagg

SEQ ID NO: 277099 - DNA, 763 bp, Unknown
  Bacterial polypeptide expressing nucleotide sequence isolated from the Sargasso Sea
ggcccgaaattcagtaatcctatttcatctactgatgatattaataatatagatacttttgatgtgaattctcttgattatgtatttagagcagttgaagagactaaaaacttaatacctgcaaatcttccattaattggattttgtgggagtccttggacattggctgcatattcaatagagggaggcggatctaaagattttcaaaaaacaaaaactttcatggccgagaatccaaatgcacttcatgattttcttgaaattctgagtgatgcttgttatcaatatctaaaacagcaagttttaagcggaataaatgcgatacaaatttttgattcttgggctgacttattaagcgaagatgaattagatttattttccttgagttatacgaaaaaaattacacaaaagttaaaaaatgatccaatcactaaacatattccaattatattgtttgaaaaaaacccaaataaagacataacggaccttatatttaaagacctttcttgcataagtttgtattggaatagtgatattagaattctttctgaaagccttaaaaatgatatagcaattcaaggaaatttagatccaaaggtactaggtaagtctgatgaaacaattcaagaagaggttcgaaaaatatgctcgataatgaaagggtaccctggatttatatttaatcttggtcatggcataacgccagatattgaacctgcaaaagttgaggtaatgattaaaacaatacgagaagacatataat

SEQ ID NO: 277100 - DNA, 910 bp, Unknown
  Bacterial polypeptide expressing nucleotide sequence isolated from the Sargasso Sea
tatgacaccattacataaagttttaattaataaagatacaacaattaatcctatatggattatgagacaagctggaaggtatttacccgaatttagagaaattagaaaaaaaaatactgattttattaaattatgcttaaatgaaaagttatcttcagaaattactttacagcctcttaaaagatttgattttgatgctgctataattttttcagacattttaatgttaccatatgctttagatcaaaaagtagaatttaaaaaaaattttggaccattattaggagatttaaatttaaatgaaatttctaaattaaatgaaaatgattttattaaaaaacttagtcctgtttataaagcaataaatttagttagtaaaaataatcttacaaaaaacaaaagcacaataggttttgtaggagcaccatggactcttttagtttatatgattaataaacagtctccaaaagtaaaattaaaagataatttttaccaagataaatctttaataaataaaattttatctactttagataaatttttaaaaattcacattaaaaatcaagtaaaaaacggagcagagattattcaaatttttgatagttgggccggtctattaaatgaagaaaatttacctaattatgtttataatccaaccttaacattggtggattatgtaaaaacattaaatgtacctgttatttgttttcctagaggtgttaaaaactataaaaattattgtgatatcgtcaaacctgatggcatttgtattgattacgaaaccgatccaaataaaattttaaaagaaataaaaatacccgttcagggaggcatggatcccaaaattttactaactgataaagaaattttgaaaaaagagacaaaaaaatatctagatatatttaaagat

SEQ ID NO: 277101 - DNA, 1012 bp, Unknown
  Bacterial polypeptide expressing nucleotide sequence isolated from the Sargasso Sea
ttgaaaaataatcactacctcaatgcattgcatcagaaaaatgaagcactaaatgtgccagtctggttactacgacaagcaggcagatatttaccagaatacatggaaattagatcaaaatttcctgatttttttgcaatgattaaaactcctgaaatttgtaaagaactaactttacaacctttaagaagatttcctttagatgcagccataacatttactgatattttgacaattcctgaagcaatgggcgtggatattgaatttataaaaggtcaaggaccaatatttgctgactcgatcagcaataattcaaaacttaaattaaatgaatctaacttcttagaaagactagactatgtattcgaagctacacaattaataaaaagtgaaattgatgttcctttaataggtttctcaggaagcccttggacattatttgtgtaccttttttatggcagatcacctagaaattatgaaatcattaattcatatatagagaatgagcctgagaatacgcatgctattttgagtatcttatctaatgcaattaaagagtatatttctgcacaaattaaatctggagctgactgtatacaaatatttgattcgtggggagggatacttgaagaacaatataatgaatactcattaaaatatataaatgatataaggaatagtttgagtaaagatattcctatgattctctatgcaaaaggtactaaggtaagcaccttattaccacatactgagataaactgcttcaatcttgattgtgaagaaaatattgataactacattaataagccattaactatacaaggcaattttgatccaaaggattttcataaagatgattcagagttaatagatcttgctgattctatttttgaaaaatatcacacaaagaaaaactatgtatttaatgttggtagcggtataacacccgatatagatccagataaagttggtttatttcttgagagattacgtctttttaattctgaataat

SEQ ID NO: 277102 - DNA, 601 bp, Unknown
  Bacterial polypeptide expressing nucleotide sequence isolated from the Sargasso Sea
tatgattggattcgttggagctccttggacaatactagtttatatgattaataaatcttctcccaaaaaaggtttatcgggtgaattctttaaagatgattttttaattaatagattactaggaataatagagaaattcttaaaacttcatataaaaaatcaaattgaggctggagctcaagttattcaaatttttgatagttgggctggattattagaagataaaattccagaatatatttatatacctactcttaatattgtagattatgtaaaaaaactgggagttcccgttatttgttttccaagaggtattaaagattataaaaacttttgtgaaattgttaaacctgatgctgtaaatatagattacgatgttgacccaaagaaaatactcaatgaaatcaaaataccaatacaaggtggtcttgacccaaaaatattattaactgatcaaaaaactcttaaaatagaagttgaaaaatatcttggtatttttaaagatcacccatacatttttaatttaggtcacggaattctccctgagactaaaattgaaatggttgaggaactaatcaagattgtaagaaattttaaatga

SEQ ID NO: 277103 - DNA, 347 bp, Unknown
  Bacterial polypeptide expressing nucleotide sequence isolated from the Sargasso Sea
aaataaaccaataatattatttacaaaaggtggtgggatctggttaaatcaaatatctaaatctggctgcaatgctataggtttggattggacaacagatatatcttatgcaaggaaaatcgttggagaaaatataagcttacaaggtaatttagacccatgtgcattgcatggaagcgaggaatctataaaagaagcttcatcaaaaatactagatgattatggttttggccataaacatatttttaacttaggacatggtattgaccaatatgtaaatcctgataatttaaaaatcttgattgatcacgtaaaagaatatagtaaaaaatatcacaaaaattaaa

SEQ ID NO: 277104 - DNA, 831 bp, Unknown
  Bacterial polypeptide expressing nucleotide sequence isolated from the Sargasso Sea
ttaaaagatttaacttagatgcagcaattatattttctgatattttaatgttaccttatggtttaggtcaaaatgttaaatttgaaaagaattttggacctaagttagacaaattaaatattgacgatattttaaaagtaactgaaaatgaatttacaaacaaattaaatcctgtttataaactaataaatatttcatcacaaaataatttacttcaaaaaaaagatttatttggttttgttggagcaccatggacaattttagtttatatgataaatcaaatttcaccaaaaaaggaactaaagaaagatttttttgacaatcaaatattaattgaaaaattactcacaatcataattaaatttttaaaaatacatataaaaaatcaaatcaacagcggggcaacaattattcaaatttttgatagttgggcaggtttggtagaagaaaaaaaattagatttattaatatataaaccaacattagatctagtaaattttgttaaatctttaaacgtgcctgtaatatgttttcctagagaaataaaagactacaaaaagtttattaataatgttaagccagatgtggtaaatattgattatagtgtagatcctaaaaaaattgcaaaagatatagaaattccggtacaagggggtttagaccctaaagtacttttaactgataaagataatgttaaaagaaatgcaattaaatatatggaaatttttagagatcatccttatatttttaatttaggacacggcgttttaccggaaacaaatcctgatatggttaaatatttggttaatactgtaaaaaattttaaatgat

SEQ ID NO: 277105 - DNA, 482 bp, Unknown
  Bacterial polypeptide expressing nucleotide sequence isolated from the Sargasso Sea
aatgagtcaaactaagcatctgcttattgaaagtatatatcaacgtacaattgatagaactcccgtctggataatgcgtcaagctggtagatacctacccgagtacattaaaacaaaaaatcaagcaggtggattcatgaagctaataagaaatccagaactagcctgtgaagttacaatgcaaccacttaggagatactctctggattctgcaatattattctctgacatcttggtagttgctgatatgtttaatatgaatttaagatttgaagataagataggacctatctttgacgagccactgagaacagaatcagattttgagaagttaccttcagaactagatgtatcaaatctggagtatgtgaatgaaacaattaaaaatataaaaggtgagcttaatgattcgcttcctctcattggattcataggcagtccatggacagtggcaacttacctaatcgagggtaactcaacaa

SEQ ID NO: 277106 - DNA, 724 bp, Unknown
  Bacterial polypeptide expressing nucleotide sequence isolated from the Sargasso Sea
ttggagaaaatagaattagataatattaaaaatgttgatgagattaattttacagaaaaagtttataaagtttacaaagcaatttccaaaacttcccaggatcctttaatggataataaagacatgataggttttgttggagctccatggactattcttgtttacatgatcaatagatcatcaccaaaaaaaggtctatcaggtcaattttttaaagatgaatttctaataaacagactattaggaattattgaaaaattcttaaaagttcatataaaaaatcaagttgaagctggggccaaagtaattcaaatttttgatagttgggcaggattattagatgataaaattcctgaatacatttatatacccacactaaatattgtagaatatgttaaacaattaggtgtgcctgtaatttgtttcccaagaggtattaaagactacaaaaatttctgtgaaatagttaaaccagacgcagtaaatatagactatgatgttgatccagaaataataataaaagaaataaaaattcctatccaaggggggcttgaccctaaaatattattgactaataaagaagttcttaaaaaagaagttgaaaaatatcttcatatttttaaggatcatccatatatatttaatttaggacatggaattctacctgaaactaaaattgaaatggttgaagacttgattaaaatcgtaagaaactttaaatgaa

SEQ ID NO: 277107 - DNA, 842 bp, Unknown
  Bacterial polypeptide expressing nucleotide sequence isolated from the Sargasso Sea
tatgacacctcttcacaaagtaataaaaaataatgacactagtataaatccaatatggataatgaggcaagctggtagatatttacctgaatttagagaaataagaattaaaaacactaatttcataaatctttgtttgaacgaaaatttatcaactaaaataacactgcaacccttaaaaagatttgatctagatgcagctatcatattttcagatattttgatgttgccttatggattaggtcaaaaagtagagttcaaaaagaattttggtcctcaattaggtgatttaaatttagatgaaatttgcaaagtaaatgagggtgattttgtagaaagaataaatcaagtttataaggctattaaaaaagtaagtttggatcctatagtaaaaaataaaaatactatcggttttgttggtgctccctggacattattagtttatatgattaatcaacaatcacctaaaaaaaacctgaaagataatttttttaaagatatatcttttataaatcgaattttattaattatcgaaaaatttttgaaaattcatattaaacatcaaattaaaaatggtgctaatattattcaaatatttgatagttgggcaggattattagaagaaaaagatttaccagattatgtttataatccaactttaaatcttgttgattatgtaaagtctttaaatgtgccagtgatatgttttccaagagaaattagaaattataaagaattttgtaatattgttaaaccagacgctgttaacattgattataatatagatcctaaaaaaattattaaagagattacaattcctgttcaagggggattagatccaa

SEQ ID NO: 277108 - DNA, 244 bp, Unknown
  Bacterial polypeptide expressing nucleotide sequence isolated from the Sargasso Sea
attgagtaacgcaagagatatgacaaatcatagagttgcattgcaaggcaatatgaaccctaagattttgacattgccatctgaggaaatcattagtgaggctaaaagaattcttcaagattatggttcttctgatgggcatatctttaatcttgggcatggcataacgccggatattgacccagaaaaagtagctgttttagttgatactgttcataaggaaagtgagatttatcatcagtag

SEQ ID NO: 277109 - DNA, 385 bp, Unknown
  Bacterial polypeptide expressing nucleotide sequence isolated from the Sargasso Sea
tctgaaatatataaagaaaattcttaaaaaattatcagaggatcctgctacaagtaaaactccaactatagtttttgctagagacccgaaatgtaatcttagtgaatttaaattagatgatcttagttgttatggcatgtttacttcaattaatccaagtaatgctattagagtatttgagggctctcatgctcttcaaggtaatttagaccctaagatccttcttgaggaagattcagttatcaaagagagtgttatgagaatgttgtcagaattcaaagactttccgggctatatttttaacttgggacacggtataacaccagatataaatccagataaggtaaaagtcttgattgaaactataagggaatctggaagctag

SEQ ID NO: 277110 - DNA, 270 bp, Unknown
  Bacterial polypeptide expressing nucleotide sequence isolated from the Sargasso Sea
aatgaccgaactgaagaacgatcgttatctgcgtgcgctgctgcgccagcccgttgatgtcaccccggtatggatgatgcgccaggcgggccgctatttacctgaatataaagccacccgcacagaggcgggcgattttatgtcgctgtgcaaaaatgccgagctggcctgcgaagtcacactccagccgctgcgccgttatccgcttgatgcggcgatcctcttctcggatattctgactattccggatgcgatggggctggggctcta

SEQ ID NO: 277111 - DNA, 922 bp, Unknown
  Bacterial polypeptide expressing nucleotide sequence isolated from the Sargasso Sea
aaaaaggaagtaaatttaagacccatttggttaatgagacaggcaggaagatatttaaatgagtttagagaaataagaaaatcaaatactaattttattaaattatgtttgaatagtaatttatcctcagaaataactttacaaccacttagaagatttgatttagatgccgctataattttttctgatatattaatagttccttatgctttaggtcaaaaagttgaatttaaaaaagattttggaccaaaattagagaatatagatttagaagcaatctctaaaactagtgaattagagttttttaaaaaattattgccagtttataagtcaatagaaaaagtaaaaaaaaatgaattagttttaaaaaaggacgttattggttttatcggtgctccttggactttattggtatatatgattaataaatgttctccaaaaaaaaaattaaaagaagatttctttaaagataagtatttaattgaagaaacaatattaattttagaaaattttcttaaagttcatataagaaaccaaataaaatatggagcaactataattcaaatatttgatagttgggcaggattattagaaaatgaaaatttacaaaattatatatatactccaacacttaatttagttaaatttataaaatcattgaatgttcctgtcatatgttttccaagaggaattaaaaattatcaggaatattgtaaaatagttaaaccggatgtaattaacattgattatttaattaatccagaaaaaataagaaaagaaattgatatagttgtacaaggtggccttgatccaaaaattttattaacaaacaaagatcaactaaaagctgaggcaaaaaaatatatggaaatttttaaagatcatccttatatttttaatttaggacacggtgtttgccaaa

SEQ ID NO: 277112 - DNA, 410 bp, Unknown
  Bacterial polypeptide expressing nucleotide sequence isolated from the Sargasso Sea
catggggagaaatgtggctttaaagaatgaccgactattgaaagcgttattagggcaagaagttgacgtgacgccagtctggatgatgaggcaggcaggcagatatttaccggaatacagaaataccagaaagatcgctggtgattttatgaatttgtgtcggtctcccgaattggcttgtgaagttactttacagccgctacgtcgctatgccttcgacgccgccattcttttctcggatatattgactatacccgatgccatgggtcaaggtttgtactttgaagcaggagaaggtccccgattcaagaaggttatccagacgcgagcagacgttgatagcttgcgagaaattagcgcaattgatgatttatcttatgtcatgagtgcagtgaccttgattaggaatg

SEQ ID NO: 277113 - DNA, 649 bp, Unknown
  Bacterial polypeptide expressing nucleotide sequence isolated from the Sargasso Sea
aatgggtgaaaatttaccgctactactttctgccgcattaggtaaaaaagtaaataggcctccagtatggatgatgaggcaagcaggcagatatatgaaaatctatagagatttaagggagcgttacccaagctttagagagaggtctgaaaatccagaactatcatatgagatttcaatgcagccttttcatgctttcaaaccggatggtgtaatacttttttcagatattctcacacctctaccagggatgggcataaattttgaaataatagaaagtaaaggtccaataattgaggacccaataagaactcttaaccaaatagaaaatttaaaagaattaaatccaagtgagagtttaagttttgttgggcaagttctttcttcactaaaaaaagatgtgaataatgaggcaacagttttaggttttgttggcgcaccctggactcttgctgcatatgtggttgaaggtaaaagtagtaaaaattattctttaataaaatcaatggcgtttaaagaaccagatttacttcataaacttcttaatcattttgcaaaatctattggtgaatatcttaaatatcaaattaaatctggagcgcaagtagtacaaatttttgattcatgggcaggtcaactaagcccacaa

SEQ ID NO: 277114 - DNA, 315 bp, Unknown
  Bacterial polypeptide expressing nucleotide sequence isolated from the Sargasso Sea
gatgcaattaaaaaatgatcgttatttaagggccttgatgaaacaaccagtcgatcgcactccgatatggatgatgcgtcaggcaggtcgttatcttcctgagtacagagcgacacgagctattgccggcgattttatgtcgttgtgcaaaaaccctgaactggcttgtgaagtcactctgcagccactaaaacgttatcctttagatgcagccatcttattcagtgacattttaacaatccctgatgctatgggcatgggcttgtactttggcgaaggcgaaggcccgcgctttaccaaacaactgaccgattt

SEQ ID NO: 277115 - DNA, 682 bp, Unknown
  Bacterial polypeptide expressing nucleotide sequence isolated from the Sargasso Sea
agagaattaaatccaagtgagagtttaagctttgttgggcaagttctttcttcactaaaaaaagatgtaaataatgaggcaactgttttaggttttgttggcgcaccttggactcttgctgcatatgtagttgaaggtaaaagcagtaaaaattattccttaataaaatcaatggcttttaatgaaccagatttacttcataaacttcttgatcattttgcaaaatctattggtgaatatcttaaatatcaaataaaatctggagcgcaagtagtacaaatttttgattcgtgggcaggccaactaagcccacaagattatgatatctttgctgggccgtatcaaaaaaaagttgttgaaattgtaaaagcggaataccctgaaacaccaataattctctacatttcaggaagtgctggtgtcatagaaagaatggcaaaaactggagtagatataatctcattagactggacagtagatattgaagaggcttgtaaacgaatccccaatgggattggaattcaaggtaatgttgaccctggcattttattcgggaacaaagaatcaataaaagaaagaattgataatacttttaataaaattaaagacaggaaatatattcttaatttgggtcatgggattttacctgggactccagaagaaaatgctcaaacattttttg

SEQ ID NO: 277116 - DNA, 464 bp, Unknown
  Bacterial polypeptide expressing nucleotide sequence isolated from the Sargasso Sea
catgactttcgctcccctgcaaaatgatcgctttcttcgtgcactcaaccgcgagacggtggatcgcacgcctatctggatgatgcgccaagcggggcgttacctaccggaataccgggctgctcgcgagcatgcgggttcatttatggatctgtgcaagaatgctgatctggcctgtgaggtgacgttacagccattggagcgttacccgttggacgcggctattctgttctccgacatcctgactattcctgatgctatggggctggggctgtattttgagacgggagaggggcccaaattcagaaaagtggtgcgaaccgaagcggatgtggccgcactgccgataccggatgcagaatccgatctgggctacgtgatgaatgcggtgagtactattcgtggtgctcttaatggacgtgtgccgctgatcggtttttccgggagcccctggacgctggcga

SEQ ID NO: 277117 - DNA, 559 bp, Unknown
  Bacterial polypeptide expressing nucleotide sequence isolated from the Sargasso Sea
ttggtaagtcgatactactgtgatggtgtgacttctattgagctatctaattcacctttccttaaggcctgtcgctgcgaacctcccgagcatgttcctgtctggtttatgcgtcaggccggaagatcattgccggaatatcgcgcagtgaggaaagagggaagtattctggacgcaatcaaagaccctaccctgtcagcagaaattacacttcagccgattcggaggtatggtgttgatgccgctatcttgttttccgacattattgtcccagtccatgctgtgggatttgggattgacattaagccaggtgtcggtccggtaacaaaggatccatttcggtcagcaagtgacttaaaaagattgaatcaccttgatccagatgttgatacgccatatgtaatcgaaacagtgaaattatgtgttagccagctagatatcccgcttataggtttcgccggcggaccatttactatcgcaagctatcttatcgagggagggccgtcacgaacttatcaagaaacaaagcgcttaatgttcgaagaccctgaactatggg

SEQ ID NO: 277118 - DNA, 331 bp, Unknown
  Bacterial polypeptide expressing nucleotide sequence isolated from the Sargasso Sea
atggtcagcttggaaaatgaccggttccttcgcgccctgttgcgtgaacctgtggaccgtaccccactatggatgatgcgtcaggcggggcgctatctccctgaataccgcgagacccgcgccgaggcgggcagtttcatggggctctgcaccaaccccgaattggcctgcgaagtcacgctgcagccgctcagacgctacgcgatggacgcggcgattctcttctctgatattttgactgtgcccgacgcactgggtctggggctgtatttctcggaaggcgagggcccgcgattcgagcggcccattcttcagcggcggagatcgcggc

SEQ ID NO: 277119 - DNA, 691 bp, Unknown
  Bacterial polypeptide expressing nucleotide sequence isolated from the Sargasso Sea
ggtgaggtgctgggacgtctgcgccaaagcgtcggcaacgaagccgctgtgctcggtttcgtcggcgcaccctggaccttggcggcctacgtcgtggaaggcaaaagcagcaagaactacgcggtgatcaaggccatggccttccgcgaaccagagctgctgcacaaactgctcgaccacttcgccgagtcgatcgccaactacctgcgctatcagattgattccggcgcccaggtcgttcagatgttcgactcctgggccggacaactcagtcctgccgattacgacaccttcgccgcgccataccagaagaaggtggtggatctggtcaagcagacccatcccgagacccccttcatcctgtacatctccggcagtgccggcgtcctcgaacggatggccaccacaggggtggacatcatttctctggactggaccgtggacatggccgaagctctagcccgcttgccggagcacatcggtgttcaaggcaacgttgacccgggtctgctgttcggaacgccggacgcgatcgaggctcggattgacgactgcgtgcgcaaggcccgcggcaggaagcacatcctcaacctgggccacggcatcctgccggggacgcctgaggaaaacggcgccgccttcttccgctccggcaagagcgtgctcgaccgcatcggggccgtcgcttgac

SEQ ID NO: 277120 - DNA, 870 bp, Unknown
  Bacterial polypeptide expressing nucleotide sequence isolated from the Sargasso Sea
gtaccaagcaataagaaaagattacagcaattttcttgatatgtgtaaacaacccaaaacatgtgcagaacttgccttacagccaattgatcgctttaatctagatgcagctattcttttttcagatattttaacaatccctgatgcctttaatcttgggcttgcatttcatgagggtgaggggccaaggtttgctaatcctatttcatctattcaagatatcaataatttgatctcatttgatgtaaataatcttgattatgtatttcgagctgtagaagaaacaaagcgtttgcttcctgaagatttacctttgatagggttttgtggcagtccttggaccctagccgcatattctgttgaagggggaggttcaaaagatttccaaaaaacaaaaagttttgtgagaaatcatccatctgagctccaaaaatttttagaagttctttgtgacgcttgttacaaatatttgaaacaacaagttttaagtggtgtaaacgcaattcaaatctttgattcatgggctaatttactatcagaatccgatcttgaaaaattttcattgagttatacgaggatgttatctcaaatgttgaaagctgattcaattactaaagatataccaattattttgtttgaaaaagcgcctaataaaaaaattattgatttagtttttgagaaccttagttgtctaagtcttcattggcaggaaaatatcgaacatgtatctcatcaattaagagacaaatttgcaattcaaggaaatcttgatccaaaaatcttagttgcgccagaaaatataatttgggacgaaactcaaaaaatatgcaagatcatgaagaattatccgggatttatctttaatcttgg

SEQ ID NO: 277121 - DNA, 754 bp, Unknown
  Bacterial polypeptide expressing nucleotide sequence isolated from the Sargasso Sea
gccggcagcttcatgggcctggccaccaacgtggactacgccaccgaagtcacgctgcagcctttggcgcgcttcccgctggatgccgccatcctgttcagcgacatcctgaccgtgcccgacgccatgggcctgggactgtcgttcgccgaaggtgaaggcccgcgctttgccaaggtggtgcgcgacgaggccgctgtggccgaactggccgtgcccgacatggacaagctgcgctacgtgttcgacgccgtgaccagcatccgcaaggccttgaacggccgcgtgccgctgatcggcttctcgggcagcccctggaccctggcctgctacatggtcgagggcaagggcagcgacgactaccgcctggtcaagagcctgatgtacgcgcgccccgacctgatgcaccgcatcctggccgtcaacgccgacagcgtggcggcgtacctgaacgcgcagatcgacgcgggcgcccaggccgtgatgatttttgacagctggggcggcgtgctggccgacggcgcgttccaggaattcagcctggcctacacccagcgcgtgctggcacagctccagcgcaccggcgtggacggcaccgacgtgccgcgcatcgtcttcaccaagggcggtggcacctggctgcctgacatgaaggacatcgactgcgaagtgctgggcctggactggaccgccaacctgggcaaggcccgcgccatcgtcggcggcgcagtcggcggccccggcaaggcgctgc

SEQ ID NO: 277122 - DNA, 550 bp, Unknown
  Bacterial polypeptide expressing nucleotide sequence isolated from the Sargasso Sea
atgtccgcaccgctcgccaacgacaccttcctgcgcgccctgcgccgccagcccaccgactacacgccgctgtggctgatgcgccaggcgggccgctatctgcccgagtacaacgccacgcgcgcgcgggccggcagctttctcggcctggccaagtcgccggcgtatgcgaccgaggtgacgttgcagccgctggatcgctacccgttggacgcggcaatcctgttttccgacatcctgaccgtgcccgacgccatgggcctggggctgtcgtttgcacagggcgagggcccgcgctttgccaagccggtgcgcacggaagccgatgtggcggcgctgtcggtgccggacatgtcgtctctgcagtacgtgtttgacgccgtggcggaaatccgccgtgcgctcgtgcaggacggccgccagcgtgtgccgctcatcggcttctcgggcagcccgtggacgctcgcctgctacatggtcgaaggcggcggctcggacgacttccgcaccgtcaagtcgatgctctacgcgcgcccggacctgatgcacc

SEQ ID NO: 277123 - DNA, 868 bp, Unknown
  Bacterial polypeptide expressing nucleotide sequence isolated from the Sargasso Sea
ggccgaggtgacactccagcctttacggcgcttcgggttcgacgctgcaatcctgttttcagacattctggtcatcccccatgcgctgggacaggacgtccgtttcgaagcaggcgagggaccacggctggaaccggtccgcgatgcgggcggcttgtccgacctatccctaaacgggatccatgaccgcctgtatcctatctattgcaccgttgagcgggttgcagaagtcctgccggacagtaccgccctgattggatttgccggcgcgccgtggacggtggcaacctatatggtcgaaggttgtggcagccgggattatccatatgcgaagggctgggcgctcggtgatcccgacggctttcaggaactgatcgacctcctggtgcaagcaaccagcgcctatctgattcgccaggtggaggcaggtgcggaggcgcttcagctcttcgatacttgggctggtgttttgccgacgcacgcgttcgagagattcagcgcccaaccgatcatcgaaatcgcaaaacgggtaaaagcagttcactcccatatacccatcatcgcgtttccgcggggtgcggcgatttatctgccggaactagcccgagcgcctgaaattgatggaatcggcatagattacgcgacagaccccgattgggcggcgcgggaaatccaaccctatgcgacggtacagggaaatttcgatcctatcctattgatggcgggaggcgaagaactggaacggcgtaccagggccattgtcaacgcgctatccggcgggccgcatatcttcaatctaggccacggcattctgcctaagaccccgatcgcgcatgtcgagcgcttgctgaaagccgtgcgcggatga

SEQ ID NO: 277124 - DNA, 853 bp, Unknown
  Bacterial polypeptide expressing nucleotide sequence isolated from the Sargasso Sea
ggcctgggcctgtcgtttgccgagggcgagggcccgcgctttgccaaggtggtgcgcgacgaagctgcggtgaatgaactggccgtgcccgacatggacaagctgcgctacgtgttcgatgcggtcaccagcatccgcaaggccctcaacggccgcgtgccgctcatcggcttctcgggcagcccctggacgctggcctgctacatggtcgaaggcaagggatcggacgactaccgcctcgtcaagacactgatgtacagccgccccgacctgatgcaccgcatcctggccgtgaatgccgacagcgtggccgcgtacctcaacgcccagatcgacgccggagcccaggccgtgatgatttttgacagctggggcggcgtgctggccgacggtgcctttcaggaattcagtctggcctatacaaaacgcgtgttggcgcaactcaagcgcaagggcgtggacggcaccgatgtgccccgcatcgtcttcaccaagggtggtggcatctggctggacgacatgaaggacatcgactgcgaggtgctgggcctggactggacggccaacctgggcaaggcacgcgccatcgtcggcgggcaggtcggcggccccggcaaagcgctgcagggcaacatcgaccccaacgtgctgtttgcgccacccgcgcagatcgtcacccaggtgcatgccgtgctcgacagctttggcaagccccacaccgaccgcagcaccaccggccccacgcacatcttcaacctgggccatggcatcagccagttcaccccgcccgagcatgtggcggcattagtggaggctgtgcacagccactcgcgcgcgcagcgccagggctgat

SEQ ID NO: 277125 - DNA, 625 bp, Unknown
  Bacterial polypeptide expressing nucleotide sequence isolated from the Sargasso Sea
gttttaggttttgttggcgcaccttggactcttgctgcgtatgtagttgaaggtaaaagcagtaaaaattattctttaataaaatcaatggcttttaatgaaccagatttacttcataaacttcttgatcattttgcgaaatctattggtgaatatctcaaatatcaaataaaatctggagcgcaagtagtacaaatttttgattcatgggcaggccaactaagtccacaagattatgatatctttgctgggccgtatcaaaaaaaagttgttgaaattgtaaaagcggaataccctgaaacaccaataattctatacatttcaggaagtgcaggtgtattagaaagaatggcaaaaactggagtagacataatctccttagactggacagtagatattgaagaggcttgtaaaagaattcccagcgggataggaattcaaggtaatgttgaccctggcattttattcggaaacaaagaatcaataaaagaaaggatagataatactttcaataaaattaaagacaggaaatatattcttaatttgggtcatgggatattacctgggactccagaagaaaatgctcaaacattttttgaacatggaaaaaaactcacctactagt

SEQ ID NO: 277126 - DNA, 841 bp, Unknown
  Bacterial polypeptide expressing nucleotide sequence isolated from the Sargasso Sea
tttgatttagatgcagcaataattttttcagatatattagtgatacctgatgcattaggacaaaaagtatctttcgaaaaaggaaatggtcctaaattaggtccaatgactttgaaccacgaaacactcttaaaaaataaagataagtttttatcccatttaagaccagtttatgaatctatcaggatggtaagaaaagaattatcaaaggatagaactctaattggttttgcgggggctccctggacaatagcaacttacatgatagaaggaggtacaacaaaaacattttcaaaagtgaaagcttggtcttataaagaccctgaaggttttggaaaatttatagatggtttagtagaagcaataattttacacttaaaaaatcaaattgatgcaggtgcggaagtcatacaaatatttgatagttgggcgggtgtcctttcaccagatagttttcataagtgggtaattgaaccaacagtaaaaatagtcgagtcaataaagcgatcaaacccaaacataccaattataggatttccaagaggcgctggagttggttatgtcagttatgtaaaagaaactatggttgatggaattagtctagacacaacgataccaacaagctgggcagcaaaaaatataccccaaaaatgtaccttacagggaaatcttgatccagacattctgataaacggcggtaaaccaatggttgatcaagcacttaacatacttcatgacttatcgaatagatcacacattttcaatttaggacatggtatcttaccagatacccctccagataatgttaagatgctaatcgaagttgttcatagatacagta

SEQ ID NO: 277127 - DNA, 806 bp, Unknown
  Bacterial polypeptide expressing nucleotide sequence isolated from the Sargasso Sea
gacaagtaccccagcttccgtgagcgttccgaaaacccggatctctcctatgagatctccatgcagccgtttcacgccttcaagcccgatggcgtgatcctgttctccgacatccttacgcccctgccggggatgggaatcgatttcgacattatcgagagcaaaggtccccagatcggcgatccaatccggagcatggaccaggtggatgccctgcgccccctcaaccctgccgagtcgatgccctttgtgggtgaagtgctgggtcgtctgcgccaaagcgttggcaacgaagcagctgttctcggcttcgttggtgcaccttggacccttgccgcttacgtggtggagggcaagagcagcaagaactacgcggtgatcaaggccatggccttccgcgaacccgagatcctgcacaagctgctcgaccacttcgcagaatcgatcgccaactacttgcgctaccagattgattccggcgcccaggtcgtgcagatgtttgattcctgggctggacagctgagcccggctgactacgacaccttcgcggcgccttatcagaaaaaggttgtggatctggtcaagcagacgcaccccgacacccccttcatcctctacatctccggcagcgccggcgtgatcgagcggatggccaacacaggtgttgacatcgtttctctagattggaccgtggatatggccgaggccctggcacgtctgccggagcacatcggtgttcaaggaaatgtggaccctggccttctgttcggcaccccggaggcgattgaggcccgcatcgatgactg

SEQ ID NO: 277128 - DNA, 739 bp, Unknown
  Bacterial polypeptide expressing nucleotide sequence isolated from the Sargasso Sea
atgactattctgtgtaaattaagcgatggggataaaacatggccacctcccatatggcttatgaggcaagccggtcggtatttgcctgaatacaatgttattagaaataaggcaggtagttttctagacttgtgttacaaaccagattatgcatccgaggtaactctacagccaataagacgatttgatttggatgcggctattatttttgcagatattttattaatcatacaaaactttggtatgggtataaaatttgaggagaaggttggtccagtcttagaaaaacctcttatagaaaacccggtgctgaatgttatcactgaagtcgaaaaatcaaaattagtaaacgtcggtgaggcaattaatttaaccagaaataagttaccaagagagaagagtttaataggtttttgtggggcaccctggactgtagtgacttacatgattaatggtcgatcaaaaaaagatctatctcaatccgttagatggatggaggataacccatcattaggaaacgatatcattgatgtactggttgatctatctgctgcttacttaattttgcagattaaagcaggggctgatgttgtaaaaatttttgattcatgggcaggtgttttgaatgaaaatcaattcaataattgggtaatcaagccaacgagtaaaattatcgcaaaagtaaaagagatcttccctaaaactcccataattgtttccccaagggcgcacatcaatt

SEQ ID NO: 277129 - DNA, 789 bp, Unknown
  Bacterial polypeptide expressing nucleotide sequence isolated from the Sargasso Sea
tatgaaaatctatagagatttaagggagcgttacccaagctttagagagaggtctgaaaatccagaactatcatatgagatttcaatgcaaccttttcatgctttcaaaccggatggtgtgattcttttttcagatattctcacccctcttccagggatgggtataaattttgaaataattgaaagtaaaggtccaataattgaggacccaataagaaatcttaaccaaatagaaaatttaaaagaattaaatccaagtgagagtctaagttttgttgggcaagttctttcttcactaaaaaaagatgtgaataatgaggcaacagttttaggttttgttggcgcaccttggactcttgccgcatatgtagttgaaggtaaaagcagtaaaaattattctttaataaaatcaatggcttttaaagaaccagatttacttcataaacttcttgatcattttgcaaaatgcattggtgaatatcttaaatatcaaataaaatctggagcgcaagtagtacaaatttttgattcatgggctggtcaactaagcccacaagattacgatatctttgctgggccttatcaaaaaaaggttgttgacattgtaaaagctgaatacccagaaacaccagtaattctttacatttcagggagtgctggtgtcattgaaagaatggcaaaaactggagtcgatataatctcattagattggacagtagatattgaagaggcttgtaagaagatccctagcgggattggaaattcaggtaatgttgacccaggcatttt

SEQ ID NO: 277130 - DNA, 703 bp, Unknown
  Bacterial polypeptide expressing nucleotide sequence isolated from the Sargasso Sea
ggttatgtgatggacgccgtgcgcaccattcgccgtgagttgaatggccgcgtgccattgatcggttttaccggcagcccctggaccctggccacctatatggttgaaggcggctcaagcaaggacttccgcaagtccaaggccatgctctacgacaacccgcaggccatgcacgcgctgctcgacaagttggcgcagtcggtgaccgcctacctcaatgggcagatcaaggccggcgcacaggccgtgcagattttcgattcctggggcggttcgctgtcagcggcggcgtatcaggagttctccctggcctatatgcagaagatcatcgacgggctgatccgcgagcacgatggtcgccgcgtgccggtgattctgttcaccaagggcggcggcctatggctggagtcgatggcggatagcggtgccgaagcgctgggcctggactggacctgcgatatcggcagcgcccgtgcccgtgtcggcaacaaggtggcgctgcagggcaacatggacccgagcgtgctgtacgccaacccggcggcaatccgcgctgaagtcgggcgtattctcgcggcttatggtcatggcagtggtcaggtgttcaaccttggccacggcatcaccccggaagtcgatcctgagcatgcgcgtgccttcttcgaagcggtgcatgagttgtctgggcagtaccatcagtaag

SEQ ID NO: 277131 - DNA, 727 bp, Unknown
  Bacterial polypeptide expressing nucleotide sequence isolated from the Sargasso Sea
tatgagcgattcaaacgattttcgatttttaaaagcttgccggggagaacaagtagataaaacacctgtttggttcatgcgtcaggccgggcgatacatgaaagtctaccgggacttgaaagaaaagtatacctttttggaaatgtgtaaaacccctgaattggcatgcgaagttaccatgcagcctctgggtgttttggatattgatgcagcgattatttttgctgatattcttctcccactcgaacccatgggtacgggtctcgagttttccgcgggcgacggtccggtaataccccgacctgtaaaagacaaaaaagcagttgaaaagttattgccggtaaatgcaaatgagcagttgggctttgtaggggatgccataaagcttgtgcgcaaagagattgatggaaagattcctctcatcggttttgcaggtgcgccttttactttatgtagctatatgattgaaggtggaaagtcacgcgattttacaaccaccaagttaatgatgtatgaggctacagatgtctggaaccaattgatggataaagtttgtaccatgcttgtggattatcttaagatgcaggtgaatgccggggcgcaggctctgcaaatttttgacagttgggttggatgcttaagtcctcatgattaccagaaatatatcttaccgcatttaaaaagagtttttgatggccttcaagatttgggtgtccctctcatcaat

SEQ ID NO: 277132 - DNA, 757 bp, Unknown
  Bacterial polypeptide expressing nucleotide sequence isolated from the Sargasso Sea
atgtcagttaatgagtcttcttttttaagagcacttaatttagaaccaactagcaagcctcctatttggctaatgcgacaagctggtagatacctgccggaataccaagacataagaaaacactacaagaattttcttgatatgtgcaaggaaccaaagacctgtgcagaattagcacttcagcctattgagcgatatagactcgatgcttcaattttattttcagatattttgacaattcctgatgcatttaatcttggcttgtctttttcagaaggcgaaggacctaggttcgctaatccgatttccttggcatcagatattgataatctgaatatttttgatgtaaataatttggattatgtatttaaaactgtagaggaaacaaagaaagtactacctgaatcgctaccattaataggattttgtggaagcccttggactcttgcagcttactccattgaaggtagtggatctaagacttttccacgtttaatgaaatttcttcaattgcatagcaattcactagaaaaattactggatttgtacactgatgcttgctttaaatatctaaaacaacagatcatatctggcataaatgcgatacaaatatttgattcttgggcagatcttcttaatgaagataaatttaaaaaatattcagtcaaaccaactaaaaatttagtaaaaatgcttaaaaatgataatgtcacaaaaacaataccgattatactgttgaaaaagctccccccataaa

SEQ ID NO: 277133 - DNA, 649 bp, Unknown
  Bacterial polypeptide expressing nucleotide sequence isolated from the Sargasso Sea
atgaatacttctcgtcctgagctgaaaaacgaccgcctgatgagggcgttgcgccgacaggaagttgactgtaccccggtctggatcatgcgccaggccggccggtatctcccggagtaccgtgccacccgtgcacgagcgggagacttcctgacgctttgcaaaacgccggaactcgcctgcgaagtaacgctccagcctctggagcggtttgatcttgatgctgcgattcttttctcggacatcctgacgatacccgatgcgatgggtttggggctcagcctaaaggaaggtgagggcccgcgcttttcccgtccggttcgaacggctgcggatgttgacgccctgacgctgcctgatcctgagggagaacttcgctatgtcatggacgccgtcaggctcattcgacaggaattgcacgggcgggtccctctcattggatttgcgggcagcccctggactctggcgacttatatggtggaaggccagagcagtcgtgatttctcaatcgccaagaacctgatttaccaggattcttcagtggctcgtcgactgctggcccttctcagcgattcaatcgctttgtacctgacggcgcaggcgcacgccggggctcaggtcctgatgctctttgatacctggggcggtg

SEQ ID NO: 277134 - DNA, 774 bp, Unknown
  Bacterial polypeptide expressing nucleotide sequence isolated from the Sargasso Sea
tatgaattataataataaaaaattgttaaaaactttacagggtcacaaattcgatacaccccctgtctggttaatgcgtcaagcaggaagatatctgccagagtacagggaagtaagaaaacaggcaggtagttttttagatctatgttacaatcctactttaactacagaggttactttacaacctttgagaagatttaatttagacggagcaatattattcgctgacattcttcttattccaaatgcacttggacaacatctggaatttaaggaaggaattgggcctattttagaaccactcaaaaataatgaggatattgaaaatttgagagatattgaagatatacacaatattttagagccagtttatgaggcggtaactaatattagatcaaaattagaaacaaacattacctttataggttttgccggatctccgtggacagttgctacttacatgatagaaggcaaaggatctaaggatcatattaaaacaaaaacatttatgttaaactatccagaggtttttaaaaaattaatagtaaaaatacaggacgcaactattgaatatttatccaaacaaatagaaggtggggttgatgttataaaattatttgatagttgggcaaattcattacctgccacttatattgaaaaattttcattggatccaatgaaagttatagcaaaagaaataaaaaaaagattccctaagataccagttattgtttttccacgtgggattggtccaatgtataagaaattcgcaat

SEQ ID NO: 277135 - DNA, 595 bp, Unknown
  Bacterial polypeptide expressing nucleotide sequence isolated from the Sargasso Sea
tcttgctgctatgtagttgaaggtaaaagcagtaaaaattattctttaataaaatcaatggcttttaatgaaccagatttacttcataaacttcttgatcattttgcaaaatctattggtgaatatcttaaatatcaaataaaatctggagcgcaagtagtacaaatttttgattcatgggcagggcaactaagtccacaagattacgatatctttgctggaccatatcaaaaaaaagttgttgaaattgtaaaagcggaataccctgaaacaccagtaatactttacatttcaggaagtgctggtgttatagaaagaatggcaaaaactggagtagatataatctcattagattggacagtagatattgaagaggcttgtaaaagaatccctagtgagataggaattcaaggtaatgttgaccctggcattttattcggaaacaaagaatcaataaaagaaaggataaataatactttcaataaaattaaagacaggaaatatattcttaatttgggtcatgggattttacctgggactccagaagaaaatgctcaaacattttttgaacatggaaaaaaactcacttattagt

SEQ ID NO: 277136 - DNA, 979 bp, Unknown
  Bacterial polypeptide expressing nucleotide sequence isolated from the Sargasso Sea
gacaatgacttgttaattaaagctgcacttggagagaatgtagaacgtactccagtgtggttaatgcgacaagcaggaagaattcttcctgaatacagggcaattcgtaattcactaagtggatttaaggaattggtggaaacccctcatttagctgctgaagttaccattcaaccagttgatattttagatgtagatgcagcaattatattttcagatattctcgttgttcctgaggctatgggattaagctatcaaatgatagagaaaaaaggtccgtggtttgaaaaaactattcacacaaatgaagatgttgattcattagtgattcctgatgttaatgatcagctatcctacgtaatggaagcaattagaattaccaaaaaagagctaaatggcagggttccattgatcggttttgcaggtgctccctggacaattttttcttatatgattgaagggcaaggttcaaaaacctttagtaaagcaaagaaaatgttgtatacaaatcctgaattagctcataatttattaaagaaaatcaccttaacaactattaaatatttaaaagcacaaattagtgcaggtgctgatgttgttcaactatttgattcttgggcaggtatattaacacaccagcaatatattgagtttggtataaaatatgttaatgaaatttgtaatgcaattaatgaagttccagttacggtattttctaaaggagcatatttcgctagaaaagaattaggtgaattaaaatgcaatactattggattagattggaatatggatattaaagaaagtagggaattaattggtccagaaaaaacactgcagggcaacttagatccttgtgtgttgtattcggattttaaaaacattcaaaagcaaacaaatgaaatgctttgtaagtttggaaaaaatcgccatattgccaaccttggtcatggagtttatcctgatatcactcctgacaaag

SEQ ID NO: 277137 - DNA, 731 bp, Unknown
  Bacterial polypeptide expressing nucleotide sequence isolated from the Sargasso Sea
gatgacaaaaaaaattttaaaggctctcgcaggtgaaaaagagaaagttcctccaatatggatgatgcggcaagccggtcgttatttgcccgaatatcgtgaaacgagggcacaggcgggtgattttttatcgctttgctataatagcgaattagccgcagaagtgacacttcaaccgataaggcgctatggtttcgatgctgcaatattatttgctgatattttgctcttaccacaagcattgggtgctgacctatggttcgtaacaggggaaggtccacgcttgtctactgtgcaagcaaaaaaagattttgaaaatttacgacggccagaagaaataaacgaaactttagcacccgtttatgaaacagttaaaattttatcgaaggaactacctagcgaaactaccctcataggatttgctggtgcaccatggactgtggcgacttatatggttgctggacgtgggactcctgatcaggcgccagcacattcattaaaaaatgaaaatccagaattgtttaataatttaattaatcttcttattgaaggaacaatagaatatttgtctcatcaaataattgcaggagctgaggttataaaaatatttgatagttgggccggatctctcaaaggaaatgattttgacaaatatgcactggagccatgtaaaaaaattatttcagcacttaaagctaagcatccgcacattccgattatagcgtttccaa

SEQ ID NO: 277138 - DNA, 422 bp, Unknown
  Bacterial polypeptide expressing nucleotide sequence isolated from the Sargasso Sea
ttcatgggcaggtcaactaagcccgcaagattacgatatctttgcagggccatatcaaaaaaaagttgttgatattgtaaaggaggactatcctgagacacctgtaattctgtatatttcaggaagtgctggtgtaatagaaagaatggcaaaaactggcgtagatattatttcattagactggacggtagatattgaagaggcttgtaaaagaatccctagtggcataggaattcaaggtaatgttgaccctggtattttatttggaaacaaagaatcaataaaagaaaggatagataatacttttaataaaattaataacaggaaatatatccttaatttaggtcatggtattttaccggggactccagaagaaaatgcgcaaacattttttgaacatgggaaaaaactcacttactagt

SEQ ID NO: 277139 - DNA, 852 bp, Unknown
  Bacterial polypeptide expressing nucleotide sequence isolated from the Sargasso Sea
aaagatatgatctggatgccgcaatattattctcagacatattaactattccagacgcattcgatcttggactcaaattttatgagggggaaggtccagtatttgaaagaccaattaacacagtcaatgacatatcgtctctatgtgaatttgatgaaggtaagctcagttatgtctatagagcagttgagattaccaaagagaatcttagctcaactattcctttaattggattttgtggcagtccatggacgcttgtagcttactcaatccaaggaagatcatcgaaagatttcaaaaaaactaaagattttattagtatgcatcccagcgaagtaaatcagttacttgagaaaattacatcagcatgttttttatacttaaaggagcaagtcaaaagcgggatagatgcaatacaaatctttgactcatgggcggatttgttagatgttaatcaattcaatgaattctccctaaagtttactaaagatttagtgcgtatgctcaaagatgatgatgttacaaatcatgtaccaattatattgtttgagaaagcgcctccaatagaagttgcaaaaataccatttgacggacttgcatgcatgagtttgcaccatagtaattccctgaatgatgcaaaaaacaaattacaagataagtatgcaattcaaggtaatttagatccaaaggttttaacgctatctgaaaaagaaattactcaagaaactgaaatgatattagatacaatgacagattatccaggatttatatttaatttggggcatggaattacaccaaatattcatccagataagatacaagtgatgattgatactatacgtaatccttaag

SEQ ID NO: 277140 - DNA, 927 bp, Unknown
  Bacterial polypeptide expressing nucleotide sequence isolated from the Sargasso Sea
aataactaacaaagatacttcattcaatcctatatggattatgagacaagctggaagatatttgcctgaatttagagaaattaggaaagaaaaccccaattttattaatctgtgtttaaatgaagatttgtcttcagagataactttacaacccttaaaaagatttgatctggacgcagcaataatattttcagatatcttaatgcttccatatggattaggtcaaaaagtagaatttgaaaaaaattttggaccaaagctaggagaattaaatttaaatgaaattgctaagattgatgaaattgactttgtagaaaaaacacatcctgtatataaggcactaaaaaaagttagttcagacacagttttaaataataaaaataccattggcttcgttggtgctccatggacattattggtttacatgatcaataaacaatcacccaaaaaaagcttgaagaaagatttttttaaagatgagtttttaataaatagaattttattaattattgaaaaatttttgaaagttcatattaaaaatcaaattgataatggtgcaaatgtgattcaaatttttgatagctgggcaggtttattagaggaaaaagatttacctaattatgtttattctccgactttaaatttagtaaattatgtaaaatctttaaatgttccagtaatatgttttcctagagaaataaaaaattataaagaattttgtgatgttgttaaacctgatgctgttagtattgattacaatttagatccaaaaaaaatacttaaagatataaaaatacctatacaaggtggtttagatccaaaaattttgttaactaataatgagattttaaaacaagaagcttctaaatacttagaaattttccgagatcatccatatatatttaatctcggtcatggtattctgcc

SEQ ID NO: 277141 - DNA, 564 bp, Unknown
  Bacterial polypeptide expressing nucleotide sequence isolated from the Sargasso Sea
aatgaccgaattaaaaaacgatcgctatttacgcgcacttttaaaacagcctgttgattacacaccggtatggatgatgcgccaagctggccgctatcttccagagtacaaagcaacgcgtgcagaagcaggcgatttcatgtctttgtgcaaaaacgcggaacttgcatcagaagtaacccttcaacctttacgtcgtttcccgcttgatgcggcaatcttgttctcagacatcctaacgatccctgatgctatgggcttaggtttgtactttgaaacaggtgaaggtcctaagtttgagcgtcctatcacatgtaaagctgacgtagagaaaattggtctacctgatccagaaggtgagcttcaatacgtaatgaacgctgttcgtcagatccgtaaagatctgaaaggcgaagtaccactgattggtttctctggcagcccatggacactagcgacatacatggttgaaggtggaagctctaaagcgttcactaagatcaagaagatgatgtacgcagaaccacaaacactgcacctgcttctagataagctggctgacag

SEQ ID NO: 277142 - DNA, 655 bp, Unknown
  Bacterial polypeptide expressing nucleotide sequence isolated from the Sargasso Sea
aagttaatccgttcagaactgcctgcagacatccccctaatcggttttggtggtgcaccttttactctcgcctcctatgcggttgaaggacaaggttcgcgcaactacattcacgttaagcgactgatgttgagtgatcccggcgccttcagtgccttgatgggaaaaatgacaagcgccgctattgactatctaaattaccagatcgaggagggtgtgcaggccatacagatctttgatagttgggtaggagcgctatcagttaatgattatcgagagcatgttttttcacatagccaacgcttgataaaagcagtatcaggtaaggtcccggtgatccactttggaaccggtaactcctcgttgctcccgctcatggcagcagccggcggtgatgtcatcgctttggattggcgtgctcctctgcttgaaagttgggatctgatgggtgttaaggctgtgcagggtaatcttgatccggtggccttgtttgctgaacgggcatcggtactccggagcgcccaagcagtattggatgatgttggtggccgaccagggcatatttttaacttggggcacggcattttgccagagacgcccgttgataacgttaaggctctggtcgattttgtgcacgagtcaaccgatcggtaag

SEQ ID NO: 277143 - DNA, 766 bp, Unknown
  Bacterial polypeptide expressing nucleotide sequence isolated from the Sargasso Sea
atatggttgatgagacaggcaggtaggtatcttcctgaatatagagctgtaagagagaagactgaaacttttttagacttatgttataatccaaagcttgcggctgaagttacattacaacctttaagaagatttgatttagatgctgctataatttttgcggatatattattaatttcagatgcactaggagtagaagttaggtttgttaatggtgaaggaccaagattggacagtgaatatttaaataataatctatcaaagttaacttttaaaaataataagataaataatatttatgaaacaattgaatatgtaaaaagttctttatcagaaaatgttacattaattgggtttgctggttcaccttggacagttgctgcttatatgattgaaggtaagtcatccaaagattttctgaatgctaaatcgtggttagaaaacgagaataaattattagtgctttttaacagtattattgattcaacaataatttatttaaaaaaccagattaaagctggtgctgaagttattcaactttttgatagctgggctggtcttctggacgatgttcaatttataaaatggtctattgaacctacaaaaaagattgtcagtgaattaaagagctataatccaaatatacgtataattggatttcctagaaatgtaagcatagagaatgcatttctttatgcaaaaaatactggagtagactgtataagtattgactataatattgatataaaagatatgaaaaattttc

SEQ ID NO: 277144 - DNA, 427 bp, Unknown
  Bacterial polypeptide expressing nucleotide sequence isolated from the Sargasso Sea
tttgattcatggggcaggacaactaagtccacaagattatgatatctttgctgggccttatcaaaaaaaagttgttgacattgtaaaaaaggagtatcctaacacacctattattctctacatttcaggaagtgctggagtaatagaaagaatggcaaaaactggcgtagatataatttcattagactggacagtagatattgaagaggcttgtcaaagaatacctaatgagataggaatccaaggtaatgttgaccctggcattttatttggaaaaaaacaatccataaaagaaaggatcaatgatactttcaataaaattaaagataggaaatatattcttaatttaggtcatgggattttacctggtactccagaagaaaatgctcaaacattttttgaacatggaaaaaaactcacttactag

SEQ ID NO: 277145 - DNA, 184 bp, Unknown
  Bacterial polypeptide expressing nucleotide sequence isolated from the Sargasso Sea
ttgaaaaatgatcgctatttacgtgcgttacttaaacagccggttgatatgacacctgtatggatgatgcgacaggctggacgttaccttcctgaatataaggctacccgtgcagaagctggcgattttatgtcgctgtgcaaaaatgctgagttggcatgcgaagtaacattacaacctttgc

SEQ ID NO: 277146 - DNA, 703 bp, Unknown
  Bacterial polypeptide expressing nucleotide sequence isolated from the Sargasso Sea
tttgatccggatgaacttcaatatgtttatcaagcagtaacgaacatcaagaattcattatcagataatattcctttaattggtttcagtggaagtccttggactttggctgcttattcaatagagggaaagtcatctaaagactttaaaaaaactcttaactttattaataaaaataatgataagtctcatacttttcttaatgctcttacagatgcttgtttcttatatcttcgtgaacaagtcaaggccggagctgatgtaatacaaatttttgactcatgggcaaatatccttgatgaaaataggttcaatgaattttcaatgcaatatataaataagttaacctatgcattaaaaaatgacaaagtgactagcaaaactccaataatattattctctagagatcctaaatgtagcaatcaaacattggttaataattctggtgctgactgtttaagtttgtattggaatatgaaagattttgatcttaatatagcaagaaataaagtttcacttcaaggcaaccttgatccacgaatattattggaacctaaagataaaataaaatatcagactcataaaatcttagataaatttaaagattatccaggctacatctttaacctaggacacggtattactccagatataaatccagataatataaagtacttaactgaagttgtaagagagtattaat

SEQ ID NO: 277147 - DNA, 742 bp, Unknown
  Bacterial polypeptide expressing nucleotide sequence isolated from the Sargasso Sea
caggtgaacgccctgcgcccgctgaaccccagcgagtcgatgccatttgttggtgaggtgctgggacgtctacgcgaaagcgtcggcaacgaggccgctgtgcttggttttgtcggcgcaccctggaccttggcggcctacgtcgtggaaggcaaaagcagcaagaactacgcggtgatcaaggccatggccttccgcgaaccagagctgctgcacaaactgctcgaccacttcgccgagtcgatcgccaactacctgcgctttcagattgattccggcgctcaggtcgtccagatgttcgactcctgggccggacaactcagtcctgccgattacgacaccttcgccgcgccttatcagaagaaggtggtggatctggtcaagcagacccatcccgatatccccttcatcctgtacatctccggcagtgctggcgtcctcgaacggatggccactacaggggtggacatcatttctctggactggaccgtggacatgggcgaagctctggcccgcttgccggagcacatcggtgtacaaggcaacgttgatccgggtctgctgttcggaacgccggacgcgatcgaggcccgcattgatgactgcgtgcgcaaggcccgcggcaggaagcacatcctcaacctcggccatggaatcctgccggggacgcctgaggaaaacggtgccgccttcttccgctcaggcaagagcgtgatcgaccgcatcggggccttcgcttgac

SEQ ID NO: 277148 - DNA, 772 bp, Unknown
  Bacterial polypeptide expressing nucleotide sequence isolated from the Sargasso Sea
atgaaagattcaaaatttttaagagctctggaccttcaaaaaaattcgatcccacccgtatggtttatgcgccaagcaggcagatatcttcctgaatatcaagaaataagaaaaaattactctaatttcctagatatgtgcaaacaacctaagatatgtgccgaacttgcattacagccaattgatagatttggtttagatgcatccattctattttcagacattttgacaatacccgatgcgttaaatcttggtcttggtttttatgagggtgagggtccaaaatttagcaatccaatctcatcccctgaagatattgataaattaataccatttgatgttaataatcttgattatgtatttaaagctgtagaagataccaaaaatcttttgccaaaaaatatacctttaataggtttctgtggcagtccctggacgcttgccgcatattcaattgaaggcgggggctcaaaagatttcaagaaaacaaaaatttttatggaagagcatccagatgaactacaaaaatttttagaaattcttagcaatgcttgttatgaatacttaagacagcaagtattgagtggcgttaatgcgcttcaaattttcgattcttgggcagatttgctctcagaagatatgttggaggagttttcggtaaaatatactcgaatacttacccagcttttaaaagctgatccagtaactgcagatattccaattatcttatttgaaaaagcaccaaagaaaaaaattaaagatatccttttcc

SEQ ID NO: 277149 - DNA, 826 bp, Unknown
  Bacterial polypeptide expressing nucleotide sequence isolated from the Sargasso Sea
aattctattctctgacatattaacaataccagatgcttttggtttaggagtagaatttttagaaggcgaaggaccggtatttaataatccaattaaaacatcaaaagatataaccaatcttcctgagtttaatcctgaagatttgtcctatgtttacaaagctgtatttaatattaaaagcgctcttccatcaaatatccctcttataggattttgtggtagtccatggactttggcagcgtattcaatagaaggtaaatcctctaaagactttaattacactagaaattttatacagcaaaacaaagatagcgctcatctttttttagaaaagttaacaaatgcttgttttcaatacttaaaaaaacaagttcatgcaggagcagatgtaatacaaatatttgattcatgggctaatctgttaaatgaggaagaatacaatctttattccatgtgctatatcaaaaaacttattgcacttttgaaagaggatgaagaaacatcaaagataccaattattttatttgcaagagatccaagttttagcacaaacaaaatgacagaatcaaattcagactgtcttagtcttttctggaacattgataagatagataaatcatatctgcaaggaaaagttgcacttcaaggcaacctaaacccaaaaattcttcttgaagatgataatcttatcaaggcagagttaaataaagtacttaatatattctctaattatccaggctatatatttaatttggggcatggaatcacaccagatataaatccagataaaattaaattcattacagagctaataaggtctcaataa

SEQ ID NO: 277150 - DNA, 571 bp, Unknown
  Bacterial polypeptide expressing nucleotide sequence isolated from the Sargasso Sea
tatgagcgattcagacaattttcgatttttaaaagcttgtcggggagaacaagtagacaaaacaccggtttggttcatgcgtcaggccgggcgatacatgaaagtttaccgggacttgaaagaaaagtatacctttctggaaatgtgtaaaacacctgaattggcatgtgaagttaccatgcagcctttgggcgttttggagattgatgcagcaattatttttgctgatattcttctcccactcgaacccatgggtacgggtctcgagttttccgcaggtgatggcccggtaattccccgacctgtaaaagacaaaaaggccgttgaaaagttattgccggtaaatgtaaatgagcagttgggctttgtaggggatgccataaagcttgtgcgcaaagagattgatggaaagattcctctcatcggctttgcaggtgcgccttttactttatgtagctacatgattgaaggtgggaaatcacgtgattttacaaccaccaagttaatgatgtatgaggctacagatgtttggaaccaattgatggataaggtttgtaacatgcttgtggac

SEQ ID NO: 277151 - DNA, 655 bp, Unknown
  Bacterial polypeptide expressing nucleotide sequence isolated from the Sargasso Sea
aaagtaccgctaattggtttttcgggcagtccatggacactcgcaacctatatggttgaaggtggtagcactaagaactttagtgtagtgaagaagctgatgttcgctgacccacaagccatgcatttattgcttgataaactggctgactccgttgcgacctacctaaacgcgcaaatcgcagcgggtgcgcaagcggtgatgatttttgatacctgggggggtgtgttgagcccgcgcgattatcgcgagttctcgttaaactacatgcagaaaatcgtttcacgcttgacgcgtgaagctgatggccgccgtgttccagtgacgctgtttaccaagggcggtggtgcatggttggcagacatggcggcgacgggagctgatgctttgggcgtcgattggaccaccgacttgggtgttgcacgccaaacggtgcaagataaagtcgccttgcaaggcaatatggacccgagcgtgttgtacgcgccgccggcacgtattgaagacgaagtcgccacgattttggctagctatgggcaaggtcacggccatgtatttaatctcggtcacggtatacaccctgaagtcgatccagatcatgccggcgcctttattgaagctgtgcacaagctaagtcccgcctaccaccgctagt

SEQ ID NO: 277152 - DNA, 548 bp, Unknown
  Bacterial polypeptide expressing nucleotide sequence isolated from the Sargasso Sea
tcaggattcttcagtggctcgtcgactgctggcccttctcagcaatgccattgctttgtacctgacggcacaggcgcacgccggggcccaggtcctgatgctctttgatacctggggcggcgccctgggtcatgctgaataccgtcatttttcgctggatcccatggcgcagatagtggaagcgcttcgggctgatgcggttgcccgtgaattgccgatcattgtgtttaccaaaggaggcggccagtggctggcgcgaatctcacaaatcggatgcgatgccctgggttgcgactggaccacctcccttagggaggctcggcgcctggtgcaggaccgggtagcactacagggaaatctcgacccggcagtgctcaatgcttctcctgagaagatccgctcagccgttcgggacgttctcgaagattatggaacaggtcctggccatgtcttcaacctgggtcacggcattacgccggggattgatcctgagaatgtcaaagttctggtggactctgtccacgaattgagtcgaaccccgatttgaa

SEQ ID NO: 277153 - DNA, 840 bp, Unknown
  Bacterial polypeptide expressing nucleotide sequence isolated from the Sargasso Sea
caaagcaaccagagcgcaagcgggtgactttatgtcattatgtcgtaatgctgagttggcatgcgaagtgacgttacagccgttacgtcgttatgatttagatgctgcgattttattctcagatattttgactgtgcctgacgccatgggccttggtttatattttgaaacaggtgaaggtccacgttttgagcgtcctacagacaccatagacgctatcaaaaaactgagcatcccagatccagaagacgagttaggttatgttatgcgtgccgtgagcaccattcgtcgtgaacttaacggtgctgtaccattaattggcttttcaggttcaccttggacgctagccacttatatggttgaaggtggctcaagcaaaacctttgaaaagattaaacgtatggcgtatgcagaacctgccgcactacacatgttattggacaagttagcagactcggtggtgttataccttaacgctcaggtagctaacggcgcacaatcgttaatgattttcgactcatggggcggcgcattatcgcaccacgcttaccgcgaattctcattacgttatatgcaaaaaattgttgatggcttaacccgctttgccgatggccgtaaagtaccagtgaccttatttactaaaggtggcggtttatggttagaagcaatggctgaaaccggttgtgatgcactcggtttagattggacggtagatattggtgatgctcgtcgccgcgtaggtgataaagtggctctacaaggcaacatggacccatcaatgttgtatgcctctcctgagcgtattcatcaagaagttgatcaaattcttgccagctacgg

SEQ ID NO: 277154 - DNA, 1123 bp, Unknown
  Bacterial polypeptide expressing nucleotide sequence isolated from the Sargasso Sea
tttgccttcagtcgtacgcaacgtggcccataaactcctgaacgatactttcctgcgcgcgctgctgcgccagccgaccgactacacgccgatctggctgatgcggcaggctggccgctatctgccggaatacaacgccacgcgggctcgtgcgggcagtttccttggtctcgcgaagaacccggcgtacgcaacggaggtgacgctgcagccgctggagcgttatccgctcgacgccgcgatcctgttttccgacatcctgaccgtgccggacgccatgggactgggtctcgaattcgtcgccggcgaggggccgaaattcgcccggccggtgcgcactgaagacgacgtcgcacgcctggctgtgccggatatcgacgccacgctgcgctacgtaaccgacgcagtgcgcgaaatccgcaccgcgctcatcgacgcgcaaggccgtcagcgcgtgccgctgatcggtttttcaggcagcccgtggaccttggcgtgctatatggtcgaaggcagcgggtcggcggatttccgcaccgtcaaatccatgctgtatgcccgcccggacctgatgcatcgtattctcgacgtcaacgcaaagtcggttgcggcatatctgaatgcgcaaatcgaagccggtgcgcaagccgtgatgattttcgacacgtggggcggggcgctcgcagacggcgtgtaccaacgcttctcgctgcagtacatccagcaggtcgtgagccagttgaagcgcgatcacgacggcgaaaaagtgccggtgatcaccttcacgaagggcggcggcttgtggctcgacgagatcgccaatacgggtgtggacgcggtcggtctcgactggaccgtgaacctgggccgagcccgcgagcgcgtgggcagtaaggtggcgctgcagggcaatatcgatccttcggtgctgtttgcgccgccggcgtcgatccgcatggaggcgcgtgccgtgctcgacagcttcgggaatcatccaggccacattttcaatctcggccacggtatttcgcaattcacgccgccggagaacgttgccgaactcgtagacgaagtccatcgtcatagccgggcgattcgcagcggcgcgcatgcaccaacctga

SEQ ID NO: 277155 - DNA, 956 bp, Unknown
  Bacterial polypeptide expressing nucleotide sequence isolated from the Sargasso Sea
tatgaacagactgttgaactgtataaataacaagaaaactggagacactccggtctggtttatgaggcaagctggaagatatttacctgagtttatgaaaataagaaaacaaaatactgattttgttaagctttgtttaaacagtgacttagctaaagaaattacaatacaaccaattaaaagatttgatttagatgcggcaataattttctccgacattctcatgatcccttacggtttaggccaaaatgtgaattttaaaaaaggttatggcccaaaattaaatgaactccaaatagatgttttaactaaaatagataataaaacatttactaacaatcttaatccagtctacgaaacaataaaaaaagtaaaaaaagaaatagaaaaaaaaagcttaataggttttgtaggagccccttggacattatttttatacatggtcaacaaacaatcaccaaaaaaaaattttaattttaatgaaataactaaaaacaatgttcttacaaaaagattatataaaaagttagaagaaattatatgtgttcatatcaaaaaccaagttgatgcaggtgctaatataatacagatttttgactcttgggcaggtctacttccagaaaatcagcttaaagattattgttatgaaccaactaaaaaaattgtggaatatgttaagcatctcaatattccagtgatttgttttcctagaggtattgataaaaactatgaagatttttgttcatcagtaaaaccagactgcataagtattgattacgaggttgatccaaattggataaaaaaaaatattaaaacacctgtaattcaaggaggattggatcctaaagtcttattaaaaaataaagaagaaatagaaaaagaagtaagaaaatatttagatatattccgtgagcaaccttatattttcaaccttggtcatggagttctgccagaaa

SEQ ID NO: 277156 - DNA, 1036 bp, Unknown
  Bacterial polypeptide expressing nucleotide sequence isolated from the Sargasso Sea
aatgaactcagaatcgtcatttctaaaagcattaaataaagaaagtccaataacacctcccatatggtatatgcgtcaagctggacgatacatgccagagtatcaaaatgttagaaagaaatttaaaaattttttagatatgtgcaaagagccagatatatgttgtgaacttgcgttacaacctattaatgcatttgaattggatgctgcaatcctattctcagatatcttaacaattcctgactcttttgggcttggtgtgaagtttattgaaaaagaaggccctgtttttaaaaatcccattagtaacagtacagatattaaaaatctcaatcactttgatcctgagagtttagattatgtttacaaagcagttaataatattaaaaactctctgccagaagaaataccgttaattggattctgcggaagcccttggactttagctgcatattcaatagagggaagatcgtcaaaagactttgagaagacattaagctttttagaatcaaatcaagaagatgttcatgatttattaacaaaatatacggacgcatgttttttatacttaagaaagcaagttcagtctggtgctgatgtgatacaaatatttgattcatgggcaaatctactaacaaaggaagatcttattgagtattcttttaattatataaattctttgatatcagcattaaagcttgatcctataacaagaaatatcccagttattatttttgctcgaaatccaaaatgtaatattgaagaattaataaatacttctgctgactgtataagcctgttctggtcaatgaatgatttgaattttgaggtagctaaaaataaggtcgctatccaggggaaccttgatccaaaaattctacttgaaagtgatgaaataataaaaagggaaacatacaaaattcttgaaaaatttaaagaatatcctggttatatttttaatttgggacatgggataactccagatataagtcccaataaaattaaatatttaacaaatattgttagagaatattaa

SEQ ID NO: 277157 - DNA, 952 bp, Unknown
  Bacterial polypeptide expressing nucleotide sequence isolated from the Sargasso Sea
gtcacgctgcagccgctgcgtcgctataaacttgatgccgcgatcctcttctccgatatcctgacgatcccggatgcgatgggactcgggctgtattttgaagcaggagaaggtccacgcttcacctctccgattaccagcaaggctgacgtcgacaaactgccgatcccggacccggaagatgggcttggatacgtgatgaacgcggtgcgcactatccgccgtgaactgaaaggcgaagtgccgctgatcggcttctccggtagcccgtggacgctggcgacctacatggttgaaggcggcagcagcaaagccttcaccgtgattaaaaagatgatgtatgccgaccctaaagcgctgcatctgctgcttgataagctggcgaagagcgtcacgctgtacctgaacgcgcagatcaaagcgggcgcgcagtcggtgatgattttcgatacctggggcggtgtactgaccggtcgcgactatcagcagttctccctgtactacatgcacaaaatcgtcgatggcctgttacgcgagaatgaaggtcgtcgcgtacctgtgaccctgtttaccaaaggcggtggtcagtggctggaagcgatggcggaaaccggctgtgatgcgttaggtctcgactggaccactgacattgccgatgcgcgtcgtcgtgtaggtcataaagtggcgctacagggcaatatggatccgtccatgctgtatgcaccgccagcccgcatcgaagaagaggtggcgacaattctggccggattcggtcagggcgaagggcatgtctttaactgggccacggcattcatcaggacgtcccgccagaacatgcgggtgtctttgtggaggcggtacatcgtttgtccgaacagtaccaccgctaaggagtcattatggatcttgcgtcattacgcgcgcagcagcttgaactggcctcttcattgat

SEQ ID NO: 277158 - DNA, 1075 bp, Unknown
  Bacterial polypeptide expressing nucleotide sequence isolated from the Sargasso Sea
tatgccggaacaattaaaaaataaccgtttaatcaaggcactgcttcgagagcctgtcgatatgacgcctgtctggataatgcgtcaagcagggagatatttacccgaatatcgagaaacaagaaagaaagctggtgattttgttacgctatgtcaaacaccggaattggcttgtgaggtgaccatgcaaccacttcaccggtacccattagatgctgcgattattttttcagatattttaacaatacctgatgcaatgggcttaggtttaaagttagtagagtcagttggtcctagatttgaaagatcaataaccaattctaatgatataaaaaatttaccactcccggacccagaacaagaattaaaatatgttatggattcaattagacttgttcgtagagagctcaatggcgatgtaccattaattggattttcaggaagcccatggacgttagcaacttatatgatagagggggggtcgagcagagaattttccaaggtaaaaggtatgttagaagctgagccagccagcctgcatttattacttaaacatttatctgattcaataacactttatttaaaggctcaaatcaatgctggtgctcaagcgataatgatttttgatacttggggtgggattttaaaaacaccaaattatatgaatttttcactttattatatgaagataatatgtgagcacttaaaaaatgaacatagtgaagttaaggtcccagtaatattatttactaaaggagcagacaaatggattgaaaaaatagtagaagctgactgcgatgctataagtatagattggaattctaatattggacaggtaagagaacgtataggcaaacgtgtagccatacaaggtaatatggaaccaaggattctaaaagagtctgagaaaaaaatagttgatgaggttgaatctattctcagatcttatggatcagggtctggtcatgtatttaatcttggtcatgggataacaccagatattgaacctgataaagtaggcattcttgtagatgcagtacataacttaagtcggcaatatcataaaactaagtaa

SEQ ID NO: 277159 - DNA, 1012 bp, Unknown
  Bacterial polypeptide expressing nucleotide sequence isolated from the Sargasso Sea
tatgaaaaagttgattaactgtttaactaaaagagatacaacttgtatgcccatttggtttatgagacaagctggtcgttatcttccagaatttagagaaattagagctaaaaacccggactttatgaagttatgtttgaatagtaatctaagttcaaaaattaccttacaacctataaaaagattcaatatagatgctgcaattattttttctgacattttagtggttccttatgctttaggacaagatgttaattttaaaaaaaatgagggaccaaagttaacaaattttaattttaaaacttttattaataacaaagaagacgactttgtatcgaagttaaaacctgtttatgatgcaataaaaaaaactaaaaaaaaactaaaaagaaaccaaactttgatatcttttgtgggtgctccttggactttgttaatctacatgctggaaatgagagagtcaaaatcaaaactcaatataaaaaaaataaatgaaaataaatttgataaaaaaattattatagatgaattaaataaatatctttgtttacatataaaaaaacaacaagaagcaggagcggatgtaattcaaatctttgattcatgggctgggctaattccagaaaataaaatacatgattattgttataaaccaaacctaacactagtagacttctgtaaaaagaaaggaataccagtaatttgttttccaaaaggtttaagagaaaaatataaggagttccttgaaattgttaaacccgacggtcttaatattgattatgaagttgatccgatttgggcaaaaaaaaatttaaaagatgtttgtttacaaggcggactagacccaaaaattttgctgggaaacgaaaatgaaatgtttaaagaaatagataaatatttaaatatttttaaagattctccatatatatttaatcttggtcatggtttgctacctgaaactaatccagacgtacttgctaaagttattaaaagagttaatctttttaaatga

SEQ ID NO: 277160 - DNA, 1006 bp, Unknown
  Bacterial polypeptide expressing nucleotide sequence isolated from the Sargasso Sea
tatgaaacctttaaacaaagtaataattaacaaagatacttcgttcaatcctatatggattatgagacaggctggtagatatttgccagaatttagagaaataagaaaagaaaatcctaattttattaatttgtgtttaaatgacaatttatcttcagaaataactttacaaccattaaaaagatttgatctggatgctgcaataatattttcagacatcttaatgcttccttatggattaggtcaaaaagtagaatttgaaaaaaactttgggccaaaattaggggaattaaatctaaatgaaattgctaggactgatgaaattgactttgtagagaaaatacaccgtgtgtataaagcattaaaaaaagttagcgcagactctagtttaaaaaataaaaatactatcggatttactggtgctccatggacattactagtttatatgattaatcaacagtcccctaaaaaaaatttgaaaaaagatttttttaaagatgagtttttaataaacagaattttattaattattgaaaaatttttaaaggttcatattaaaaatcaagttgataacggtgcgaatgtaattcaaatttttgatagttgggcaggattattagaggaaaaagatttacctaattatgtttattctccaactttaaatttagtaaattatgtaaaatctttaaatgtgccagttatatgttttcccagagaaattaaaaattataaagagttttgtgatattgttaaacccgatgctgttagtatcgactataatattgatccaaaaaaaatacttagagatataagcatacctatacaaggaggcttagacccaaaaattttgttaacagataaagaaacattaaaaaaagaagcctttaattatttagaaatttttcgagatcacccgtatatatttaatctcggccatggtattttgcctgaaacaaatccagaaatggttgaaaatttaattaaaattgtaaaaaattttaaatga

SEQ ID NO: 277161 - DNA, 883 bp, Unknown
  Bacterial polypeptide expressing nucleotide sequence isolated from the Sargasso Sea
atgagcgaattaaaaaacgaccgttatttacgtgcacttgcaaaacaacccgttgatgtaacgcctgtatggatgatgcgtcaagctggacgttatttaccagagtaccgtgctacacgtgcgcaagcgggcgattttatgagcctgtgccgtaatgctgagcttgcttgtgaggtaacacttcagccactgcgtcgttacccattagacgcggccattttgttcagcgatattttaacgattcctgatgcaatgggtttaggtttgtacttcgaaacaggtgaaggccctaagtttgaacgtcctatatcgtcgcttgcagatgttaaaaaaatacctaagctcgatccaactgacgagcttggttatgtaatgaacgcagtaagtactatccgccgtgaacttaaaggcgaagtaccacttattggcttttctggttcaccatggacacttgctacatacatggttgaaggcggtagcagcaaagtatttggtaaaattaaaaaaatggcgtttgcagagccgcaaacacttcatttattactagataaacttgctgattcagtaatcgactacttaaacgcacaagtaaaagccggcgcgcagtcgttaatggtatttgattcgtggggcggtgtattaagcccgcgcgactacaacgagttttcactgcaatacatgcacaaaattgttgatggcctgattcgtgagtacgatggccgcaaggtgccagtaacgttatttactaaaaatggtggccagtggatagaagccattgcagccacaggttgtgatgcagtaggcctagattggaccattaatattggcgatgctaaacgccgtgtaggcgataaagtggccttgcaaggtaacatggacccgt

SEQ ID NO: 277162 - DNA, 1066 bp, Unknown
  Bacterial polypeptide expressing nucleotide sequence isolated from the Sargasso Sea
atggcagaattaaagaatgatcgttatttacgcgccctactaaaacagcctgttgatatgactccagtgtggatgatgcgtcaagcaggtcgttatcttcctgaatacaaagcgactcgcgctcaagcgggtgacttcatgtctttatgcaaaaaccatgaattggcctgtgaagtaacgctacaaccgctgcgtcgttacgagctggatgcggcgattctgttttccgatattctgacagttcccgatgctatgggtttaggtctgtattttgaggcgggcgaaggcccacgttttgagcgcccaacagacactatcgatgccatcaaaaaattagccgttcccgatccagaagatgatctgggttatgtgatgaaagcggttagcactattcgtcgtgaactgaatggccaagtgccattgattggtttctctggttcgccttggacacttgcgacttacatggttgaaggcggttcgagcaaaaccttcgaaaaaattaagaagatggcctacgcagagccagcggcgctgcatatgttactcgacaagttagccgattcagtgactctgtacctgaatgcacaggttgctaacggcgcgcaatcgctgatgattttcgactcatggggcggtgcgttatcgcacacggcttaccgtgaattctcactgcgttatatgcagaagattgtcgatggcctgactcgctttgccgatggccgccaagtgccagtgaccttattcactaagggtggtggtttatggttagaagccatggctgaaacgggctgtgacgccttaggcttagactggactgtcgacattgccgacgcccgtcgccgtgtaggccataaagtggcactgcaaggcaacatggacccatctatgctgtacgcgccaattccacgtatcgaagaagaagtggctcaaattctggcgggctacggtgaaggtacaggccatgtgtttaacttaggccatggtattcaccagcacgttgaccctgagcatgcaggtgcctttatcaaggcggttcatgctcaatctaagcagtaccataagtaat

SEQ ID NO: 277163 - DNA, 1075 bp, Unknown
  Bacterial polypeptide expressing nucleotide sequence isolated from the Sargasso Sea
tatggggagaaatgtggttttaaagaatgaccgtctattaaaagcattattagggcaagaagttgacgttacgccagtctggatgatgaggcaggcaggcagatatttgccagaatacagaaataccaggaaaatagctggtgattttatgaatttgtgccggtctccagaaatggcttgtgaagttactttgcagccgctacgtcgctactcctttgatgctgctattcttttctcagatatattgactatacccgacgctatgggtcaaggtttgtactttgaaacaggagaaggtccgcgattcaagaaggttatccagacacgagcggatgtagatagcttgcgagaaattaccgcagtcgatgatttatcttatgtcatgagtgcagtgaccttgatcaggaatgaacttaatggctcaattcctcttattggattcagtggcagcccttggaccctagcgacgtacatgatagaagggggaggttctaaggattttagtaaggtgaaagcctttatgtataacgagccagaggcgatgcacttgctattagagaaattaactgacgcggttatcgattatctaaactctcaaataagggctggcgcacaagctgttcagattttcgacacctggggtggtgtccttaatacgccgggatactttgatttttcgcttaactacatgaagaggatagtatcaaagttgataagacagcatgatagtcgggatgtccccataattctattcactaagaatgggggtcaatggttgtcccagattgttgatgctggtgctcatgcaattggccttgattggaccatcgaaataggagcggcaaaaaacctagtaggatcaaagtgtgccctgcaaggtaacatggacccatcaattttgtactcgtctccacaaacaattcgcgaggaagttgaccggattttgtcagattttggcaaacagaatgggcatgtttttaacttgggccatggtattactccgggagtaaaccctgaccatgtaaaagtttttgttgactcagttcatgaaatctcagcccaatatcacatttga

SEQ ID NO: 277164 - DNA, 1003 bp, Unknown
  Bacterial polypeptide expressing nucleotide sequence isolated from the Sargasso Sea
atgtctaacatcaagaaggttattaaggacagaaaaacagatttaaatcctgtatggattatgaggcaagctggaagatatctgccagaatttagagaaattagaaaaaaaaatactgattttattaaactatgtttaaattctagtttatcagctgaaataaccttacaacctctaaaaagatttgacttagatgcagccataatcttttctgatatattaattttaccttacggtttgaaacaaaaagtggaatttaaaaaaaatgttggacccattcttggtgacttaaaccttgatcaggcatttgaagttactgaaaatgattttattgaaagaattgatcctgtttataaagctataaatttggtaaaaaacaacaatctaacagaaaacaagtctaccataggttttgttggagccccttggacattacttgtttatattctaaataaacaatctccaaaaataaaactaaaagaaaatttttttaaagatttttctatcattgaaaaaactttaaagataatagataaatttttaaaaattcatatcaaaaatcaaattgatagtggtgcagagattatacaaatttttgatagttgggcaggtctattagaagataaggattatgatttttacatctataatccaacctgttccttagttgaattcactaaatctttaaatgttccagtgatttgttttccacgaggtataaatgattataaaaaatattgtgaaattgtaaaaccagatgcaatttgtatagattatgaagttgatccaataaaaattgaaaaagagataaaaattcctgtgcaaggcggcatggatccaaaagttttacttactgataaagataaccttaaaaaagaggcaaccaagtatctggatatttttaaagatcatccatatatatttaatttaggtcatggaatattacccgaaacagatccaagcatgatggattatttggttaaaactataaaagattattgat

SEQ ID NO: 277165 - DNA, 1003 bp, Unknown
  Bacterial polypeptide expressing nucleotide sequence isolated from the Sargasso Sea
atgacaccgttacatgaagtaatagtaaataaaaaaacaacaattaatcctgtttggataatgagacaggctggtagatatttgccagaatttagagagataagaaaaaaaaatccaaatttcattgagttatgtttgaatcataacttatcttcagaaataactcttcagcctattaaaagattcgacctcgatgctgcaataatattttcagatattttaatgttaccatatggattaaatcaaaaagttgatttcaaaaaagactttggaccagttcttggtaatttagacatgggcacaatgtccatgattgatgaaatagattttgttgaaaaaatttatccaatttataaagccattaaatctgtgagttcaaaaatgacttctatgaacaaaaatacaattggctttgttggggcgccttggacgttgcttgtttacatgatcaatcaacagtcccctaaaaaaaatgtcaaaaaagatttttttaaagatgattttctaataaacagaattttattaataattgaaaaatttctgaaaattcatattaaaaatcaaattgaaaatggtgctaatattatacaaatctttgatagttgggctggtttgttggaggaaagagactatccaaattatatttatacaccaactttaaacttagttgattatgtaaaatcactaaatgtgcctgtgatatgtttcccaagggaaattagaaattataaagagttttgtgagatagttaaacctgatgcaataaatattgattatagtgttgaccctttgatgataagtaaaaacattaaaattccggtacaaggtggtttagacccaaaaatcttgttaacagataaggaaaatttaaaaaaagagattttaaagtatttagatatatttaaagatcatccatatatttttaatcttggtcatgggatactgccagagactaatccagatatggttgaatttttaataaagacagtaaaagatcattaaa

SEQ ID NO: 277166 - DNA, 1048 bp, Unknown
  Bacterial polypeptide expressing nucleotide sequence isolated from the Sargasso Sea
catgactgaattgaatcgtaattttatagctgcacttgatcgaaaaactcagaaaactccacctgtatgggtaatgagacaggctggaagatatctgcctgagtatagaaaagtaagatcaaatttcaaaaactttcttgatatgtgtaagactcctgaagtttgctgcgagttagttttgcagccaatagagagatatgattttgatgccgcaattatcttttcagatatcctgacgattccagatgctcttggtctaggagtttcttttgtagaaggaaaaggtccaattttctcaaatcctattaaaagaccagaggatatctctaagatgacaaattttaatccagatagtcttgactatgtatacaagaccgctgaactaacaaaaaaagagttgaatcaaagtatcccactcattggatttgctggaagtccatggactcttgcagcatattcaattgagggtagtagttccaaaaattttgatctaacgaaatcatttatagaaagtcactctgatgatgctcataaatttcttgatatcctatctgatgcctgttttgaatatctaaaaagacaaatcatcagcggagtagatgcggttcagatatttgattcttgggctaatcttctttcggaagaacaatatttggaatactctcttaaatatataaagaaaattcttaaaaaattatcagaggatcctgttacaagcaaaactccaaccatagtttttgctagagatccaaaatgtagccttagtgaattccagctaaatgatcttagctgttatggaatgtttacttcgattaatccaaacactgctataagtgtgtttgaaggctctcatgcgcttcaaggcaatttagacccaaagattcttctcgaggaagattcagttattaaagaaagtgttttaagaatactttcagactttaaagactatccaggatatatttttaacttgggacatggcattactccggatataaatccagataaggtaaaagttttagttgaagctataagagactctggaagttag

SEQ ID NO: 277167 - DNA, 1039 bp, Unknown
  Bacterial polypeptide expressing nucleotide sequence isolated from the Sargasso Sea
atgaatgatcgtgattcattgctactaaaagcactaaagagagaaaatctcacaactccacctatttggtatatgaggcaagctggaagatatatgccagagtataggaatataagaaaaaaatttaaaaatttcttagatatgtgtaaaaaccctgaagtttgttgcgaattagccatgcaaccactaaatgcttttgaacttgatgctgcaatattattttctgatattttaacaatacctgatgctatgggattgggcgtaacatttgaagaaaataaaggaccaatctttaaaaaccctattaaatcagttgttgatataaataatataggaccatttaatccagatgatctttcgtatgtatatcaagctgttacaaatattagaaatacaatcccagaaaacataccattgataggtttttgtggtagtccgtggactctagctgcttactcaattgaaggaaaatcttctaaagaatttaataaaactaaaaaatttattgctgagaatatagatgaagtgcatttgttcctatcaaaattaacagatgcttgttttttgtatctaagaaaacaagttcaagctggtgcgaatgttatacaaatctttgattcttgggctaaccttttaaataaaaaagatcttcaaacattttcattaaattatataaattctttaatacttgccttaaaacaagattcaattacatccgatattcctattattcttttttctagggaccctaaatgcgatgataatactttaatcgagacaacagctgactgtataagtttgtattggtcgatggaaaattttaatcttgatcttgcaaaaggtaagactgctattcaaggtaatctaaatcccaaagtattactagaatctaaagaaactatcagaaatgaaacatataaattacttgataaattcaaaaattttccagggtatatctttaaccttggtcatggaataactcctgatataaatccagaaaaaattaaatatttaactgatatagttagagattattaat

SEQ ID NO: 277168 - DNA, 1030 bp, Unknown
  Bacterial polypeptide expressing nucleotide sequence isolated from the Sargasso Sea
aatgaaaaataaaaaaattctagcatctcttcgaggagaaatttttaaggtaccacctgtatggcttatgagacaagcaggaaggtatttaccagagtatagagaaacaagaaaaaatgctggtggttttctggatttatgttttaattctgatcttgcaacagaggttactttacaacctataagacgatataattttgatgcagctatcctatttgctgatattcttctaatacctaaagccttaggtatgaacgtatggttcgcacctggtgaaggaccaagactggatggaatacgcgaaggttttcctttaaattcattaaagaaagcagacgatatacatgatacgttattacctatttaccagacagtaaagaacttgtcagaagagctacctaaagagacagcgttaattggtttcgctggagctccatggacagtggcaacatacatgataaatggtaaaggttcaccagaccagctgatagcaaaaaaatatatgtataataaattggaagagtttgaaaaacttatagagatattgacagagagtaccatagaatatttatccaagcaaattgagcatggtgctgaggtaataaaaatatttgatagctgggctggcgcactttctggtacaatggtggaaaagttttctttaaaaccgatgacgataatagccgaacagttaaaaagtcgccatccgactgtacctatcattgtttttcctcgtggtattggtactaactatgatcaatttagcatgaataaacaatttgatggtttagctatagatggtactgtatcagctggatgggcagctaaaaatctgcaggttaagaagacggttcaaggtaatttagatccattgttattagtgacaggaggccaagctctgaaaagtgaatgtaagcatctgctcaatacactgtcaaacggaccgttcatttttaatctaggccatggtatcacgcctgatgcagacccaaaaaatgtagatctattactggaatgtattaggacatag

SEQ ID NO: 277169 - DNA, 999 bp, Unknown
  Bacterial polypeptide expressing nucleotide sequence isolated from the Sargasso Sea
gatgcaattaaaaaatgatcgttacttaagggctttgatgaaacaacctgttgattgcactccaatctggatgatgcgtcaggcgggtcgttaccttccggagtacagagcaacacgagccatagccggcgattttatgtcgttgtgtaaaaaccctgagttggcctgtgaagtcactttgcagccgttaaaacgttatcctttagatgcagctattttattcagcgatattttaaccatccccgacgctatggggatgggactttactttggtgaaggtgaagggccgcgttttaccaaacaactgactgactttatggatgtgatgcagctgcctgtgcctgatcctgaagttgagttgcgttacgtgatggacgctgtgcgtactattcgccgcgaactgaatggtgaagtaccgttaattggtttctctggtagcccttggactcttgctacctatatgtttgagggcggcagcagcaaaaccttctccaaaatcaaaaaactgatgtacacagaacctgaagtggtgcatatcctgctggataagctgacgcaaagtgtcatcttgtatttgaacgcgcaaattgcagctggtgctcagtctgtgatgatttttgatacctggggtggcgtattaaccccacacgattatcgtgaatattcattaagctatatgcagcaaattgtctccggtttaacccgttttgccgatggacgtcctgtgcctgtgactttattcaccaaaaacggtggcttatggttagaagaaatcgcagctactggttgtgatggcgtgggtttagactggaccattgatattcgtcatgcacgggctcgtattggcgataaagttgcgttgcagggcaatatggatccttccattcttttaggtactccagagcgcattcgtcaggaagttcaggctattctggatggttatggtatgggatcaggtcatgtctttaacctgggtcatggtattactcctgatgtgga

SEQ ID NO: 277170 - DNA, 1012 bp, Unknown
  Bacterial polypeptide expressing nucleotide sequence isolated from the Sargasso Sea
atgagcttaattcgaaactgcattatagaaaaaagcaacaaaaaggtacctgtatggtttatgagacaggccggcaggtatttgccagagtttagagaaataagaaaaaaaaatccaaattttatagaactatgtttaaataggaatttagttcccgagattacacttcaaccaattaaaagatttaatttattagatgctgcaataattttttccgatattcttatgatacctcatgcgcttggtcaaaaagtagaatttaaaaaagattttggcccaattttaaatgaaataaatatcgacaaaactttaaaaattgatgaaattgaattcactaaaaacttactgcctgtttacgattcaatgaaaattatatctaacaatgaaatagttaaaaacaaagatacaattggtttcgtaggtgcaccatggactttactagtttatatgcttaataaaaaatcacctaaaaaagaaatttctaaagaaattttaaacaataaatcgttagttaaaaatttacttaatatcattgataaatttacaaaactacatattaaaaatcagatagataatggagcaacattaattcaaatttttgatagttgggctggtttattaaaagaagaaaatgaaatatccgaattgatatataaccccactttaagtctagttgattacgttaagtcattaaacacaccagtaatatgttttccaagaagtattaagaactatgaattatactgcaagatagtttcacctgatgcaatcaatatagattacgaaattgacccaaaaaatatagagaaaaaaataaaaattcctgttcaaggaggtcttgatcctaaaatattgctttcagataaagaaaatttaaaaaaagaagctttaaaatatttaaatatttttaaagatcacccctatatctttaatctaggacatggagttttgccagagacaaaaccagaaatggttgaatacttagtaaacctaataaaagattttaaatgaa

SEQ ID NO: 277171 - DNA, 1057 bp, Unknown
  Bacterial polypeptide expressing nucleotide sequence isolated from the Sargasso Sea
aatgcccattcaaaaccaaattattcttgatgttttatcaggtaaaaaagttgctcgcacgcccatgtggattatgagacaagccgggaggtatttaccggaatatcaagaagtcagaaaacaagcaggcagctttattaatctttgtaaatcacctgaacttgcgtcagaagttacaattcagccattaagaagatttgctttagatgcagccattatattttctgatattttgactattccagacgctatgggcatggatttaaaatttgaggataataaaggaccgtattttgaagaagccctatccagtcagaaagatttgaaacgcttagatcaaaaaaatgcgggtgaaaaattagaatatgtttatgacgctatcaaacaaactaaaattaaattagataataaagttccattaattggattcgctggcagcccatggacattatgtgtttatatggttgaaggtaaagcaaccaaagaatttagaaaagtcagatctttggtatataaagactcagcatttattgaagaattaaatgaatctctttgttctacgattactagttatttagtaaatcaagttaaggctggcgcaaacgttgtaatgttgtttgattcatggggagggcttctaaataaaaataattatgaaaaattttctttagagcctatgaaacaaattatcaaagaatttaaaaaggaatcagatgttccagtaattttatttactcgaggtggtggaaattggcttccattaattatcgaatcaggttgtgattgtatcggacttgactggactgttgacataaaccacgcaaaatcactagttgggaacaacatagcactccagggaaatcttgatccttgtgcgcttcatggtgatgaaagaagtttaagatgtgcagcaaaaaaggttcttgagggttatggcgaaggtcataggcatatttttaatcttggccatggtattgatcaatttgtaaatccagacaacgtaaatttgcttgttgaaattctaaaagaagaaagtccagcgtttcatcaaaattaa

SEQ ID NO: 277172 - DNA, 1042 bp, Unknown
  Bacterial polypeptide expressing nucleotide sequence isolated from the Sargasso Sea
aatgggtcaagatttaccactactactttctgccgcattaggtaaaaaagtacataggcctccagtatggatgatgaggcaagcaggaagatatatgaaaatctatagagatttaagggagcgttacccaagctttagagagaggtctgaaaatccagaactatcatatgagatttcaatgcagccttttcatgctttcaaaccggatggtgtgatccttttttcagatattctcacacctcttccagggatgggcataaattttgaaataatagaaagtaaaggtccaattattgaggatccaataagaactcttaatcaggtagaaaatttaagagaattaaatccaagcgagagtttaagctttgttgggcaagttctttcttcactaaaaaaagatgtgaataatgaggcaactgttttaggttttgttggcgcaccttggactcttgctgcatatgtagttgaaggtaaaagcagtaaaaattattctttaataaaatcaatggcttttaatgaaccagatttacttcataaacttcttgatcattttgcaaaatctattggtgaatatcttaaatatcaaataaaatctggagcgcaagtagtacaaatttttgattcatgggcaggccaactaagcccacaagattatgatatctttgctgggccgtatcaaaaaaaagttgttgaaattgtaaaagcggaataccctgaaacaccaataattctttacatttcaggaagtgctggggtattggaaagaatggcaaaaactggagtagatataatttcattagactggacagtagatattgaagaggcttgtaaaagaatccccagggggattggaattcaaggtaatgttgaccctggcattttattcggaaacaaagaatcaataaaagaaaggatagataatactttcaataaaattaaagacaggaaatatattcttaatttgggtcatgggattttacctgggactccagaagaaaatgctcaaacattttttgaacatgggaaaaaactcacttactag

SEQ ID NO: 277173 - DNA, 1036 bp, Unknown
  Bacterial polypeptide expressing nucleotide sequence isolated from the Sargasso Sea
aatgaactcagattcgtcatttctaaaagcattaaataaagaaagtctcccaacacctccaatatggtacatgcgtcaagctggacgatacatgccagagtaccaaaatgttagaaaaaaatttaaaaattttttagatatgtgtaaagagccagatatatgttgtgagcttgcattacagcctattaatgcatttaaattggatgctgcaatcctattctcagatatcttaactatccctgattcttttgggctcggtgtggagtttattgaaaaagaaggacctgtttttagaaatcctattagtaaaagtacagatattaaaaatctcaatcactttgatcctgaaagtttagattatgtctacaaggcagtgaataacattaaaagctctttgccaaaagaaataccattaattggattctgtggaagcccttggactttagctgcatattcaatagagggaagatcatcaaaagactttgagaagacattaggctttttagaatcaaatcacaaagatgttcatgatttattaataaaatatacggacgcatgctttttgtacttaagaaagcaagtacagtcaggtgctgatgtgattcagatatttgattcttgggcgaatctacttacaaaggaagatcttattgaattttcttttaattatataaattctttgatctcagctttaaagcttgatcccgtaacaaaaaatattccagttattatttttgctcgaaatccaaaatgtaacatcgaagaattaattaatacttctgctgactgcataagtctcttctggtcaatgaatgatttgaattttgaggtagctaaaaataaggttgctatccaaggtaaccttgatccaaaaattctacttgaaagtgatgaaacaataaaaagggagacctataaaattcttgaaagatttaaagaatatcctggttatatttttaatttaggacatgggataactccagatataagtcccgataaaattaaatatttaacaaatattgtcagagagtattag

SEQ ID NO: 277174 - DNA, 1036 bp, Unknown
  Bacterial polypeptide expressing nucleotide sequence isolated from the Sargasso Sea
aatgaactcagattcgtcgttcctaaaagcgctaaataaagaaattcttcctacgccccccatatggtatatgcgtcaagcaggaagatatatgcctgagtaccaaaatgttagaaaaaaatttaaaaactttttggatatgtgcaaggagccagatgtatgttgtgaacttgcgttacaaccaattaatgcttttaaattggatgctgcaatcctattctcagacatcttaacaattcctgattcttttgggcttggtgttgagtttgttgaaaaagaaggccctgtttttaataatcctattaattccagtactgatattagcaatctagatcactttgatcctgagagtttagattatgtttacaaggcagttaaaaatattaaaaactctctgtcagaagaaattcctttaattggattctgtggaagcccctggactttagctgcatattcaattgaaggaagatcatcaaaagactttgagaagacattaaactttttagtatcaaatcaaaaagatgttcataatttattaacaaaatatactgatgcatgttttttatacttaagaaggcaagttcagtctggtgctgatgtgatacagatatttgattcatgggcaaatctgcttacaaaagaaggtcttattgaatattcttttaattatataaatgctttgatttcagctttaaaactagatcctgtaacaaaaaatatcccagtgattgtttttgctcgaaatccgaaatgtaatatcgaagaattaatcaatacatctgctgactgcataagcctgttctggtcaatgaatgatttgaattttgagttagctaaaaataaggtagctatccagggcaaccttgatccaaaaattctacttgaaagtgatgaaataattaaaagagaaacatacaaaattcttgaaaaatttgaaaaatatcctggttatatttttaacctggggcacggaataactccagatattaatcccgacaaaattaaatatttaacgaatattgttagagaatattaa

SEQ ID NO: 277175 - DNA, 1003 bp, Unknown
  Bacterial polypeptide expressing nucleotide sequence isolated from the Sargasso Sea
tatgagtcccataattaactgtattaaaaataaagatattaaaactaatcccatatggttaatgagacaggcaggaaggtatttacctgaatttcgagagataagaaaaaaaaatacagatttcataaaactttgtttaaacagtgatttagcatctgaaataactcttcaacctataaagagatttgattttgatggcgcagtaatattttctgatattttgatgttaccatatggtcttggtcaaaaagtagaatttaaaaaaaactttgggccaaaacttggggaaatagaattagataatattaaaaatgttgacgaaattaactttacagaaaaagtttataaagtttacaaagcaatttctaaaacttcccaggaccctttaatggataataaagacatgataggttttgttggagctccatggactattcttgtttatatgattaatagatcatcaccaaaaaaaggtctaacaggtgaattttttaaagatgaatttctaataaacagactattaggaattattgaaaaattcttaaaagttcatataaaaaatcaagttgaagctggggccaaagtaattcaaatttttgatagttgggcaggattactagaaaataaaattcctgaatacatttatgtacccacactaaatattgtagaatatgttaaacaattaggtatacctgtaatttgttttccaagaggtattaaagattacaaaaatttctgtgagatagttaaaccagatgcagtaaatatagattatgatgttgatccaaaaaaaatagtaaaagaaataaaaattcccatccaaggggggcttgaccctaaaatattattgactgataaagaaatccttaaaaaagaagtagaaaaatatcttcatatttttaaggatcatccatacatatttaatttaggtcatgggattctaccagaaactaaaattgaaatggttgaagacttgattaaaattgtaagagattttaaatga

SEQ ID NO: 277176 - DNA, 1042 bp, Unknown
  Bacterial polypeptide expressing nucleotide sequence isolated from the Sargasso Sea
aatgggtcaagatttaccactactactttctgccgcattaggtaaaaaagtaaataggcctccagtatggatgatgaggcaagcaggaagatatatgaaaatctatagggatttaagggagcgttacccaagctttagagagaggtctgagaatccagaactatcatatgagatttcaatgcaaccttttcatgctttcaaaccggatggtgtgatccttttttcagatattctcacacctcttcctgggatgggaataaattttgaaataatagaaagtaaaggtccaattattgaggacccaataagaacccttaaccaggtagaaaatttaaaagaattaaatccaagtgagagtttaggttttgttggacaagttcttacttcactaaaaaaagatgtgaataatgaggcaacagttttaggttttgttggcgcaccttggactcttgctgcatatgtagttgaaggtaaaagcagtaaaaattattctttaataaaatcaatggcttttaatgaaccagatttacttcataaacttcttgatcattttgcgaaatctattggtgaatatctcaagtatcaaataaaatctggagcgcaagtagtacaaatttttgattcatgggcaggccaactaagtccacaagattacgatatctttgctgggccgtatcaaaaaaaagttattgaaattgtaaaatcggaataccctgaaacaccaataattctatacatttcaggaagtgctggggtattcgaaagaatggcaaaaactggagtagacataatctcattagactggacagtagatattgaagaggcttgtaaaagaattcccagcgggataggaattcaaggtaatgttgaccctggcattttattcggaaacaaagaatcaataaaagaaaggatagataatactttcaataaaattaaagacaggaaatatattcttaatttgggtcatgggatattacctgggactccagaagaaaatgctcaaacattttttgaacatggaaaaaaactcacctactag

SEQ ID NO: 277177 - DNA, 1003 bp, Unknown
  Bacterial polypeptide expressing nucleotide sequence isolated from the Sargasso Sea
atgactccaatccaagactgtataaagaataagaatactggcttaaatcctatttggattatgaggcaagctggaaggtatcttcctgagtttagaaaaattagagctcaaaacactgattttataaaattatgtttaaatgaaagtttatctaccgaaataactttacaaccaattaaaagatttgactttgatgctgcaataattttttctgatattttaatgttaccatttggtttgggtcaagaagttaaatttgaaaaaggtttaggacctaaactaggtgaattaaatttagatcttattgaaaatgtaagtaaagatgaatttattaaaaaattaaatcctatttataaatctatttcaaacatatctaccaattctatttgtaaaaataaagatataattggttttgtgggggcaccatggacaatcttagtttatatgattaataaaatgtcacctaaaaaaaacctatctaaggaaatttttaatgataaattatttataaataaattattatctataatagaaaaatttcttaaaattcacattgaaaatcaaataaaagcaggagcaacccttatacaaatttttgatagctgggcaggattgttagaagaaaatattcctgaatttatatatgaaccaactctaaatctcgttaatcatgtaaaaaaactaaacgtgccagtcatttgttttcctaggggtataaaagattacaagaacttttgtgaatttgttaaacccaatatggtgaatatcgattataatatcgatccaaaaaaaataattaatgaagtacaaataccaatacaaggtggtttagacccaaaggtattattaactgacaaggaaaacttacatcgagaagtggttaaatatcttcgaatttttaaagatcacccttacgtatttaatcttgggcatggtattttaccggaaacacaaattgaaatggtcgaagaactagtaaaaacggttagggattttaactaat

SEQ ID NO: 277178 - DNA, 1084 bp, Unknown
  Bacterial polypeptide expressing nucleotide sequence isolated from the Sargasso Sea
cctgctcaacgacaccttcctgcgtgcgcttctgcgcgagccgaccgactacacgccgatctggctgatgcgccaggccggccgctacctgcccgaatacaatgcgacgcgcgcacgcgccggcagcttcctcggtctcgcgaagaatcccgactacgcgaccgaagtgacgctgcagccgctcgagcgctttccgctcgacgccgcgatcctgttctcggacatcctgacgattcccgacgcgatggggctcggcctcgacttccaggtcggcgaagggccgaagttcgcgcatccggtgcgcaccgaggccgacgtcgcgaagctcgcggtgccggacatcgaagcaacgctcggctacgtgacgggcgcggtgcgcgaaatccgtcgcgcgctcaccgacggccagggccgccagcgcgtgccgctgatcggcttttcgggcagcccgtggacgctcgcgtgctacatggtcgaaggcggcgggtcggacgatttccgcacggtgaagtcgatggcgtattcgcgccccgacctgatgcaccggatcctcgacgtgaacgcgcaggcggtggccgcgtacctgaacgcgcagatcgaagcgggcgcccaggccgtgatgatcttcgatacatggggcggcgcgctggcggacggcgcgtaccagcgcttctcgctggactacatccgccgcgtggtgtcgcagctcaagcgagagcacgacggcgagcgcgtgccggtgatcacgttcacgaagggcggcgggttgtggctcgaggagatcgcggcgaccggcgtcgacgcggtcgggctcgactggacggtcaacctcggcaaggcacgcgaacgcgtcgcgggcaaggtcgcgctgcagggcaacctcgacccgacgatcctgtttgcgccgccggccgcggtgcgcgagcaggcgcgcgcggtgctcgacagctatggcaaccatccgggccacgtattcaaccttgggcacggtatttcgcaattcacgtcgcccgatcacgttgccgaactcgtcgacgaagtgcatagccacagccgcgcgatccgtagcggagccgccggctga

SEQ ID NO: 277179 - DNA, 1044 bp, Unknown
  Bacterial polypeptide expressing nucleotide sequence isolated from the Sargasso Sea
gtttcatgagttactcaaattcattgatccaaaaagccctagataaacaaattcttaaaacaccaccaatctggtacatgagacaggctggaagatatatgcctgaatatagagcaataagaaaaaaattcaaaaattttttagatatgtgtaaaaatcctgaggtctgttgtgagttagccttgcaacctttagatgcttttaaacttgatgcagcaattttattttcagatattcttacaataccagatgcactaaacctaggcgtatcatttattgaaaacgaagggcctgtttttaaaaatccaatttcaacagcatcagatgtagatgatttgattagttttgatcctaataagctaaattatgtttataaagcagtctcaaatattaagaatactctatctgatgacataccacttattggtttttgtggaagtccttggacacttgctgcatattctatagaaggcaggtcttcaaaagatttcaataagacaaaaaattttattgaagaaaataaccaagctactcatctttttttaacaaaaataacagatgcatgttttttatacctgagaaaacaagttgaggctggcgcagacgttattcaaatctttgattcttgggcaaatcttttagatgctaatgcctttatagacttatcaataaattatacaaaatctcttatcaatgccttaaaaaatgatccaataacaaaacatattccaatagtgcttttttcaagagatccaaagtgcgatacaaaaactctgattggtacttcagctgattgcattagtttgttttggaacatggaaaatttcgatatctcgttggcaaaaaacagtgtagccattcagggaaatttaaatccaagagtattattagaatcaagagatactattaaaaaagaaacatatagcattttagataaatataacggctatccgggttacatatttaatctagggcatggtattaccccggatattgatcctaataatattaagtttttaacagatattgttagggattattaat

SEQ ID NO: 277180 - DNA, 334 bp, Unknown
  Bacterial polypeptide expressing nucleotide sequence isolated from the Sargasso Sea
gatgaaagagctgaagaacgatcgttacctgcgtgccctgctgcgccaggaagtggacatgaccccggtatggatgatgcgccaggctggccgctatctgccggaatacaaggccacgcgcgcccaggcaggggatttcatgtccctgtgccgcaacgccgagctggcttgtgaagtcaccctgcagccgctgcgccgctatccgctcgatgccgccatcctcttctccgacatcctcaccgtgcccgatgccatgggtctgggtctctacttcgagcagggtgaaggcccgcgtttcgagcgtccgatcacctccatggccgatgtgcagggg

SEQ ID NO: 277181 - DNA, 989 bp, Unknown
  Bacterial polypeptide expressing nucleotide sequence isolated from the Sargasso Sea
aatgacaccgataaaagaatgtttaataaataataaaacaaatctcattcctatctggctaatgagacaagcaggcaggtacttacctgaatttagagaaataagaaaagataacccaaattttattaatctttgtttgaactcaaaattatcaaaagaaataactcttcaaccaataaagaggtttggttttgatgcagcaattatcttctcggacattttaatgataccttacgggcttggtcaaaaagttgagtttaagaaaaattttggacctaagcttgatgatttcgaaatagataaattactagaaattgatgaagaaaaatttacaaaaaatttatctccaatatatcaacttttagtcgatttaaaaaaaagtgaggatttagaaaaaaaagacataattggttttgtaggagctccttggactttacttgtgtatatgataaataaggtttctccaaaaaacggtttaacaaccaattttttttcagacataggtttaattaataatttgttaaaaattttagataaatttattaaaacccatattaaaaaccaagtaaatgccggagctactataatccaaatatttgatagttggtctggactgatcaaatctgatttggacaaatatttatacaatccaactttatctttagttaattatactaagagcctaggggtaccagtgatttgttttccaagaggaataacagattacagccaattttgtaaaatcgttaagccaaacatgattaatatagattatgacgttgacccaaaaaatttacttaagaatatagatataccggtacaaggtggattacatcctgaggtactattaacaaataaagatcatttaaaaaaagaagtgaataaatatttagaaatttttaaaaatcacccttatgtatttaatcttggacatggtattcttccagaaacaaaaattgagatggtagaagaattagtaaaaatagtta

SEQ ID NO: 277182 - DNA, 802 bp, Unknown
  Bacterial polypeptide expressing nucleotide sequence isolated from the Sargasso Sea
attcctgatgctctgaatcttggtttggcatttcatgaaggagaaggtcctaaattcagcaatcccatttcgtcacctcaagatattaaaaaattaactcgatttgacgtcaattctctcgattatgtttttaaggcagtcgaagaaaccaaaaaacttttgccgaataatctccctttaataggattctgcggtagcccatggacacttgctgcatattcaattgaaggcggaggctctaaagatttctataaaacaaaaagttttataaaagagcatccaaaagagctgcttgagtttttggaaattcttagcaatgcttgttacgaatatttaaagcagcaagttttgagtggagtaaatgcgctgcagatttttgattcatgggcagatttgttgttagagaatgagttagaaaaattttcgttgcagtatactcaaaggttaaccggccttctcaaagccgacccagttacatcaaatattcctatcattttgtttgaaaaagctccaaagataaaaattgatgacttggtttttgcagatatttcttgtatgagtctctattggcaagaggatattgagagtgtagctaagaactttaagaatcaatatgcaattcagggaaatcttgatccaaaagtgttacttggatctgatgaattgatctggaatgaaacacaaaaaatctgcagtattatgaatgaatatccaggatttattttcaatcttggtcatggcattacacccgacatcaacccaagcaaggtgaaggttatgattgatgcaataagacaataga

SEQ ID NO: 277183 - DNA, 1033 bp, Unknown
  Bacterial polypeptide expressing nucleotide sequence isolated from the Sargasso Sea
aatgaatgattcaaaatttttaaatgctttaaagctaaaaccaaattcaactcctccaatatggttcatgcgtcaagcaggcagatacctccccgagtatcaagaaattagaaaaaactattcaaattttcttgatatgtgtaaagaacctaaaacatgcgcgaagttagcattgcaacctatcgagcgatttgatcttgatgcgtcaattttattttcagatattttgacaataccagatgcattagatcttgggcttgccttccatgaaggagaaggtcctaaattcagtaacccaatctcaaaacccgaggatattaacaccctaatctcatttgacgaaaacacactatcatatgtattcaatgctgtagaggaaacaaaaaaattactgcctgcagaccttccattgattggattttgtggtagcccatggactctagcagcatattcaatcgaaggtggtggttcgaaagattttaaaaaaacaaaaaatttcatgcaagatcatccatcagcattgcatgattttctggaaattctttgtgatgcttgctatcggtatttaagacaacaagtcttaagtggagtaaacgccttgcaaatattcgattcgtgggcagacttgttaagtgcacaagagctagaaatattttctctacaatatacaaaaaagattactaaaaagttaaaaagtgatccaattacaaaagatattccaattattttatttgaaaaggatcctaagcagaaaataactgatcttttatttgatgatctgtcctgcataagtctgcactggaaaaatgatattgaggctatatctaaaagcgtaaaaaataatattgcaattcagggaaatttaaatcctatgatattaagtaaatctgatgagattattcatcaagaggtgcaacgaatatgctctataatgtgtgaatatcccgggtttatattcaaccttggtcacggaattactccagacattaatccccaaaaagtacagacaatgatcaaagcagcaagagaatag

SEQ ID NO: 277184 - DNA, 989 bp, Unknown
  Bacterial polypeptide expressing nucleotide sequence isolated from the Sargasso Sea
taactgtataaaaaataaagacactaaaactaatcctatatggttaatgagacaagcaggaaggtatttacctgaatttcgagatataagaaaaagaaatgtagattttataaagctttgtttaaatagcgatttagcatctgaaataactcttcagcctataaagagatttggatttgatggtgcagtaatattttctgatattttgatgttaccatatggtcttggtcaaaaagtagaatttcaaaaaaactttgggccaaagcttggagaaatagaattagataatatcaaaaatattgatgaaattaactttactgaaaaagtttataaagtttacaaagcaatttctaaaacttctcaggatcctttaatggataatagagacatgataggatttgttggagctccatggactattcttgtatacatgattaatagatcatccccaaaaaaaggtctaacagatgaattttttaaagatgaatttctaataaatagattgttacaaatcattgaaaaattcttaaaagtccatattaaaaatcaagttgaagctggagctaaagtaattcaaatctttgatagttgggcaggattattagatgataaaattcccgaatatatctatatacctacattaaatattgtagaatatgttaaacaattaggtgtacctgtaatttgttttccaagaggtattaaagattacaaaaatttttgcgaaatagttaaaccagatgcagtaaatatagactatgatgttgatccagaaaaaatagtaaaagaaataaaaattcccatccagggtggtcttgaccctaaaatattattgactgataaaaaaattcttaaaaaagaagttgaaaaatatcttcatatttttaaggatcacccatatatatttaatttaggacatggaatcttaccagaaactaaaattgaaatggttgaagacttgattaaaatcgtaagaaattttaaatgac

SEQ ID NO: 277185 - DNA, 767 bp, Unknown
  Bacterial polypeptide expressing nucleotide sequence isolated from the Sargasso Sea
tttgtttttgagagcattaagaagagagtctgtaactcacacgccaatttggataatgcgccaagcaggacggtatttgcctgaatacagggcgcttaggaaagaggcgggtagttttatgaatttgtgttctaatcctgagcttgcttgtgaagtgacgatgcaaccattaagaagatttaatttggatgctgcaattttattctcagatattctaacagttcccgatgcgatggggttgggcttgtattttgaggaaggcgaaggaccaaaattcaagtttcctgtagacaatgaaacaagcataaaaaaactctttgtaccggatgttcaggatgagctttcttatgtattttctgcggtctctcgaattaaaagagagttacaatcatccataccactgattggttttgctggaagcccatggacagtagctacttatatggttgagggtggatcttcaaaaactcactcaaaaattaagaatttattatataaaaatcctgaaaccttaaaatttcttttgaataaagttgcgacagtaactattgattacctcaatgcacaaattgaagcaggagttgatgtcataatgttattcgatacttggggagcagtattaggcgatgaacactatgtcgaattttcactagattatatgcgaaagatttcagatgagctgaatttgaacagcaatagaaaaaaaataccagtgattttttttactaaaggtgctgggtcactcttaactgaaatgtcacgaaatt

SEQ ID NO: 277186 - DNA, 1066 bp, Unknown
  Bacterial polypeptide expressing nucleotide sequence isolated from the Sargasso Sea
atggcagaattaaagaatgatcgttatttacgcgccctattaaaacagcctgtcgatatgactccggtttggatgatgcgtcaagcaggccgctaccttcctgaatataaagcgactcgcgctcaagcgggcgatttcatgtctttatgtaaaaaccatgaattggcctgtgaagtgacactacaaccgctgcgtcgttatgagctggatgcggcgattctgttttccgacattttgactgttcccgatgcaatgggattaggtctgtattttgaggcgggtgaaggcccacgttttgagcgcccaacagatactatcgatgccatcaaaaaattatcaatcccagacccagaagatgagctgggttatgtgatgaaggccgttagcacgattcgtcgtgaactgaatggccaagtgccattaatcggcttctctggttcgccatggactctagccacttacatggttgaaggcggttcgagcaaaaccttcgaaaaaattaagaaaatggcctacgccgagcctgctgcattgcatatgttgcttgataagcttgcagattcagtgaccttatatttaaacgcacaggtagctaatggtgcgcaatctttaatgattttcgactcttggggcggcgcgttatcgcacactgcttaccgtgagttctcactgcgttatatgcagaaaattgttgatggcttaactcgctttgctgatggccgccaagtgccagtgaccttattcactaagggcggtggtttatggttagaagcgatggctgaaacgggctgtgatgctttaggtttagactggactgtcgatatcgctgacgcccgtcgccgtgttggtcataaagttgctctgcaaggcaacatggatccatccatgttatatgcaccaatcccacgtatcgaagaagaagtcgctcaaattctggctggctacggtgaaggtacaggccacgtgtttaacttaggccatggtattcaccagcatgtggacccagagcatgcaggtgcctttattaaggcggttcacgctcaatctaagcagtaccataaataag

SEQ ID NO: 277187 - DNA, 1003 bp, Unknown
  Bacterial polypeptide expressing nucleotide sequence isolated from the Sargasso Sea
tatgaaccccataactaagtgtattagaaataaagatactaaagttaatcctatatggatgatgagacaggctggaagatatttacctgaattcagagaaattagaaaagataaccaagattttataaaattatgtttaaatagtgatttggcatctgaaattactctccagcctataaaaagatttggatttgatggagctgtaatattttctgatattttaatgttgccttatggtttaggccagaaagttgaatttgaaaaaaactttggtcctaaattaggtgaaatagatttagataacattaagaatgtagatgaaattaatttcacagaaaaagtttacaaagtctataaagcaatttctaaaacatcacatgaccctttaatggataatagagatgtaattggatttgttggggctccgtggactattcttgtgtatatgataaatagatcatctccaaagaaaggattaacaagtgaattctttaaagatgattttttaataaatagattactaggaataattgaaaaattcctaaaagttcatataaaaaatcaagttaatgccggtgctaaagtaattcaaatatttgatagttgggctggattactagaagataaaattcctgaatatgtttacatacctacattaaatattgttgaatatgttaaacaattaggagttcctgtcatttgttttccaagaggcattaaagattacaaaaatttttgtgaaatagtaaaacctgatgcaataaatattgactatgatgtagatccaaaaaaaataattaatgagattaatataccagtacaaggaggtcttgatcctaaaattttattaactgataaagaaacgcttcaaagagaatctgaaaaatatcttaatatttttaaagatcatccatatatttttaacctaggtcatggaattctccctgaaaccaaaattgaaatggttgaagaactaattaaaattgtaagaaatttcaaatga

SEQ ID NO: 277188 - DNA, 1069 bp, Unknown
  Bacterial polypeptide expressing nucleotide sequence isolated from the Sargasso Sea
atgaccgccctgaagaacgaccgtttccttcgtgccctgctcaagcaacccgtggatgtcacgccgatctggatgatgcgccaggccggccgctatctgccggagtaccgcgcgacccgggccaaggccggcgacttcgtgagcttgatgaagaacccggagctggcttgcgaggtcaccatccagccgctggatcgctacccgcaactggatgcggcgatcctcttctccgacatcctcaccattcccgatgccatgggccagggcctgtacttcgagaccggcgaaggcccgcgtttcaagaaagtggtcagcagcctggccgatatcgaggcgctgtcggtgcccgacccggagaaagatctgggctatgtgatggacgccgtgcgtaccattcgccgcgagctcaatggccgcgtgccgctgatcggcttctccggcagcccgtggacgctggccacatacatggtcgaaggcggctcgtcgaaggactttcgcaagaccaaggccatgctctacgacaacccgcaagccttgcacgcgctgctcgacaagctggcgcagtcggtcaccgcttatctgaacgggcagatcctggccggtgcgcaggcggtacagatcttcgattcctggggcggcgcgctgtcggcagcggcctatcaggaattctccctggcctacatgaagaagatcgtcgatggcctgatccgcgagcacgacgggcgtcgtgtgccggtgatcctgttcaccaagggcggcggcctgtggctcgaatctctggcggacaccggcgcagaggcgctgggcctggactggacctgcgacatcggcagtgcgcgtgcccgtgtcggtgccaaggtcgccctgcaaggcaacatggacccggcagtgctctacgccaagccggcggcgatccgtgccgaggtggcgcgcatcctggccgcctatggcgacggtagcggccacgtgttcaacctcggccacggcatcactccggaggtcgacccggctcatgcaggcgccttcttcgaggccgtacacgagttgtcggcgcagtatcaccagtgat

SEQ ID NO: 277189 - DNA, 1042 bp, Unknown
  Bacterial polypeptide expressing nucleotide sequence isolated from the Sargasso Sea
atgggtgaaaatttaccactactactttctgccgcattaggtaaaaaagtaaataggcctccagtatggatgatgagacaagcaggaagatatatgaaaatctatagagatttaagggagcgatacccaagctttagagaaaggtctgaaaatccagaactatcatatgagatatcaatgcagccttttcatgctttcaaaccagatggtgtgatacttttctcagatattctcacacctcttcctgggatgggtataaattttgaaataatagaaagtaaaggtccaataattgaagacccaataagaactcttagccagatagaaaatttaaaagaattaaatccaagtgagagtttaagctttgttgggcaagttctttcttcactaaaaaaagatgtaaataatgaagcaacagttttaggttttgtaggcgcaccttggactcttgctgcatatgtagttgaaggtaaaagcagtaaaaactattctttaataaaatcaatggcttttaaagaaccagatttacttcataaacttcttgatcattttgcaaaatctattggtgaatatcttaaatatcaaataaaatctggagcacaagtagtacaaatttttgattcatgggcaggacaactaagcccacaagattatgatgtctttgctgggccttatcaaaaaaaagttgttgacattgtaaaaaaggattaccctaacacacctattattctctacatttcaggaagtgccggagtaatagaaagaatggcaaaaactggcgtagatataatttcattagactggacagtagatattgaagaggcttgtcaaagaatacctaatgaaataggaatccaaggtaatgttgaccctgggattttatttggaaataaacaatccataaaagcaaggatcaatgatactttcaataaaattaaagataggaaatatattcttaatttaggtcatgggattttacctggtactccagaagaaaatgctcaaacattttttgaacatggaaaaaaactcacttattagt

SEQ ID NO: 277190 - DNA, 1042 bp, Unknown
  Bacterial polypeptide expressing nucleotide sequence isolated from the Sargasso Sea
catgactaattcaaatccattgtttttgagagctctcaataaagaaggtcttaaaacacctccaatttggtatatgcggcaggctggaaggtatatgcctgagtatagagctgttagaaaaaagtttagtaattttcttgatatgtgtaagaatccagacgtatgttgtgaacttgcacttcaaccaataaatgcttttgatctagatgctgcaattttattttcagatatattaacaatacctgatgcacttggattgggagtaaattttgtagaaaatgaaggacctgtatttaataatccaataaataattcaaaagatatagataatcttaatttattcaatccggacgatcttaaatatgtttatcaagcagtaacgaatatcaagaattcattaccaaataatattcctttaattgggtttagtggaagtccttggactttggcagcgtattcaatagaaggaaggtcatctaaggactttaaaaaaactcttaattttattaacgcaaatgctgacgattctcatacccttcttaacacccttactgatgcttgtttcttatatcttcgtgagcaagtcaaagctggagctgatgtaatccaaatttttgactcatgggcaaatatccttgatgaaaataagctcaatgaattttcaatgcaatacataaataagcttacgtatgcattaaaaaatgacaaagtaactagcgaaactccaattatattattctctagagatcctaaatgtagcaatctagcattggttaatgattctggtgctgattgtttaagtttgtattggaatatgaaagattttgatcttaatctagcaagaaataaagtttcgcttcaaggtaaccttgatccacgaatattattggaacctaaaaatgaaataaaatatcaaactcataaagtcttaaataactttaaagactacccaggctatatctttaacctagggcacggtattactccagatataaatccagataatataaaatacttaactgaagtcgtaagagaatattaa

SEQ ID NO: 277191 - DNA, 422 bp, Unknown
  Bacterial polypeptide expressing nucleotide sequence isolated from the Sargasso Sea
aagtccacaagattatgacgtgtttgctgcgccttatcaacaaaaagtagtcaatttagtaaaagaaaaacatccagatacacctatgattttatatatctcaggtagtgcgggagttcttgaaaggatgggacaaaccggagtagatatagtctctctagattggactgttgacatggcagatggactaaaaaggctgcctcaagcagttggagtccaaggaaatgttgatccaggacttttgtttggtactcctgatgcgatcagatcaagaattgttgatgtcgtcaaaaaagcgaaaggtagaaaacatattcttaaccttggtcatggaatacttccagggacgccagaagaaaatgcaagagtatttttcgaggctggtaaaaatgtgaatgaactcataaaagtttcatcttgaa

SEQ ID NO: 277192 - DNA, 943 bp, Unknown
  Bacterial polypeptide expressing nucleotide sequence isolated from the Sargasso Sea
atgagacaagcaggaagatatctgccagaatttagagaaattagaaaagataatcctaactttattaatctatgtttaaatgatgatttatcttcagaaataacgctgcaacccttaagaagatttgatctggacgctgcaattatattttcagatatattaatgcttccttatggactaggtcaaaaagttgaatttgaaaaaaactttggaccaaaattaggagaattaaatctaaatgaaattgctaagattgatgaaatcgattttgtagaaaaaatacaccgtgtatacaaagcaataaaaaaagtaagcttaaatccaattttaaacgacaagaatactattggatttgttggtgcgccttggacattattagtttatatgattaatcaacagtcacctaaaaaaaaattaaaaaaaggtttttttgaagataaatttttaataaatagaattttgttaataattgagaaatttttaaaaattcacattaagaatcaagttgaacatggtgcaaatataatccaaatttttgatagctgggcaggtttattagaagaaaaagatttgccgaactatgtttataccccaactttaaatttagtaaattatgtaaaatctttaaatgtgccagttatatgttttcctagagaaataaaaaattacaaagaattctgtgatattgttaaacctgatgccgttagtatcgattataatgttgatccaaaagaaatgcttagggatataaaaatacctatccaaggtggtttagaccctaaaattttattaacagacaaagaaacattaaaaaaagaagcttcaaaatatctcgatatttttaaagatcatccttatatatttaatttaggacacggggtgcttccagagacagatcctaatatgttcgagtatttagtaaaaacagtaaaaaattattaat

SEQ ID NO: 277193 - DNA, 1003 bp, Unknown
  Bacterial polypeptide expressing nucleotide sequence isolated from the Sargasso Sea
atgagtctcttaactaactgtataaaaaataaagacactaaaaccaatcctatatggttgatgagacaagcaggaaggtatttgcctgaatttcgcgaaataagaaaaaaaaatacagattttataaagctttgtttaaacagtgatttagcatctgaaataactcttcaacctataaagagatttggttttgatggcgcagtaatattttctgatattttgatgttaccatatggtcttggtcaaaaagtagaatttgaaaaaaacttcgggccaaagcttggagaaatagaattagataatattaaaaatgttgatgagattaactttacagaaaaagtttataaagtttacaaagcaatttccaaaacttctcaggaccctttaatgaataataaagacatgataggatttgttggagctccatggactattcttgtatatatgattaatagatcatctccaaaaaaaggtcttacaggtgaattctttaaagatgaatttttaataaatagactattacaaatcattgaaaaattcttaaaagttcatattaaaaatcaaattgaagctggggccaaagtaattcaaatctttgatagttgggcaggattattagatgataaaattcctgaatatatttatatacccacattaaatattgtagaatatgttaaacaattaggcatacctgtaatttgttttccaagaggtattaaagattacaaaaatttctgtgaaatagttaaaccagatgcaataaacatagactatgatgttgatccagaaaaaatagtaaaagaaataaaaattcccattcagggagggcttgatcctaaaatattattaactgatagagaaattctaaaaaaagaagtggaaaaatatcttcatatttttaaggatcatccgtatatatttaatttaggacatggaattctaccagagaccaaaattgaaatggttgaaaacttgattaaaattgtaagaaactttaaatgac

SEQ ID NO: 277194 - DNA, 697 bp, Unknown
  Bacterial polypeptide expressing nucleotide sequence isolated from the Sargasso Sea
atgaatgcggtgcgcaccatccgccgtgagctcaagggcgaagtgccgctcatcggcttctccggcagcccctggaccctggccacctacatggtggaggggggcagctccaaggcgttcaccaagatcaagcagatgatgtatgcagagccgcagaccctgcacctgctgctcgacaagctggccgacagcgtgattagctatctcaacgcccagatcaaggcgggtgcccaggcggtcatggtgttcgatacctggggcggcgtgctcaccccgcgcgattaccgcgacttctccctgcaatacatgcacaagattgtcgatggcctcattcgcgagcacgacggtcgccgtgtgccggtcaccctgttcaccaagaacggcggccagtggctggagcagatcgccgctaccggttgcgatgcgctgggtctggactggaccaccgacatcgccgacgccaagcgccgggtcggcgacaaggtggcgctgcagggcaacatggacccctccatgctctacgccagcccggcccgcatccgtgaagaggtcgcctccatcctggccggcttcggtcacggcaacggccatgtcttcaacctgggccacggcatccatcaggatgtgaacccggagcatgccggcgtgttcgtcaacgcggtacacgagctgtccgcccagtaccacggccgctgag

SEQ ID NO: 277195 - DNA, 1030 bp, Unknown
  Bacterial polypeptide expressing nucleotide sequence isolated from the Sargasso Sea
atggattcaatattaatcagaactttaaatggtgaaaaaacaaatagacctcctgtatggtttatgagacaagctgggaggatacttccaaattatatgcaacttaaagaattatacacattccatgaactaatgaatgataaagatcttgcttctaaagttacattactaccaatacaagatttgaatgttgatgctgcaattttatttagcgatatattggtaattccacatgcattaggtcttgatgttgagttcaaaaaaactggtcctatttttaacaatccattaaattttaattcaaaagcagctgatttggaatttgattcaagtaagttgaattacatatataataatatcaaacaagttcaatcggataagaatcaaaatactccattaattggtttttgcggtggaccattaactgtttttcttttcatgtttaagagagagggatcaaaagatcatatgaaaaaagcaattaaatatttatatgaaaatagagaggagagtaaaaagattcttgaacttataacagaatcatccattgattatgtaaaaggtcagtgtaaagctggtattgatgtttttcagctttttgaaacttattgtggctccattccatatgaattatatgtagatttaatacttccatatgcaaaaagaattctaactactgcaaagaaagaaaattgtccaacaattttttttcctaaagattttggttttggtataagttatattggtaaagatatatgtgattatgttagtatagattggcatacatcaatttttcatgcaagagaaatactaaataatgaaatcggtattcaaggaaatatggatcccagaatattttatgaggactataaaaaaattgaaacctatttaaatactttgactaattttggcaatcaaaattttgattggatatttaatctaggtcatggttttctgcctgatatagaccataaaaaagtaaagtttgtagttgaatggataaaaaataaaaattggaatagagcatgag

SEQ ID NO: 277196 - DNA, 1036 bp, Unknown
  Bacterial polypeptide expressing nucleotide sequence isolated from the Sargasso Sea
aatgaactcagattcgtcatttctaaaagcattaaataaagaaagtctcccaacacctcccatatggtatatgcgtcaagctggacgatacatgccagagtatcaaaatgttagaaaaaaatttaaaaattttttagatatgtgtaaagagccagatatatgttgtgagcttgcattacagcctattaatgcatttgaattggatgctgcaatcctattctcagatatcttaacgatccctgactcttttgggctcggtgtggagtttatagaaaatgagggtcctgtttttaaaaatcctattagtaacagtacagatattaaaaatctcaatcactttgatcctgagagtttagattatgtctacaaggcagtgaataatattaaaagctctttgccagaagaaatacctttaattggattctgtggaagcccttggactttagctgcatattcaatagagggaagatcatcaaaagactttgagaagacattaggctttttagaatcaaatcaaaaagatgttcatgatttattaataaaatatacagacgcatgctttttgtacttaagaaagcaagtacagtcaggtgctgatgtgattcagatatttgattcttgggcaaatctactaacaaaggaagatcttattgaattttcttttaattatataaattctttgatctcagctttaaagcttgatcctataacaaaaaatattccagttattatttttgctcgaaatccaaaatgtaacatcgaagaattaattaatacttctgctgactgcataagtctgttctggtcaatgaatgatttgaattttgaggtagctaaaaataaggtcgctatccaggggaaccttgatccaaaaattctacttgaaagtgatgaaacaataaaaagggagacctataaaattcttgaaagatttaaagaatatcctggttatatttttaatttgggacatggaataactccagatattagtcccgataaaattaaatatttaacaaatattgtcagagagtattag

SEQ ID NO: 277197 - DNA, 1006 bp, Unknown
  Bacterial polypeptide expressing nucleotide sequence isolated from the Sargasso Sea
atgagtccaattcaaaagtgtataaaaaataaagatacaaaaattaatactatttggttaatgagacaagctggaagatatttgcctgagtttagagagataagatctaagaatccagactttgtaaaattatgtttaaatgaaaaattatcttctgaaataacactgcaaccactaaaaagatttaatttagatgcagcaattattttttctgatattttaatgttaccctatggtttaggtcaaaatgttaaatttgaaaagaattttggaccaaggttagacaaattaaatgttgatgatattttaaaaattactgagaatcaatttacgaataaattagattctgtatataagttaatagatatttcttctaaaaatgatttacttcaaaaaaaagatctattcggttttgttggagcaccatggacaattttagtttacatgataaatcaggtttcaccaaaaaaaaaactaaagaaagatttttttgataatcaaatattaattgaaaaattactgacagttatagtaaaatttttaaaattacatataaaaaatcaaatcaacagcggcgcaacaattattcaaatttttgatagttgggcaggtttggtagaagaaaaaaaattagatttattaatatataaaccaacattagatctagtaaattttatcaaatcattaaacgtgcctgttatatgttttcctagagaaataaaagattacaaaaagtttgttaataaagttaagccagatgtgataaatattgattacagtgtagatcctaaagaaattgtaaaaaatatagaaattccagtacagggtggtttggaccccaaagtgcttttaactgataaagataatgttaaaaaaaatgcaattaaatatatggaaatttttagagatcatccttatatttttaatttaggacacggcgttttacctgaaacaaatcctgatatggttaaatatttagttaacactgtaaaagatttcaaatgat

SEQ ID NO: 277198 - DNA, 994 bp, Unknown
  Bacterial polypeptide expressing nucleotide sequence isolated from the Sargasso Sea
ttgcatgaagtaataataaataataaaacaactgttaatccagtctggataatgagacaagctggaaggtatttaccagaatttagagagataagaaaagaaaattcaaattttatcgaattgtgcttaaatcacaaattatcttcagaaataacgcttcaacctatcaaaaggtttgattttgatgctgcaataatattctcagatattttgatgttgccgtatggattaaatcagaaggtcgaatttaaaaaaaattttggaccaactcttggcaacttagatataaaatcaatgtccaagatagatgaaatagactttgttgaaaaaatttatccagtttataaagctataaagtctgtgagtttggaaatgaattctaaaaataaaaatacgatcggctttgtcggagcaccttggactttacttgtttatatgattaatcaacaatctccaaaaaaaaatgttaaaaaagattttttcaaagatgattttttgattaatagaattttactaataatcgaaaaatttcttaaaattcatattaaaaatcaaattgaaaatggtgctaatgttatacaaatttttgatagctgggcaggattgttggaagaaagggattatccaaattatatttatacaccaactttaaacttagtgaattatgtaaaagcattaaatgttcctgtaatttgttttccaagaggaattaaaaaatataaagagttttgcgatatagttaaacccgacgcagttaacattgattataacgttgatcccctaatgataagtaaaaatattaaaatccccgtgcaaggtggtttagatccaagaatcttgttaaccgataaagaaaatttaaaaaaagagatctcaaaatatttagacatatttaaagatcacccatatatttttaatttgggtcacggtattctgccagaaaccaatccagatatggttgagtttttgataaatacagtaaaagatcattaaa

SEQ ID NO: 277199 - DNA, 812 bp, Unknown
  Bacterial polypeptide expressing nucleotide sequence isolated from the Sargasso Sea
gattcctgatgctctcggtctaggtgtttcttttgtagaggggaaaggtccagtcttttcgaatcctattaaaagaccagaagatatttctaacatgataaattttaatccagacagtcttgactatgtatacaagaccgctgaacttacaagaaaagagttaaatccgagcattccactaattggatttgctggaagtccatggactcttgcagcatattcaattgagggaagtagttccaaaaactttgatctaacaaaatcatttatagaaagtcattcttatgatgctcataaatttcttgagatcctggctgatgcttgttttgaatatctaaaaaggcaaattgttagtggagtagatgcaattcagatatttgactcttgggctaatcttctttcagaagaacaatatctggaatactctttgaaatatataaagaaaattctcaaaaaattgtcagaagatcctgttacaaataaaactccaacaatagtttttgctagagatccaaaatgtaatcttgatgaatttaaattagatgatcttagttgttatggcatgtttacttcaattgatccaagtagtgcaataagagtatttgagggctctcatgctcttcaaggtaatttagaccctaagatccttcttgaggaagattcagttatcaaagagagtgttttaaagattctttcagaatttaaagactttccgggctacatttttaacttggggcatggcataacaccagatataaatccagataaggtaaaggtcttggttgaagctataagggagtctggaagttagt

SEQ ID NO: 277200 - DNA, 1046 bp, Unknown
  Bacterial polypeptide expressing nucleotide sequence isolated from the Sargasso Sea
cgtggtcgactccccgcccagttcgggcccgttcctggccgcctgccgggccgaaccccatgactacaccccggtctggttcatgcgccaggccggacggtcgctacctgagtatcgggccgtccggggttcgggcagcatcctcgacgccatcgccgaccccgagctgtccgccgagatcactctgcaaccggtccgccggtacggcgtagacgcggccatcctctattccgacatcgtggtccctgcctccgccgtgggcttcggcgtggacgtgaagcccggcctggggccggttgtcgagcagccgttcgagcggaccgccgacctgcagcgccttcgaccgctggaacccgaaatcgacaccccgtacgtgctcgagacggtccgccgggtggtcgccgaagccagcgtgccgctaatcggcttcgccggggcacctttcaccgtggcctcctacctgatcgagggtgcaccgtcccgtacatacgggcgaaccaaagccctcatgctgggcgacccggccctgtggaacgacctcatggaacgcctagtcgacatggccatcacgtcgctgaggtcccagatagctgccggggcctcggccgtccagctcttcgacagctgggctggggccctcagcccaccggtctacgagcgctgcgtcctgcctcacagccggcgagtgttcgagggggtagccgacacctgcgtaccgcgcattcacttcggcgtgggtaccggcgagatactcccattgatggccaaggcgggtgccgatgtggttggggttgactggcgggtgccgttggacgaggcccggcgtcgcctcggacccgacaccattttgcaaggcaacctcgacccagcggtctgcctcgggccacccgaggttgtcgaggccgaggtggccgacgtgttgtcccgcaacggtagacatccgggccacgtgtttaacctgggccacggcgtgctgcccgagaccaacccggccgtcctggaacaggtggtcgcccaggtccacgcctactccatcggtggctgat

SEQ ID NO: 277201 - DNA, 536 bp, Unknown
  Bacterial polypeptide expressing nucleotide sequence isolated from the Sargasso Sea
gcttcatgcgttactagcaaaactggctgattctgttactgagtatttaaatgctcaaatcgctgcgggcgcgcagtcagtcatggtatttgatacttggggtggcgtgttatctcctcgtgactacaaagaattctcgcttcagtacatggagcgcattgtaagtgggctgacccgtgaaaatgaaggtcgtaaagtacctgttaccttgttcaccaaaaacggtggcatgtggctagaatcgattgcggcgacaggctgcgacgcagtaggtttagactggactatcgacattaaagaagcgcgtgcgcgcattggcgataaagttgcacttcaaggtaatatggatccatcaatgctgtatgctcaaccgaaaagaattgagcaagaagtggcgtccattctagaaggttacggtgaaggtagcggtcacgtatttaatttaggtcacggtatccatctagacgtaccacctgagaatgcaggtgtgttcgttaatgcggtacatgaacttagtaagcaatatcacaagtaag

SEQ ID NO: 277202 - DNA, 1048 bp, Unknown
  Bacterial polypeptide expressing nucleotide sequence isolated from the Sargasso Sea
catgactgaattgaatcggaattttatagctgcacttaatagaaagactcagaaaactccgcctatatggataatgaggcaggctggcagatatcttcctgagtacaggaaggtaagatcaaatttcaaaaattttcttgatatgtgtaagactcctgaaatttgctgcgagttagtcttacagcctatagaaagatatgattttgatgctgcaattattttttcagatatcctgacgattcctgatgctctcggtcttggagtttcttttgtggagggaaaaggtccaatcttttcaaatcctataaaaagaccagaggatatttctaacatggcaaattttaatccagacagtcttaactatgtgtacaaaactgctgagctgacaagaaaagagttgaatccaagcattccactaattggatttgctggaagtccatggactcttgcagcatattcaattgagggtagtagttccaaaaactttgatctaacaaaatcatttatagaaaatcattctgatgatgctcataaatttcttgatatcctggctgatgcttgttttgaatatctaaaaaggcaaatcgttagcggagtagatgcaattcagatatttgactcttgggctaatcttctttcagaaaagcaatacctagaatactctttgaaatatataaagaaaattctcaaaaaattatcagaagatcctcttacaaacaaaaccccaaccatagtttttgctagagacccaaaatgtaatcttaatgaatttaaattagataatcttagctgttatggcatgtttacttcgattgatccaagcaatgctataggtgtatttgaaggcactcatgcccttcaaggtaatttagaccccaagattcttcttgaggaagattcagttatcaaaaagagtgttttaaaaatgctgtcagaatttaaagactttccgggttatatttttaacttgggacacggcataacaccagatataaatccagataaggtaaaagtcttggttgaagctataagagaatctggaagctag

SEQ ID NO: 277203 - DNA, 727 bp, Unknown
  Bacterial polypeptide expressing nucleotide sequence isolated from the Sargasso Sea
acaggccatgaaaaaagagatgagcctcttggcattggtatgatgtttttgccaagaaacgactatgcagcattagaaaaatgtcgaacaataattgagtctgaacttcttgatcatggatactatatatatggttggagacaagtgcctattaataacagtgttattggtgaaaaagctaattcaactagacctgagattgagcaggttatgtttgttaataacattgaaagagaaagtaattttgattattcaaaagaattatatctagtaagacgtcgacttgaaaagagaatagcaaaacagcaaattaatgggttttatgtatgctctctgagttttgagtcaatcatttacaagggactatttttagctgaacaactttccatattctatcctgatttagctaataataattttgtttcttcttatgcagtgtttcatcagagatattctacaaatacctttccatcctggggtttggcgcaaccatttagaatgttggctcacaatggggagataaatacaatttccggaaatacaaactggatgagaaatcatcaaacaagaattacatcagaaatttttggtgatgatagtgaacaagttaaaccaattatagaaaaaaatgtttctgactctgctgccttagatgccgcatttgaattatatgttagagctggaagatcagttcctcttgttaaaactcttctaataccagaggcgt

SEQ ID NO: 277204 - DNA, 187 bp, Unknown
  Bacterial polypeptide expressing nucleotide sequence isolated from the Sargasso Sea
atgtcacaagctgtagaatcacgtactcgaatcaaatcagagcgttacgaatcaggtgtaatcccttacgcaaaaatgggttactgggatcctgattacgcaatcaaggaaacagatcttttagcactattccgatgtactccacaaccaggtgtagatccagtagaagcagcagctgcactagctg

SEQ ID NO: 277205 - DNA, 749 bp, Unknown
  Bacterial polypeptide expressing nucleotide sequence isolated from the Sargasso Sea
gctacagaaatttttggtgatgatagcgaacaggtaaagccgatcattgaaaaaaatgtttctgactctgcagcattagacgctgcctttgagctctatgtaagagcagggcggtcagttccccttgttaaaacccttctaatgcctgaggcctggtcaaaaagaagtgaacttatgccaatcgagcatagaaacatgtatgaattctcaaatgcaatagttgaaccttgggatggccctgcagcaatagctgcagttgatggcaattggataattggcggaatggatagaaatggtcttaggccaatgcgttactcaatatccagtgagaatataatatatgttggttctgaaactggaatggtaagagttgacgagtcaaagataattgaaaaaggtagacttggtccaggggatataattggagttaatttaaaagatggcaaaatttacagagataacgatttaaaaaattatttagcttctgagtctccttatgaagactacgtaaaaaaaattatacgacttgataagcgcgtaacagtttcaagagaatcgacagtcattaaagcagataaattaagaaaaaaaatgattgcggcgggttatacaatggaagaacttgaattaatacttcacccaatggttagtgacgctaaagaatcaacaggaagtatgggagatgatacacctattgctgttttatctgataaatatagaccattatctcacttctttagacagaagtt

SEQ ID NO: 277206 - DNA, 196 bp, Unknown
  Bacterial polypeptide expressing nucleotide sequence isolated from the Sargasso Sea
atgagcaagaagtacgacgctggggtcaaggagtacagggacacttactggactcctgattacgttcccctcgacaccgacctgctggcctgcttcaagtgcaccggccaggaaggtgtgcccaaggaagaagtcgccgctgctgtggctgctgaatcctccaccggcacctggtccactgtgtggtccgagctcc

SEQ ID NO: 277207 - DNA, 168 bp, Unknown
  Bacterial polypeptide expressing nucleotide sequence isolated from the Sargasso Sea
aatgagaattacacaaggaactttttcgtttttaccagatttcacagatcaacagattcatgagcaagtacaatattgtattgataatggttgggcagtgagcatagagtatactgacgatccccatccgaggaatacttactgggagatgtggggacatcccatgtt

SEQ ID NO: 277208 - DNA, 603 bp, Unknown
  Bacterial polypeptide expressing nucleotide sequence isolated from the Sargasso Sea
atatctataatagtattaaaaagagtataaaaaaccataaagtattaataagaaaaaaagatttaagttttacagctattaaaaaaataaatcctgattttatcttgtattatggatggagtaatataataaaaaaaaaaatatatgaaaattatttttgcttaatgcttcatccttcagatttgccaaaattcagaggaggtagtcctattcaaaatcaaatcataaattctgttgaaaaatctgctgtaacaatttttaaaattaataaagatattgatggtggaccaatattaaaaaaacatagtctttctttaaaagataatatatcagatatatttttaagattagaaataattggttttaaacttacaaaagaaataataaaaggaaattataaattaaaaaaacaaaatttaaaaaatacaaaagtttataaaagactaaagccacaccaaagtgaaataaaaattgaagattttcttaaaaaagatggaaggtatatatttaataaaattagaatgttaggggatccatatccaaatgcttttattaggactaaagacagaaagaaaatttatttaaaaaaagtgagtctataaa

SEQ ID NO: 277209 - DNA, 700 bp, Unknown
  Bacterial polypeptide expressing nucleotide sequence isolated from the Sargasso Sea
cctataactttctttgatgacgaaattgctaaaactggtcatgaaaaaagagatgagcctctaggcattggtatgatgtttttgccaagaaatgactatgcagcattagaaaaatgtcgaacaataatcgagtcggaacttcttgatcatggatactacatatatggctggagacaagtccctataaataatagtgttattggtgaaaaagctaattcaactagacctgagattgaacaggttatgttcgttaataacattgaaagagaaagtaattttgactattcaaaagaattatatctagtaagacgtcgacttgaaaagagaatagctaaacagcaaattaatggattttatgtatgctctctaagttttgagtcaattatctataagggactatttttagctgaacaactttccatattctatcctgatttagctaataaaaattttgtgtcttcttatgcagtgtttcatcaaagatattccacaaatacctttccatcctggggtttggcgcaaccatttagaatgttagctcacaatggagagataaatacaatttctggaaatacaaactggatgagaaatcatcaaacaagaattacatcagaaatttttggtgatgatagtgaacaagttaaaccaattatagaaaaaaatgtttccgactctgctgccttagatgctgcatttgagt

SEQ ID NO: 277210 - DNA, 1042 bp, Unknown
  Bacterial polypeptide expressing nucleotide sequence isolated from the Sargasso Sea
gaagctgctgctgctgttgccgctggagtgcccgctggtgttcttcaagctgctgttgcagaagtaaaccaagaaactgcacaagccaatgtcgaagctcaagttgaaatgcagtctcaagtatctgatgctcaagctgaccttgctgctgctgacggtgcggaaggttcgcttgcagaagctcaaggaaatgtagatgaagcacaaactgctgctcaagaacaaatattggaaaataatctggctggacaggaagctgctattgaagcttctcaagaagctactgccgaaattatggcagagatgattgagatgaatcctgacgctgctgcagaaatcatagctggtgctgcagcatcaaatcctgaagctgccgctgagatggttcaagaaatgatggcctcagatccagaagttgctgttgaattatgcgcagacattgcagaggctaatcctgctgctgctgccatggcaacagaagctattattgaagctgctccggatcaagctgtagaagctactgctgcgatggctgaagttgctcctgctgctgcaggtgctgctgcagaagttatggctgaactagctcctgaacaagcaggtgaggctgctatggcaatgcaagaagctgctccagaagctgctgctgctgttgctgccggtgttgccgaaggaaaccctgaagttgctcaagaagtagcgagtgaaatggctgctgctgatcctgaagctgccgcagatattgcaacaggtatggctgccggcgctcaagcaaatgccgctgctgctgttgctgaagttcaagcagaagctgctgctgaaattgctgaggttcaagcaggactcgctgatacggttgctgacgcacaagctaaccttgcatctgatgatccaaatgttgtagctgaagctcaagcaactcttgctggtgttcaagaaacaattgcagacgcacaggctgctgctcaagaaacaattgctgatgcacaaggcgctgcaagtgaagctgctcaagatctagctggcgacattgctggcgcaa

SEQ ID NO: 277211 - DNA, 421 bp, Unknown
  Bacterial polypeptide expressing nucleotide sequence isolated from the Sargasso Sea
atgaaactaactcaaggatgtttttcttttcttcctgacctaactgatgagcaaatcactaagcagattcaatatgcaatcgataagtcttgggctgtatctatcgagttcactgatgatccgcaccctcgtaacaactactgggaaatgtggggtcttcctttattcgatattaaggatgcagctgctatccttttcgagatcaacatgtgtcgtaaggcaaagcctaacttctacgttaaggtagctgcttttgataacactcgtggtactgagtcttgttgtagttctttcatcgttcagcgtcctgcgtatgagcctggtttcagacttgtacgtcaagaagttgcaggtcgtaagcttgtttacacaatcgaagcttatgcgccagcacttaagccagaaggtgagcgttactaat

SEQ ID NO: 277212 - DNA, 136 bp, Unknown
  Bacterial polypeptide expressing nucleotide sequence isolated from the Sargasso Sea
cctcaaattttaagagatgcagctaagacttgtggtcctctacagactgcgctagatctttggaaggatattactttcaactacgcttctacagatactgctgacttcgctgaaacaccaacagcaaacgtataat

SEQ ID NO: 277213 - DNA, 196 bp, Unknown
  Bacterial polypeptide expressing nucleotide sequence isolated from the Sargasso Sea
atgagcaagaagtacgacgctggggtcaaggagtacagggatacctactggactcctgattacgtccccctcgacaccgacctgctggcctgcttcaagtgcaccggccaagaaggtgtgcctaaggaagaagttgccgcagctgtggctgctgaatcctctaccggcacctggtccactgtgtggtccgagctcc

SEQ ID NO: 277214 - DNA, 898 bp, Unknown
  Bacterial polypeptide expressing nucleotide sequence isolated from the Sargasso Sea
ttctttgatgacgaaattgctaagactggtcacgagaaaagagatgaacctctaggaatcggtatgatgtttttgccaagaaacgattatgcagcattagaaaaatgtcgaacaataatcgagtcagaacttcttgatcatggatattacatatacggttggagacaagtacctattaacaatagtgttattggtgaaaaagctaactcaactagacctgagattgagcaggttatgtttgttaacaatattgaaagagaaagtaattttgattattcaaaagaattgtatcttgtaagacgtcgacttgaaaagagaatagcaaaacagcaaataaatggtttttatgtatgctcactaagttttgagtcaattatttacaagggattgtttttagctgaacaactatccatattctatcctgatttagctaataataattttatatcctcttatgcggtgtttcatcaaagatattctacaaatacctttccatcctggggtttggcgcaaccatttagaatgttggctcacaatggggagataaatacaatttctggaaatacaaattggatgagaaatcatcaaacaagaattacatcagaaatttttggtgatgatagtgaacaagttaaaccaattatagaaaaaaatgtttctgactctgctgccttagatgctgcgtttgaattatatgttagagctggaagatcagtcccccttgtaaaaactcttttaattcctgaggcgtggtcaaaaaggagtgaactgatgccaattgagcatagaaatatgtatgagttttccaatgctattgtagaaccatgggatggacccgccgctatagctgcagttgacggaaattggattattggtggtatggatcgaaatggcttga

SEQ ID NO: 277215 - DNA, 967 bp, Unknown
  Bacterial polypeptide expressing nucleotide sequence isolated from the Sargasso Sea
tttagaatgttggctcacaatggggagataaatacaatttccggaaatacaaactggatgagaaatcatcaaacaagaattacatcagaaatttttggtgatgatagtgaacaagttaaaccaattatagaaaaaaatgtttcggactctgccgccttagatgccgcatttgaattatatgttagagctggaagatcagttcctcttgttaaaactcttctaattccagaggcatggtcaaaaagaagtgaactgatgccaattgagcatagaaatatgtatgaattttccaatgctattgtagaaccatgggatggacccgccgctatagctgcagttgacggaaattggattattggtggtatggatcgaaatggcttgaggccaatgcggtactctgtatcaaatgacaacataatatacgttggttctgaaacaggaatggtcagagttgatgagtcaaagatagttgaaaaagggagactgggccctggagatataattggaataaatttgaaggaaggtaaaatttatcgtaactctgatttaaaagactaccttgcgcaagaagctccttatgaagagtatgtcaaaaaaataattcgattagataaaagagtaacagtttcaagagagtcgacagttatagaagctgaaaaattaagaaagagaatgattgcggctggcttcacaatggaagaactagagcttattcttcatccaatggtaagtgatgccaaggaatctactggaagcatgggcgatgatactcctgttgctgtattatcggacaagtatcgcccattatctcatttttttagacaaaagtttagtcaggtaacaaaccctccaattgatagtctaagagagcaaagtagaatgagtttaaaaactcgatttggaaatttacaagatattctatctccacaatcacttatgaagaaagatgtttttgtaattgatagtc

SEQ ID NO: 277216 - DNA, 379 bp, Unknown
  Bacterial polypeptide expressing nucleotide sequence isolated from the Sargasso Sea
agttgcttttctttctcacctttctattcctagtgcaattgaagtattttctaataatgtctatggtcttctgagtagattaaatgtttcacatgacctaaataatgaatctcaaattggctataatttaggctataataaatttaaaaaaatggatggacaatttatatatacagttgtttatggaaggagcttagattcttttggaatattttttgaaatctttggggatgattctaaaaatagatctaacattaattttgattcaggaattacatatctgttagacaataaaaaacagcttgatctatctataggtaagggtataaataacgacatgttttttatttctggaggaattagtattaatatcgactaa

SEQ ID NO: 277217 - DNA, 3148 bp, Unknown
  Bacterial polypeptide expressing nucleotide sequence isolated from the Sargasso Sea
ttggaagaagggcacctttatagtcctaaacaagagcacgatgcatgcggtgttggctttgtagcatcagttgacggtaagcaaagaagagaagttgtagaaggtggtatcgatgcgctaaaagctgtgtggcacagaggtgctgttgatgctgatggtaagacaggggatggtgccggcatacttactcaaatacctataaacttctttgatgacgaaattgctaaaacaggccatgaaaaaagagacgagcctctaggcattggtatgatgtttttgccaagaaatgactatgcagcattagaaaaatgtcgaacaataattgagtctgaacttcttgatcatggatactatatatatggctggagacaagtgcctattaataatagtgttattggtgaaaaagctaattcaactagacctgagattgagcaggttatgtttgttaataacattgaaagagatagtaattttgattattcaaaagaattatatctagtaagacgtcgacttgaaaagagaatagcaaaacagcaaattaatggattttatgtatgctctctaagttttgagtcaatcatttacaagggactatttttagctgaacaactttccatattctatcctgatttagctaataataattttgtttcttcttatgcagtgtttcatcagagatattctacaaatacctttccatcctggggtttggcgcaaccatttagaatgttggctcacaatggggagataaatacaatttccggaaatacaaactggatgagaaatcatcaaacaagaattacatcagaaatttttggtgatgatagtgaacaagttaaaccaattatagaaaaaaatgtttctgactctgccgccttagatgctgcatttgaattatatgttagagctggaagatcagttcctcttgttaaaactcttctaataccagaggcgtggtcaaaaagaagtgaactaatgccaattgagcatagaaatatgtatgagttttctaatgctattgtagaaccatgggatggacccgcagcaatagctgcagttgacggaaattggattattggtggtatggatcgaaatggcttaaggccaatgcggtactctgtatcaaatgacaacataatatacgttggttctgaaacaggaatggtcagggttgatgagtcaaaaatagttgaaaaaggcagactgggccctggagatataattggaataaatttgaaggaaggaaaaatttatcgtaactctgatttaaaagactatcttgcgaaagaagctccttatgaagagtatgtcaaaaaaataattcgattagataaaagagtaacagtttcaagagagtcgacagttatagaaactgaaaaattaagaaaaagaatgatcgcggctggtttcacaatggaagaactagaacttattcttcatccaatggtgagtgatgccaaggaatctactggaagcatgggtgatgatactcctgttgctgtgttgtcggacaagtatcggccattatctcatttttttagacaaaagtttagtcaggtaacaaaccctccaattgatagtctaagagagcaaagcagaatgagtttaaaaactcgatttggaaatttacaagacattctatctcctaatccttatgaagaaaatgtttttgtaattgatagtccatttataacaaatgggttgttcaaaaagatttctgctcggggacaagaatctacaactgtgattgattgtacagttcataaggataattttaatttaaaagaggaaataaagcgtattcaattcgagtctgagactgcagttttaagcggaaagtctcatatcgtactgtctgatattagcgcggaccacgacaaattatctttaccaatgatattgattaccgctgcagttcacacagatttgacacgcaaaggtattagatcttttgtatcattgcacgtaaggtctgcagagtgtctggatactcattacttcgcggtgcttattggtgttggcgccacgactgtaaacccttacttagcattggactgtatttatgaaagacaacaaaaaggactctttggaaatctatcttacgaggaatgcgttgagcgatataaaaaagcagtagaccaaggcttactcaaggttatgtctaagcttggaatttcagttatcagtgcttacaggggcggatttaattttgaagctgttggcttaagccgttcaatggttaatgaatatttcctaggtgtacaaagtcgtatgtctggcattggtttatccggaattgaaaaaaaactaaccgatcttcataattatgcgtattcggatagcgtacaaacattgccaattggtggtatatatcggtacagaaacggtggtgaaactcatgcttatgaagggaagttgatacaccttctacaaacagcagtggcagatgactcttatgagatgtttaaaaaatattcaaactccatgagcaactttgctccaatcaatattagagatttgctcgagtttaaagaaagtgaaagttcaatcgaattaagcgaagtagaatcaataacgtctatcagaaagcgcttcggtacaggtagtatgtcacatggagcactttcaaaagaggcccatgaaacactagcaatagcaatgaaccggatcggaggtgcttcttgttcaggcgaaggcggtgagtcgattgaaagatcgaagcctctcaataatggagacagtgctaactcaagagtaaaacaagtagcttccgcaaggtttggtgtaacaactgaatatttaaataactgtgaggaaatagaaattaaaatagcacaaggagctaagccaggtgagggtggtcagcttcctggatttaaagtaactgctgagatagccaagcttcgccactcaacagaaggtgttacactaatcagccctccaccacatcacgatatttattcaatagaagatcttgctcaacttatttatgatcttaaacaggcaaacccagatgctagagtttgtgtaaagcttgtagcgtcatctggaattggaacaatagcggcaggtgttgcgaaggctaaagctgatgtcattttaatttcagggcacaatggtggaactggagctagtccccaaacgagta

SEQ ID NO: 277218 - DNA, 145 bp, Unknown
  Bacterial polypeptide expressing nucleotide sequence isolated from the Sargasso Sea
atgaaattaagacaaggaacattttcttttttacctgatctcactgatgctgaaatacacactcaagtacaatattgtatagataatggttgggcagtaagcgttgaatatacagatgatccacatccaagaaatacttattggg

SEQ ID NO: 277219 - DNA, 1792 bp, Unknown
  Bacterial polypeptide expressing nucleotide sequence isolated from the Sargasso Sea
gtgccgggatcgacgtcacaggactacccgtcgacgactccgtccagcaccgaaccgggatcaacgagcactgtgccgggatcaacgagcactgtaccgggatcaacgagccccgagccggggtcgacgagcactgtgccgggatcaacgtcgcagtactacccgtcgtccaacaacgagccggggtcgacgagcactgtgccgggatcaacgtcgcagtactacccgtcgtccaacaacgagccggggtcgacgagcactgtgccgggatcaacgtcgcagtactacccgtcgtccaacaacgagccggggtcgacgagcactgtgccgggatcaacgtcgcagtactacccgtcgtccaacaacgagccggggtcgacgagcactgtgccgggatcaacgtcgcagtactacccgtcgtccaacaacgagccggggtcgacgagcactgtgccgggatcaacgtcgcagtactacccgtcgtccaacaacgagccggggtcgacgagcactgtgccgggatcaacgtcgcagtactacccgtcgtccaacaacgagccggggtcgacgagcactgtgccgggatcaacgtcgcagtactacccgtcgtccaacaacgagccggggtcgacgagcactgtgccgggatcaacgtcgcagtactacccgtcgtccaacaacgagccgacaagcaccaagccgagctcgagtacgcattacccgttcactccgagctctggaccagaggagacgcaagagccagtgcccggagaggagtccactgagccgagcccgacgccgacagagcattacccgttcactccgagctctggaccagaggagacgcaagagccagtgcccggagaggagtccactgagccgagcccgacgccgacagagcattacccgttcactccgagctctggaccagaggagacgccggatgacatcggaccagaggagacgtcggaagtcattcccggcgactcgacgacgccgacgcccacgatttctccgagcgatgactcgaacgcgacgatgcttcacgaagtgcgcgcgggcgtgcgattattcgggtacgtggcgacgtcattcaactctgaagagagaggtttcttcaggagaggcatgtcgacgttcttgggcatcgcgcccaagcaggtcaccatcaatcacgtcgaggatgtaaacacgcggtccacgcgtcgattgttgcaagcgtcagccgtcgacgtgtactacatcgtctcaaccaccacgccgcaagtggcgtcggcggtggttgacgaaacgaatagagcgttgaacgcgacgggttccggcgcgctgttgaacaatttgcaatccgcgggcttggtcgtctctcaggtggtgatcatttcgcgaccgaacgtcacggtggtccccatgccgccgacgcccgcgcccacgcccgcgccttcaaacacgccgtcggcgacgccgttcaatttgagcgacatcaacatcaatctcaacgtcgacgtcacggtgcacatggacgaatccaatctctctccgtcggcgaacgccaccgaacgttcaaccaccaatgatccgggaacgaacgcatcgccgacgccgacgccgacgccgacgccgggatacccaaccccgacgccgggatacccaaccccgacgccggcgtacccggcgccgactccggactgcgtcccgctcggcaccgagacggaggagtcccaatacgagcgcgccggctcgttgcaacacgaagcccttcaacaggctcgcgattccgctcgagacaacgact

SEQ ID NO: 277220 - DNA, 1303 bp, Unknown
  Bacterial polypeptide expressing nucleotide sequence isolated from the Sargasso Sea
aaaatgtcgaacaataattgagtctgaacttcttgatcatggatactatatatatggctggagacaagtgcctattaataacagtgttattggtgaaaaggctaattcaactagacctgagattgagcaggttatgtttgttaataacattgaaagagaaagtaattttgattattcaaaagaattatatctagtaagacgtcgacttgaaaagagaatagcaaaacagcaaattaatggattttatgtatgctctctaagttttgagtcaatcatttacaagggactatttttagctgaacaactttccatattctatcctgatttagctaataataattttgtttcttcttatgcagtgtttcatcagagatattctacaaatacctttccatcctggggtttggcgcaaccatttagaatgttggctcacaatggggagataaatacaatttccggaaatacaaactggatgagaaatcatcaaacaagaattacatcagaaatttttggtgatgatagtgaacaagttaaaccaattatagaaaaaaatgtttctgactctgctgccttagatgccgcatttgaattatatgttagagctggaagatcagttcctcttgttaaaactcttctaataccagaggcgtggtcaaaaagaagtgaactaatgccaattgagcatagaaatatgtatgagttttctaatgctattgtagaaccatgggatggacccgcagcaatagctgcagttgacggaaattggattattggtggtatggatcgaaatggcttaaggccaatgcggtactctgtatcaaatgacaacataatatacgttggttctgaaacaggaatggtcagggttgatgagtcaaagatagttgaaaaaggcagactgggccctggagatataattggaataaatttgaaggaaggaaaaatttatcgtaactctgatttaaaagactatcttgcgaatgaagctccttatgaagagtatgtcaaaaaaataattcgattagataaaagagtaacagtttcaagagagtcgacagttatagaaactgaaaaattaagaaaaagaatgatcgcggctggtttcacaatggaagaactagaacttattcttcatccaatggtgagtgatgccaaggaatctactggaagcatgggtgatgatactcctgttgcagtgttatcggacaagtatcggccattatctcatttttttagacaaaagtttagtcaggtaacaaaccctccaattgatagtctaagagagcaaagcagaatgagttaa

SEQ ID NO: 277221 - DNA, 709 bp, Unknown
  Bacterial polypeptide expressing nucleotide sequence isolated from the Sargasso Sea
atgaaaaaaagatttttaatttttttatttctcttgtttaactgttcattggttttttctcaaattacaaccgatagaccagatcaaactgaatctgcagttgttttatcctcaggtcaaattcaggttgagtctggtattttaattgaaaattctcaatctaatattaatactctttttaggattggtataatagaaggaattgagataagaattaatagtaattatttaataaatgatgaattatcgtttatgaaaaaatcatcatttagcgattttgaggtaggagctaagtttagaatctttgataaaacttcaaataatacaaaagttgcttttctgtctcacctttctattcctactgcaattgaagtattttctaataatgtctatggtcttctcagtagattaaatgtttcacatgacctaaataatgaatctcaaattgcctataatttaggctataataaattcaaaaaaatggatggacaatttatatatacaattgtttatggaaggagcttagattcttttggaatattttttgaaatctttggggatgattctaaaaatagttctaatattaattttgattcaggaattacatatcttttagacaataaaaaacagcttgatctatctataggtaagggcataaataacgacatgttttttatttctggaggaattagtattaatatagactaaa

SEQ ID NO: 277222 - DNA, 932 bp, Unknown
  Bacterial polypeptide expressing nucleotide sequence isolated from the Sargasso Sea
tgctgctggacaccggtccatcgcgcaggccatggcggaccgcgggaggcaccagcgcatgctgcgcgcggacctggcgccgtccgaggccttcttcatgcagttcaacacgacctcgcgctgagtagcggggggcggcgtagtggcggcggccgggcgcaggagtgttgccccgcccggcactgctgcgcgcgcgaggaacatggggcagctgctgctggacaaccggtccatcgcgcaggccatggcggaccgcgggaggcaccagcgcgtgctgcgcgcgaacctggcgccgtccgagtccttcttcatgcagttcaacacgacctcgcgctgagtagcggggggggggggggggggcggcgtagtggcgccggccgggcgcaggagtgctgccgtgcccggcactgctgcgcgcgcgaggaacatggggcagctgctgctggacaaccggtccatcgcgcaggccatggcggaccgcgggaggcaccagcgcgtgctgcgcgcggacctggcgccgtccgaggccttcttcatgcagttcaacacgacctcgcgctgagtagcgggggggggcggcgtagtggcgccggccgggcgcaggagtgctaccccgcccggcactgctgcgcgcgcgaggaacatggggcagctgctgctggacaaccggtccatcgcgcaggccatggcggaccgcgggaggcaccagcgcgtgctgcgcgcgagcctggcgccgtccgaggccttcttcatgcagttcaacacgacctcgcgctgagtagcggggggggcggcgtagtggcgccggccgggcgcaggagtgctaccccgcccggcactgctgcgcgcgcgaggaacatggggcagctgctgctggacaaccggtccatcgcgcaggccatggcggaccgcgggaggcaccagcgcgtgct

SEQ ID NO: 277223 - DNA, 398 bp, Unknown
  Bacterial polypeptide expressing nucleotide sequence isolated from the Sargasso Sea
catgagattaacacaaggcgcattttctttccttccagacttaactgacgagcaaatcgttaagcaaatccaatacgctatcagtaaaggatgggcacttaacgttgaattcacagatgatccacatcctcgtaactcttactgggatctttggggacttcctctattcggtgttaaggatccagctgctgttatgttcgagatcaactcatgtcgtaaggctaagccagcttactacgtaaaggttaacgctttcgataactcacgtggtgttgagagttgttgtctttctttcatcgttcaaagaccaacttctaacgagcctggattccaactacaacgtcaagagtctgattcaagaaacatcagatacactattcaaagttacgctagcactc

SEQ ID NO: 277224 - DNA, 238 bp, Unknown
  Bacterial polypeptide expressing nucleotide sequence isolated from the Sargasso Sea
atggctaaaaagtatgatgctggagttaaggagtatagagatacttacttcactcctgattacgtccccctagatactgatctacttgcatgttttaaatgcacaggtcaggaaggtgtacccaaggaagaggttgcagcagcagttgcagctgaatcatctacaggtacatggtcaacagtttggtcagaactattagtagatcttgaattctacaaaggccgctgttaccgcatga

SEQ ID NO: 277225 - DNA, 418 bp, Unknown
  Bacterial polypeptide expressing nucleotide sequence isolated from the Sargasso Sea
tatgaaaataagacaaggagcattttcttttttgcctgatttaacagatgcagaaattcatactcaagttcaatattgtatagataatggatgggctgtaagtgtcgaatatactgatgatccacacccaagaaatacatattgggaaatgtgggggcatccaatgtttgataatcctgatgccgctgctgttgtttttgaagtaaatgaatgtagaaaacaatttggagattattacatcagagtaattgcatttgactctacacatggctgggagagtattaaactttctttcatagtaaatagaccaaaagatgaacctggatttcatgtttctagagaagaagtgaaaggtagatctattcgatattctataaaatcttatgctacagataaacctgaaggcaagcgatattag

SEQ ID NO: 277226 - DNA, 256 bp, Unknown
  Bacterial polypeptide expressing nucleotide sequence isolated from the Sargasso Sea
ttactagcctgtttcaaatgtacaggtcaggaaggtgttccaagagaagaagtcgcagcagctgttgcagctgaatcttcaacaggtacttggtcaacagtttggtccgagttacttacagacttagaattttataaaggacgttgttatcgaatagaagacgttcctggagatcctgaagctttttatgctttcattgcatatcctttagatctttttgaagaaggttctattacaaacgtattaacatctcttg

SEQ ID NO: 277227 - DNA, 421 bp, Unknown
  Bacterial polypeptide expressing nucleotide sequence isolated from the Sargasso Sea
atgagaattactcaaggaaccttttcatttttacccgatttcacagatcaacagattcatgagcaagtgcaatattgtattgataatggttgggcagtaagcatagagtatactgacgacccccaccctaggaatacttactgggaaatgtggggacatcccatgtttgataatcctgacgccgccgcagttgtttttgaactaaatgaatgcagaaaagtgtatggatcttattacataagaattatagcttttgattctagcccaggttgggagtctataaggctgtcattcatagtgaacagaccctcccaagaaccagggtttaggctgaataggaccgaaactaaaggtagaaatattcaatactcaatgtctccttattcaagtgataatccacagggttctcgttacaaataat

SEQ ID NO: 277228 - DNA, 234 bp, Unknown
  Bacterial polypeptide expressing nucleotide sequence isolated from the Sargasso Sea
tggaggaaacacatggtcatccatggggttcagctgctggagctgcagctaatagagttgctttagaagcttgtgtaaaagcccgtaatgctggtcgcgaaatcgaaaaagagagtagagacattcttatggaagctgctaaacacagtcctgaattagctatcgctcttgaaacttggaaggaaattaagtttgaatttgataccgtcgataaactagacgttcaaggttaaa

SEQ ID NO: 277229 - DNA, 397 bp, Unknown
  Bacterial polypeptide expressing nucleotide sequence isolated from the Sargasso Sea
ttcttttttaccggatctaacggatgatcagattcatacacaagtgcaatattgtatcgacaatggttgggcggtgagcttggagtttactgacgatcctcatccacgtaatacttattgggagatgtggggccatccaatgtttgataacccagatgctgcggctctaatttttgaattaaacgagtgtcgaaaaattcatggagataagtatataagagttatggcttttgattctacccacggttgggagtcggtaagactttcgtttattgtaaataggcccaaggaagagaagggttttaaactttcacgggaagacactcatggaagaatgatgcgatattctatcacaccgtattcaaccgatatgcctgagggcgagcgttacaaataa

SEQ ID NO: 277230 - DNA, 337 bp, Unknown
  Bacterial polypeptide expressing nucleotide sequence isolated from the Sargasso Sea
ggttcaatgcctggagtatttgcagtcgcatcaggtggtatccatgtttggcatatgcctgcacttctagcgatctttggtgatgattcctgccttcagttcggtggaggaacacatggtcacccatggggttcagctgctggagctgcagctaacagagttgcattagaagcttgtgtaaaagcccgtaatgctggtcgtgaaatcgaaaaagagagtagagacattcttatggaagctgctaagcatagtcctgaattagctattgctctagaaacttggaaggaaattaagtttgagtttgacactgtcgacaaacttgatgttcagggttaac

SEQ ID NO: 277231 - DNA, 961 bp, Unknown
  Bacterial polypeptide expressing nucleotide sequence isolated from the Sargasso Sea
aaggctctattacaacgtattaacatctcttgtaggaaacgtttttggatttaaagctcttagacatttacgtctagaagatattagattcccaattgctttcattaaaacttgcggtggtccaccaaatggaatcgtagttgaaagagatcgacttaacaaatacggaagacctctacttggttgtaccatcaaacctaaattaggattatctggtaaaaactatggtcgagttgtatatgaatgtcttagaggaggtcttgatctaacgaaggatgatgagaatattaattctcaaccattccaacgttggagagaaagatttgagtttgttgcagaagcagttaagcttgctcaacgagaaactggagaagttaaaggtcactatctaaattgtactgctaacactcctgaagaactctatgaaagagctgaatttgcaaaagagctagatatgccaatcatcatgcatgattatataactggtggttttactgcaaatactggattagctaattggtgtcgtaaaaatggcatgcttttgcatattcatagagctatgcatgctgttattgatagacatccaaagcatggtattcacttcagagttcttgcaaaatgtttgagactatctggaggagaccaattacatactggaaccgttgttggaaaactagaaggtgatcgtcaaacaactcttggttatattgacaacttaagagagtcatttgttcctgaagatagatcaagaggtaacttttttgatcaagattggggttcaatgcctggagtatttgcagtcgcatcaggtggtatccatgtttggcatatgcctgcacttctagcgatctttggggatgattcctgccttcagttcggtggaggaacacatggtcatccatggggatcagctgctggagctgcagctaacagagttgctttagaagcttgtgtaaaagcc

SEQ ID NO: 277232 - DNA, 589 bp, Unknown
  Bacterial polypeptide expressing nucleotide sequence isolated from the Sargasso Sea
tatgagtaagaagtatgatgcaggggtaaaggagtacagagatacctactggactcctgaatatgtacccctagacactgatttattagcctgtttcaaatgtacaggtcaagaaggtgtccccagagaagaagttgcagcggctgttgcggctgaatcttcaacaggtacttggtcaacagtttggtccgagttacttacagacctagaattttacaaaggacgttgttatcgaatcgaagacgttcctggagatccagaagctttttatgcttttattgcatatcctttagatcttttcgaagaaggttcaattacaaacgtattgacatctctagttggaaacgtttttggatttaaagctttaagacatttacgtctagaagacattagattcccaattgctttcattaaaacttgcggtggtccaccaaatggaatcgtagttgaaagagatcgtttaaataaatatggaagacctcttcttggttgtaccattaaacctaaattaggtttatctggtaaaaactatggtcgagtagtttatgagtgtcttagaggtggtcttgatttaactaaggatgatgag

SEQ ID NO: 277233 - DNA, 562 bp, Unknown
  Bacterial polypeptide expressing nucleotide sequence isolated from the Sargasso Sea
atgcctgatggtgataaaaaattagatgctaaagctcgatactcagctggggttttagaatacaagaaaatggggtattgggagcctgattattcacctaaagataccgatgtcatagcactttttaggatcactcctcaggatggagtggatcccattgaagctgcagcagcagttgctggtgaaagctcaaccgcaacttggacagttgtttggacagatcgtttaacagcgtgcgaaaaatacagagctaaagcctatagagttgatccaacacctaacaacccaaacgagtattttgcgtatattgcctatgagttagatctttttgaacctggatctattgctaatctaacagcatcaatcattggtaatgtcttcggctttaaacctctaaaagcactaagactagaagatatgcgattaccggtagcctatgtcaaaacttttcaaggcccggctactggaatagtagtagaaagagagcgacttaattgttacggacgccccctcctgggagcaactgtaaagcctaagcttggactttccggaagaaactagg

SEQ ID NO: 277234 - DNA, 427 bp, Unknown
  Bacterial polypeptide expressing nucleotide sequence isolated from the Sargasso Sea
tttctacaacactcttctatcaactcaatcagaaattagcctaactcaaggtctattcttcgcacaagattgggctgctcttaacaagtgtctacctgtagcttcaggtggtattcactgtggtcaaatgcaccaactaattcactacctaggtgatgatgttgtacttcaattcggtggtggtactattggtcaccctgatggtattcaagctggtgcgactgctaaccgtgtagctcttgagagtatggttgtagctcgtaacgaaggacgcgattacctttcagaaggtcctggtatccttaagaatgcagctaagagctgtggtcctcttcaaacagctctagatctatggaaggatattacattcaactatgcttctacagatacagctgacttcgttgaaacagctacatctaacagataa

SEQ ID NO: 277235 - DNA, 778 bp, Unknown
  Bacterial polypeptide expressing nucleotide sequence isolated from the Sargasso Sea
gcagaggcagttaagcttgctcagcaagaaactggagaagttaaaggtcactacctaaactgtactgctaatactcctgaagagctttacgaacgagctgaatttgcaaaagagctagatatgccaatcatcatgcatgattatataactggtggtttcactgcaaatactggattagcaaactggtgtcgtaaaaatggcatgcttctgcatatacacagagctatgcatgctgttattgatagacatccaaagcatggtattcatttcagagttctagcaaaatgtttgagactctccgggggagatcaattacatactggaactgttgttggaaaactagaaggtgatcgtcaaacaactcttggttacattgataacttaagagagtcatttgttcctgaagatagatcaagaggtaacttctttgatcaagattggggttcaatgccaggagtatttgctgtcgcatcaggcggtattcacgtttggcatatgcctgcactcttagcgatttttggagatgattcttgtcttcagttcggtggaggaacacatggtcatccgtggggttcagctgctggagctgcagctaatagagttgctttagaagcttgtgtaaaagcacgtaatgctggtcgcgaaatcgaaaaagagagtagagacattcttatggaagctgctaagcacagtcctgaattagctattgctcttgaaacttggaaggaaattaagtttgaatttgataccgtcgacaagcttgacgttcaaggttaaa

SEQ ID NO: 277236 - DNA, 751 bp, Unknown
  Bacterial polypeptide expressing nucleotide sequence isolated from the Sargasso Sea
gagacaggggaagtaaaaggtcattacttaaattgcaccgctaatacacctgaagaactatacgaacgtgcagaatttgctaaagagctcgatatgccgatcatcatgcatgattacataactggcggatttactgcaaatactggtttggcaaactggtgtcgtaaaaatggcatgcttctgcatattcatagagctatgcatgcagtaatagatagacatccgaaacatggtattcacttcagagttttagcaaaatgtttaaggctttctggaggagatcagctgcatactggaacagttgttggaaaacttgaaggtgataggcagactactcttggttacatagataacttaagagaatcatttgttcctgaagatagatcaagaggtaacttctttgatcaagattggggatctatgcctggagtctttgctgttgcatctggtggtattcatgtttggcatatgccagcattgcttgcaatatttggagacgattcttgtcttcaatttggtggaggaactcatggccatccatggggctcagctgctggagctgctgcaaaccgtgttgcattagaagcatgtgtgaaagcacgtaatgcaggtcgcgaaatcgaaaaagagagtagagacattctaatggaagctgcaaaacacagtcctgagttagctattgcgcttgaaacttggaaagaaatcaagtttgagtttgatactgtcgataagctcgacgttcaaggctaac

SEQ ID NO: 277237 - DNA, 457 bp, Unknown
  Bacterial polypeptide expressing nucleotide sequence isolated from the Sargasso Sea
tggaactgttgttggaaaactagaaggtgatcgtcaaacaactcttggttacattgacaacttaagagagtcatttgttcctgaagatagatcaagaggtaacttctttgatcaagattggggttcaatgccaggagtatttgctgtcgcatcaggtggtattcacgtatggcatatgcctgcactcctagcgatttttggagatgattcttgtcttcagttcggtggaggaacacatggtcatccatggggttcagctgctggtgctgcagctaatagagtcgctttagaagcttgtgtaaaagcacgtaatgctggtcgcgaaatcgaaaaagagagtagagacattcttatggaagctgctaaacacagtcctgaattagctattgctcttgaaacttggaaggaaattaagtttgaatttgataccgtcgacaaactagacgttcaaggttaa

SEQ ID NO: 277238 - DNA, 700 bp, Unknown
  Bacterial polypeptide expressing nucleotide sequence isolated from the Sargasso Sea
caaaagagcagagtttgctaaagaacttggctcagttattataatgatagatttggttataggttatactgctattcagtcgatggctaaatgggcccgggacaatgatatgatacttcatttgcatagagcaggtcatggtacctacacaaggcaaaaaagccatggagtctcttttagagttatagctaaatggatgagacttgctggggtagatcacatacatgctggtactgttgttggcaaattggaaggagacccgtcgactactaaaggtttctacgatatattgagagaagaatataatgaagtagccttagaaaatggtgttttctttgatcaagattgggcgtctctgaataaagtaatgcctgtagcatctggtggaattcacgcaggacaaatgcaccaactggttcattacttaggagaggatgtggttcttcaatttggaggtggaacaataggtcatcctcaaggtatagaggctggagcaactgctaatagggtagcgttagaagctatgatttatgcaagaaatgcaggaagggactatttagcagaaggaccggcaattcttgcggaagcagcaagaacttgtacccccttaaagcaggcactagatgtttggaagggtgtgacctttgactatgaatcaactgatgcaccagactttgtgcccacaacttcagtttcttaa

SEQ ID NO: 277239 - DNA, 315 bp, Unknown
  Bacterial polypeptide expressing nucleotide sequence isolated from the Sargasso Sea
gctgtgcctccggtggtatccacgtttggcacatgcctgcgttggtgtcgatctttggcgacgactccgttctgcagttcggtggcggtacccacggtcacccctggggttcggctgctggtgctgctgctaaccgtgtggccctcgaggcctgcgttaaggcccgcaatgctggccgcgagatcgagaaggaaagccgcgacatcctcacggaagccgcgaagcacagccctgagctggccatcgctctcgagacatggaaggagatcaagttcgagttcgacactgtcgacaagctcgacgtccagaactgat

SEQ ID NO: 277240 - DNA, 727 bp, Unknown
  Bacterial polypeptide expressing nucleotide sequence isolated from the Sargasso Sea
tacttaaactgtactgctaacactcctgaagaactctacgaaagagctgaatttgctaaagagctagatatgccaatcatcatgcatgattatataactggcggttttactgcaaatactggattagcaaactggtgtcgtaaaaatggcatgcttctacatattcatagagctatgcatgctgttattgatagacatccaaaacatggtatccatttcagagtcctagcaaaatgtttgagactctccggaggagatcaattacatactggaacagttgttggaaaactagaaggtgatcgtcaaacaactcttggttacattgacaacttaagagagtcatttgttcctgaagatagatcaagaggtaacttctttgatcaagattggggttcaatgccaggagtatttgcagtcgcatcaggtggtattcacgtatggcatatgcctgcactcctagcaatttttggagatgattcttgtcttcagttcggtggaggaacacatggtcatccatggggttcagctgctggagctgcagctaatagagttgctttagaagcttgtgtaaaagcacgtaatgctggtcgcgaaatcgaaaaagagagtagagacattcttatggaagctgctaaacacagtcctgaattagctattgctctcgaaacttggaaggaaattaagtttgaatttgataccgtcgacaaactagacgttcaaggttaaa

SEQ ID NO: 277241 - DNA, 682 bp, Unknown
  Bacterial polypeptide expressing nucleotide sequence isolated from the Sargasso Sea
atgagcaagaagtacgacgctggggtcaaggagtacagggatacctactggactcctgattacgttcccctcgacaccgacctgctggcctgcttcaaatgcaccggccaggaaggtgttcccaaggaagaggttgccgctgctgtggccgctgaatcctcaactggcacctggtccaccgtgtggtccgagctcctcaccgacctcgacttttacaagggtcgttgctaccggatcgaagacgttcccggtgataaggagtcgttctacgccttcatcgcctacccccttgacctgttcgaagagggttcaatcaccaacgttctgacctccctggtcggcaacgtgttcggcttcaaggccctgcgccacctccgcctcgaagacctgcgcttcccgctggccttcatcaaaacctgctacggcccaccaaacggcatccaggtcgaacgcgaccggatgaacaagtacggccgtcctctgctgggttgcaccatcaagccgaagctcggcctgagcggtaagaactacggccgtgttgtctatgagtgcctgcgtggcggtctcgacttcaccaaggacgacgagaacatcaactcccagcccttccagcgctggcagaaccgctttgagtttgtcgctgaagcgatcaagctgtccgagcaggagacaggcgagaaga

SEQ ID NO: 277242 - DNA, 510 bp, Unknown
  Bacterial polypeptide expressing nucleotide sequence isolated from the Sargasso Sea
tatgagtaagaagtatgatgcaggggtaaaggagtacagagatacctactggactccagaatatgtacccctagacaccgatttactagcctgtttcaaatgtacaggtcaagaaggtgttcccagagaagaagttgcagcagctgttgccgctgaatcttcaacaggtacttggtcaacagtttggtccgagttacttacagatttagaattttataaaggacgttgttatcgaatcgaagacgttcctggagatcctgaagctttttatgcttttattgcatatcctttagatctttttgaagaaggttctattacaaacgtattaacatctctagtaggaaacgtttttggatttaaagctcttagacacctacgtctagaagatattagattcccaatcgctttcatcaaaacttgcggtggtccaccaaatggaatcgtagttgaaagagatcgtttaaacaaatatggaagacctctacttggttgtaccattaaacctaaatt

SEQ ID NO: 277243 - DNA, 998 bp, Unknown
  Bacterial polypeptide expressing nucleotide sequence isolated from the Sargasso Sea
actggcgaaagcaagatattcagcgggggttcttgaatataaaaaaatgggttactgggaacctgattatgaaccaaaagatacagatataatatctctttttagaattaccccacaggatggggtggatccaattgaggccgcggccgctgtagctggtgaaagttctactgctacatggactgtagtttggacagatagattaacagcttgtgaaaaatacagagcaaaagcatatagagtagatccagtaccaaactccccaggtcaatattttgcgtatatagcctatgatttggatctttttgagccaggctcaattgcaaacttaactgcttctattattggtaatgttttcggttttaagccattaaaagctttgagattagaagatatgagattacctatagcctatataaaaacattcaatgggcctgcaacaggtatagttgtagaaagagaaagactaaattgttttggacgcccacttcttggtgcaacagtaaaacctaaattaggtttatcaggaagaaattatgggcgtgttgtttacgaagctttaaaaggtggattagattttactaaagacgatgaaaatattaattctcaaccttttatgcactggcgtgatagatttctatattgtatggaagctgtaaatagagcttctgcagctactggtgaagttaaaggaacatacttaaatgtaactgctggtacaatggaggaaatgtataaaagggcagaatttgcgaaagatttaggttctgttataattatgattgatctcgtaattggttatactgcaattcaatcaatggccaattgggcaagagacaacgatatgatattgcatttacatagagctgggcactcaacatacactagacaaagaaaccacggcgtttcatttagagttatagcaaagtggatgcgactggctggagtagatcatattcatgctggtactgttgtaggtaagcttgaaggtgatccag

SEQ ID NO: 277244 - DNA, 907 bp, Unknown
  Bacterial polypeptide expressing nucleotide sequence isolated from the Sargasso Sea
tcaacagtttggtccgagttacttactgacttagaattttataaaggacgttgttatcgaatcgaagacgtccctggcgatcctgaagctttctatgcttttattgcatatcctttagatctttttgaagaaggctcaattacaaacgtattaacatctcttgtaggaaacgtttttggatttaaagctttaagacacctacgtctagaagatattagattcccaatcgctttcattaagacttgcggtggtccaccaaatggaatcgtagttgaaagagatcgacttaacaaatacggaagacctctacttggttgtaccattaaacctaaattaggattatctggtaaaaactatggtcgagttgtatatgaatgtcttagaggcggtcttgatttaactaaggatgatgagaatattaattctcaaccgttccaacgttggagagaaagatttgaatttgttgcagaagcagttaagcttgctcaacgagaaactggagaagttaaaggtcactatctaaactgtactgctaacactcctgaagaactctatgaaagagctgaatttgcaaaagagctagatatgccaatcatcatgcatgattatataactggtggttttactgcaaatactggattagctaattggtgtcgtaaaaatggcatgcttctgcatattcacagagctatgcatgctgttattgatagacatccaaagcatggtattcacttcagagttcttgcaaaatgtttgagactatctggaggagaccaattacatactggaaccgttgttggaaaactagaaggtgatcgtcaaacaacacttggttatattgacaacttaagagagtcatttgttcctgaagatagatcgagaggtaacttttttgatccaggattgg

SEQ ID NO: 277245 - DNA, 574 bp, Unknown
  Bacterial polypeptide expressing nucleotide sequence isolated from the Sargasso Sea
tatgagtaagaagtatgatgcaggggtaaaggagtacagagatacctactggactcctgaatatgtacccctagacaccgatttactagcctgtttcaaatgtacaggtcaagaaggtgttcccagagaagaagttgcagcagctgttgccgctgaatcttcaacaggtacttggtcaacagtttggtccgagttacttacagatttagaattttataaaggacgttgttatcgaatagaagacgttcctggagatcctgaagctttttatgcttttattgcatatcctttagatctttttgaagaaggttctatcacaaacgtattaacatctctagtaggaaacgtttttggatttaaagctttaagacacttacgtctagaagatattagattcccaatcgctttcattaaaacttgcggtggtcctcctaatggaatcgtagttgaaagagatcgtctaaacaaatatggaagacctctgcttggttgtaccattaaacctaaattaggattatctggtaaaaactatggtcgagttgtatatgagtgccttagaggtggtcttgattta

SEQ ID NO: 277246 - DNA, 911 bp, Unknown
  Bacterial polypeptide expressing nucleotide sequence isolated from the Sargasso Sea
gctttctatgcttttatcgcatatcctttagatctttttgaagaaggctcaattacaaacgtattaacatctcttgtaggaaacgtttttggatttaaagctcttagacatctacgtctagaagatattagattcccaattgctttcattaaaacttgcggtggtccaccaaatggaatcgtagttgaaagagatcgacttaacaaatacggaagacctctacttggttgtaccatcaaacctaaattaggattatctggtaaaaactatggtcgagttgtatatgagtgtcttagaggaggtcttgatttaacgaaggatgatgagaatattaattctcaaccattccaacgttggagagaaagatttgagtttgttgctgaagcagttaagcttgctcagcgagaaactggagaagttaaaggtcactatctaaattgtactgctaacactcctgaagaactttatgaaagagctgaatttgcaaaagagctagatatgccaatcatcatgcatgattatataactggtggttttactgcaaatactggattagctaattggtgccgtaaaaatggcatgcttttgcatattcatagagctatgcatgctgttattgatagacatccaaagcatggtattcacttcagagttcttgcaaaatgtttgagactatctggaggagaccaattacatactggaaccgttgttggaaaactagaaggtgatcgtcaaacaactcttggttatattgacaacttaagagagtcatttgttcctgaagatagatcaagaggtaacttctttgatcaagattggggttcaatgcctggagtatttgcagtcgcatcaggtggtatccatgtttggcatatgcctgcacttctagcgatctttggtgatgattccct

SEQ ID NO: 277247 - DNA, 499 bp, Unknown
  Bacterial polypeptide expressing nucleotide sequence isolated from the Sargasso Sea
atgtctcaatctgtatcagaacgtacacgaattaagtcagagcgttacgaatctggtgtaatcccttacgctaagatgggttactgggatgctacttacacagttaaagatactgatgtattagcgttattccgtattacacctcaaccaggtgtagaccctgtagaagctacagctgctgtagctggtgagtcttcaactgctacatggactgtagtatggactgacctactaactgcttgtgatatttaccgtgcgaaagcataccgtgtagatccagtacctaacacacctgatcagtacttcggttacatcgcttacgaatgtgaattatttgaagaaggttcacttgctaacttaactgcgtctatcattggtaacgtatttggtttcaaggcggttaaagctcttcgtttagaagatatgcgtattccattcgcttacttaaagactttccaaggcccagctactggtgtaattgtagagcgtgagcgtttaa

SEQ ID NO: 277248 - DNA, 886 bp, Unknown
  Bacterial polypeptide expressing nucleotide sequence isolated from the Sargasso Sea
agagagcgtttaaatatttatggaaggcctcttttaggcgccaccgttaaaccaaagcttggtttgtcgggtagaaattatgggagagtagtttatgaagctttaaagggtggtctcgatttcacaaaggacgatgaaaatattaatagtcaaccatttatgcattggagagatagattcctttattgtatggaaggtgtaaataaagcaatagcggctactggagagataaagggcacctatctaaatgtaactgctgcaacaatggaagatatgtatgaacgcgctgaatttgcacgtgacttaggttctacaataataatgatcgacttagttattggctacacagctattcaatcaatggcaaagtgggcacggaataatgatatgatcttgcatttgcatagagcagggcattcaacttatacccgccaaaaaagtcatggagtttcttttagggttattgctaagtggatgcgtttagcaggtgttgaccatatccatgccggtactgtggtaggaaaactagaaggtgatcctttaacgaccaagggctattatgatatttgtagagaagagtataaccctacaagtttagaaacaggtattttctttgatcaggattgggctagtttgaataaaatgatgccagttgcatctgggggaattcatgctggacagatgcatcaattaattgatcatcttggggaagatgtagtccttcagtttggaggaggtaccattggtcatccacatggaatagcatcgggtgctacggcaaatagggtagcattagaatctatgatttttgctagaaattcagggagagattatcttgctgaaggacctcaaattttagcagaagcagcgaagacctgtacaccgt

SEQ ID NO: 277249 - DNA, 727 bp, Unknown
  Bacterial polypeptide expressing nucleotide sequence isolated from the Sargasso Sea
atgtacaggtcaagaagtgtcccaagagaagaagttgcagcggctgtagcggctgaatcttcaacaggtacttggtcaacagtttggtccgagttacttacagacctagaattttacaaaggacgttgttatcgaatagaagacgtacctggagatcctgaagctttttatgcatttattgcatatcctttagatctttttgaagaaggctcaattacaaacgtattaacatctctcgtaggaaacgtttttggatttaaagctttaagacatttacgtctagaagatattagattcccaatcgctttcattaaaacttgtggtggtccaccaaatggaatcgtagttgagagagatcgtttaaacaaatacggaagacctctacttggttgtaccattaaacctaaattaggattatctggtaaaaactatggtcgagttgtatacgagtgtctaagaggtggccttgatttaaccaaggatgatgagaatattaattctcaaccattccagcgttggagagaaagatttgagttcgttgcagaggcggttaagcttgctcagcaagaaactggagaagttaaaggtcactatctaaactgtactgctaacactcctgaagagctttatgaacgagctgaatttgcaaaagaactagatatgccaatcatcatgcatgattatataactggtggttttactgaaaatactggattagctaactggt

SEQ ID NO: 277250 - DNA, 664 bp, Unknown
  Bacterial polypeptide expressing nucleotide sequence isolated from the Sargasso Sea
ggagaagttaaaggtcattatctaaattgtactgctaacactcctgaagaactctatgaaagagctgaatttgcaaaagagctagatatgccaatcatcatgcatgattatataactggtggctttactgcaaatactggattagctaattggtgtcgtaaaaatggcatgcttctgcatattcacagagctatgcatgctgttattgatagacatccaaagcatggtattcacttcagagttcttgcaaaatgtttaagactatctggaggagaccaattacatactggaaccgttgttggaaaaatagaaggtgatcgtcaaacaactcttggttatattgacaacttaagagagtcatttgttcctgaagatagatcaagaggtaacttctttgatcaagattggggttcaatgcctggagtatttgcagtcgcatcaggtggtatccatgtttggcatatgcctgcacttttagcgatctttggtgatgattcctgccttcagttcggtggaggaacacatggtcacccatggggttcagctgctggagctgcagctaacagagttgcattagaagcttgtgtaaaagcccgtaatgctggtcgcgaaatcgaaaaagagagtagagacattctcatggaagctggtaagcatagtcctg

SEQ ID NO: 277251 - DNA, 811 bp, Unknown
  Bacterial polypeptide expressing nucleotide sequence isolated from the Sargasso Sea
gacggcgtagatcctattgaagcggcggcggcagtagccggcgaaagttctactgcaacttggaccgttgtttggactgatagattaacagcttgtgaaaagtacagggctaaagcatatcgcgtagatcctgtgccgaacgaaccgggacagttttttgcttacatagcatatgatcttgacctttttgagggtggttcaattgctaatcttactgcatcaattatcgggaatgtttttggttttaagcctctcaaggggctgcgtcttgaagatatgaggcttcctgttgcttatgttaagaccttccaaggcccggcaacgggtattgtggttgagcgcgaaaggttaggcgtatttggtcgaccattgttaggggcgacggtgaagccaaagttgggactttcgggaagaaattatggccgagtagtttatgaggccttgaaaggtggactggattttacgaaggatgatgagaatatcaatagtcaaccgttcatgcattggcgagatcgctttttgtattgtatggaggcagtaaatagggcgagtgcggccacaggtgaggtgaaggggacttatttaaacgtaactgctggtactatggaagaaatgtacaaaagagcagaatttgccaaagagttgggatccgtgataataatgattgatttagtcattgggtacacggcgattcagtcgatggccaagtgggctagagataatgatatgatattgcacttgcaccgcgcgggacattccacatacactcggcaaaagtctcacggtgtttcatttcgagtaatatcaaagt

SEQ ID NO: 277252 - DNA, 460 bp, Unknown
  Bacterial polypeptide expressing nucleotide sequence isolated from the Sargasso Sea
gaccaccttcactcaggaactgtagtaggtaagcttgagggtgagcgtaacgtaactcttggtttcgtagaccttatgcgtgacgcagtagtagagaaggaccgtgaccgtggagtttacttcacacaggaatggggatctctccctggtgtaatgccagtagcttctggtggtattcacgtatggcacatgccagctcttgtagagattttcggagacgacgcttgtcttcagttcggtggtggaactcttggacacccatggggtaacgctccaggtgcatctgctaaccgtgtagcacttgaggcttgtactcaggctcgtaacgaaggacgtgacctcgctcgtgagggtggtgacgtaatccgtgcagcttgtaagtggtctcctgagctcgcagcagcttgtgaagtatggaaagagattaaattcgaattcgatactgttgacactttataag

SEQ ID NO: 277253 - DNA, 511 bp, Unknown
  Bacterial polypeptide expressing nucleotide sequence isolated from the Sargasso Sea
tatgagcaagaagtacgacgccggggtaaaggagtacagggacacttactggactcctgattacgttcccctcgataccgacctgctggcctgcttcaagtgcaccggccaggaaggtgttcccaaggaagaagttgccgctgctgtggctgctgaatcttccaccggtacctggtccactgtgtggtccgagctcctcgccgacctcgacttctacaagggccgttgctaccgcatcgaagacgtccctggcgacaaagagtcgttctacgccttcatcgcctatcccctcgacctgttcgaggaaggctccatcaccaacgttctgacctccctggtcggcaacgtgtttggtttcaaggctttgcgccacctgcgtctggaagacatccgcttcccgctggccttcatcaagacctgctacggcccgccgaacggcatcgtggtcgagcgcgaccggatgaacaagtacggccgtccgctgctgggttgcaccatcaagccgaagctc

SEQ ID NO: 277254 - DNA, 478 bp, Unknown
  Bacterial polypeptide expressing nucleotide sequence isolated from the Sargasso Sea
atgagtaagaagtatgatgcaggggtaaaggagtacagagatacctactggactccagaatatgtacccctagacaccgatttactagcctgtttcaaatgtacaggtcaagaaggtgttcccagagaagaagttgcagcagctgttgccgctgaatcttcaacaggtacttggtcaacagtttggtccgagttacttacagatttagaattttataaaggacgttgttatcgaatcgaagacgttcctggagatcctgaagctttttatgcttttattgcatatcccttagatctttttgaagaaggttctattacaaacgtattaacatctctagtaggaaacgtttttggatttaaagctttaagacacttacgtctcgaagatattagattcccaatcgctttcatcaaaacttgcggcggtccaccaaatggaatcgtagttgaaagagatcgtttaaacaaatatggaagac

SEQ ID NO: 277255 - DNA, 1089 bp, Unknown
  Bacterial polypeptide expressing nucleotide sequence isolated from the Sargasso Sea
tatgagtaagaagtatgacgctggggtaaaggagtacagagatacctactggactcctgaatatgtccccctcgacactgatttgttagcctgtttcaaatgcacaggccaagaaggtgtcccaagagaagaagttgcagcagcggtagcggctgaatcttctactggtacttggtcgactgtttggtccgagttacttaccgaccttgaattttacaaaggccgttgttatcgaatcgaagacgttcctggtgatccagaagccttttatgcatttattgcataccctctagatcttttcgaagaaggttcaatcacaaacgtattaacctctttagtaggtaacgtatttggatttaaagctttaagacatctccgtcttgaagatattagattcccaattgcttttattaagacctgtggtggaccacctaacggaatagtagttgaaagagatcgacttaataagtatggaagaccacttctaggttgtaccatcaaacctaaattaggattgtctggtaagaactacggaagggttgtctatgaatgcctaagaggggggcttgatctaactaaagatgatgagaatatcaattctcagccattccaacgttggagagaaagatttgagttcgttgctgaagccgttaaacttgctcagcaagaaactggagaagtaaaaggtcattatttaaattgcaccgctaatacccctgaagaactatacgaacgtgcagagtttgctaaagagcttgatatgccaatcatcatgcatgattacataactggtggatttaccgcaaatactggccttgcaaactggtgtcgtaaaaatggcatgcttctgcatatacacagagctatgcacgctgttattgatagacatccaaagcatggtatccatttcagagttctagcgaaatgtttaagactctctggaggagaccagttacacactggaaccgttgttggaaaactagaaggtgatcgtcaaactactcttggttacattgataacttaagagaatcatttgttcccgaagatagatcaagaggtaacttctttgatcaaagattggggatcaa

SEQ ID NO: 277256 - DNA, 1087 bp, Unknown
  Bacterial polypeptide expressing nucleotide sequence isolated from the Sargasso Sea
tattgcctatcctttagatctttttgaagaaggttctattacaaacgtattaacatctttagttggaaacgtttttggatttaaagctctaagacacttacgtcttgaagatattagattcccaatcgctttcatcaaaacttgcggtggtccaccaaatggaatcgtagttgaaagagatcgtctaaacaaatatggaagacctcttcttggttgtaccattaaacctaaattaggattatctggtaaaaactatggtcgggttgtatatgagtgccttagaggtggtcttgatttaacgaaggatgacgagaatataaactctcagccattccaacgttggagagaaagatttgagtttgttgcggaagcagttaagctcgctcagcaagaaactggagaagttaaaggtcactatctaaactgtactgccaatactccagaagaactttacgaaagagctgaatttgcaaaagagctagatatgccaatcatcatgcatgattatataactggcggttttactgcaaatactggattagcaaactggtgtcgtaaaaatggcatgcttctacatattcatagagcgatgcatgctgttattgatagacatccaaaacacggtatccatttcagggttctagcaaaatgtttgagactctctggaggagatcaattacacactggaacagttgttggaaaactagaaggtgatcgtcaaacaactcttggttacattgataacttaagagagtcatttgttcctgaagatagatcaagaggtaacttctttgatcaagattggggttcaatgccaggagtatttgctgtcgcatcaggtggtattcacgtttggcatatgcctgcactcctagcgatttttggagatgattcttgtcttcagtttggtggaggaacacatggtcacccatggggttcagctgctggagctgcagccaacagagtcgctttagaagcttgtgtaaaagcacgtaatgctggtcgcgaaatcgaaaaagagagtagagacattcttatggaagctgctaaacacagtcctgaattagctattgctcttgaaacttgg

SEQ ID NO: 277257 - DNA, 1061 bp, Unknown
  Bacterial polypeptide expressing nucleotide sequence isolated from the Sargasso Sea
agcccttagattagaggatatgaggctacctgtagcttatataaaaacctataatggccctgctactggaatagtggtagagagagaaagattaaattgttttgggagacctttattgggtgcaactgtgaaaccaaagcttggtttatcaggaaggaattatggtagagttgtttatgaagctttaaaaggtggattagattttacaaaagatgatgaaaatataaactcacaaccgtttatgcactggcgtgatagatttctgtattgtatggaagctgttaatagagcatctgcagctaccggcgaagttaaaggtacatatttaaatgttactgcaggaactatggaagaaatgtacaaaagagcagaatttgctaaggatttaggttctgtaataattatgattgatcttgtaattggttatacagctattcaatcaatggctaattgggcaagagataatgatatgattttacatttacatagagctggtcattcaacttatacaagacaaaggacacatggagtttcctttagagttatagccaagtggatgcgtttggctggtgttgatcatattcatgctggtactgttgtaggaaaacttgaaggagatccagcaactacaaaaggattttatgatgttatgagagaggagtataatcctcagtctttggaaacgggaattttctttgatcaacattgggcttctttaaataagatgatgccagttgcatcaggtggcatccatgcaggtcaaatgcaccaacttatacactacctaggagaggatgttgtattacaatttgggggagggacaattggccacccacaaggaatacaagcaggcgctgaagcaaatagggtagccttagaagctatgatttttgcaagaaatgcaggagacgactatttgcaaaatggtcctgaaattcttgctagagcagcaaaaaattgtacaccgttaaaacaagctttagacgtttggaaaggagttacatttaattatgaatcaactgatgctcctgattttgtcgtaacaccaaccacatcttaag

SEQ ID NO: 277258 - DNA, 1321 bp, Unknown
  Bacterial polypeptide expressing nucleotide sequence isolated from the Sargasso Sea
cttgcagcattccgtatgactccacaacctggagtacctgcagaggagtgtggagcagctgtagcggctgagtcatcaactggtacttggacaactgtatggactgatggtcttactcagcttgaccgttacaagggacgttgttacgacatcgagccagttccaggtgaagacaaccagtacatcgcgtacgtttcttacccactcgaccttttcgaggaaggatcagtaactaaccttttcacatcaatcgtaggtaacgtattcggattcaaggcacttcgtgctctccgtttagaagaccttcgtattcctgtagcatactgtaagactttccagggtgctcctcacggaatccaggttgagcgtgataagcttaacaagtacggacgtggacttcttggatgtactattaagcctaagcttggtctttcggctaagaactacggacgtgcagtatacgagtgtctccgtggtggacttgacttcactaaggatgacgagaacgtaaactcacagccattcatgcgttggcgtgaccgtttccttttcgtagctgaggctatctacaagtcacaagctgagactggtgaggttaagggacactatcttaacgcaactgctggacacgtagacgagatgttaaagcgtgctcagtgtgctaaagaactcggtatgccgattgtaatgcacgactaccttactgctggattcacagctaacactactcttgctacttactgtcgtgaccacggacttcttcttcacattcaccgtgcgatgcacgcagtaattgaccgtcagcgtaaccacggtatccacttccgtgtacttgctaaggctctccgtctctctggaggtgaccaccttcactcaggaactgtagtaggtaagcttgagggtgagcgtaacgtaactcttggtttcgtagaccttatgcgtgacgcagtagtagagaaggaccgtgaccgtggagtttacttcacacaggaatggggatctctccctggtgtaatgccagtagcttctggtggtattcacgtatggcacatgccagctcttgtagagattttcggagacgacgcttgtcttcagttcggtggtggaactcttggacacccatggggtaacgctccaggtgcatctgctaaccgtgtagcacttgaggcttgtactcaggctcgtaacgaaggacgtgacctcgctcgtgagggtggtgacgtaatccgtgcagcttgtaagtggtctcctgagctcgcagcagcttgtgaagtatggaaagagattaagttcgaattcgatactgttgacacactttaag

SEQ ID NO: 277259 - DNA, 1213 bp, Unknown
  Bacterial polypeptide expressing nucleotide sequence isolated from the Sargasso Sea
cttagaattttataaaggacgttgttatcgaatagaagacgttcctggagatcctgaagctttttatgcttttattgcatatcctttagatctttttgaagaaggttctatcacaaacgtactaacatctctagtcggaaacgtttttggatttaaagctttaagacatttacgtctagaagatattagattcccaatcgctttcattaagacttgcggtggtccaccaaatggaatcgtagttgagagagatcgtttaaacaaatacggaagacctcttcttggttgtaccattaaacctaaattaggattatctggtaaaaactatggtcgagttgtatatgagtgtcttagaggcggtcttgatttaacgaaggatgatgagaatattaattctcaaccattccagcgttggagagaaagatttgagtttgttgcagaggcggttaagcttgcccagcaagaaactggagaagttaaaggtcactatttaaactgtactgctaacactcctgaagaactctatgaaagagccgaatttgcaaaagaactagatatgccaatcatcatgcatgattatataactggtggttttactgcaaatactggattagcaaactggtgtcgtaaaaatggcatgcttctgcatattcacagagctatgcatgctgttatagatagacatccaaagcatggtatccacttcagagttctagcaaaatgtttgagactctccggaggagatcaattacatactggaactgttgttggaaaactagaaggtgatcgtcaaacaactcttggttacatcgataacttaagagagtcatttgttcctgaagatagatcaagaggtaacttctttgatcaagattggggttcaatgcctggagtgtttgccgtcgcatcaggtggtattcacgtttggcatatgcctgcacttttagcgatttttggagatgattcttgtcttcagttcggtggaggaacgcatggtcatccatggggttcagctgctggagctgcagctaacagagtcgctttagaagcttgtgttaaagcacgtaatgcaggtcgcgaaattgaaaaagagagcagagacattcttatggaagctgctaagcatagtcctgaattagctattgctcttgaaacttggaaggaaatcaagtttgagtttgataccgtcgacaagcttgacgttcaaggttaa

SEQ ID NO: 277260 - DNA, 433 bp, Unknown
  Bacterial polypeptide expressing nucleotide sequence isolated from the Sargasso Sea
tatgagtaagaagtatgatgcaggggtaaaggagtacagagatacctactggactccagaatatgtacccctagacaccgatttactagcctgtttcaaatgtacaggtcaagaaggtgttcccagagaagaagttgcagcagctgttgccgctgaatcttcaacaggtacttggtcaacagtttggtccgagttacttacagatttagaattttataaaggacgttgttatcgaatcgaagacgttcctggagaccctgaagctttttatgcttttattgcatatcctttagatctttttgaagaaggttctattacaaacgtattaacatctctagtaggaaatgtttttggatttaaagctctaagacacctacgtctagaagatattagattcccaatcgctttcatcaaaacttgcggtggtcctcca

SEQ ID NO: 277261 - DNA, 534 bp, Unknown
  Bacterial polypeptide expressing nucleotide sequence isolated from the Sargasso Sea
gtgtctcttttagagtaatagctaaatggatgagactcgcaggagtagatcacatacatgctggtactgttgttggcaaattagagggagaccccttaaccacaaaaggtttctatgacatattaagagaggaatacaatgaagtagccttagaaaatggtgttttctttgatcaagattgggcatctctcaataaggtgatgcctgtagcatcaggtggcatccacgcaggacaaatgcaccaactggttcattacttaggagaggatgtagttcttcaatttggtgggggaactataggtcaccctcaaggcatagaagctggagcaactgcaaatagggtcgcgctagaagcaatggtgtatgcaagaaatgcaggaagggattacttagcagaaggacctacaattcttgctgaagcagcaagaacttgtactcccttaaagcaggcgctggatgtgtggaagggagtgacctttgattatgcgtcaactgatgcaccagactttgtaccaacaacttcagtttcttaag

SEQ ID NO: 277262 - DNA, 421 bp, Unknown
  Bacterial polypeptide expressing nucleotide sequence isolated from the Sargasso Sea
atgagtaagaagtatgatgcaggggtaaaggagtacagagatacctactggactcctgaatatgtacccctagacaccgatttattagcctgtttcaaatgtacaggtcaagaaggtgttcccagagaagaagttgcagcagctgttgccgctgaatcttcaacaggtacttggtcaacagtttggtccgagttacttacagatttagaattttataaaggacgttgttatcgaatagaagacgttcctggagatcctgaagctttttatgcttttattgcatatcctttagatctttttgaagaaggttctattacaaacgtattaacatctctagtaggaaacgtttttggatttaaagctttaagacacctacgtctagaagatattagattccccaatcgcttcattcaaaactgcg

SEQ ID NO: 277263 - DNA, 1417 bp, Unknown
  Bacterial polypeptide expressing nucleotide sequence isolated from the Sargasso Sea
tatgagtaagaagtatgacgcaggggtaaaggagtacagagatacctactggactccagaatatgtacccctagacaccgatttactagcctgtttcaaatgtacaggtcaggaaggtgttccaagagaagaagttgcagcagctgttgccgctgaatcttcaacaggtacttggtcaacagtttggtccgagttacttacagacttagaattttataaaggacgttgttatcgaatcgaagacgttcctggagatcctgaagctttctatgcttttattgcatatcctttagatctttttgaagaaggctcaattacaaacgtattaacatctcttgtaggaaacgtttttggatttaaagctctaagacatctacgtctagaagatattagattcccaattgctttcatcaaaacttgcggtggtccaccaaatggaatcgtagttgaaagagatcgtttaaacaaatatggaagacctctacttggttgtaccattaaacctaaattaggattatctggtaaaaactatggtcgagttgtatatgagtgtcttagaggtggtctcgatttaacgaaggatgacgagaatataaattctcagccattccaacgttggagagaaagatttgagtttgttgcagaagcagttaagcttgctcagcaggaaactggcgaagttaaaggtcactatctaaactgtactgccaacactcctgaagaactttacgaaagagctgaatttgcaaaagagctagatatgccaatcatcatgcatgattatataactggcggttttactgcaaatactggattagcaaactggtgtcgtaaaaatggcatgcttctacatattcatagagcgatgcatgctgttattgatagacatccaaaacacggtatccatttcagggttctagcaaaatgtttgagactctccggaggcgatcaactacatactggaactgttgttggaaaactagaaggtgatcgtcaaacaactcttggttacattgacaacttaagagagtcatttgttcccgaagatagatcaagaggtaacttctttgatcaagattggggttcaatgccaggagtatttgctgtcgcatcaggtggtattcacgtatggcatatgcctgcactcctagcgatttttggagatgattcttgtcttcagtttggtggaggaacacatggtcatccatggggttcagctgctggagctgcagccaacagagttgctttagaagcttgcgtaaaagcacgtaatgctggtcgcgaaatcgaaaaagagagtagagacattcttatggaagctgctaaacacagtcctgaattagctatcgctcttgaaacttggaaggaaattaagtttgaatttgatactgtcgacaaactagacgttcaaggttaa

SEQ ID NO: 277264 - DNA, 586 bp, Unknown
  Bacterial polypeptide expressing nucleotide sequence isolated from the Sargasso Sea
taagaacggcatgctgctgcacatccaccgtgccatgcacgcggtgatcgaccgtcatcccaagcacggcatccacttccgcgttctcgccaagtgtctgcgtctgtccggtggtgaccagctccacaccggcaccgtggtcggaaagcttgaaggtgatcgtcaaaccaccctcggctatatcgaccagctgcgcgaatccttcgtgcccgaagaccgcagccgcggcaacttcttcgatcaggactggggttccatgcctggcgtgttcgccgttgcttccggcggtattcacgtctggcacatgcccgccctggtcaccatcttcggcgacgactccgttctgcagttcggtggtggtacccacggtcacccctggggttccgctgcaggtgctgcggccaaccgcgtggcccttgaggcttgcgtcaaggcccgcaacgccggccgtcatctcgagaaagagagccgcgacatccttatggaagccggcaagcacagccccgagctggctatcgccctcgagacctggaaggagatcaagttcgagttcgacaccgtcgacaagctcgacgttcagaactga

SEQ ID NO: 277265 - DNA, 1414 bp, Unknown
  Bacterial polypeptide expressing nucleotide sequence isolated from the Sargasso Sea
atgagcaagaagtacgacgctggggtcaaggagtacagggacacttactggactcctgattacgttcccctcgacaccgacctgctggcctgcttcaagtgcaccggccaggaaggtgtgcccaaggaagaagtagccgctgctgtggctgctgaatcctccaccggcacctggtccactgtgtggtccgagctcctcaccgacctcgacttctacaagggccgttgctaccgcatcgaggacgtccctggtgacaaggagtccttctacgccttcatcgcttaccccctcgacctattcgaagagggttccatcaccaacgttctgacctccctggtcggcaacgtgttcggtttcaaggccctgcgccacctccgtctggaagacatccgcttcccgatggccttcatcaagagctgctacggcccgccaaacggcatccaggtcgagcgcgaccggatgaacaagtacggccgtcccctgctgggttgcaccatcaagccgaagctcggcctgagcggtaagaactacggccgtgttgtctatgagtgcctgcgcggcggtctggacttcaccaaggacgacgagaacatcaactcccagcccttccagcgttggcagaaccgcttcgaattcgttgcggaagccatcaagctgtccgagcaggagaccggcgagcgcaagggtcactacctcaacgtgaccgccaacactcccgaggagatgtacgagcgcgctgagttcgccaaggaactcggcatgccaatcatcatgcacgacttcatcaccggtggcttcacggccaacaccggtctgtcgaagtggtgccgtaagaacggcatgttgctgcacatccaccgcgccatgcacgcggtgatcgaccgtcaccccaagcacggcatccacttccgcgttctcgccaagtgtctgcgtctgtccggtggtgaccagctccacaccggcaccgtggtcggcaagctggaaggtgatcgtcagaccaccctcggctacatcgaccagctgcgcgaatccttcgtgcccgaagaccgcagccgcggcaacttcttcgatcaggactggggttccatgcctggcgtgttcgccgttgcttccggcggtatccacgtgtggcacatgcccgcgctggtcgccatcttcggtgacgactccgtgctgcagttcggtggtggtacccacggtcacccctggggttccgctgcaggtgctgctgccaaccgtgtggccctcgaggcctgcgtcaaggcacgcaatgccggtcgcgagatcgagaaggaaagccgggacatcctcatggaagccggtaagcacagccctgagctggccatcgccctcgagacctggaaggagatcaagttcgagttcgacaccgtcgacaagctcgacgttcagaact

SEQ ID NO: 277266 - DNA, 1111 bp, Unknown
  Bacterial polypeptide expressing nucleotide sequence isolated from the Sargasso Sea
tatgagcaagaagtacgacgccggggtaaaggagtacagggacacttactggactcctgattacgttcccctcgataccgacctgctggcctgcttcaagtgcaccggccaagaaggtgttcccaaggaagaagttgccgctgctgtggctgctgaatcttccaccggtacctggtccactgtgtggtccgagctcctcaccgaccttgatttctataaaggtcgttgctaccgcatcgaagacgttcctggcgataaagaatcgttctacgccttcatcgcctatcccctcgatctgttcgaagaaggctccatcaccaacgttctgacctccctggtcggcaacgtttttggtttcaaggctctgcgtcacctgcgcctagaagacatccgcttcccggtggccttcatcaagacctgctacggcccgccgaacggcatcgtcgtcgagcgggaccggatgaacaagtacggccgtcctctgctgggttgcaccatcaagccgaaacttggcttgagcggtaagaactacggccgcgtggtttacgaatgcctccgcggcggtctcgacttcaccaaggacgacgagaacatcaactcccagcccttccagcgctggcagaaccgctttgagtttgttgccgaagcgattcgcctggctgagcaggaaaccggcgagaagaaaggtcactacctcaacgtgactgccaacacgcctgaggagatgtacgagcgcgctgagttcgccaaggaactcggaatgccgatcgtcatgcacgacttcatcaccggtggcttcacggccaacaccggtctgtcgaagtggtgccgcaagaacggcatgctcctgcacatccaccgcgccatgcacgcggtgatcgaccgtcatcccaagcacggcatccacttccgagtgctggcgaagtgcctgcgtctctctggtggtgaccagctgcacaccggcaccgtggtcggcaagcttgagggcgatcgtcagaccaccctcggttatatcgaccagctgcgcgaatccttcgttcccgaagatagcagccgcggcaacttcttcgatcaggactggggctccatgcctgggtcttcgctgtgctcc

SEQ ID NO: 277267 - DNA, 911 bp, Unknown
  Bacterial polypeptide expressing nucleotide sequence isolated from the Sargasso Sea
attaggattatctggtaaaaactatggtcgagttgtatatgaatgtcttagaggcggtcttgatttaacgaaggatgatgagaatattaattctcaaccattccaacgttggagagaaagatttgagtttgttgcagaagcagttaagcttgctcagcgagaaactggagaagttaaaggtcattatctaaattgtactgctaacactcctgaagaactctatgaaagagctgaatttgcaaaagagctagatatgccaatcatcatgcatgattatataactggtggttttaccgcaaatactggattagctaattggtgtcgtaaaaatggcatgcttctgcatattcatagagctatgcatgctgttattgatagacatccaaagcatggtattcacttcagagttcttgcaaaatgtttgagactatctggaggagaccaattacatactggaaccgtggttggaaaactagaaggtgatcgtcaaacaactctaggttatattgacaacttaagagagtcatttgttcctgaagatagatcaagaggtaacttctttgatcaagattggggttcaatgcctggagtatttgcagtcgcatcaggtggtatccatgtttggcatatgcctgcacttcttgcgatctttggggatgattcctgtcttcagttcggtggaggaacacatggtcacccatggggttcagctgctggagctgcagctaacagagttgctttagaagcttgtgtgaaagcccgtaatgctggtcgcgaaatcgaaaaagagagtagagacattcttatggaagctgctaagcatagtcctgaattagctattgctctagaaacttggaaggaaattaagttcgagtttgacactgtcgacaagcttgacgttcagggttaac

SEQ ID NO: 277268 - DNA, 352 bp, Unknown
  Bacterial polypeptide expressing nucleotide sequence isolated from the Sargasso Sea
attgtatttactcattgcttcaatactaaatgatgaagaattaaaaaatttttcagaaatagcagaaagactgaagcttgattatattattgaagttcatgatgaggaagaattacaaagagtacaacatttctctaatgcaattattggagtcaataacagaaatttaaaaacttttgatgtcgatattaataattcagttgcactaaaaaaaatttttgaaggagaaaatatttttattgctgaatcgggaataaaaagtaaaaaagatatcgaataccttcaacaaaataatattaatgtttttctaattggtgaaagcttgatgaaaggagatttttttgaaacttag

SEQ ID NO: 277269 - DNA, 322 bp, Unknown
  Bacterial polypeptide expressing nucleotide sequence isolated from the Sargasso Sea
gacgaagaattaaaaaacttttctgaaacagcagatagactcaagcttgattatattattgaggttcatgatgatgaggaattacaaagagtacaacatttctcaaatgcaattattggagtcaataatagaaatttaaaaacttttgatgttgatattaataattcagttgaactaaaaaaaatttttgagggagaaaacatttttattgctgaatctggtataaaaagcaaaaaagatatcgagtacctcaaacgacataatattaatgtttttctaattggtgaaagcttgatgaaaggagatttttttgaaacttagg

SEQ ID NO: 277270 - DNA, 637 bp, Unknown
  Bacterial polypeptide expressing nucleotide sequence isolated from the Sargasso Sea
gatggatatccttacaaaaataatctcaaaaaaaatagatgaattgaatcagctaaaaagagttatttccacatcggaccttgaaagcagtgaattttttgagagaaataacaaatctattgtaagtggtttgattggaaatgaaataagtattattgcggagcataaaagaaaatctccatctagatctgaaattaattttcaaacatcaactgaaaaaataattaatggttatcaaaaagcaggagcagtagcactttcaattttgactgaaaaaaatttttttaatggatccaattatgatataacaaatgttagaaaaattacagaattaccaattttaagaaaagactttataattgatgaatttcaagttcttgagtccaaatcaattggtgctgatggtattttattgattgctgcatgcttagacaaaaaacaaattattaaactatctagacttgcaaaaagtttggatttagaagttttaattgaaatacatgatttatctgaactagataattgctgtatagatagtgtagatataattggagttaataatagaaatttgatgacattcaatgtagatattgaaactagtattagtttaagcagtaaaataccaagaaattacgta

SEQ ID NO: 277271 - DNA, 644 bp, Unknown
  Bacterial polypeptide expressing nucleotide sequence isolated from the Sargasso Sea
tttgaaggaaatatatgaatataaaattgactttgttaataagcaaaaaaagctacatactcaaagtgatattcaaaataaaataaaaaatacacactcgcacgatttcagtttttctaaaaaattaaaaaacgagaagactcaaacgtcaattattggtgaattaaaacgtgcaagtccttcgctaggaaattttgttaatgaagaaatagacttatctaagattgcaaaaacatatgaagattatggcgtttcttgtctatcaatattaactgatgaaaaatattttaaaggcagtgtaaaggatcttgctgatataaggaaaatatctactttgccaatattaagaaaagattttatagttgatgaatatcaaatttacgaaagtaaattagtcggagcaaactgcatattaataatcttggctatgcttgatcaaaaaaaagcagatagacttgaagcaattgctctgaatatgggtcttgatgttataattgaaatccataataaaaaagagcttgaaagagcattaaatatgaaatcagaattaatcggtataaataatagaaacttaaataattttgaaacgagtatagaaactacgattgagcttagtaattatatagctgatttaaaaaaaattt

SEQ ID NO: 277272 - DNA, 458 bp, Unknown
  Bacterial polypeptide expressing nucleotide sequence isolated from the Sargasso Sea
aatgtcaattttgaaggaaatatatgaatataaaattgactttgttaataagcaaaaaaaactacatactcaaaatgatatcctaaataagttaaaaaatataacttcgcacgatttcagtttttctaaaaaacttaaagatgagatgtctcaaacatcaataataggtgaattaaaacgtgcaagcccttctctaggaaattttgtaaatgagaaaataaacttatctaatattgcacaaatatatgaagaatgcggtgtttcctgcttatcaatattgacagatgaaaaatatttcaaaggaggaattgaagatattattgaaataagaaaaatatctactttaccaattttaagaaaagatttcatagttgatgaatatcaagtttatgaaagtaagttagtgggagcaagctgcattttaataattctagccatgctagatcaaaaaaaagcgg

SEQ ID NO: 277273 - DNA, 620 bp, Unknown
  Bacterial polypeptide expressing nucleotide sequence isolated from the Sargasso Sea
aaaaaaaaaacgtcctctagcctcacttttggaatacccttctgatacaatggtttattataattttaaagaagcaattgaaaaaagaatttctaatggaaaaatatcattaatagctgaatcaaaaaaagcgagtccttcggcaggtattattataaaagattatgatcctgtagaaatagcaaaaatttatcaatcaaaaaaagctacttgtttatcaattttaacagaggaagatttttttttaggaaatctttctcatatttataaaattaaattaaattcaaaaacaatggaaaatactggcattactttacctatattatgtaaagatttttttatagatacttaccaagtacatttatctaaacattatggagcagatgcaattttaataatattagcaggtgttagtgataaacttgctgatgatttatataacgaagcgcttaaattagacatgtcggtaattgttgaagttcatactgttgaagaagcaaagcgttctttaagatttaaagatgctttaattggtgtaaataatagaaacctaaaaacattaaaaactaatataaatacaacttttgatattcatgatgttttgcttaatcaccctgggc

SEQ ID NO: 277274 - DNA, 661 bp, Unknown
  Bacterial polypeptide expressing nucleotide sequence isolated from the Sargasso Sea
tgaaaggatagctgtaatcgcggagattaagagaaggtccccatcaaaaggcgacttattcgcaaacctcgacccaggtgtattagctgcagagtatgaaagtggtggagcagctgcaatttctgttttgacagataaagaaaattttggtggctctgataaggatttaatcgaagcatcaaaatcagtaaaaataccggtactgagaaaagattttacggttgatcagcgtgatatttgcgacgcaagaataatgggagccgatgctgttttattgatagtttctgctcttgatcgatacgaacttaaagattttatagaactctcaatagagcttgatatggatccattagttgaagtgcatgatgagaaagaactagagcaggctttatcagttgaggcgaaattgattggagtcaatcaaagagatttgaaatcatttgaagttgatccattaaaagctacggctttaatgtcaaaaattcctgaatctgtaacagctgtagctgagtctggtatcgatggaggtgaaagtgcacgcaatcttatgcgggttggatactcagccttattggtgggagagttattagttaaatcaaatgaccggatgaaaacgctttctgaacttaataataaatttgatgaaaaaagttatgagtaa

SEQ ID NO: 277275 - DNA, 724 bp, Unknown
  Bacterial polypeptide expressing nucleotide sequence isolated from the Sargasso Sea
atgccgggcatggtgaacggacatacccacctgttccagaccctgttcaggggcctagccgacgacaaatctctcctggattggcttagggactgcatctggccagtcgctggagagatcgacgccgaagcagcgcgcgctgcggccaccctcggtctgatcgagaacctccggtccggttcttcgaccgtgatcgaccaccagtacgtgcacgcagaccccgatatcgatgacgccatctgccaagtggcggctgacctaggtattcggtttgagctggcccggggttgggccgaccgcaactatcacccgccacttacagaatcggtcgagacggtattggaaagagtcgaaccactccggcagacctggcacggttcttgcgacggccgcatcaccatcggcctggctcctctcatcccctgggggtgttcggacgaggccatggtggccaccacagctgcagcccgatcgtggggcggccatatccacactcactgcgcagaggcggaaatcgaagtggtgatgaacctcgaggagcgagggttgcgccacgtcgcatggttggactctctcggtgtgttgggacccgatgttcagttggcgcactcggtatggctggacgaaacagaaatccagctcatagccgagcgcggcgcatcggtagtccactgcccagtttccaacatgtacttggcatcaggcattgccccaatccgggctc

SEQ ID NO: 277276 - DNA, 450 bp, Unknown
  Bacterial polypeptide expressing nucleotide sequence isolated from the Sargasso Sea
tacgcaaagattttatgtatgatacttaccaagttacggaggcacgtgcactaaacgcagattgtattcttataattatggcatcggtcagtgatcaacaagcagaagagctagaacatgccgcggtctcctggaatatggatgttttaattgaagtacacaatgaaatagagcttgagagagcaatgaatttaaagtctcctatgattggagtaaacaacagggacctgaaaacgtttgagacttcacttgaaacaacaaaaagattatccaaacttttacctagtgatcgattgatcgttagcgaaagtggacttttcaatactgaggacctccggtcaatggcagaattagacgtacgatcattcttaataggagaaagtttaatgcgacaaccagacgttaaaacagcaactcagaaaattctaagcaatccattgagaccataaa

SEQ ID NO: 277277 - DNA, 780 bp, Unknown
  Bacterial polypeptide expressing nucleotide sequence isolated from the Sargasso Sea
tttgggaaaaacatctagaagttgagattgcaaggaaaaaagtttcgcttgaagatttaaagaaaaagatcagggatttacccaaaacaaaaaattttatagatgcattaataaatagtaattcgaaaccagcactaatagcagaaattaaaaaagctagtccaagtagagggataataagagaggactttgacgcgagaatgataggtaaaatgtatcaagatggaggtgctaactgtatatcagtcttaacagataaaaaattttttcaaggtggttttgatgtcttagttgaagttagaaaggaaatcgtaatcccaatactatgtaaggattttattctttacccctatcagctttaccaagcaagagctgctggggctgatgctgcacttttgatagccgcaatcctgactgattctgacttaaagtacttatctaaggtggccaaacatttaggacttacaatattagtagaggttcatgattcagaagaacttgaaagagtactaaatattaatatatttaatttaataggtattaataatagaaatttaaagagttttaaaactgatcttgaagttacaaagaagttggctaataattatgctaaccaaatcaagaaaagttctattaatttggtaagcgagtcaggtttatttactcgtgaggatttggatctagtaaaaagttatggggctgatgctgttttagttggtgaatctcttatgtcacaggaagatatattaggtggagttaaaaagttaattggtcagtaat

SEQ ID NO: 277278 - DNA, 385 bp, Unknown
  Bacterial polypeptide expressing nucleotide sequence isolated from the Sargasso Sea
atggaaataagacgcaggccaccaaatccaacagtaagggtagaaaatttagaatatgctgtacctcatagagaagcacaagcaaaaaacattctggaagaaattgtatggcacaaggatattgaaattaagaattttaaaaaaatagtctctttagaagatctcatcaaaaagattgaaaaacttcctactcccaaagatttttacaaaaatatcttggagtcaaaaataaaaccaggagttattgctgaaataaaaaaagctagtccgagtaaaggagttattagaaaagattttaaccctgaaaacatagcaatttgttatgaaggattaggtgcatcatgtatctcagtacttaccgataaaaggttttttccaaggtagt

SEQ ID NO: 277279 - DNA, 525 bp, Unknown
  Bacterial polypeptide expressing nucleotide sequence isolated from the Sargasso Sea
tattaacagataataatttttttggtgggcaattagactttattaatcttgttaaatcagttgtcagcatacctgttttaagaaaagattttataatatctgaatatcaagtttgggagtcattttatattggagcagatgctatattacttattgctgatgcaattgaatatgagttactttcatcattaaacagtttagcaactgaattaggtatgcatgtacttatagaaacacatgatatcaaaaatataaataaaatgagattacttaatccaaacataattggtattaattgtagaaatttgaaaactatggaaactcatttggattggtttaatgatgcaataaatgatttaccttcaaatattattaaagttgctgaaagtggtatccatttaaattctcatttgaaagcaatagaaaaacttggttacgacgcagcattaattggatcaagtttgatgaaaacaaaaactcctggacacgctctcgcaaaattattaaatagatctcctaagtaga

SEQ ID NO: 277280 - DNA, 350 bp, Unknown
  Bacterial polypeptide expressing nucleotide sequence isolated from the Sargasso Sea
aatggagataagacgcaggccaccaaacccaacagtaagggtagaaaatttagaatatgctgtgcctcatcgagaagcacaagcaaaaaatattctggaagaaattgtatggcacaaggacattgaaattaagaattttaaaaaaatagtttctttagaagatcttataaaaaagattgaaaaccttcctgctcccaaagatttttataaaaatattttggagtcaaaaataaaaccaggagtaattgctgaaataaaaaaagctagtccgagtaaaggagtcattagaaaagattttaaccctaaaaacatagcaatttgttatgaaggattaggtgtatcatgtatct

SEQ ID NO: 277281 - DNA, 455 bp, Unknown
  Bacterial polypeptide expressing nucleotide sequence isolated from the Sargasso Sea
aatggatataagacgcaggccaccaaatccaacggtaagggtagaaaatttagaatatgctgtacctcatagagaagcacaagcaaaaaatattcttgaagaaattgtatggcacaaagatattgaaattaagaattttaaaaaaatagtctcattagaagatctcgtcaaaaagattgaaaaactccctactcccaaagatttttataaaaatattttggagtcaaaaataaaaccaggagttattgctgaaataaaaaaagctagtccgagtaaaggagttattagaaaagattttaaccctgaaaaaatagcaatttgttatgaaggactaggtgcatcatgtatctcagtacttaccgacaaaaggttctttcaaggtagttatgaaatacttaaaactgtaaggagatcaactaatctccctctactctgcaaagattttattatttctg

SEQ ID NO: 277282 - DNA, 490 bp, Unknown
  Bacterial polypeptide expressing nucleotide sequence isolated from the Sargasso Sea
ctcaaggccggctccacccgctttattctggagtgcaagaaggcctccccctccaagggattgatccgcgacgacttcagcccggaggccatcgccgacatctatggcaaatacgccaccgccatctcggtgctgaccgacgagaagttctttcagggggatttcgcctttttgccgcgggtgcgcagccgcgtcacccagccggtgctctgcaaggatttcatgattgacccctatcaggtctatctggcccgccactatcaggcggacgccatcctgctgatgctctcggtgctcaccgacgaaggctatcgcgccctgttcgcggtggccaaagagctgggccttggggtgctgaccgaggtgagcaacgaggaggagctgacccgcgccatcgcgctgggcgcaccggtgatcggtatcaacaaccgggacctgcgggatttgagcgtggatctcgcccgcaccaaacagctggctaaagatattc

SEQ ID NO: 277283 - DNA, 460 bp, Unknown
  Bacterial polypeptide expressing nucleotide sequence isolated from the Sargasso Sea
atgttagatgaaatcatcaaaaataaactcaaagaagtatctcaattaaagtcttcatttgatatctctaagattgatactagcgcacccaaaaagccattttatgaaactcttttattacgccaaggcaataaaaaaaattcaattatcgccgagattaaaaaaagatcaccaagtaaagggatacttgatagtaacctgaatgtatcggaaaaagctgctcaatacgaagctggtggagctagttgcttatcagttttaactgagagagattatttcaatggatcaattgacgatctactcgtcgcaaaaagatcggttaatcttcctatattaagaaaagatttcattattgacgcattacaagtataccaaagcaaaatgataggagcagattgcattctccttattgtttccgccttatcacacaaatcatttgaagaattatattctttggcag

SEQ ID NO: 277284 - DNA, 589 bp, Unknown
  Bacterial polypeptide expressing nucleotide sequence isolated from the Sargasso Sea
cattattagagaggattttaatccggttgagataccgttatcatacgaaaaaggtggtggctcatgcatttcggtattaactgacaaagaaaatttcttgggatcaaacagtcatcttaaagaggttaaaagaaatacaagattaccaattttaagaaaagactttattgttgatcctttacaggtattggagtctaaaaagctaggagccgattgtattttaataataattggaatgaattctgttgacgacaataaaaagatagaaagtttagctattgatattggattggaatgtatactagaggttcactcacttgaagagttagagaaaacaaaaagtttctcctccaatatgattggtataaataacagaaatttaaatacatttgagacaaaaatatctacgactcttgatcttattcctaaaatcccctcaaacaaaacaataatttcagaatcaggtttttcagaaaagaaagacctagaggaattggcgatgttaggtgtttcctcatttttaataggcgagagtcttatgaggcaagctgatattgaaaatgcaaccaaaaaattactaagaggttaa

SEQ ID NO: 277285 - DNA, 511 bp, Unknown
  Bacterial polypeptide expressing nucleotide sequence isolated from the Sargasso Sea
catgtctgtgttaaaagaaatttgtgaaaaaaaaattttagatattcaatcattaaaaagtaaaacttctgagtcgaaacttttagaattaattaagaataaagataaaacaaagggttttaaaaaagcaataaataaaaaaatatcaaaaaataaatttgccttaattgcagaaataaaaagagcaagcccttctaaaggaataataaaagaagattttgtgccaataaatatagcaacttcatataaaaatggaggagcaacttgtttaagcatacttacagaagaaaattggtttaaaggaaaaaattcatacttaatagaagttagaaatgaaatagatttacctatattaagaaaagatttcatattagacccgtggcaggttttagaaacaagatatataggagctgactgtattcttataatactttctgcagtaaatgatcaactagctaatgaattgaaagttactgctaaaaatgtaggtttagatattttagtagaagta

SEQ ID NO: 277286 - DNA, 552 bp, Unknown
  Bacterial polypeptide expressing nucleotide sequence isolated from the Sargasso Sea
tatgcagctgatcgtctctgctaaaaaaagagcgattgccaagcaaaagtcaaagatttcgcgggaagatatagaacgtcttgctaaagactttcctgaactgccaagaaaatttctcagcagtctaaaagccaattcccaaaaaaaaaggacggcgatcatcgcggaaataaaacgagcatctccttctaaaggcatcatcagccagaattttgatcctaaagccatcgcgaagagctacgaggaagccggcgccacctgcatatccgttttgacagagacagatttttttctcggttcaccgaggtatataaggacagtgaaagatgcttgctctttgcctgtattgcgcaaagattttatcatggatgaatatcaaatatttgaatccaagctaattggatctgattgcattttgcttattgcagcgatcctagatatctctgatcttcatcggttatatgaactggcaatttctcttggtatggatgtccttgttgaagtacacaacccagaagaattagacaaggctctgacgctttcgcctaaatg

SEQ ID NO: 277287 - DNA, 697 bp, Unknown
  Bacterial polypeptide expressing nucleotide sequence isolated from the Sargasso Sea
gcaccagataccttaggttttaagaagatattatccgaatctgttatagatagaggcgtcgggttaatagcagaaataaagaaatcttctcccagcaggggtattatccgggatgattttgatcctgtagaccttgctttacagtacgaaactggaggtgcaagttgcatatcagttttgacggaaagaaattatttttctggtcataacgaacatttaatagatgttcgtaaagcagtaaaattgcctattttgaggaaagatttcatacttgatccatatcaggtttatgaaaccagagcgataggtgctgattgtatcttattaatcatggcagcaattgatgattatttagcctcagatttgtctaaagaagctagaaggcttggtttgtgtgttttagtagaagttcatgatgaaagagaactagaaagaacatgtgatttagatgttgatcttattggtataaataatcgtaatttaaaaacactcgagataaatttaaatacaaccgaaagattaatgtccctcgtacctaaaggaatcgacgttgtttctgagagcggtatatattcaaatgaagatattgtaaggatgctccactcaaaggtggggagatttttagttggtgaatccttaatgaaacaaaatgaccttgtccaagcgacacgccaattattaggcaataaaaattaga

SEQ ID NO: 277288 - DNA, 573 bp, Unknown
  Bacterial polypeptide expressing nucleotide sequence isolated from the Sargasso Sea
aatgtcaattttaaatgaaatatatgaatataaaattgactttgttaatttccaaaaaaatctacatactcaaaatgatatcttaaataagataaaaaatctaccctcacatgatttcagtttttctaaaaaattaaaaaacgagatgtctcgaacatcaattataggtgaattaaaacgcgcaagtccctctttaggaaattttgttaatgaagaaataagcttatctaatattgcacaaatatatgaagaatgtggtgtctcctgtctatctatattgacagatgaaaaatatttcaaaggaagaattgaagatcttattgaaataagaaaagtatcaaatttaccaattttaagaaaagatttcatagttgatgaatatcaaatttatgagagtaagttagttggagcaagttgcattttaataatcttagccatgcttgatcaaaaaaaagcagacgagcttgaagcaattgctctaaatatgggtctagatgttatagttgaaattcataataaggcagagcttgaaagagcgataaacatgaaatcagaattaatcggcataaaaca

SEQ ID NO: 277289 - DNA, 283 bp, Unknown
  Bacterial polypeptide expressing nucleotide sequence isolated from the Sargasso Sea
ttgagctcaaaaggtactattttagaagaaatcatagatcataaaaaacgagcggtatcaattgccaagcaggaactgtcattagaagatatcgagagtcaattgaaggattgccctagtcctcgtccttttatttcaccgcttcggtctgcactagcgaatcaggagcctgctgttatagcagaaattaagaaagcatctccatcaaaaggtttgataaggtctgactttaatccaagagagcatgctaaagattatgaggttagtggagcgacttgtttat

SEQ ID NO: 277290 - DNA, 488 bp, Unknown
  Bacterial polypeptide expressing nucleotide sequence isolated from the Sargasso Sea
aatgagtaatgttttagaaaagatagtaattgataaaaaagatagtataattaaatctaaaaattcatatactataagcgatttagaaaataaaatatcctcatataataattatttaaattttaaaaataagttaaccgaaaataaaatttctattgtagctgaattaaaaaaagcaagcccttcagctggattaattattaaaaattataatcctatagaaatctcaaaacagtatttaaattctggcgcatcatgcttgtcaatacttactgaagagaaatattttttagggaaattagatcatattacagatgttaaaaaagaaataaaattgcctgtattatgtaaagattttattattgatccatatcaagtttatttagctaaaagtttcggtgctgatgctatattaattattttatctgcggttgaaaaaaaaatggcaaaggaaatttatgatgtagcaaataaattaaatgtaagtt

SEQ ID NO: 277291 - DNA, 505 bp, Unknown
  Bacterial polypeptide expressing nucleotide sequence isolated from the Sargasso Sea
aaaatattttgaaggagacattgatcatatatcattaattaaaaaaacaacaaatttaccagtgctaagaaaagattttataattgatgaatatcaaatattagaaagtaaaatttataatgctgatgcaatacttctaattttgtcaatcttgactgatagacaagttaaacaatttataaaaaaagctaatgaaattaatttagattgtatagttgaagcacatagtaatgatgagataaaaagagcaattaaaattggttatcctataattggtattaacaacaggaatttaagtaatctttcagttaatataaataatacaattaatttggttaaaaaaattgataaaaattttactatcattggagaaagtggcattaaaagtaaaaaagaaattaaaaaatacaatgaaattaatatatataattttttaattggagaaactttactaaaagctattaataaagagaaaaaaataaaagaatttttaataaatgaatag

SEQ ID NO: 277292 - DNA, 733 bp, Unknown
  Bacterial polypeptide expressing nucleotide sequence isolated from the Sargasso Sea
aatgaatcatttagaaaaaatccttgccggacagcaatctagaataaatattcttaaacatacatatcctatcaatcttcttaaagaaaagattaagtcttataataattttattaactttaaagaaaaattaataaaagaaaaaaataaagtttcaattataacagaaatgaagaaagctagtccttctgcaggaattataatcaatgattataaaccctcagaaattgcagaaaattattttagcaatggagcatcatgcttatcaatcttaacagaggaaaatttttttcaaggaaaattagaacatattgatgaggttaaaaaaaaagttaaacttcctgttttgatgaaagatttttttacagacgattatcaagtatatttagcaaaagcttctggcgctgattgtattttaataattttatctgctctaaacggttctgcagctgacaaaatatatcaaaaagcaaacgagcttaatttaacaacaatagtagaagttcataatgaagaagaggctaaagaagctttaaaatataaggaagcaatcataggaataaacaatagagatttaacaactttgaaaactgacatcaatacaacatataaactctacgaaacattagccaatcataggcagccaattgtttgtgaaagtggaataaaatctgaaaaagaagtggaggaaatagtaaaaaaaacaaagataaataatttttcttattggtga

SEQ ID NO: 277293 - DNA, 452 bp, Unknown
  Bacterial polypeptide expressing nucleotide sequence isolated from the Sargasso Sea
cctgcgaaaagattttatgtatgatacttatcaggttatagaggcacgagcattaaatgcagactgtattttgataataatggcttcagtcagtgaccagcaggcaaaagagctagaagatgccgctatttcatggaacatggacgttttaatcgaggtgcacgatgaaatagaacttgagagagcaatgaatttaaattctcccatgattggtataaacaatagaaaccttaagacattcgagacttcaaccgacacaacgcaaaggctatcacaacttttacccagtgagcgattgattattagtgaaagtgggcttttcagtaatgatgatctgcggtctatggcgagagtaggcgtaaggtcattcctaataggagaaagtttaatgcgacaagacgacgtgacagaagcaacccaaagaattcttcaaaaccctttgaggccataga

SEQ ID NO: 277294 - DNA, 504 bp, Unknown
  Bacterial polypeptide expressing nucleotide sequence isolated from the Sargasso Sea
gatgagtattctagaaacaattgtcgcaaatacaaaagcaggtcttattgcgaagaaggcagaattacctttagagcagataaaaagatctttagagaatttcgatcttcctagaggaagatttaaagataatatttccaacaaagatgaagccattattgcagaaatcaaaaaagcttcaccaagcgcaggagtcattgcagaagaatttgatccagtgaaaaaggcaattgaatatgaggcttttggagcatctgcattatcaattttaacggaagaagatttttttatgggtagtgttgagtatataaaagagattaagaagattactgccttgccaattttaagaaaagatttcatgattgataaatatcaaatttatgaatctaaattgattggcgcagattgtattttattgattgcatccattctttctgatcagcaaatcgaggatttcgttaatattgctaaaaagttagagctggattatttaattgaggtgca

SEQ ID NO: 277295 - DNA, 760 bp, Unknown
  Bacterial polypeptide expressing nucleotide sequence isolated from the Sargasso Sea
atgaatatattagaagaaattgttaaccgtaaaaaacttgatctaaaaaaaataaaagaactaatttctattgaccagtttctaaaacaaatagatataaatcaaaaaggggatttttttaaaaccttaactaataatgatgatcagtatcatattattcctgaaactaaaaaatcttcaccatctgcaggcatcatagtcaaagaatatgatcctctaaaaaaagcatcagcttataaaaatgacggtcataaggttatatcggttttaacagaagagcattattttaatggaagtattgaacatattaaatctattaaatctgaattagatttaaagatattaagaaaggattttataattgatgagtggcaaatatatgaatcgaaagcatatggtgccgactgtattcttctaattgctgaaagcctaagcaaaaaggatattgctcatttttcaaatattgcaaatgagttaaatcttgatgtcttattggagtttcataacgaagaacaaatagataaagtgctcagcagtggccttgatttaattggcataaacaatcgtaatttaagtactgtagaaactaatatttctcactgtgaaaatcttctaaatagacaccatcaagtcttgaaaccacaaaacattattgctgagtctggtttcacacttaaatctcaactggatgattatgttaatattggcgtaaataaatttttaattggagagggattattaagaaatacattgctttaat

SEQ ID NO: 277296 - DNA, 751 bp, Unknown
  Bacterial polypeptide expressing nucleotide sequence isolated from the Sargasso Sea
tatgaatattcttgatgaaatagttgcaaataccaaagcaaaagtaagtattgctaaagaaaaggtttctttagatgatttggtatcaactatacattcaaacaagattgtaaaaagtaaatttaaaacaagcctaagagataaagatcaggcaatcattgctgagattaaaaaagcatcaccaagtgcggggattattagtgaaaattttgatccagttacaaaagctcaagagtatgaagcttttggtgcatctgctctttctattctaaccgaagaagattattttttaggcagcactcaatacctaaaagatgttaagaaaatatctaagttacccattttgagaaaagatttcatagtagatatttatcaaatttatgaatctaagttaattggttctgattgcattttactaatagcaagcatccttagtgatgatgaattaaatgattttactcaactcgcagatactttaggactagattacatcattgaagtacataatgaagacgaactaaaaagagtgcaggatttctcagaagctatcatcggagtaaataacagagacttaaaatcgtttacggtagatattgagaactctataagactaaagcaattattcaatcaagataatttgtttgttgctgagtctggaattaagggacaaagcgatattaataaattattgcaacatggtataaatatattcttaataggtgaaagcctaatgaagggagattttgcttga

SEQ ID NO: 277297 - DNA, 621 bp, Unknown
  Bacterial polypeptide expressing nucleotide sequence isolated from the Sargasso Sea
aatgcctgaaaatattcttgaaaaaataatcgaaaaaaagattataaaaattgataatcttaagaaaactttagcactagagtctttaaaagatataattgataagaataatacatttctaaattttaaagaaaaaattgaaaataacttaaaagctcaaaagttttcaattattgcagaaattaaaaaagcaagtccctcagctggagtaattattaataattatgaccctgtgcagatagcgaatatatatgaccaaaataaagctacttgtttatcagtactcaccgaagaggatttttttttaggaaactctttacatataagtaaaataaaagaaaaaataaacttacctattctttgcaaagatttctttattgataagtatcaagtaccacttgctaaaagttatggagcagatgcaatacttataattatggctggagtatcggataatctagcatcagaaatatatgatgaagctttaaaacataatatgtcagtaattgtagaggtacatactgtagaggaagcaaaaagagctttacgttttaatgaagctttgattggtgtaaataatagaaacctaaaaactttaaaaacagatataaatacaactta

SEQ ID NO: 277298 - DNA, 1411 bp, Unknown
  Bacterial polypeptide expressing nucleotide sequence isolated from the Sargasso Sea
atgcaaaccagtaccgcaaaagccaacgttttaacccgtatcgtcgatactaaggccgcccatatcgccgcccttaagttgcgttttcctgaagacagcttaaccccaaaaatctcggaccgtagtctatttgccgccttaaaagccccgaaggcgggttatattttagagtgcaaaaaagccagtccatccaaaggcttaatccgtagagactttgatgtcgaagccatcgcctcgatttatgccaagtatgctgcggggatttcggtcttaaccgatgagcaatttttccaaggggacatgggctatatcccgaaagtgcgggccaaagtgagccaaccgattctgtgtaaagacttttttgttgatgaatatcaaatcaagttggccgcacatcagggcgccgatgcgattctactgatgctttctgtgctcgatgataagcgatatcagcaacttgccagcgaagcggccaagtatcaactcgatgtattgaccgaagtcagtaatgaggaagaactaagacgagccatcgccttaaatgcaccaattattggcataaataaccgtaacttgcgagatttaagtaccgatttagccaccacagaagcccttgcgccacacatcggcagcgatcgcgtggtgatcagcgaatcgggcatttacactaacgatcaagtacgccgcttaagtccattggtcgatggcttcttggtcggtagctcgattatggccgaagaagacattgatttagcctgtcgtaaattgatcttcggtcacaataaagtctgcggtctcacccgacttgaggatattcaagcagcagccactgcgggcgcagtttatgctggactcatttttgctgaaaaatcaccacgagcactcacaaaagatgccgccaaacagttagtcgagcaataccgtgccgccaacttgcccgccattgagtttgttggcgtatgtgtgaatagcacgcctgagttcatggtgagtatcgcccaagaatgtggcttagccgcgctgcaactgcacggcagcgaaactgagttggaaattgccgagctaagccaattgctgcaacaggccggactgaacacccaaatttggaaggcgatcagtgtcgatgctcaaagctgcgaacttgctgctatgccaagaggggtgcagcgttatctctttgatagcaagaatgacgcaggttttggtggcacggggcaagtctttgattggcaactccccattgcccataaagccgaggccatgctcgcgggtggcctcaatgcggacaatgctgcccgtgccaatgctcaagggttttacggtttagattttaactctggcctcgaaaccgcccctggcattaagtcggcagagaagatccaagcggcatttagtcaattacgactctaga

SEQ ID NO: 277299 - DNA, 1450 bp, Unknown
  Bacterial polypeptide expressing nucleotide sequence isolated from the Sargasso Sea
gatgtcagaccttattgccccccatgcttttctgaacatggcctccatcagccagaccattctcggcaagatcgtggcgaccaaacaggagtgggtcgccgcccgcaaactggcccagccgctggagagcttccagagcacgctgacccccagcgatcgggatttcgtcggggcactcaaggcgggctccacccgctttattctggagtgcaagaaggcctccccctccaagggcttgatccgcgacgatttcagcccggaggcaatcgccgacatctatggcaaatacgccaccgccatctcggtgctgaccgacgagaagttctttcagggggattttgccttcctgccgcgggtgcgcagccgcgtcagccagccggtgctctgcaaggatttcatgattgacccctatcaggtctatctggcccgccactatcaggcggacgccatcctcttgatgctctcggtgctcaccgacgagggctatcgcgccctgttcgcggtggccaaagcgctgggtcttggcgtgctcaccgaggtgagcaacgaagaagagctgacccgcgccatcgcccttggcgcgccggtgattggcatcaacaaccgggatctgcgcgacttgagcgtcgatctcgcccgcaccaaacagctggccaaagatattccgagcgatcgggtggtgatcagcgagtccggcatcaaccaccgcgcccaggtggcggatctgcgccaccacgccaagggctttctggtgggctcatccctgatggccgagccggatctggaggcggcggtgcgcaagctggtactgggccagaacaaggtgtgcggcctgacccgcgccgaagacgccgctgcggcccatcaggcaggcgcggtattcgggggtcttatctttgtggccaaaagcccgcgctacgtggacatccccgccgcccgcgccgtgatggcgggcgcgccgctcgcctatgtgggggtatttcgtaacgcccagcccgccaccctcgtcaagacggtggaggcgctcgggctctccgcagtgcagctgcacggggatgaagatgccgcctatatcgaggggctgcgggcgctgctgccggctggctgccagatctggaaggcagttggagtcacaagtggtgagccgctgcccgccctcgactacccggccgatcgcctgctgctggatacgaaagtcggcagccagagcggcggcaccggtcaggcgttcgactgggccctgctggccaatctcgataaagccaagctgatgctggcgggcggcctcaatcccgacaacgccctgcaggcggcgcaagtgggctgcctcggccttgatttcaactccggggtagagagtgccccgggccagaaggatgcgcacaagctggcggccgcgtttgctgccctgcgcccaactgtgagcgcgccctgtgaggccgcccactga

SEQ ID NO: 277300 - DNA, 785 bp, Unknown
  Bacterial polypeptide expressing nucleotide sequence isolated from the Sargasso Sea
aaaaatgcttgatgatattataaaaaataagattaaagaaattgacttacttagagagtctcaaaagttgagttttgatgaagcatgtgatctcaaatattccaagaggagttttattggggcgcttcaatcaaaaattaatgatggcaagaatgctatcatagctgaaattaaacgatgttcacccagcaagggatatctaaacaagaatttaaatattgagaatatggcagatatttatgaaaaatctgatgcatcatgcatatctgttttaactgattctaaattttttaaaggctcaatagatgatctaattgttataaaacaaaaaactaatctacctgtacttcgcaaagattttatattggatgagtctcagttaattcaatcatgtatgattggttcagactgcatcctacttataattgcctgtctttcagaaaatcaattttcaaacctcctagaaaaatctaaaattctaggtcttgatgtccttgtcgaggtacatgatgaaaacgaacttaagttggcacttaaatataaatgtaatttgataggaatcaacaacagaaatcttgctacttttgaagttaatcttgatactagcaagaagttggcccgactagtagatacacacaatacattaattgttagtgaaagtggtatagacaataaaggaaccatagatgacctcaataagaatggtattaagacttttttaattggtgaaagcctgatagtatctccagcacccggtgatttattgaaaagcttggttggttgat

SEQ ID NO: 277301 - DNA, 1411 bp, Unknown
  Bacterial polypeptide expressing nucleotide sequence isolated from the Sargasso Sea
atgcaaaccagcaccgcaaaagccaacgttttaacccgtatcgtcgataccaaggccgcccatatcgccgcccttaagttgcgttttcctgaagacagcttaacccccaagatttcggaccgtagtttatttgccgccttaaaagccccgaaggcgggttatattttagagtgtaaaaaagccagtccatccaaaggcttaatccgtaaagactttgatgtcgaagccatcgcatcaatttatacccaatatgccgctgggatttcggtattaaccgatgagcaatttttccaaggagacatggactatatcccgaaagtacgggcaaaagtgagccaaccgattctgtgtaaagacttttttgttgacgaatatcaaatcaagttggccgctcatcagggcgccgatgcgattctgctgatgctttcagtgctcgatgatgagcgatatcagcaacttgccagcgaggcggccaagtatcaactcgatgtgctgacggaagtcagcaatgaggaagaactgaaacgcgccatcgccttaaacgcacctattattggcattaataaccgcaacttacgagatttaagtaccgatttggccaccacagaagcccttgcgccacacattggtagtgatcgcgtggtgatcagcgaatcgggcatttacactaacgagcaagtgcgccgcttaagtccgttagtcgatggcttcttagtcggtagctcgattatggccgaagaagacattgatttagcctgtcgtaaattgatcttcggtcacaataaagtctgtggcctcacccgccttgaagatattcaagcggcggccactgccggcgccgtgtatgcagggctgatttttgctgaaaaatcgccacgcgcactcagcaaagatgccgccaaacagttagtacatcaataccgcgccgctaacttgcccgccattgagtttgtcggcgtatttgtgaacagcacgcctgagttcatggcaagtatcgcccaagaatgtggcttagccgcgctgcaactgcatggcagtgagactgaactggaaattgccgagctaagccaattgctgcaacaggccgaactgaacactcaaatttggaaggccgtcagtgtcgatgcccaaagcggcgagcttgctgcgatgccaagaggggtgcagcgttatctgttggatagcaagaatgacgcaggttttggtggcacggggcaagcctttgattggcaactccccattgcccataaagccgaggccatgctcgcgggaggcctcaatgctgacaatgccgcccgagccaacgcccaaggattttacggtttagattttaactctggcctcgaaacagccccaggcattaagtcggcagaaaaaatccaagcagcatttagtcaattacggctctaga

SEQ ID NO: 277302 - DNA, 483 bp, Unknown
  Bacterial polypeptide expressing nucleotide sequence isolated from the Sargasso Sea
aaaaaattaaaaaaattgtagatctaccaattttaaggaaagattttataattgatgaatttcaaatttttgaaagcaggttcattggtgctgattgtatactactgatagtagcatgccttaatgatactgaactgaacaatttctataatatatctaaatctcttaaaatggatgctttaatcgaagtgcacaacgaagatgaattacaaagggctctaaaactcaaccctaaaatgattggtattaacaacagaaacttaaaaaatatgacagttactcttgatacttcaataaaacttgtgaaaaaaataccaaaaaatattttggttatttctgagagcggttttaaaaatcacagtgacttaaagcttatggagcagtatggtataaaaagttttttaatcggtgaaacatttatgaagtcaaagaacattcaatcgtctgtaaaaaatattctttttgggagaaataatgcctaaa

SEQ ID NO: 277303 - DNA, 472 bp, Unknown
  Bacterial polypeptide expressing nucleotide sequence isolated from the Sargasso Sea
acagcaattaaatcagtagtttcaatacctctccttagaaaagattttattatagatgaatatcaagtctatcagtcaaaattttatggtgctgatgcaatcctattgataggtaaagcattaggcttttctgaattgaaagatttatcctctatagccaatgaacaagatttagatatcttgtatgaagttcatgacgaggatgatcttgaaaaaggaattaagcttggcttcaatatttttggagtaaataatagaaaccttaatacttttactgtcgacaatgataatgtaataaaattctctaaattaattccagaaggttcaattttagttagtgaaagtggtattttatcaaaagaagatttggataatatagtcttaaatggtgttcgaaattttcttattggtgaatatttaatgaagtcagaggatagagtaggtcttcttcaggttcttttaaatgcttaaa

SEQ ID NO: 277304 - DNA, 220 bp, Unknown
  Bacterial polypeptide expressing nucleotide sequence isolated from the Sargasso Sea
aattttccaaatgcaattattggggtcaataacaggaaccttaaaacttttaatgttgatatacaaaactctataaaaatgagaaatttatttaaaaaagataatatctttatcgcggaatctggtattaaaaatcaaaaagatattgatacacttgtatctaatggtattcatgtttttctaattggcgaaagtctgatgaaaggggactttttttgaa

SEQ ID NO: 277305 - DNA, 779 bp, Unknown
  Bacterial polypeptide expressing nucleotide sequence isolated from the Sargasso Sea
taaaattattaagaaaaaaaaggaggaattagaatacttaaaaaagaatgtttcaatttctaaattagaaaaatccatttacttcaatagcaagaccaattctttagtgaacagtattaaggataaggatatatcaatcattgctgaacataaaagaaaatctccttcaaaatccgatattaaccatcttacctccactaaagatatagttcatggatatgaatatggtggagcagtaggaatttcatttttaacagaaaaaaacttttttgatggatcggtcgaggatttcaaagaggcaagaaaaataacaaaattaccccttcttaggaaagattttattattgatgaataccaaataatagaatcaaaatctattggtgccgatgctattttacttattgcagcatgtctaaatgatgctgatattttaaagctatcaaatcttgcaaaaagtattggacttgaagtattaattgagattcatgaaattgaagagttaaaaaagtcttcaatttcaaccatagatataattggtattaataacagagatttaaaaacttttgatgtaaacatagagacaagtttaaatttaatcaataaaataccatcaagttttacaaaaatatcagaaagtggtctgaatagttcagttgaaataaataaattaaaaaatcatggatttgatgggtttcttattggtgaaaggtttatgaaaagtcaatatccgggcaaggaattatcaaattttatatcaaaaattaaagatgaaagttaaa

SEQ ID NO: 277306 - DNA, 550 bp, Unknown
  Bacterial polypeptide expressing nucleotide sequence isolated from the Sargasso Sea
ctgcctggtctcagcatactaacagaacctgatttttttctaggcagtcttgattacttattagaggtaagaaaagtctgtcatttacctattttgcgaaaggacttcataattgatgaaatacaaattttggaatccaaagcttttggggcggattgcattctactgattgcttcaattttagataaaaataaaattaaagaattttatcaaatcgcaaaagaaaatgaattagatgttcttatagaagttcatgatgagaaggaagcagaaatagcaatggcagtttcacctgagcttttaggaataaataatcgagatttgaagacttttgatgtagatattaataattcgatcaaaatcaaaaaaatgctacccaaagatcaattaattatttccgaaagcggcatctattcaaaagacgacataaatgatctcaacgaagccaaaatttacaactttttggttggagaattttttatgagaaaaaaagaaccatataaggctgttcaagatttaatagctttatcaccaatatcatctcgataaa

SEQ ID NO: 277307 - DNA, 402 bp, Unknown
  Bacterial polypeptide expressing nucleotide sequence isolated from the Sargasso Sea
tgatagagtcaaaaaacctgggagctgactgtattcttattataattggcatgaattcgatcaaagaaaataaattaattgaatcaacggcgctagatattggattagaatgcatcttagaggtgcattctcttgaggaacttgaagcaactaagcatttttcttcaaatataattgggataaataatagagacctcaatacatttattactgataccgatactacaattaagctattgccccatatacccaaaaacaaaaccataatctctgaatctggattatcgaaaaagggtgaattagaaaggctggccgaactcggagtatcatcgtttcttgttggagaaagcttgatgaaacagaataatgtagaaaaagcaacaaaatcgttactggaataat

SEQ ID NO: 277308 - DNA, 592 bp, Unknown
  Bacterial polypeptide expressing nucleotide sequence isolated from the Sargasso Sea
catgaagatattagataaaatagttaaggataaaaaagaagaaataataaaactatctttaaaaaaccctatatcttcattagaaaacgaaaaattattttccagaaaatgtatatcactaaaagattctttattaagaagttctagtggtataatatgtgaatttaagagaaagtctccctctaataataatataaattacaaatcaactatttcagaagttgttagaggatatcaaaaggctggagctgctggattatcaatccttacaaataaaaaatattttgatggaaatattgaggatatcattgaaataagaaattttgcagaaattccaattttacgaaaagaatttataattagcgaatatcaaatatttgaagctaaatcgattggggctgacgcaatactattaattgcatcaattcttacctcagaagatattttaaattttagttccttagccaagagcctcggtcttgaagtattggtagagatacacttgtatgaagaattgaaaaaaatatcaggaaataatattgatataattggtgttaataatagaaatcttgacactttagagatcgattaa

SEQ ID NO: 277309 - DNA, 526 bp, Unknown
  Bacterial polypeptide expressing nucleotide sequence isolated from the Sargasso Sea
aatggagataagacgcaggccaccaaatcccacagtaagggtcgaaaatttagaatatgctgtccctcatagagaagcacaagcaaaaaatattctggaagaaattgtatggcacaaggatattgaaatcaagaattttaaaaaaatagtctctttagaagatctcatcaaaaagattgagaaacttcctactcccaaagatttttataaaaatattttggagtcaaaaataaaaccaggagttattgctgaaataaaaaaagctagtccgagtaaaggagttattagaaaagattttaaccctgaaaaaatagcaatttgttatgaaggattgggtgcatcatgtatctcagtacttaccgataaaaggttttttcaaggtagttatgaaatactcgaaactgtaagaaaatcaactaatctccctctactctgcaaagattttattatttctgcttatcagatttataaagcaagggtatctggtgctgatgcaatattacttaatcgctgcgattttaagtga

SEQ ID NO: 277310 - DNA, 278 bp, Unknown
  Bacterial polypeptide expressing nucleotide sequence isolated from the Sargasso Sea
aatggctagttatttagataaaattttaagtacaaaagtacaggaagtagagcaacagaaatctgtactaaatttagatgaaatcaaattgaggatagaagattgttctcctagaagaggatttatcaaagctataaaagaaaggaatgaaaaaggattgatatcagtaatagctgagattaaaaaagcttctcctagcaaaggaataataagagaagatttttctcctacggaaattgctcaacaatatgaaaataatggggcaacatgtttaagta

SEQ ID NO: 277311 - DNA, 487 bp, Unknown
  Bacterial polypeptide expressing nucleotide sequence isolated from the Sargasso Sea
attctagcccgaaaactaaccaatctaccaatcttaaggaaggattttatagttgacgaatatcaaatatttgaatcaaaatatttgggagctgacgcaatattattaattgcaacctgcttaaacaaaaatgaaattattaaattttcacatctcgctaaacaactaaacttagatgttttggttgaaattcattcaaaggatgaactagagaaggtttgtattgatagtgttgatataattggagttaacaatagaaatttaaaagatttttcagttaacatagaaaacagtatcgatattggtaaagaaatacctgattcatttgtcaaaatttccgaaagtggtttatataattctgaagaattaaaaaggttaattgagtttggttatgatggatttttaattggggaattatttatgagggaaagtgatccaggtgatgaattgagtaaactgataaatcaaataaaaggtgaagattaaa

SEQ ID NO: 277312 - DNA, 745 bp, Unknown
  Bacterial polypeptide expressing nucleotide sequence isolated from the Sargasso Sea
aatggagataagacgcaggccaccaaatccaacagtaagggtagaaaatttagaatatgctgtccctcatagagaagcacaagcaaaaaatattctggaagaaattgtatggcacaaggatattgaaattaagaactttaaaaaaatagtctctttagaagatctcattaaaaaaattgaaaaacttcctactcccaaagatttttataaaaatattttggagtcaaaaataaaaccaggagttattgctgaaataaaaaaagctagtccgagtaaaggagtcattagaaaagattttaaccctgaaaacatagcaatttgttatgaaggattgggtgcatcatgtatctcagtacttaccgataaaaggttttttcaaggtagttatgaaatactcgaaactgtaaggagatcaactaatctccctatactctgcaaagattttattatttctgcttatcagatttataaagcaagggtatctggtgctgatgcaatattattaatcgctgcgattttaagtgatgacgatttaatttatttaaagaaaatagctgataatttaaagatgagtgttcttgttgaggtccataacactaatgaattagaaaggattctaaagttaaaatcttttaatttgattggaataaataacagggacttaaagacttttaaaactgatttaaaaacatcaatagaattgatgcatacatatgcagatatatttttaaaacaaaatattatt

SEQ ID NO: 277313 - DNA, 889 bp, Unknown
  Bacterial polypeptide expressing nucleotide sequence isolated from the Sargasso Sea
aatggagataagacgtaggccaccaaatccaacagtaagggtagaaaatttagaatatgctgtacctcacagagaagcacaagcaaaaaatattcttgaagaaattgtatggcataaggacatcgaaattaagaattttaaaaaaatagtctctttagaagatctcatcaaaaagattgaaagccttcccgctaccaaagatttttataaaaatatcttggagtcaaaaataaaacccggagtaattgctgaaataaaaaaagctagtccgagtaaaggtattattagaaaagattttaatcctgaagacatagcaatttgttatgaaggattaggtgcatcatgtatctcagtacttaccgataaaaggttttttcaaggtagttatgaaatactcgaaattgtaaggaaatcaactaatctccctctactctgtaaagattttattatttctgcttatcagatttataaagcaagggtatctggtgctgatgcaatattattaatcgctgcgattttaagcgatgatgatttaatttatttaaaaaaaatagctgataatttaaagatgagtgttcttgttgaagtccataactctaatgaattagaaaggattctaaagttaaaatcttttaatttgattggaataaataacagggacttaaaaacttttaaaacggatttaaaaacatcaatagaattgatgcatacatttgcagatatatttttaaaacaaaatattattcccataagtgaatctggaattaattctgccgaagatttagaatcgcttagatctattggaatgaagggggtattaattggtgaaacttttatgagagaaactgatattgaacaatcgttcaagaaattatttaactcaatttaa

SEQ ID NO: 277314 - DNA, 668 bp, Unknown
  Bacterial polypeptide expressing nucleotide sequence isolated from the Sargasso Sea
aatagattttgagaaccttagagaaacaaattttaagaaaagtcttcagaataaagctgaagctattatcgctgagataaaaaaagcatctccaagcgcaggcattatcagtgataattttgatccagtttcaaaatcaaaagaatatgaatcttttggagcctcagcactttccattctcacagaggaagattattttttaggaaatattcagtatcttaaggatgttaaagcaactacaagtcttccaatcctgagaaaagacttcatagttgatgagtatcaaatatacgagtcaaagttgattggagcagattgtattttacttattgcttcaatactgaataacaaagaattaaaaaacttttcagaaactgctgaaagactcaagcttgattatattattgaagttcataatgaagaggaattacaaagagcacaacatttctcaaatgcaattattggagtcaataatagaaatttaaaaacttttgatgtcgatattaataactcagttgagctaaaaaaaatttttgaaggagaaaacatttttattgctgaatcgggcataaaaagtaaaaaagatatcgaataccttcaacaacataatattaatgtttttctaattggtgaaagcttaatgaaaggagatttttttgaaacttagg

SEQ ID NO: 277315 - DNA, 396 bp, Unknown
  Bacterial polypeptide expressing nucleotide sequence isolated from the Sargasso Sea
aatggagatccgccgtcgtccgcccaaccccaaggtgcgggttgcccatctcgaatacgcggtgccccacgacgacgatgaaccgcgtcacatcctcgagaagattgtctgggaaaaagatcgtgagatcgatgccgcccgcgagaaggttccccttgacaacctgaagcagcagattgccaagcttccccccaccaaggatttcctgggagcgcttcaggcggccgccacgaaaccagcggtgatcgctgaggtgaaaaaagcgagccccagcaaaggggtgatccgtgaggatttcgacccggtggcgatcgcaaaggcctatgccgctggcggtgcaagctgcctctcggtgctcaccgacaagaccttcttccagggcggctttgatgtcct

SEQ ID NO: 277316 - DNA, 745 bp, Unknown
  Bacterial polypeptide expressing nucleotide sequence isolated from the Sargasso Sea
atgaattcttatttagacaaaattatagaacagacaacatctacagttgaaatagataagaagaggattcctttacaagaattaagatcttatctttcagatttaactgaaacaaaaggttttttaaaatctataaagtctagacatgacgatgggcttgtttcggttattgcagagattaaaaaggcttctcctagccaagggttaataagagaaaattttaatcccgaagatattgctaaaagctatcaagcttctcaagctacttgcttgagtgtcttaacagatgctccttatttcaaaggatctttagaagacttagctgctgttagggaagttgttgagcttcctttgttaaggaaagattttattgttgatgaatatcaaatataccaaagtaggttttatggagcagattgtattttattaatagcttcttttttatctgatgcccaattaaaagaattttatgagattgcaaaagaattaagtctcgatgtgctcatagaagttcatgataaatcagagatggatagggctctaaaattagaatttcctttaattggaattaacaatagggatcttaaaactttcaaagtaaatctagagaccactattaatctctcaaaaggtctacaagataagataatcgtatcggagagtggaattaaaacaaaagaagatgtaaaagaaataatgtcttctggaacaaaaactttcttagtaggggagtctttcatgagag

SEQ ID NO: 277317 - DNA, 538 bp, Unknown
  Bacterial polypeptide expressing nucleotide sequence isolated from the Sargasso Sea
atgaaaattaattctttagataaaattataaataaaaagaaagaaaagttaaatttattaaaaaataaattcaaaatcaaagatttaaaatacaaaattgataaatttgacaaatatttagattttaaagaaaaattatattctaatttctcaaaaggtaaatactctataattgctgaaataaagaaagcaagcccgtctgctggagttattattgaagattataatcctgtagatatagctaaaatttatgaaaaaaataatgctacatgtttgtcagttcttactgaagaggatttttttagcggtagcttaaatcatatttctaaaattaaagagcaaataaatcttccaattttatgtaaggatttttttattgacaaatttcaaattccattagcaaaaagttttggagctgacgctatacttttgattgttgcagctttaaatcaagatcaacttgaagaactttataatactgctttagaatacaaaatgtctgtgattatcgaagttcacactatgaagaggcaaaaaa

SEQ ID NO: 277318 - DNA, 463 bp, Unknown
  Bacterial polypeptide expressing nucleotide sequence isolated from the Sargasso Sea
agcattcaatatcttatagatgtgaaagcaataacaaatcttcctatattacgaaaagactttattattgatgaatatcaaatctatgaatctaaacttattggcgctgactgcattttatttattgcaagtatattaactgataataaattaaaaatatttgcagagattgcagataatcttgaacttgattacatcattgaggtgcataataaagatgagctatctagggttaaaagttatagcaaagcaatcataggagttaataacaggaacttgaaaacctttgaagtagatatagaaaactctataaaactaagaaaagaattcaagcaagataatatctttgttgctgaatcaggtattaaaagtcaaaaagatataaataagctcatacaaaataatattaatgtctttctaatcggtgagagttttatgaaaggagatttttttgaagcttaga

SEQ ID NO: 277319 - DNA, 505 bp, Unknown
  Bacterial polypeptide expressing nucleotide sequence isolated from the Sargasso Sea
aatggaatataattctttagataaaatcataaacaaaaaaaaagaaaagttaaatttattaaaaaataaatttaaaattgaagatttaaattataaaattaataagtttgataaatttttagattttaaacaaaaaatatattctaactacttaagtggaaaattctctttaatagctgaaattaaaaaagcaagtccctctgctggtgtaattattcaagattacaatcctgtaaatatagctaaaatttatgagaaaaataaagcaacttgtttatcagttttaacagaagaagatttttttaatggtagcttagatcatatttataaaattaaagaaaaagtaaatcttcctatcttatgtaaagatttttttattgataaatttcaaattccattagcaaaaagttttggtgctgacgctatacttttaatagttgcagctttaagtcaaaatcaacttgaagaactttataatacagctttagaatataaaatgtctgta

SEQ ID NO: 277320 - DNA, 530 bp, Unknown
  Bacterial polypeptide expressing nucleotide sequence isolated from the Sargasso Sea
aaaagaatatgaatcttttggagcctcggcactttctattctcacagaggaagattattttttaggaaacattcagtatcttaaggatgtcaaagcaattacaagtcttccaattctcagaaaagattttatagttgatgagtatcaaatatatgagtcaaagttgattggagcagattgtattttactcattgcttcaatactaaatgacgaagaattaaaaaacttttcagaaatagcagaaagactcaagcttgattatattattgaggttcatgatgaggaggaattacaaagagtacaacatttctctaatgcaattattggagtcaataatagaaatttaaaaacttttgatgtcgatattaataattcagttgaactaaaaaaaatttttgagggagaaaatatttttattgctgaatcgggcataaaaagcaaaaaagatatcgagtacctcaaacaacataatattaatgtttttctaattggtgaaagcttgatgaaaggagatttttttgaaacttagg

SEQ ID NO: 277321 - DNA, 438 bp, Unknown
  Bacterial polypeptide expressing nucleotide sequence isolated from the Sargasso Sea
aatgaataatatgtcaattttaaaagaaatctgcaataataaaaaacttgaaataaagtcactaaaagaaaaattttcacaaagtaatttattagaaatatcaaaatatcaagaaaaacctagagggtttaaaactgctcttacatctaaagtaaataataatcaatatgctttaattgcagaagtaaaaaaagctagcccttcaagaggtattattaaggaagattttaatccaaaagatatagcagctagttactataaaggtggtgctacctgtttaagtgtattaactgaaattaaatggtttaaaggaagtattgattatttaatagaaataagtaaaaatattagtttgccaatattaagaaaagatttcattattgatccatggcaaatctatgaaagtagaagtataggtgcagattgtatattaataat

SEQ ID NO: 277322 - DNA, 625 bp, Unknown
  Bacterial polypeptide expressing nucleotide sequence isolated from the Sargasso Sea
ttggggaataataattatacattaataactgaaattaaaagagcatctccatcaaaaggcattattagggaagattttaacccaacggaattagcaatatcttatgaaaaaggtggtgcatcgtgtctgtctgttttaacagatgtaacgtattttaaaggttcaaatgattacatttctcaaattaagaatgttgtgtctctacccgttctaagaaaagattttatgattgaccctcttcaagtaatagagtcaaaaaaccttggtgctgactgcatccttattataattgggatgaactcaattgaagacaataagattattgaatctatggctttggatattggattagaatgtattttagaagtacattctcttgaagagctcgaagcaaccaagcatttctcgtcaaatataattggtataaataatagagacctcaatacctttcatactgatatcgaaaccacagtcaagcttttgcccaatgtgcctaaaaacaaaacggtaatatctgaatctggattgtcaagaaagagtgatttggaaagactagctaagcttggagtatcatcatttcttgttggagaaaagtttaatgaagcaacaagattcctgaaaaagc

SEQ ID NO: 277323 - DNA, 781 bp, Unknown
  Bacterial polypeptide expressing nucleotide sequence isolated from the Sargasso Sea
aatgcttgatagaatcatacaagacaaaaaagaagaggtaaaaatactcaaatctaatcagaagcatacaatcgctgatgtgttagatatggaatttgaaaaaagagaattttatagttctctaagaactaaaattgaatctggaaaaaatgccatcattgcagaattaaaaaaacattctccaagcaaaggtatgttaaatcaaaatttagatatagccgaattttctaaaatatatgaggattcaggtgcagcatgtatttctgtattgactgatcgaattcattttcatggaaaaatagatgatctcattacagcaaaaaaaagcgtaaagttgccaatacttagaaaagatttcataattgatgaatctcaaattatacaatctaaactaataggagctgactgtattttgttgattgttgcatgcttgtcaaaaacgcaattgcatgacctgcttacaattagtaaaaaacttaatatggaagttcttttagaagttcatgatagaaatgaattggatattgcgctagaatcagagtgtaaaattattgggataaataataggaatcttaaaacatttaatgtttctatcaatactagtcttgaactatgtgaggctattaacgatgatgacattatagttataagtgaaagcggaataaaggatatagaaaccattgaaaaacttaattctaagaatataaaatctttcttagttggggagagcctaataatgaatagcgaccctaaattattactaaaaactctagttggataa

SEQ ID NO: 277324 - DNA, 311 bp, Unknown
  Bacterial polypeptide expressing nucleotide sequence isolated from the Sargasso Sea
cagattgaagattatgtatctaaagcagaagcccataaatttagatgttcttattgaagtgcatgatgaggaagaactcgcaagaatttcaagatttaaaaatgctttgataggagttaataatagaaatcttaaaacttttgaagtagatcttacgaacgctgtcaggttaagaaaaaattataatgggaatcagatttttattgcagagtcaggaataaaatctaatgaagatatagagtatttagtatccaatgatataaatgtttttttaattggtgagagcttgatgaggggtaatcttttttgaa

SEQ ID NO: 277325 - DNA, 481 bp, Unknown
  Bacterial polypeptide expressing nucleotide sequence isolated from the Sargasso Sea
aatgaatccaactgttttagataaaataaaagcttacaaattagttgagatagaaaacgataagaaagttagatcattattagatattgaatcaattgcaaaatctgcgcccaaagttcggtctttttctaaagcgttatctaacacaaaaaattccgtatacagccttatagctgaaataaaaaaagcctcgccttcaaaaggcttaattagagaagatttcaaccccagtaaaattgccaaagcatatcaggcaggcggagctgcctgtctatccgttttaacagatactcccagttttcaaggagctaaacactacttggaagaagcaaagagtgtgacatctttgcctgcgctcagaaaagatttcatgtatgatatctatcaagttgcagaagccagagccctaaatgcagactgcatattaatcattatggcctctgtatctgacatgcaagcacaagaactgaagacgccgcac

SEQ ID NO: 277326 - DNA, 583 bp, Unknown
  Bacterial polypeptide expressing nucleotide sequence isolated from the Sargasso Sea
aatgagcattctggacaaaatcgtggctacgaagcaacaggagctggcggcactgccggtgacggcggtcacggtggattcgctacgcgcccaagtggcgacccgcggtggcgttcgggatttcacggcggctttggcggagccgcgtaccggcgatgtgggattaattgccgaggtgaaaaaggcttcgccttcggccggtatcattcggccggatttcgatccagtccaaatcgcgcaggaatacgaaacggccggcgcgagttgtctctcagtgttgaccgatgagcagtattttcagggttcgccagagtatctgcggcagattcgtgaggcggtggatgtgccgctgttgcgaaaggattttgtgatcgatgcccggcagattgccgaggccatcgaatggggcgcggacgcggtcctgttaattgtagcgatcctcgatgacgatcgcctgcgggagtttcatgaattggccgtgggcgccgggttatcggcgttggtggaagtacatgacgcggaagaattggcccgagccaaggcgctggaggcgccgttgattggcgtgaacaccgcgatctga

SEQ ID NO: 277327 - DNA, 547 bp, Unknown
  Bacterial polypeptide expressing nucleotide sequence isolated from the Sargasso Sea
tggatactttaatggaggcgcctctgcaatttctatcttgactgatgaaaaattttttcaaggtaagatagattatataactgctatcagagcgattattgatattcccatacttaggaaagattttattattgatgattatcaaatctatcaatcaaagttttatggagcggatgcaatactcttaattggtaaagctttatctttagaaaaacttatatcgctatttgaaatttcccaggaattgaatctcgatgtaatttatgaagttcatgatgaagatgattttaataaaggaattaaagcaggcgtaaaaatttttggagttaacaatagaaatttagaaaattttgatgtagataatgcaaatgttttaaattttattaataaaattccaaatgattctattttgattagtgagagtggcattagttctaagaatgatttggacatgctagtaaattcaggagtgaagaattttttaattggtgaatatcttatgatttcacccaacaaagaattaaccctaaacaatttattaaaatag

SEQ ID NO: 277328 - DNA, 448 bp, Unknown
  Bacterial polypeptide expressing nucleotide sequence isolated from the Sargasso Sea
gattatttaaaaaatgttaaaaagattacagccttaccaattttaagaaaagatttcatgatcgatgaataccaaatttatgaatctaaattgattggtgcagattgtattttattgattgcatcgattctttctgatcaacaaatcgaggattttgttaatattgctaaaaagttacagctcgattatttaattgaggtacacgatgaaaatgaacttcgcagagttgagcattttcaagatgctttaataggtataaacaacagaaatttaaaaacatttgaagtggatctagataattcagttcgcctacgaaatgcattcaaacaaaaaaatatctttatcgcagaatcaggtattaaatctagggaagatattgattatttaaaacttcataacattaaagtctttcttattggagaaagcttaatgaggggctctttttaaa

SEQ ID NO: 277329 - DNA, 769 bp, Unknown
  Bacterial polypeptide expressing nucleotide sequence isolated from the Sargasso Sea
atgtcaagttatctagatagaattatcaagaccaaggttgaagttgtagagcaacaaaaagctcttctaactctcagtgaaatgcaacataaacttgaaaatatttttccaactcgagattttataaagactattgaatcgagaaacatcgaaggtcaaatttctgtcattgccgaagttaaaaaagcatctccaagtaaaggtgttataagaaaagacttctctccaaaacaaattgctaaacaatatgaatccagtggagcaacttgcttaagcatcttaacggatgaagaatattttcaggggtcgatagactaccttatggacatacgctccgaagtcgaactccctcttttgagaaaagattttatcatcgacgaatatcagatttatcaaagcaggttatttggtgcagattgcatacttttgattgtatccattctttcagatgatcaacttggaaattttaagaacttagcagaaagtctaaaccttgacgttcttgtcgagatacatgatttaaatgaacttgaccgtattagaccttttgattttcccctcgtcggaataaataataggaatttaagtacttttgaagttgatttagagactaccaaaatcatagctgaaaagattccgcacagacttgtagtttcagaaagtggaattaaaactaagtccgatattaatcaaatagtctcttatgatgtaagaaactttcttgtaggtgaatccttcatgagagctcaagatcccggccaggaatgaa

SEQ ID NO: 277330 - DNA, 757 bp, Unknown
  Bacterial polypeptide expressing nucleotide sequence isolated from the Sargasso Sea
aatgaatattcttgatgaaatagtagcaaaaacaaaatctaaacttgaagaaaaaaaacaaggactatcgcttgaagaattgagttctaaaatagatttcgagaatcttaaagaaacaaattttaagaaaagtcttcagaataaagctgaagctattattgctgagattaagaaagcatctccaagcgcaagcattatcagtgaaaattttgatccagtcttaaaatcaaaagaatatgaatcttttggagcctcggcactttccattctcacagaggaagattattttttaggaaatattcagcaccttatggatgtcaaagcaattacaagtcttccaatcctgagaaaagacttcatagttgatgagtatcaaatatatgagtcaaagttgattggagcagattgtattttactcattgcttcaatactaaatgacgaagaattaaaaaacttttcagaaatagcagaaagactcaagcttgattatattattgaggttcatgatgaggaggaattacaaagagtaaaacatttctctaatgcaattattggagtcaataatagaaatttaaaaacttttgatgtcgatattaataattcagttgaactaaaaaaaatttttgaaggagaaaatatttttattgctgaatcgggcataaaaagtaaaaaagatatcgaataccttcaacaacataatattaatgtttttctaattggtgaaagcttgatgaaaggagatttttttgaaacttag

SEQ ID NO: 277331 - DNA, 778 bp, Unknown
  Bacterial polypeptide expressing nucleotide sequence isolated from the Sargasso Sea
aatgtcaatacttaacgaaatatataagtataagcttgattttgttgctcatcgaaaaaaaactttgccacaaaaaaaaattgaaaaaaaaatcataactaatagtgacactaattttacatttaaaaataaattaaattgtcaaagtaataaattttccattattggagaattaaagaaagccagtccctccttgggaaaatttgtaaaaagtaatgttaatttaattgaacttgcccaaatctatgaaaaatgtggggtatcatgtctttctatactaacagacgaaaaatacttcaatggcaaattaattgacctaaaacaaataaaaaaaaacacctctattcctattttgaggaaagattttattgttgatgaatatcaaatttatgaaagtaaattagttggtgctgattgcatattgataattctttcaatgcttaatcaaaaagacgctgtaagatttacagatcttgcaaatgagcttggcctggatacaataatagaagtacataatactgaggagttaaaaagatctgataaaattagctctgaaataattggcataaataacaggaatctcaacaattttattaccgatataaatacaacaattaagctatcaaaagaaataaagcaaagtgaaaagattttagtatctgaaagtggttttcaatctaagcaggatcttgataaaatttatgatgaaactggcataaataaatttttaattggtgagtatttaatgaaatcaaacaatctttcctctctcataaaa

SEQ ID NO: 277332 - DNA, 691 bp, Unknown
  Bacterial polypeptide expressing nucleotide sequence isolated from the Sargasso Sea
atcgcttggagaattgagttctaaaatagattttgagaaccttaaagaaacaaattttaagaaaagtcttcagaataaagctgaagctattatcgctgagataaaaaaagcatctccaagcgcaggcattatcagtgataattttgatccagttttaaaatcaaaagaatatgaatcttttggagcctcagcactttccattctcactgaggaagattattttttaggaaacattgagtatctaaaggatgtcaaagcaactacgagtcttccaattctcagaaaagacttcatagttgatgagtatcaaatatatgagtcaaagttgattggagcagattgtattttactcattgcctcaatactaaatgacgaagaattaaaaaatttttcagagacagcagaaagactcaagcttgattatattattgaagttcatgatgaggaggaattacaaagagtacaacatttctctaatgcaattattggagtcaataatagaaatttaaaaacttttgatgtcgatattaataattcagttgaactaaaaaaaatttttgaaggagaaaacatttttattgctgaatccggcataaaaagtaaaaaagatatcgaataccttcaacaacataatattaatgtttttctaattggtgaaagcttgatgaaaggagatttttttgaaacttag

SEQ ID NO: 277333 - DNA, 517 bp, Unknown
  Bacterial polypeptide expressing nucleotide sequence isolated from the Sargasso Sea
atgaaaaccttacaagatattattgaatataaaaagaaagaaattattggcgaaaaatcattattttcattttcagagataaatgacctcattttaaaaaataatcctccaagaggttttttacattcattaattactaacaaaaataaatttggaataatatctgaagtaaagaaggcatcgcctagcaaaggaataataagaaaagattttgatcatattaagattgctcaatcatatgaaaaaagcggagccacttgcctatctgttttaaccgacagtaatttttttcaaggcaaaaaatcgtatataaaagatattaaaatgaaaattgaccttccgatactaagaaaagattttataatagattcatggcaaataaaacaatcaagaatgatagatgcagattgtattttattaattttgtcatgtctttcatttaaccaggcaaaagaatatgaagatgaagcaatggatttgggaatggatgtaattattgaaacacatacagaaaaag

SEQ ID NO: 277334 - DNA, 790 bp, Unknown
  Bacterial polypeptide expressing nucleotide sequence isolated from the Sargasso Sea
aatgaattcttatttagacaaaattatagaacagacaacatctacagttgaaatagataagcagaggattcctttacaagaattaagatcttatctttcagatttaaatgaaacaaaaggttttttaaaatctataaagtctagacatgacgatgggcttgtttcggttattgcagagattaaaaaggcttctcctagccaagggttaataagagaaaattttaatcccgaagatattgctaaaagctatcaagcatctcaagctacttgcttgagtgtcttaacagatgctccttatttcaaaggatctttagaagacttagctgctgttagagaagttgttgagcttcctttgttaaggaaagattttattgttgatgaatatcaaatataccaaagtaggttttatggagcagattgtattttattaatagcttcttttttatctgatgcccaattaaaagaattttatgagattgcaaaagaattaagtctcgatgtgctcatagaagttcatgataaatcagagatggatagggctctaaaattagaatttcctttaattggaattaacaatagggatcttaaaactttcaaagtaaatctagagaccactattaatctctcaaaaggtttacaagataagataatcgtatcggagagtggaattaaaacaaaagaagatgtaaaagaaataatgtcttctggaacaaaaactttcttagtaggggagtctttcatgagagcttctgatcccggtgaagaattacagaaacttttcttttcttga

SEQ ID NO: 277335 - DNA, 525 bp, Unknown
  Bacterial polypeptide expressing nucleotide sequence isolated from the Sargasso Sea
aatgaaaactaatattctggataagattcgagattataaaattaatgaagttaaagagagaaaaataaattttcctcaaaatgatataattgatctaattaaagatgacaaaaaaacattgggttttcgagataagcttatcgaaaaaaatgataagggtttcccaggaattattgctgaagtaaaaaaggcaagcccttcaaaagggattattaaacaaaatttcaatcatattgatattgctaaagattatgaaactggaaatgcagcatgtatatctgtattaacagactttccatcttttcaaggaaaactagaatttttaaaagatataagagataatgttaatctacctttgcttagaaaagattttatgattgacccttatcaagtttatgaagcgaaactttatggcgctgattgcatattaataattatgaaaatggttgaacaagataaagccaatgaaatttataaaacagcaaaaaaaatcaatatggatgtaatttttgaggtaaataatga

SEQ ID NO: 277336 - DNA, 557 bp, Unknown
  Bacterial polypeptide expressing nucleotide sequence isolated from the Sargasso Sea
catgaatattcttgacgagattgttttaaatacaaaaactaaacttgaagaaaaaaaattacatcttccttttaatgaattactctcaaaaattaatcttgaggatatcgaacaaagtaatttcaagaaaaacttagaaaataaacctaaagcaatcatcgctgaaataaagaaagcttccccaagtgcaggattaattagagaaaattttgacgcaatttcaaaagctaaagaatatgaatcatttggtgcttcagctctctccattcttactgaagaagattattttttaggaagtatcgaacatcttaaacaagtaaaagctataaccaatctgcctatattaagaaaagattttattattgatgagtatcaaatttatgaatcaaaatttattggagctgattgtattttacttattgcttctatattgaatgaaaatgagttatttacattctctgaaacagcagaaaaactaggcttagattacatcattgaagtccatgatgaaaatgaaactttcagagtagaacaattttcaaacgcacttattgggg

SEQ ID NO: 277337 - DNA, 707 bp, Unknown
  Bacterial polypeptide expressing nucleotide sequence isolated from the Sargasso Sea
catgaacgttctcaacgacatcctcgatggagtccgcgaagacgtagcgcagcgcatgcaacgtgttcccctcgagcaagttaaagaacgcgcgagcatgaccagtgcaccgagagatcctcgcccgacgttgaccgatgaggacgtgtgcgtcatcgcagaggtcaagcgagagagcccgagtcgaggaccgctagcggagatcgctgatccggccgctcttgctcgcgactacgaagccggtggagcgcactgcatcagcgtcctgactgaggaacgtcgcttcggggggagtctggacgacctcgcatcggtgcgcgccgccgtcgacgtgccggtgttgcgcaaagacttcatcatcgggagctatcaactctgggaagcacgggcctacggcgcggacctcgtcctgctgatcgtggctgcgctcggacaagacgccctggtctcacttgtggagcgttctcgaaccttggggttgacaccactggtcgaggtgcacgacgagaatgagattgcccgagctctggacgccggggcagacatcatcggggtgaatgcccgagacctgaccacgctagaagttgacagaggtgtcttcgcacgcgtggcgcatctgatcccggattcctgcatcaagatcgcggaatcgggtgtccgggagccccatgacttgatcgcatacgccgaggcgggagccgacggcg

SEQ ID NO: 277338 - DNA, 510 bp, Unknown
  Bacterial polypeptide expressing nucleotide sequence isolated from the Sargasso Sea
gcgctgcagctatttcggtgttaaccgaagaagatttctttcaaggctcacctgaagacttgcaacaggttaaaaccgcagttgatttacccattttacgcaaagattttattattgacagttatcagatctatgcatccaaagcgatgggtgcggagtgtattctgttaattgcaagcatcttggatgatagccaacttcaagaattttcacagttggcagagcttttaaagttagattatattattgaagtacacacgatcgaggaactgaaacgggcagaacagttttccaaagctattattggcgttaataaccgtgacttgaggacgtttactgtagatttagaaaactctgtaaacctcaaagctgcttgctccacaaataatatctttgttgcagagtcaggtattaaaactttagatgatatgcattaccttgccagcaaaggaatcaataattttttgattggtgaaagcttgatgcgaggaagttttcatgcaacttagg

SEQ ID NO: 277339 - DNA, 703 bp, Unknown
  Bacterial polypeptide expressing nucleotide sequence isolated from the Sargasso Sea
aaaaagatttctttacgtgaagtaaaatcatacatttctgatctaaataaaacacaaggattttttgagtccattaaaaacagatgtgataaagggcttgtttcggtgattgctgagattaaaagagcatccccaagcaaagggttaatacgagaaaattttaaccctagagatattgctatttcttatcaagaacaccatgctacttgcttgagtgtgttaacagatactcctttttttaaaggctctcttgaagatttatcctccgttagagaagccgttgatcttccattgttgagaaaagatttcattgtggatgaatatcaaatctaccaaagtagattttacggcgctgactgtattttattaattgcttccgtcttaacagataaccaattgaaagaatttagagagattgctgaagaattaagcctagatactctagtagaagtacatgataaatctgagatggatagagtaagaaagttagattttaagttaattggaattaacaacagggatttaaagacattcaaagtaaatttagatactactattaatctttctcataacttaaaagatacaataattatttctgaaagcggaatacaatcaagagaagatatagaaaaaatacttacttccggaactaaaactttcttagtagggaagtctttcatgagagcctcagaccctggtcagg

SEQ ID NO: 277340 - DNA, 811 bp, Unknown
  Bacterial polypeptide expressing nucleotide sequence isolated from the Sargasso Sea
atgcaaggtatattaaaggaaatttatgattataaagttgatttaattaaccatctaaaagctaaagaaaatcaaaaatcattagaaagtaaaatattaagctcaaaaaaatctagaggattttttaataaaattaacaataacattaagtcaaaaaaaccatctatcatagctgaaataaaaaaagctagcccctcaaaaggagtaattaaagaaaactttataccagaaaaaattgcaaaaatatatcaactaggtaaagctagttgtatatcagtattaactgatagtaaattttttttaggttccaatgatgatcttataaaagtaaaaaatgttacgaatatccctatattaagaaaagactttatagtctcagaatatcaaatttacgaaagtaaaataataggtgcagattgtattttattaatttcagaaattttatctgaaaatcagattgatgagtatattaatttagcaaaaagtatagatttagatgtacttatagaggttcatagcgaagaaaattttataaagtttattaataagaaaaaagtattattaggagttaataacagaaatcttaaaaatatggttgttgatattaatcatgcactaaaagtggttaaaacaaacaataagaattatattatatgtgaaagtggtattaaatcttttcaacaatatcaaaatttaatatcacaaggatttaaaaacttcttaattggagagtattttatgaaaagcaaagacactaaaaaagaattattaaaatttacaaatgaaccactcaagattgaaagttattaaa

SEQ ID NO: 277341 - DNA, 871 bp, Unknown
  Bacterial polypeptide expressing nucleotide sequence isolated from the Sargasso Sea
cttgaatgcaaaaaggcatcgccctctaaaggtttaatccgtagcccttttgatttggatgaaatatctgccgcttatgctcaatatgccgattgtatttcagtactgaccgacgagaagttttttcagggcaattacgactatctggccaaagtgcgcgctaaagtaaaccagcctttgctgcacaaagactttattatcgacccttaccagatttacctcggccgtttgcagggttctgacgctgtgctgttaatgctctctgtgctgaacgatctggagtatctggaactggccaaggtagcgaaaagcttaaacctgaccatcttaaccgaggtcagcaacgaagcagaaacgctgcgtgctgtggctttaggtgcagagctgattggcattaataaccgtgacttgcgcaccttagataccaacttggaaaccagttttaaactggctcgtctgatccctaaaggtattactatcgtatccgaatcaggcatttacagttcacaacaagtacggcaactggccaaagtcgcagatgcctatctggtcggtagttcgttaatggcgcaagctgatttagccgacgcttgccgctcactgatccgtggcgaacataaagtctgtggtttaacccgcgcgcaagacagcaaagccgtgtatgacaatggggcttattttggtggcttaattttttatccaaaatcaccgcgttgtgtcacagtcgagcaagcgaaagccgtacaacaaggtgcgccagcactgcattatgtcggtgtttttgtcgacgaagccgtagagacagtagctgaaatggccaaggatttaaaactagctgcagtgcagttacatggtgatgaatccgacttgt

SEQ ID NO: 277342 - DNA, 537 bp, Unknown
  Bacterial polypeptide expressing nucleotide sequence isolated from the Sargasso Sea
ccgaccgcaattggtttcatggggaaccagaatttttggttgcggcacgcgcggctgtcaccctgccagttctacggaaggattttatgatcgacccgctacagattattgagtcacgcagcctcggggctgattgtattttgctgattatggcagctttagaagatgatgccgcggctgagcttgaatcgtgcgcttttgagtatgacatggatgttctgatcgaatgccatgacaacgccgagattgaacgagcaaaaaaactaaaatcgcggcttattggtataaacaataggaatttaaaaaccatggagatatcgcttgatgttggcgaagccatgttaccccatttaccggcagacaggattgcggttgctgaaagtggtctgttttatccggcagacctcgctcgaatggccgtcattggagcgcgctgttttttaatcggcgagtcactaatgcgggctgacgatgtagcgggggcaacagcagcgattcttgccaatccagttggcgtgcccgctcgagcgggctaac

SEQ ID NO: 277343 - DNA, 346 bp, Unknown
  Bacterial polypeptide expressing nucleotide sequence isolated from the Sargasso Sea
aatgtctgatattttaaaaaaaattactgactataaaaaaagtgaagtccttaaattgaaaaaaaaacaatcaataaaggattttgaaaaagaaataatcaatatcgaaaacccaagaaaattttttgatactctaatctcagcgagcaatgataaatttgggttaattgctgaagttaaaaaagcatcaccctcaaaaggaataattagaaaggactttaatcctgaaaaaattgctatagattatgaaaaagcgggagcggcatgtctttcagtgttaactgatcaaaatttttttcatggcaaaaaagaatatttggaaaaaattaaaaaaattgtagatcta

SEQ ID NO: 277344 - DNA, 364 bp, Unknown
  Bacterial polypeptide expressing nucleotide sequence isolated from the Sargasso Sea
ccaaccaagcgagactttgaaggcgcattagcagcaaccggcacgcagtttattttagaatgtaaaaaggcctcaccgtcaaaagggcttattcgtgaaccattcaatttagaggaaattacatcggtttataaaaagtacgcaacctgtatgagcgtactaacggatgaaaaatatttccaaggcagctatcagtaccttgagtatgtgcgcagccaagttgaacagccgcttatttgtaaagacttctttattgatgagtaccaagtttatttagcacgcttatctggtggtgatgccattttattaatgctctcagtccttgatgacgagcaatatttagcgcttcataaggtggctgatt

SEQ ID NO: 277345 - DNA, 543 bp, Unknown
  Bacterial polypeptide expressing nucleotide sequence isolated from the Sargasso Sea
aatgaacatacttgatgaaatagtagctaatactcgatccaaacttgaggataaaaagctaaaagaatcccttgatgatttattgtcaaaaattgacatggataatcttggaaagaatatctttaaaaaaggtttagaaggaaaaagtgaatcaatcattgctgaaataaaaaaagcatcacctagcgcaggattaataagcaaagactttgatccagtatcaaaagcaaaagaatatgaattatttggtgcctctgcactttcaattcttactgaagaagattactttcagggagatgttcaatacttaattgatgtaaaaaatgcttcaaatttgccaatactaagaaaagacttcattattgatgaatatcaaatttatgagtccaaacttataggagcagactgtattttattgatagccagcatattaaatgatgaagaattaaaaatattttcacaaattgctgacaaactctgtttagattacatcatagaagttcatgataaagatgagttactacgagttaaaatttctccaaa

SEQ ID NO: 277346 - DNA, 802 bp, Unknown
  Bacterial polypeptide expressing nucleotide sequence isolated from the Sargasso Sea
aaatattctggaagaattgtatggcacaaggatattgaaattaagaattttaaaaaaatagtctctttagaagatctcatcaaaaagattgaaaaacttcctactcccaaagatttttataaaaatattttggagtcaaaaataaaaccaggagttattgctgaaataaaaaaagctagtccgagtaaaggagttattagagaagattttaaccctgaaaacatagcaatttgttacgaagaattaggtgcatcatgtatctcagtacttaccgataaaaggttttttcaaggtagttatgaaatactcgaaactgtaaggagatcaactaatcttcctctactctgcaaagattttattatttctgcttatcagatttataaagcaagggtatctggtgctgatgcaatattattaatcgctgcgatcttaagtgatgacgacttaatttatttaaagaaaatagctgataatttaaagatgagtgttcttattgaagtccataactctgatgaattagaaaggattctaaagttaaaatcttttaatttgattggaataaataatagggatttaaagacctttaaaacggatttaaaaacatcaatagaattgatgcatacatattcagatatatttttaaaacaaaatattattcccataagtgaatctggaattaattgtgccaaagatttagaattgcttagatctattggaatcaagggggtattaattggtgaaacttttatgaaagaaactgatattgaacaatcattcaagaaattatttaactcaatttaat

SEQ ID NO: 277347 - DNA, 374 bp, Unknown
  Bacterial polypeptide expressing nucleotide sequence isolated from the Sargasso Sea
aatttatgaatctaaattgattggcgcagattgtattttattgattgcatcgattctttctgatcagcaaatcgaagattttattaatgtcgctcaacagctagagctggattacttaattgaggtacatgatgaaaatgagcttcgcagagttgagcattttgaagatgctttgatagggataaataacagaaatttaaaaacgtttgaagttgatctagagaattctgttcgcttaagaaatgtattcaaacaaaaaaatgtctttattgcagaatcaggaattaaatctaggaaagatattaattatttaaaacttaacaacattaaagtatttcttattggagaaagcttaatgaggggctctttttaaa

SEQ ID NO: 277348 - DNA, 847 bp, Unknown
  Bacterial polypeptide expressing nucleotide sequence isolated from the Sargasso Sea
aatggagataagacgcaggccaccaaatcccacagtaagggtagaaaatttagaatatgctgtccctcatagagaagcacaagcaaaaaatattcttgaagaaattgtatggcacaaggatattgaaattaagaattttaaaaaaatagtctctttagaagatctcatcaaaaaaattgagaaacttcctactccaaaagatttttataaaaatattttggagtcaaaaataaaaccaggagttattgctgaaattaaaaaagctagtccgagtaaaggagttattagaaaagattttaaccctgaaaaaatagcaatttgttatgaaggattgggtgcatcatgtatctcagtacttaccgataaaaggttttttcaaggtagttatgaaatactcgaaactgtaagaagatcaactaatctccctctactttgcaaagattttattatttctgcttatcagatttataaagcaagggtatctggtgctgatgcaatattattaatcgctgcgattttaagtgatgacgatttaatttatttaaagaaaatagctgataatttaaagatgagtgttcttgttgaggtccataacactaatgaattagaaaggattctaaagttaaaatcttttaatttgattggaataaataacagagatttaaagacttttaaaacggatttaaaaacatcaatagaattgatgcatacatatgcagatatatttttaaaacaaaatattattcctataagtgaatctggaattaattgtgccgaagatctagaatcgcttagatctattggaatcaagggagtattaattggagaaacttttatgagagaaact

SEQ ID NO: 277349 - DNA, 527 bp, Unknown
  Bacterial polypeptide expressing nucleotide sequence isolated from the Sargasso Sea
cctgggaaaaattgcaggagttggtgtcctttaccgctgtattcaaagaggagaatgccgggtgagtattccaaccgttctggagaagattctcgcgcgtaaggctgaagaagtcgccgcacgccgcgccgttgtttcgctggccgagcttgagcagcaagcccgtgctgccgatccggtgcgcggctttgccgaggcgctgataagccaggccaagcgcaagcagccggcggtgatcgctgaaatcaaaaaagcctcgccgagcaagggcgtgctgcgcgagcagttcgtgccagccgagattgccgagagttatcaggccggtggcgccacctgcctgtcagtgctgaccgatatcgatttctttcagggcgcggatcgttacctgcaggaagcccgtggggcgtgttcactgccggtgattcgcaaggatttcatgattgatccgtaccagatcgttgaagcccgtgccttgggtgccgactgtgtgctgttgatcgtctcgggcctggacgacgcgcagatgg

SEQ ID NO: 277350 - DNA, 514 bp, Unknown
  Bacterial polypeptide expressing nucleotide sequence isolated from the Sargasso Sea
catggagatccgccgtcgtccccccaaccccaaggtgcgggtggcccatctcgaatatgcggtgccccacgacgacgaggaaccgcgtcacatcctggagaagattgtctgggaaaaagatcgtgagatcgatgccgcccgcgacaaggttcccctcgacaacctgaagcagcagattgccaagcttccccccaccaaggatttcctgggggcgcttcaggcggccgccacgaaacctgcggtgatcgctgaggtgaaaaaagcgagccctagcaaaggggtgatccgtgaggatttcgacccggtggcgatcgccagggcctatgccgctggcggtgcaagttgcctctcggtgctcaccgacaaaaccttcttccagggcggctttgatgtcctggtgcaggtgcgtcaggccgttgacctgcctctgctctgccaggagtttgtgctgagtccctatcagctgttccaggccagggcggccggggctgacgcggtgctgctgattgctgcc

SEQ ID NO: 277351 - DNA, 592 bp, Unknown
  Bacterial polypeptide expressing nucleotide sequence isolated from the Sargasso Sea
atgaacatccttgatgaaatagttttaaaaaaaagaacaagagttaccgaggcaaaatcgattgtatccattgaagatattcaaaatcaattagcaaaatcatcttcactaaagagtaattttaaaaataacctagaaaatcaagcacaagcgataattgctgagattaagaaggcatcaccaagtgctggaattattgctgaagattttaatccaattttaaaagcgcaagaatatgaaaaaatgggcgcaagagcattatctatactaaccgaggaggacttttttcaaggaagtaataaggttcttcaagatgttaagaaagtcactaatctcccaatccttagaaaagattttatcattgatgattaccaaatatatgaatctaagttaataggtgccgattgtattttattgattacaagcatactctcagactctcaaattgaagagtatgtatccaaagcagaagcaataaatttagatgtgcttattgaagtgcatgatgaggaagagctcgccagggtttcaagatttcataacgcgctgataggtgttaacaataggaatctcaaaaccttgaagttgatct

SEQ ID NO: 277352 - DNA, 652 bp, Unknown
  Bacterial polypeptide expressing nucleotide sequence isolated from the Sargasso Sea
aatggcaattcctgaatatttatataaaatcattaattcaaaaaaaaaagaagtagaacatttagttagtcattttggaatttcttattttaaagaggaaattagtaaagagtctccttttaagtcaattttttacgcagtattagctaagccaggacttcagttaattgcagaggtgaaaaaagcctctccgtcaaaaggaattattaataatgactttgaaccattatcaattgctcagaactacgtaacaaaaggggcctctctattatcagtgttaactgaaaaaaaatattttttaggacatcctacttatatcaagcatataaaaaaaagtgttagtattcctattatacgaaaagactttatatttgagcccatacaagtatatgaaagtagagttcttggtgcggatgctatattattaattctttcaattctagatgatgataaagctcaagagttacttagccttgcaacatctattgggttagatgttattgtggaagttcatagtgaagaggaattgaaaagagctcttaaatataaagatattaaaattattggaataaataataggaatttaaatacttttgtagtcaatacagatatatccataaatctatttgaaagttatctgaaagaaaagtaa

SEQ ID NO: 277353 - DNA, 799 bp, Unknown
  Bacterial polypeptide expressing nucleotide sequence isolated from the Sargasso Sea
atgaccgacgtgctggaacgcatcgccgcttacaagcgagaggacgtcgccgcacgcaaggccgcccgctcacaggacgccatcgaaacgctggccctggccgcctccgcgccgcgcggcttccgcgacgccctggatcgcaaggtcgaggagaccggacgcccggccctgatcgccgagatcaagaaggccagcccgtccagggggctgatccgcgccgacttcgatccgcccgcgctggccctggcctaccaggccgggggcgcggcctgtctgtcggtcctgaccgacggtcccagcttccagggcgacgacgccttcctgggtcaggcccgcgccgccgtctcccttccctgtcttcgcaaggacttcctggtggatccctggcaggtggccgagagccgggcgttgggcgccgactgcatcctgatcatcctggcgatggtggatgacgccctggcggccgaactgctggcggaggccggacggttcggcatggacgccctgatcgaaacccacgacgaggccgagatggcgcgcgcctgcgcgctgggcggcgatctggtgggcgtcaacaaccgttcgctccgcaccttcgaggtcgatctggagacgaccgagcgactgtcgatgctcagcccggtcaaggcgttgctggtggccgagagcggcatcttcacgcccgaggacgtcgagcgcgtctcggccgcccacgcccaggccatactggtgggcgaaagcctgatgcggcaggccgatgtgaagccgccacccggacgttgctggccgcctgatgtcg

SEQ ID NO: 277354 - DNA, 433 bp, Unknown
  Bacterial polypeptide expressing nucleotide sequence isolated from the Sargasso Sea
tccctaccagctgttccaggcccgtgcggctggcgccgatgccgtgctgctgatcgccgcgattctcacggaccaggatctgcgctatctgcggaaagccgccgccagtcttggcctggacgttctggtggaggttcacgacgccggcgagctggagagggtgctgaccctcggtgaattcccgctgatcggaatcaacaacagggatctcaccagcttcgagacggatctgacgaccaccgagcgactgaccgaggactttcgacctcgtcttcagcagcagcaggttctgctggtcagtgaatccggcctcttcagccgctctgatctcgatcgggtccaggcagccggtgcaggagccgtgctggtgggggaggcgttgatgcgtcagcaggacgtgcagatggccctgaccacgctgatcggtggatag

SEQ ID NO: 277355 - DNA, 379 bp, Unknown
  Bacterial polypeptide expressing nucleotide sequence isolated from the Sargasso Sea
attgggtgcaacagagaatatattagatgaaatcttagctcaaaaagagcaagaagtagtaaccgcgaagcagcgactatcacttgaagaaatagagagtcaaattaagggttttccttcccctcggccgttcatagggtcgcttcgatcggtgatatccaacagggagccagcggttattgctgaaataaaaaaagcatccccttcaaaaggattgataagacctgaatttcatccatctgagcacgcgaaagactacgagactaacggagcaacatgtttgtcggttctcactgacgttgaatatttcatgggatctgatgattatttgtcggaggtcaaacaggccagttcgttaccagttttacgaaaagatttt

SEQ ID NO: 277356 - DNA, 594 bp, Unknown
  Bacterial polypeptide expressing nucleotide sequence isolated from the Sargasso Sea
catggagatccgtcgccgtccccccaatcccaaggtgcgtgttgcctatctggaatacgccgttccccacgatgacgagaagcctcggcacatcctcgaggaaatcgtctgggagaaggaccgcgaaatcgacgtggcgcgtcagaaggttccccttgaaaagctgagatcacaaattcaggacctgcccccaacgcgagatttcatcgcggcactccggtcatcgacgcggaagccggctgtgatcgctgaggtcaaaaaagccagtcccagcaaaggtgtgatccgtgaggatttcgacccggttgcgattgcccgcgcctacgccagtggcggcgccagctgcctgtcggtgctgaccgataagacgttcttccagggtggttttgaggttctggtggatgtgcgacaggccgttgatctccccctgctctgcaaggagttcatcctcagtccctatcagctttatcaggctcgggcagcaggcgcggatgccgtcttgctgatcgctgcaatcctcaccgaccaggatctgaattacctgcgtaaggcagccaaagcgctcagcctcgacgttcttgtggagggtcacga

SEQ ID NO: 277357 - DNA, 448 bp, Unknown
  Bacterial polypeptide expressing nucleotide sequence isolated from the Sargasso Sea
catggatgtcaaagcaattactagtcttccaatcctgagaaaggacttcatagttgatgagtatcaaatatacgagtcaaagttgattggagcagattgtattttactcattgcttcaatactaaatgatgaagaattaaaaaatttttcagaaatagcagaaagactgaagcttgattatattattgaagttcatgatgaggaggaattacaaagagtacaacatttctctaatgcaattattggagtcaataacagaaatttaaaaacttttgatgtcgatattaataattcagttgcactaaaaaaaatttttgaaggagaaaatatttttattgctgaatcgggaataaaaagtaaaaaagatatcgaataccttcaacaaaataatattaatgtttttctaattggtgaaagcttgatgaaaggagatttttttgaaacttag

SEQ ID NO: 277358 - DNA, 862 bp, Unknown
  Bacterial polypeptide expressing nucleotide sequence isolated from the Sargasso Sea
ccaccagtaagggtagaaaatttagaatatgctgtacctcatagagaagcacaagcaaaaaatattctggaagaaattgtatggcacaaggatattgaaattaagaattttaaaaaaatagtctctttagaagatctcatcaaaaagattgaaaaacttcctactcccaaagatttttacaaaaatatcttggagtcaaagataaaaccaggagttattgctgaaataaaaaaagctagtcctagtaaaggagttattagaaaagattttaaccctgaaaaaatagcaatttgttatgaaggattaggtgcatcatgtatctcagtacttaccgataaaaggttttttcaaggtagttatgaaatactcgaaactgtaaggaaatcaactaatctccctctactctgcaaagattttattatttctgcttatcagatttataaagcaagggtatctggtgctgatgcaatattattaattgctgcgattttaagtgatgatgatttaatttatttaaagaaaatagctgataatttaaagatgagtgttcttgttgaagtccataactcaaatgaattagaaaggattctaaagttaaaatcttttaatttgattggaataaataatagggacttaaagacttttaaaacggatttaaaaacatcaaaagaattgatgcatacgtatgcagatatatttttaaaacaaaatattattcccataagtgaatctggaattaattctgcagaagatttagaatcgcttagatctattggaatcatgggagtattaattggtgaaactttcatgagagaaactgatattgaacaatcgttcaagaaattatttaactcaatttaat

SEQ ID NO: 277359 - DNA, 478 bp, Unknown
  Bacterial polypeptide expressing nucleotide sequence isolated from the Sargasso Sea
aatgagtgatgcgctgacaaaaatctgcgccgataaacgcgatcatgtggcggccgccaaaaccgcgcaatctttggctgatactgagacagcagctcgacaagcgtctcctgtgcgtggattctataacgcgctcaagctgatggccgattccggccgatacgggttgattgccgaagttaaaaaagcctctccaagtaaaggtctgatccgggaaaatttcgatccaccggctatagcttccgcttatgaaaaaggtggcgcgacctgcatgtccgtccttaccgatatcccgtattttcagggagctgatgaacatctggtgaccgcgagctccgccgtctctctgccggtaatccgaaaggatttcatgatcgatccgtatcaggtgcccgaagcccgcgcccttggggccgactgcatattgctgatcctcgcggcactcgatgacggtttggcggctgaattggaggcagcg

SEQ ID NO: 277360 - DNA, 535 bp, Unknown
  Bacterial polypeptide expressing nucleotide sequence isolated from the Sargasso Sea
atggagataagacgcaggccaccaaatccaacagtaagggtagaaaatttagaatatgctgtgcctcatagggaatcacaagcaaaaaatatactggaagaaattgtatggcacaaggacattgaaattaaaaattttaaaaaaatattttctttagaagatctaataaaaaagattgaaaaacttcctgcccccaaagatttttataaaaatatcttggagtcaaaaataaaaccaggagtaattgctgaaataaaaaaagctagtccgagcaaaggagttattagaaaagattttaaccctgaagaaatagcaatttgttatgaaggattaggagcatcatgtatctcagtacttaccgataaaaggtttttccaaggtagttatgaaatactcgaaactgtaaggaaatcaactaatctccccctactctgcaaagattttattatttctgcttatcagatttataaagcaagggtatatggtgctgatgcaatattattaatcgctgcgattttaagtgatgacgatttaa

SEQ ID NO: 277361 - DNA, 790 bp, Unknown
  Bacterial polypeptide expressing nucleotide sequence isolated from the Sargasso Sea
aatgtcaatattaaaagaaatatatgagtataaaattgattttgtttcaaatcaaaaagaaataactcctcaatcaaaaattgaaagtaaattgaatataaacaatattaacttccctttctttgaaaaattaaatcatgaaaagggtcaaatatctattataggagaaataaaaaaagccagtccctctttaggtaaatttactgaagagaatataaatttaatcgattttgcaaaggcatatgaagacaataatatttcgtgcatctcagttttaacagacgaaaaatattttaatggaaaaattgatgatttaattgaaattaaaaaagaagtgcagctacctatactaagaaaagattttatagttgacgattaccaaatatatgaaagcaaattaattggggcagattgtatcttgatcatattatcaatgttaagtcaagatgatgcaaatagattcgctgaattagcaagtgaactaaagatggatagcattattgaagtgcatgactatgatgaactgcaaagagcgaaatctatgaattcaaatatgataggcataaataatcgaaatctaaataactttgtaactaatttagatactacaataaatttgtctcaacacttagataattgtaacaaactcataatctctgaaagtggctttcatagtaaaagtgacatttcaaaaatttatacaaccacgggtataagcaactatttaataggtgaatttttaatgaagtcagataatttacccgatcatattgcagaattattaaattaa

SEQ ID NO: 277362 - DNA, 784 bp, Unknown
  Bacterial polypeptide expressing nucleotide sequence isolated from the Sargasso Sea
atgagtatactagataacataaagcttacaaaattggaagaagtaagtaaattagacaaaaaaaaactagaatatgataaactaaacttccttaagtcttctcaaaacaatgggagatttgaaaactcccttaagaaattgggaagtaatgattatacattaataactgaaattaaaagagcatctccatcaaaaggtattattaggaaagaatttaacccaacgcaattagcgatatcttatgaaaaaggtggtgcatcgtgtctgtctgttttgacagatgtaacatattttaaaggttcaattgactatatcgctcaaattaaggatattgtgtctctacccattcttagaaaagattttatgattgaccctctgcaggtaatagagtcaaaaaaccttggcgccgattgcatccttatcataatcggcatgaactcaattgaagataataaaataattgaatctatggctttagacattggattagaatgtattttagaggtgcattctcttgaagagctcgaagcaacgaagcatttctcgtcaaatataattggtataaataatagagaccttaatacctttaacactgatatcgaaaccactgtcaagctattgcccaatgtgcctaaacataaaactgtaatatctgaatctggcttgtcaaaaaaaagtgatttggaaagactagccaagcttggggtatcatcatttcttgttggagagagtttaatgagacaagaagatcctgaaaaagcaacaaaattgctgatgaattaat

SEQ ID NO: 277363 - DNA, 811 bp, Unknown
  Bacterial polypeptide expressing nucleotide sequence isolated from the Sargasso Sea
atgagcctaactgttttagataaaataaaagcttacaaattggttgaaatagaaaacgataagaaagttaggtcattattagatattgaatcacttgcaaaatctgcgcccaaagttcggtctttttctaaagcgctatctaatacaaaaagttccgtatacagcctcatagctgaaataaaaaaagcctcgccttcaaaaggcttaatcagagaagatttcaacccaagtaaaattgccaaagcatatcaggcaggcggagctgcctgtctatcaattttgacagatactcctagttttcaaggagctaaacactacttggaagaagcaaaaagtgtgacatctttgcctgcgctcagaaaagatttcatgtatgatatctatcaagttgcagaagccagagccctaaatgcagactgcatattaatcattatggcctctgtatctgacatgcaagcacaagaacttgaagacgccgcactcttttggaatatggatgttcttttggaagtacatgatgagatcgagctagaacgcgctttaaatctcaaatcaaaattaatcggaataaataatagaaatttaaagacctttaaaacagatataaatacaactcgtaatctagcaaaattaattccagaaaatcgatttttgatttctgaatcgggactaaactcatccgaagaccttcgcgagctaaagtcacatggggcttctgcatttttgataggggaaagtttgatgagacaaaacgatgtggaagttgccacgcgagatttaatctcaaaaccagcaagtgagtataattaaa

SEQ ID NO: 277364 - DNA, 796 bp, Unknown
  Bacterial polypeptide expressing nucleotide sequence isolated from the Sargasso Sea
atggcaagctaccttgacgaaattataaaagataaacactcagtagtagctgaggaagagagaagagaaagcttagaagatatcaaatctaagattttagatttgcctccaagacgaggatttattcaatctatccagcaaagaaataataaaggccttgtatctgtaattgcagagataaaaaaggcttctcctagcaaaggtgtgatcagagagaacttctcacctgaaactatcgctaaacaatatgaggaaaataatgccacttgtctgagcatactgactgacaaaaaattctttcatggctctttagagtatctcaagaagataaggtctaaagtagagattcctcttttaagaaaagattttattattaatgagtatcagatttatcagagcaaattatatggtgcagattgtattttattaatcgtatctgctttatcagatagtcaacttaaggagtttaaaaatattgctgaaagcctagatctagatgttttggtggagattcataaccaagctgaactggaacgtattcaaccaatagattttccatttattggcattaataatcggaatttgagtacttttgaagtagaccttaaaactaccaaagaattatctctaaatttaaaagacaaactaatcgtctctgaaagtggaataaagacaagagaagatatagaccaaatactcaattacgatgttttaaactttctagtcggggagtcttttatgagagcagaaaatccaggaactgaactaagaaagctttttttctccccagaataaa

SEQ ID NO: 277365 - DNA, 715 bp, Unknown
  Bacterial polypeptide expressing nucleotide sequence isolated from the Sargasso Sea
aatggaaaattgcaaatcacttaacgcagatgaatctaataagttttcaagtaagcttattaatgaaaataataaaaaaatttctattattggtgaattaaaacgatcaagtccatcagcaggaaccataatcgataataatgttgatatcattaatatagctaaacaatatgaagaaaatggaatctcatgcatttcgatattaactgatgaaaaatattttaaaggatcaataaatgacttaatagaagttaaaaagcatatttcactgccaatacttagaaaagatttcattgtagatgaatatcaaatatatgaatctaaggtaattggggctgattgtatcttattgatattatccatattagatcacaaacaagcatgtttatttgaaaatatttcatctgaaataggactggatgttttaattgaagttcacaatgaagaagaaatgaaacgtgctgagttaatgaaatcaaagttagttggaattaataatagagacttgaatgatttcagtattgatatcaataattcaattaaaattagtaatattacaaaaagtaataagctgattgttgctgaaagtggaattaatactcgacaagatattgatcacataaagaacaattcatcaattgatacttttcttataggtgaatcattgatgcgatcacctaacttgagccagaatgtaaagaatcttataaattaa

SEQ ID NO: 277366 - DNA, 793 bp, Unknown
  Bacterial polypeptide expressing nucleotide sequence isolated from the Sargasso Sea
aatgaattcctacctagataaaattattgatcaaacaattttaactgttgaagcagataaaaaaaagatttctttaggggaagtaaaatcatatatctctgatttaaataacacaaaaggattttttgaatccattaaagatagatatgatcaagggcttgtttcggtgattgctgagattaaaagagcatccccaagccaaggactaatacgagaaaattttaatcctagagatattgctatttcctatcaagaacaccatgccacttgcttgagtgtcttaacagacactactttttttaaaggctctcttgaagatttatcctctgttagagaagtcgttgacctcccgttgttaagaaaagatttcatcgtggatgaatatcaaatctaccaaagtagattttacggcgctgactgtattttattaattgcttccgtcttgccagataaccaattgatagaatttaaagaaattgctgaagagttgaacctggatactctagtagaagtacatgataaatctgagatggacagagtaagaaagttagattttaagttaattggaattaacaacagggatttaaagacgttcaaagtaaatttagatactactattaatctttctcataacttaacagatagaataattatttctgaaagcggaatacaatcaagagaagatatagaaaaaatacttatttccggaactaaaactttcttagtaggggagtctttcatgagagcttcagaccctggtcaggcattggagcaattattttactcgtcctaa

SEQ ID NO: 277367 - DNA, 757 bp, Unknown
  Bacterial polypeptide expressing nucleotide sequence isolated from the Sargasso Sea
atgaatattcttgatgaaatagtagcaaaaacaaaatctaaacttgaagaaaaaaaacaaggactatcgcttgaagaattgagttctaaaatagatttcgaaaatcttaaagtaacaaattttaagaaaagtcttcaaaataaagctgaggctattattgctgaaattaagaaagcatccccaagcgcaggcattatcagtgataattttgatccagttttaaaatcaaaagaatatgaattttttggagcctcggcactttctgttctcacagaggaagattattttttaggaaatattcagcaccttatggatgtcaaagcaattactagtcttccaatcctgagaaaggacttcatagttgatgagtatcaaatatacgagtcaaagttgattggagcagattgtattttactcattgcttcaatactaaatgatgaagaattaaaaaatttttcagaaatagcagaaagactgaagcttgattatattattgaagttcatgatgaggaggaattacaaagagtacaacatttctctaatgcaattattggagtcaataacagaaatttaaaaacttttgatgtcgatattaataattcagttgcactaaaaaaaatttttgaaggagaaaatatttttattgctgaatcgggaataaaaagtaaaaaagatatcgaataccttcaacaaaataatattaatgtttttctaattggtgaaagcttgatgaaaggagatttttttgaaacttagg

SEQ ID NO: 277368 - DNA, 799 bp, Unknown
  Bacterial polypeptide expressing nucleotide sequence isolated from the Sargasso Sea
aatgaaaaataatatacttgataagataaaggactataaaattagtgaagtagaagagaaaaaattaaattttcctcaagaagacattgttaatttaattaaaaatattaatagcactcgaggttttcacagtaatctaaaagaaaaaaacaataatggttatccaggtattattgctgaagttaaaaaggcaagtccttcaaagggaataattaaacaggattttaatcatatagacattgcaaatgattatgaggctggaaatgcttcttgtatttcagtgttaaccgactttccttcgtttcagggtaaattagaatttcttaaagatattcatgagaatgttaatctgccattgcttagaaaagattttatgattgatccttatcaagtttatgaggcaagactttatagggctgattgtatattaataataatgaagatggtaaatcaagaaactgctaatgaattaaatgaaactgcaaaaaaaatgaaaatggatgttatttttgaagttaataatgaggatgaattgaacaaggctcttgatttaaaaccaaaaatgataggaattaataatagagatctaagaacatttaaaacagacttaaataatagtattaatctctcaaaaaaaattagcgatgaaatcacattaataagtgaatctggaatatcagaaaggaaagatattgagcttctgttagatcataatattagaaactttttaattggtgaaagcatcatgaaatcatcaaatataataaatgtattaaaatcatttactggtaaatattaa

SEQ ID NO: 277369 - DNA, 787 bp, Unknown
  Bacterial polypeptide expressing nucleotide sequence isolated from the Sargasso Sea
gatgcttgaaaatattatcaagaataaaattatagaagttgaaattcttaaatcttcaactaagtatgaattagataatatgataaaaacacaaagcaataactataattttctctctaggcttaaaaacgtatctcaagacggatcaaatccaataatagctgaaattaaaagaaaatccccaagtaaaggaaatttagattcaaaattggatgtaaaagtacttagtaaaatttatgaagacaacggagctgcatgcatatcggtgctaacggatgagaaattcttcggaggcaacattcgcgatttgcaattagttaaagaaaacgtgtctattcctgtattgagaaaagattttattatcgatgaatatcaattattagaatccaagtatcatggagcggattgtgttttattaatagttgcatgtttggaagaaaagaaactacggttattactccagatgtgcaaaaaacttaatttacaagctttggttgaagttcatacgttagatgagatgcatatagcattaaggaatgaagcatatttaattggaattaataatagaaatttaaaaacttttgaagttgatattaatacaacaacacaattatctaaactcaaaaatggtaatacaatgcttgttagcgagagtggactcaaagacagagaaacattagataagcttaaaaagtgtggcgttgatgcttttcttattggagaaagtttagtaacatctcaaaatccatcaaaaaacttgagagaactagtaggaaatgttaaataa

SEQ ID NO: 277370 - DNA, 889 bp, Unknown
  Bacterial polypeptide expressing nucleotide sequence isolated from the Sargasso Sea
aatggagataagacgcaggccacctaatccaacagtaagggtagaaaatttagaatatgcagtacctcatagagaaggacaagcaaaaaacattctggaagaaattgtatggcacaaggatattgaaattaagaattttaaaaaaatagtccctttagaagatctcatcaaaaagattgaaaaacttcctactcccaaagatttttacaaaaatatcttggagtccaaaataaaaccaggagttattgctgaaataaaaaaagctagtccgagtaaaggagttattagaaaagattttaatcctgaaaacatagcaatttgttatgaaggattaggtgcatcatgtatttcagtccttaccgataaaaggttttttcaaggtagttatgaaatactcgaaactgtaaggagatcaactaatctccctctcctctgcaaagattttattatttctgcttatcagatttataaagcaagggtatctggtgctgatgcaatattattaatcgctgcgattttaagtgatgatgatttaatttatttaaagaaaatagctgataatttaaagatgagtgttctcgttgaagtccataacgctaatgaattagaaaggattctaaagttaaaatcttttaatttgattggaataaataacagggacttaaagacttttaaaacggatttaaaaacatcaattgatttgatgcatacatatgcagatatatttttaaaagaaaatattatccccataagtgaatctggaattaattgtgccgaagatttagaatcgcttagatctattggaatcaagggagtattaattggtgaaacttttatgagagaaactgatattgaacaatcgttcaagaaattattcacctcaatataa

SEQ ID NO: 277371 - DNA, 757 bp, Unknown
  Bacterial polypeptide expressing nucleotide sequence isolated from the Sargasso Sea
aatgaatattcttgatgaaatagtagcaaaaacaaaatctaaacttgaagaaaaaaaacaaggagtatcgcttgaagaattgagttctaaaatagatttcgaaaaccttaaagaaacaaattttaagaaaagtcttcagaataaaactgaagctattattgctgagataaagaaagcatctccaagcgcaggcattatcagtgataattttgatccagttttaaaatcaaaagaatatgaatcttttggagcctcagcactttctattctcacagaagaagattattttttaggaaatattcagtatcttatagatgtcaaagcaactacaagtcttccaattctcagaaaagacttcatagttgatgagtatcaaatatatgagtcaaagttgattggagcagattgtattttactcattgcttcaatactgaatgacgaagaattaaaaaacttttcagaaacagcagaaagactcaagcttgattatattattgaagttcatgatgtggaggaattacaaagagtaaaacatttctctaatgcaattattggagtcaataataggaatttaaaaacttttgatgtcgacattaataattcagttgaactaaaaaatttttttgaaggagaaaacatttttattgcagaatcgggtataaaaagtaaaaaagatatagagtaccttcaacaacataatattaatgtttttctaattggcgaaagcttgatgaaaggagatttttttgaaacttag

SEQ ID NO: 277372 - DNA, 751 bp, Unknown
  Bacterial polypeptide expressing nucleotide sequence isolated from the Sargasso Sea
atgaatattcttgatgaaatagttgcaaataccaaagcaaaggtcagcattgctaaagaaaaggtttctttagatgagttagtatcaactataaattcaaagaatattgttaaaagtaaatttaaagcaagcctcaaagacaaagatcaggcaatcattgctgaaattaaaaaagcatcgccaagtgctggtgttataagtgaaagctttgacccagttacaaaagctaaagaatatgaggcctttggagcagctgctctttcaatacttacggaggaagattattttttaggaagtattcagtttcttaaggatgttaaagaagtttctgatttaccaatattgaggaaagatttcatagtagacatttaccaaatttatgaatcgaaattgattggttctgattgtgttctacttattgctagcattttaagcgatacagagctagatgaatttacaaaacttgctgacttacttggtcttgattacatcattgaagtgcacaatgaagaagagttaaggcgtgctcagaactttcctgaggctatgattggcgtaaacaatagaaatttaaaaacatttaatgttgatattgaaaattcaataagactcaagaaattatttacaaaaaataatcttttcattgccgagtcaggaattaaaggacaagaagatatcgataagctaattgagaatgatataaatgtatttttaataggtgaaagtctcatgaagggagattttgtttgaa

SEQ ID NO: 277373 - DNA, 757 bp, Unknown
  Bacterial polypeptide expressing nucleotide sequence isolated from the Sargasso Sea
atgaatattcttgatgaaatagtagcaaaaacaaaatctaaacttgaagaaaaaaaacaaggactatcgattgaggagttaatctctaaactagatttccaaaactttaaagaaagcaactttaaagaaagtcttgagaataaaactgaagctataattgctgaaatcaaaaaagcatcaccaagtgctggaattatcagtgaaaattttgatccaatcttaaaagcaaaagaatatgaatcttttggcgtttcagcgctttccattcttacagaggaagattattttttaggcaatattcagtatcttaaggatattagagctaatacgagtctcccaatcctaagaaaagacttcatagttgatgactatcaaatatacgaatcaaaactgattggcgcagattgtattttgcttattgcttcaatactaaatgatgatgagttaaaagtattttcagaaacagcagaaaaacttaagttagattatattattgaagttcataatgaagaggaattgcgtagaatagaaaatttctctagtgcaataattggagttaacaacagaaatttaaaaacttttgaagtggatataaataattcaattaaacttaaaaaaatatttaaagaggataatattttcatctcagaatctggaattaaaagcaaaaaagatatacaacaacttcagcaacataatataaatgtttttcttattggtgaaagcatgatgaaaggagatttttttgaaacttagg

SEQ ID NO: 277374 - DNA, 505 bp, Unknown
  Bacterial polypeptide expressing nucleotide sequence isolated from the Sargasso Sea
atgagtattcttaaaaaaattgttgaaaatacaagagagaacttgaaggcgaagaaagcaaaattatctttagaggatgtcaaatcttctttaaaagaactagatcttccaaaaagtaatttcaaaagtagcatctctaataaagatgaggctatcattgcagaaataaaaaaagcttcaccaagtgctggagttatttcagagaattttaaccctgttgaaaaagcaaaagaatacgaatctgttggagctgcagctctatcgattttaactgaagaggatttcttcctaggaagcattgattatttaaaagcagtcaaaaggacaacttctcttccaatattaagaaaagatttcatcattgatgaatatcaaatatatgagtcaaagctaattggagcagattgcattttattaattgcatcaattctttctgatttacaaatagaagaatttgtgaaaattgcagaaaaactagaattagattatctcattgaggttcatg

SEQ ID NO: 277375 - DNA, 403 bp, Unknown
  Bacterial polypeptide expressing nucleotide sequence isolated from the Sargasso Sea
aaagatttatttatgatgatttaccaaatatatgaatctaagctgataggagctgactgtattttattgattacaagcatactctcagacatgcaaattgaggattatgtttccaaagcagaagccatacatttggatgttcttatcgaagtgcatgatgaggaagagctcgcaaggatctcaaaatttcatgatgtgcttataggggttaataataggaatcttaaaacctttgaagtggatcttatgaatgctgttaggttaagaaaaaattatagtggtaatcagattttcattgcagagtcaggaataaaatctaatgcagatatagagtatctaatatccaatgatataaatgtttttttaattggcgagagcctgatgaggggtaatcttttttgaa

SEQ ID NO: 277376 - DNA, 445 bp, Unknown
  Bacterial polypeptide expressing nucleotide sequence isolated from the Sargasso Sea
catggagatccgtcgtcgtccccccaatccgaaggtgcgcgtggcgcatctggagtacgccgttccccacgacgaggaggaacccaagaacattctcgaaaagatcgtctgggccaaagaccgtgaagtggatgccgcccgcgagcgggtgccgctgcagaccctcaaacggcagatcgaggatctgccgccgacaagggacttcctcgctgccctgcgcgaggcccctgtgcagcctgccgtgatcgcggaagtgaagaaggcaagccccagcaagggggtgatccgggaggatttcgatcctgtcgcgatcgccgaggcctacgccgccggcggtgcacgctgcctgtctgtgctcaccgacaagaccttttttcagggcggctttgacgtgctggtggaaatgcggcaggcggtggatctgcctctgctgtgcaaggaattc

SEQ ID NO: 277377 - DNA, 588 bp, Unknown
  Bacterial polypeptide expressing nucleotide sequence isolated from the Sargasso Sea
tatgttagatgaaatcatcaaaaataaactcaaagaggtatctcaattaaagtcttcatttgatatctcaaagattgacgtcagcgcccctaaaaagccattttatgaaactcttttattacgtcaaggcaataaaaaaaattcaatcatagctgaaattaaaaaaagatctcctagtaagggtatactcgatagtagcctgaatgtatctgaaaaagccatacaatacgaagctggaggtgctagctgcctatcagttttgacagaaaaagattatttcaatggatcaattgatgatctactcgtcgcgaaaaaatcggttaatttacctgtattgagaaaagatttcattattgacccattacaagtataccagagtaaaatgataggagcagattgcattcttcttatcgtctctgccttatcacacaaactatttgaagaattatattctttggcaacatctttaaatttagatgtcttagccgaggtgcatgatattaacgaattaaactttgttaaatctttggggataaagttattgggcatcaataatagaaatttgaagacgtttgaggtagatattaa

SEQ ID NO: 277378 - DNA, 628 bp, Unknown
  Bacterial polypeptide expressing nucleotide sequence isolated from the Sargasso Sea
gcggaagtaaaaaaggcaagtccttcaaaagggattattaaacaaaacttcaatcatattgatattgctaaagattatgaaactggaaatgcagcatgtatatctgtattaacagactttccatcttttcaaggaaaattagaatttttaaaagatataagagataatgttgatctacctttgcttagaaaagattttatgattgatccttatcaagtttatgaagcaaaactttacggcgctgattgcatattaataattatgaaaatggttgaacaggataaagccaatgaaatttataaaacagcaaaaaaaatcaatatggatgtaatttttgagataaataatgaaagcgaattaaataacgctcttgatttagagcccaaaattataggaattaataatagagatttaagaacttttaaaacagatattaataatagcgttattctctccaaaaaaattgataaagaaattacattaataagtgagtccggaatatctaaaagagaagatattgaattactttttgaaaataatataaaaaattttctcattggagaaagcattatgaaatcatctaatataattaatgaattagaattattaactaggaaattttcatgaa

SEQ ID NO: 277379 - DNA, 802 bp, Unknown
  Bacterial polypeptide expressing nucleotide sequence isolated from the Sargasso Sea
atgaaaaataatattcttgataagatccgagattacaaaattaatgaagttaaagagagaaaaataaattttcctcaaaatgatataattgatttaattaaagatgataaaaaaacactggggtttcaagataagcttattgagaaaaacgataaaggtttcccaggaattatcgcggaagtaaaaaaggcaagcccttcaaaagggattattaaacaaaatttcaatcatattgatattgctaaagattatgaaactggaaatgcagcatgtatatctgtattgacagactttccatcttttcaaggaaaactagagtttttaaaagatataagagataatgttaatctaccattacttagaaaagattttatgattgatccctatcaagtttatgaagcaaaactttacggcgctgattgcatattaattattatgaaaatggttgaacaggataaagccaatgaaatttataaaacagcaaaaaaaatcaatatggatgtgatttttgagataaataatgaaagtgaattaaataacactcttgatttagagccaaaaattataggaattaataatagagatttaagaacttttaaaacagatattaataatagtgttattctctccaaaaaaatcgataaagaaattacattaataagcgagtccggaatatctaaaagagaagacattgaattactttttgaaaataatataaaaaattttcttattggagaaagtattatgaaatcatctaatataattaatgaattagaattattaactggaaaattttcatgaa

SEQ ID NO: 277380 - DNA, 757 bp, Unknown
  Bacterial polypeptide expressing nucleotide sequence isolated from the Sargasso Sea
atgaatatacttgatgaaatagtttcaaatactaagtccaaattagaatacagaaaaattcaaaaaagcttcgatgaaatatacttagaaatcagtaataaaacttttaaaaaaagtatcttcaaagaatctttgaccaataaaactgaagctataattgctgaaataaagaaagcatcaccaagtgctggaatcattagtaaagattttgatccagtttctaaggcaaaagaatatgaggcgttgggcgcatcagcactctcaatactgaccgaagaagattattttttaggaagtacagattatttaaaagctgtcagggaaatttccaatttaccaatacttagaaaagatttcattgttgatgagtatcaaatatatgagtcaaagttaattgaggctgactgtattttattaattgcaagcatcttgactgatagtgatctaaaaaatttctctaagattgcagataatataggtctagactacatcatggaagttcatgataaagatgagttacgaagagttagtgattttgaaaatgcaatcataggagtcaataatagaaacttaaaaacttttgaagttgatattaaaaactcaataacattaagacagcaatttgataaggacaatgtatttgtatcagagtcaggtattaaatctaaaaaagacattgaaaaacttaaagaaaataacattagtgtttttttaattggagaaagcttaatgaatggtgacttttttgaaacttaga

SEQ ID NO: 277381 - DNA, 271 bp, Unknown
  Bacterial polypeptide expressing nucleotide sequence isolated from the Sargasso Sea
gattgccttatggaggttcatgatcaagatgagctcaacaggattgaatcaattaaggatgtaattattggagtcaataatagaaacttgaaaacatttgaggtagacatcagcttatcagtaaaacttaaaaattcttatcggggcgacaatccatttgttgctgaatcaggaattaaatcacaagaagatttagattatcttatgaacaacggtataaataatttcttaatcggcgaaagccttatgagaaaaaatcttcaaatatgag

SEQ ID NO: 277382 - DNA, 728 bp, Unknown
  Bacterial polypeptide expressing nucleotide sequence isolated from the Sargasso Sea
agtttccgtaaaccaattagaaacaactgatttatttaattctcgtattaaatcgttaagcaaaattttagccaatacaacttttggagttattgcagaacacaaacgtcgttcgccttcaaaaaatataataaacttcaatcataatgtagaagatgtaacgcttggctatcaaaatgctggcgttagcggaatttctgttttaactgataaaaaatattttggtggaagtttagacgatttacatcttacaagagcttctgtaaatattccaattttgagaaaagagtttattattgatgaataccaaattttagaagcaaaagcttacggagcagatgttattttacttattgccgcggttttaactcgagaggaaatacaacatttatcgcaatttgctcaaagtttaggtttagaagttatgttagaagttcacaatagagaagaactagaaaaatcaataatgccaagtttaaacatgattggtgttaataatagaaacttaaaaactttcgaagtcagtttagattatagcaaagaattatcacaacatattcctgatgaatttgtaaaagtttctgaaagtggaattagctctgtagaagcggttaaagagttacaacaatttggttaccaaggctttttaatgggcgaacattttatgaaaaccgataatcctggaaatgaagcaaaactattcattcaaaaactgatttcaatatgaa

SEQ ID NO: 277383 - DNA, 536 bp, Unknown
  Bacterial polypeptide expressing nucleotide sequence isolated from the Sargasso Sea
tgcggcctgtttatcggtgctgactgacatcgatttttttcagggggcggatgagtacctgcaggccgcgcgaggcgcttgctcactgccggtgctgcgcaaggacttcaccttggacccgtatcagatttgggaagcgagggcgctgggcgctgacgccatcctgctaattgtcgcgtgtctagagttgccgcatcttaaagatcttcatgactgcgctctggaggcgggtctcgatgtgttggtagaggtccacgaagaggccgaactcgaagaagcgctgacattgggcggtgatctcgtcggcatcaataaccgggacctccacacttttgagaccagcctggacacaacctaccgtttactcgagcgcatacccgtcgaggtgcaggtagtgaccgagagcggattcagttccgcagcacaggtcttggagatgcgcgggcgcggggtgcacaccttcctgattggcgaaacctttatgcgggcggaagacccgggcgctgcactggcgactatgttcaccgatgactgat

SEQ ID NO: 277384 - DNA, 439 bp, Unknown
  Bacterial polypeptide expressing nucleotide sequence isolated from the Sargasso Sea
cttcgaaaagattttattcttgatgaatcacaaattatagaatctaaaattataggtgcagactgcattctacttattgtagcctgtctatcaaaattacaatttaacgagcttctcttatttagcaaagaattagatatggatgttcttgttgaagttcatgatagaaaagagctagatattgcgctagaatcagattgtaaaatcataggaataaataatagaaaccttaaaacattcgatgtttctattgatacaagtttagagctttgtgaaatcattaaagatgataatattattgttgttagtgagagtggaataaaggatatagaaactattaagaaacttaatgagaagaatataaaatctttcttagttggcgaaagcctcataaaacatagtgacccaggactactattagagagtttagttggatgaa

SEQ ID NO: 277385 - DNA, 722 bp, Unknown
  Bacterial polypeptide expressing nucleotide sequence isolated from the Sargasso Sea
atttgaaaaagaaataatcaatattgaaaccccaagaaaattttcagatattcttatctcagcaagcaatgataaatttgggttaattgctgaagttaaaaaagcatcaccctcaaaaggaataattagaaaagattttaatcctgaaaaaattgcaatagattataaaaaagctggagcggcatgtctttcagtgttgacagatcaaaatttttttcatggcaaaagtgaatatttggaaaaaattaaaaaaattgtagatctaccaattttaagaaaagattttataattgatgaatttcaaatttttgaaagcaggttcattggtgctgattgtatacttctgatagtagcatgcctaaatgatactgaactgaacgatttctataatatatctaaatctcttaaaatggatgctttaatcgaagtgcacaacgaagatgaattacaaagggctttaaaactcaaccctaaaatgattggtattaacaatagaaacttaaaaaatatgacagttactcttgatacttcaataaaacttgtgaaaaaaataccaaaaaatattttggttgtttctgagagtggttttaaaaatcacagtgacttaaagcttatggagcagtatggtataaaaagttttttaatcggtgaaacatttatgaagtcaaagaacattcaatcgtctgtagaaaatattctatttgggagaaataatgcctaag

SEQ ID NO: 277386 - DNA, 814 bp, Unknown
  Bacterial polypeptide expressing nucleotide sequence isolated from the Sargasso Sea
tctgaccaccaaacttgctgcgccgaccgtgctgaaaaagatttttgaccgcaaaatcgaagaggttgctgagcgcaagcagcagcggtcactcgcggagctcgaaaagctggcagccgacggggatcttgcgcggggttttcgccgggcactctctgatcgcgtcgcgcagggccagccggcagtcattgccgaggtgaaaaaggcgagcccgagcaaaggggtgatccgcgaggcgtttcatcccgccgaaattgccgccagctatgaggcgggcggtgcggcctgtttatcggtgctgactgatatcgatttttttcaaggggcggatgagtatctgcaggccgctcgcggcgcttgctcactgccggttctgcgcaaggacttcaccttggacccgtatcagatttgggaggcgagggcgctgggcgctgacgccattctgctgatcgtcgcatgtctagagttgccgcatcttaaagatcttcatgactgcgctctagaggcgggtctcgatgtattggtagaggttcacgacgaggccgaactcgaagaagcgctgacattgggcggtgatctcgtcggcatcaataaccgggacctccacacttttgagaccagcctggacacgacctaccggttactcgagcgcatacccgtcgaggtgcaggtagtgaccgagagcggattcagttccgcagcgcaggtcttggagatgcgcgggcgtggggtgcacaccttcctgattggcgaagcctttatgcgatcggaagacccgggcgctgcactggcgactatgttcaccgatgactga

SEQ ID NO: 277387 - DNA, 649 bp, Unknown
  Bacterial polypeptide expressing nucleotide sequence isolated from the Sargasso Sea
aatgaaaacattatctgacattatcgagtataaaaaagaagaggttaatataaaaaaaaagcttctgtctttaactcaaataaaagaagaaagctctaattatattccaactagaccctttttaaaaaaaatagaagccaataaatctgagattagtattatctctgaaataaaaaaagcgtcaccaagcaaaggtgttattagaagtgattttaatccagtagaaattggtcaaatttatgaaaaaaatggtgcaacatgcctctcaattttaactgataaaaatttctttcaaggtgatgacgaattcataaaagctgtaaaaagtaaagtatcgctccctgtcttgagaaaagactttattatagatgaatggcaaattgaagaatcaagatatttgggtgctgattgtatattattgattttatcatgtttgtcatttgatcaagcaagagagtatgaagaatatgcttttagtttagggatgaacgtaatagttgaagttcatgatttacaagaattagaacttgctaacaagcttaaagctaaactaattggaatcaacaatagaaatttaaaaacaatggatgttaatattagcacctcaataaatttaataaattacatagaaaaaagtaaaataccaatc

SEQ ID NO: 277388 - DNA, 703 bp, Unknown
  Bacterial polypeptide expressing nucleotide sequence isolated from the Sargasso Sea
atgacagacgtgcttaccaaaatatgtgatgacaagcacaaacacataaaaaaacagaaagctttttactccctagctaatcaagaagagtttgctagtaatgctgacaaaacacgtggatttgcaaaacggcttttagactcttctcaatctaacaaatatggagtgattgcagaaatcaaaaaagctagccccagcaaaggattaattagaaatgattttgatccagctataattgctgccgaataccaattaggtggggcagcatgtatgtcagttctaacagatgaaccttattttcaaggtaaagactcagatctagttgatgcaaggaaggtagtttcactacctgtacttagaaaggattttataatcgatagttatcaaatcccggaatctagaggtttgggcgccgattgtatattgttgattgtcgcagcacttgacagatctctggcaaaagaattggcagcacaagcacacgaatggaatatggatgtgttaattgaagttcataataaagacgaattagagaaggcgctattaatagaagcagatttgattggaattaataatcgaaacttaaaaacacttgaggtagacatttctacaactgaaaatttagcgcctcttgttccgaaagaaaaaattactgtctcggaaagcgggttatttacgactaatgatttgaagcgaatgtcta

SEQ ID NO: 277389 - DNA, 829 bp, Unknown
  Bacterial polypeptide expressing nucleotide sequence isolated from the Sargasso Sea
catggagatccgacgtcgtccccccaaccccaaggtgcgcgtggcgcacctggagtacgccgttccccacgatgaggaggaacccagaaacatccttgaaaagatcgtctgggccaaggaccgtgaggtggatgcggcccgcgatcgggtgccgttgcagaccctcaaatgtcagatcgaggatctgccgcccacgcgggattttctggcggctctgcgcgaggccccggttcagcctgcagtgatcgctgaagtgaagaaggccagccccagcaaaggggtgatccgcgacgactttgaccctgtggccatcgccaaggcctacgcggcaggcggggcacgctgcctctccgttctcacggacaagaccttttttcaagggggattcgacgttctggtcgaggtgcgccaggcggtggagctgcccttgctgtgcaaggagttcgtcctcagcccgtatcagttgttccaggcccgtgcggccggtgccgatgccgtgttgctgatcgcagcgatcctgacggatcaggatctgcagtatctgcagaaggccgctgctgctctgggactggatgtgctcgtcgaagtgcacgatgccgccgagatggagcgggtgctcaaccttgggggctttcccttgatcgggatcaacaaccgtgatctcgccagttttgagacggatctggccacaacagagcagctcatgaagcgtttcggcgagcgactgcgcgatcagggcgcattgctggtgagtgaatcgggtctgtttgagcggtcagacctggaccgtgtgcagaccgccggtgccgatgccgtgctggtcggcgaa

SEQ ID NO: 277390 - DNA, 737 bp, Unknown
  Bacterial polypeptide expressing nucleotide sequence isolated from the Sargasso Sea
catgagcagtgacatcctcaacaagatcgtggccgtcaagcacgaagaagtggccgccgccaaaaagcgcctgccctttgacgccatgcgcgccgacgccgagagccgcgtgctcacccgcgactttgaaggcgcactgcgcgccaagatcgccaagggccaggcggcggtgattgccgaggtcaagaaggccagccccagcaagggcgtgctgcgtgccaacttcgagccggccgacatcgctcagagctatatggaaggcgatggcaaggtcagcgcggcctgcctgtcggtgctgaccgaccgccagttcttccagggccagcccgactacctcaagcaggcccgcgccagcactacgctccccgtgctgcgcaaggacttcatggtggacgcgtaccagatctacgaatcgcgggccatgggcgccgatgccgtgctgctgatcgccgcctgcctggacgatgcccagatggtcgacttcgaggccatcgcccgtagcctggacatggcggtgctggtggaggtgcacgaccgcgccgagctggagcgcgcgctgaagctcaagaccccgctggtcggcatcaacaaccgcaacctgcgcacgttcgaggtcacgctggacaccaccttgggcatgctcaaggatgtgcccgctgaccgcctgctggtcaccgagtcgggcatcctgaagcctgccgacgtgaagaccatgcgcgacgcgggcgtgcatgctt

SEQ ID NO: 277391 - DNA, 808 bp, Unknown
  Bacterial polypeptide expressing nucleotide sequence isolated from the Sargasso Sea
atgaaaaatgtcttattagaaatttgcgaacaaaaactgatacacatagagaggtgcaaacaacaaaaaacagaaaatcaattactgaacgagattaagaacgcatcaaagcaaagaggttttttaaaagcgttagaacgaaaaagtaaacatggttacgggcttattggtgaaataaaaaaagcatctcccagcaaaggccttataagaaaagaattcgatgtagtacaccttgcaaaagcctatgaggaagggggagctgcctgcctatcggtccttacagatattccatactttcaaggagacgataagttcctggttgcggctagagagtctacttcgcttccggtcctgaggaaagattttatgctagacacttatcaagtaatagaatcccgtgttctaggcgcagattgcattttacttataatggcagcattagaggacgatgcagcccaaaatttagaggattgtgcgattgagctaggaatggatgttcttgttgaaatccataatgaagacgaacttcatcgcgcgcttaaactaaaaacgaagcttcttggcgtaaataatcgtaatttaaagacaatgattacagacatcggcatgacagaaaaacttgcttctcttgcacccaccgaaaaaatcttaatttcagaaagtgggttacaaactcgggcggatttagacagaatggcgagtgcaggagcgcgatgttttttaatcggggaatcgataatgaaacagaaagatatagagaaggctacgaagttacttttaaagaaatcaacccaagaaaacgtttaag

SEQ ID NO: 277392 - DNA, 620 bp, Unknown
  Bacterial polypeptide expressing nucleotide sequence isolated from the Sargasso Sea
tcttattcgtcaagaatcggggatcatagctgagataaaaaaagcttcaccaagcgcaggattaattgctgaagcatttgatccaattaagaaagctaaagagtacgaagaaattggtgctattgcactttctgtactcactgaggaagacttttttatgggctgtgatcaagatctgatagatgtaagattaaattctgcactgcctatcctgaggaaagactttattatcgatgaatatcaaatttatgaatccaaaattattggtgctgattgtattttgctgattgcttcaatattaaatgatgctcaacttaatgaatttacaaaattagctgacactctcaatttagattacttaatagaggttcatgatgccgatgaattaaagagaattgagaactttgatgatgctattgtcggcattaataacagaaacttaaaaacttttgaagttaaccttgaaaattcaatcacactaagaaaaagcttcaataaagataatatttttatatctgaatcaggcattcaaagcaaggcagacatcgaatatttgcagagaaataaaatctcatattacttaatcggcgaaagtttgatgcgcaatgcatttaattaaa

SEQ ID NO: 277393 - DNA, 760 bp, Unknown
  Bacterial polypeptide expressing nucleotide sequence isolated from the Sargasso Sea
cgaggagctagcggtcttgccgactgcagaagtgacgaaggattcactgtcggcagccttggctgaacggggcggagcgcgggatttcatcgcagccttggcggcgccgcgcgcgggggatgtggggctcatcgccgaggtcaaaaaggcgtcgccctcggccggtgttattcgggcggactttgatcctgtgaccattgccaaggaatacgcggcggccggagcgagttgtttgtccgtgctcacggatgaaaaatattttcagggttcaccggagtacctgcggcaaattcgtgcggcggtggatttgcctttgttgcggaaggattttgtgattgatgcccggcagatcgccgaggcggtggagtggggggcggatgcggtgctgttgattgtggcgattcttgatgatgcccagttgcaggagtttcacgaactggcaacgggcgcaggaatagcagctctggttgaggtgcatgatgccgacgagctgcgccgggctagtgcgctgaaagcaccgttgattggcgtaaacaatcgtaacctgaaaaatttcacggtggatctcggcaccacggaatcgcttgcggctcaattggatttgtcccaaacgctgctggtgtccgaaagcggcatacatacgcgggtggatgtggagcgccttacgactgccggagcaaaggcaattcttgtcggtgaatcgctgatgcgcgaggcggatatcgccgcaaaggtgcgcgagttgggagggcaggcatga

SEQ ID NO: 277394 - DNA, 720 bp, Unknown
  Bacterial polypeptide expressing nucleotide sequence isolated from the Sargasso Sea
gttgggctcaaaagttactattttagaagaaatcatagatcataaaaaacaagaggtatcaattgccaagcagcacctgtcattagaagatattgagaatcaattgaaggattgccctaatcctcgcccttttatctcaccgctaaggtctgcggtagcgaatcaggaacctgctgttatagccgaaattaaaaaagcatctccatcaaaaggtttgataaggtcggactttaatccaagagagcatgctaaagattatgaggttagtggagcgacttgtttatcagttcttactgatgctagatatttcaaagggtctgacagatacctaactgaagtaaagcaagtaagcttattacctatcttacgaaaagacttcattattgatccttatcaggttgcacagtcaaagttaatgggagcagattgtattttgcttatcgttgcagcattgtctcggtcgcaactccaagagttggtggcttatgcagatcaaatttctatcgatgtattgattgaagtccataataaggcagagcttgattgtgcgttggatttggataacgacttaattggtgtgaataatcgaaatttacataattttgaaacttcgctgcaaacaactcttgaacttaaaaagtatattcccgaggacaaattagtgataactgaaagtggtattcactccgtaaaggatgtcaaattgatgaatgcaaatgg

SEQ ID NO: 277395 - DNA, 714 bp, Unknown
  Bacterial polypeptide expressing nucleotide sequence isolated from the Sargasso Sea
aagaaataattaatgttaaaagcccaagaaaattttcagacaccctaatcacagcgagcaatgctaaatttgggttaattgctgaagttaaaaaagcatcaccctcaaaaggaataattagaaaagatttcaatcctgaaaaaattgcaatagattatgaaaaagcaggagcagcatgtctttcagtgttgactgatcaaaatttttttcatggcaaaaatgaatatttggaaaaaattaaaaaaattgtagatctaccaattttaagaaaagattttataattgatgaatttcaaatttttgaaagcaggttcattggtgcagattgtatattactgattgtagcatgcctaaatgatactgaactgaacgatttctataatatatctaaatctcttaaaatggatgctttaattgaagtacacaacgaagatgaattacaaagggctctaaaactcaatcctaaaatgattggtattaataatagaaacttaaaaaatatgacagttactcttgatacttcaataaaactagtaaaaaaaataccaaataatattttggttgtttctgagagtggttttaaaaatcacagtgacttaaagcttatggagtattatggtataagaagttttttaatcggtgaaacatttatgaagtcaaagaacattcaatcgtctgtagaaaatattctatttgggagaaataatgcctaaa

SEQ ID NO: 277396 - DNA, 822 bp, Unknown
  Bacterial polypeptide expressing nucleotide sequence isolated from the Sargasso Sea
catggagatccgtcgtcgtccccccaatccgaaggtgcgcgtcgcgcatctggagtacgccgttccccacgacgaggaggaacccaagaacatccttgaaaagatcgtctgggccaaggaccgtgaagtggatgccgcccgcgagcgggtgccgttgcagacccttaaacggcagatcgaggatctgccgccgacacgggacttcctcgcttccctgcgcgaggcccgtgttcagcctgccgtgatcgcggaagtgaagaaggcgagccccagcaaggggatgatccgtgaggattttgatcccgtcgccattgccaaggcctacgccgccggcggtgcacgctgcctgtctgtgctcaccgacaagaccttttttcagggcggcttcgacgtgctggtggaggtgcggcaggcagtggatctgcctttgctgtgcaaggaatttgttctcagcccttatcagctgttccaggcccgcgcggccggtgctgatgccgtgctgctgattgcagcgatcctcacggatcaggatttgcagtatttgaagaaggccgctgccgctctgggtcttgatgtgctggtggaggtgcatgacgccgccgagttggagcgagtgctcaacctcgggggcttcccgttgatcggcatcaacaaccgtgatctcaccagcttcgagacggatctggccaccaccgagcagctcatggaacgcttcggcgaccgtcttcaggatcagggcgcgttgctggtgagtgagtcaggcctctttgaccgttctgatctggaccgggtcaaagccgctggtgccgatgccgtgctggt

SEQ ID NO: 277397 - DNA, 726 bp, Unknown
  Bacterial polypeptide expressing nucleotide sequence isolated from the Sargasso Sea
ccaggggctttcggcacgcgctttctgatcgtgtggcgcagggccaggcggcagtcattgccgagatcaaaaaggcgagccccagcagaggagtgattcgcgaggagttccatcccgccgagattggcgccagctatgaggcgggcggtgcggcctgtttatcagttttgaccgacatcgatttttttcaaggggcagacaactacttgcaggccgctcggggcgcctgctcactgccagtattacgcaaggattttaccctcgacccatatcagatttgggaagcaagggcgcttggcgccgatgctatcctgctgattgtggcctgtctggagttaccgcatctcaaggatcttcacgactgtgcctgtgaggcagggctggatgtgctggtcgaggtccacgacgagacggagctcgacgaggccctgacactgggtggtgatctcatcgggatcaataaccgcgatctgcatacgttcgagacgagtctcgatacgacctacggattattagagcgcatacctgccggagtgcaggtggtaaccgaaagcggattcagttccgcagcacaggtcttggagatgcgcgggcgtggggtgcacacctttctgattggagagacctttatgcgggctgaagacccgggcgttgctctggcgaccatgttcaccggtgactcatttggcagactagttggacagcggagagatttcggggagtaaa

SEQ ID NO: 277398 - DNA, 728 bp, Unknown
  Bacterial polypeptide expressing nucleotide sequence isolated from the Sargasso Sea
catggagatccgtcgtcgtccccccaatcccaaggtgcgcgtggcgcatctggagtacgccgttccccacgacgaggaggaacccaagaacattctcgaaaagatcgtctgggccaaggaccgtgaagtggatgccgcccgcgagcgggtgccgttgcagaccctcaaacggcagatcgaggatctgccgcccacacgggacttcctcgctgcactgcgcgaggcccatgttcagcctgccgtgatcgctgaagtgaagaaggcgagccccagcaagggggtgatccggggggatttcgatcctgtcgccatcgccaaggcctacgccgccggcggtgcacgctgcctttctgtgctcaccgacaagacctttttccagggcggcttcgacgtgctggttgaggttcggcaggcggtggatctgcctttgctgtgcaaggaattcgtcctcagcccttatcagctgttccaggcccgcgctgccggtgctgatgccgtgctgctgattgcagcgatcctgacggatcaggatctgcagtatctgaagaaggccgctgccgctctgggtcttgatgtgctggtggaggtgcatgacgccgccgagctggagcgggtgctcaacctcgggggcttcccgttgatcggcatcaacaaccgtgatctcgccagcttcgagacggatctggccacgaccgagcagctcatggaacgcttcggcgaccgtcttc

SEQ ID NO: 277399 - DNA, 679 bp, Unknown
  Bacterial polypeptide expressing nucleotide sequence isolated from the Sargasso Sea
atgataacaaaacttgaagaaatcataaactataaaagagaagaatttatttttagaagaaatcaaacaaataacttttacctccaatctaaaattgacaaacaaacaaaaccaagaagatttatagaaaaccttaataattcaaataaatttaatcttatagcagaaataaaaaaagcgtcaccaagcaaaggaataataagaaaaaattttgatccactagagcttgcaaaatgttatcaaaatggaggtgcctcatgtttatctgttttaaccgatgaaaaatattttcaaggaaataataaatatattggcattataaaaaaagaaatagatttaccaattctgagaaaagattttatagttgatccttggcaaataaaagaatctagatcattaggtgctgattgtatattgttgataatggcagcgctaaaattagaagaggcaattttattagaaaaagaagccatagatttaggtatggatgtacttattgagacacatactcacgaagaaattaaaatggcaaataagcttaaatccaaattagtaggtgttaataatcgaaatttaaaaactatggaagtagatattaataatactttgaaattaaaaaaatttattaatccagacaagattcttgtagctgaaagtggactaaaaacacactcagatc

SEQ ID NO: 277400 - DNA, 737 bp, Unknown
  Bacterial polypeptide expressing nucleotide sequence isolated from the Sargasso Sea
tatgtcattacatgagttgcaccatcaagcagctgctgcacctgcgccagccggctttgctgctgcgctgaaagcagcgtcggtgtctggctatggcctgattgctgagcttaaaaaagcctctccctcaaagggtcttataagggatgactttgatatcccctcattggcgcgcgcttatgcggatggtggcgcaagttgtctgtctgttttaacagacaagcactattttcagggcgatgatgcatttcttatggcagcacgcactgttagcagtctgcctgttctgcgcaaagatttcatgattgacccttttcagattgttcattcccgtgcattaggcgcggattgcattctgcttatcatggctgccttatcagatgcacaggcacaagaacttgaagcagcagcgcatgagctaggtatggatgttttgatcgagatccatgacagtactgaacttgaccgagccatccagctgacctcacctctgatgggcattaataaccgtaacctgaaaacaatggaaatctcgcttcaggttgggctggacatgctgcctcgcctgcctaaggaccggattgctattgctgaaagtggcttgttcacagctgatgatctagcactcatggcggccaccggcgcccgctgttttctgattggtgagtcgcttatgcgcagcgatgatgtcacgagcgctaccgctgctttactggcaaatcccgttcccgcttaac

SEQ ID NO: 277401 - DNA, 637 bp, Unknown
  Bacterial polypeptide expressing nucleotide sequence isolated from the Sargasso Sea
cgccgacctcgatgccgcagctgctgccgccgacccggcgcgcgggttcgccgccgcccttgccgatgcctcgaaggaaggatacgggttgatcgccgaattgaagaaggcctcgccctcgaagggactgatccgcaccgacttcgagcctgctattcttgccgccgcctacgaggctggtggggccacctgcctgtcggtgctgaccgacgtgccctggttccagggatcgccagactatctcgtcgcggcgcgcgccgccgtcagcctgccggttctacgcaaggacttcatgatcgatccgatccagatcaccgaatcccgagctctcggcgccgactgcatcctgctgatcatggccgcgctgaatgacgaccaggcgctggagctggaagcctgtgccatggaactcggcatggatgtcctgatcgaggtgcatgataagtccgagctcgagcgcgcctgccgactgaaatcaccgctgatgggcatcaacaaccgcaatctgaagacgatggagatttcgctggatgtcggcgccgcaatgctgccggcgctgccttcggaccgcattgccgtcgccgaaagcgggctgttcgcccctgtcgatctcgcgcggatggccggcacgggcgca

SEQ ID NO: 277402 - DNA, 787 bp, Unknown
  Bacterial polypeptide expressing nucleotide sequence isolated from the Sargasso Sea
catgagcgacatcctcgaccgcatcatcgcggtcaaacgcgaagaagtccgcgcggctgaacagagcgcgccgctcgaagaactacgcctcgaagcgtcgtcgcgcgacatccgcgatttcgtcggcgcattgcgcgcgaagcatgcggcaggcctcgccgcagtcatttccgaagtgaagaaagcgagcccgtcgaaaggcgtgctgcgcgaacacttcgtgccggccgagatcgcgcgttcttatgaaaagcacggtgcggcctgcctgtccgtgctcaccgacgtgcagttcttccagggcagcgtggcatacctggaagaagcccgcgccgcctgcaatctgccggtgctgcgcaaagacttcatcgtcgatccgtaccagatcgtcgaagcccgcgcgatgggtgcggacgcgattctgctgattgccgcggcgcttgaaacctcggagatgcaggatctcgaagcgctcgcgcattcgctgggcctcgcagtgctggtcgaagtgcatgaccacaatgaactgatggaatcgcttaagttgaagacgccgctgatcggcatcaacaaccgcaatctgcgcaccttcgaaacgtcgatcgaaacgaccatcggcatgctcgaatcgattccggacgaccgcatcgtggtcaccgagtcgggcattctgtcgcgcgtcgatgtcgaacgtctgcgagcgatggacgtgcatacgttcctcgtcggcgaggcgttcatgcgcgcggaagagccgggcgtggaacttgcgcggatgtttttctaa

SEQ ID NO: 277403 - DNA, 751 bp, Unknown
  Bacterial polypeptide expressing nucleotide sequence isolated from the Sargasso Sea
atgaatatccttgatgaaatagtttcaaaaaaaagaacaagagttaatgaggcaaaatcaattgtatccattgaagatattcaaaatcaattagcaaaatcatcttcactaaagagtaattttaaaaataacttagaaaatcaagcacaagcgataattgctgagattaagaaggcatcaccaagtgctggaattattgctgaagattttaatccaattttaaaagcgcaagaatatgaaaaaatgggcgcgagagcattatctatattaaccgaggaggatttttttcaaggaagtaataaggttcttcaagatgttaagaaagtcactaatctccccatccttagaaaagattttatcattgatgattaccaaatatatgaatctaagttaataggtgccgattgtattttattgattacaagcatactctcagactctcaaattgaagagtatgtatccaaagcagaagccataaatttagatgttcttattgaagtgcatgatgaggaagagcttgcaagggtttcaagatttcataatgcgctgataggtgttaataataggaatcttaaaacctttgaagttgatcttatgaatgctgttaggttaagaaaaaattatgatgggaatcagatttttattgcagaatcaggaattaaatctagtgctgatatggagtatttagtatccaatgatataaatgtttttttaattggtgagagcttgatgaggggtaatcttttttgaa

SEQ ID NO: 277404 - DNA, 769 bp, Unknown
  Bacterial polypeptide expressing nucleotide sequence isolated from the Sargasso Sea
atgtctgatattttaaaacaaatcactgactataaaaaaagtgaagtccttgaattgaaaaaaaaacaatcaataaaggattttgaaaaagaaataatcaatattgaaaacccaagaaaattttcagatactctaatctcagcgagcaataataaatttaggttaattgctgaagttaaaaaagcatcaccctcaaaaggaataattagaaaaaatttcaatcctgaaaaaattgcaatagattatgaaaaagctggagcggcatgtctttcagtgttgacagatcaaaatttttttcatggcaaaaatgaatatttggaaaaaattaaaaaaattgtagatctaccaattttaagaaaagattttataattgatgaatttcaaatttttgaaagcaggttcattggtgctgattgtatactactgatagtagcatgcctaaatgatactgaactgaacgatttctataatatatctaaagctcttaaaatggatgctttaatcgaagtgcacaacgaagatgaattacaaagggctctagaactcaaccctaaaatgattggtattaacaatagaaacttaaaaaatatgacagttactcttgatacttcagtaaaacttgtgaaaaaaataccaaaaaatattttggttgtttctgagagcggttttaaaaatcacagtgacttaaagcttatggagcagtatggtataaaaagttttttaatcggtgaaacatttatgaagtcaagaacattcaatcgtctgtaga

SEQ ID NO: 277405 - DNA, 751 bp, Unknown
  Bacterial polypeptide expressing nucleotide sequence isolated from the Sargasso Sea
tatgaatatccttgatgaaatagtttcaaaaaaaagaacaagagttaacgaggcaaaatcaattgtatccattgaagatattcaaaatcaattagcaaaatcatcttcactaaagagtaactttaaaaaaaacttagaaaatcaaacacaagcgattattgctgaaattaagaaggcatctccaagtgctggaattattgctgaagattttaatccaattttaaaagcgcaagaatatgaaaaaatgggtgcgagagcattatctatattaactgaggaagacttttttcaaggaagtaataaagttcttcaagatgttaagaaagtcactaacctccccatccttagaaaagattttatcattgatgattaccaaatatatgaatctaagttaataggtgccgattgtattttattgattaaaagcatactctcagactcacaaattgaagagtatgtatccaaagcagaagccataaatttagatgttcttattgaagtgcatgatgaggaagagctagcaagggtttcaaaatttcataatgctcttataggggttaataataggaatcttaaaacctttgaagtagatcttattaatgctgttaggttaagaaaaaattatgatggaaatcagatttttattgcagaatcaggaattaaatctactgcagatatagagtatttagtatccaatgatataaatgtttttttaattggtgagagcttgatgaggggtaatcttttttga

SEQ ID NO: 277406 - DNA, 808 bp, Unknown
  Bacterial polypeptide expressing nucleotide sequence isolated from the Sargasso Sea
tatgtcgaaagaaacaccgaatattttaaaaaaaatactcgactacaaaaaagagtatattgagaatgtaaaaagagatttaccattaaaagaattaaagagtatggctttggattgtccgccagcacgcggttttactaatagtattttaaaaactatagaaaatgataaaccggctataattgctgaaattaaaaaagcttctcctagcaaaggtattatttgtgaaaatttcaatccatcagtgattgctaaaagctatgaggatgcaggagcatgctgtctatcggtacttactgatatcaaattcttcgaaggttctgatgaatatttaaaagaagcacataaagcttctattttacccatattacgtaaagattttatgatcgacacttaccaaatttatgaaacaaaaaaaataggtggtgattgtatactaattattatctccgcattatcagatgttcaggcacaagaaatcgttggtattgctcatgaaattgggcttgatgttctcgtcgaagtacatgatcgggaagaattagagcgaggtatgatgttacgtaccccccttattggcattaataatagaaatcttcatacgtttgaaacaagcttaaatacaacattaagccttttgactgatgttttccaagatcgtacggtaattacagaaagtggtattcatacacctgaccatgttaaactaatgagaaaaaataacgtacacgctttccttgttggtgaagcgttcatgcaagctaaagatcccggggatgaattaaaacgactgttctataataaatag

SEQ ID NO: 277407 - DNA, 751 bp, Unknown
  Bacterial polypeptide expressing nucleotide sequence isolated from the Sargasso Sea
aatgaacatacttaatgaaatagtagctaatactcgatccaaacttgaggataaaaagctaaaagaatcccttgatgatttattgtcgaaaattgacatggataatcttggaaagaatatctttaaaaaaagtttagaaggaaaaagtgaatcaatcattgcagaaataaaaaaagcatcacctagcgcaggattaataagcaaaaactttgatccagtatcaaaagcaaaagaatatgaatcatttggtgcctctgcactttcaattcttactgaagaagattactttcagggagatattcaatacttaattgatgtaaaaaatgcttcaaatttgccaatactaagaaaagacttcattattgatgaatatcaaatttatgagtccaaacttataggagcagactgtattttattgatagccagcatattaaatgatgaagaattaaaaatattttcacaaattgctgacaaactctttttagattacattatagaagttcatgataaagatgagttactacgagttaaaaatttctccaaagcaattataggagttaataataggaatttgaaaacatttgaagtagacattgagaattcgataaagcttagaaaagaattccaagaagataatatttttgtctctgaatctgggatcaaaagtcaaaaagatatagataaacttaaagaacataacattaatgtctttctaattggcgaaagtttgatgaaaggagatcttttttga

SEQ ID NO: 277408 - DNA, 796 bp, Unknown
  Bacterial polypeptide expressing nucleotide sequence isolated from the Sargasso Sea
cttgagcgccgcccccgacattcttgagcggatcctcgcgcgcaaacgcgaggagatcaacgagcgccagcgcgagcatagcctgacggatctttatgcaagggcagccgatcgcgcgccaccgcggggctttgtgtcctcgctcaagaaaagcattggggcggggcaggcgggtgttattgcagaggtcaaaaaggcttctcccagcaaaggcctcatccgggagcattttgatccggccgccattgccgtcagttatgaatccggcggcgcgtcttgtctttcagtgctgacggatcatgattttttcatgggcagcgaagcggatcttgaagcggcgcggggcgcctgtgctttgccggtgttgcgcaaggattttgtgatcgacccctggcaggtcgctgagtcacgggccatcggtgccgactgcatcctgctgattgtggccgctcttgagcaggcgcagatggcagagctctcggcagcggcagcggatcttgcaatggatgtcttggttgaggtgcacgacggggaggaactggatcgagcccttgcgctcgatccggctttgcttggcatcaataaccgcaatctgcgcacttttgagacaacgcttaagacaacgctggcactggccccaaccgtgccgaaggacacgctgctggtcactgaaagcggcattcacagcgttgcagatgtgagcgcgatgcgcgaagcggatattcatgcttttctcgtgggcgaagcgttcatgcgccaggatgatcccggttcccatcttgcagcgctgttcgga

SEQ ID NO: 277409 - DNA, 808 bp, Unknown
  Bacterial polypeptide expressing nucleotide sequence isolated from the Sargasso Sea
atgagtacaccgaccatattaaaacgtattgttgctcgcaagcttgaagaagtggctgagcgacaggcgcaagtacctgtatctgaactattaccaaccattgttgctaatagtgttggccctatggcaccaagaggtttttgtcaggccatgttagataaggtggccagcggtcaaccagccgtgattgctgaggcaaaaaaagcttcgccatccaaaggtgtgattagagcagattttgaccctgcccagattgcccaaagttatgctgccggtggggctacttgcttgtcagtattaacagatgcggatttttttcagggcagtgaagcatatttacgcgccgctcgtgaagcctgtgatttacctgtaattcgcaaagactttatcgtcgacccttatcaggtttatgaagccagggccattggtgcggactgtattttgttgattgtagcttgtttagaagacgctcaaatgcaagatttggcagaattggcagaagatttaggcatggatgtattggttgagtctcatgatgccgatgaactggagcgggctttacagctaacaacgcctttgatcggtattaataaccgtaatttacatacctttgatttaaccttgcagacgacctttgatctgttggcaatgatacctgacgagcgtttggtgattactgaaagtggcattcatacgccagctgatgtggctatcatgcagcaacataaggttaatgcctttttagtaggtgaatcttttatgcgtgccgctgatccgggggcaaaattggcagaactttttacttaat

SEQ ID NO: 277410 - DNA, 793 bp, Unknown
  Bacterial polypeptide expressing nucleotide sequence isolated from the Sargasso Sea
atgagcgacatactgaaaaaaattctctcaaccaaacgagaggaaatcatgcaaagaaaacaaaagctctctttgtcggatcaaaagaggttaggagaatcgcaggaagagcctagagactttgtgaacgccttgaaatcagccgcaatcaacaatagggccggcgtgatagcggaaataaaaaaagcctcgcccagtcaaggaatcattcgagaaaatttcgatcccgtatcaatagctaaatcatatgaacaacacggcgcagcctgcctatcggttctcactgactctcagtatttccaaggttcggacgactttatttcactagttaaagcgcacgttggactacccgttctccgaaaggatttcactatagacccctatcaagtctatgaagctagagcaatcggtgctgactgcattctcttgatcgtggccgcactcgatacgaaaatgcttagggagctatttgaacttgcccattccctaaaacttggagttcttgtagaggtccataatagggcagagcttcaagaagcgcttgagttagatctaacgctggtgggcataaacaacagaaacttaaagacttttgaaaccagcctagaaaccacgaccaaactactcgagcaaatacctcaatcgattaccgtggttactgagagcggcatacgcgacaaaagtgacgtgagtttaatgcagaaaaatcaagtgaattgctttttagtaggggaaaccttcatgagatcagagataccaggagaggctctcagcgatttattttactcctaga

SEQ ID NO: 277411 - DNA, 889 bp, Unknown
  Bacterial polypeptide expressing nucleotide sequence isolated from the Sargasso Sea
atggagatccgccgtcgtccccctaaccccaaggtgcgggtggcccatctcgaatatgcggtgccccacgacgacgaggaaccgcgtcacatcctcgagaagattgtctgggaaaaagatcgtgagatcgatgccgcccgcgacaaggttcccctcgacgacctgaagcagcagattgccaagcttccccccaccaaggatttcctgggggcgcttgaagcggccgccacgaaacctgcggtgatcgctgaggtgaaaaaagcgagccctagcaaaggggtgatccgtgaggatttcgacccggtggcgatcgccaaggcctatgccgctggcggtgcaagttgcctctcggtgctcaccgacaaaaccttcttccagggcggctttgatgtcctggtgcaggttcgtcaggccgtagacctgcctctgctctgcaaagagtttgtgttgagcccctatcagctgttccaggccagggcggccggggctgacgcggtgctgctgatcgctgccatcctttcggatcaggatcttcgttatctcaacaaggctgcggcggctctgggcctcaccgtgttggtggaggttcacgacgccaccgaaatggaccgtgtgctgaatattggtggcttccccctgatcggaatcaacaaccgtgatctcaccagcttcgagacggatctggccacgaccgagcggctgctggtcgacttcaacgaccggttgaaccaacagggggtgctgctggtgagtgaatcgggtctgttcagtcgggccgatctcgaccgtgtgcaggccgccggtgccggggctgtgctggtgggggaagccctgatgcggcagccggatgttgaagctggtttggtgcagttgatccagcccggttaag

SEQ ID NO: 277412 - DNA, 787 bp, Unknown
  Bacterial polypeptide expressing nucleotide sequence isolated from the Sargasso Sea
atgagcgacattctcgaccgaatcatcgccgtcaagcgcgaagaagtcgcggcggccatgcgcagcgcaccgctcgaggcactgaaactggaagcgtccgcgcgcgacctgcgcgacttcgtcggcgcattgcgtgcgaagcacgcggccggccgcgcagccgtgattgccgaaatcaagaaggccagcccgtcgaagggcgtgctgcgcgagcatttcgtgccggccgatatcgcgcgctcgtatgcggcgcacggcgccgcgtgcctgtcggtgctgaccgacgagcagttcttccagggcagcgtccgctatctcgaggaagcgcgcgcggcctgcacgctgccggtgctgcgcaaggacttcatcgtcgacgcgtaccagatcatcgaagcgcgcgcgatgggcgccgacgcgatcctgctgatcgcggccgcgctcgacacgccgctgatgcaggatctcgaagcgtatgcgcactcgctcggcctcgcggtgctggtcgaagtacacgaccgcaacgagatggagcaggcgctgacgctcaagacacccctgctcggcatcaacaaccgcaacctgcgcacgttcgagacgtcgatccagaccacgctcgacatgctcgacatgattccggcggaccgcatcgtcgtgaccgaatcgggcatcctgtcgcgcaccgacgtcgacacgatgcgtgcggcgaacgtgaacacgttcctcgtcggcgaagcgttcatgcgtgccgaccagcccggcgaagagctcgcacggatgttcttctgat

SEQ ID NO: 277413 - DNA, 370 bp, Unknown
  Bacterial polypeptide expressing nucleotide sequence isolated from the Sargasso Sea
tggtgtatatgcagaccttttaatgaaaaggatagagtctttcaactctaaagtttttcttgtaaatactggttggacaggcggacctcatggtattggatcaagattcgatatacctacgacaagaagaattattaatgcaatccagaatggtgaattaaataatgttgaaactgctcatattgatggtcttaatttagaggttcctaaagaaattaatggagttgatgccaaagttttgatcccaaaaaatacttggtcaaatcatgatctgtatgaacaatatttaaaggatcttataaaacaatttaaagataattttaaaaaattctcggtaagtgaagatataattgctgcaggtccctcctaa

SEQ ID NO: 277414 - DNA, 607 bp, Unknown
  Bacterial polypeptide expressing nucleotide sequence isolated from the Sargasso Sea
tttgaaaagtgctggccctcatccaaattcaattatttttcttacttgtgatgcgtatggtataatgccaccactagctagaatgacaaaaaaacaagctatgtatcatttcataagcggatatacggctaaaatggctggaaccgagacaggtgttacagaaccagttgctgcattttcaccatgttacggaggaccttttttaacattgcatcctctaagatatgctgaattattggagcaaaaactgaatgattataattcttcagtttatttagtcaatactggatggtcaggatcaagtgcaacaagtggatcttcaagaatagatttaaaactaacaaagcatattatcaatttaattaatgatggtagtttagactttagtcaatcagtatttgataagtttttcaatttagaaataccattaaacgttgatggtttagaaaatgaattcttggtaccccattatagttgggataatttagaggaatatttttcaactggtaatatgcttacaagacttttcaataataattttgaaaattttaaaattcaagattcagatattctagcagcaggtcctaaaactgatttaagtgcttaa

SEQ ID NO: 277415 - DNA, 151 bp, Unknown
  Bacterial polypeptide expressing nucleotide sequence isolated from the Sargasso Sea
aatgaattatctcttaccccaaaaaaatatagcgtcaatgcattgttctgcaaatatggggcaagatggttccgttgcattgttttttggtctctcaggtactgagaaaaacaaccttatcaacagatccaaagaggcaattaattggtga

SEQ ID NO: 277416 - DNA, 474 bp, Unknown
  Bacterial polypeptide expressing nucleotide sequence isolated from the Sargasso Sea
tatcaggatttactgcaaaaactgctggcacagaaagagggattactgaaccgcagccaacattttctgcatgctatggcgcagcttttttaatgttacatccaacaaagtattcaagcgtattgtcaaaaaaaatgaaactttctaactctaaagtttttttagtcaatactggttggaatggacaaggtgaaagaatttcgttaaaaaacactaggttaattattgatgcaatcttaagtgacgaattgaatgatgtttatatggatacaataccatattttaacctagcaattcctaaaagtataaaaaatgttccatctaatttattagaccctagatcaacatggaaaaataacactgaatgggaaaataaggctaaagaattagcacaactatttattaataattttcaaaaattttgtgatgatgagcatggaagaaaacttttagctgctggtccacaaatataac

SEQ ID NO: 277417 - DNA, 526 bp, Unknown
  Bacterial polypeptide expressing nucleotide sequence isolated from the Sargasso Sea
tatgcataatctaggtataaaacaactggataatttttatagaaacttacctgtaaaggatttagtacatcatattgttcaaaacaaggaagggcttgtaggcttaagaggagctgcaatggtggacacaggaatttatacaggtcgatcacctgatgataaatactttgtggatgaacctagctcaagagataagatttggtggggttcagttaataaaaaagtagatgaaagaatctttgatgatttatactcaaaagtaattgattattataataacggagtaagtaattcatatatttttgatggatttgcaggtgcagataaaacctatcgtttaaatgtaagaattattgcaaaaaaggcatggcaagcacattttgcacataatatgtttataagacccaatagtgctgaactagaaaaatttgaaccagattttaccattattaatgcatcagatattcaaaatgaagattttcaacaacatggattgaattcgaaaacatttgttttattccatatt

SEQ ID NO: 277418 - DNA, 411 bp, Unknown
  Bacterial polypeptide expressing nucleotide sequence isolated from the Sargasso Sea
aaatagcaggtacagaacgtggtgtaaaagagcctacagctacattttcatcttgctttggtgaagcatttttatctttacatccaaatgtttatgctgatttattaaaagaaaaactaaatacacacaaaccgactgtttggttagtaaatacaggttggatcggtggaaaatatggcgtaggagaacgaattccattagatataagtagaaaatgtgtgaatgctattttaaatgatacgattaatgattttgttacatatacatattttgatctatctattcctagtaaaatagaaggagtagatagtcaagtattaaatccagagtcaatgtgggaagacaagctagattttttaactacagtcaattatttaaataaactatttgaagcacgagataataaataag

SEQ ID NO: 277419 - DNA, 343 bp, Unknown
  Bacterial polypeptide expressing nucleotide sequence isolated from the Sargasso Sea
gatgtccggggctcaggcctggttggtgaatactggctggactggaggagggctaggagtcggccaacgaattgatctatcaagcactcggtgcattattgacgcgattcatgccggatcactgaccagtgagccaactcagcgagatcccatttttggactcgaggcggtttgtcgggtgccgggtgtctctgagcgtctccttgtaccacgggatgcttgggcggatgcggcagtttgggaagaagcagcccgaactctagcagagaagttccgaaagaattttgtactgtttggggatgaggctgatgaggcggtgttacgggctggcccatccaaataa

SEQ ID NO: 277420 - DNA, 451 bp, Unknown
  Bacterial polypeptide expressing nucleotide sequence isolated from the Sargasso Sea
aatggggtctagtgctgatatcgagtctactttctcaacttcttttggagctccattctttccacggcctgcaaatgtgtatgcttaccttctaatgaaacgggtagaaggatttaactcaaaagtttttctagttaatactggttggactggaggtccttatggtgttggttcaagatttaaaattccaacaacaaggagaattgttaatgcaatccaagatggtgaattaaatgatgtggaaactcttaagattccgggtttaaatcttaatgttcctactgctatcgaaggtgtcaattcgagcttactaaatccaatagaaacttgggataataaagaagaatacgaaaaatacttaaatgaattaatttctaaatttcaagaaaattttaaaagatttaatgttagtcctgaaataatattagccggtccaggatctgatggctaa

SEQ ID NO: 277421 - DNA, 301 bp, Unknown
  Bacterial polypeptide expressing nucleotide sequence isolated from the Sargasso Sea
atgaataaaaaagtacaaaagcaattatttgacattggaataaaagatattactgaaattatctataatccgtctttcgaacatctttatattgaggaaaattcttcaaaattagagggttttgagaaagttcaaaatactgaatttggagccgttaatgtgatgacgggcatttatactggaagatcacctaaagataaatatattttaaaagatgagaccactaaaaataatttatggtggacttcaaaattttcaaaaaatgacaataaaccaatagataaagaaacgtgggaatagt

SEQ ID NO: 277422 - DNA, 569 bp, Unknown
  Bacterial polypeptide expressing nucleotide sequence isolated from the Sargasso Sea
actgttttttaaacaacaatttcataaatttatatttagaaattattcaaattgtaataaatatggtttaagtaaaattggtatttatggaccaaataatattaactataatttatctcaagataaattatttgagcatgaagtaaaaaataatgaaggaaaagtattcaaaactaaatatggtgatacatttggtgttgacactggtaaatttacaggaaggtcaccaaaggataaatggatagttaaaagtactgaaactggaaaaaatatttggtggggagatgttaatcaacctactaagcctgaagtatttgatcatttattagctaaatcactaaatcattttaattctttagataatctttatttgtttgatggatattgtggatcaaatgataaatctagaaaaaaagtcagatttattcatgaattatcatggcaacaacattttgtaagtaatatgttcataagacctaacgatgatgaaaaattatatgaagaagaaccagattttacaattattaatgcttgttcggttgtaaatgatcaatggaaaaatcatggtt

SEQ ID NO: 277423 - DNA, 487 bp, Unknown
  Bacterial polypeptide expressing nucleotide sequence isolated from the Sargasso Sea
gaagttgaggtgacggagccagaagccactttttcggcctgcttcggagccgccttcatggtatggcacccaagtaagtatgctgaactgcttgcagaaaggattaagcaacatgggactacggtctggctggtgaacaccggttggtccggagggggattcgaaactggccagagaatgtcccttaaatacagccgggcaattgtagatgccatcctcgatggcagtcttcaaaatgcaccgactttaaaggacccggtattcgggctcgagatgatcactgagtgtcccgcagtccctaatgaggttcttcagccaaaactgtcctggagtgatcccgatgcctatgatagggctgcaaatagattggctgctatgtttatggagaactttaagaagttcgaaaaatacagtcccgcctatattgctgctgccggccctgttgttttaaaagatcaaaataccagagtctctgaaactgtttaga

SEQ ID NO: 277424 - DNA, 403 bp, Unknown
  Bacterial polypeptide expressing nucleotide sequence isolated from the Sargasso Sea
gcaccgttctttcctagaccagctaatgtatatgctgaacttttaatagagcgaatagaagggtttggttcaaatgtttttttagtaaacacgggttggaccggaggtccatttggagttggttcaagatttgatataccaaccacgagaagaattgttaatgcaatccaagatggagaattagatgactcagaaacaataaaaatacctggattaaatttactaattccaaaatcagtagatggtgttgataacaagttactaaatccaatagatacttgggaaaataaagatgaatataatagatatttaaaagagttaatttcaaagttccaagaaaattttaagaaatttaatgttaagccagaaatagttgaagccggtccaggattcaatggctaat

SEQ ID NO: 277425 - DNA, 499 bp, Unknown
  Bacterial polypeptide expressing nucleotide sequence isolated from the Sargasso Sea
attgacaacatcccagttatttgaaaagttaaagttaggtgagttaggaattgattctgcatcatctatttcttatcaattatcatatgaagaattatttgaaaaagaggttaacgctccagagggttaccaaaaaggaattgaaacctcatttggagctgtttctgttgatactggtaagtttactggtcgttcagcaaaagataaatatgttgttaaggataatttatctgagaatactgtttggtgggaggatcaaggctcaacaaataaaccattatctgaaaccgcttgggcacatttgaaaactatttgtttagggcaattatcgaataaagatatttatgttatagatggatattgtggtgcaaatgaagatactcgaatctcagttcgtttggttactgaagttgcttggcaagctcactttttcaaaaatatgtttattcggccaacagatgaggaactagaatcttttgagcctgattttacattttga

SEQ ID NO: 277426 - DNA, 724 bp, Unknown
  Bacterial polypeptide expressing nucleotide sequence isolated from the Sargasso Sea
tatgaaccaagacgataaaaatctttaccttaatcgacctaatggcttttacatagaagaatcaattcgacgaggccgaggcaagttaagtcgccaaggagctctagttgtcgaaactggaaaatttactggaagagcggcaaaagataaatatgtcgttaaatctgattccactcaagatactgtctggtgggataatgatgttcttgaaatgactcctgagacatttagcaaattaaaaactcacattacggcccatctgaacgagcaaaaagatatttatatgacagagcgatctgcgggagctcacccaatacataatttatctgttcgcctcgtctccagtagtcctagtcatgcactcttttcaaagcacatgtttagaaaaaagattcgagaatatgacgagtctaaagattatgttattttacatgcaccagatttagatctcgatcctaaagaatttggcactcgtagtgaaacttgtattgttacctgctttgatacaaatacaattcttatttgcggaactcgttatgctggagaagttaaaaaatcagttttctctattttgaattacttgctcccagaaaccggtgttctcccgatgcacgcgggggcaaataaaagtgaaacagatacatcagtattttttggattgtcaggaacagggaaaacaactttatctactgatgaagggagacttttaattggtgatgacgaa

SEQ ID NO: 277427 - DNA, 650 bp, Unknown
  Bacterial polypeptide expressing nucleotide sequence isolated from the Sargasso Sea
tttttatacacaaaatacaagagtcagttatccaatagattatattgataatgcaataataccgtgtattacttgtcatccaaataatattatattactcacttgtgatgcatttggagttttaccacctgtatcaaaattaacgaaggaacaaacaatgtatcattttataaatggatatacagcaaaagttggtggtacggaagacggtataaataaaccaattgccacattttcagcttgttacggagatgcttttatggtttggcatccattaaaatatgctactttattgagtgagaaaatagaaaaatataatgtaaattgttatcttgtaaatactgggtggattggtggaaagtgtggtgttggaaaaagatgtgatattaaaataacaaaaacaattatacgagaaattcataatggtaatttaagtaaagctgaatatcaaaaatttaatgtattcaatttaatgatacctaaaaatgtaaataatgttcctgaaaaaattcttaatccaattaattgttgggaaaataaagaagagtataataaatccttaaataatcttgctagattatttattgataattctaaaaaatttggacttgataaaaataaaatttttgaagatataataacaatataat

SEQ ID NO: 277428 - DNA, 366 bp, Unknown
  Bacterial polypeptide expressing nucleotide sequence isolated from the Sargasso Sea
tatatgcagaccttttaatgaagagaatagaatctttcaattctaaagtcttccttgtaaacactggctggacaggtgggccacatggcattggatcgaggtttgacatacccacaacaagaagaataataaacgcaatccagaatggtgagttaaatgatgttgaaaccgctcatattgatggtcttaatttagaggttcctattgaaattgatggagttgatcctaaagttttgattccaaaaaatacttggtcagatcaagatgaatatgatcaatatttacaaaatcttatcaagcaatttaaagataactttaaaaaattctcagtaagtgaagaaatagttgctgcaggcccaacttaaa

SEQ ID NO: 277429 - DNA, 475 bp, Unknown
  Bacterial polypeptide expressing nucleotide sequence isolated from the Sargasso Sea
gacgaagccagaagccactttttcggcctgcttcggagccgccttcatggtatggcacccaagtaaatacgcggaactgcttgcagaacggattgagcaacatggaaccatggtctggctggtgaacaccggttggtccggagggggattcgaaatgggccatagaatgtcccttaaatacagccgggcaattgtagatgccatcctcgatggccgtctccaaaatgcaccgactttaaaggacccggtattcgggctcgagatgatcacagaatgccctgcagtccctcatgaggttcttcagccaaaactgacctggagtgatcccgaggcctatgatagggctgcaaatagattggctgctatgtttgtggagaactttaagaagtttgaaaagaacagccctgcttatattgctgctgccggccctgttgttttacaagagcaaaataccaaagtctctgaaactgtttag

SEQ ID NO: 277430 - DNA, 757 bp, Unknown
  Bacterial polypeptide expressing nucleotide sequence isolated from the Sargasso Sea
gcctgatatctataacgcaataagacacggtgcgttgcttgaaaatgtggtttatgatgagcatactagagttgttgattataccgataatactaaaactgaaaatactcgagtttcctatcctttgaattttattgaaaattcagtttttgcaaaaggaaaaccagcgctgagcgatcacccaaaaactataatttttttaacatgcgacgcgtatggcgttattcctccagtttctaaacttagtccagagcaagcaatgtatcattttataactggttatacagcaaaagtcgctggtacagaacgtggagtaacagagccaactgctaccttttccccttgttttggtggaccgtttttaacccttcatccactagagtatgctgagttactcaggagcaagattaataaatttaacgttcctacatttttagtaaatactggttgggttggagcaactgctgaatcaggtgcaaaacgaatttcactgccaatcacaagacaaatcatttatgcgatccttgatggaagtttaaataagtctgattttgaaacagatccctattttggcgttgcagtgccaaataaattaggcaatattgaaaataatgtcttgattccaatgaaagcttggcctaacaaagaggattatgtcaaaactgcagagaccctggttgaaaaatttcaaaataattttgcagactacaacattgaagatgaaaatatcagaaatgccggtccaaagaaatcataa

SEQ ID NO: 277431 - DNA, 565 bp, Unknown
  Bacterial polypeptide expressing nucleotide sequence isolated from the Sargasso Sea
aatattccttacttgtgatgcttttggcgtattgcctccaatttcaagattaacaccagcacaagcggcttaccatttcattagtggatatacagctaaagttgcaggaacagaaattggagtggttgagcccacaccagaatttagtgcatgctttggagaaccctttatgccaatgcaccctggagtttatgcagatttattatcagcaaaaatggaagagcataatgcaaattgttggctaattaatactggatggtcaggaggttcgtatggagttggcaatagaatgaaaattcgttacactagagcaatgttgaatgctgcaatggatggagatcttgacgatgtagaatatgtaaaagacgcaagatttggatttgatattccagtggaatgtccaaatgtccccagtgaattattacaaccaagaaatacttgggaaagtggagaagagtatgacaaaacagcaaacaaattagtttcaatgtttaatgaaaattttgttagatatagtgcaggggtttctgatgaagtcaatgcggcttcacctaaattagagtaa

SEQ ID NO: 277432 - DNA, 607 bp, Unknown
  Bacterial polypeptide expressing nucleotide sequence isolated from the Sargasso Sea
tatgaacaaaaactacggcaccgttaattcaaatctgactttaggcagccaagggattacaggttttaaaaacgcattctacaatctgaccgagcccgatttaatatcttattcactacatcgtgatgaaggcaaacttggtattggaggcgcctttcttgttgaaacaggaagatttacgggcagatcgcccaaagacaagcatattgttgtgtcagctgaaactgtggataaggtttggtgggaccgtaatgctaaaatgtcttctgaagcatttgacgaattacacaaagacatgctcaagcatatccaaggaaaagacttatttgtccaagatctttacgggggtgccgatccaaagtatagaattggcgttcgcgtcataactgaatattgctggcatagccttttcattcgtcatttgttgataaggcccactagatccagtttggaaacttatagtaacgatttctcaattattaacttacctagcttttctgccaatcctaacaagcatggatgtaggagcgaaacggttatagctataaattttgaaaaaagattaattttaattggtggtactgaatacgcaggggaaaataaaaag

SEQ ID NO: 277433 - DNA, 358 bp, Unknown
  Bacterial polypeptide expressing nucleotide sequence isolated from the Sargasso Sea
atggagcgcatagagggttttaattctaaagtttttcttgtaaacaccggttggactggaggtccttatggagtaggatctagattcaagatacccaccacgagaagaattgttaatgcaattcaggatggtgagcttgataatgttgaaacaacaactattcctggattaaatttatctgtgcccttaaaagttgatggagtagatagtgaattgctaaatccaattaatacatggaaaaataaagatgaatacgaaaaatatctttcacaattaattacgaaatttcaagaaaacttcaaaaaatttaatgcaaaacctgaaatagtaaaagctggtccagggtttaatgactaat

SEQ ID NO: 277434 - DNA, 715 bp, Unknown
  Bacterial polypeptide expressing nucleotide sequence isolated from the Sargasso Sea
tatggataatcacataaaaacattggatgcattggaactaactactgaagagttaattcaatccgcagttgacaataacgaaggtgttattgcaagtaatggggccttttctaccagcacaggtaaaagaacgggcaggagtccaaacgacagatttatagtacaagaaccaggaactgataatcttatagactggggtgaagtgaacaagccatttgacgaagacaaattcgatttgttgtggaataaagttgagtcttatttagctgaaaggaatagatattcctctaaagttcatgttggatcgcatgatgagcattatttgccagtaaatatcattactgaaacagcatggcattcactttttgcaagattaatttttgtatgtactgaaagttacaatccttccatgaaacaagaatggcaaattattagtgctgctaactttgagtgtgatcctgatcaagatggaacaaattctgaaagttgcgtaatcataaattttgctaagagaaaagttattattgccggcatgaaatatgccggtgaaatgaaaaaatcaatgttctcagttcaaaactttctgcttcctgaaaaaggtgttttgccaatgcactgttcggcaaatgtaaatacaaagggggatgttgcattattctttggtctttcaagaactggtaaaacaaccttatccgctgatccaaagtgttcattg

SEQ ID NO: 277435 - DNA, 567 bp, Unknown
  Bacterial polypeptide expressing nucleotide sequence isolated from the Sargasso Sea
aatgtcaaatatttttgaaaatttatcagttgatgaactcatcttagagtctctgcaaagagaagaaggagagatagctgccaatggtgctcttcttgttaaaacgggcaaaagaaccggcagaagtccgttagacagatttatagttactgacgcctcaacaaaagatgcggttgattggggtgaggtcaatcgaccctttgaatcggaagattttgataggctttggagtaaagtagagagctacttggaatcaaaagatagctttgtctcttctttgcatgttggtgaacattctgagcattacgtcccagtaaatattaggacagagtgggcttggcacaaccttttcggaaagcaaatgttcataagaccagcaaaatttaatccgagcaacaaggaagtctggcaaatactaagcgcacctgaatttgtttgtgatccagaagctgacaagactaatagcgatggtgttgttcttcttaattttacttccagaaaagttctcctagcagggatgccttatgcaggtgaaatgaagaaatcaatgtttgcagtacaaaactt

SEQ ID NO: 277436 - DNA, 862 bp, Unknown
  Bacterial polypeptide expressing nucleotide sequence isolated from the Sargasso Sea
tatgaaaatagtaaaacatttttttgaatttatattcattgtccccttctttattatttttaaaattattggatacaaaaacgcaacgaatttaggtgaatttattggtaaaatatttggtccattgtttagatctaattttaaaattcaaaaaaatttagaaaattcaaatattggcaattcagaaaaagatagaaaaattattatcaataatatgtggggcaattatggaagaatttttgcagaatacatgtacattaaacaatatagacaaaatagtctttcaaataatattgaagtagttggccaaaatattttggaagaaattaaaaatgataataaaccagtaatatttatctctggacactttaataactttgaattaatggccatgcatctagaaaaatctggtatcgatttggctgctatatacagacctttaaataacaaatttttaaatcctttaatggaaaaaattagaaaaaattatatttgtaaaaagcaaataaaaaaaggcatgtctggtacaaaagaaaccttaaaatattttaaaaaaggtacttctattgctttaatgattgatcaaagagtttctgagggaataagttgtaatttttttaataaaaaagctttaacaactactataccagctcaatttgtaaaaaaattcaattgtaaggttattccaatatatattgaaagaaagaatggatatcaatttagactagagatatttaaacctatagagttttttaaaaatgaaaatattgaaattattacatctaatttaaataaaattcttgaagaaatgataaaaagaaatccagaccaatggatttggacacataacagatggaaataa

SEQ ID NO: 277437 - DNA, 643 bp, Unknown
  Bacterial polypeptide expressing nucleotide sequence isolated from the Sargasso Sea
catgagcgaagctgccatttccaccccggatgttcactccggtctcccttcaactgaactgattgacatggccctggcacggggtgaaggcgtgctgtccgacaccggcgcactgcgtgtcgagacgggtgcacgcacgggccgctctccggcagatcggtttgtcgtaagggagccttccagcgaggacgctatagactggggcggcgtcaaccggccatttaatgcagaccggtttgatgccctctgggagcgggtcaaatcgcacgccaatcagtcagagacttgggtgcaacacctgcacgtgggagagcacagcgatcactacctgcccgtcaaagtcattactgccacagcctggcagtccctgtttggccgcaacatgttcatccgccctgacacatacaaccccgccaacaagcctgagtggaagatcctcaacgtagccgactttgtctgtgaccccgagcgcgatggcacccgctcggacgccaccgtcatcattaatttcggtcagcgaaaagtgctgattgcggggatgcgttacgcaggcgagatgaaaaaagccatgttctcggtgcagaatttcctgctccccgagaaggatgtcatgcccatgcactgtccgccaacatggcgaaga

SEQ ID NO: 277438 - DNA, 334 bp, Unknown
  Bacterial polypeptide expressing nucleotide sequence isolated from the Sargasso Sea
aacaccttttgctggctagttaacacaggttggacaggtggtgggcatggaataggtactaggatgccaataaatgtgactagatctctgttggcagctgccattgatggcaacatgaacaccgcaacatttgtcaaagatgaaaattttggttttgaggttcctaagtttgtgccaggagtggatccaaagtatctaaaccccagaaacacttgggacgataaagctgcttatgatcaagctgcaaaaaaacttgttagcctttttatttcaaattttgaacaatatctgccgagcgttgataacgatgttaaggatgctttggttttttaat

SEQ ID NO: 277439 - DNA, 573 bp, Unknown
  Bacterial polypeptide expressing nucleotide sequence isolated from the Sargasso Sea
aatgccgtctattttcgaaaatttatctgtagaggaacttatcgaccaagccctagaaagaggcgaaggcgagcttgcttctaatggagccttgttggtaaaaactggaaagagaactggtagaagccctcttgatagatttattgtaaatgatgaatcgacaaaggactctgtagattggggtgaagtaaataaaccatttgatagcgaggccttcaatgccctttggcaacgggttaatgagtatatggacgaaagagatacttttgtctcatctcttcatgttggtgagcactctgaatactatgttccagtaaagattagaactgaatgggcttggcataatctttttggcaaacaaatgtttattagacctaaaaattttaatccagcaggcaaagaacattgggagataatgagcgcacctcaattcgtttgtgaacctgaaagagattcaactaacagcgatggcgttgttttgcttgattttacaagaaagaaggtccttctagcaggtatgccttatgcgggagaaatgaagaagtctatgtttgctgttcaaaacttcttact

SEQ ID NO: 277440 - DNA, 396 bp, Unknown
  Bacterial polypeptide expressing nucleotide sequence isolated from the Sargasso Sea
acccatcggagtatggaaaacttttacaaaaacttattgcaaaacatagtgtaaaatgctggcttgttaatacaggttggaccggagggccttatggaaaaggtgaaagaatgccaattgacgcaacaagaaagttactatcttctgcattgaatggttccttactatcagcagaaatgagaattgatgaaaactttggttttgaagtcccttcatttgtcgatggagttgatactaaaatccttaacccaagagatacatgggaagataaggaaggttatgatttacaggctcaaaaattagtaaaaatgttttctgataattttgatgtttttaagccttatgttgatatagacatcatagatgctgcgccaaatcttcaagctgcagaataat

SEQ ID NO: 277441 - DNA, 472 bp, Unknown
  Bacterial polypeptide expressing nucleotide sequence isolated from the Sargasso Sea
ggttatacagcaaaagttggttctactgaaatgggcagcaccaaatcaatggattttgctttttcaacatgctttggagcgccattctttccaagaccggctggagtgtatgccgatctattaattaaaagaattcaaaagaacaacacaaaagtttttttagttaatactggctggactggtggtagttatggtgtaggggaaagatttcctattcctgtaacaagagcaattattaatgctattcaggaaaataaaattgacacaaatgatgttgaacatcttgaaaagttaaaccttaatgtgccaaaagatattaaaggtgttgatcaaaaattactaaatccaagaaactgctgggaatctgcagaaagctatgatgaggaatgcgaaaaattgtgtatgagatttaaggataatttcagaaaatttgatgttgctcaacaaattattgatgcaggcccaaggtaat

SEQ ID NO: 277442 - DNA, 572 bp, Unknown
  Bacterial polypeptide expressing nucleotide sequence isolated from the Sargasso Sea
agagcctaatgccgttatatcctttacctgtgatttatctggagtaatacctcccgttcaaatcttaagtaaagaggctgctgcttatcactttttaagcgggtatacagctgcaattggatcaacagaaataggttctacagaagcgttcaaaaccactttctcaacttgctatggagctcccttttttccaagagctgcgggtgtttatgctgaccttctaatgaaaagaatagaagaatttgatagtaaagtttatttggtcaatacaggatggactggaggaccctatggaataggtaaccggttcgatatacctgttactcgatcaattatttctgcaattcaatcaggtgcactaattggtgccgatactgaaaccatagaaggaatgaatttagatgtcccattaagtgttgaaggagtggatagcatgcttctcaatccgataaaaaattggaaagatccatcatcttatgccgaatacgaaaataaactagtgaatcaatttaaggaaaactttaagaagtttgacgtatcccaatctatagttgacgctggaccaaggtaag

SEQ ID NO: 277443 - DNA, 466 bp, Unknown
  Bacterial polypeptide expressing nucleotide sequence isolated from the Sargasso Sea
aaggtgggatctactgagattggatcatcttcagatattgaatcaactttttcgacctgttttggagcaccattttttcctcgacctgcaggtgtttatgcagaccttttaatgaaaagagttgaaaattttggctcaagggtttttcttgtaaatacaggttggactggaggaccttatggagttggaaaaagatttgatataccaactactagaagaatcgttaatgcagtccaaaacggcgagcttgatgatgttgaaactcaaatgcttaaaggtttaaatcttgaagttcctctatcgattcaaggagttgatggcaacttgctaaatccacgcgaaacttgggaagataaaagcgtttatgatgctgccgcagctgacttaataaaattatttcaaaataactttgaaagatttgatgtcagtaaagaaataatttctgccggcccttctgatcaataaa

SEQ ID NO: 277444 - DNA, 660 bp, Unknown
  Bacterial polypeptide expressing nucleotide sequence isolated from the Sargasso Sea
aaaatacacgggtttcgtatcctttagaacacattgaaaattccatttcaggcaaagggatgcccagcattgcaggacatcctaaaaaaataatctttctaacatgcgatgcctatggtgtcttgccaccagttgcaaaattaacttctgatcaggcaatgtaccatttcataagtggttatactgcaaaggttgctggaactgaaagaggcattacagagcctactgcaacattctcaccctgttttggaggaccatttttaactctgcatccactaaaatatgcagaactattaaaaaagaaaatgcaaaaatttaatgttccagtttaccttgtaaatactggttgggttggcaatagtgctaagtcaggggaaagtagattcagccttccattgacaagacagattctaaactcaatattgaatggccatattgaggagtgtaagtttgatcatgatgattattttggttttcagattcccaagactcttggcgatatagatccaaagcttcttaatccgttaaaagcttggaaggatattgaagaatatcatagatctgccagagaattgattcaaaagtttcaagaaaattatatgatgtatgaccttggggataaaaatattctaaatgcgggtcccaattatgtagagtgat

SEQ ID NO: 277445 - DNA, 496 bp, Unknown
  Bacterial polypeptide expressing nucleotide sequence isolated from the Sargasso Sea
tatcattttttatcaggttatacagcaaaggttgctggcacagaaaaaggtgttgatgagcctgaagcaactttttcagcttgttttggcgcaccctttatgccaagacatccatctgaatatggtaatttattaaaaaacctcattcataagtataaagtaaattgttggctggttaatactggttggtctggaggaccagtgggtgagggaaatagaatgcctattaaagatacaagagctctattaactgcagctttaaatggtactttaggtgaagcagaaatgcgtattgataattactttggatttgaagttccattatgggttaaaaacgttaatgaaaatatattagttccaaggaatacatggagcaataaggagagatatgatcttcaagctaaaaagcttgtagaaatgttttcagaaaatttcgcagtattcgaggctcatgtagactctgatgttttggacgctgcaccaaaaatttcttaga

SEQ ID NO: 277446 - DNA, 645 bp, Unknown
  Bacterial polypeptide expressing nucleotide sequence isolated from the Sargasso Sea
atactcgtggttcttatccgattgaattcattgaaaaccgaacacctgattcgatggctggacacccgcagaatgttgtgtttttgacctgtgatgcgtttggtgttcttccaccgattagccgactgaatcctgctcaagcggcgtatcatttcatctccggatatactgccaaggtcgctggaaccgaggtcggagtgaaagaaccccaagcgactttctctgcttgctttggagctcctttcatgccccgtcatccaagcgtatatgctgatcttttggctgaaaaaatgtcacagcatggtgccaagtgctggttattgaatactggatgggtaagtggaggttacggcaagagcaagcgtattcgtatcaagtggactcgagcattgctgaatgcagccctcgatggtagtctaaatgatgttgagtttgtgattgatcctagatttggatttgaagtgccgcaaagttgtgagggagtgcctgaagaaatgctcaaccccagaaatacttggggcgatggtactgaatacgatgcggctgcaaatcgtttagccgtaatgtttggggaaaacttcactcaatttgaagatgggaccagtgccgaagttctcgaagccgcgccaaagccgcttcgttgaa

SEQ ID NO: 277447 - DNA, 771 bp, Unknown
  Bacterial polypeptide expressing nucleotide sequence isolated from the Sargasso Sea
taaatttgagttacgaggatgaaccacaaattttctctaccaccgaaaaattttccacagtaatcgaaaatatgaattataatccaaacgaccgatcattaaatttttcagacccttctattactgaaaacatgagatgtgcgtatcctatttcttatattaaaaactcatcaaaatcgggatttgggggagccccaaaaaatataattttattgacgtgtgatgctttcggtgtgttgccacctgtggctaaacttacagcagctgaagctgtttttttcttcctttctggcttcacatcaaaagttgctgggaccgaagagggaataaaggaacctgtgcccactttttcaacttgttttggtgcacctttcatgcctaaaagaccggaagtgtacggccagcttttgtggaataggatcaatagcacaaaacccgtatgttggttacttaacacaggatggagtggaggaagctatggagaaggagaaagaatatcaatagagttaaccagaaagattttaaaatttattttaaatattaaaggtgagttccaaacacgaaaagatcagtttttcaatttttctgttccgattgaaataaatgaggttcccaaaaacttactaaaacctagggaaaattggacaaatcaggaaggttatgatagagtcgcgactaagctgaagacaatgtttgtagataattttcagcagttttcctcaattaatgaaaaggtacacggagtttataacagcttaaaaaatgactaaa

SEQ ID NO: 277448 - DNA, 403 bp, Unknown
  Bacterial polypeptide expressing nucleotide sequence isolated from the Sargasso Sea
tatgaatttaagacatatttcacttgaacagtacgggataaatgtaggtactgtgatccgaaatgctgcagctccgaagttatacgaagcggcattaaaatatgaaccagatgcagctatctcatctgatggagcattaattgtttcttcttacgaaaaaaccggacgcagtccaaaagataaaagaattgttgaacatccaagtatccaaaaacacgtatggtggggaaaaattaatatcggtattgattctgaaacatttttggccacaagggagagggcaattgattacctgaactctcaaagtataatttatgtagttgatggttttgctggatgggatataaattaccagattaaagttcgcataattaccactcgcccttatcatgctttgtttatg

SEQ ID NO: 277449 - DNA, 763 bp, Unknown
  Bacterial polypeptide expressing nucleotide sequence isolated from the Sargasso Sea
ttgaaaagttgtacaagtagggtaagtcgatttgggctccattctctagggctcaaggataaaaaaaatgtattttggaatctgaatactccagaattgtttgaagaggcgtgccgccgtggtgagggtcaagtaacagcaaacggtgcctttatggcattaactggagagcattctggtcgttctccgaatgacaggtttatagtccatgaatctttgacgggtgacgaggttttttggggtgagattaataaagcaataagtgaagaaaattttctgcggttacaaaaaaaaatgcagagtcatttgtctgagaaagatgtttttgttcaagattgttactgtggggcagattttaaaaatcgtttgaatataagggttgttactgagaatgcatggcataatctcttcgctcgaaacatgtttattcagccaaaattagaggagctggaggaatttgagcctgaattttcagttttacatgctccaagtttgcttgctgagcccgagaaggatggtactaactccggcacttttataattgttaacctcgaaaaaaaagtgattttaataggtggaactgcatatgcaggagagataaaaaaatcaattttctctgtgatgaattttctaatgccggccagaggcattctgccgatgcattgttctgctaacacgtcagaaagcggagactcggctattttctttggactttcaggaacaggaaaaaccaccttatcagcggatagttccagaacttgat

SEQ ID NO: 277450 - DNA, 760 bp, Unknown
  Bacterial polypeptide expressing nucleotide sequence isolated from the Sargasso Sea
tttgtctcctgaaaatgaaccagagatatacgccacaacatcgaaattttccactgtgatcgaaaatatggtttgtaatacacacactaaacaattggattttcaagatgatagcttgacggtgaatatgcgtgctgcctatccaatgcattatatagctaattcggctcaagatggcttagcaaaacatccaaaggatcttgttctgttgacttgtgacgcatatggagtcatgccacccatagcttctctttcaccagctcaagctatgtatcattttttgtcaggttttacatcaaaagtggcaggcactgaaagaggggtaaatgagcctgagccaacgttttcaacttgtttcggtgcgccgtttttacctctccgaccagaagtatatggagagctattaagagaaaaaatcacaaagtacaatacgaggtgttggttgttaaatactggatggacaggaggaggggttggcagcggggaacgtatgccaatcgatatcactagagcactcttggatgcggcactagaggggcatttagatcgttgttcttttcgtaaagatccaaactttggttttgatgtgcctattgctcttcaaggcatagataacaaattcttaaatccacgagaaaattggttggataaagtttcttacgataaagaagctgccaaattagttaaattattctctgataattttgaacaatatttaccttttgtagatgaaaaaacaaaagctgctgcaattggctaa

SEQ ID NO: 277451 - DNA, 583 bp, Unknown
  Bacterial polypeptide expressing nucleotide sequence isolated from the Sargasso Sea
tggaaaacacccaaagaatataatttttcttacctgtgatgcttttggagttttacctccagtaagtaaattgagtattcaacaagctatgtatcactttataagcggttacacggccaaaattgctggtacagaaattgggattacagagcctgaagccactttttctgcttgttttggagcggcttttttggtgtggcatccaagtaagtatgcagatctcctcgcaaaacgtatagaaaaaagtggtacttcagtatggttggttaacacgggatggataggaggatcctacggagagggtgagcgtatttctctcaaatatactcgtcatatcatagatgcgatattgaatggtttgctagaagacaaacagacagctagagacgaattgttcggttttgaaatcttgactcaatgtccggaagtcccagaaaaaattcttcaacctagaagtatgtggattgatagcaatttatatgacaagacttcatttaaactagcaaaaatgtttcgagaaaatttcaaaaaatatgaaaaagatacaagcaatgaaattattaaagcaggtccaaaaatttga

SEQ ID NO: 277452 - DNA, 791 bp, Unknown
  Bacterial polypeptide expressing nucleotide sequence isolated from the Sargasso Sea
agagaaggagcccgaaatcttcgacgctattaagtttgggacggttgttgagaacgtcgtcttcgacccaaatgaccgcgaagtcgactactacgacacttctattacggagaatacaagggctgcttatccgttgaatcacatcccgaacgcgttacttcctgcgaaagtggatactcacccgtctgcctgcattctgttaagctgcgacgccttcggagtccttcctccgattgctcgtttatcatctgcacaagctcagtattacttcataagcgggtacacggccaaggtcgccggcaccgaacagggcgttaccgaacccactgctacgttctccgcctgcttcggagcaccgtttctcgtctggcatcctatcgtctactccgaaatgctggccgagaaactcgaaaaaactggagcaaatgcgtttttgctcaacactggttggagtggtggggggtatggggttgggaagcgcatcgatttgaaatatactcgtaaaatggtggatgccgtgcacgatgggtatcttaaatctaaagaatgcgaatatgtgaatttcgaagccgcgaatggtgtccctccagaaaacaggttgttcaatttcgaaatccccaaaaaaatccctggtgtaccagacgagattttgaatccgaggttgagctgggcggataaaaaggcttatgatgcggggctgaaaaaattacacgatctctttcaggataattttgggcagtatgcggataggtgtccgttggaggtgaggcaggcgggaccttatttttgag

SEQ ID NO: 277453 - DNA, 770 bp, Unknown
  Bacterial polypeptide expressing nucleotide sequence isolated from the Sargasso Sea
aatgttccaattaagtgaagaaaactttgataaaatattaaaaagttttattgattttgcccaggacaaaaatctctttgtacatgatcttctgggtggggctgacagggataactgtctcggagtctcaattattacagaatatgcatggcatgggttgtttgctaggcatttattggtcaggcctactaaagatgaacttaaaaatttttcaagtgagttcacaataataaattttcccaatttaaaaatggatcctgatcaccatggaacaagaagtgaaacagtaatcgcagtcaaccttgataaaaaaattatacttattgctggaactaaatatgctggtgaaactaaaaagtctgttttcactttattaaattttattttgccagaaaaaaatataatgcccatgcactgttcagtgaacactggtaaaaatggagactcagcaatattctttggtttgtcaggaactggaaaaactaccttaagtgcagatccaaaccgctcactcttaggagatgatgagcatggttggtctgatcaagggttgtttaattttgaaggaggttgctacgctaaacttattagactctctcaagaagcagagccagaaatttatgcaaccactcaaatgaaaaattcagtaatcgaaaatgttgtaatgaacgataagggtgaactagatcttaatgataactctttaactgaaaatactagaggagcttatcctattaattttattcccggtgtaacactttcaggaaaaa

SEQ ID NO: 277454 - DNA, 716 bp, Unknown
  Bacterial polypeptide expressing nucleotide sequence isolated from the Sargasso Sea
cattgttgttgatggggaaggtgtgccagatttcttcgatacttccaagacagaaaatacacgtggctcgtatccaattgactttattccgaaccacgtcaggggctcaaaaggagggcaccctcaaaacgttattttccttacatgtgatgcttttggcgtacttccccctatttccaaactcacacatcaccaagcagcttatcatttcataagcggatacaccgcaaaagttgcaggaactgaagtaggcgtcaccgaacctgtcgcaacattctccgcatgctttggagaaccatttatgccaatgcaccctggagtatatgctgatttgcttagcgataaaatgagccagcatggttcgaatgcatggttgattaatactggttggtcaggagggccttacggcgttggaaatagaatgaaaatcaaatacactcgagcaatgctcaatgcagcattaaacggtgaattagagaatgttgactttgaaatcgatcctcgatttggctttgcgatcccaaaaacttgtcctggtgtcccaagtgacgtgcttaacccaagacaaacttggaataaccccgaggaatatgacaaaaccgcgaatcgtttagcagatatgttcaatgagaacttcaaaagatatgaaaacggagtttctgaggacgtaaatgctgtttccccaagaccgatgactgtatctacaaactcataat

SEQ ID NO: 277455 - DNA, 757 bp, Unknown
  Bacterial polypeptide expressing nucleotide sequence isolated from the Sargasso Sea
atgacctctacaatcactcgccatgtcgatttaacagtggcagatttagttgaacacgctattcgtcgtaatgaaggtgtattagcggacaacggcgctttggtggttaaaaccggtcatagaactggtcgctcacctacagatcgctttattgttaaagaagccagcacagagcaggatattcaatggggcaacgtcaaccgtccttttgatccagcaaaattctctgcgctttgggctcgtgttaacgactttattgcgaccaaagaacattttgtttctcacctggaagtaggtgcagatccggaacactacattccgatgacggtgaccacagaaaccgcatggcagcatatttttgccaaaaacctgtttatcacttcagcacactggaacaaagccggcaaagagacctggcaaattctgaacgtgccttcgtttgaatgtgatccagagcgtgacggcaccaacagtgacggtactgtgatgatcaactttgccgagcgcaaagtattattagcaggcatgcgttatgccggcgaaatgaaaaaagccatgttctcagtacaaaacttcctgttgccagccaaaggtgtattacctatgcactgttcggctaacgttggtgaagcaggtgacaccaccttattctttggtttgtcaggcacaggtaaaaccactttatctgcagaccctaaacgtttcctgattggtgatgacgaacacggctgggcacctaactcagtctttaacatga

SEQ ID NO: 277456 - DNA, 595 bp, Unknown
  Bacterial polypeptide expressing nucleotide sequence isolated from the Sargasso Sea
catgcaaaatttaggtataaaacaactggataatttttatagaaacttacctgtaaaggatttagtacatcatattgttcaaaacaaggaagggcttgtaggtttaagaggagctgcaatggtggacacaggaatttatacaggccgatcgcctgatgataaatactttgtggatgaacctagctcgagagataagatttggtggggttcagtaaataaaaaagtagatgaaaaaatctttgatgatttatacacaaaagtaattgattattataataatggagtaagtaattcatatatttttgatggatttgcaggtgcagataaaacttatcgtttaaatgtaagaattattgcaaaaaaggcatggcaagcacattttgcacataatatgttcattagacccaatagtgctgaactagaacaatttgaaccagattttaccattattaatgcatcagatattcaaaatgaagattttcaacaacatggattgaattcgaaaacatttgttttattccatattggccgtcgtattgcaatcattggtggtactgagtacggtggtgaaatgaaaaaaaggtattttttcagt

SEQ ID NO: 277457 - DNA, 490 bp, Unknown
  Bacterial polypeptide expressing nucleotide sequence isolated from the Sargasso Sea
tttctctctggtttcacatcgaaggttgccggaactgaagaaggaattaaggaacctgttcccactttttcaacttgttttggagcgccattcatgcctcaaaaaccggaagtatacggaaaacttttatggagcaagatccatagcacagaacccgcctgttggttgcttaataccggatggagcggtggcagctatggagaagggaaaagaatatcaatagagttaactcgaaaaattctaaagtttattttaagcaacaaaaaacggtcgcagacacggaaagaccagttttttcatttttgtgtcccaattgaaatagatggtgttcctaaaaacttactcaaccctagggagaattgggcaagtgtaagtgattatgataggtcagcgactgaattaaaatcaatgtttgtgaataactttcaaaagttttctgcaatcaatgaaaaggtagatagcgtttacaatcgcttaaaaaatgactaac

SEQ ID NO: 277458 - DNA, 909 bp, Unknown
  Bacterial polypeptide expressing nucleotide sequence isolated from the Sargasso Sea
gatcttgaatggcaggcattgtacgatgcggcgattcgtagaggcgaaggagaactcaccgctcatggcgtattgatggctgaaaccggggatcgaaccggccgttcaccaaatgacaaatttgtcgtcaaggatgatgaaaacggcactctcacgcgagatatttggtggggggatgtcaacgtcccaacaaccccggaaatctatcaaaagttgagtgcgaaggtgcgcgattatttgtcttctaaagatgagttgtacgttcaggatttgtactgtggcgctgaccttacggagagattgccgattcgcatcgtcacagagaatgcttggcatgctgcatttgctcgtaatatgtttgttcgccctaatgtctctgagattgaatcgcatgtgcccgattttacaattttgcacgccccccatttccatgcaaatccggagactgatgggacaaactctcatgtgtttgtgattatctcgtttgaagaaaaaactgtcattattggaggtacagaatatgcaggtgaaatcaagaaatcaatattctcaatcatgaaccatctcttgccctcccgtggtcacttgcctatgcattgctcatccaacacaacaggcgaaaatacggctgtatttttcggattatctggaactggaaagaccacactgtcggcggaccccaatagagcgctggttggggatgacgaacatggttggtctgccaaaggtgtgttcaactttgaaggtggttgctatgccaaactcatcgacttgtccgaagaagacgaaccggcaatttttgcgacgacaaggatgccaggatctattttagagaatattattgtcgatgatgatggaattcctgatttcacggatgattcactcaccgcgaatactcgtggttcttat

SEQ ID NO: 277459 - DNA, 742 bp, Unknown
  Bacterial polypeptide expressing nucleotide sequence isolated from the Sargasso Sea
tataacgcaataaggcctggtgcactattagaaaatgtagtttatgatgaaaatacaaatgttgttgattattttgatggtacaaagactgaaaatacgagagtatcatacccaataaatttcatagaaaattcagtatttgctcagggaaaaccaagtattgcagatcatccagagaaaataattttcctaacttgtgatgcttatggtattcttcctcctgttgcaaaattagaccccgaacaagctatgtaccattttattagcggatatacagcaaaagtagctggaaccgaaagaggtattactgagcctactgcaaccttttctccatgttttggtggtccatttcttactcttcacccattaagatatgcggaacttttaagagaaaaaatgaatgagtttaatgtctcggtctatctcgtgaataccggttggattggtgctagtgctcaaagtggagcaaagcgtataagcctacctctaactcgaaaaataattcacaaaatattagatggttctattgattctgttggttttgatgaagatatttattttggtttccagataccaaagtcattggatgatgttgaatccgatatattgaatccactaaacgcatggtctgatgcagatatgtataatagatctgcaaaagatttagtaacgaaatttaaggataattataaaaaatatgatcttggtgatgaagagatcagaaaaggtggaccatattaaa

SEQ ID NO: 277460 - DNA, 437 bp, Unknown
  Bacterial polypeptide expressing nucleotide sequence isolated from the Sargasso Sea
catgattacaactggaaaagaattacaactaaataagatcggcttgaataaaatagatgaagtatgtagaaacttaagcgttgaaagcttgattgaggaaacggtaaaaaatggtgaagggattattggtccacgtggcgtgacaattgttgatacaggtaaatttactggaagatcgccaaaagataaatatatagttgatgaacccagttcaacggacaaggtatggtggggttcagttaataaaaaaatagatgaatcaattttcgatgaactttatgccagtgtagttgattactacaactctgatgattcaaaaacgtatctctttgatggtttcgctggtttcgatccatcacatagtataaatgttagaattattgctaaaagagcatggcaagcacattttgtaaataacatgtttatcagacctgaaa

SEQ ID NO: 277461 - DNA, 898 bp, Unknown
  Bacterial polypeptide expressing nucleotide sequence isolated from the Sargasso Sea
gtacagggaaaaaacaacgcttagtaccaatgcaaatcgccctttaattggagatgatgaacacggatggtcagataatgggatatttaattttgaaggtggatgttatgcaaaggctattaatcttgataaagataaagagccagaaatttataatacaattaagcacggaactcttttagaaaatgttgtttatgatttagaaactaaacaagttgattttgatgataatgctaagagtgaaaattctagaatttgctacccaattaattttgtagagaattctttaggctctaaaggcttaaaaagtgctggtcctcatccaaattcaattatatttcttacttgtgatgcatatggtataatgccaccattagctaggatgacaaaaaaacaagctatgtatcacttcataagcggatatacagctaaaatggctggaaccgagataggtattacagagccagttgctgcgttttctccatgttacggaggaccctttttaacattgcatcctttaaggtatgctgaactattggagcaaaaactaaatgattacgattcttcagtttatttagtcaatactggatggtcagggtcaagtgcaataagcggatcttcaagaatagatttaaaactaacaaagcatattatcaatttaattactgatggtagcttagactttagtaaatcagtatttgataagtttttcaacttagaaataccactaaacgttgatggtctagaaaatgaatttttggtacctcatcatagttgggataatattgaagaatatttttcaactggtaatatgcttacaagacttttcaataacaattttgaaaaatttaaaattcaagattcagatattctagcagccggtcctaaactgatttaa

SEQ ID NO: 277462 - DNA, 748 bp, Unknown
  Bacterial polypeptide expressing nucleotide sequence isolated from the Sargasso Sea
aatgaagacaccctcaaaggggccagattcagaatcagagaaaaacaaattactttttgaaatttgcggcctcaaaaaatttggggcaaaaaaaataaagaatattcattacaatctcccgatatcatctttaacagagatgtctatcagtcgaggcgagagttttctcgctaacaatggcgcattagttgttaataccggaaagtttactggaagatcacctaaagacaaatttactgttaatcaaagtccttcgaataaaaagatttggtggggagagattaatcagaaattatccccaaaaaattggattacaattaaaaataaagttgctaattatttaaacaataaagaaatattcatatttgatggatatgtaggaaacgacaagagatacagaattccggtgagagttatttcagagtttgcatggcactcactattttgccaaacactacttgtaagaccttcaaacaaaagtttcagacctcacaaagacccatttactgtcatagacgttggtaggtttttaggatgtgggaaaaaagaaggattacgccaaaacaatttcacagttgtaaattttgaaaaaaatatggcattaatcggtggttctgaatacgcaggagaaatgaaaaaatctgctttctatattatgaattatttattacctcagaaaaatattttccctatgcattgctccgcaaatatgggtgaaaaagaagacacttccttattctttggtctt

SEQ ID NO: 277463 - DNA, 634 bp, Unknown
  Bacterial polypeptide expressing nucleotide sequence isolated from the Sargasso Sea
tacccgatttcttacataaaaaattcatcaaaatctggatatggtggagttcctaaaaatataattttgttaacatgcgatgctttcggcgtattaccaccttttgctaaacttacagcagccgaggcagtcttttatttcctctctggtttcacatcgaaggttgctggaactgaagagggaatcaacgaacctgttccaactttctcaacttgctttggtgcgccattcatgcctcaaaaaccggaagtatacggaaaacttttatggagcaagatccatagtacagaacccgtctgttggttgctaaatacgggatggagcggtggcagctatggaaaaggaaaaagaatatcaatagaggtaactcgaaagattctaaagtttattttaagcaacaaaaaaaacttacagacgcggaaagacaagttttttaatttttgtgttccaattgaaatagatggtgttcctaaaaacttactcaaccctagggagaattgggcaaatgcgaatgattatgacagggcagcgactaacttaaaatcaatgtttgtgaataactttcaacagttttcttcaattaatgaaaaggtagatagcgtttacaatctattaagaaatgaccaacactaag

SEQ ID NO: 277464 - DNA, 592 bp, Unknown
  Bacterial polypeptide expressing nucleotide sequence isolated from the Sargasso Sea
cctgctctttcagatcatcctaaaacaataatctttctgacttgtgacgcatatggagttttacctcccgtatcaaaattaacttcagagcaagctatgtatcattttattagtggctatacggctaaagttgcaggaactgaaagaggtatcactgagccaacagctacattctcaccatgctttgggggcccatttcttactctgcatcccttgcgatacgctaaattattgaaagagaagatgaataaatatgatgttccagcttatttagttaatacaggttgggttggagcaagtgcacagtctggagcaaaacgtatttcattacccgttactcgttctatcatatatgcaatccttgatggaagtattgataactcagattatgagttagatccatattttggtataatggttccaaaatctttaggtgatattgattcgaatttattaataccagctaaagcatggagtaataaagatgaatatgattctgtagcaaaaaatctagtgggaaaatttcaagctaactttcaagagtatgatttgggagattcagacatacgaaatgctggaccatccatttaat

SEQ ID NO: 277465 - DNA, 390 bp, Unknown
  Bacterial polypeptide expressing nucleotide sequence isolated from the Sargasso Sea
aatgaataataaagtacaaaagcaattaattgacattggaataaaagatattactgaaattatctataatccgtcttttgaacatctttatagtgaagaaaattctttaaagttagagggttttgagaaagttcaaaatactgaattcggcgctgttaatgtgatgacgggtatttatacaggaagatctcctaaagataaatatatcttaaaagatgagactactaaaaataatttatggtggacttcagaattttccaaaaatgacaataaaccaattgataaagaaatatgggatagtctatacggtattgttagtaatcaactttcaaataaaaaactttatgtgattgacgcattttgtggagccaacaaagatacttgtctaag

SEQ ID NO: 277466 - DNA, 640 bp, Unknown
  Bacterial polypeptide expressing nucleotide sequence isolated from the Sargasso Sea
aatactcgatgtgcatatccattacatcatattgaaaatgctatttttccatcagttggtaatcatccaaatcaaattattttacttacttgcgatgctcatggagtattaccacctatttcgaaactgaattgtaaacaagctgtttattttttcttgtcaggttatacttcgaaaactccaggcactgaagttggaattacacaaccaacctcgactttttcagcctgttttggcgaaccatttctagtatgggatcctaatacatatggtcaattattacaaaaaagattatatgaatttcagtcagaggtttggttactaaatactggatggattgaaggaagttatggtcaaggtagaagaattcctctaaagcatactagacaaatgataaactatattcattctaaatattatcttgaagaccaatgggaagaatgtacaccatttagtttacaagtgcctaaagatattaacaataatttaggagttcctcgtaacattttaattcccattcaaggttggaaagataaattagaaaatggtgctaatttataccaagaaaaaatggaaatgttatttcagcaatttgaatcaaattctaagcaaaaattaaataatattaaatggtattaga

SEQ ID NO: 277467 - DNA, 355 bp, Unknown
  Bacterial polypeptide expressing nucleotide sequence isolated from the Sargasso Sea
attgaaaagagttgaaagttttggttcaaaggtctttcttgtaaatacaggttggaccggagggccttatggagttggaaaaagatttgatattccaactacaagaaggattgtgaatgcagttcaaaatggtgagcttgatgacgttgaaactcaaatgctcggtggtttaaaccttgaagttcctctatcgattcagggagttgatagcaacttactaaatcctcgtgatacctgggaagataaaagtgcttatgatgctgctgcagctgatttaataaaattatttcaaaataactttgaaagatttgatgtcagtgaagaaataatttctgccggcccctctaatcaataa

SEQ ID NO: 277468 - DNA, 561 bp, Unknown
  Bacterial polypeptide expressing nucleotide sequence isolated from the Sargasso Sea
ttttaacttgtgatgcatatggggtattaccacctgtatctaagttaactcgtgatcaagcaatgtaccaatacttaagtggatatactgcaaaagtagcaggtactgaactaggagttacagaaccaacagcaacattctcaacttgctttggggctccttttttatcagtccatcctacaacctatgctgaaatattaggaaaaaagattgatgaacatcaagcagacgcttatcttgttaatacaggatggagcggcggtgcttatggtgttggctcacgtattaagttaagctatactcgtgcaattattgattctattttagatggctctatcgaaaaatcagaatttgaaacaacacgattctttagattacttatacctaaatcactaccaggcattgatagtgctattcttaaccctagcaatatatgggatgataaagaagcttatgaaaagacagctaaaaagttagtccaacaatttatagataattttaagaaatttactgaaacaccaagtggaaaagctgtagcagaatctggtcctgtattgtagt

SEQ ID NO: 277469 - DNA, 413 bp, Unknown
  Bacterial polypeptide expressing nucleotide sequence isolated from the Sargasso Sea
catgctgggagaaaaaattgcaaaacatgaggtccgctgctggcttgtcaataccggttggacaggtggtgcctatggcgttggaaaaagaatagaaatcaaatatacccgtgccatgatcaatgcaattttagacggacaacttgctaatggggaaactaaagaagaccctgttttcggggtccacattcctacttcggtcaagggggtacccaaagaatacctgttccccagaaatacatggaaaaacccagaagcctatgatgaaaaagccaatgagttggcaaaccaattcattgaaaatttcaaggaatatgagagcaacgtcgacaaaaaaattctcgatgcaagcccaaggcctgtcaccaaaagagggagcacttctggaaaaattcatgagttaagaaaatagc

SEQ ID NO: 277470 - DNA, 942 bp, Unknown
  Bacterial polypeptide expressing nucleotide sequence isolated from the Sargasso Sea
aatatctcataagaatggcgaaggtcagttgtctaaacacggcgcgttggttgttaaaacaggaaaacacacaggacgttcggcaaatgataaattctttgtagaagaaaatgataataaaagtaaaattcattggggtgacactaacgtagcgatttctgaagataaattcgaaaaaatagctaattcatttgtggaatttgcaaaagataaatcgattttctcaaatgatttaatgggtggagcagacagaaatcattcattaaatgtctcaattattactgaatacgcttggcatggtctatttgcaagacatcttttagtaagaccaacagctgatgagattaaaaactttgttgcagactatactattattaactttccaagcctcaaattagatcctgaatttcacggtactaatagtgaaacagcgataatagtaaatctgaaagaaaaagtaatacttatcgctggaactgagtatgcaggtgagacaaaaaaatcagttttcactctcctaaattttttattgccagaaaaagaagtaatgccgatgcattgctcagttaattctggagaaaagggagactcagctattttcttcggtctctctggaaccggaaaaacaaccctaagtgctgatccaaatagatctttgttgggagatgatgaacatggatggtcagatgaaggtctttttaattttgaaggtggttgttatgcaaaattgatacgtttatctaaagatgctgagccagaaatctataagacaactcaaatgaagggtacagttatagaaaatgcggtcatgaataatgatggtcttttagaccttgatgacaactcactcactgaaaatacaagaggcgcatatccgttagattatatacctggagtaattaaatctggaaaagcacctcaccctaataatattataatgtt

SEQ ID NO: 277471 - DNA, 706 bp, Unknown
  Bacterial polypeptide expressing nucleotide sequence isolated from the Sargasso Sea
aatgtcaaaagtaattgacctttcaaaccctgaattaattaaggaagcagttgctaacggagagggctctttagtaagcaacggatccttccttgcattaactggtactagaactggtagaagccctgcagacagatttatagttaaagaatcgagcactgaggatcaaattgactggggagaagttaataaaccttttgatccacttcattttgatacattgtgggaaaaagtctcactataccttgattcaagaaatcactaccaatcagaagtgcatgttgggtcaaatgtaaatcattacataccagtaaatgtaaaaacagagcttgcctggcattctcttttttcaaaactcatctttattgttcctcaagaatttaatagtcagaaaaaggaggtttggaaagttctatctgctgcaaactatatttgtgatccagaaattgaccatactaattcagaatcctgtgtaattattaattttcataaaagaaaggttttgatagctgggatgagatatgcaggtgaaatgaaaaaatcaatgttttccgtacaaaatttcctattaccagaaaagggcgttctcccaatgcattgctcagcaaatcaaacaaaagacaaacgaacaactcttttctttggtctatcaggtacaggtaaaacaacattatcagcagacccaagctgtaatttaattggtgat

SEQ ID NO: 277472 - DNA, 742 bp, Unknown
  Bacterial polypeptide expressing nucleotide sequence isolated from the Sargasso Sea
aaccgcgttcactacaacccctcaacagcacaactggtcgaatttgccctgctacgcggcgaaggtgaattgactgcaaacggcgcactggtcgctaaaaccggtacccgtacaggtcgctctcctggcgatcgttttatcgtaaaagaagacagttcagcggctgacatcgaatggggacccgtcaaccaagcatttgaacccggtgcttttgaaggattatgggcgcgcgtagaagcattcctcgccgataaagagttgtttgtatctgacctcgaagtcggtgcagatccagaacattaccagccagtgcgtgtgacgactcaatacgcttggcaccaactgttcgcccgcaacctttttatcatcccagaagaatttaaccgtcaagacaagcctgtatggcaaatcatcaacgcgccagacttcgtctgtgttcctgagcgtgatggcaccaattcagatgctgcggtgatcttaaactttgccgagcgcaaagtgttgctagcgggcctgaaatacgctggcgaaatgaagaagtcgatgttctctgtacaaaacttcctactgccagctcaaggcgtattgccaatgcactgctcggctaacgtaggtaaagacggcgacaccaccctattcttcggtctgtcaggcacgggtaaaaccaccctgtctgcggatccaaaacgcttcctgatcggtgacgatgagcacggctgggcaccaggcggcgtattcaaca

SEQ ID NO: 277473 - DNA, 771 bp, Unknown
  Bacterial polypeptide expressing nucleotide sequence isolated from the Sargasso Sea
tcaattttggtgggataacaacaagtcaattaccgaagaaaattttaataatcttcatgaggatgttctgaatttttgtaaagaaaaagagttatatgtccaagatttatttggtggtgcagatcttgattatcgattgagtacaagagtatatacagaatatgcatggcattccttgttcatacaaaatttactaattgaagttaaggaagatgagaaatctagcttcaaccctgagtttgtgataattgatattcctagctttaaagcggatacatctaggcacggttgttcttcggaaactctaattgctgtcaattttgaaaagaaattagttattattgttggaacctcttatgcaggtgaaatcaagaagtctgttttttccatgttgaattatctgttgcctccaaagaatgttatgcctatgcattgctcagtaaatgtaggggaagagaatgatcctgcaattttctttggtttatcgggaaccggtaaaactactctatctgctgatccagataggatattaattggtgatgatgaacatggttggtccagtaatggtgttttcaactttgagggcggttgttatgcaaaaatgattagattatcagaaaaggctgaaccagagatttatcaaacaacaaaattaagagggactatcttagaaaatgttgtcatcgacaaagactctggagaaatagatctagatgatagttctcttgctgaaaatacaaggggagcctatcctttatcttttatacctaa

SEQ ID NO: 277474 - DNA, 761 bp, Unknown
  Bacterial polypeptide expressing nucleotide sequence isolated from the Sargasso Sea
tgataccaacgtgcccatctctgaggaaaattatcaaaaaatagctagttcatttatagaatttgctaaaggtaaatcgatatacgctcatgatttaatgggtggagcagatagaaatcattctttaaaagttacaataattactgaatacgcatggcatggtctgtttgcaaggcaccttttagtcaggccaacactagaggaagttgatagttttattgctgactttacaataataaattttccaaatttaaaaatggaccctaaatttcatggaaccaatagtgaaacagcaattatcgtaaatttaaaagaaaaggtaattctaatttcaggaactgagtatgcaggagagacaaaaaaatcagttttcactcttcttaactttttattgccagaaaaaaaagttatgccaatgcattgttcagttaatactgggaataatggtgattcagcaatcttttttggtctatctggaactggcaaaacaacgttaagtgctgatccaaagagatctctattaggtgatgatgagcatggctggtctgacaatggtctttttaattttgagggaggatgctatgcgaaacttattcgtttatctgaagaagctgagcctgaaatatatcaaactactcaaatgaagggaactgtcatagaaaatgtgataatgaaagaaaatggccttttagatcttgacgataattctctcacagaaaatacaagaggcgcatatccgttagattatattccaggtgtaa

SEQ ID NO: 277475 - DNA, 721 bp, Unknown
  Bacterial polypeptide expressing nucleotide sequence isolated from the Sargasso Sea
attaaaagaggctcagtggttgaaaatgtcgtactcaagcctaataccattgatattgattacgctaatcaatctattactgagaatacaagagcggtctatcctctttcacatgtagacagtcatttaaaagataattttgctggcgagccaaatgcaattattttccttacttgtgatttaactggggtactgcctccagtatctattctgagtaaagaggcggctgcgtatcactttcttagcggttatacagcaaaagttggttccacagaaattggttcgaccaaagatctggattcaaccttctctcactgtttcggctctccattttttccaaggcctcctagagtttatgctgaacttttaatgaaaagaattgagagtttcggcagtaaagtattcattgttaattctggatggaccggaggtccatacggagttggtaatagatttgatattcctgttaccaggagtgtcataaaagctatacagaatggttctatccatgaatcatctacagaaatgctcgatatcatgaatgttgaaatacccgtcaatcttgatggcgtagatccaaaacttttaaatccgtctgctacatggggaagtaaatcagattacgataatgaagcaaaacaacttgctgaaaaatttagaactaacatagaaaaatttaatctttcatccgaagtagtagcagctggtccaaaggtataat

SEQ ID NO: 277476 - DNA, 454 bp, Unknown
  Bacterial polypeptide expressing nucleotide sequence isolated from the Sargasso Sea
ggttctactgaaatgggcagcacaaaatcaatggattttgctttttcaacatgctttggagcaccattctttccaagaccggctggagtgtatgcagatctattaattaaaagagtacaaaagaacaacacaaaagtttttttagttaatactggctggactggtggcagttatggtgtgggtgaaagattccctatccctgtaacaagagcaattattaatgccatccaagataacaaaatcaatacagatgatgttgagcatcttgagaaattaaaccttaatgttccaaaagatattaaaggagttaatcaagaattactaaatccaagaaactgttgggagtctgtagaaaactatgatgaggaatgtgacaaattatgtatgagattcaaagagaattttagaaagtttgatgttgctcagcaaataattgatgcaggcccaaggtaac

SEQ ID NO: 277477 - DNA, 655 bp, Unknown
  Bacterial polypeptide expressing nucleotide sequence isolated from the Sargasso Sea
aaatacgagagtttcttatccgttaaattttattgagaattcagttttcgctaagggtagacctgcactgagcgcacatccaaagacaataatatttttaacgtgcgatgcatatggtgttattcctccagtttctaaacttactccagagcaggcaatgtaccattttatcagtggatacacggcaaaagttgctgggaccgaaagaggtgtaacagagccaactgctactttttcaccttgttttggaggtccgtttcttactttacatccattaaaatatgcagaattattgcgagaaaaaatgaatcatcataatgttcctgcctatcttgttaatactggttgggtaggggcgagcgcacaatctggcgctaaacggatttcattgcctataaccagaaaaattatctacgcgattttagatggtagtatcaacagcgctgattacgagacagacccttactttggggttcaaatcccaatcaatttaaaagatatagatactgaaattttaattccatcaaaagcatggtcaaatcacaatgaatacattaaaattgcagaagatcttgttcaaaaatttcagaagaattttgaagattacagcattgaagatcaagagataattaatgctggaccaaaacttacgtga

SEQ ID NO: 277478 - DNA, 748 bp, Unknown
  Bacterial polypeptide expressing nucleotide sequence isolated from the Sargasso Sea
atgaataaccaaacacaagaaactcttcatctgagtactgaacaattaatagatgctgctgttgaaaataatgaaggtgttattgcaagcaatggtgcattttctactaccaccggagagaggagttcaagaagcccaaacgacagatttatagtaaaagaggcacatacagaagatttaattgaatggggtgagatcaataagccttttgatagagaaaaatttaatagtctatgggaaaaggtagagtcttatttaactaatggaaatagttatacttcagatgttcatgttggcgcacatccagaacattatttaccagtcaaagttactactgaaacagcatggcattcattattcgctagattgatttttatatgtcctaatgactttaatcctcttaataaaataaagtgggagatattgagcgcagcaaactatgaatgtgttcctgaagaagatggtacgaattcagaaagttgtatagttattaatttttctgagagaaaggtcataattgcaggcatgaaatatgcaggtgaactaaaaaaatcaatgttctcagttcaaaatttcttgctacctgataaagatgttttgccaatgcattgctcagcaaacgttaataaaaataataatgttactctcttttttggtttatctggaacaggtaaaacaacactctcggcagatactaaatgttctctcataggtgatgacgaacatggttggagcaaaggatctgttc

SEQ ID NO: 277479 - DNA, 688 bp, Unknown
  Bacterial polypeptide expressing nucleotide sequence isolated from the Sargasso Sea
tgtattaaatgatggggttcctgattactcagatatttcgttaactcagaattcaagatgttgctatcctagaacacatatagaaaaagcagtccctgaaaattatgctggtgagccaaatacagtaatcttcctaacttgtgatttgactggcgtcctgcctccagtatcaatactgtctaaagaagctgctgcctatcattttttaagtggatatactgcaaaggttggatctacagaaattgggtcatcttcagatattgagtcaactttttcaacctgttttggagcaccatttttcccacgacctgcgggtatttatgcagatcttctaatgaaaagagtcgaaaatttcggctcaaaggttttccttgtaaatacaggttggactgggggaccttatggagttggaaaaagatttgatattccaactactagaagaattgttaatgcagttcaaaacggcgagcttgacgatgttgaaactcaaatgcttaatggtttaaatcttgaaattcctctatcgattcaaggagttgatagcaacttgctaaatccacgcgaaacctgggaagataaaggtgcttatgatgctgccgctgctgacttaataaaattatttcaaaataactttgaaagatttgatgtcagtgaagaaataatttctgccggcccttctactcaataa

SEQ ID NO: 277480 - DNA, 767 bp, Unknown
  Bacterial polypeptide expressing nucleotide sequence isolated from the Sargasso Sea
actttcggaggaagctgagccagaaatatatgctacaacacaaatgaaacaaactgtaatcgaaaatgcaattctcaaatcagatggcactctagatttagatgataattctataacagaaaatactcgtggtgcgtacccattagaatttattccaaatgtaactctaagtggcaaaacaaatcatccaacaaacataattatgttgaccgctgatgcatttggagttttgcctcctatatcaaaactctcaccttctcaagctatgtatcactttttatcaggatacacagctaaagttgctggaactgagatgggcttaggtaaagaacctcaggcaaccttctcaacttgttttggaagtccattcatgcctagaaatcccattgaatatggggaccttctgaaaaacaaaatctcggagcacaatgtaaactgttggctcgttaatacgggttggattggtggagtttatggtgttgggaaaagaattagcataaaagatacaagaactctcttaaatgcagcgttatcaggcgagttagcagatgctgaaatgagaaaagacgaaaattttggttttttagtccctcttaatgtaaataatgtagacactaaaattcttgatccaaaaaattcttgggaagatccaagcgcttatgatgcgcaagcaaaaaagttggtttcaatgtttattgataactttacccaatttgaaaatgatgttgatgaaaacgttaaatcttcgggtcctgttagcatctaaa

SEQ ID NO: 277481 - DNA, 661 bp, Unknown
  Bacterial polypeptide expressing nucleotide sequence isolated from the Sargasso Sea
aattctttaacagaaaatacaagaggagcctatcctttagactatataccaggagttaccgtatctggaaaaactggtcaccctaaaaatataattatgcttactgctgatgcatttggcgtattgcctccaattgctaaactttctgcagatcaggcgatgtatcattttttatcaggttatacagcgaaagttgcaggtactgaaattggtctttcaaacgagcctcaggcaacattttcaacatgttttggtgcaccattcatgccaagaaatccaatagaatatggaaatttacttaaaaaaaagatatcagatcataaggttgattgttggcttgtaaatacaggttggtctggcggtgtttatggagttggtaaaagaatatcgattaaaaatactagagcattacttaatgctgcgctctcaggcaaactaactaatgctgaaatgagaaaggatccaaattttggcttctcagtcccagttaaggttgatgaaattagtgaacaaatattagatcccaagaaaacatggcaaagcgagtctgattatgatgcgcaggcaaaaaaactagtacaaatgtttattagtaattttactaagtttgaatctgacgttgaagagaatattaaaacttcaggacctattgccaattagg

SEQ ID NO: 277482 - DNA, 490 bp, Unknown
  Bacterial polypeptide expressing nucleotide sequence isolated from the Sargasso Sea
cattttttaagcggatatactgcgaaggtaggatctacagagattggatcatcttcagatattgaatcaactttttcaacctgttttggagcaccattttttcctagacctgccggtatttatgcagaccttctaatgaaaagagtcgaaaatttcggctcaaaggttttccttgttaatactggctggactggaggaccttatggagttggaaaaagatttgatattccaactactagaagaatcgttaatgcagttcaaaacggcgagcttgatgatgttgaaactcaaatgcttaatggtttaaatcttgaagttcctctatcgattcaaggagttgatagcaacttgctaaatccacgcgaaacctgggaagataaagacgcttatgatgctgccgctgctgacttaataaaattatttcaaagtaactttgaaagatttgatgtcagtgaagaaataatttctgccggcccttctgatcaataaa

SEQ ID NO: 277483 - DNA, 925 bp, Unknown
  Bacterial polypeptide expressing nucleotide sequence isolated from the Sargasso Sea
atgggtggagcagatagaaatcattctctaaaggttacaataattactgaatacgcatggcatggtctgtttgcaagacatcttttagtaaggccgacgtctgaagaagttgatagttttattgctgactttactataattaactttccaagtttaaagatggatccaaagtatcatggaaccaatagtgaaacagcgattattgtaaatttaaaagagaaggtaattctaatttcaggaactgagtatgcaggtgagacaaaaaaatcagtttttactctccttaactatttgttgccggaaaaaaaagttatgccaatgcattgttcagttaattctggaaataatggtgattcggcaatcttttttggtctttctggaactggcaaaacaacattaagtgctgatccaaaaagatctctattaggtgatgatgagcacggttggtctgacgatggtctttttaattttgaagggggatgctatgcaaaacttattcgtttatcagaagaagctgaacctgaaatatatcaaactactcaaatgaagggaacagtcatagaaaatgcggtaatgaaagatgatggcattttagatcttaatgataattctcttacagaaaatacaagaggtgcatatcctttagattatattcctggtgtaataaaatcaggtaaagcaaatcatccaaaaaatataattatgttaacagctgatgcttttggtgtattgcctccaattgcaaaactctcacctgatcaagctatgtatcattttctctcaggctatacagctaaagtcgctggaacagagattggtctatcaagtgaacctcaggcaacattttctacgtgctttggagctccttttatgccaagaaatccaatagagtatggcaaccttctcaaagataagatttctaaac

SEQ ID NO: 277484 - DNA, 891 bp, Unknown
  Bacterial polypeptide expressing nucleotide sequence isolated from the Sargasso Sea
aatgatttaatgggtggagcagacagaaatcattcattaaatgtctcaataattactgaatacgcttggcatggtctatttgcaagacatcttttagtaagaccaacagctgatgagattaaaaactttgttgcagactatactattattaactttccaagcctcaaattagatcctgaatttcacggtactaatagtgaaacagcgataatagtaaatctgaaagaaaaagtaatacttatcgctggaactgagtacgcaggtgagacaaaaaaatcagttttcactctcctaaattttttattgccagaaaaaaaagtaatgccgatgcattgctcagttaattctggagaaaaaggagactcagctattttcttcggtctctccggaactggaaaaacaaccctaagtgctgatccaaatagatctttgttgggagatgatgaacatggctggtcagatgaaggtctttttaactttgaaggtggttgttatgcaaaattgatacgtttatctaaagatgctgagccagaaatttataagacaactcaaatgaagggtacagttatagaaaatgcagtcatgaataatgatggtcttttagaccttgatgacaactcactcactgaaaatacaaggggcgcatatccattagattatatacctggagtaataaaatctggaaaagcacctcaccctaataatattattatgttaacagcagatgcattcggcatattaccacctattgcaaaattaactcctgaacaagcaatgtatcattttctttcaggctatactgcaaaagtagcaggcaccgaaattggactatcaaatgaacctcaggctacattctcaacatgtttggagctccttttatgcccagaaatc

SEQ ID NO: 277485 - DNA, 948 bp, Unknown
  Bacterial polypeptide expressing nucleotide sequence isolated from the Sargasso Sea
aatttactaattgaagttaaggaagatgagaaatctagcttcaaccctgagtttgtgataattgatattcctagctttaaagcggatacatctaggcacggttgttcttcggaaactctaattgctgtcaattttgaaaagaaattagttattattgttggaacctcttatgcaggtgaaatcaagaagtctgttttttccatgttgaattatctgttgcctccaaagaatgttatgcctatgcattgctcagtaaatgtaggggaagaaaatgatcctgcaattttctttggtttatcgggaaccggtaaaactactctatctgctgacccagatagaatattaattggtgatgatgaacatggttggtccagtaatggtgttttcaactttgagggcggttgttatgcaaaaatgattagattatcagaaaaggctgaaccagagatttatcaaacaacaaaattaagagggactatcttagaaaatgttgtcatcgacaaagactctggagaaatagatctagatgatagttctcttgctgaaaatacaaggggagcctatcctttatcttttatacctaatgcaagtgaaacaggaagaactgacatacctaaaaacatcatattgttaacatgtgatgcatttggggttcttccaccaatagctaaattatcttcgtcacaaacaatgtatcattttctttctggttatactgctaaggttgctggaactgaaaagggggtaacagaaccagaagctactttttctgcgtgttttggcgcaccttttatgcctagacacccatcggagtatggaaaacttttacaaaaacttattgcaaaacatagtgtaaaatgctggcttgttaatacaggttggaccggagggccttatggaaaaggtgaaagaatgccaattgacgccacaagaaagttactatcttct

SEQ ID NO: 277486 - DNA, 928 bp, Unknown
  Bacterial polypeptide expressing nucleotide sequence isolated from the Sargasso Sea
aattttaagcgctgcaaattatgaatgtattcctgaagaagatgggactaattcagaaagttgtatagttattaacttttcggaaagaaaagtcttaatcgcaggcatgaaatatgctggcgagttaaaaaaatcgatgttctctgttcaaaatttcttattgactgatgaagatgtattgccaatgcactgctcagcaaatataaataaaaatagtaatgttactctattttttggactatcaggaacaggtaaaacaacgctttcagcagatcttaaatgttcactcataggcgatgacgaacatggttggagtaaaggagctgtttttaattttgagggtggttgttatgcaaaaactgttaatttgtcaaaagaaaacgagccagtaatttacagcgctataaagcacggaagtgtaattgagaatgtttacatagatgataataatgagcctgattattctaatatttcgatttcagagaacggaagatgttgttacccaagatcacacatcgagaatgcagttaaagaaaatgcagcaggagaaccaaagaccattatattcttaacatgtgatcttactggtgtaatgcctccagtctcaatattatccagagaaagtgcagcctatcatttcttaagtggctatactgcaaagcttggctcgacagaaagaggatctggtgctcctattcaatctactttttctacatgttttggggctcctttttttccaaggccagcaagcgtgtatgcagatcttttaatgaagcgtgttgaagaatttgattctaaggtgtttcttgtaaatactggttggacaggcggtccttatggagttggatctaggtttgatattccaatcactagaagaatagtaaatgcaattcaggatggagagttaaataatgtagaaacattaaaa

SEQ ID NO: 277487 - DNA, 784 bp, Unknown
  Bacterial polypeptide expressing nucleotide sequence isolated from the Sargasso Sea
aagaaggggatgttctccatgatgaactacttcctgcccctgcgcggcatcgcctccatgcactgctccgccaacgtgggtcaggacggtgacgtggccatcttcttcggcctgtccggtaccggcaagaccaccctctccaccgatcccaagcgtcagctgatcggcgatgacgagcacggctgggacgacgacggcgtgttcaacttcgaaggcggctgctacgccaagaccatcaagctctccaaggaagccgagccggacatctacaacgccatccgtcgcgatgcgctgctggagaacgtgaccgtggcggccgacggcaccatcgacttcgacgatggctccaagaccgagaacacccgggtctcctaccccatctatcacatcgagaacatcgtcaagccggtctccaaggcgggtcacgccaacaaggtgatcttcctgaccgccgacgccttcggcgtgctgcccccggtctccaagctgaccaaggagcagaccaagtaccacttcctgtctggcttcaccgccaagctggccggtaccgagcgcggcatcacagagccgaccccgaccttctcctcctgcttcggcgcagccttcctctccctgcacccgaccaaatacggtcaggagctggtgaaacggatggaagccgccggcgcggaagcctacctggtcaacaccggctggaacggcaccggcaagcgcatctccatcaaggatacccgcgccatcatcgacgccatcctggatggctccatcgagaaggccgagacca

SEQ ID NO: 277488 - DNA, 910 bp, Unknown
  Bacterial polypeptide expressing nucleotide sequence isolated from the Sargasso Sea
tccctctgaagacggaacaaattctgatagttgtgtgattataaattttgcaaaaagaaaagttattctcgctggtatgaaatatgccggtgaaatgaaaaaatctatgttttccgtccaaaattttcttcttcctgaaaaaggtgttttgccaatgcattgctctgcaaatgtaaattctaatggaaatgtagctttattttttggtttatctggtacaggaaaaactacgctatcagctgatcctaaatgttcactcataggagatgatgaacatggctggagcaaaggctctgtttttaactttgaaggtgggtgttatgcaaaaactattaatttaaccgaagaaaatgaacctgtaatttatagagctatcaaacatggaagtgttatagaaaatgttttcataaacgaagatggtacgcctgactatagtaatacttctctttctgaaaatggaagatgttgttatccaaggtctcacattaaaaatgctgttgacagcaatgcagctggcgagccaaaaacagtcatttttttaacttgtgatcttacaggtcttatccctcctgtctcagtattatctaaagaagcagctgcgtatcacttcttgagtggatatacagctaaggttggttcaactgaaatgggatctggatctgatatagaatcaactttttcaacatgttttggggcaccattttttcctaggcctgcaaatgagtatgcggaccttctaatggagcgcatagagggttttaattctaaggtttttcttgttaacaccggttggactggaggcccttatggagtaggaactagatttaagatacccactacgagaagaattgttaatgctattcaggatggtgagcttgataatgttgaaacaaacactcttcctggataa

SEQ ID NO: 277489 - DNA, 709 bp, Unknown
  Bacterial polypeptide expressing nucleotide sequence isolated from the Sargasso Sea
atcgtcgagaacgtgatgatcgacccggaaacccgcgagccggattacaccgacgtttccctgaccgaaaactcccgctgtgcctacccactggagcacgtcgagaagcgcgtgatcgagaaccgtgccggtgaaccgtcgcacatcatcttcctgacctgcgacatgaccggcgttctgcctccggtatcggtactgagccgcgaagccgctgcgtaccacttcctgagtggttacaccgcgctggtgggctccaccgaaatgggctcttcctccaagctcaagtccaccttctctacctgcttcggcgcaccgttcttcccgcgcccggccggcgtttacgccgagctgctgatgaagcgtattgacgagttcggcagcaaggtattcctggtcaacaccggctggaccggtggtccttacggtgaaggcaagcgcttcagcatcccgaccacccgtgccatcatcgctgccatccagaacggcgacctggacgacgtggaaaccgagcacctggacgacctgaacctggacgtgcccaggcacatcccgggtgtcgagaccgaactgctgaacccgcgcaatacctggaccagcccggagtactacgacggcaaggcccaggagctgattggccagttcgtagagaacttcaagaagttcgacgtggcagacaccatcgtcgaagccggcccgaaactcgcctgag

SEQ ID NO: 277490 - DNA, 942 bp, Unknown
  Bacterial polypeptide expressing nucleotide sequence isolated from the Sargasso Sea
gccctcagtggagcaaaacagcacttttccccagatttcacggtaattcatgtccctggtctgcaggccgcgggagcgactgatggcgtgaattcggaaacttttatcttggtgaattttgatagaaaaatggttttgatagggggaagccattatgcaggcgaaataaaaaaatcgatctttggaattcttaactacctccttccagatagagacgtaatgccgatgcattgttcagcaaatgtcggaagaaatggtgatagtgcgatttttttcggattatccggcacaggaaaaacgacgctatctgccgacaagtcaagagccttaattggtgatgatgaacacggttggtcacaaaatggaattttcaactttgaaggtggatgctacgcaaaggttataaacctatctgagaaggccgaacctgagatatatgccactacccatcgctttggcacagttctagagaatgtggtctttgagcctgagtcaagaaacctggacttatgggataagagccttactgagaacactagagcttgttatcctcttgagttcattgaaaatgcaagttctaccggaatagcaagccatcctaaaaacattgtattactggctgcagatgcgtttggagttttaccccccatttcaaagttatcacctgaacaggccatgtatcattttctatctggttatactgctaaagtagctggtactgaaaagggaatgggaagtcagcctgaagctactttctccacatgctttgggggaccattcatgcccagacgtccaactgtctatggagaaatgttgagagagaggttatctaagcatggaggttcgtgctggctagtcaatacaggatggtcgggtgggtccgttgctgatggtgcagaaagaatgaaaattagttacacacgcgccatgctaagagcagca

SEQ ID NO: 277491 - DNA, 847 bp, Unknown
  Bacterial polypeptide expressing nucleotide sequence isolated from the Sargasso Sea
aataaaaaaattgatgaatcgatttttgatgaattgtacgaaagtgtaactgattattacaattcagatagctctaaaacctatctttttgatggttttgcagggtttgatccagcttatagtatcaatgttagaatcattgcaaaaaaagcatggcaggctcattttgttaataatatgtttattagacctgaaatggatcaattaaaggattttattcccgatttcaccattattaatgcatctaatgttcaaaataagtcgtttgaaaaacatggtatgaattctgaaacctttattatgtttcatttaggcagaaaagttgcaattattggtggaactgaatacgctggagaaatgaaaaaaggtattttttcactgttgcattatgtgcttccgcaaaaaggtgtattatctatgcattgctctgctaatgttgatgaagatggtttaaatccagctatcttttttgggctaagcgggactggaaaaacaaccctatccaccgaccccaaaagaccgcttataggcgatgatgaacatgggtggtctgatgatggagttttcaatttcgaaggaggttgttatgctaaaacaatcaatctaaatcctgaagatgagccagatatttacaatgcaatacgacatggagctctgcttgaaaatgttgtatatgatccacatacaaggattgttgactataatgataactccaagacagaaaacacgagagtttcttatccgttaaattttattgagaattcagttttcgctaagggtaaacctgcactaagcgcacatccaaagacaataatatttttaacgtgcgatgcatatggtgttattc

SEQ ID NO: 277492 - DNA, 954 bp, Unknown
  Bacterial polypeptide expressing nucleotide sequence isolated from the Sargasso Sea
ggaaatgaaaaaaggtatttttctgtacttcactacatattgcctcaaaaaggtgttttatcaatgcactgttctgcaaatgttgataataatggagaaaactctgcacttttttttggccttagtggcactggtaaaacaacgcttagtacagatcctcaaagacctctcgtaggcgatgatgaacatggctggtcagaaaatggtgtttttaattttgagggtggctgctacgctaagacaattaatttagatccaaaccaagagccagatatttataatgcaataaaacctggagcacttcttgagaatgttgtttttgatgaaaattctaaagaagtagattatagtgatgggtctaaaacggaaaatactagagtttcttatccaatagactatataaaaaactctgtttttgctcaaggaaggcctagtttgtctgggcatccggaaaaaattatttttcttacatgcgatgcttatggagttttgcctccagtagcaaagttagatccaaatcaagctatgtatcattttataagcggttacaccgcaaaagtagctggaactgaaagaggtattactgagcctactgcaacgttttcgccatgttttggaggaccatttctgactctacatccatatgaatatgcaaggttattagagaaaaaaatgtctgaattcaaagtaccagtttatttggtaaatactggctgggttggagctaatgcaaattcgggtacaaagagaataagtttgcctctgacgcgtaaaataattcatgcgattttaaatggttctattgaaaaggtaaattttaaaacagatccttattttggtttttctatgccagaatcgcttgaagatattgacccgttgatattaaatccgcaaagtagttggtctagtgagaaagaatatactaaggcagcaaaatctctagtgaaaaatcaa

SEQ ID NO: 277493 - DNA, 788 bp, Unknown
  Bacterial polypeptide expressing nucleotide sequence isolated from the Sargasso Sea
ttgttatgctaaaactatcgacttatcttctgaaaaagaacctcagatatacaatgcgattaaatatggagctatacttgaaaatataggtttttatgaaaactcatctactccagattatgaagatgcaactattacagaaaacacaagagtttcataccctttacatcatattgacaatattatgattccatcatctgcatcaggtcctaaaaatattttctttttaactgccgatgcttttggtgtattgcctccaatttcaaaattaactacagatcaggcaatgtatcattttatgtctggttatactgctaaggttgcaggtacagaagtaggtattactgaaccaacaactacattctctgctggttttggtgctgcttttttacctcttcatccagttgcatatgctgagttgttaggtgaaaaacttagaggcacagacattaacgtatggttgataaatacaggatggacaggtggttcctatggtgttggttcccgaatgaagttgtcatatactcgtgctatgattacagcagcacttaatggagaattagacaacgcaacatttaagaaactcccaatatttgagttgaattatcctacatcttgtccaaatgttccaagcgaattattaaacccaagagatacatggtctgataaagctaaatatgatgatacagcaacagatctggcatctcaattcgtaaagaattttgagcaatatgtttctgaagctagtaaagaagtattagcagcagctcctaaagtattggtataaa

SEQ ID NO: 277494 - DNA, 814 bp, Unknown
  Bacterial polypeptide expressing nucleotide sequence isolated from the Sargasso Sea
cctgctcaccccctatgggattcattgtcagactaattttcgcaacgcaagtcccgccattctctatgaagaagcacttttatacgaaacagattccgcagtgtccgacacaggagcactgatcgtttcttcttcaaaaaaaacaggaagaagccctaaagacaagcgaatcgttaccactcctgaattcatcgacgacatatggtggggcgatgtcaatatcgggattgatgaagacacttttttaattgtccgggaaagggcaatcgattacctgaatatttgtgaccgactctacatcaccgatggttttgcagggtgggatccgaaataccgcatcaaggtcagagttgttgccagccgtccctatcatgctttgttcatgcacaatatgctcatccgacccgatgatgcgcagcttgaggaatttggaaagccggattacgtcattttcaatgcaggaaaatttccggcaaatccgcataccaaatacatgacctccaggaccagtgtggacctcagttttgcccgaggagagtttgttattctcggaacggaatatgccggagagatgaaaaaaggggtctttactatcatgaactacatcatgcccaaaaagggaatcttatccatgcatagttcagcaaatgttggaaagaaaggagacgtatcgctatttttcggactctccggaacaggaaagacgaccctttctgctgacccgaaccgtagcctgattggggatgatgaacactgctggactgatgatggaatctttaacattgagggggggatgttatgccaaatgcattga

SEQ ID NO: 277495 - DNA, 927 bp, Unknown
  Bacterial polypeptide expressing nucleotide sequence isolated from the Sargasso Sea
catggttgggtctcatcccgatcactatcttccaattgaggtaataactgaaacagcttggcagagccttttctcaagattgatatttattgatcctgatgaatttaacccaaaagctaaaagtaactggaaaatacttagcgcagcaaattttgaatgtgtgcctgaaacagatgggactaattcagatggttgtgtaattataaattttaaagagcaaaaggtccttattgcgggcatgaagtatgcaggcgagatgaaaaaatcaatgttctcggtacaaaactttcttcttcctgccaaagatatccttccaatgcattgttcttcgaatatcaatgataaaaattcagtagcactattttttggtctttcaggtactggaaaaactactctctctgcagatccagcatgtacattgatcggtgatgatgagcatggatggtcttcgggttctgtttttaatttcgaaggtgggtgttatgcaaaatgtatagatctctccgaggaaaatgaacctgtaatttggaaggctattaaagaaggaagtattttagaaaacgttgtattaaatgatggggttcctgattactcagatatttcgttaactcagaattcaagatgctgctatcctagaacacatatagaaaaagcagtccctgaaaattatgctggtgaaccaaagacagtaatcttcctaacttgtgatttgactggtgttctgcctccagtatcaatactgtctaaagaagctgctgcctatcattttttaagcggatatactgcaaaggttggatctacagaaattgggtcatcttcagatattgaatcaactttctcaacctgttttggagcaccatttttcccacgacctgcgggtatttatgcagaccttctaatgaaaagagtcgaagaatttcggctcaa

SEQ ID NO: 277496 - DNA, 633 bp, Unknown
  Bacterial polypeptide expressing nucleotide sequence isolated from the Sargasso Sea
cctatccgttagattttatacctggagtaacgttggaaggaaaaacttctcatcctagaaatattattatgttaacagcagatgcttttggggtgctcccaccaattgcaaaactaactccagcccaagctatgtatcattttttatccggttatacagcaaaagttgcaggaacagagatgggtttaagttctgagccaacagcaactttttctacttgttttggggctccatttatgcctagaaatccaattgaatatggtaatttattaaaaagaaaaatttcagaatttaatgttacctgttggctagttaatacaggttggtctggtggtgtctatggtgttgggaaaagaatttctataaaagatacaagacaacttttgaatgaagctctcataggaaatttatcaaacatcgaaatgagaaaagatgataattttggttttgaaattccaaagtcagtgaatggtatagactcaaatatacttaaccctagaaattgctggtcagatcctaccgcttatgacttacaggcaattaagctagttaatatgtttatagaaaatttcaaaaaatttgaaactgatgttgatgaaaatattaagtcttctggaccagttattaattaat

SEQ ID NO: 277497 - DNA, 745 bp, Unknown
  Bacterial polypeptide expressing nucleotide sequence isolated from the Sargasso Sea
actgagaaaaacaaccttatcaacagatccaaagaggcaattaattggtgacgatgaacatgggtgggataatgaaggtgtatttaactttgaaggcggttgttacgcaaagaccattgaccttgataaagataaagaaccagatatttttaaagctgttagaagagacgctcttctagagaatgttacagtaaatgaaaatggaattgttgactacagtgatacctcggtcactcaaaatactagggtatcgtatccaattcatcacattgacaatattgtaaagccaatatcaaaaggggggcatgcctctaaaattatatttttaacagctgacgcatttggagttcttcctccaatatcaaaactttcttatgaacaagctgagtatcattttctctcagggtttacggcaaaattagcaggtacagaaaggggtgtaacagaacctcagccggctttttcagcatgttatggagcagcttttctaatgttacatccaacacgatattcaaatgtattgtccaaaaaaatgaaagaatcaaattcacaagtttttttagtcaatacgggatggaatggtaaaggtaatagaatttccttaaaggatacaagattaattatagacgccatattaaatgatgaattaaaggatatagaaactgaaattatacctttttttaatttatcaattccaaaaaatcttaaaaatatttcttcaaatgtaattgatcctagaaaatcc

SEQ ID NO: 277498 - DNA, 504 bp, Unknown
  Bacterial polypeptide expressing nucleotide sequence isolated from the Sargasso Sea
gtgcagcctatcactttttaagtggttatactgccaaacttggttctactgaaagaggagttggagcccctattcagtcaacattttctacatgctttggagccccattctttccaagaccagcaaatgtatatgcagatcttcttattaagcgcattgaagagttcggatctaaagtgtttcttgtaaatactgggtggactggcgggccttatggagttggttctagatttgatatacctgtcacaagaagaatagtaaatgcaatccaagatggagaactgcatgaagtagaaacagaaaaagtacctggtttaaacctagaaatacctttgctagttcgaggagtggattcaaaattattaaatccaattaataactggaatgataaagatgaatatcaaaaacaattgaaagatttagtttcacaattccaagaaaacttcaaaaaatataatgtacaacctgaaatagtatcagccggtccaggatttgatgactaat

SEQ ID NO: 277499 - DNA, 832 bp, Unknown
  Bacterial polypeptide expressing nucleotide sequence isolated from the Sargasso Sea
gcctttttctccgttttgaattatgttttgcccgtccgtggtgttttgcctatgcattgtgctgctaatcgaggtgaggatggggatgtggccttattttttggtttgtccggaaccggtaaaaccacattgtctgctgatccaaagagacaattgataggggatgatgaacatgggtggtttgcagaaggggttttcaattttgagggtggctgctatgcaaaatgtattaatttaactgaaaaaagcgaacctatgatttggcaagcagcccatcaatcaacagcaattttggaaaatgttgtgctgaaagaaggtggtattcctgacttccatgatacttcaattacttccaatacccgagcagcataccctagagatgttatttctaatattgtgcctgaaaatatggggtctaccccaaaatccgttgtttttctaacttgtgatctgtatggtgtgttgccacctgtttctgtgttgagtcatgatcaagcaattttttggtttttgaacggttatactgcacttgtaggtagtacagaagtgggtagttctcgagaaataaacccaacatttagtacatgctttggtgctgctttctttccccgtaatcccactgtatatggtgacttgcttttacaaaaactaaagtcttctgaggcacaagtttatcttgttaacacagggtggcactcgggatcatatgcgtgtcaaggacagcgctttgaattaagctttacaagaaaaatcattgattttattcatgatggtactattttaagctcagaaaaagaaaacttttcagtatttgatttgcagatcccttgtt

SEQ ID NO: 277500 - DNA, 730 bp, Unknown
  Bacterial polypeptide expressing nucleotide sequence isolated from the Sargasso Sea
caacggctgcgtgatgatcaactttgccaagcgcaaggctctgctggctggcatgcactacgccggcgagatgaaaaaggccatgttctccgtgcagaatttcctgctgccggagaaagacgttctgcccatgcactgctcggccaacgtcggtgaagacggcgaaacctgcctgttcttcggtctgtccggcactggcaagactaccctctccgccgatccccaccgcttcctcatcggtgacgacgagcacggttggggcccgggcaccgtattcaacatcgaaggcggttgctacgcgaagtgcatcgacctgacccggaaaaatgaaccgatcatctgggacgccatccgtttcggtgccattgtcgagaacgtgaccatcgaccctgagacccgtgagccggattacaccgacgtatccctcaccgaaaactcccgctgcgcctacccgcttgagcacgttgaaaagcgcgtgatcgagaaccgcgccggtgagccatctcacatcgtgttcctgacctgcgacatgaccggcgtcctgccgcccgtgtccatcctgagccgcgaaggcgccgcttaccacttcctgagtggctataccgctctggttggctccaccgagatgggctcctcctcgaagctgaagtccaccttctcaacctgcttcggtgcgcccttcttcccccgtccggccggcgtttacgccgagcttctgatgaagcggatg

SEQ ID NO: 277501 - DNA, 759 bp, Unknown
  Bacterial polypeptide expressing nucleotide sequence isolated from the Sargasso Sea
aatgaagatttatggaaatgacttaggtctagatagccttggactaaataacctaaagaatgtacatcgaaatctatctgtatcagaactagttgacgatatagttaataataatgaaggtatcatcggtctacgaggagcggctatggttgatactggtatttatactggacgctctcctcaagataaatatattgtagatgaaccatcttctaatgaaaaactttggtggggacccgtaaataaaaagatatccgaagatatctttgatatgctttatgaaaaaattaccgattattataattcaactgatcataacaagacctatgtatttgatggttttgcaggtgccgatcctaattattctttgaatgtaagaattattgcgaaaaaagcttggcaagcccattttgttaataacatgttcatacgccctaaaaatggtgagctagacgaatttaaacccggttttactataataaatgcatctgatgtttcaaatgaacgttttgatgagtttggtatgaattcagaaacgtttattattttccatatggaaaaacggattgcaatcatcggtggaactgaatatggtggtgaaatgaaaaagggtatcttttctgttctacattatcttctccctcaaaaaggtgtactttcaatgcattgctcagccaatgtgcaagaagatcagaaaaatcctgctattttcttcggtttatctggtacgggtaaaaccactttaagtaccgatccaat

SEQ ID NO: 277502 - DNA, 726 bp, Unknown
  Bacterial polypeptide expressing nucleotide sequence isolated from the Sargasso Sea
atattgtataaacgagtgatcgaatattacaataaatctgactcatcaaaaacttatgtttttgatggttttgcaggcgctgaccctaattacgcactaagtgtaagaattttagcaaaaaaagcatggcaagctcactttgttcataacatgtttataagaccaaaattaaatgatttagatagctttaaacccgattttacgattatcaacgcctctgacctaaaaaatgtcgattataaaaagtttggaatgaattctgaaacatttattatctttcatttaacaaaaaaaatcgcaattattggtggaactgaatatggtggggagatgaaaaaagggatcttttcagttttgcactatattctacctcaaaaaggtgttctttcaatgcactgttctgcaaatgtgtataaagatggcgaaaatcctgctattttttttggattatcaggaaccggaaaaacaacattaagcacagattcagatcgaccattagttggtgatgatgaacatggttggtcaaatgatggtatttttaactttgaaggaggttgttatgcaaaggttattaatttaaaccccgaagaagagccggatatttacaatgccatccgtgatggggcattgcttgaaaacgttgtctatgacaaaaaatctaaaaagattgatttttctgatggttcaaagacagaaaatacacgagtctcataccctttaaatcat

SEQ ID NO: 277503 - DNA, 904 bp, Unknown
  Bacterial polypeptide expressing nucleotide sequence isolated from the Sargasso Sea
gagaaaaagattgcaatcattggaggtacagagtatgctggagaaatgaagaaaggaattttttcaatgatgcattattatttgccaatgaaaaatgttctttcaatgcactgttcagcaaatgtatctaaaactcaagatcaatcaactgtattttttggtctttcaggaacaggaaaaacaacacttagtaccaatgcaaatcgacctttaattggtgatgatgaacatggatggtctgataatggtatatttaattttgaaggcggatgttatgcaaaagcaattaatcttgataaagataaagagccagaaatttataatgcgataaagcacggaacaatactagaaaatgttgtttatgattttgaaactaaagaagttgattttgatgatagcaccaagagtgaaaattctagaatttgctatccaatcaactttgtagaaaactcactaggttctaaaggtttaaaaagctctggcccacatccaaattcaattatatttcttacttgtgacgcatatggtataatgccaccactagctaaaatgacaaaaaaacaagctatgtatcatttcataagtggatacacagcaaaaatggctggaactgaaactggagttactgagcccatagctgcattttcaccatgttatggaggaccatttttaaccttacatcctttaagatatgctgaacttttagagcaaaagttaaatgattacaactcttcagtttttttagttaataccggatggtctggatcaagtgcaacaagcggatcttcaagaatagatttaaaaaaaacaaagcatattatcaatttaattactgacggtaatttagactttaataaatctgtgtttgataagttctttaatttagaaattccattagatgttt

SEQ ID NO: 277504 - DNA, 642 bp, Unknown
  Bacterial polypeptide expressing nucleotide sequence isolated from the Sargasso Sea
gatcgtcatatccaatcgattttctcgaaaatatcagcgaatccgggatgggtggccaccccgacaacattgttatgttaactgccgatgcgtttggtgtgcttcctccaataagtaaaatgactgccgaacaggctatgtatcacttcctatcaggctacaccgccaaggtcgctgggaccgagcggggcatgacctccggcgccgaggcgaccttctctacgtgttttggagcaccattcttaccgcgtcatccgacggtttatgcaaagatccttggagagcgaattgctaaacacaaatctacctgctggttagtcaatacgggctggagtggtggagcctatggtgtaggtgagcggatgaaaattgcacatacccgggcaatggttcgtgccgcccttgacggcaagcttgccactaccggcgttgccgaagatccaaacttcgggcttctggtgccggaaggctgccccgatgtgccaagtgatgtacttgctccgcggaatacatggagtgacaagggcgaatatgacaatacagcccagcacctcgccaaaaaattcgaggaaaatttcaagcaattcgaatcccatgttgatgatgaagtcaatcaggcgggcattcatgccgcggcttaat

SEQ ID NO: 277505 - DNA, 925 bp, Unknown
  Bacterial polypeptide expressing nucleotide sequence isolated from the Sargasso Sea
attttgcaaagagaaaaggtcataattgctggaatgaaatatgcaggagaaatgaaaaaagcaatgttctctgttcaaaatttcctccttccagaaaaagatgttctgccaatgcattgctcagcaaatgtagatgctaatggaaaagttgctttattttttggcttgtctggtactggaaaaacaaccctatcagctgatccatcgtgtcaccttattggtgatgatgagcatggatggtctgagggttctgtatttaactttgaaggcggctgttatgcaaaatgcatagatctttctgaggagaatgagcctgttatttggaaagcaattaaaaaaggcagcatcattgaaaatgtaattttagatgatcaactggtgcctgattatgctgatacatctcttactcaaaattcacgttgttgttatccaagatctcatgttgaaaaagcagtccccacaaacaatgggcctgaacctgaagttgtaatttttctgacttgtgatttaactggtgttctgcccccggtttcaatccttagtaaggaagcagctgcataccattttttgagtggctatacagcaaaagtaggttctacagaggttggttctacatctgcaattgagtcaacattttcaacttgctttggtgcaccttttttccctaggcctgctggtgtttatgctgatctgctaatcaaaagaatagaatcttttaattctcaagtttatttggttaatacgggctggactggaggcccacatggtgttggtgaaagatttagtatccccactacaaggagaattgttaatgctattcaagctggagaactaaaaaccacagaaaaaacaatgcttgatggtttaaatttagaaatcccaaatcatatgaaggggttgataagaacatactcaaccctagaca

SEQ ID NO: 277506 - DNA, 901 bp, Unknown
  Bacterial polypeptide expressing nucleotide sequence isolated from the Sargasso Sea
ttttggtctatctggaactggcaaaacaacgttaagtgctgatccaaagagatctctattaggtgatgatgaacatggctggtctgacgatggtctttttaattttgagggaggatgctatgcgaaacttattcgtttgtcagaagaagctgagcctgaaatatatcaaactactcaaatgaagggaactgtcatagaaaatgtagtaatgaaagaaaatggccttttagatctcgacgataattctcttacagaaaatacaagaggggcatatccattagactatattcctggcgtaataaaatcaggtaaagcaaatcatccaaaaaatataattatgttaacagctgatgcttttggtgtgttgcctccaatcgcaaaactatcacctgatcaagctatgtatcattttctatcaggttatacagctaaggttgctggaacagaaattggactatcaaatgaaccacaagcaacattttctacttgttttggggctccctttatgccgagaaatccaatagaatatggcaacttgctcaaagaaaagatttctaaacataatgtagactgttggctagtaaatacaggttggtctggtggtgtttacggtgtgggtaaaagaatatctataaaaaatactcgaagattattagatgctgcattatctggtgagctttctaacgtagaaatgagaaaggatgacaatttcgggtttttcgtaccattagaagttaatggaattaatggaagcgtcttagacccaagaagtacatgggctgattcatctgaatatgatttacaagcaaaaaagttagtaaacatgttcatagacaattttgtaaagttcgagtctgatgttgaagaaaaaataataaattcaggaacttctcaaatttaa

SEQ ID NO: 277507 - DNA, 970 bp, Unknown
  Bacterial polypeptide expressing nucleotide sequence isolated from the Sargasso Sea
agatcttgcgactgatactttatcaaataaaccgctttatattgttgatgggttttgtggtgctaataaggatacacgcttatctgttcgtttaatttgcgaagttgcttggcaagctcatttttttaaaaatatgtttattcgtccaagccaagatgaactagaaaatttcaaacctgactggacgattttaaacgcttgtaaagccacatgtgcaaactatgaagaattaggtctgcgctctgaaacctttgtgacgtttaatattactgaacgtatgacgttaatcgctggtacatggtacggcggggaaatgaaaaaaggtattttttcaatgatgaattactttttacctctcaaaggaattggcgcactacactgttctgctaatcaaggtaaaaatggcgatactgctttattttttggtctttctggaacaggcaaaacaacgctatcggctgatcccaaacgtaaattaataggtgatgatgaacatggatgggatgatgagggtatttttaactttgaaggtggttgttatgcaaaaaccatcgatttaacagaggaaaaagagcctgatatttatcgcgctattcgtaaaaacgcattgttagaaaacgttgtaatgaacaatgacaacatcattgattttgaagacggttcaaaaactgaaaatacacgtgtgtcttatcctattgatcatattgataatattgttaagcctatttctagcggtacacacccttctaaaattatttttctaacttgcgatgcttatggtgtgttgccacctgtatctaagctaaacaatgatcaagcaatgtatcaatacttaagtggctatacagctaaagtagcgggtacagaacttggcgttacagagccaacagctactttttcttcttgttttggaaaacgttttttgacagtgcatccaactcaatacgcacatacattaggggaaaaaatg

SEQ ID NO: 277508 - DNA, 856 bp, Unknown
  Bacterial polypeptide expressing nucleotide sequence isolated from the Sargasso Sea
aagggaattttttcaattatgcactatattctacctttgaagggtgtcttatcaatgcattgctctgcgaatgttgactatgatggtacgaattctgcgttattctttggtttaagtggtaccggtaagacgacactaagtacagattcaaaaagacctcttattggtgatgatgagcatggttggtctgataatggaatctttaattttgagggtggttgctatgctaaggctataaatcttgacccagatacagaacctgatatatataatgcgataagacctggtgcactactagaaaatgtagtttatgatgagcatacaaaagttgttgattattttgatggttcaaaaactgaaaatacgagagtatcgtaccccataaactttatagaaaattcagtatttgcgcaggggcatccaagtgtagcagatcatccagagaaaataatttttcttacttgtgatgcttacggtattcttccgccggttgcaaaattagatcccgaacaagctatgtaccattttattagtggatatacagcaaaagtagctggcacggaaaggggtatcactgagcctactgcaaccttctctccatgctttggtggtccatttcttactcttcatccattaagatatgcggaaattttaagagaaaaaatgaatgagtttgatgtcccggcataccttgtgaataccgggtggattggtgcgagtgctcaaagtggagcaaagcgtattagtcttccccttactcgaaaaataattcataaaatattagatggttctattgagtccgttagctttgatgaagatgtttattttggttttctgataccaaagtccattagat

SEQ ID NO: 277509 - DNA, 700 bp, Unknown
  Bacterial polypeptide expressing nucleotide sequence isolated from the Sargasso Sea
ctgctaaattacattcttaccgatgttggaataatgccaatgcattgttccgcaaatatttcaaaggaaaagcctgagaattctgctatattctttggtttatctgggacaggaaaaacgacgctttcatcggacccagatagaatacttatcggtgacgatgagcacggctggtctgacgacggtattttcaattttgaaggtggttgttacgcgaaaacaatcaatctgtccccagagtcagagcctgatatttacagaacgacttctttgttctcgactgtaatcgaaaatatggtctacgacgagaggaccaaaaagttggactttgaaaacgatagccttacagcaaacatgcgtgctgcctatccaatgcactatataccaaattctagtgagacaggcttggcagcgaagcctgaacacgtcattttgctcacgtgtgatgcttttggagttatgcctcctatagctaggctcacgcccgcccaagcaatgtatcatttcctctcaggttttacttcaaaagctcctggtacagaaagaggagtaacagagccagaaccaacattttccacatgttttggagccccgtttcttccaaggccacctcaagtgtatggaaatctattcaaaaggaaaatctctgaaaataactcctcttgttggctagttaacactggatggaccggtggaggat

SEQ ID NO: 277510 - DNA, 781 bp, Unknown
  Bacterial polypeptide expressing nucleotide sequence isolated from the Sargasso Sea
gttgcatggattgaaaaatctaggctcaattcattggaatcttagtgctcctgctctttatcaagaagccatccgaagaaaagagggggtagtgacggctggaggcgcactcaccgttgctacaggaattcatacgggtagatcaccaaaagataaatttattgtggatacaccgtctattcatgaccatataaattggggcaatgtcaataagcccataagtgagggaaactttgaatctttattcagcaaagtgacctcttacctccaaggccgcgatgtatttgtccaggattgttttgcgggtgctgatcctgaatatagattaaacgttcgagttataacggaatccgcatggccaaacctatttgcacaaaatatgttcatcaggccctcagttgaacaaaaactctgcttttccccagatttcacggtaattcatgttcctggtctgcaggccgcgggagccactgatggcgtgaactcagaaacttttatcttggtgaattttgatagaaaaatggttttgatagggggaagccattatgcaggggaaataaaaaaatcgatttttggaattcttaactacctgcttccagatagagatgtaatgccgatgcattgttcagcaaatgtcggaagcaatggcgatagtgcgattttttttggattatccggtaccgggaaaacgaccctatctgccgacaagtccagggccttaattggtgatgatgaacacggttggtcacaaaatgggattttcaattttgaaggtggatgc

SEQ ID NO: 277511 - DNA, 773 bp, Unknown
  Bacterial polypeptide expressing nucleotide sequence isolated from the Sargasso Sea
gatgttctctatgatgaactatctcttgccgcgcaaaggtattgcgtccatgcattgttcagccaactgtgatgcaaagggtgatgttgccctgttttttggtctttctggtaccggcaaaaccaccttatctgcctctgcagaccgaagtttgattggtgatgacgaacatggctgggacgacggaggcatttttaattttgaagggggctgttacgccaagaccagcgacctcaacgaagcgagcgaaccggaaatatacggagccatccggcgtgatgcattgctcgagaatgtgattgtagacgataatggtaaaattgattttagtgacaccagcctcacgctaaatactcgggtatcttatccgatttatcacatcgacaatatcgtccgaccagtgtcaaaagcagggcacgcaaaacatgttttgtttctaaccgctgatgcttttggcgttttgcctcctgtgtcgattcttgatgacgcaaaaacacaataccattttctgtctgggtttaccgccaaaatggcagggatggaacgtggtatgactgaacaccaaccaaccttttcagcctgcttcggggcagcgttcctatcactgcatccaacaacatatgctgaggttttaagtaagcggatgcgtgatgctggggccaaagcttatctgattaataccggctggaacggaaagggcgcgcgcattccactgaaaaccactcgagcattaatcaacgcgatattttcgggtgagattgataaaagcgaaa

SEQ ID NO: 277512 - DNA, 922 bp, Unknown
  Bacterial polypeptide expressing nucleotide sequence isolated from the Sargasso Sea
aagaaacttggcaatacttagtgcgcctgaatttgtttgtgtttcagaagttgataaaaccaacagtgacggtgtagttattctagattttactgctaagaaagttctactcgcaggtatgccttacgcaggagagatgaaaaagtctatgtttgccgtgcaaaacttcttacttcctgcaagcgaagtattacccatgcattgtgcatctaacgttagtcatgatggggaagtttgtctattttttggactttcaggaacaggtaaaacaactttatcagccgatcctcatagaaatttaataggtgatgatgaacatggttggggaccaggaacagtgtttaattttgaaggaggttgttacgcaaaatgtatagatttaaccaaaaaaaatgaacctgtgatttgggatgctataaaaaagggaagcgttatggaaaatgtggtaattgatgcccaaaccaaagtgcctgattacagcgattcatcgttgaccgaaaatactagagttgtttatccgagggagcacatagagaaaagggcagatgaaaatgcagcaggtgaacctaatgcagttatcttcctaacttgtgatttatcaggtgtaatacctcctgtttctattctttctaaagaagcagctgcttatcattttttgagtggatatacagccgctattggttctacagaagtaggttctactgaagcctttaaaacaacgttttctacttgctacggtgctcctttttttccaagagctgcaggagtttatgcagacctactgatgaaaagaattgaagagtatggcagtaatgtctatctcgtaaataccggctggacaggtggtccttatggaacaggtaaacggtttgatataccggttactaggtcaattataagcgctatacagtcaggtgagttg

SEQ ID NO: 277513 - DNA, 950 bp, Unknown
  Bacterial polypeptide expressing nucleotide sequence isolated from the Sargasso Sea
aagaagtccaaaggacaagcatattgttcggcatgaagattcagagaaggatgtgtggtggggaagtacgaatcatcctattgaagagcacacattccttttgaatcgccagcgggcaattgactatctcaatacacgagatcagatctatgtttttgatgggtttgcaggttgggatccaaatcatcagatcaaagttcgagtaatctgtgcgagggcttatcacgcgcttttcatgcataacatgctcattcgtcctacacgtgaggaactagagaacttcggagatcctgattgtgtcatctacaatgcggggcaatttcccgcaaattccttgacggcacagatgacaagtcgtaccagtgtagatatttcacttgaacggaaagaacaggtcattctcggaactgagtatgccggggaaatgaaaaaaggggtgttcacactcatgcattggttgttgccacccaaaggtgtgctttccatgcattgtgcagcgaatgagggaaagtcaggagacgtatctcttttttttggtttgtcggggacaggaaaaactaccctgtcagctgatccaactcgaaggcttctcggcgatgatgaacacggatggagtgacaatggtgtttttaacattgaaggaggatgttatgcgaagtgtatcggccttgctttggataaagagcctgacatttatcgagccattcgattcggcacagtgctagaaaatgttgtttacgataaaaccacgcgtgaagtaaattacaactcgaatgcgataacagaaaatacgagagcggcatatcctctcaaatttattaaaaatactcggatgccatctctcgcgggtcatccaaaccatgtgattttcttaacgtgcgatgcttctggagtgctgccaccagtgagtcggcttacgcctgagcaagcgatgtatcagtttctgtcag

SEQ ID NO: 277514 - DNA, 685 bp, Unknown
  Bacterial polypeptide expressing nucleotide sequence isolated from the Sargasso Sea
ggtgatcaacgatcaaggtgttccagactactctgatagcatatatacggaaaatactagagtttgttatccgagagattttatagatggtgccgtacctgctaatgaaggcgacgaacctgataacataatttttttaacatgtgatctatctggggtcttgccgcctgtaagtatcttgaatgaaaatgcagcagcctatcattttttaagtgggtacactgcgaaagttggttctacagaaataggtgcctcaaaatcaatggattttactttttcgacttgctttggtgctccgttttttcctcgacctgcaagggtttatgcagacttacttattaaaagagcaaaaagaaatgaaacaaaagtctttttagtaaacactggttggacaggcggaggttatggtattggcaaacgattccctattccagttacaagagcaataattaatggtattcaagataataaaataaacttcgataatttgacttacttagataaacttaatctttatatccctaatgagcttgatggagtagatagcagcttcttaaacccaaaaacctcatggagttcagctgaagaatatgacttagaatgcaacaaactatgtgaaagatttaaacaaaactttaaaaaatttaatgtatctcaagaaataatagatgcaggaccaaagtag

SEQ ID NO: 277515 - DNA, 865 bp, Unknown
  Bacterial polypeptide expressing nucleotide sequence isolated from the Sargasso Sea
gaaaaaacagtcatcatcggtggtacagagtatgctggtgaaatcaagaaatctattttctcaattatgaatcatctattgccggctcgtgggcacctgcctatgcattgctcttccaatacaaccggagacaacacagctgtcttctttggtctgtcggggactggaaagacgacactttcagctgaccccaatcgggctctggtcggagacgatgaacacggttggtctgccaagggtgtgttcaactttgaaggtggatgctatgcaaagttaatcgatctctctgaagaagatgagccggcgatttttgcaaccacccaaatgccaggttccatcctagagaatatcatcgtcaatgatgatggaatcccggatttcaccgatgatactctcactgccaatacccgaggttcttacccgattgaattcatcgagaaccgaacacatgattccatggcaggacatcctcagaatgtggtgtttttgacctgtgatgcgtttggagttcttccacccattagtcgactcaatcctgctcaagccgcctatcacttcatctcgggatacaccgccaaagttgccggaacagaggtcggagtcaaggagccacaggcaacattctccgcttgcttcggtgcaccattcatgccacggcatccaagcgtatacgcagatctcttggcagaaaaaatggcgcaacatggagccaagtgttggttactgaataccggctgggttagtggtggatacggtaagagtaagcgaatccgaatcaaatggacacgtgcactgctcaatgctgcactagatgggagcctcaatgatgttgagtttgttatcgatcccaaggtttggttttgaa

SEQ ID NO: 277516 - DNA, 871 bp, Unknown
  Bacterial polypeptide expressing nucleotide sequence isolated from the Sargasso Sea
gtagatgacattatttcgaataacgaaggtgtcctagcctctacaggagctgctattgtagatactgggaaatatacaggaaggtcaccgaaggataagtacattgttgttgaagcttcaagcagtgaaaatatttggtgggggaatgtaaatcaaaaaatttctgaggaaatatttgatgatttatacagcgaggtactagaatattataattcatcgcaatccaagacatatctttttgatggatttgctggtgcagattctgattacgctttatctgtacgatttttagtgaaaaaagcatggcaggcacactttgtacataacatgttcattagaccacaaaatggtcaattgaaaaattttaatcctgactttacaataattaatgcttcagatgtaaaaaacctgaattatgaaaagcatgggatgaattcagagacatttataatctttcatttgggtaaaaaaattgcaatcattggtggtacagaatacggtggtgaaatgaaaaagggcattttttcaattatgcactatattctacctttgaagggggttttatctatgcattgctctgcgaatgttgactatggaggtgataattctgctttattctttggtttaagcggtaccggtaagactacactaagtacagactcaaaaagacctcttatcggagatgatgaacatggttggtcagacaacggaatttttaattttgagggtgggtgttatgcgaaggctataaaccttgatccaaatgcagagccagatatttataatgcaataaggcctggtgccctattagaaaatgtagtttatgatgaggatacaaaagttgttgattattatgatgggtcaaaaaccg

SEQ ID NO: 277517 - DNA, 878 bp, Unknown
  Bacterial polypeptide expressing nucleotide sequence isolated from the Sargasso Sea
gcagatttagttgaacacgctattcgtcgtaatgaaggtgtattagcggacaacggcgctttggtggttaaaaccggtcatagaactggtcgctcacctacggatcgctttattgtgaaagaagccagcacagagcaggatattcaatggggcaatgtcaatcgtccttttgatccggtgaaattttctgcgctttgggctcgtgtcagcgactttattgcgaccaaagaacattttgtctctcaccttgaagtaggtgcagatccggaacactacattccgatgacggtgaccacagaaaccgcatggcaacatatttttgccaaaaacctgtttatcacatcagcacactggaacaaagctggcaaagagacctggcaaatactgaacgtgccttcgtttgaatgtgacccagagcgtgacggcactaacagtgatggtactgtaatgatcaactttgccgagcgcaaagtgttattagcaggcatgcgttatgccggcgaaatgaaaaaagccatgttctcagtacaaaacttcctgttgccagctaaaggtgtattacctatgcactgctcggctaacgtaggtgaagcaggcgacaccaccttattcttcggtttgtcaggcactggtaaaacaaccttatcagcagacccgaaacgttttctgattggtgatgacgaacacggctgggcacctaactcagtgtttaacattgaaggtggttgctacgctaaatgtatcgacctgtcgaagaaaaacgaacctgtgatttgggatgcgatccgcttcggtactattctggaaaacgtggtgttagacgctaaccgtactccggattacaaagatgccagcctgacccaaaacagccgcgccgc

SEQ ID NO: 277518 - DNA, 856 bp, Unknown
  Bacterial polypeptide expressing nucleotide sequence isolated from the Sargasso Sea
atgaatagtaaatcacaaccttttaagcctcagacattaacaactgagcaacttattgatgctgctgtcgaaaataaagaaggtgtgattgcaagtaatggtgcattttctacaactactggggataggagttctagaagtccaaatgatagatttattgttaaagaagcgcatacagagaatttaattgaatggggtgaaattaataagccttttgaaagagaaaaatttaatactttatggaccaaggttgaatcttatttagctgagaaagatagttattcttctgaagttcatgtaggcgcacatccagaacattatttgccagtaaatgtaactactgaaacagcctggcactcattatttgctagattaatttttatatgtcctgaaaaattcaaccctcttaataaaataaaatgggaaatattaagcgcagcaaactttgagtgtattcctaaagaagacgggactaattcagaaagttgcataattataaatttttctgaaagaaaagttcttatagctggaatgaaatatgcaggtgagttaaaaaaatcaatgttttcagttcaaaactttttactgcctgacatggatgttttacccatgcattgttctgcaaatataaataaaaataatagagtaacattattctttggtttatcagggactggcaaaacgactctttcagcagatactaaatgctctttaataggtgatgatgaacatggttggagtgaaggggctgtatttaattttgaaggaggttgttatgcaaagactgttaatttatcagtcgaaaatgaacctgtaatatataaggctattaaacatggtagtgtaattgagaatg

SEQ ID NO: 277519 - DNA, 574 bp, Unknown
  Bacterial polypeptide expressing nucleotide sequence isolated from the Sargasso Sea
catagagccagataatattatttttttaacttgtgatttatcaggagtattaccaccggtaagcatacttaacaaaacttctgctgcttatcatttcttgagtggttatactgctaaagtaggctctactgaagtggggagtacaaagtccatggatttcactttttcaacttgctttggagcccctttttttcccaggcctgctggcgtatatgcagatttgctgatcaaaagaatagaaaaaatggatacaaaagtttatcttgtaaacactggctggacaggaggaggatatggagtaggaaaaagattccctattcccgtaactagagcaatcatttcagcgatacaagataatgccattgaccatactgatacttatcatatggaacctttaaatttaataattccgaataaaatatctggagtagatgaaaaatatctaaacccaaaagaggcatgggaggacaaagatatgtatgactctgaagccgaaaaattggcacaaagatttaaagataacatcaaaaaatttaaagtgagcgaagagattcttgcttctggcccaaaataa

SEQ ID NO: 277520 - DNA, 748 bp, Unknown
  Bacterial polypeptide expressing nucleotide sequence isolated from the Sargasso Sea
gagaaattcaaaatagaatggacggtaatatcagctccaaattttcatgcaaatcctaaagaagatggtattgataatgagaatttttcaattattaatttttcaaagaaaatcataataattggtggaactggatatactggtgagattaaaaaaggaattttttctgttttaaatttcactttacctgtacagaaaaatgttttaccaatgcattgcagtgcaaactcaggagagaatggtgacacctcaattttctttggtctttctggcaccggaaaaactactctgtcaaccgactcttcaagaaaattaattggggatgatgagcatggctgggatcaagatgataacatctttaattttgagggtggttgctatgctaaagtattaaatctttcaaaggaaaaagaacctgaaatttttggtgctataagcagaggtgctttactggaaaacgttattcttgacaataacggtgaggtcgattttaaaaacaagacaataactcaaaactcaagagttagttacccaatttactttatcaataatatcaagcaaccctcaatagggaataacccaaaaaatattttctttttaacagcagatgcttttggtgttttaccaccgatatcaaagctaactccaagtcaatctgcttatcattttatttcaggttacacctcaaaattagctggaactgaagacggagttgacgaacctgtcccttcattttcagcatgctttg

SEQ ID NO: 277521 - DNA, 865 bp, Unknown
  Bacterial polypeptide expressing nucleotide sequence isolated from the Sargasso Sea
gatatttggtggggtgatgttaataagccgatcagcgtcgagcacttcaaccaattgcattctaagatgctattgcatttgaacggttgtgaggtcttcatccaaaattgctacgcgggcgccgacccggcgaaccgtctaaaggtccgggtgataacggaaaatgcctggcacaacctgttcgctcgaaacatgttcattcagccaccagcagatgaactgcatgacttcgaaccggatttcactgttttgcaatcgcccagcgtgactgctgatccgtccgctgatggcaccacgtcaccgacattcattgttgtcaatctgacaaagcggataatccttgtgggggggtccgcgtacgctggcgagatcaagaaatctatcttttcgattatgaactatctgatgccgccgcgcgaaattctgcccatgcactgttcagcgaatatcggtcccgaaggcgaatcggcaattttttttggcctgtctggcacgggcaagaccaccttgtcggctgacagctcacgggtgttgataggtgatgatgagcacggttggggcgccaaaggtctcttcaactttgagggtggttgttacgcgaagactatcaacttaacccaagaggccgagcctgaaatctacgatctttgtcacacgtttggttcgatcatcgagaacgtgatgatggatcccgacacacgagagctcgatttcttcgatagcacctactcggaaaacggaagggtgagctatgacatctccaaggtcctgaacgcgtcggcaaccggccaaggtggtcaccctaagaatattatcatgttgacgtgtgacgcctttggtgtgctgccaccgatcagccaactca

SEQ ID NO: 277522 - DNA, 907 bp, Unknown
  Bacterial polypeptide expressing nucleotide sequence isolated from the Sargasso Sea
tcgattatgaactatctgatgccacctcgtgatatcctgcccatgcattgttcagcgaatatcggtcccgagggagaatcggcaattttctttggtctatctggcacgggcaagaccaccttgtctgccgacagttcgcgagtgctgataggtgatgatgaacacggttggggggccaatggcctcttcaatttcgaaggtggttgttacgccaagactataaatctcacccacgaggcggagcctgaaatatacgatctttgtcacacgtttgggtcgattatcgagaacgtgatgatggactccaatacacgtgagctcgatttcttcgacagtacctactcggaaaacggcagggtgagctatgacatctccaaggtcacgaatgcgtcagtaaccggtcaaggcggtcaccctaagaatattatcatgttgacgtgcgacgcctttggtgtgctgccaccgattagccaactcacaccagaccaagccatgtatcacttcctaagcggttacactgcgaaagtggctggaacagagcgtggcctgaaagagccggccgcgacgttctccacttgctttggcgcacctttcatgccgcgccacccgaccatttatgccaagttgttaggggataagatggctgaacacgatgcgaagtgttggcttgttaacacgggttggtcaggtggggggtatggtgtcggtgcccgaatgaagattgcttatactcgggccatggtgaacgcggctctaaatggtaaactaggagaggttgaggtttctccagatcctaacttcggcgtattggtgccgcaggcctgccccgatgttccaggtgaggttcttaatccaagaaacacctggagtgatagcagcgcctacgattcgcaggcccgtaatctca

SEQ ID NO: 277523 - DNA, 874 bp, Unknown
  Bacterial polypeptide expressing nucleotide sequence isolated from the Sargasso Sea
gcaattaataggtggcacgtggtatggtggtgaaatgaaaaaaggtatgtttgctgttatgaattatttactacctcaaaaaggtatagcttcaatgcattgctctgctaacaaagggattaaagatgatacagttgctttgttttttggattatcaggaactggaaaaacaacgttatcaacagaccctaaaagaagtttaattggtgatgatgaacatggttgggatgatgacggaatttttaattttgaaggtggttgttatgctaaaaccgtaaatttagacccagaaaaagaacctgatatttttaaagctatcaaaaaagatgctcttttagaaaatgtaattgtaaatgaaaatggtaaagttgactatgatgatatttctctgactgaaaatactagagtatcttatcctatttatcatattgataacattgttcaaccaatttcaaaaggtggtcacgctaataaagttatttttttaactgcagacgcatttggcgttcttccagctgtatctatattgagtaatgaagaagctcaatatcatttcctatctggttttacagcaaaattagctggaacagaaagaggtgtagataaaccaacaccaactttttctgcttgttttggtgcagcttttttaacattacatccaacaaaatatgcagaagtcctctcaagaagaatgaaaatgaatagttctaaagcctatcttgttaatactggttggaatggtagaggtgaaagaatctcattaaaaaatactcgtacaataattgacaacatattaaataacaaaattgataatgttctaacaacaaaaattccaatttttaatttagaggtaccaactgaattaaatgaaatt

SEQ ID NO: 277524 - DNA, 807 bp, Unknown
  Bacterial polypeptide expressing nucleotide sequence isolated from the Sargasso Sea
ctctctctggtcaaaagttgagtcttatttagatgacaaagaaagatttttaactaaagtccatgttgggtcacatcctgatcactatcttccaattgaggtaataactgaaacagcttggcagagctttttctcaagattaatatttattgatcctaatgaatttaacccaaaaggtaaaagtaactggaaaatacttagtgcagcaaattttgaatgcgtgcctgaaatagacgggactaactcagatggttgtgtaattataaattttaaagaggaaaaggtccttattgcgggcatgaagtatgctggcgagatgaaaaaatcaatgttctcggttcaaaactttcttcttcctgccaaagatatccttccaatgcactgttcttcgaacatcaatgataaaaattcagtagcactattttttggtctttcaggtactggaaaaacgactctctctgcagatccagcatgtacattgataggtgatgatgagcatggatggtctccaggctctgtttttaatttcgagggtgggtgttatgcaaaatgtatagatctctctgaggaaaatgaacctgtaatttggaaagctattaaagaagggagtattttagaaaacgttgtattaaatgatggagttcctgattactcggatgtttctttaactcaaaattcaagatgttgttatccaagaacacatatcgaaaaggcagttcctgaaaattatgctggtgaaccaaagacagtaatcttcctaacttgtgatttgactggcgtcctgcctccagtatcaatactgtctaa

SEQ ID NO: 277525 - DNA, 805 bp, Unknown
  Bacterial polypeptide expressing nucleotide sequence isolated from the Sargasso Sea
aattttgagggaggttgttacgccaagactatcaacctcacccacgaggccgagcctgaaatctacgatctttgtcacacgtttggttcgatcatcgagaacgtgatgatggatcccgatacgcgtgagcttgattttttcgatagcacctactcggaaaatggacgagtgagttatgacatcgccaaggtgccgaacgcatcggcaaccggacaaggcggtcacccgaaaaacattgtcatgttgacctgcgacgcctttggcgtgttgccacccatcagccaactgacgccagaccaggccatgtatcacttcctgagtggttacactgcgaaagtggccggaacagagcgtggcttgaaagagccggcggcgacgttctccacttgctttggagcacccttcatgccgcgccaccccaccgtttatgcgaagttattaggggacaagatggctgatcatgatgcgaagtgttggctcgtcaacacgggttggtcaggtgggggttatggtgtcggtgagcgaatgaaaattgcttatacccggactatggtaaacgctgctcttaatggcagccttggtgaagtcgaacttgctccagattctaacttcggtgtattggtgccgcagacctgccccgatgttccggttgaggttcttaatccaagaaacacctggagtgatgttggtgcttacgattcgcaggcccgtaatctcacgcaacgcttcgaggataattttaagcagtttgaagatcatgtagacgacagcgtgaaagctgcagcaattcgtgccgctgcctaga

SEQ ID NO: 277526 - DNA, 610 bp, Unknown
  Bacterial polypeptide expressing nucleotide sequence isolated from the Sargasso Sea
aagaaaaagcagtccctggaaaattatgctggtgagccaaagacagtaatcttcctaacttgtgatttgactggcgtcctgcctccagtatcaatactgtctaaagaagctgctgcttaccattttttaagcggatatactgcaaaggtaggatctacagagattggatcatcttcagatattgaatcaactttttcaacctgttttggagcaccattttttcctcgacctgctggtgtttatgcagaccttttaatgaaaagagttgaaaattttggctcaaaggtttttctcgtaaatacaggttggactggaggaccttatggagttggaaaaagatttgatattccaactactagaagaatagttaatgcagttcaaaacggcgagcttgatgatgttgaaacccaaatgcttaatggtttaaatcttgaagttcctctatcgattgaaggtattgatagcaacttgctaaatccacgtgaaacctgggaagataaaggcgcttatgatgctgccgctactgacttgataaaattatttaaaaacaactttgaaagatttgatgtcagtgaagaaataatttctgccggtccttctgatcaataaa

SEQ ID NO: 277527 - DNA, 789 bp, Unknown
  Bacterial polypeptide expressing nucleotide sequence isolated from the Sargasso Sea
tatgcagaataagggtttattagatctggataattattatcgaaaccttcctgttgaggacttagtccatcatattgttcaaaacaatgaagggcgtgttggcttacgaggagctgcaatggttgatactggaatttatacaggtcgttcacccaatgataaatattttgtagatgagtcgagttcaaatgataaaatttggtggggttctgtaaataaaaagatagatgaagaaatttttgatgatttatacaataaagttgttgattattataataatggcgtgagtaattcatatatttttgatggatttgcaggtgcagataaaacttatcgtataaatgtaagaattattgcaaaaaaggcatggcaggctcactttgcacataatatgtttattagaccagatgaaaaagaattaaaagtttttgaaccagattttactattattaatgcttctgatattcaaaatgaagattttcaaaagcatggattaaattcaaaaacatttgttttattccatattggtcgtcgtattgcaattattggcggtactgaatatgggggtgagatgaaaaaaggtattttttcagttttgcattatctgctacctcaacaaggagtattatctatgcattgttctgccaactcagataaaaatggagataactctgcaatattttttggtctaagtggtactggtaagacgactttatcaacggaccctgatcgtactcttattggagatgatgaacatggttggtctgatgatggaatatttaattttga

SEQ ID NO: 277528 - DNA, 739 bp, Unknown
  Bacterial polypeptide expressing nucleotide sequence isolated from the Sargasso Sea
cggtggtacagagtatgctggtgaaatcaagaagtctattttctcaattatgaatcatctattgccggctcgtgggcacctgcctatgcattgctcttccaatacaaccggagacaacacagctgtcttctttggtctgtcggggactggaaagacgacactttcagcagatcccaatcgggctctggtcggagacgatgaacacggttggtccgccaagggtgtgttcaactttgaaggtggatgctatgcaaagttaatcgatctctctgaagtagatgagccagcaatttttgcaaccacccaaatgccaggttccattttagagaacatcatcgtggatgaggatgggattccagatttcacggatgattcaatcactgccaatacccgaggttcttacccgattgaattcatcgagaaccgaacacatgattccatggcaggacatcctcagaatgtggtgtttctgacctgtgatgcgtttggagttcttccacccatcagtcgactcaatcctgctcaagccgcctatcacttcatctcggggtacaccgccaaagttgccggaacagaggttggagtcaaggagccgcaggcaacattctctgcttgcttcggtgcaccattcatgccacgtcatccaagcgtatacgcagatctcttggcagaaaaaatggcgaaacatggagccaagtgttggttactgaataccggctgggttagtgggggatatggt

SEQ ID NO: 277529 - DNA, 625 bp, Unknown
  Bacterial polypeptide expressing nucleotide sequence isolated from the Sargasso Sea
tatgaacaataaattacaaaaagagttatctaaagttggaataaagaatatttcagaaattatacataatccttcctatgaatttttatatgctgaggaaaacaaagaaaaattagaaggatttgaaaaagttcaaaatactcaaaatggagctgttaatgttatgactggtatttatactgggcgatctccaaaagataagtatattttaaaggacgaaacaactgaggataatttgtggtggacctcagattttgcaaaaaatgacaacaaaccaataaataaaaatgtttgggatcacctctataaaattgttagtaaacaactatcaaacaaaaaactttatgttattgatgcattttgtggagcgaacaaggatacttgtcttaatgttagatttgtagtggaagtagcatggcaagctcattttgttaaaaatatgtttataagaccatctgaagaagagctaaaaaccttcaaaccagatttccacgttttaaatggctctaaatcgactaacaaaaactttgaagaacagggtcttaattctgaaacatttatagcttttaatctaactgacaaaattcaaattattggtggaagttggtatggtggtgaaatgaaa

SEQ ID NO: 277530 - DNA, 823 bp, Unknown
  Bacterial polypeptide expressing nucleotide sequence isolated from the Sargasso Sea
aggcgacaccaccttattcttgggttgtcaggcacaggtaaaaccactttgtctgcggaccctaagcgtttcttgattggtgatgacgaacacggttgggcgcctaactcagtgtttaacattgaaggtggttgctacgctaaatgtatcgacctgtcgaagaaaaacgagcctgtaatttgggatgcgatccgtttcggcactattctggaaaacgtggtgttagatgctaatcgtacaccagattacaaagatgccagcctgacccaaaatagccgcgccgcttatccattagctcacgtcgaaaaacgtgtactggaaaaccgtgccggtgaacctaaagctgttgttttcctgacctgtgacgtcagtggtgtattaccacctgtatctatcctgtcagaagaagctgctgcttatcacttcttaagtggttataccgccaaagtaggttcaacggagattggttcaacttccgctattgaatcgactttttctacctgttttggtgcgccatttttcccacgcccggctggtgtgtacgcagaattgctgatcaaacgtgtgcgtgaattcggcagtaaagtgtatttagtcaacacgggctggaccggcggtccacacggcataggtaagcgttttgatatccctacgactcgtggcattatcgacgctatcgtctcaggtgaattggcgactgctgaaactgtgcatttagcagaattaaatctgaatgtgccgttaaaagtgacaggtgtggatagtaatctgctgaacccaagagatacctgggcagacaaagcagcttatgatcaatacgctc

SEQ ID NO: 277531 - DNA, 779 bp, Unknown
  Bacterial polypeptide expressing nucleotide sequence isolated from the Sargasso Sea
actggtatttttaccggccgctcaccaaaagataatatacattgtgcgtgatgacacgacccgcgataccgtgtggtggtctgatcagggcaaaaacgacaataaagctatcacacctgacgtatgggcagatctgaagtctctggtcactaagcagttgtctggcaagcgtttatttgtcgtagacacttattgcggcgccaatgctgacacccgcttggcggtaaggtttattactgaggttgcctggcaggctcatttcgttaaaaatatgtttatccgaccgacggatgcagagttgaaaacttaccagccggatttcattgtgatgaacggagccaagtgcactaatccggattggcaacgccatggcctgaattccgaaaactttgtcgcctttaacctgacggagcgcattcagctgatcggcggtacctggtacggcggtgagatgaaaaaaggtatgttctcgatgatgaactactttttaccactgcaaggcgtcgcgtctatgcactgttcagctaatgtcggcaaagatggcgatgttgccgtgttcttcggtttatctggtactggtaaaaccacgttatcaaccgatcctaaacggcagctgattggtgatgatgagcacggttgggatgacgatggcgtgtttaactttgagggcggttgttacgcgaaaactatcaacctgtcgaaagaaaacgagcctgatatctacaatgctattcgtcgcgatgcgctgctggaaaacgtaactgtgctggctgacggcg

SEQ ID NO: 277532 - DNA, 862 bp, Unknown
  Bacterial polypeptide expressing nucleotide sequence isolated from the Sargasso Sea
ttcgaacatctttatattgaagaaaattcgtcaaaattagagggttttgagaaagttcaaaaaaccgaattcggcgctgttaatgtgatgacaggtatttatactggaagatctccgaaagataaatatatcttaaaagatgagaccactaaaaataatttatggtggacttcaaaattttctaaaaatgataataaaccaattgataaagaaacatgggatagtctgtatggtattgtcagtaaccaactttccaataaaaaactttatgtggttgatgccttttgtggagctaacaaagatacttgtctaagcgtgaggtttgtgatggaagttgcatggcaagctcattttgttaaaaatatgttcataagaccaacggatgaagaacttaaaaactttgttcctgattttcatgttttgaatggatctaagtcaataaacaaaaactttgaaaagcaagggctaaattcagagacatttatagcttttaacttaacagataatattcaaataattggaggcagttggtatggcggtgagatgaaaaagggaatgttttctgtaatgaattatctattgcctcaaaaaaatatagcttcaatgcactgttcagctaataagggtgatgatggttcagttgcattattttttggtttatcaggtactggaaaaacaactctttctactgacccaaaaagacaattaattggtgatgatgaacatggttgggaccaagaaggtgtttttaattttgaaggtggatgttatgccaaaactgtagacttagataaagaaaaagaaccagacatatacaaagcaattagaagagacgcgcttttagaaaatgtaagtgtaaacg

SEQ ID NO: 277533 - DNA, 949 bp, Unknown
  Bacterial polypeptide expressing nucleotide sequence isolated from the Sargasso Sea
tcaactgaccataccaagacctatgtatttgatggatttgcaggtgctgattctaattattctttgaatgtacgaataattgcgaaaaaagcctggcaagctcattttgtaaataacatgttcattcgccctaaaaatggagagctagataattttgaacctggatttacaattattaatgcatcggatgtttcaaatgaacgttttgatgaatttggtatgaattcagaaacatttattatttttcatttgaaaaaacggattgcaattattggtggaactgaatatggtggagaaatgaaaaagggtatcttctctgtcttgcactaccttctaccacaaaaaggcgtactttcaatgcattgctcagccaatgtacaagaagatcaaaaaaatcctgccattttctttggtctatctggaactggtaaaacgacattgagcactgacccaataaggcctcttattggcgatgatgaacatggttggtctgatgatggtatatttaattttgaaggtggatgctatgccaaggtgattaatctaaacccagaagaagagcctgatattttcaacgccattagagaaggtgcattgctagagaatgttgtttataatgaaaatacattagaaattgactttacagatggatcaaaaactgagaatactcgtgtatcttatccattagaccatattgataattctattgcaggtaaaggaatgccaagcatggcatctcaccctgaaaaaataatttttcttacttgtgatgcatatggcgttttacctcctgtagctaaattgaactctgaacaggctatgtatcattttataagtggatatacagctaaggttgcagggacagaaagaggtatcactgaacctacagctacattttctccttgttttgggggaccatttttaactctacatcctttgcgttacgctg

SEQ ID NO: 277534 - DNA, 688 bp, Unknown
  Bacterial polypeptide expressing nucleotide sequence isolated from the Sargasso Sea
aatgtaattaccgatgataatggagttgtagactacagtgatgggagtatcaccgagaatacaagagtatcataccccataaattacatcgataatatagagcctagtgaaacaggagggcatcccaaacacgttatctttcttacatgcgatgcatttggagttttgccacctgttgcaaagcttactcctgaaatggcaatgtatcattttctaagtggatatactgcaaaagtagctggaaccgaaagaggaatcaccgaacctgtggcgactttctcaacatgctttggagcaccttttatgccacaatttccaaccacatatgctgaactattaggtaaaaaactgaaaaaacacggcgctcaggcatggcttgttaacactggatggagcggtggatcatatggtataggaaatagaatagatttacctgtaactagaagaatgttaactgcgatacttaatggtgaattagagaatagcaagtttgtacctgattcaaatttcaaaatattagttccagaagatgtacctggtgtagactctgaaattttgaatcctagaaacacatggaaagacaaagaagcttatgacacaaaggcaaaagagttaattgaacttttcaagaataattttgtgaagtatgaaagcttcggtgattattctaaagctggtcctgactaaa

SEQ ID NO: 277535 - DNA, 844 bp, Unknown
  Bacterial polypeptide expressing nucleotide sequence isolated from the Sargasso Sea
attgcgaaaaaagcttggcaagcccattttgttaataacatgttcatacgccctaaaaatggtgagctagacgaatttatacccggttttactatcataaacgcatctgatgtttcaaatgaacgttttgatgagtttggtatgaattcagaaacgtttattattttccatatggaaaaacggattgcaattattggcggaactgaatatggcggcgaaatgaaaaagggtatcttttctgtcctacattatcttcttccacaaaaaggtgtactgtcaatgcattgctcggccaatgtgcaagaagatcagaaaaatcctgctatcttcttcggactatctggcacaggtaaaaccacattaagcaccgatccaattcgtcctcttataggtgatgatgaacatggttggtctaatgatggtattttcaattttgagggtggttgttatgccaaagtgataaatctaaacccagatgaagagccagatatatataatgctattagaaaaggagcattgctagagaatgttgtttatgatgaagaaacattagaaattgatttcacagatgggtctaaaactgagaatactcgtgtgtcttatcccttagatcatattgataattctatttcaggtaaaggaatggcaagcatggcatctcaccctgaaaaaataatctttcttacctgtgatgcatatgggattttacctccagttgccaaattaacctcagaacaggccatgtatcatttcataagcgggtacacagctaaagttgcagggacggaaagaggaattactgaaccaacggctacattctcaccttgttttggtggaccttttt

SEQ ID NO: 277536 - DNA, 913 bp, Unknown
  Bacterial polypeptide expressing nucleotide sequence isolated from the Sargasso Sea
tagtgtatcaattattacagaatatgcttggcatggtttatttgctaggcatttattggtaagacctaatgaagaagaaattaaaaatttttccagtgaatttacaattataaactttcctaatttaaaaatggatcctgactatcatggaacaagaagtgaaactgtaattactgtcaatcttgataagaaaattatacttattgcaggaaccaaatatgctggagaaacaaaaaaatctgttttcactctattaaactttatattgcctgaaaaaaatatcatgccaatgcactgttctgtaaatactggaaacaacggagactcagcaatattttttggtttatcaggaactggaaaaactacattaagtgctgatcctaatcgctctttattaggagatgatgaacatggttggtctgatcaggggctatttaattttgaaggtggctgttatgccaaattaataagactctctaaagaagcagagccagaaatttatgcaaccactcaaatgaaaaattcagtgatcgaaaacgttgtaatgaatgaaaaaggtgatttagatcttgatgacaattctttgactgaaaatactcgaggagcttatcctcttgattttattcctggagtaacactatcaggaaaaacatctcatccaaaaaatataatcatgttgacggcagatgcatttggaattttacccccaattgcaaagctaactcctgctcaagccatgtatcattttttatctggctatactgctaaagttgctggaacagaaattggactttcaaacgagccacaagcgacgttttcaacatgctttggcgccccatttatgccaagaaatccaatagaatatggaaacctacttaaagaaaaaatatcaaagcataatgttaattgttgg

SEQ ID NO: 277537 - DNA, 859 bp, Unknown
  Bacterial polypeptide expressing nucleotide sequence isolated from the Sargasso Sea
attgccctcaataacaaggaaggcattactgcatccaatggcgccttaattgttacaactggaaaaagaaccggaagaagccctaaagacagattcattgtcgaggattcaatcactagagaagttgtcgattggagtgagaacaatcagcctatcgagtcggaaaaattcgaacgactttggaacgagtctgaagattatctaaaaggaaaagagacttacacagcagatcttcacgttggagctagcgctgagcattaccagcctgttgttgttgaaaatgagcttgcttggcacaacgtattttgccaaagcttactcataaggcctgatgcatttaaccctaagggaaaaggtttatggaatcttagatgcgttccaagttttgtttgtgatcccaaggtccatggaactaattcagatggaacagtgatgatcaatttcactgagaaaaaagttcttattctgggcattgcctatgcaggggaaatgaagaagtctatgtttggagttttgaacttcatcttacctgagcatgatgttttgccaatgcattgtgctgcaaatgcaggagagaatggcgatgtatcacttttctttggtctttctggaacaggcaaaacaacattatcagccgatccaaatagatggttgattggcgatgatgaacatggctggggagaaggaatcgtctttaattttgaaggcggatgttatgcaaaaactgtcaacctctcgcaaaagaacgaacccattatttgggatgccatcaaaaggggttcggtagttgaaaacgtagtcctcaaaccaaataccatcgatatagattatgctaatcagtcaattacagaaaacacca

SEQ ID NO: 277538 - DNA, 631 bp, Unknown
  Bacterial polypeptide expressing nucleotide sequence isolated from the Sargasso Sea
atgttgtatccaagagcacatatcgaaaaggcagtgcctgaaaattatgctggtgaaccgaagacagtaatcttcctaacttgtgattggactggggtccttcctcctgtatcaatactgtctaaagaagctgctgcctaccattttttaagtggatatactgcaaaggtaggatctactgagattggatcatcttcagatattgaatcaactttttcgacctgttttggagcaccattttttcctcgacctgcaggtgtttatgcagaccttttaatgaaaagagttgaaaattttggctcaagggtttttcttgtaaatacaggttggactggaggaccttatggagttggaaaaagatttgatataccaactactagaagaatcgttaatgcagtccaaaacggcgagcttgatgatgttgaaactcaaatgcttaaaggtttaaatcttgaagttcctctatcgattcaaggagttgatggcaacttgctaaatccacgcgaaacttgggaagataaaagcgcttatgatgctgccgcagctgacttaataaaattatttcaaaataactttgaaagatttgatgtcagtaaagaaataatttctgccggcccttctgatcaataaa

SEQ ID NO: 277539 - DNA, 418 bp, Unknown
  Bacterial polypeptide expressing nucleotide sequence isolated from the Sargasso Sea
cttgtctatgcactgtgcagcaaatgctggaaatgatggcgatgtatctttattttttggattatcaggaactggcaaaactactctttcagcggatcctgatagatggcttattggtgacgatgagcacggatggggggatggaatagtgtttaatatcgaaggtggatgttatgcaaaaactgtcgatctgtcccaaaaaaacgagccagtaatctggaacgccattaaaaatggcacaattttagagaatgtaatcttcgatccttctagcctagaagttgactacgcagaccaaacattgactgaaaatactagagcttgttacccattaagtcatgttgatcaacatcttgaaaaaaattacggtggcgagccgcaaaacatcatttttctaacatgcgatttatctggcgta

SEQ ID NO: 277540 - DNA, 727 bp, Unknown
  Bacterial polypeptide expressing nucleotide sequence isolated from the Sargasso Sea
ccctctgaagacggaacaaattctgatggttgtgtgattataaattttgcaaaaagaaaagttattcttgctggtatgaaatatgcaggtgaaatgaaaaaatctatgttttccgtccaaaattttctacttccagaaaaaggtgttctgccaatgcattgctctgcaaatgtaaattctaatggaaacgtagctttattttttggtttatctggtacaggaaaaactacgctatcagctgatcctaaatgttcactcataggagatgatgagcatggatggagcaaaggctcagtttttaactttgaaggcgggtgttatgcaaaaacaattaatttaactgaagaaaatgaacctgtaatttataaagctatcaaacatggaagtgttatagagaatgtttttataaatgaagatggtacgcctgactatagtaatacttcgctttctgaaaatggaagatgttgttatccaaggtctcacattcaggatgctgttgaaagtaatgcagctggcgagcctaaaacagttatttttttaacttgtgatcttacaggtcttatccctcctgtctcattattatctaaagaagcagctgcctatcattttttgagtggatatacagctaaagttggttcaactgaaatgggatcaggatctgatatagaatcgactttttcaacgtgttttggggcaccgttttttccgaggcctgcaaatgaatatg

SEQ ID NO: 277541 - DNA, 328 bp, Unknown
  Bacterial polypeptide expressing nucleotide sequence isolated from the Sargasso Sea
aatatgttcataagaccaactgatgaagaacttaaaaactttgtccctgattttcatgttttgaatggatctaagtcaataaaccaaaactttgaaaagcaaggactaaattccgagacctttatagctttttacttaacagataatattcaaataattggaggcagttggtatggcggtgagatgaaaaaaggaatgttttctgtaatgaactacttattaccacaaaagaatatagcttcaatgcactgttcagccaataagggtaatgacggttctgttgcattgttttttggtctttcgggaactggaaaaacaactctttcta

SEQ ID NO: 277542 - DNA, 810 bp, Unknown
  Bacterial polypeptide expressing nucleotide sequence isolated from the Sargasso Sea
cacaaggggcagggccattgattacctgaacacgcaaagcagaatttatgtagttgacggttttgctggatgggatgttaattaccagattaaagtccgaataattacgacacgtccctatcatgctttgtttatgcataatatgttgatccgcccaagagatgaacaattggataattttggtgagcccgactatgtgatttttaatgcaggccagtgtcctgctgatccacttactaagcacatgacttcaaaaaccagtgttgaattgaattttgaccgcaaggaatttgtgattcttggcactgagtatgccggagaaatgaagaagggtgttttcactatcatgaactacattatgcccaaacagggaattctttcaatgcatagttcaaccaatgttggaaaaaataatgacgtggccttattttttggattatctggaacaggcaaaactacgctgtctgcggacccaaagcgacaattaattggagatgatgaacactgctggagcgatgatggcatttttaatattgaaggaggatgttacgcaaaatgcatcaatctttccgaagaaaaagaaccggatatttacaaggctatcaaatttggcactgtgttggagaatgtagattataacaaggagacacatgttgttgattacgatggaacttctctaactgaaaatactcgtgcgtcttacccaattgaatatatccagaacgcaaaaattccatgtgtaggaggccatccaaataatataatctttctaacatgcgacgcctttggtgtgctaccccctgtgagcaa

SEQ ID NO: 277543 - DNA, 871 bp, Unknown
  Bacterial polypeptide expressing nucleotide sequence isolated from the Sargasso Sea
attattctcttacccaaaaaaggcattttgccaatgcattgtgcagccaatatagtatccgatcaattctccgattcagcgatattttttggcctttcaggtacaggaaaaacgacattatcaaccgatggtaaacgagtgctcataggtgacgatgagcacggatggtctgaaagtgggatttttaatttcgaaggcggttgctacgcaaaaacattaggattgaccgagcaaaccgagccggaaattcttgctaccactaccaagttttcaacagtgattgagaacatggtttacgatgagcaaactaaagaattagattttttcgacagtaaactgacgtttaatatgcgtgcagcttatcctatgcgatatatctcaaaatccgctgaggatggtttaggaatgcatcctaagcatttaatcatgcttacttgcgatgcctttggtgtgctacctccggtagcccgtctttcgccggagcagacaatatatcacttcttatcgggctttacatcgaaagcagttggcacagaacgcggggtgaaagttccagagccaacattttcatcttgttttggtgctccctttctaccgttgaagccagaggtctatgggtcaattctgaaacaaaagataattgcgaatggcactagctgttggcttatcaacactggatggacaggtggctcgtatggaattggcacccgaatgcctataaaagccacaagagcaattttggatgcattattgaccggtaaacttgatgacgccgagttccgcaaagatgacaattttaaatttttggttcctgtattcattgatggtgtagagcgctccttgttgaacccacgggagaattgggaaaatt

SEQ ID NO: 277544 - DNA, 564 bp, Unknown
  Bacterial polypeptide expressing nucleotide sequence isolated from the Sargasso Sea
taatctttctaacttgtgatttaactggtgtccttcctccagtatcaatactgtctaaagaagctgctgcttaccattttttaagtggatatactgcaaaggtaggatctacagagattggatcatcttcagagattgaatcaactttttcaacctgttttggagcaccattttttcctcgacctgccggtgtttatgcagaccttttaatgaaaagagttgaaaattttgattcaaaggtttttcttgtaaatacaggttggactggaggaccttatggagttggaaaaagatttgatattccaactactagaagaatcgttaatgcagttcaaaacggcgagcttgatgatgttaaaactcaaatgcttaatggtttaaatcttgaagttcctctatcgattgaaggagttgatagcaatttgctaaatccacgcgaaacctgggaagataaaagcgcttatgatgctgccgctgctgacttaataaaattattccaaaataactttgaaagatttgatgtcagtgaagaaataatttctgccggcccttctgatcaataaa

SEQ ID NO: 277545 - DNA, 696 bp, Unknown
  Bacterial polypeptide expressing nucleotide sequence isolated from the Sargasso Sea
gagtatgcaggagagacaaaaaaatcagttttcactctccttaactttttattgccagaaaaaagagttatgccaatgcattgttcagttaatactgggaaagatggtgactcagcaatcttttttggtctatctggaactggtaaaacaacgttaagtgctgatccaaagagatctctattaggtgatgatgagcatggctggtctgacgatggtctttttaattttgagggagggtgctatgcaaaacttatccgtttatcaaaagaagctgagcctgaaatatatcaaactactcaaatgaagggaactgtcatagaaaatgtgataatgaaagaaaatggccttttagatcttgatgataattctctcacagaaaatacaagaggtgcatatccattagactatattcctggcgtaataaaatcaggtaaagcaaatcatccaaaaaatataattatgttaacggctgatgcttttggtgtactgccgccaattgcgaaattatcacctgaccaagccatgtatcattttctttcaggttatacagctaaagttgctggaacagaaattggattatcaaatgaaccacaggcaacattttctacgtgttttggggctccctttatgcctagaaatccaatagaatatggcaacttactcaaagagaagatttctaaatataatgtagattgt

SEQ ID NO: 277546 - DNA, 937 bp, Unknown
  Bacterial polypeptide expressing nucleotide sequence isolated from the Sargasso Sea
tatgccagattttacccttattaattgtccatcttttaaagctgatccaagaaagtatggagtaagaagtgagacggtgatagcaataaattttaaaaaaaaaatggttattgtttgtggttctgagtatgccggtgaaaataaaaaaggtgttttttcaattttaaattatatacttgccaaaaaaggggtgatgccaatgcattgttcggctaatcatgcagtcggcgatcaaaatgaaatggccattttttttggcctttccggaactggcaagactacgctttcacaggacccagatcgtattttgattggcgatgacgaacatggctggtctgatgacggtgttttcaacttcgaagggggatgttatgcgaaaactattaatttaagtgccacctccgaaccagaaattttttctacaatgacaaaattttcaacggttgttgaaaatatgatttttgatccagatactttggagatcaattatactgatgacacgttaacgcctaatatgagggctgcctatcctttgagttttattgaaaatgcttctgaaaccggaaagggtggtacgcccaaacatattatatttcttacatgtgatgcttttggagtgctacctccaatagccagtctttcttcagagcaggctatatatcattttctttcaggctttacttcaaaagcaccagggacagaaactggggtcattgaaccggaaccaaccttttctccatgttttgcagcgcctttcttgccattaaggcctgaaatttatggtaacatattaaaaaacaagatagagaaatataatgctaaatgttggttggtaaatactggttggacaggtggaccgtacggagttggggaaagaatgccactagcatatactcggtcagttttaagaggaatactaaatggctcttttgagtaa

SEQ ID NO: 277547 - DNA, 680 bp, Unknown
  Bacterial polypeptide expressing nucleotide sequence isolated from the Sargasso Sea
gtgtgtttattcttcggactttcaggaacagggaaaactaccttatctgcagacccggatagaaatttaataggagacgatgaacatggatggggaccgggagctgtatttaactttgagggaggttgctacgcgaaatgtatagaccttactaaaaaaaatgaacctgttatctgggacgccataagaaagggaagcgttatggaaaatgttgtcatagactctgatacaaaggagccagattacagtgattcttctctaaccgagaacactagagtggtctacccaagggagcatatagaaaaaagagctgatgaaaatgcagcaggtgaacccaatgcggttatttttctaacttgtgacttatcaggagttattcctcccgtctctattctttctaaggaggcagccgcctaccattttctaagcggttacactgcagctattggatctactgaggtaggctcaactgaagcattcaaaacaactttctctacttgttacggagctcctttctttcctagggcagcaggagtatacgcagacctgctaatgaaaagaattgaagaattcggaagtaatgtttatttagttaacactggttggactggcggtccttacggaacaggcaaaagatttgatatacctgttacaagatcaataataagcgctattcagtc

SEQ ID NO: 277548 - DNA, 845 bp, Unknown
  Bacterial polypeptide expressing nucleotide sequence isolated from the Sargasso Sea
agacctaataggagacgatgagcatggatgggggatagggtcagtgtttaactttgagggaggttgttacgcaaaatgcatcgatttgtctgaaaagaatgagccagttatatggaatgcaattaaacacggcagtgttatggaaaatgttgttgtagacctctcaacaaaagaacccgattattcggactcttctttaactgaaaacactagagtggtctacccaagagagcatattgaaaaaagatctttggagaatgcaggtggggagccgagcgctgttatcttcttaacttgtgatctttcaggagttatacctccagtctcgatactttctaaagaagctgcagcttatcatttcttaagtggttacactgcagccgtaggttcaacggaagtagggtcgactgaagcatttaaaacaactttttctacgtgttatggagctcctttcttcccaagacctgctggtgtctatgcacaattattgatgaaacgtatagaagagtttaatagccaagtatatttagttaatacagggtggaccggaggaccttacggagtaggaaaaaggtttgatattccagtaactagatctgtaattagcgctattcaaaccggaagtttgctaaatacagaaactgaaactatcgaaggaataaatttagaggttccaaaagaaatagaaggaattgatagcaatctgcttaatcccataaggaactggaaggataaaaaatcctattacgtttaccaagaaaatttagtaaaagaatttacagaaaactttaaaagatttgatgtttctgaggccatagttaaagctgggcctaatctttcataaa

SEQ ID NO: 277549 - DNA, 590 bp, Unknown
  Bacterial polypeptide expressing nucleotide sequence isolated from the Sargasso Sea
aactagccacccaaaaaatattattatgttaactgctgatgcatttggtgtattacctcctattgctaaactttctgcagatcaggcgatgtatcattttctatcaggctatacagcaaaagttgcaggtactgaaattggtctttcaaacgaacctcaagcaacattttcaacatgttttggtgcaccatttatgccaagaaatccaatagagtatggaaacttacttaaacaaaagatatcagatcatgaggtagactgctggcttgtaaacacaggttggtctggtggtgtttatggagttggcgaaagaatatcaattaaaaataccagaacattgcttaatgctgccctctcaggcaagctcgctaataccgaaatgagaaaagatccaaattttggcttcttagttccagtcaaagttgatggaattaatgaacagatattggatccaaaaaaaacttggcaaagtgagtctgactatgatgcgcaggctaaaaaattagtgcaaatgttcattagtaattttactaagtttgaatctgacgttgaagagaatgtaaaagcttcaggtcctattgctaattagg

SEQ ID NO: 277550 - DNA, 862 bp, Unknown
  Bacterial polypeptide expressing nucleotide sequence isolated from the Sargasso Sea
gctttcaccgactcaaaaagacgtctaataggagatgatgaacatggatgggatgatgatggtatctttaactttgaaggtggatgttatgcaaaaacagtggatttggataaagaaaaagaaccagatatatataatgctattaaaagagacgctctattagaaaatgtaactgtcaattcatcaggaattataaattataaggacacaagtataactgaaaatacccgagtttcatatccaatttatcatatcaaaaatattgttgaaccagtttcaaaagcagggcatgcaaataaaattattttcttaacagctgatgcatttggagtattaccagctgtatcaattttatctgaagagcaatcaaaatatcattttttgtcagggtttactgcaaagctggctggaacagaaaggggaattaacgaacctactcctacattttctgcatgttttggtgcagcttttttgactttacaccctacaaaatatgctgaagtactatctaaaagaatgagaaaagcaaatgctgaagcatatttagttaataccggatggaatgggaatggcgaaagaatttctttaagagacactagggcaattattgactctatattaaatagtgaaattgttacatctaatacaaaaaaacttcctatttttaatttacaaatgccttttcaaataaaaggagtttctcaagaaatattagatccaagaaatagctggaaaaacgagaaattgtgggaaataaaagcaaaagaattagcaaatctgtttatcaataattttaagcaattcactgataatgatgaaggcagcaagttagtgaagtttggtcctatcgtaaataattaag

SEQ ID NO: 277551 - DNA, 724 bp, Unknown
  Bacterial polypeptide expressing nucleotide sequence isolated from the Sargasso Sea
catgttcggtacgatcttggaaaatgtggtcatggatcccgcaacccgagtgcttgatcttgacgatggatcgctcactgaaaatacccgggcttcctatccgctgtcctttataccaaatgtggagatgagcggtgttggaggacagcccgagaatgttgtgatgcttacggcggacgcgttcggcgtcctgcctccgatcagccgcctttccgctgatcaggcgatgtaccacttcttgtccggatacacggcacgggttgccggtaccgagcgcggccttaccgagccgcaggcgaccttctcgacctgtttcggagcgcccttcatgccgcgccatccgacggtctacgccaagatgctgggcgaacgcatcgctaatacgggcgcgaagtgctggctggtcaataccggttggtccggtggcgcctacgggactggcaagcgcatggaaattgcccatacacgtgcgatggtgcgcgcggctttggatgggcgccttgcagaggcggcgacgacggctgatccgaatttcggtctcaatattccgcaaatttgcccggatgtgccgaatgaggttctgcagccgcgggagacctgggtcgacaagggtgcttacgatacgacggcccgtgacctcacgcagcggttcgaggcgaacttcaagcagtttgaagaatatgtggatgcgaatgtaaaggctgccggcgtttacgccgcctga

SEQ ID NO: 277552 - DNA, 847 bp, Unknown
  Bacterial polypeptide expressing nucleotide sequence isolated from the Sargasso Sea
ctgattaacgcagctattgaaaataatgaaggagttatagcgagcaatggggctctttccttagagactggcttaagaacaggcagaagtccaaatgatagattcattgttgatgaagagagcacatcaagccttattgactggggcgaaattaacaaaccttttgatgcagaaaagttcaatcatctttgggataaagttgaggcatatttagctgagaaaaatcgttatctttcaaaggttcatgtcggcgcacacattgatcattacataccggtcaatgtaataacagaaagtgcagctcatagcatgttctcaaaattaatatttattgatcccattaaatttaatccacaagccaaaaaagaatggcagataatgagtgcgcttaattataaatgtgttcctgaggaagatggcactaactctgatggttgtgtaattataaattttgcggctagaaaagttctacttgcaggaatgaaatatgctggtgaaatgaaaaaatctatgttctctgctcaaaactttttaatgcctgaaaaaaatgttctaccgatgcattgttcttctaatgttaataaagatggcaaagtatcattattttttggtctatctgggactggaaaaactactttgtcagctgatccaacatgttcactcattggagacgatgaacacgggtggggtgaaggaacagtatttaattttgagggaggttgctacgcaaaaacaatagatctatcagaaaaaaatgaacctgtgatttggaaagctataaagcatggcagcatcattgaaaatgtcttcttagatgaagagggaactccagattactcaaatacat

SEQ ID NO: 277553 - DNA, 691 bp, Unknown
  Bacterial polypeptide expressing nucleotide sequence isolated from the Sargasso Sea
ttgtgtaattataaaatttttgcaaagagaaaggtaataatcgtgggaatgaagtacgctggtgaaatgaaaaaatctatgttttctgttcaaaatttcttacttccagagaaaaatgttctacctatgcattgctcagcaaatgtaaacaaaaataatgaagttgcactgttttttggtctttccgggactggaaaaacaactttatctgctgatcctagttgttctttaataggtgatgatgagcatggctggagtaatgactctgtctttaattttgagggtggatgttatgcaaaaactattaaccttactgaggaaaatgaaccagtcatattcaaagcaattaaaaatggaagtgtaatagaaaatgtttttttagatgagaataataatcctgattattcaaatacctcattatctgaaaatggtagatgctgttaccctagatcacatattgattcagcaataaaagataatgcttcaggccaaccaaaaacagtaatttttttaacttgtgatcttacaggcattattccaccagtctcaattttatccaaggaagctgctgcttatcattttttaagtggttacactgcaaaagttggatctactgaagttgggtccggatcagatattgaatcaactttctcgacatgttttggagcaccattttttccaaggcctgcaa

SEQ ID NO: 277554 - DNA, 745 bp, Unknown
  Bacterial polypeptide expressing nucleotide sequence isolated from the Sargasso Sea
acttaatagaggtgaaggcgagatagccgccaacggagctttattagttaaaactggtaaaagaactggtcggagtcccttggatagatttattgttaaggaccttattacagattctaaggttgactggggcgaagtaaatagaccatttgatagcgaaaagtttaattctctctggcaaagagttgagttttatctatctgaaaagggtatttttgtttctagtctgcatgtaggagagcacaaggaacattacattccagtagaaattcaaactgaatgggcatggcacaatctttttggtagacaaatgtttatacgaccagaggttttcaatccatcaaataaagaaacttggtccgttatgagcgctccagaatttgtttgtgatcccgaaagagatgggaccaatagtgacggagcagtaatcattaattttaatgaaaaaaaggttctgcttgcgggtatgcaatatgcaggtgaaatgaagaagtccatgttttcagttcaaaattttcttttgccggaaaaaaatgttctccccatgcattgtgctgcaaatgttggaaaagatggtgatgtatgtcttttctttgggttatcgggcactggaaagacaactctttcggcagacgccgatagagatttaataggagacgatgaacatggatggagcgaagggtctgtatttaattttgagggggggtgttatgccaagtgcatagacctaactcaacaaaaatga

SEQ ID NO: 277555 - DNA, 948 bp, Unknown
  Bacterial polypeptide expressing nucleotide sequence isolated from the Sargasso Sea
gatgacaagcagaacaagtattgacttgtcgttagaatgtcgggagcaggtaatcttgggaaccgaatacgcaggtgagatgaaaaaaggcgtattcacaatgatgcattggttgctccctgctcaagggattctctcaatgcattgtgctgctaatgagggaaagagcagtaacgacgttgctttattttttggtttatctggaacaggaaaaacaacgctttcaactgaccctgctcgtcggctgattggtgacgatgagcatggctggggagacgatggagttttcaacattgaaggaggatgctacgccaagtgcatccacctttcatcgttggaagaaccagaaatatatcaggccatacgatttggaacggtgctagaaaatgtggtctatgaacaagccacgcgagaggttgattttgagtctagtctcgttaccgagaacacacgtgccgcttatcccatagactatatcgacaacgccaaagtgccgtgtgttgcaggtcatcccaaaaatgtgatttttctcacctgtgatgcttccggtgcacttccaccggtcagtcggctcactcgggagcaggcgatgtatcattttctatcgggctatacagcccgtgttgctgggacagagatgggcgtgcgtgaacctcaccttgcgttctcgccttgctttagtgcagcgttcctggttcggcatcctgctatttatgcacgattgcttgctgaaaaacttgaccgacatcggtcgcaggcttggcttgtaaatacgggctggactggaggagggtatggtcaggggaagcgcattgacctctccataacgaggaaaatcatcaacggaattcactctggagtgctcctaaaggctcctttgcttcaagatgcaatatttggcctgcacgccgtttgtagcgttcctggagtcgataaagggattctggt

SEQ ID NO: 277556 - DNA, 973 bp, Unknown
  Bacterial polypeptide expressing nucleotide sequence isolated from the Sargasso Sea
tttaaattctgaaacatttattgcttttaatttaacggataaaattcagataattggaggtacttggtacggtggtgagatgaaaaagggtatgttttctataatgaattacctcttacctcaaaaaaatatagcgtcaatgcattgttctgcaaatatggggcaagatggttctgttgcattgttttttggtctctcaggtactggaaaaacaaccctatcaacagatccaaagaggcaattaattggtgacgatgaacatgggtgggataatgaaggtgtatttaactttgaaggcggttgttatgcaaagaccattgaccttgataaaaataaagaaccagatatttttaaagctgttagaagagacgctcttctagagaatgttacagtaaatgaaaatggaattgttgactacagtgatacctctgttactcaaaatactagggtatcgtatccaattcatcacattgataatattgtaaagccaatatcaaaaggggagcatgcctctaaaattatatttttaacagctgacgcatttggagttcttccaccaatatcaaaactttcttatgaacaagctgagtatcattttctctcagggtttacggcaaaattagctggtacagaaaggggtgtaactgaacctcagccagctttttcagcatgttatggagcagcttttttaatgctacatccaacacgatattcaaatgtattgtccaaaaaaatgaaagaatcaaattcacaagtttttttagtaaatacgggatggaatggtaaaggtgatagaatttccttaaaggatacgagattaattatagacgccatattaaatgatgaattaaaagaaatagacactgaaattataccttattttaatttatcaattccaaaaaatcttaaaaatatttctttcaatgtaattgatcccagaaaatcttggaatttcactgctgaatgggaaata

SEQ ID NO: 277557 - DNA, 877 bp, Unknown
  Bacterial polypeptide expressing nucleotide sequence isolated from the Sargasso Sea
ccattcgatagcgaagcttttataaatatttggaataaagttgaagaatatatgaatcaaagagatacatttgtaagttctttgcatgttggagagcatcctgattattatgtaccggtaaaaattaggactgaatgggcttggcataatctttttggtaaacagatgttcataaggcctaacgaatttaatcctggagataaagacaactgggagattatgagtgcacctttattcgaatgcgatcctgaaatagatggcaccaacagtgatggtgtcgttttattagacttcacaagaaagaaggtcttattagccggaatgccttatgcaggagagatgaaaaaatctatgtttgctgttcaaaattttttactacctgaaaaggacgttcttccgatgcactgtgcatctaatgttggatctaacggagaagtttgcttgttctttggtttatcgggtaccggcaagacaactctttcggcggatccggagagagacttaataggtgacgacgaacatggatgggggccaggtacagtattcaattttgaaggaggttgttatgcaaaatgcattgacctcactcaaaaaaatgaacctgtcatttgggatgccataaaaagaggcagcgtaatggaaaatgtggttattgattcggaatcaaaagatccagatttttctgattcctccctaactgaaaacactcgagttgtttatccaagagaacacatagaaaaaagagcagatgaaaattcaggtggagaaccaaatgcagttatattccttacctgtgatttatctggagtaatacctccaatatcaattttaagcaaagaggctgctgcttatcactttttaagcggggtatacagct

SEQ ID NO: 277558 - DNA, 582 bp, Unknown
  Bacterial polypeptide expressing nucleotide sequence isolated from the Sargasso Sea
caggtcatccaaataatataatatttttaacatgtgatgcatttggtgtattaccacccgtagcaaaattaaatagcggtcaagcaatgtatcattttttgtcaggttatacagctaaggtagcaggaacagaaagaggtattacagaaccggaagctacattttctgcatgttttggagcagcttttttaacattgcatccaactgtatatgctgatttgttacaaaaaaaaatagaggaacataattgtaatgtatatttagtaaatacaggttgggtagggggaggatatggagtgggtgaaagaataagtataaaagatacaagaagatgtatagattctatattagatggttctattttagaagctaaatttagcaatgataaaatatttgattttgaagtacctttagaattaaatggtgtgagtaaagaaatttgtaatcctagagatagttgggaagataaaaaattatatgataatcaagcaaaaaaattagcagatatgtttattaataattatgaaaattacatagatcctaattttacagattattcaaattatggaccaaaatattaat

SEQ ID NO: 277559 - DNA, 790 bp, Unknown
  Bacterial polypeptide expressing nucleotide sequence isolated from the Sargasso Sea
tgattcagacaattcattaaatgttagaatgataacaaagaaagcctggcaatcattatttgtaaataatatgtttatacgtccaacaaaggaagaattgaatgattttaatcctgattttacaattatcaatgcctatgatgtaaaagaagaaaattggaaagattacggactaaattcagaaaatttcattgtcttcaatataaagaaaaagattgcaattataggcggtactgaatatgcaggagaaatgaaaaaaggaattttttcaatgatgcattattacttaccattgaaaaatgttttatcaatgcattgctctgcaaacgtatctgctgctcaagatcagacaaccgtctttttcggtctttctggcacaggaaagacaacgcttagcaccaatgcaaatcgccctttgattggtgatgatgagcatggatggtcagataatgggatatttaattttgaaggtggatgctatgcaaaagctattaatcttgataaagataaagagccagaaatttataatgcaatcaagcacggaacgcttttagaaaatgttgtttatgatttagaaactaaagaagtcgattttgatgataatgccaaaagtgaaaattctagaatttgctacccaattaattttgtggagaattcattaggctctaaaggcttaaaaagtgctggtcctcatccaaattcaattatatttcttacttgcgacgcgtatggtataatgccaccattagctaggatgacaaaaaaacaagctatgtatcacttcataagc

SEQ ID NO: 277560 - DNA, 745 bp, Unknown
  Bacterial polypeptide expressing nucleotide sequence isolated from the Sargasso Sea
aatgagtaaagaaccagatattttcaaagcaattaaaagaaatgctttgttggaaaatgtggtagttagtaataatggtaaaattaactacaaagacacttctcatacggaaaatactagagtttcttatcctataaatcacatagataatatcgtaaggccaatttctaaggcaggccacgcaaacaaagttatttttttaactgctgatgcttttggggttttgccagctgtttcaatattatctaatgaacaagcccaataccattttctttcaggatttacttctaaactagccggtactgaaagaggagttgataaacccacaccaactttttcagcttgttttggtgctgcttttcttactttacatcctgtgaattacgcagaagttctattgaatagaatgaaaatatcaaactctaaagcttatttggttaacactggttggaacgggaaaggtgagaggatttctcttaaagatactagaataatcattgataaaatcattaacaatgaaattgataatgttttaacaactaaaattccaatatttaacctttcaattcctgttcagttggacggtctagacccaaatatttttgatccaagaaaaagttgggcatctttgtcatcttgggaaggaaaagcgaaacaacttgctaaattatttatacaaaattttgatcagttttgtaataaaaatacggggaaaaatcttgttaaatatggaccaataatatag

SEQ ID NO: 277561 - DNA, 1543 bp, Unknown
  Bacterial polypeptide expressing nucleotide sequence isolated from the Sargasso Sea
tatggcggatggattaaaccgcgttcattacaacccctcaacagcacaactggtcgaatttgccctgctccgcggcgaaggtgaattaaccgccaatggtgcgctggttgccaaaaccggtacacgcacaggtcgctctcctggcgatcgttttattgttaaagaacctagttcagcggctgatatcgaatggggacccgtcaaccaagcatttgaacccggtgcttttgaaggattatgggcgcgtgtagaagcattcctcgccgataaagagttgtttgtatctgacctcgaagtcggtgcagacccagaacattaccagccagtgcgcgtgacgactcaatacgcttggcaccaactgttcgcccgcaacctttttatcatcccagaagaatttaaccgtcaagacaagcctgtatggcaaatcatcaacgcaccagacttcgtctgtgttcctgagcgtgatggtaccaattcagatgcggcggtgatcttaaactttgccgagcgcaaagtattgctagcgggcttgaaatacgctggcgaaatgaagaagtcgatgttctccgtgcaaaacttcctgttgccagcccaaggcgtattgccaatgcactgctcggcaaacgtaggtaaagacggcgacaccaccctcttcttcggtctgtcaggcacgggcaaaaccacactgtctgcggatccaaaacgcttcctgatcggtgacgatgagcacggctgggcaccaggcggcgtattcaacatcgaaggcggctgctacgccaaatgtatcgacctgagccaaaagaatgagccagtgatttgggatgcgattcgcttcggtactgtgctggaaaacgtggtaatggacgaacaccgcgtgcctaactacaaagacagcagtctgacggaaaacacccgcgcagcttacccgctcgagcatatcgcccagcgtaaagaagacaaccgtggcgccgagccgcacgcagtggtgtttttaacctgcgacgtgtctggcgtgttgccaccagtttctatcctgagcaaagagcaagcagcttaccacttcctctctggttacaccgcgaaagtcggttcgactgaaatcggttcaacctcggcgattcagtccaccttctcaacctgcttcggcgcgccgttcttcccacgtcctgcgggcgtgtatgctgagctgctgatgaagcgtatcgaatcattcggtagccaagtatacctagttaacactggctggactggcggcccacacggtattggtaaacgtttcgacatcccaaccacccgcgccattgtcgatgcgattgtcagcggcgagctgaaaaacgttgaaaccgttcatttagataccttaaacctcgcggtgcctgtagcggttagcggtgtcgacagcaatctactcaacccagtgaacacttggagcgataaagcactgtacgccgaatacgcccaaaaactggccgaagccttcactaagaacttcgcgaagtatcaagtgtcagacgccatccgtaacgcgggcccaaaggcataa

SEQ ID NO: 277562 - DNA, 1306 bp, Unknown
  Bacterial polypeptide expressing nucleotide sequence isolated from the Sargasso Sea
tctggtcaaagttgagtcttatttagatgacaaagaaaggtttttaactaaagtccatgttgggtctcatcctgatcactatcttccaattgaggtaataactgaaacagcttggcagagctttttctcaagattaatatttattgatcctgatgaatttaatccaaaaggtaaaagtaactggaaaatacttagtgcagcaaattttgaatgtgtgcctgaaatagacggtactaactcagatgcttgtgtaattataaattttaaagaggaaaaggtccttatagcgggcatgaagtatgctggcgagatgaaaaaatcaatgttctcggttcaaaactttcttcttcctgccaaagatatccttccaatgcactgttcttcgaatatcaatgataaaaattcagtagcgctattttttggtctttcaggtactggaaaaacgactctctctgcagatccagcatgtacattgataggtgatgatgagcatggatggtctccgggctccgtttttaatttcgagggtgggtgttatgcaaaatgtatagatctctctgaggaaaatgaacctgtaatttggaaagctattaaagaagggagtattttagaaaacgttgtgttaaatgatggagttcctgattactcggatgtttctttaactcaaaattcaagatgttgttatccaagaacacatatcgaaaaggcagtccctgaaaattatgcgggtgaaccaaagacagtaatcttcctaacttgtgatttgactggcgtcctgcctccagtatcaatactgtctaaagaagctgctgcctaccattttttaagcggatatactgcgaaggtaggatctacagagattggatcatcttcagatattgaatcaactttttcaacctgttttggagcaccattttttcctagacctgccggtatttatgcagaccttctaatgaaaagagtcgaaaatttcggctcaaaggttttccttgtaaatacaggctggactggaggaccttatggagttggaaaaagatttgatattccaactactagaaggatcgttaatgcagttcaaaacggcgagctggatgatgttgaaactcaaatgcttaatggtttaaatcttgaagttcctctatcgattcaaggagttgatagcaacttgctaaatccacgcgaaacctgggaagataaaggagcttatgatgctgccgctgctgacttaataaaattatttcaaaataactttgaaagatttgatgtcagtgaagaaataatttctgccggcccttctgatcaataa

SEQ ID NO: 277563 - DNA, 1051 bp, Unknown
  Bacterial polypeptide expressing nucleotide sequence isolated from the Sargasso Sea
ttcttattttacttctagaaaggttctcctggcaggaatgccttatgcgggggaaatgaaaaaatcaatgtttgccgtacaaaacttcttacttcctgagaaaaatgttttgcctatgcattgcgcttctaatgtcaactctgaaggagaagtatgtttgttttttgggctttcaggaacaggtaaaactactttatcagctgatcctgatagaaatttaataggagatgacgaacatggatgggggccaggagctgtatttaactttgaaggaggttgttacgcaaaatgtatagatcttactaaaaaaaatgaacctgttatctgggacgccataagaaaaggaagtgttatggaaaatgttgttatagactctgagacaaaggagcccgactatagtgactcttctttaactgagaacactagagtggtctacccaagggagcatatagaaaaaagagctgatgagaatgcagcaggagagcccaatgcagttatcttccttacttgcgatttatctggtgttattcctcccgtctctattctttctaaagaggcagctgcctaccattttttaagtggttatactgcagctattggatccactgaagtaggttcaactgaagctttcaaaacaactttctctacctgttatggggctcctttcttccctagggcagcaggagtatacgcagatctgttaatgaaaagaattgaagagtttggaagtaatgtctatttggttaataccggttggacgggtggaccttatggaacaggcaaaaggtttgatataccagttactagatcaatcatttctgccattcaatctggtaacttagctggttccgaaactgaaaagatagaaggaatgaacctagaagtacctttaaatgttgatggcgttaactctaaactactaaacccaattaataactgggaagatccttctttatacaactcttatgaagagaaattagttaaccaatttaaagaaaattttaaaaaatttgatgtttctgaatcaataattagtgcaggtcctaaataa

SEQ ID NO: 277564 - DNA, 814 bp, Unknown
  Bacterial polypeptide expressing nucleotide sequence isolated from the Sargasso Sea
aatgcgaattagcggaaaagaattaggattagagagtttaggaataactgatatagatcaaatatatagaaatttgtctatagatgaacttattgatgaaacagtcaataataatgaaggaatcattggtgcaaatggagcttctattgtagatactggtaaatatactggtcgatcacctaaagacaaatatatagttgatgaaccttcatcaactgataatatatggtgggggcctgtaaataaaaaaatagatgaggcaatctttgatgaattatatgaaaagattgttgaatattataatacagatgattcaaaaacttatttatttgatggttttgctggctttgacccaacatatagtataaacgtaagaatactagcaaaaagagcgtggcaggcacattttgtacataatatgtttattcgtccggaaactcctgaacaattaatcaatttttctccagattttacgattataaatgcttcaagtgtttttaatgaaaaatttaaggaacatggaatgaattctgagacattcattatttttcatatgggcaagagaattgcaataattggtggtactgaatatggaggcgaaatgaaaaaaggtattttttcagttcttcattatttacttcctcttaaaggagtcttatcaatgcattgttcagcaaatgtagatgaagaaggaaaaaactcagcaatattctttggcttaagtggtacagggaaaacaaccctttctacagatccaaaaagaccattgattggtgatgatgaacacggttggtcagatgatggtatctttatt

SEQ ID NO: 277565 - DNA, 1543 bp, Unknown
  Bacterial polypeptide expressing nucleotide sequence isolated from the Sargasso Sea
tatggcggatggattaaaccgcgttcactacaacccctcaacagcacaactggtcgaatttgccctgctacgcggcgaaggtgaattgactgcaaacggcgcactggtcgctaaaaccggtacccgtacaggtcgctctcctggcgatcgttttatcgtaaaagaagacagttcagcggctgacatcgaatggggacccgtcaaccaagcatttgaacccggtgcttttgaaggattatgggcgcgcgtagaagcattcctcgccgataaagagttgtttgtatctgacctcgaagtcggtgcagatccagaacattaccagccagtgcgtgtgacgactcaatacgcttggcaccaactgttcgcccgcaacctttttatcatcccagaagaatttaaccgtcaagacaagcctgtatggcaaatcatcaacgcgccagacttcgtctgtgttcctgagcgtgatggcaccaattcagatgctgcggtgatcttaaactttgccgagcgcaaagtgttgctagcgggcctgaaatacgctggcgaaatgaagaagtcgatgttctctgtacaaaacttcctactgccagctcaaggcgtattgccaatgcactgctcggctaacgtaggtaaagacggcgacaccaccctattcttcggtctgtcaggcacgggtaaaaccaccctgtctgcggatccaaaacgcttcctgatcggtgacgatgagcacggctgggcaccaggcggcgtattcaacatcgaaggcggctgctacgccaagtgtatcgacctaagccaaaagaacgagcctgtgatttgggatgcgattcgcttcggtactgtgctggaaaacgtggtcatggacgagcaccgcgtgcctaactacaaagacagcagcctgacggaaaacacccgtgcggcttacccactcgagcatatcgctcagcgtaaagaagacaaccgtggcgccgagccacacgctgtggtgttcttaacctgcgacgtgtctggcgtattaccaccggtttctatcctgagtaaagagcaagcggcttaccacttcctctctggctacacagctaaagtcggttcgactgaaatcggttcaacttcggcgattcagtccaccttctctacctgcttcggcgcgcctttcttcccacgtcctgcgggcgtgtatgcagagctgctgatgaagcgtatcgagtcattcggtagccaagtgtacttagtgaacactggctggactggcggcccacacggtattggtaaacgtttcgacattccaacgacgcgcgccattgtcgatgcgattgtcagcggtgaactgaaaaacgtcgaaaccgtacacttagagacgctgaatctggccgtgccagtggcggtaccgggtgtagacactaacctactcaacccagtgaacacttggagcgataaggcactgtacgccgaatacgcccaaaaactggccgaagccttcactaagaacttcgctaagtaccaagtgtctgatgccatccgtaacgcaggcccaaaggcataa

SEQ ID NO: 277566 - DNA, 856 bp, Unknown
  Bacterial polypeptide expressing nucleotide sequence isolated from the Sargasso Sea
atgaataaattagaccttggtataaaaaaattagatagcttttaccgtaatctaccggttaaagatcttataaatcatatcgttcaaaataaagaaggacgaactggtttacgtggagctgcaatgattgatactggaatttatactggtcgctcacctaatgataaatattttgtagatgagcctacgtccagagataaaatttggtggggtgaagtaaataggaaagttgatgaaaatatttttgatgatttatatggtaaagtgattgattattataatagtggggtaagtaattcatatatttttgatgggtttgcaggagcagataagaaataccgtattaatgttagaattatagctaaaaaagcatggcaagctcatttttcacataacatgtttattagatccaaaaatgaagagataaatcaatttgaaccagattttacgattataaatgcttcagatattcaaaatgaagattttgaaaaacatggattaaactcaaagacttttgttttatttcaccttggtcgtcgtattgcaataattggaggaacagaatatggaggagagatgaaaaagggtattttttcagtgctacactatcttcttccacagcaaggtgttttatccatgcattgttctgcaaatacagataaaaatggagaaaattctgctattttttttggtttaagcggtacagggaaaacaaccttatcaacagatccttatagaccactcattggtgatgatgaacatggatggtcagatgaaggaatatttaattttgaaggtggatgttatgctaaagttattaatcttaaccctgagcatgaaccagatatttacaatg

SEQ ID NO: 277567 - DNA, 1066 bp, Unknown
  Bacterial polypeptide expressing nucleotide sequence isolated from the Sargasso Sea
attgcaattatttggaggcacagaatatgccggagaaatgaagaaaggaattttttcaatgatgcattattatttgccaatgaaaaatgttctttcaatgcactgttctgcaaatgtatctgcaactcatgatcagtcaactgtatttttcggtctttcaggaacaggaaaaacaacacttagtaccaatgcaaatcgacctttaattggtgatgatgaacatggatggtctgataatggtatatttaattttgaaggcggatgttatgcaaaagcaattaatcttgataaagataaagagccagaaatttataatgctataaagcacggaacactactagaaaatgttgtttatgatttagaaactaaagaagttgattttgataataatagtaagagtgagaattctagaatttgctatccaatcaattttgtagaaaactcactgggttctaaaggtttaaaaagtgctggcccgcatccaaattcaattatatttcttacttgtgatgcatacggaataatgccaccattggctagaatgaccaaaaaacaagctatgtatcatttcataagtggatatacagctaaaatggctggaactgaaattggagttacggatcctgtagctgcattttcaccatgctacggtggaccgtttttaacattacatcctttaagatatgctgaacttttagagcaaaaattgaatgattacaactcttcagtttttttagttaatactggatggtcaggatcaagtgcaaaaagcggatcttcaaggatagatttaaaaaaaacaaagcatattataaatttaattactgatggtaatttagactttagtaaatcagtatttgataagttttttaatttagaaattccattagatgtttatggtttagaaaatgattttttagttcctcatcatagttggactaatttagaagaatatttttcgactggtaatatgcttacaagacttttcaataataattttgaaaagtttttaatacaagatccagatattctagcagcaggtcctaaaactgatttaagtgcttaa

SEQ ID NO: 277568 - DNA, 1561 bp, Unknown
  Bacterial polypeptide expressing nucleotide sequence isolated from the Sargasso Sea
attgatagcatttggaattacaccacactcaattcatcgaaatttacctgttgaaaaactagttgagcagtctattgaaacaaatgaaggcatgttgacctctactggctcattatctgtaaaaactggaaaatatactggccgttctcctcaagaccgttacataatctatgatgatgaaactcatgaaactattgattggggtgatgtaaatagacaattcccaactgaaaaattcaattctatatttgaaaaaatgaaaaaacatgctgaaggtaaggatctttacgtttttgatggatttgtaggtgctgacaaagaaaatcgattggcaattcgtgtagtcaatgatcatgcatggcaaaatctcttttgcagacaattgtttgtaagaccatcaaatgaagagctagaatctcacgacccagactttacaattgtatgtttgaacgattttgaaacaattcctgaaattgatggaactagaacaaatattttcattttggttaatctatcgaaaaaaattgtactgattggcggaaccaattatgcaggtgaaatgaaaaaatccatgtttgctgtaatgaattatctaatgccaaagaaagatgtttttccaatgcattgttctgcaaatattggaaaagaaggtgataccgcattattctttggtctatctggtactggaaaaacaagtttgtctgcagatcctgaacgtatgttaattggcgatgatgaacatggttggtctcaaaatggtgtttttaattttgaaggtggatgttatgcaaaatgtattaatcttaacgaggatgctgaaccacaaatttggaatgccataaaatctggagcagttcttgaaaatgttgttgtaaacaaagatactttgaaaccagactttgatgacggaagtttaactgaaaacactcgtgcagcttatcctttggattacattccaggggctgtaattccaagtgttggtggtcatcctaaagttataatatttttaacagcagatgcattaggtgtacttccacctgtttcaaaattaacaaaagaaggtgcaatgttccatttcatgtcaggttatacaagtaaacttgctggtaccgaacgtggaattaaagaaccaaaagcaacgttctctgcatgttttggttcgccatttatgcctcgtcctgcatctgtatatgcaaaaatgttaggtgaaaaaatacttgaacacaataccgttgtttatctaattaacactggatggtctggtggtccatatggcgttggaaaaagaatcagcataaaatacagtcgtgcaatggtaactgctgccttgaccggaaaatttgacttgataaaattcagacatgatgacaccttcaatcttgatgttcctactgaatgtccaggtgtaccttctgatgtattagacccaaaaaatacatggattgacaaggattcctacgatttgtctgcaaagaaattagcacaaatgtttggtgaaaactttacaaaattcaaagatgcttctccagaaattaaaaatgctggacctcaaattcagtaa

SEQ ID NO: 277569 - DNA, 1552 bp, Unknown
  Bacterial polypeptide expressing nucleotide sequence isolated from the Sargasso Sea
atggataacaatacccaaacaacttctgcgcttgaacttccaactgaggtgcttatagatattgcagtagaaaacaatgagggtgtcattgccagtaatggggcattctcaacaacaacaggtagtagaactgggagaagtccaaatgatagatttattgtacgagagcctggaactgatgatctgatcgattggggtgatattaataagccttttgatgaagataaatttgatagtctttggaacaaggttgattcataccttgcagaaaaaaataggtatgtctctcacgttcatgttggatctcatgctgatcattacttgccagttaaagttgttactgaaacagcttggcattctctgtttgctcgtctgatttttgtatgtacagaggattataacccatccaataaacaagaatggcaaattctatctgcagctaactttaaatgtaatcctgagtctgatggaacaaactcagaaggctgtgtgattattaattttgcaaaaagaaaagtgatacttgctggaatgaagtatgcgggtgaaatgaaaaaatctatgttttctgttcaaaactttttattaccagaaaaaaatgtgctgcccatgcattgttcagcaaatatgaattccaatggagatgttgcgttattttttggtttatcaggaacgggaaaaacaacattatcagctgatcctaaatgctctttgataggtgatgatgagcatggttggagcgaagggtcagtatttaattttgagggtggttgttatgcaaaaaccatagatctctcagaagaaaatgaacctgtaatttttaaagcaatcaaacacggcagtgttattgaaaatgtatatttagataataaaggcaatcctgactattcaaatacatccctttctgaaaatggcagatgttgttatccaaggtctcatattgaggctgctgttccagaaaatgcagccggagaacccaaaacgatcatttttcttacatgtgatcttacaggtctgataccacctgtatctatactatccaaagaagccgctgcatatcatttcttaagtgggtacactgcaaaagtaggctcaaccgaagttggctcaagctctgatattgaatctaccttctctacttgctttggagcaccattttttccaagaccagcaaatgaatatgcagagctcctaattaagcgaattgaatctttcggatctaaagtatttttagtcaacacaggatggactggaggtccatatggtgttggttcaagatttaaaattccaacaacaagaagaatagttaatgccatccaagacggcgaacttaatgatgttgaaactgaattggtacccggcttaaatctaagcattccccttagtatcgaaggagtagattcaaagctgttgaatccaattaatacttgggaagataaagaagaatataaaaaatatctaaatgaattggttgaaaaatttcaagataactttaaaaggtttaatgctaaaccagaaataattgcagctggtcctggatttgatggctaat

SEQ ID NO: 277570 - DNA, 973 bp, Unknown
  Bacterial polypeptide expressing nucleotide sequence isolated from the Sargasso Sea
atgacatcaaatattttttcaaatctgtctcaggatgagttgattcaagaatcaataaatcgtggcgaaggtgaaatagcagcaaatggagccttgcttgtcgagacaggcaagagaactggcagaagtcccctagataggttcatcgttaaagatgaaactaccgaagactcagtagattggggagaagttaataggccttttgattcagaagactttgaccagctttggcaaagagtggagaaattcttgaatgacaaagatacttttgtttctaatctccatgtaggtcagcatgaagaacactatattcctgtagaaataaaaacccagtgggcttggcacaatctatttggctgccaaatgtttatcagaccagattcatataaccctaagaataaagatccatggacagttatgagtgcagctgagttcgaatgtgaaccagaaagagatggtacaaatagcgatggagcagtaataatcaattttacgaagagaagagttttactagcaggaatgaaatatgcaggggaaatgaaaaagtctatgttctctgttcaaaattttattcttcccgaaaaagatgttctgcctatgcattgcgctgccaatgtaaatgaatcaggcgatgtatgtttattctttggtttatcaggaacaggaaaaacaaccctttcagctgatccggatagagacctaataggagatgatgaacacggctggggcataggatcagtatttaactttgagggtggttgttacgcaaaatgcatcgatttgtctgaaaagaatgagccggttatatggaatgcaattaaacacggcagtgttatggaaaatgttgttgtagacccttcaacaaaagaacctgattattcggactcttcgttaactgaaaatacaagggtggtctacccaagagaacatatgaaaaaagatctttggagaatgcgggcggggagccgagcgc

SEQ ID NO: 277571 - DNA, 1267 bp, Unknown
  Bacterial polypeptide expressing nucleotide sequence isolated from the Sargasso Sea
gatagctactggtggaatggtaatggcacaaaaaacgacaataaatcaattgatcttggtgtctggaatgaacttaaagcacttgctggaaatcagttaagcggcaagaaactgtatgttgttgatggattttgtggagcaaacaaagatacttgcatgagggttcgctttgttatggaagtagcatggcaggcgcatttcgtcaaaaacatgtttattcggccaaatgatgaggaattagccaactttattcctgatttcactgttgtaaacgcgtccacggcaaccaatcccgattgggaacgccacggtatgaactcgccaacctttgttgcctttaatctgaccgaacgcatgcaacttattggaggcacctggtatggcggggaaatgaaaaaaggccttttttcagtaatgaattaccttttaccacaaaaaggcattgcctcgatgcattgttctgcaaactgcggtgcctgtggtgatgttgcattgttttttggactctcaggcacgggtaaaacgaccctttccgcatcatcaaaccgcagcttgattggtgatgatgagcatggctgggacgatgacggtgttttcaatttcgaaggaggctgttacgccaaaaccagcggtctaagcgctgaaagcgagcctgagatttaccaagctattcgccgtaatgcactgcttgaaaatgtgatggtagatgatgctggcaaggttgattttaaagatacaagcctgacattgaacacacgtgtctcctacccgattcatcatatcgataatattgtagagcccgtctctaaggcagggcacgccaaaaatgttctgtttttgaccgccgatgcatttggggttcttcccgcaatatcaattctcgatgaagcggcaacgcaataccatttcctgtctggatttaccgcaaaaatggctggcatggagcgcggcatgacggaccatcaacccacattttctgcctgtttcggtgcggcctttttaactcttcaccctactgtttatgccaaagttctaaatgagcgcatgaatcaggctggggcgaaagcctatttgatcaacaccggatggaatgggcagggcaagcgaatttcattggctaacacgcgcaggctgatcaatgctatttttgatgatgagcttgatgatgcagaaacagaaatcctgccaattttcaaattgaaagtgccaaaagcacttgtggggcttgacggatcagttctggatccccgctcaagttatgatgacc

SEQ ID NO: 277572 - DNA, 1525 bp, Unknown
  Bacterial polypeptide expressing nucleotide sequence isolated from the Sargasso Sea
atgtcacgagaacttaatttaactaattcaaaattaattgagagagcaatcgctaatggtgagggcgaacttaccaatacaggagcactcttagcattaaccggaagtagaactggaagaagtccaagcgatcgctttatagtccaagaaaatagtacagctgacaaaattgattggggtgaagtaaacataccttttgaagctgatcattttgataatctatggaacaaagtttccgattatttagataataaggactgctacatgtctgaagtccatgtaggctctaataaagatcactatattccagtactagttaaatctgagaaagcatggcactccctgttctcaaaacttatttttatagttcctgaagtattcaatgaagaggaaaaagaaacttggaaaattatgacagctgctgattatgtttgtgatccagaagttgatcatactaattctgaatcttgtgtaattatcaatttcttgagaagaaaagtattaattgccggcatgaagtatgcaggtgaaatgaaaaaatcaatgtttgctgtccaaaatttcttattaccagaaaaagatgttcttcctatgcattgttcagctaatcaaactaaagataaaagaactacactattttttggattgtctgggactggcaaaacaacattatcagctgaccctaaatgcgctctaattggagatgatgaacatgggtggagtgatgggtctgtatttaatttagagggcggctgttatgccaaatgcatcaagctttctaaagaaaatgagccattaatttgggatgctataaaatttggaagcattttagagaatgtagtaattaatgaaaatggggttccagattatgacgatgataaatacacagagaacacaagagtttgctatccaagagattttatcgaggggtcagttcccgaaaatcaaggtggtgaaccagacaatatagtttttcttacttgtgatctgtctggagtcctgcctccagtaagtatattagatgagaatagtgcggcttatcattttttaagtggttatacagcaaaggttggttctactgaaatgggcagcacaaaatcaatggattttgctttttcaacatgctttggagcgccattcttcccgagaccggctggagtgtatgcagatctactaattaaaagagtgcaaaaaaacaatacaaaagtttttttagttaatactggctggactggtggtagttatggtgtgggtgaaagattccctatccctgtaacaagagcaattattaatgccattcaagacaacaagatcgatacagatgatgttgagcatcttgagaaattaaatcttaatgttccaaaagatattaaaggagttaatcaagaattactaaatccaagaaactgttgggaatctgtagaaaactatgatgaggaatgtgacaaattatgtatgagattcaaagagaattttagaaagtttgatgttgctcagcaaataattgatgcaggcccaaggtaac

SEQ ID NO: 277573 - DNA, 1427 bp, Unknown
  Bacterial polypeptide expressing nucleotide sequence isolated from the Sargasso Sea
catggaaaaaggaacccaaacaacttccgcgcttgaacttcctacagaagagctcataactattgccgtcgaaaataatgagggtattattgctaaaaatggagccttctcgacaaccacaggcactcgaaccggaagaagtcctaacgacagatttatcgtaagagaacctagtaccgatgctcttatagagtggggagacattaataagccttttgatgaagaaaaatttgatgttctatggaataaagttgattcataccttgcagaaaaaaatcgatatgtctcgcatgttcatgttggatctcatgctgaacattacttaccagtcaaagttataactgaaacagcttggcattccctttttgctagattaatttttgtatgtacagaagattacaattcatcaaataaacaagaatggcaaattttatctgctgcaaattttaaatgcgatcctgaaactgacggtacaaattcagaaggctgcgtaataattaattttgcaaaaagaaaagtaatacttgcaggaatgaagtatgcgggtgaaatgaaaaaatctatgttttctgttcaaaactttttattaccagaaaaaaatgtattgcctatgcattgctcagcaaatgtaaatgctaatggtaacgttgcattgtttttcggtttgtctggaacaggaaagacaactttatcagctgatcctaaatgttctttgataggcgatgatgaacatgggtggagcgagggatccgtatttaattttgaaggcggttgttatgcaaaaactattgatctatcagaagaaaatgaaccagtaatttttaaagcaattaaacatggcagtgttatcgaaaatgtatatttagatgaggaaggcaatcctgattattcaaatacctcactttctgaaaatggtagatgttgttacccaagatcacatatagatgcagctgtgccagaaaatgcagctggtgaaccaaaaactatcatttttcttacctgcgatcttacaggccttataccaccagtatctatattatctaaagaagcagctgcttatcatttcttaagtggatacactgcaaaagtaggttctactgaagttggttcaagtgctgatattgagtccaccttctctacctgctttggagcgccttttttcccaagaccagcaagtgaatacgcagatctcttaatcaaacgaattgaatcttttggctctaaggtgtttttggttaatacaggatggacaggtggtccatatggtattggttcaagatttaagattcctacaacaagaagaatagttaatgccatccaagatggtgaactggatgacatagagactgagttagtaccaggattaaacctaagcgttcccttgtctatcgaaggagttgacacaaagcttttgaatccaattaata

SEQ ID NO: 277574 - DNA, 1510 bp, Unknown
  Bacterial polypeptide expressing nucleotide sequence isolated from the Sargasso Sea
cctgccaaatgcagaacttatcgagcgcgccgtaaagcgcggcgaaggtgtcctcgataaaaacggtgcgctagtcgttgaaaccggaaaacgtacaggtcgctctccaaacgatagattcatcgttaaagagcctacgacagaaaacgacattgattggggcaaggtaaacaagccttttgattctgataaattcgatgcgctgtgggatcgcgttgaagcttacctgtctacccaagaacactttctttcacaccttcaagtgggctccgatcctgaacatgccttgtggcttgaagtaagaacgcaaaccgcgtggcagcacgtttttgcccgcaacctttttattatcccagagcagtggaatgttaaaggcgaccagccttggcaaattctgaatgtacctggtttcacctgtgagccagagcgtgacggtacaaacagcgacggcacagttatcatcaacttcgcgaaaaaacgcgtattgcttgcgggcatgcgttacgcgggtgaaatgaaaaaagccatgttctccgtgcaaaacttcctgcttccggcaaaagacgtgctacctatgcactgttcagccaacgtgggtgaagaaggcgatgtgaccttgttctttggtctttcaggtactggcaaaacaacactttcagccgatcctaagcgtttcttgattggtgatgacgagcacggctgggcaccaggtagcgtatttaatattgaaggcggttgctacgctaaatgtatcgacctatctcaaaagaacgagccagtaatttggaatgctatcaagtttggtaccatcctagaaaacgtagtgcttgatgaaacacgcacgccagactataccgacacgtcgttaacccaaaactcacgtgcggcctatccgctttcacacattgaaaagcgcgttgctgaaaaccgaggcggcgaacctcgctcggttgtatttttgacctgtgacgtaagtggcgtattgcctcctgtttcagtgttaagtgaagaagctgcggcgtatcacttcttaagcggttacacagcgaaagtaggctctactgaaattggctctacaagcgatattgaatcaaccttctcaacttgttttggtgcgcctttcttcccgcgtccagcaggcgtgtatgcagagcttctgattaagcgtgttaaagcgtttggcgctaaggtttacttggttaataccggttggacaggcggcccttacggcacaggtagccgttttgatatccctactacgcgcgccatcattgatgcgattgtatcgggtaacttggctgatgttgaaacccagcacattgacgcgttaaacctagatgtgccagtggcaatagacggtgtagacagcaatttgcttgtgccacaaaacacgtgggcagacaaagagaagtacaacgaatacgccgctaacttagtcaacgactttaaacagaactttgaaaaatacgacgttagcgacgctatcgttaaagccgggccgggtaactaa

SEQ ID NO: 277575 - DNA, 1612 bp, Unknown
  Bacterial polypeptide expressing nucleotide sequence isolated from the Sargasso Sea
ttggaaaatgtgggtgaaaatttttctaaagttgggactgatagtcatggctttaaaaatctaaaaaaagttaattggaatctcaatagagatgatatttatgatataacaatttcaaacggacaaggtttattatcaaaagatgaagttcttgttgttgaaactggaatacatactggccgatcagcaaatgataaattcattgttaaaaatgatcaaaatgaagattcaatttggtgggataacaataagtcaattacagaagaaaattttgataatctatataaagatgttttgaatttttgtgaagaaaaggaattatatgttcaagatttatttggtggagcagatcttgattaccgattgagtacaagagtttatacagaatatgcttggcattctctgtttatacaaaatttgttaattgaagttaaagaagaagaaaaatctgaatttaatcctgaatttatcataattgatataccaagttttaaagctgatacatcaagacatggttgttcttctgaaactttaattgcagtcaattttgaaaagaaattagtcataattgtaggcacttcatatgcaggagagataaagaaatctgttttttcaatgttgaattatttactgccccctaagaatgttatgcctatgcattgttcagtcaatgttggtcaagatgaggatccagcaatattttttggtttatctggaactggaaaaacaactctatcagccgatccaaatagaattttgattggtgatgatgagcatggttggtcaagtaatggtgtttttaattttgaaggcggttgttatgctaagatgatcaggctttctgaacaagctgaacctgaaatttatcaaacaacaaaattaagaggaacaatcttagaaaatgttgttattgacaaatcttctggagaaattgatttagacgacagttcgcttgctgagaatacaagaggtgcatatcccctatcttttattcctaatgctagtgaaacaggaagaacatgcatgccaaagaatataattctattaacatgtgatgcatttggagttcttccaccaattgcaaaattatctgcttctcagactatgtaccattttctttcagggtatactgcaaaagtcgctggaactgaaaagggcgtaactgaaccagaagcaactttctctgcctgttttggggcaccatttatgccaagacacccttctgaatatggaaagttactgcaaaagcttattgctgagcatagtgtaaaatgttggctagttaatactgggtggacgggtggaccttatggcgcaggtgagagaatgccaattggtgcgacacgaaaattgttatcatcagccctcactggctctttattatcttcagatatgagaattgatgaaaattttggttttgaagtccccgtagcagttgaaggagttgatacaaaaattctcaatccaagagaaacttgggaagataaagaaggttatgatttacaagcacagaaactagtaaagatgttttctgataactttgatgtttttaaaccatatgtagatattgatataatagatgctgctccaaatcttcaagctgcagaataaa

SEQ ID NO: 277576 - DNA, 1531 bp, Unknown
  Bacterial polypeptide expressing nucleotide sequence isolated from the Sargasso Sea
aatgtcaaaaatttttgaaaatttatcagttgatgatctcatcacagaatctcttgagagaggagaaggagaaatagcagctaatggtgcgcttctggtaaaaacaggtaaaaggacaggcaggagtcctcttgacagatttatagtcattgatgactctacaaaaaaagaggttgattggggtgaggtaaatcgtccatttgaatcattagcttttgaaaatctttggaataaagttgaagcctatttagattcaaaagataccttcatatcttcattacatgttggcgaacattccgaacattatgttcctgtaaatataagaactcaatgggcttggcataatctttttggtaagcaaatgttcataaggcccgatgaatttaaccctaacaataaagaaacttggcaaatacttagtgcgcctgaatttgtttgcgatccagaagttgataaaaccaacagtgacggtgtagttattctagattttactgctaagaaagttctacttgcaggtatgccttacgcaggagagatgaaaaagtctatgtttgccgtgcaaaacttcttacttcctgcaagcgaagtattacccatgcattgtgcatctaacgttagtcatgatggggaagtttgtctattttttggactttcaggaacaggtaaaaccactttatcggccgatcctcatagaaatttaataggtgatgatgaacatggttggggaccaggaacagtgtttaattttgaaggaggttgttacgcaaaatgtatagatttaacccaaaaaaatgaacctgtgatttgggatgctataaaaaagggaagcgttatggaaaatgtggtaattgatgcccaaaccaaagtgcctgattacagcgattcatcgttgaccgaaaatactagagttgtttatccgagggagcacatagagaaaagggcagatgaaaatgcagcaggtgaacctaatgcagttatcttcctaacttgtgatttatcaggtgtaatacctcctgtttctattctttctaaagaagcagctgcttatcattttttgagtggatatacagccgctattggttctacagaagtaggttctactgaagcctttaaaacaacgttttctacttgctacggtgctcctttttttccaagagctgcaggagtttatgcagacctactgatgaaaagaattgaagagcatggcagtaatgtctatctcgtaaataccggctggacaggtggtccttatggaacaggtaaacggtttgatataccggttactaggtcaattataagcgctatacagtcaggtgagttggttggttgtgatactgaaaaaatagatggaatgaatctagaagttccgcttaatgttgaaggagttgactctaaattactaaaccctgttaaaagttggcaagatccttcactgtatgattcatatgaagagaagttagttaatcagtttaaagaaaactttaagaaatttgatgtcgcagatgcaataattaatgcaggaccaaaataa

SEQ ID NO: 277577 - DNA, 1331 bp, Unknown
  Bacterial polypeptide expressing nucleotide sequence isolated from the Sargasso Sea
tatggaaagtaacgcggtggctgaaacattagaactaaataccgaagacctcatcaaagctgctattgaaaatggggagggggtaattgcaagcaacggagctctctctttagagacaggagctcgaactggacgcagcccaaacgataggttcattgttaaagaagatagcacctcgcatttaatagattggggtgaaattaacaggccatttgatgcagataagttttcacttctttgggataaagttgatgcatatctagcagaaaaaaatcgctacctttcaaaggttcatgttggagcgcatgaagatcattacatcccagttcatgtgactgctgaaagtgcctctcatagcatgttctctcagttaatatttataagccctgatgaatttaatcctcaagcaaaaaaggaatggcagataatgagcgccctaaattacgagtgctcccctgaggaagatggaactaattccgaaggatgcgtaattatcaattttgcagctagaaaagtcctacttgctggaatgaaatatgccggtgagatgaaaaaatcaatgttttctgttcaaaattttttaatgccagaaaaggatgtcctgccaatgcattgttcatccaatgtaaataaagatggaaacgtttcactcttttttgggctttcaggaacaggaaaaacaactctttctgctgatccaacttgttcgctcattggagatgatgaacatggctggggtgtaggcactgtctttaacttcgaaggcggttgctatgcaaaaaccattgatctttcagaaaaaaatgaacctgttatttggaaggccattaaacatggcagcataattgaaaatgtatttttagatgagactggcacccctgattattcaaacacatctttatctgaaaatgggcgttgttgttatccacgctcacacattgatgatgctattgaatctaattctgcaggtgagcctgaaaccgtaatatttttaacttgtgacctaactggagtcatccctcctgtttctatcctttcaaaggaagcagcggcttatcatttcctgagcgggtatactgctaaagttgggtctactgaagttgggtctactgaatcaattggcactacgttttctacttgttttggagcaccatttttccccagaccagctggagtatacgcagacctcttaatgaaaagaattgatgcctttaactcaaaagtgttcttagtcaacactggttggactggaggtccacatggtattggctcaaggtttgatattccgaccacaagaagaataattaatgccattcaaaatggtgaaaaaa

SEQ ID NO: 277578 - DNA, 1201 bp, Unknown
  Bacterial polypeptide expressing nucleotide sequence isolated from the Sargasso Sea
tctgtttgcaagacatcttttagtaaggccaacgtctgaagaagttaatagtttcattgctgacttcactataattaactttccaagtttaaaaatggatcctaattatcatggaacaaatagtgaaacagcaattatcgtaaatttaaaagagaaggtaattctaatttcaggaacagagtatgctggcgagacaaaaaaatcagtttttactctccttaactttttgttgccagaaaaacaagttatgccaatgcattgttcggttaatactggaaatgatggtagctcggcaatcttttttggtctttctggaactggcaaaacaacgttaagtgccgatccaaatagatctctattgggcgacgatgaacacggctggtctgacgaaggactatttaattttgaaggtggctgttatgcaaaattaattagactgtcgcaagaagcagagccagaaatatatgcaactacacagaaaaaattaacagtaattgaaaacgcagtacttaaaactgatggtgatctcgatctagatgacaactcactcactgaaaatacaagaggcgcataccctttagaatttattccaaatgtaacactaaacggaaaaacatctcatccaaaaaacattatcatgttaactgcagatgcatttggagtattgcctccaatttcaaaattatctccttctcaagcgatgtatcactttctttcaggttatacggctaaagttgctggaacagaaattggactatcaaatgaaccacaggcaacattttcaacatgttttggggctccttttatgccaagaaatccaatagagtatggcaacctacttaaagagaagatttctaaatataatgttgactgttggctagtaaatacaggttggtctggtggtgtttacggtgtgggtaaaagaatatctataaaaaatacacgaaggttattagatgcagcattatctggtgagctttctaacgtagaaatgagaaaagatgacaatttcgggttttttgtaccattagaagttaatggaattgacgaaagtgtcttagacccaagaagcacatgggctaattcaactgaatatgatttacaggcaaaaaaattagtaagcatgttcatagataattttgtaaagtttgagtctgatgttgaagagaaaatactaaattcaggaccatctcaaatttaa

SEQ ID NO: 277579 - DNA, 778 bp, Unknown
  Bacterial polypeptide expressing nucleotide sequence isolated from the Sargasso Sea
caaattgatacgtttatctaaagatgctgagccagaaatctataagacaactcaaatgaagggtacagttatagaaaatgcggtcatgaataaagatggtcttttagaccttgatgacaactcacttactgaaaatacaagaggcgcatatccgttagattatatacctggagtgataaaatctggaaaagcaccacaccctaataatataataatgttaacagcagatgcattcggtatattaccacctattgcaaaattaactccagaacaagcaatgtatcattttctttcaggctatactgcaaaagtagcgggcaccgaaattggactatcaaatgaacctcaggcaacgttctcaacatgttttggagccccttttatgcccagaaatccaattgaatatggaaatctacttaaagaaaaaatctctaaatttgcagtggattgttggttagtaaatactggatggtcaggtggtgtttacggagttggtaagcgaatatcaattaaagatacccgaagattacttgatgccgcactatctggcgaactttcaaattcaccgatgagaaaagataagaattttggatttagtgtgcctctaacagttaaaggcattgatgaagctatattggatccaagaaatacatggagtaatgcatcagagtacgatgaacaagctaaaaaattagtaaatatgtttattgaaaattttgtaaagtttgagtctgatgtagaggataaaattcttgcgtcaggtccagtaactagttag

SEQ ID NO: 277580 - DNA, 1315 bp, Unknown
  Bacterial polypeptide expressing nucleotide sequence isolated from the Sargasso Sea
ttggggggagttgcgattcagagttcctctcaaagtagggctgtcgatttgtcacagcatggtttggaacccagtggaaacgttcactggaatatgggtcctgaagagctccaccaaatggcggttgacttgaacgaggctaaactcacatcagactctgtattacttgcagttactggagagagaacaggacgctctccaaatgacagattcattgtggatgaggtcggaatggcagaggaggtctggtggggggaggtcaatagaccaacggctccggcggttttcgatagactattagtcaaggtccaagaacacctcaattcggtagagaatgtattcgtcaaggacgccttctgcggagctgacaaggactacaggatgccagttaggctagtgactgagaaggcatggcatgcagcattcatgcacaacatgttcgttcgagctacggaagaggagatcgcatctcacattcccgagttcacgattctccatgttccagagatgaagtccagtatgagcgacggagtgaactccgacgtcttcgtaataattgctctggacagaggaatggtgataatcggagggactcactatgctggcgagattaagaaggctattttcacaataatgaatcatatcttgccttctaagggacttctcccaatgcattgttctgccaatacagacggggagaacgcagctctattcttcgggctttccggtaccggtaaaacgacactatctgcagattccaacagagcacttgtcggagacgatgagcatggctggtcagacaacggggttttcaatttcgagggagggtgctatgctaagctaatccgcctctctgaggaggacgaaccggcgatatatgcaactacaaagatgcctggatcaattctagagaatgtggttttgaatgcagacggatctcctgacttcgacaacggctctctaactcagaacactagaggatcgtatccaatcgaattcatagaaaatcgtactccggattcgatggccggtaacccgaacaatgtggtgttcctaacttgtgatgctttcggggtgctccctccgctttcgagattaactcccgaacaagctgcatatcacttcatgtcgggttatactgctaaggttgctggtaccgagatgggtgttactgaaccccaggccacgttctcgacttgctttggggcaccatttatgccgaggcatccgagcatatacgcagatttgctctccaagaagatccgtgagaatgatgcgaagtgctggctgatcaacaccgggtggattgcaggtg

SEQ ID NO: 277581 - DNA, 1552 bp, Unknown
  Bacterial polypeptide expressing nucleotide sequence isolated from the Sargasso Sea
ttggctaaagcaaaaaaagtgcattacaataattcagcctcacagctcattcagcttgccactgagttgaatgagggtattctaaccattgatggctctttttcggtaaatacggggaagcatacaggtagatcaccaaaggataagcatataattgctgataatgagactgaggataatgtttggtggggcaataatgcaagaattaaaagaaatgatttcaatcttctcgagagcgatatgctctcccacatgcaaggcaaagaactgtttattcaagacttgcatgccggaacagatccaagcgagaaaattaaagtcagagttatcactgaatttgcatggcaggctctatttattcagcatttactcattttacctgaaaatattgaacagcaggattttaaagaagatcttttgatcattgatctaccatcattcaaaactgatcctaataaatacggcgtacgaactgatacgactatagcatgtgactttacaaataataagattctaattgcgggaacttattatgccggcgaaataaaaaaatcagtctttacttatttcaactatacattaccaccaaaaggcatatttccaatgcattgctcagcaaatagtgacccagatggtaaaaatactgcaatatttttcggattatcagggacaggcaaaacaacattatctgcagatccagaacgacttttagttggtgatgatgagcatggatggtcaaacaaaggagtgtttaattttgaggatggatcatatgcaaaggctataaatttatctaaagatgctgagccacagatttataatgctgtaaggagatcaacgacagtattggagaatgtggttgtagacgaaaacactggtgaacttgattttaatgatggaagtttgacagaaaatacaagagccgcatttccaatgtcttttgtcggggagaatgtatcgaaagagggtatggcgggcacgccaacaaatattgtaatgctgacgtgtgatgccttcggtgtcatgcctccaatttcaagattggactcaaatcaggccgtatatcattttttatcagggtatactgcaaaggttgctgggactgaaagaggcgttattgatccgtctgcgactttttcaacatgtttcgctgctccttttctaccacgacatcctattgtttacggccggttattaaaagagtatatggaaagatataatgtccgaacgtggctgattaatactggatggagtggcggtccagcgggtatcggtcaaagaatgccaattaagcttacaagaagtctattaaaagcagcacttaatgatgacctagacaatgccgaaatgaggcaggataaatattttaagttaatggttcccctctcgataaatggtgatagcagttacttgaatccaattgatacatggtcaaataaagatgaatttgacatacaggcgaagaaattagttgagatgtttgttgaaaatttcaaaagattccaaaacgaggtggacgatgacatcgttaatgcaggtccttcaaattaat

SEQ ID NO: 277582 - DNA, 1381 bp, Unknown
  Bacterial polypeptide expressing nucleotide sequence isolated from the Sargasso Sea
aaagctatccgaagaaaattttgactatcttttgaataaagtattagatacttatgaaggtttacattcaagttattatgtttttgatggatttgctggagatgatacagataattcattaagtgttagaatgataacaaagaaagcttggcaatcactttttgtaaacaacatgtttatacgtccaacaaaagaagaattgaatgattttaatcctgattttacaattatcaatgcctatgatgttaaagaagaaaattggaaagattacggactaaattcagaaaatttcattgtctttaatattaagaaaaagattgcaattattggcggtacagaatacgctggagaaatgaaaaaaggaattttttcaatgatgcattattacttaccattgaaaaatgttttatcaatgcattgctctgcaaacgtatctgcttctcaagatcagacaaccgtatttttcggactttcaggtactggaaaaaccacgcttagcactaatgcaaatcgtcctttaattggtgatgatgaacacggatggtctgacaatggtatatttaattttgaaggtggatgctatgcaaaagccattaatcttgataaagataaagagccagaaatttataatgcaattaagcacggaactcttttagaaaatgttgtttatgacttagaaactaaagaagtcgattttgatgataatgccaaaagtgaaaattctagaatttgctaccctattaattttgtagagaattctttaggctcaaaaggcttaaaaagtgctggtcctcatccaaattcaattatctttcttacttgtgatgcgtatggtataatgccaccattagctagaatgacaaaaaaacaagctatgtatcacttcataagcggatatacagctaaaatggctggaaccgagacaggtataacagagccagttgctgcgttttcaccatgttacggaggaccctttttaacattgcatcctttaaggtatgctgaattattggagcaaaagctaaatgattacgattcttcagtttatttagtcaatactggatggtcagggtcaagtgcaacaagtggatcttcaagaatagatttaaaactaacaaagcatattatcaatttaattactgatggtagcttagactttagtaaatcagtatttgataagttttttaatttagaaattccattaaacgttgatggtttagaaaatgacttcttggtacctcatcatagttgggataatttagaggaatatttttcaactggtaatatgcttacaagacttttcaataataattttgacaaatttgaaattcgagattcagatattctagcagccggtcctaaaactgatttaagtgcttaa

SEQ ID NO: 277583 - DNA, 1261 bp, Unknown
  Bacterial polypeptide expressing nucleotide sequence isolated from the Sargasso Sea
gaaaaaaccgggcgtagccctaatgataaaagaatagttgaacatccaagcattgaaaaacatgtttggtggggcaaaattaatataggtatggatgcagatacattcattattacaagagcaagagcaattgattacctgaatacgcaaaaaagaatttatgtagttgacgggcttgctggatgggatgttaattaccagattaaagttcgaataattaccactcgtccgtaccatgctttgtttatgcataacatgttgattcgcccaagtaatgagcaattggaaaattttggggagccagactatgtgatatttaatgcaggcaagcatcctgctgacccacttattaagcatatgacttcaaaaaccagtgttgagttggattttgatcgcagggaatttgtgattcttggtacagaatacgctggagagatgaagaagggtgttttcactataatgaactacattatgcccaagcagggaattctttcaatgcatagctcagccaatgttggaaataacaatgatgtggctttattttttggattatccggaacaggaaaaactacactgtctgcagacccaaaaagacatttaattggagacgatgaacattgttggagcgatgatggtatttttaatatagaaggagggtgctatgcaaaatgcatcaatctttccgaagaaaaagaaccggatatttacaaggcaatcaaatttggtactgtgctggagaatgtagattatgacaaggatacacatgttgttgattacgatggaacttcactcactgaaaacactcgtgcgtcttacccaattgaatatatcaataacgcaaaaattccgtgtgtaggaggtcatccacagaatattatctttctaacatgcgacgctttcggtgtactgcctcctgttagcagactcaattcatctcaagcgatgtatcatttcattagcggttacactgcaaaagtggcaggtacagaagtaggagtaacagagcctgaagcgactttctctgcatgttttggtgcagctttcatggtgtggcatcccagtaaatatgctgaacttttagcagaacgaattgaaaagaacggcaccttagtttggcttgtaaatacgggctggagcggtggtggtttcggagagggcaaaagaatttcattgaaatacactcgttctattataggctctattcttgatggtactatgtataatgctcgggtcatcaagaataaactttttggctttgatg

SEQ ID NO: 277584 - DNA, 1141 bp, Unknown
  Bacterial polypeptide expressing nucleotide sequence isolated from the Sargasso Sea
agactatactattattaactttccaagtctcaaattagatcctgaatttcacggtactaatagtgaaacagcgataatagtaaatctgaaagaaaaagtaatacttatcgctggaactgagtacgcaggtgagacaaaaaaatcagttttcactctcctaaattttttattgccagaaaaaaaagtaatgccgatgcattgctcagttaattctggagaaaaaggagactcagctattttcttcggtctttctggaactggaaaaacaaccctaagtgctgatccaaatagatctttattaggagatgatgaacatggctggtcagatgaaggtctttttaactttgaaggtggttgttatgcaaaattgatacgtttatcaaaagatgctgagccagaaatctataagacaactcaaatgaagggtacagttatcgaaaatgcagtcatgaataatgatggtcttttagaccttgatgacaactcactcactgaaaatacaagaggcgcatatccgttggattatatacctggagtaataaaatctggaaaagcgcctcaccctaataatattataatgttaacagcagatgcattcggcattttaccacctattgcaaaattaactcctgaacaagcaatgtatcattttctttcaggctatactgcaaaagtagcgggcaccgaaattggactatcaaatgaacctcaggctacattctcaacatgttttggagctccttttatgcccagaaatccaattgaatatggaaatctacttaaagataaaatctctaaattttctgtagattgttggttagtaaatactggatggtcaggtggtgtttatggagttggtaagcgaatatcaattaaagatactcgaagattacttgatgctgcactatctggcgaactttcaaatacacagatgagaaaagataagaattttggatttagtgtacctctaacagttaaagaaattgatgaagctatattagatccaagaaatacttggagtaatacatcagaatacgatgaacaagctaaaaaattggtaaatatgtttattgaaaattttgtaaaatttgagtctgatgtagaggacaaaattcttgcatcaggtccagtgactaattag

SEQ ID NO: 277585 - DNA, 628 bp, Unknown
  Bacterial polypeptide expressing nucleotide sequence isolated from the Sargasso Sea
acgtgttgtttaccctagagagcacatagagaaaagagctgatgagaatgcaggcggcgagcctaatgcagtaatatttctgacatgtgacctttctggagttatacctcctgtctctatcctaagcaaagaagcggctgcttatcactttttgagcggttataccgccgctataggttctactgaagttggttctactgaagctttcaaaactactttttcaacttgttatggggctccttttttccctagagcagctggagtctatgctgatctgcttatgaaaagaatagaagaatttgatagtaaagtttatcttgtaaacactggttggacgggcgggccttatggtgttggaaagagatttgatatacccgttactagatcaataatctctgccattcaatcaggagctttaagtggtgttgagactgaaacaatagagggaatgaaccttgatgtgccactaaatgtagaaggtgtagatagcaatctgctcaatccaattaaaaactggtctgatccttcttcgtatgcagagtatgaaaataaactagttactcaatttaaggataactttaagaaatttgatgtatcgcaatctattgttgaggccggaccaaggtaa

SEQ ID NO: 277586 - DNA, 808 bp, Unknown
  Bacterial polypeptide expressing nucleotide sequence isolated from the Sargasso Sea
atgtcaaaagaacaaattttatctaattctaaacttattgaagaggctgttgctaatgatgaaggaaaacttgtcagcaatggcgcatttcttgccttaactggaagtaggactggaagaagtccaaaagataggtttattgtagaagaagctagcactagagatcaaattgaatggggtaacgtcaaccaaccttttaattcagatgattttaataatctatgggataaagtttcagattatctaagtaataaaaaacactataaaacagaagttcatgttggttcaaataaagatcactatattccagtagaagtaaaatgtgaaaaagcgtggcattctctcttttcaaaattaatctttattgttcctgataaatataactccgaaaataaagaagtttggcagttaatttcagcacctgattttgtttgtgatcctgaagttgataaaactaattctgatggttgtgtgataatcaattttcataaaagaagagttttgattgctggtatgaaatatgctggtgaaattaaaaagtctatgttttctgtgcaaaactttctattacctgaaaaaaatgtccttcctatgcactgctcagcaaatcaaacctcagatggacgtacaacattattttttggtttatctggaacaggcaaaacaacactatctgcagatcccaagtgttcactaatcggagatgatgagcatggatggggagatggaacagtctttaattttgagggtggttgttatgctaagtgcataaaactttccaaagaaaatgaaccattgatttgggatg

SEQ ID NO: 277587 - DNA, 1585 bp, Unknown
  Bacterial polypeptide expressing nucleotide sequence isolated from the Sargasso Sea
aatgataaaaaatcaagattttaagagaaatctccatattgatgatttgatcaaagatgctgttgaaaataaagagggtgtaattggacttaacggagctttgatggttgatacaggtgaattttcaggaagaatcccgaatgataagtttattgtagatgaggactcctcaaatgaagatatttggtggggtgaagtaaatcaaaagctttctcaaaataattttgactatttattaaaaaaagttttagatacatatgaaaatctttcttctagttattatgtttttgatggttttgcaggagatgatagcgataattctttaaacgtaagaatgattacaaaaaaggcttggcagtcgctatttgtaaataatatgtttattcgtccttcaaaagaacaattaaacaatttttctccagattttactattataaatgcctatgatgtgaaagaagagaattgggataagtatggattaaattctgaaaattttatcgtttttaatattaagaaaaaaattgcaattattggaggtacggaatacgccggtgaaatgaagaaaggaattttttctatgatgcactactatttaccattaaaaaatgttctttcaatgcattgttctgcaaatgtatctgcatcacataatcaatctactgtattttttggtctttctggaacaggaaaaacaactttgagcactaatgctaatcgaccactgattggagatgatgaacatggctggtctgataacggaatttttaattttgaaggtggatgctatgcaaaggctatcaatcttgataaagataaagaaccagaaatttttaatgctataaagcatggaactcttttagagaatgttgtatatgatttagatacaaaagaggttgattttgatgacaactcaaaaagtgaaaattctagaatttgttatccaattgaatttgttcaaaattcattaggatctaaagggttaaaaagtgctggtcctcatcctgactctattatatttcttacttgcgatgcatatggtataatgccccctttagcaagaatgacaagaaaacaagcaatgtatcattttataagcggatatacagctaaaatggctggaacagaaactggtgttacagaaccagttgctgctttttcaccatgttatggaggcccttttttgacattacatcctttaaaatatgctgaacttctagaaaaaaaattaaacgaccataattcttctgtttatttagtaaatactggatggtctggatcaagcgcaactagtggatcttcaagaattgatttaaaactaactaaacatattataaatctaattacggaaggaagtttagactttagtcaatctgtatatgataaatttttcaacttagaaattccaatgaatgttgaaggtttagaaaatgattttctaattcctcatctaagctggagcaatctagaagaatatttttcaaccgggaatatgcttacaaggttatttaataataactttgaaaaattcaatataaaagaccctgatatccttgctgctggccctaaaacagatttaagcgcataa

SEQ ID NO: 277588 - DNA, 762 bp, Unknown
  Bacterial polypeptide expressing nucleotide sequence isolated from the Sargasso Sea
tatgaatcataatttacctctagactctctattagacatcgctattaaaaacggcgaaggtaccattgttgataacggtgctttagttgttactaccggtaagagaacaggcagaagtcccgctgataggtttctggtgaatgatgaaaaaacacaacacgtagtcgattggggcgaaaacaaccagcctaccgaaagggaaactttcgaaaaactttgggacgaatctgaagaatatttaaaaaataaaacagtttatacagcagacctgcatgttggagcaagtgaagaacattatcaaccggtgagagtcgaaaatgaattggcttggcacaacatgttttgtcaaagtcttttcattagaccaccatctttcaatcccaagaataaaactccttggcaactaagatgtgctccagggtttacctgcgaccccaaaagacacggcactaattccgatggaacggtgatggtgaatttcaccacgcatcaaatattgattcttggtattgcctacgctggggaaatgaaaaaatccatgtttggaataatgaattttataatgcctgaagaagacgttctatcgatgcactgcgctgctaacgccggtaaggacggtgatgtttcgttgttctttggtttatccgggacaggaaaaacaactctttctgcagatccagatcgatggttaataggagacgatgagcacggttggggcgatggcattgttttcaatattgagggcggttgttatgcgaaaac

SEQ ID NO: 277589 - DNA, 1129 bp, Unknown
  Bacterial polypeptide expressing nucleotide sequence isolated from the Sargasso Sea
atggtttttgaactttcaaataaagatcttatttctaaagctctagagagagaagaaggagtgcttgcttctaacggagcgctaaccgttgtaacggggaaaagaactgggagaagccccctagatagatatattgtagaagaggaaacaaccaaaaatgatattgaatggggagaaataaataggccatttgatgaagagaagttccactctctttggtcaaaagttgagtcttatttagatgacaaagaaagatttttaactaaagttcatgttggatctcatcctgaacactatcttccaattgaggttacgactgaaacagcttggcagagtctcttctcaagattaatatttattgatcctgatgagtttaacccaaaagataaaagcaactggaaaattcttagcgcagcaaattttgaatgtgtgcctgaaatagatgggactaattcagatggttgtgtaattataaattttaaagaggaaaaagtcctcattgcgggcatgaagtatgccggtgagatgaaaaaatcaatgttttcagtgcaaaacttccttcttcctgcaaaagacatccttccaatgcattgctcttcaaatatcaatgataaaaattcagttgcgctattttttggtctttcaggcactggaaagacaactctttctgctgatccagcatgcacattaatcggcgatgatgagcatggatggtctccgggttctgtttttaatttcgaaggtgggtgttatgcaaaatgtatagatctctctgaggaaaatgaacctgtaatttggaaagctattaaagaagggagtattttagaaaacgttgtattaaatgatggagttcctgattactcagatgtttcattaactcaaaattcaagatgttgttatccaagaacacatatcgaaaaggcagtccctgaaaattatgccggtgaaccgaagacagtaatctttctaacttgtgatttaactggtgtccttcctccagtatcaatactgtctaaagaagctgctgcctaccattttttaagcggatatactgcgaaggtaggatctacagagattggatcattttcagatattgaatcaactttctcaacctgtttggagcaccatt

SEQ ID NO: 277590 - DNA, 1549 bp, Unknown
  Bacterial polypeptide expressing nucleotide sequence isolated from the Sargasso Sea
atggacacttcatctcaaacctcagaagctcttgagcttacaaacgaagaattaataaccgcagctgttaataatggtgaaggagtaattgcaaataatggagctttttcgaccgaaactggtgaaagaacaggaagaagccctaatgatagatttattgttaaggaacctggatcaagcaatctaattgattggggtgatgtaaatattccttttgaggaagataactttaattctttatgggacaaagttgaaacataccttgctgaaaaagatagatacgtttcaagagttcatgttggatctcattcagagcactatttacctgttcgagttacaactgaaactgcgtggcattcattttttgcaagactgattttcgtttgttcagaaaactataatccaaataacaaaaaagaatgggaaattttatcagcagcaaactttcaatgtgatcctgaatctgatggcacaaattctgagagttgtgttgtaataaattttgctcaaagaaaagtaattattgctggcatgaaatacgcaggtgaaatgaagaaatcgatgttctctgttcaaaattttttattgcctgaaaaaaatgttttacctatgcactgctctgcgaacgttaataaaaatggaaatgttgcattgttttttggattatctggcactggtaaaactaccttgtcagcagaccctaaatgctctcttatcggtgatgatgaacatggttggagccctggatcagtttttaattttgaaggcggttgttatgcaaaaacaattaatctttctgaggaaaatgaaccagtaatcttcaatgctataaaacatggaagtgttattgaaaatgtttttttaaataataatgaacctgattattcaaacacttcactgtcagaaaatggcaggtgctgttatccaagatcccatattgaaaatgcagttgaagcaaatgcagctggggaacccaaaactgtaatttttcttacatgtgatttaacaggccttattccaccggtttcaatattgtccaaagaagcagcagcttatcactttctcagtggttatacagcaaaagttggatctacagaaatgggttctacatctgatatagcgtcaacattctcaacttgttttggcgcaccattttttcctagaccagcagatgtatatgcagatttgcttatgaaaagaattgaaggttatggatcaaaagtctttctggttaatacaggttggacaggaggaccttatggtaaaggttcaaggtttgatattcctgttacaagacgaatagttaatgccatccaagatggtgaattggataatgtagaaacacagatgatacctggattaaatctagaagtgcctctagaaatagaaggtgttgaatctatccttcttacaccagaaaaaacttgggaagacaatgaagagtatcaaaaatacttaaaagatcttatttataaattccaagaaaattttaaaaaatttaatgtaaatcctgatatagtttcagctggtcctggatttaatgaataat

SEQ ID NO: 277591 - DNA, 1366 bp, Unknown
  Bacterial polypeptide expressing nucleotide sequence isolated from the Sargasso Sea
aatgatattgagtggggagaaataaataggccatttgatgagagaaagttccattctcttttgtcaaaagttgaatcttatttagacgacaaagaaaaatttttaactaaagttcatgttgggtctcatcctgaacactatcttccaattgaggtaacaactgaaacagcttggcagagcctcttctcaagattaatatttattgatcctgatgaatttaacccaaaaggtaaaagtaactgggaaatacttagcgcagcaaattttgaatgtgtgcctgaaatagatgggactaattcagatggttgtgtaattataaattttaaagaggaaaaggtccttattgcaggcatgaagtatgctggcgagatgaaaaaatcaatgttctcggtacaaaactttcttcttcctgccaaagatatccttccaatgcattgttcttcgaatatcaatgataagaattccgtagcactattttttggtctttcaggtactggaaaaactactctctctgcagatcaagcatgcacattgatcggcgatgatgaacatggatggtctccgggttctgtttttaatttcgaaggtgggtgttatgcaaaatgtatagatctctctgaggaaaatgaacctgtaatttggaaagctattaaagaagggagtattttagaaaacgttgtattaaatgatggagtccctaattactcagatgtttcattaactcaaaattcaagatgttgttatccaagaacacatatcgaaaaggcagtccctgaaaattatgccggtgaaccgaagacagtaatttttctaacttgtgatttaactggtgtccttcctccggtatcaatattatctaaagaagctgctgcctaccattttttaagcggatatactgcgaaggtaggatctacagagattggatcatcttcagatattgaatcaactttctcaacctgtttcggagcaccatttttccctcgacctgccggtgtttatgcagaccttttaatgaaaagagttgaaaattttggctcaagggttttccttgtaaatacaggttggactggtggaccttatggagttggaaaaagatttgatattccaactactagaagaatcgttaatgcagttcaaaacggcgagcttgatgatgttgaaactcaaatgcttaatggtttaaatcttgaagttcctctatcaattgaaggagttgatagcaacttgctaaatccacgcgaaacctgggaagataaaagcgcttatgatgctgcagctgctaacttaataaaattatttcaaaataactttgaaagatttgacgtcagtgaagaaataatttctgccggcccttctgataaataaa

SEQ ID NO: 277592 - DNA, 927 bp, Unknown
  Bacterial polypeptide expressing nucleotide sequence isolated from the Sargasso Sea
aatgtcatcaattcacgaaaatctaaccgtcgaagaacttattaatgccgcccttgaaagaggtgaaggagaaatagcttctaatggtgcgctgcttgtaaaaactggtaaaagaaccggaagaagtccgcttgatagatttatagttaaagatgatacaacgatcaattctgttgattggggacaagtcaacaaaccattcgatagcgaagcatttataaatatttggaataaagttgaggaatacatgaaccaaagagatacatttgttagctctttgcatgttggagagcatcctgattactatgtaccagtcaaaatcagaacggaatgggcatggcataatctttttggtaaacaaatgttcataaggcctcaagaatttaaccctggaggtaaagacaactgggagattatgagtgcacctttatttgaatgcgatccagaaacagatggcaccaatagtgatggcgtcgttttattagacttcacaagaaagaaggtcttgttggcgggaatgccttatgcaggagaaatgaagaaatctatgtttgcagttcaaaatttcttactacctgaaaaggatgttcttccgatgcactgtgcttctaatgttggatctaacggagaagtttgcttgttctttggtttatcgggtaccggaaaaacaactctttcagcagatccagaaagaaacttaatcggtgatgacgaacatggatgggggccaggtacagtattcaattttgaaggaggttgttacgctaaatgcattaacctcaccaaaaaaaatgaacctgtcatttgggatgctataaaaagaggtagcgtaatggaaaatgtggtcatcgattcggaatcaaaagatccagatttttctgattcatccctaaccgaaaatactcgagttgtttatccaagagaaca

SEQ ID NO: 277593 - DNA, 1252 bp, Unknown
  Bacterial polypeptide expressing nucleotide sequence isolated from the Sargasso Sea
atgaatgagtatggaagaaaagctcccaaagcttctatttctgcattaggtttaggcaatgtgtcggctgcctattggaatctcgatccggcacaattggtagaagacaccattgtacgcggcgaaggagttttagccaacaacggagccttggccattgatacaggtgagttcaccggaagatcaccgcaggacagattcattgttgaagatgacatcactagagatagtgtttggtggggtgacatcaacaaaaagtttgatgctgaaaaatttgaccgactatacaatagggtaacttcttacctctcaggaaaagaagtatatgtaagagatgcatccgtttgtaccaaagaaaagtatggcatgaacttgcgattggtctcagaatttccatattctaacctatttgcacacaacatgtttttgagactttcagatcaggaaattgacaactttgaggctgaatggaacatcatctgtgctcctggcttcaaagcagatgctgaaattgatggaacacgccaacacaattttgccatcatgaatttcagcaaaaagatattgcttattgggggaaccggttatacaggagaaatcaagaaagggattttttcagcacttaattttattctcccgcacgaacaagatgtactctcaatgcactgttcagccaatgtcggccaaaatggagatacagccgtattctttggtttatccggcacaggaaaaaccaccttatcttctgatccaaacagacgattgattggagatgatgaacacggttgggatgaagattctgtgttcaattttgaaggtggttgctatgcaaaatgcattgatttgagcagagagaaagaacctcaaatttatgatgcgatcaagtttggtgccttgctagaaaatatcaatttcaaagaaggtactacagaagtggattatgaggattctgaaaaaacagaaaatacaagagttagttatccaatttatcacatcgacaatattcaagaaggatctttgggtggcacacctaaaaacatctttttcttgacgtgtgacgcatacggagtattgcctcctatttccaaattgtctaaaggacaaagcatgtaccattttatctcaggatatacagcaaaagttgccggtactgaagcaggaattactgagccacaaacggcattttcagcttgttttggtgctccctttcttccgcttcatcccaccaaatatgcaatgatgttaggtaaaa

SEQ ID NO: 277594 - DNA, 1099 bp, Unknown
  Bacterial polypeptide expressing nucleotide sequence isolated from the Sargasso Sea
gaacaattaaacaatttttctccagattttactatcattaatgcttatgatgtaaaagaagaaaattgggatcagtatggattaaattctgaaaatttcatcgtttttaatattaagaaaaaaattgcaattattggtggtactgagtacgcaggtgaaatgaagaaaggaattttttcaatgatgcactactacttaccgataaaaaacgttctttcaatgcattgctccgcaaatgtatcagcttcacataatcaatccactgttttttttggactgtctggaacaggaaaaacaactttgagtaccaatgctaatcgaccattgattggggatgatgaacatggttggtctgataatggaattttcaattttgaaggcggatgttatgcgaaggctatcaatcttgacaaacataaggagccagaaatttttaatgctataaagcatggaactcttttagagaatgttgtttatgatttagatactaaagaggttgattttgatgataattcaaagagtgaaaattctagaatttgttatccaattgaatttgtagaaaattcattaggatctaaagggttaaaaagtgctggccctcatcctgactctatcatatttcttacttgtgatgcatacggtataatgcctccactggctagaatgacaaggaaacaggcaatgtatcatttcattagtggatatactgcaaaaatggctggtacagagactggtgtgacagaaccagtagctgctttctctccatgttacggaggtccttttttaacattacatcctttaaaatatgcagaacttttggaaaaaaaattaaatgaccataactcttctgtttatttagtaaatactggctggtctggatcaaacgctactagcggatcttcaagaattgatttaaaacttactaagcatatcatcaatctaattactgaaggaagtttagattttagtcaatcagtgtatgataaattttttaacttagaaattccaatgaatattgaaggcttagaaaatgattttcttgttcctcatttaagttggagtaatttagaagaatatttttctacaggcaatatgctta

SEQ ID NO: 277595 - DNA, 940 bp, Unknown
  Bacterial polypeptide expressing nucleotide sequence isolated from the Sargasso Sea
gcactgttctgcaatattggtaaagatggtgatactgcattattctttggtctatctggcactggaaaaacaagcttatctgcagaccctgaacgtatgctcattggtgatgatgaacatggttggtctgaaagtggagtttttaatttcgaaggtggatgttatgcaaaatgtatcaatctaaatgaagaagccgaaccccaaatttggaacgcaataaaatctggcgcagttttagaaaatgttgtagtaaacaaagatactctaaagcctgactttgatgatggaagtttaactgaaaacacacgtgcagcatatcctcttgattacattcccggtgctgtaattccaagtgttggcggtcatcctaaagtcataatatttttgaccgctgatgcattaggtgttttaccacctgtatcaaaattaacaaaagaaagtgcaatgttccatttcatgtcaggttatacaagcaaacttgctggaacagaacgtggaattaaagaaccaaaggcaacattttcagcatgctttggttcgccatttatgcctcgtccagcatctgtctatgcaaaaatgttaggagagaaaatatctgaacacaacactgttgtttatctcatcaacactggctggtctggcggtccatatggagttggaaaaagaattagcataaagtacagtcgttcaatggttactgctgcattaactggtaaatttgacttgataaaattcagacatgatgatacattcaatctggatgttcctaccgaatgtccgggagtaccttctgatgtattagacccaaaaaatacatggattgacaaagactcctatgatttatcagccaaaaaattggcacagatgtttagtgaaaactttacaaaattcaaagatgcctcacctgaaattaaagcagccggacctcaaattcaataat

SEQ ID NO: 277596 - DNA, 991 bp, Unknown
  Bacterial polypeptide expressing nucleotide sequence isolated from the Sargasso Sea
atgaataaccaatcacaaccacttgaaccccttgtgcttagtaatgaagagctgataaaggctgctattgataatgatgaaggtgttattgctagcaatggtgcattttcaactactactggagaaagaactgggagaagtcccaatgatagatttattgtaaaagaaccgggaacagataatctaattgattggggtgaaataaataagccttttgatgaaaaaaaatttgatcaattatgggataaggttgaatcctatttaactgagagtaattgctactctactaatgttcatgtcggttcacataaagaacattatctacctgttaaagttactacagaaacagcatggcattcattctttgctagattaatatttgtctgtcctgatatatacaacccatcttccaaagaagaatgggaaataataagcgctgcaaattttaaatgttctccagatgaagatggaacaaattctgaaagctgtgtagttattaactttgcaaaaagaaaagtaattattgcgggaatgaagtatgcaggtgaaatgaaaaaatcgatgttctcagttcaaaattttcttctacctgaaaaaggtgttttaccgatgcattgctctgcaaatgtaaatagaaatggtgatgttgccttattctttggcctttcaggcactggtaaaacaactttatctgcagacccaagttgttctttgataggtgatgatgaacatggctggagcgagggttcagtttttaactttgaagggggttgttatgcaaaaactatagacctttcggaagaaaatgaaccagtgatctataaagctattaaacatggtagcgttatagaaaatgtatatcttaatgagaataatgagcctgaatattcaaacacatcactttcagagaatggaaggggtggttacccaagatcccatattgatgccgccgtagaagaaaatgctccaggcgaaccaaaaacagtaatat

SEQ ID NO: 277597 - DNA, 1393 bp, Unknown
  Bacterial polypeptide expressing nucleotide sequence isolated from the Sargasso Sea
atgagaaagcaatatggtggggataataacaaatcaattaccgaagagaattttgataatctctacaaagatgttttagatttttgtgaagaaaaagaattatatgttcaggatttgtatggtggagctgatcttgattatcgattaagcacaagagtatatacagaatatgcatggcattctttgtttatacaaaatttactaattgaagttaaagaagatgagaaatctagcttcaacccagagtttgtaataattgatattccaagctttaaagcggatacatctaggcacggttgttcttcggaaactctaattgctgtcaattttgaaaagaaattagttattattgtcggaacttcttatgcaggtgaaatcaagaaatctgttttttccatgttgaattatcttttgcctccaaagaatgttatgcctatgcattgctcagtcaatgtaggggcagaaaatgaccctgcaattttcttcggtttatcgggaaccggtaaaactactctatctgctgatccagatagaacattaattggcgatgatgagcatggttggtctagtaatggcgttttcaactttgagggtggttgttatgcaaaaatgattagattatctgaaaaggctgaaccagagatttatcaaacaacaaaattaagagggactatcttagaaaatgttgttatagacaaagactctggagaaatagatctagacgatagttctcttgctgaaaatacaaggggagcctatcctttatcttttatacctaatgctagtgaaacaggaagaactagcatgcctaaaaatatcatattgttaacatgtgacgcatttggggtccttccaccaatagctaaattatcttcatcacaaacgatgtatcattttctttctggttatacagctaaggttgctggaactgaaaaaggggtaacagaaccagaagctactttttctgcgtgttttggtgcaccatttatgcctagacacccatcagaatatggaaaacttttacaaaaacttattgccgaacatagtgtaaaatgctggcttgttaatacaggttggaccggagggccatatggaaaaggtgaaagaatgccaattgacgcgacaagaaagttactaacttctgcattgaacggttccttgctgtcagcagaaatgagaattgatgaaaactttggttttgaagttccttcatatgtcgatggagttgatactcaaatccttaacccaagagatacatgggaagataaggaaggctatgatttgcaggctcaaaaattagtaaaaatgttttctgataattttgatgtttttaagccttatgttgatatagatatcatagatgcggcgccaaatcttcaagctgcagaataat

SEQ ID NO: 277598 - DNA, 990 bp, Unknown
  Bacterial polypeptide expressing nucleotide sequence isolated from the Sargasso Sea
ttccgcaaaaaggtgtattatctatgcattgctctgctaatgttgatgaagatggtttaaatccagctatcttttttgggctaagcgggactggaaaaacaaccctatccactgaccctaaaagaccgcttataggcgatgatgaacatgggtggtctgatgatggagttttcaattttgaagggggttgttatgctaaaacaatcaatctaaaccctgaagatgagccagatatttacaatgcaatacgacatggagctctgctagaaaatgttgtatatgatccacatacaagggttgttgactataatgacaactccaagacagaaaacacgagagtttcttatccgttaaattttattgagaattcagtttacgctaagggtaaacctgcattgagcgcacatccaaagacaataatatttttaacgtgcgatgcatatggtgttattcctccagtttctaaacttacaccagagcaggcaatgtaccattttatcagcggatacacggcaaaagttgctgggaccgaaagaggtgttacagaaccaactgctactttttcaccttgttttggaggaccatttcttactttacatccgttaaaatatgcagaattattgcgagaaaaaatgaatcatcataatgttcctgcctatcttgttaatactgggtgggtaggggcaagcgcacaatctggcgctaaacggatttcattgcctataaccagaaaaattatctacgcgattttggatggtagtatcaacagtgctgattatgagacagacccttactttggggttcaaatcccaatcaatttaaaagatatagatactgaaattttaattccatcaaaagcatggtcaaatcagaatgaatacattaaaattgcagaagatcttgttcaaaaatttcagaagaattttgaagattacagcattgaagatcaagaaataattaatgctggaccaaaacttatgcgaaattaag

SEQ ID NO: 277599 - DNA, 763 bp, Unknown
  Bacterial polypeptide expressing nucleotide sequence isolated from the Sargasso Sea
aatgattaaaaaccaaaatttcaaacgaaattcaaacgttgatgatctgatcaatgatgctgttaataataatgaaggtgtcattggtcttaacggtgccttaatggttgatactggggagttttcaggaagaattccggatgataagtttattgtggatgaagactcttcaactgaaaaaatttggtggggagaagttaatcaaaagctatctgaagaaaattttgactatcttttgaataaagtattagatacctatgaaagtttaccatcgagttattatatttttgatggatttgccggagatgattcagacaattcattaaatgttagaatgataacaaagaaagcctggcaatcattatttgtaaataatatgttcattcgtccaacaaaggaagaattgaatgattttaatcctgattttacaattatcaatgcctatgatgtaaaagaagaaaattggaaagattacggactaaattcagaaaattttattgtctttaatataaagaaaaagattgccattatcggaggtacagaatacgcgggagaaatgaaaaaaggaattttttcaatgatgcattattacttaccaatgaaaaatgttctttcaatgcattgctctgcaaacgtatctgcttctcaagatcagtcaactgttttttttggtctttcaggtacagggaaaaccacgcttagtaccaatgcaaatcgcccattgattggtgacgatgaacacggatgtcagataatgggatat

SEQ ID NO: 277600 - DNA, 669 bp, Unknown
  Bacterial polypeptide expressing nucleotide sequence isolated from the Sargasso Sea
attcaaatacttcactttcagaaaatggaagatgctgctacccaagatctcatattgatgcagctgtgaaaaacaatgctgccggagagcctaaaacagttattttcctaacttgtgatcttatgggcttgatacctcccgtgtccattctatctaaagaaagtgctgcttatcattttctaagtggttatacggccaaggttggatctactgaaatgggatcaagttctgatatagaatctacattttcaacatgttttggggctccgttttttccaaggccagcaggcatttatgctgatctgctcatggaaagagttgagtcttttggtgctaaagtttatctagtaaatactggatggaccggcggaccttatggcacaggttctagatttaaaattccgactactagaagaattgtaaatgccattcaagatggagaacttgaaaacgttgagactcaaagaattccaggactaaacctagacgttccaaccgaagttcaaggggttgactctaatttacttaatccaagaaatacttgggaagataagaaagagtatgataaatatctaaaagaattaattaaaaagttccaagataactttaaaaaatttgatgtaaaacctgaaatagtaaaagctggtccaggatttgatgacaaatgat

SEQ ID NO: 277601 - DNA, 1525 bp, Unknown
  Bacterial polypeptide expressing nucleotide sequence isolated from the Sargasso Sea
atggacagtaactcattaattaaaaatagccataaattaagcactgatgagctaatagatgctgctgttaagaatgaagagggtgttattgcaagcaatggagcgttttctacgactactggagacagaagttcaagaagtccaaatgataggtttattgtaaaagaagcacattcagaagatttgattgattggggcgaggttaataagccttttgatcgacaaaattttaatgttttatggaacaaggttgaatcttatttagctgaaagagatagttatacatctgatgtgcatgtaggcgcacatccagaacattatttgccagttcaagtaactactgaaactgcatggcattcattgtttgctagattaatttttatatgtcctgatagttttaatcctctaaacaaaataaagtgggaaatacttagcgcggctaactataagtgtgttcctgaagaagatggaacaaattcagagagttgcatagttattaacttttctgagaaaaaagttctgatagctggtatgaaatatgctggtgagttaaagaaatctatgttctcagttcaaaacttcttattacctgatatggatgtattaccgatgcattgctcagctaatataaataaaaataataatgtgactttattttttggtttatctggaactgggaagacaacactgtcagctgacactaagtgttctctaataggagatgacgaacatggttggagcaaaggggctgtttttaattttgaaggtggttgttatgcaaaaacggttaatctatcagagaaaaatgagccagtaatatataaggctattaagcatggtagtgtaattgaaaatgtatatttaactgataataatgagccagactactctaatatctccatatcagaaaatggtcgatgttgttacccaagatcgcatattgaaaatgctgtgagagaaaatgcagcaggtgaaccaactactattatttttttaacatgtgatttaactggagtaatgcccccggtttcaattttaactagaaaaagtgctgcttatcattttttaagtggttatactgcgaagcttgggtctaccgaaagaggtgctggtgcacctatccagtctactttttcaacctgttttggagcaccctttttccctaggcctgcaaatgtctatgcagatcttcttattaaaaggattgaagagtttggttcaagagtattcttagttaatactggctggacagggggtccatatggtgtaggatctagattcgatatcccggttacaagaagaatagttaatgccatccaagatggagagttgcatgatgtagagacaactaagatacctggattaaacttaaatgttcctctattgcttcgaggtattgattcaaaactattaaatcctattgagaactggaaggataaaactgaatatcaaaaacagttagaaaatttaatctcacagtttcaagaaaattttaaacaatatgatgtaagccctgaaatagtat

SEQ ID NO: 277602 - DNA, 1291 bp, Unknown
  Bacterial polypeptide expressing nucleotide sequence isolated from the Sargasso Sea
tttgatggatttgcaggtgcagataaaacctatcgtttaaatgtaagaattattgcaaaaaaggcatggcaagcacattttgcacataatatgtttataagacccaatagtgctgaactagaaaaatttgaaccagattttacaattattaatgcatcagatattcaaaatgaagattttcaacaacatggattgaattcgaaaacatttgttttattccatattggccgtcgtattgcaatcattggtggtactgagtacggcggtgaaatgaaaaaaggtattttttcagtattgcactatctgcttcctcagcaaggagtcctttctatgcattgttctgctaatactgataaaaatggagataattccgcaatattctttggtctaagcggtacaggaaagacaacactatcaacagaccctgatcgttctcttattggagatgatgagcatggctggtctgatgatggaatttttaattttgaaggtggatgttatgctaaagtaattaatcttaaccctgagcatgaaccagatatttataatgcgattcgagaaggtgctcttttagaaaatgttgtttatgataaagcttctggattaatagatttttctgatgattcaaaaacgcaaaatacgagagtatcttatcctcttgaacatatagataattcactcttgtcacaaggtagaaatagtactgcagggcatccaaaaaatattatatttctagcttgtgatgcatatggtattttaccgccagttgcaaaattatctcctgaacaagcaatgtatcattttattagtggatatacagcaaaagttgcaggaacagagagaggtatcatagagccgacagctactttttcaccctgttttggtggaccttttttaacattgcacccactgaaatatgcggagttactgaaagaaaaaatgaaaaattttaaggtacctgcttatttagttaatactggatgggtagggcataatgctagttcaggatccccaagaatttcattgcctattactcgaaagattattcacaaaattttagatggtacaattaattcatgtgaatttgaaattgatcctttttttggttttcaaataccaactaaacttgacgatttaaattctgatctgctattaccaaaaagagtgtggaaaaatgaaaaaaattatttttctgcagcaaaagaattaattgaaaaatttcaagctaactttgctgaatatgaaattaatgatgatcttgttaaaaattctggaccagtaattatttagc

SEQ ID NO: 277603 - DNA, 1546 bp, Unknown
  Bacterial polypeptide expressing nucleotide sequence isolated from the Sargasso Sea
tatgaatactcaaacacaagaacctctcaatttgagcactgaacaactaattgatgccgctgttgcaaataaagaaggtattattgcaagtaatggtgcattttctacgaatactggagaaaggtcggcaagaagcccaaacgatagatttatagtaaaagaggcacatacggaagatttaattgaatggggtgaagtaaataaaccttttaatagagaaaaattcaatagtctttgggataaggttgaatcttatttatctaaagggaatagttatacttcagatgtccatgtaggcgcacatccagaacattatttaccagtcaaagttactactgaaacagcatggcattcattgttcgctagattaatttttatatgtactgatgattttaatcctcttaataaaataaaatgggagatactgagtgcagcaaactttgaatgtgttcctgaagaagatggcacgaattcagagagttgcatcgttattaatttttctgagagaaaggtaataattgcaggcatgaaatatgcaggtgaattaaaaaaatctatgttctcagttcaaaatttcttactaactgacaaagatgttttgcctatgcattgctcagcaaatataaataaaaataataatgtaactttatttttcggattatctggaacaggcaaaacaacactctcagctgatactaaatgttctcttataggagatgacgagcatggctggagcaaaggttctgtttttaattttgaaggcggatgttatgcaaagacagtaaatttatcagaagaaaacgaaccagtaatttataaagctattaaacatggaagtgtaattgagaatgtatatctaaatgataacaacgaaccagattactctaatatttctatttctgagaatggaagatgttgttaccctagatcgcatatcgaaaatgctattaaagaaaatgctgccggtgaaccaaaaactattattttcttaacttgtgatttaactggagtgatgccgccagtatcaatcttatctagaaaaagtgcagcttatcactttttaagtggttatactgcaaaacttggctctactgaaagaggggctggagcccctattcaatcaacgttctctacatgctttggagccccattttttccaagaccggcaaatgtatatgccgatcttcttattaagcgtattgaagagtttggttctaaggtgttccttgtaaatactggttggacaggaggaccttatggggttggttctagatttgatattcctgtgacaagaagaatagtaaatgcgattcaagatggagagctgcatgaagtagaaacagagaacatacctggtctgaacctagaagtacctttgttagttcgtggggttgattcaaaattattaaatccaattaataactggaatgataaagaagaatatcaaaaacaattaaaagatttagtctcacaattccaagagaactttaaaaaatataatgtacaacctgaaatagtatcagccggtccaggatttgatgactaa

SEQ ID NO: 277604 - DNA, 973 bp, Unknown
  Bacterial polypeptide expressing nucleotide sequence isolated from the Sargasso Sea
tctgagtactgaacaattaatagatgctgctgttgcaaataatgaaggtgttattgcaagcaatggtgcattttctactactactggagagaggagctcaagaagcccaaacgatagatttatagtaaaagaggggcatactgaagatttaattgaatggggtgagattaataaaccttttgatagagaaaaattcaatagtctatgggaaaaggtggagtcttttttagctaatggaaatagctatacctcagacgttcatgttggcgcgcatccagaacattatttaccagtcaaagttactactgagacagcgtggcattcattatttgctagattaatttttatatgtcctgatgactttaatcctcttaataaaataaaatgggagatattgagcgcagcaaactatgaatgtgttcctaaagaagatggtacgaattcagaaagttgtatagttattaatttttctgagagaaaggtcataattgcaggcatgaaatatgcaggcgaattaaaaaaatcaatgttctcagttcaaaatttcttactacctgataaagatgttttgccaatgcattgctcagcaaatgtaaataaaaataataatgtgactctcttttttggtttatctggaacaggtaaaacaacactctcggcagatactaaatgttctctcataggtgatgatgaacatggttggagtaagggatctgtttttaattttgaaggcggatgttatgcaaagacgataaatttatcagaagaaaacgaaccagtaatttataaagctattaagcatgggagtgtaattgagaatgtttatcttaatgatagtaatgaaccagattattctaatatttccattacagagaatggaagagtttgttaccctagatcacacatagaaaatgctgttaaagaaaatgctgccggagagccaaaaactgttattttcttaacatgtgatttg

SEQ ID NO: 277605 - DNA, 679 bp, Unknown
  Bacterial polypeptide expressing nucleotide sequence isolated from the Sargasso Sea
aactttagatctagatgacaattctttgacagaaaatacaaggggagcttatcctttagactatattccaggtgttactgcgtctggaaaaactagtcacccaaaaaatattattatgttaactgctgatgcatttggtgttttgcctcctattgcgaagctttctgcaagtcaagcgatgtatcattttctatcaggctatacagcaaaagttgcgggcactgaaattggtctttcaaatgaacctcaagcaacattttcaacatgttttggcgcgccatttatgccaagaaatccaattgagtatgggaacttacttaagaaaaagatatcagatcatgaggtagactgctggcttgtgaacacaggatggtctggtggtgtttatggagttggtgagagaatatcaattaaaaatactagaacattactgaatgctgccctctcaggcgagctcactaatactgaaatgagaaaagatccaaattttggcttttcagttccagtgaaagttgatggaattaatgaagagatattggatcctaaaaaaacttggcaaagtgaggctgattatgatgcgcaggccaaaaaactagtacaaatgttcattagtaattttactaagtttcaatctgacgttgaagaaaatgtaagagcttcaggtcctattgctaattaa

SEQ ID NO: 277606 - DNA, 1279 bp, Unknown
  Bacterial polypeptide expressing nucleotide sequence isolated from the Sargasso Sea
ttgtatggtggagctgatcttgactatcgattaagcacaagagtatacacagaatatgcttggcattctttatttatacaaaatttactaattgaagttaaagaaaatgagaaatctagttttagcccagaatttgtaataattgatattccaagttttaaagcggataaatctaggcatggttgttcctcggaaacacttattgctgttaattttgaaaaaaaattagttattattgttggaacttcatatgcaggtgagatcaagaaatctgttttttcaatgttgaattatttattgcctccaaaaaatgttatgcctatgcattgttcagtcaatgttggggcagaaaatgatcctgcaattttctttggtttatctggaactggtaaaacaactctatctgctgatccagatagaatattaattggtgatgatgagcatggttggtctagtaatggcgttttcaactttgaaggcggttgttatgcaaaaatgattagattatcagaaaaggctgaaccagagatttatcaaacaacaaaattaagagggactatcttagaaaatgttgttatcgacagagactctggagaaatagatctagacgatagctctcttgctgagaatacgagaggagcctaccctttgtcctttattcctaatgctagtgaaacaggaagaactggcatgcctaaaaatataatattattaacatgtgatgcatttggggtccttccaccaatagctaaactatcttcatcacaaacgatgtatcattttctttctggttatacagctaaagttgctggaactgaaaagggagtaacagagccagaagctactttttcagcgtgttttggagcgccattcatgcctagacatccatctgaatatggaaaacttttacaaaaacttattgctgaacatagtgtaaaatgctggctagttaatacaggttggacaggtggaccttatggaaaaggcgaaagaatgccaattgatgctacaagaaagttactatcctctgcattgaatggctccttactatctgcagaaatgagaatcgacgaaaactttggtttcgaagttccctcatatgtagatggagttgatactaatatccttaacccaagagatacatgggaagataaggaaggttatgattttcaagctcaaaaattagtaaaaatgttttctgataattttgatgtctttaaaccttatgttgatatagatataatagaagccgcgccaaatcttcaagcagctgaataat

SEQ ID NO: 277607 - DNA, 1525 bp, Unknown
  Bacterial polypeptide expressing nucleotide sequence isolated from the Sargasso Sea
gatgtcacgagagcttaacttaactaattcaaaactaatcgagcaagcaattgctaatggcgaaggggagcttactaatacaggtgcattcttagcgctaactgggaatagaaccggaagaagtccaagcgaccgttttatagtccaagaaaatagtacagctgacaaaattgattggggtgaagttaatatcccttttgaagctgatcactttgatgatttatggagcaaggtttccgactatttagacagcaaggactgttatatgtctgaggtccatgttggctctaataaagatcattacattcctgtagttgttaaatctgagaaagcatggcattcattattttcaaaacttatcttcatagttcctgaaatatttaatgaagaagaaaaagaaacttggaaaattatgacagctgcagactatgtttgcgatccagaggtggatcatactaattctgaatcttgtgtaattattaattttctacgaagaaaggtattgatagcaggaatgaagtatgcaggagaaatgaaaaaatcaatgtttgccgttcaaaatttcctattgcctgaaaaagatgttcttccaatgcattgttcagctaatcagactaaagacaaaagaactacactcttctttgggctctctggaactggaaaaacaacattatcagcagatcctaaatgttcattaattggtgacgatgagcatggctggagtgatggggcagtgtttaatttagagggtggatgttacgcgaaatgcattaaactttctaaagaaaatgagccattaatttgggatgctataaagtttggcagcattttagaaaatgttgcgattgatgaaaatggtattccagattatgacgatgacagatataccgagaatacaagagtttgctatccaagagatttcattgagggatctgttcccgagaatcaaggtggcgaaccagataacattatttttcttacttgtgatctttcaggcgtccttcctcctgtaagcatgctgaacgaaaatagtgcagcttatcattttttaagtggatatacggcaaaggttgggtcaactgaagttggcagcacaaaatcaatggattttgctttttcaacctgctttggcgcacccttttttcctagacctgctggagaatatgcagatttactgataaagagaatgcagaaaaataatacgaaagtctttttggttaatacagggtggactggtggcggctatggggttggtgaaaggtttcctattcctgtaaccagagcaattattaatgccatacaagaaaatgaaattgatacagatgattttaaccatcttgaaaaacttaacctaaatgttccaaaagatattaagggagttaagcaagaattattaaatccaagaaattgttgggcatctgctgatgattatgatgaggaatgcgataaattatgcatgaaatttaaagaaaatttcagaaaatttgatgttgctcaacaaataattgatgcaggacccaggtaa

SEQ ID NO: 277608 - DNA, 963 bp, Unknown
  Bacterial polypeptide expressing nucleotide sequence isolated from the Sargasso Sea
tatggataaccaaacaaaagccttgcattcattggagctcactactgaggagttaataaaggctgcagttgataatgatgaaggcattattgcaagtaatggtgccttttctacaaatacaggaaaaagaacaggcagaagtccaaacgacagatttatagtaaaagaaccaggcactgataatcttattgattggggtgaagtcaataagccttttgatgaagataaattcgatttgttatggaataaagtcgagtcctatttggctgaaaaaaatagatacttatctaaagtccatgttgggtcgcatgatgagcattatttgcctgttagtatcacaacagaaacagcctggcattctctttttgcaagattaatttttgtatgtgctgaaaattacaattcttctatgaaacaagaatggcaaattattagtgctgctaactttgagtgtgatcctgatgaggatggaacaaattctgaaagttgtgtaatcataaattttgctaagagaaaagtcattattgcaggtatgaaatatgccggtgaaatgaaaaaatcgatgttctctgtacaaaactttctgcttcctgaaaaagatgtcttgccaatgcattgttcggcaaatgtaaatgcaaagggagatgttgcattgttctttggtctttcaggaactggtaaaacaaccttatctgctgacccacagtgttcattaatcggtgatgacgaacatggctggagtcctggctcggtattcaattttgaaggcggttgttatgcaaaaacaattaatcttaccgaagaaaatgagcctgtaatattcaaagcgataaagcatggtagtgtcattgaaaatgtctttctgaataaactcaatgaacccgattattcaaatacttctctctcagaaaatggaagatgttgttatcctaggtctcatatagatgctgctgtaaagaaaat

SEQ ID NO: 277609 - DNA, 1114 bp, Unknown
  Bacterial polypeptide expressing nucleotide sequence isolated from the Sargasso Sea
ctgctattttgtttgcgacccctctaaagacggtacaaattctgatggttgtgtgattataaattttgcaaaaagaaaagttattcttgctggtatgaaatatgcaggtgaaatgaaaaaatctatgttttccgttcaaaattttctacttccagaaaaaggtgttctgccaatgcattgctctgcaaatgtaaattctaatggaaacgtagctttattttttggtttatctggtacaggaaaaactacgctatcagctgatcctaaatgttcactcataggagatgatgaacatggatggagcaaaggctcagtttttaactttgaaggcgggtgttatgcaaaaacaattaatttaactgaagaaaatgagcctgtaatttataaagctatcaaacatggaagtgttatagagaatgtttttataaatgaagatggcacgcctgactatagtaatacttcgctttctgaaaatggaagatgttgttatccaaggtctcacattgaggatgctgttgacagcaatgcagccggcgagccaaaaacagtcatttttttaacttgtgatcttacaggtcttatccctcctgtctcattattatctaaagaagcagctgcatatcatttcttgagtggatatacagctaaagttggttcaactgaaatgggatctggatctgatatagaatcaactttttcaacgtgttttggggcaccattttttcctaggcctgcaaatgagtatgcagaccttttaatggagcgcatagagggttttaattctaaagtttttcttgtaaataccggttggactggaggtccttatggagtaggatctagattcaagatacccaccacgagaagaattgttaatgcaattcaggatggtgagcttgataatgttgaaacaacaactattcctggattaaatttatctgtgcccttaaaagttgatggagtagatagtgaattgctaaatccaattaatacatggaaaaataaagatgaatacgaaaaatatctttcacaattaattacgaaatttcaagaaaacttcaaaaaatttaatgcaaaacctgaaatagtaaaagctggtccagggtttaatgactaa

SEQ ID NO: 277610 - DNA, 718 bp, Unknown
  Bacterial polypeptide expressing nucleotide sequence isolated from the Sargasso Sea
cgcaattcgtcgtgacgcgctgctggaaaacgtcaccgtgcgcgaagatggttccatcgacttcgacgacggttccaaaactgaaaacacccgcgtttcctacccgatttatcacatcgataatatcgttaagccagtgtcaaaagcgggtcatgctaccaaagtgatcttcctgactgccgacgcatttggcgtgctgccgccggtttctcgcctgacagcagaccaaactcagtaccatttcctgtctggcttcaccgccaaactggccggtaccgaacgcggcgttaccgaaccgaccccaaccttctctgcctgcttcggcgcagcattcctgtctctgcacccaacgcagtatgcagaagtgctggtgaaacgtatgcaggcggcaggtgcgcaggcgtatctggttaacaccggctggaacggtactggcaaacgtatctctatcaaagatacccgtgcgattattgacgccatcctgaacggttcgctggatgacgcagaaacgttccgtctgccgatgtttgacctggctatcccgaccgagttgccgggcgtggatacgcgcattctcgatccgcgtaatacctacgcgtctccagagcagtggcaggaaaaagccaatgcactggcgaaactgtttatcgagaacttcgagaaatacaccgacacccctgcgggtgaagcgctggttagcgccggaccgaagctgtaa

SEQ ID NO: 277611 - DNA, 1531 bp, Unknown
  Bacterial polypeptide expressing nucleotide sequence isolated from the Sargasso Sea
catgtcttcagtttacgaaaatttatccgtcgaagagttaatcgaaaaagcactagaaagaagtgaaggagaaatagcttctaatggagctttactcgtcaaaacaggaaaaagaactggcagaagtccgcttgatagatttattgttaaagacgaattaacagaaaattcagtcgactggggagatgttaataaaccgtttgccagtgatgcttttgatgagctttggacaagggtagaaagctatctaaatgagagagatacctttatctcttcccttcatgttggggagcattctgattactacgtacccgtaaaaattaggacagaatgggcctggcataatctgttcggtaagcaaatgttcataaggccagaagtttacaatcccaatggtaaggataattgggaaataatgagcgctcctgaatttgtgtgtgagcccgatagagatgcaacaaatagcgacggtgttgtcttgttggatttcagtagaaaaaaagttctgttagcaggaatgccttacgcaggtgaaatgaagaaatctatgttcgcggttcaaaactttctattgcctgaaaaagatgttctgcctatgcattgcgcatctaatgttggttcaaatggcgaagtatgtcttttctttggtctttcaggaacgggaaagacaactttatctgcagatcctgagagaaacttgattggagatgatgaacacggctggggaccgggcactgtatttaattttgaagggggatgctacgctaagtgtattgatctaacccaggaaaacgagccagttatctgggatgccatcagaaaaggtagcgtgatggaaaatgtagttattgatcctgaatcaaaaaatcctgactactccaattcttcattaactgaaaatacacgcgttgtttatccaagagaacacatcgaaaaaagagctgatgaaaatgctgccggagaaccgaatgcagttattttcctgacttgtgatttatcaggtgttataccccctgtgtctatcttgagtaaggaagctgcggcttaccactttttaagtggctatacagctgctattggctctactgaggttggatcaacagaggctttcaaaacaactttctccacctgttacggggctcctttttttccaagagcggcaggtgtttacgcagatttgctcatgaaaagaattgaagaatttgatagcaaagtatacctagtaaacactggttggaccgggggtccttatggagtaggcaaaaggtttgatattcctgtcacaagagcgattatttcagccatacaatctggtaccttagtaggcgcagagactgagaccgtagcaggaatgaatctggaggttccggttgaattagatggagttgactcaaaattactcaatcctataaaaaattgggcagatccaagctcttatgccgagtatgaagccaagcttgtaagccagttcaaagaaaattttcaaaagttcaatgtatcgcaatctattgttgaggccgggcctaggtaa

SEQ ID NO: 277612 - DNA, 718 bp, Unknown
  Bacterial polypeptide expressing nucleotide sequence isolated from the Sargasso Sea
aatgaagatttatggaaatgacttaggtctagatagccttggactaaataacctaaagaatgtacatcgaaatctatctgtatcagaactcgttgacgatatagttaataataaggaaggtctcatcggtctacgaggagcggctatggttgatactggtatttatactggacgctctcctcaagataaatatattgtagatgaaccatcttctaatgaaaaactttggtggggacccgtaaataaaaagatatccgaagagatctttgatatgctttatggaaaaattactgattattataattcaactgatcataccaagacctatgtatttgatggttttgcaggtgccgatcctaattattctttgaatgtaagaattattgcgaaaaaagcttggcaagcccattttgttaataacatgttcatacgccctaaaaatggtgagctagatgaatttaaacccggttttactatcataaacgcatctgatgtttcaaatgaacgttttgatgattttggtatgaattcagaaacgtttattattttccatatggaaaaacggattgcaatcatcggtggaactgaatatggtggtgaaatgaaaaagggtatcttttctgttctacattatcttctcccgcaaaaaggtgtactttcaatgcattgctcagccaatgtgcaagaagatcaaaaaaatcctgctattttcttcggt

SEQ ID NO: 277613 - DNA, 988 bp, Unknown
  Bacterial polypeptide expressing nucleotide sequence isolated from the Sargasso Sea
atggacacttcatctcaaacctcagaagctcttgagcttacaaacgaagaattaataaccgcagctgttaataatggtgaaggagtaattgcaaataatggagctttttcgaccgaaactggtgaaagaacaggaagaagccctaatgatagatttattgttaaggaacctggatcaagcaatctaattgattggggtgatgtaaatattccttttgaggaagataactttaattctttatgggacaaagttgaaacataccttgctgaaaaagatagatacgtttcaagagttcatgttggatcccattcagagcactatttacctgttcgagttacaactgaaactgcgtggcattcattttttgcaagactgattttcgtttgctcagaaaactataatccaaataataaaaaagaatgggaaattttatcggcggcaaactttcaatgtgatcctgaatctgatggtacaaattctgagagttgtgttgttataaattttgctcaaagaaaagtaattattgctggcatgaaatacgcaggtgagatgaagaaatcgatgttctctgttcaaaattttttattgcctgaaaaaaatgttttacccatgcactgctctgcaaatgttaataaaaatggaaatgtggcattgttttttggattatctggtactggtaaaactaccttgtctgcagatcctaagtgttctcttatcggtgatgatgaacatggttggagccctggatcagtttttaattttgaaggtggttgttatgcaaaaacaattaatctttctgaagaaaatgaaccagtaatcttcaatgctataaaacatggaagtgttattgaaaatgtttttttaaataataatgaacctgattattcaaacacttcactgtcagaaaatggcaggtgctgttatccaagatcccatattaaaaatgcagttgaagcaaatgcagctggggaacccaaaaacctgtaat

SEQ ID NO: 277614 - DNA, 665 bp, Unknown
  Bacterial polypeptide expressing nucleotide sequence isolated from the Sargasso Sea
aatgacaatcgtggcagaacccaccctggccaagcaattaggactggaccagtacggtatcaagaactccactgaaatcctgcgcaacccttcctacgaccagctgttcgcggaagagacacgtgccgacctggaagggttcgagcgcggcgtggtgaccgaactgggcgccgtcaatgtcaataccggcatcttcaccggccgctcccccaaagataaatatatcgtcaaagacgccactacccagaatactgtgtggtggtctgaccagggtaaaaacgataacaaagccatcagcccggaagtgtggtcacatctgaaatccctggtgaccaaacagctctccggcaagcgcctgttcgtggtcgacggcttctgcggcgccaacccggatacccgcctggccgtgcgcatcatcaccgaggtggcctggcaggctcacttcgtgaaaaacatgttcatccgcccgagcgatgaagagctgaaaaccttcaaaccggacttcgtggtgatgaacggtgccaagtgcaccaacccgaactggaaggagcagggtctcaactccgagaacttcgtcgccttcaacctgaccgagaagatccagctcatcggcggcacctggtacggtggcgagatgaagaaggggatgttctccatgatgaact

SEQ ID NO: 277615 - DNA, 574 bp, Unknown
  Bacterial polypeptide expressing nucleotide sequence isolated from the Sargasso Sea
ggcgagcctaatgcagtaatatttctgacatgtgacctttctggagttatacctcctgtctctatcctaagcaaagaagcggctgcttatcactttttgagcggttataccgccgctataggttctactgaagttggttctactgaagctttcaaaactactttttcaacttgttatggggctccttttttccctagagcagctggagtctatgctgatctgcttatgaaaagaatagaagaatttgatagtaaagtttatcttgtaaacactggttggacgggcgggccttatggtgttggaaagagatttgatatacccgttactagatcaataatctctgccattcaatcaggagctttaagtggtgttgagactgaaacaatagagggaatgaaccttgatgtgccactaaatgtagaaggtgtagatagcaatctgctcaatccaattaaaaattggtctgatccttcttcgtatgcagagtatgaaaataaactagttactcaatttaaggataactttaagaagtttgatgtatcgcaatctattgttgaggccggaccaaggtaaa

SEQ ID NO: 277616 - DNA, 1110 bp, Unknown
  Bacterial polypeptide expressing nucleotide sequence isolated from the Sargasso Sea
tggggagaaataaataggccatttgatgaagagaagttccactctctttggtcaaaagttgagtcttatttagatgacaaagaaagctttttaactaaagttcatgttggatctcatcctgaacactatcttccaattgagattacgactgaaacagcttggcagagtctcttctcaagattaatatttattgatcctgatgagtttaacccaaaagataaaagcaactggaaaattcttagcgcagcaaattttgaatgtgtgcctgaaatagatgggactaattcagatggttgtgtaattataaattttaaagaggaaaaagtcctcattgcgggcatgaagtatgccggtgagatgaaaaaatcaatgttttcagtgcaaaacttccttcttcctgcaaaagacatccttccaatgcattgctcttcaaatatcaatgataaaaattcagttgcgctattttttggtctttcaggcactggaaagacaactctttctgctgatccagcttgcacattaatcggcgatgatgagcatgggtggtctcagggctctgtttttaattttgagggtgggtgttatgcaaaatgcatagacctctccgaagaaaacgagcctgtaatttggaaagctattaaagatgggagtattttagaaaacgttgtattaaatgatggggttcctgattacacagacgtttctttaactcaaaattcaagatgttgctatccgaggacacatatcgaaaaagcagtccctgaaaattatgccggtgaaccaaagactgtaatctttctaacttgtgatttaactggcgtccttcctccggtatcaatactctctaaagaagctgccgcctaccatttcttaagtggatataccgcaaaagtcggatctacagagattgggtcctcttcagatattgaatcaactttttcaacctgttttggagcgccattttttccaagacctgctggtgtttatgcagaccttctgatgaaaagagtcgaaaattttggttctaaggtgttccttgtgaatacaggatggacaggtggaccctatggggttggaaaaagatttgatattccaaccacaagaaggatt

SEQ ID NO: 277617 - DNA, 430 bp, Unknown
  Bacterial polypeptide expressing nucleotide sequence isolated from the Sargasso Sea
aatggaagttcccaaaaaaaatcaaactttcacagcattaaatgataagaagcaattagttaataatagtaagcattttttgttagaactttatagatgtgattacgaaaaattgaatgacgaatcttttttgcgttgtactttaaataatgctgccaaattagctaatgcaacagttttgaatctaataagtaataaatttgaacctcagggtgttacagcaattgctttactagctgaatctcatatatcaatacatacatggcctgaagcccattattctgcagttgatatttttacatgtggtcaaaatatgaagccagaaatatcatgtaaatacttaattcaagctttcatagctaaagaacatcttttgcgtataattgatagaaatctaccttcagaagtccatagtcaattaaaaaaataa

SEQ ID NO: 277618 - DNA, 436 bp, Unknown
  Bacterial polypeptide expressing nucleotide sequence isolated from the Sargasso Sea
atggaaatttacaaaaaaagtcaaattttaagttcgttaagtgatgagcaaaaattaagtcatcaaagtaaacaccttttgttagaactttatagatgcgatcgtgaaaaattaaatgacgaatcctttgtgcgctgtattttaaatagagctgctaaattggcaaatgcaaccgttttgaatttgattagtaataaatttgagcctcagggggttacggcaattgcattacttgcagaatctcatatttcaatacatacttggcctgaatctaattattcggcagtagatgtttttacatgtggtcaaaatatgatgcctgaacttgctagtcaatatttaattgaatctatgatggctaaagaacattctttgcgtgttattgagcgaaacccaccttcagcagtctctaaacagatcagaacggttgtttgac

SEQ ID NO: 277619 - DNA, 436 bp, Unknown
  Bacterial polypeptide expressing nucleotide sequence isolated from the Sargasso Sea
atggaaatctacaaaaaaaatcaaaatttgggttcgtttagtagtgcccaaaaattaagtcatcaaagtaaacaccttttgttggaactttatagatgtgattacgaaaaattaaatgacgaatcctttttgcgctgtgcgttaaacaaagctgccaaattagcaaaggcaacagttctaaatttgataagtaataagtttgagcctcagggggtcacggcaattgccttactggctgaatcccatatttcaattcatacttggcctgaatctaattattctgccgtcgatatctttacatgtggtcaaaatatgttgccagaagttgcgagtcaatatttaattgaagttttgaaggctgaagaacatttcttgcgtgtgattaagcgaaatccacctgaagtagtgtttaaacagatgagaacggttgtctagc

SEQ ID NO: 277620 - DNA, 322 bp, Unknown
  Bacterial polypeptide expressing nucleotide sequence isolated from the Sargasso Sea
atgtcagtacgatctaaaagaattgaagatgttaatgacttcaaagactttttttccaaacgtggtggtaagaaattcgccggtacccacattttattggatttatgggatgctcaacacattgatgatcaaatttttgtagaaaaaacactcaaggaggctgttaaagcctgcgaagcaaaccttctccacatgcacctacataaatttggagaagggttaggtatctcgggggtagccgttctagctgagtcgcacattagcatccatacttggccagagcgtcaatttgctgccatagacatttttatgtgtggtaact

SEQ ID NO: 277621 - DNA, 436 bp, Unknown
  Bacterial polypeptide expressing nucleotide sequence isolated from the Sargasso Sea
atggaaatctacaaaaaaagtcaagttttaagttcatttagtgatgagaaaaaattaagtcatcaaagtaaacacctcttgttggaactttatagatgcgattgcgaaaaattaaacgacgaatcctttttgcgctgtattttaaacagagctgctaaattagcaaatgcaacagttcttaatttgataagtaataagtttgagcctcagggggtaacggcaatagcattactggcagaatctcatatttcaatacatacttggcctgaatctaattattctgcagttgatatttttacatgtggtcaaaatatgatgcctgaactagcaagtcaatatttaattgaatctttgatcgctaaagaacattctttgcgtatcattaagcggaatccaccttcagaagtacctaaacagatcagaacagctttttaat

SEQ ID NO: 277622 - DNA, 418 bp, Unknown
  Bacterial polypeptide expressing nucleotide sequence isolated from the Sargasso Sea
tttgaaccaatcggatcaatcaccatggtactcagaccatcgaagtgattactttgttaacaaggatggagtaatttatgctggtgcgcatttaattattgatatgtgggatgcgattaatctctcaaatagggaggttattcataatacacttaaaaaaatagcgaaggcgtgtgatgctcaaatactgcatatacatctccattcttttgatgaaaatcaaggtataacaggtgtgatagttttggcggaatcgcatataaatatacacacttggcccgaagtggggtttgctgcgcttgatatttttatgtgcgggaaaacgaatccagtagcggcgatccctgttttagagaccgcctttaaaccacaacgtatggaagttcagacggttacaagggggataataaccaaataa

SEQ ID NO: 277623 - DNA, 391 bp, Unknown
  Bacterial polypeptide expressing nucleotide sequence isolated from the Sargasso Sea
tatgaatgaacaaaaagatttagattttctaataagaaaagatgggcaaacttttgccggcattcacttgctaattgatttttaccaagcctcaaacctgactgacaaaaatttgattgaagaggcactcgaaagtgctgcatccgcagttaacgcaaaaaaaatagatatttgtgtccataaattttcacaaaatcatggggtttcgggggttattactcttgctgaatctcatataagtatacatacatggccagaaatattttttgctgccattgatgtgtttacgtgcggaaagtgtaaacctcactcatgtatagacattttaaaaaactatttagaaccttcacgtatagagattgttgagcgttaccgtggattaatcgcatga

SEQ ID NO: 277624 - DNA, 341 bp, Unknown
  Bacterial polypeptide expressing nucleotide sequence isolated from the Sargasso Sea
aatggaagtcccaagaaaaaatcaaaatttaagttctttttgtaatgatgaaaaattaattcatcagagtaaacaccttttgttggaactttatggatgtgatttcgaaaaattaaatgatgaatcctttttgcgttgtaccttaaatagggctgcaaaattggcaaaggcaacagttctgaatttgataagtaataaatttgaacctcaaggagttacaggaattgcattactggctgaatcccatatttcaatacatacttggcctgaagctaaatattctgcagtcgatatctttacatgtggtcaaaatatgatgccagaacttgcaagtcaatatt

SEQ ID NO: 277625 - DNA, 451 bp, Unknown
  Bacterial polypeptide expressing nucleotide sequence isolated from the Sargasso Sea
ttgataaaaacacagaaaccacctagccgtcactgggagcaatccaagccatcaccgtggtattcagaccgccttagtgaatattttgtaaaaagggacggtcttatttatgctggtgcccacttgatcattgatatgtgggatgggatcaatctaactaacgtggaagttgttgagaacacccttaaaagggcggctgaggcatgcaacgctcaaatacttcacataaatctgcattgttttgacgctaatcaaggtattacgggtgttatcgttttggcggagtctcatattaatatacatacctggcctgaagctggatttgctgccctagatattttcatgtgcggcaaagcgaaccctgcaacagctatccctgtattggagagagcctttaggccaaaattaatggaagttcagacagttacacgaggtataattgcaaaataac

SEQ ID NO: 277626 - DNA, 837 bp, Unknown
  Bacterial polypeptide expressing nucleotide sequence isolated from the Sargasso Sea
tttatgttttgtaagagctcaagattcaggaggtgcgtatataaaaacttttctcaaagatgaaaatataattgtgtacgatgaaaattatattcatacatggccaaaacatccttatgattatttagttcaaattataaaagatagaaattgggataaactttcaatcggagttgagatggatgctcattacttcaccgctttttgctatgaaaagataaaacaaggtttacctaatgcaaaaataaaagattcagaaagattagtaaattgggcaagatatgcaaaatctgatgcagaaattaattacatgaaaactgctgcactaatttcagaaaaaggaatgaagactgcaatggaggtaattaaaccgggtgtcagacaatgcgatgcagtaggtgatatacaaaaaactttattttatgggacacctgagtttggtggagagtattctagtatcgcaacactcttaccaacaggaaaagggacatctgcatctcatttaacagcaacgcatgataagtttgtagaaggtgaggcgacaatcgttgagttatctggagtatataaaagatatcatgcgccaatggctagaacagtcttacttggaaaacctgatcaactaaaaatagacacaatgaacaaaactatcgaggctttgcaagctggaatagatgttacaaaacctgggaatactgcaaatgatgtagctcaagccttttggggtattctagataaatatggcatagaaaaaaaatcaagaaccggttactcaattggaataggttacccaccagattggggcgagcatactcttaacatctataaaggagaaat

SEQ ID NO: 277627 - DNA, 268 bp, Unknown
  Bacterial polypeptide expressing nucleotide sequence isolated from the Sargasso Sea
ggtgcaacactcataaacttggtaacacatagcttaaaaccacagggggttacaggattagctttattagctgaatctcatatttcaatacatacatggcctgagattggatatgcagccattgatgtattcacatgtggtgaccatacgatgcctgaaaaagcgtgtaaactactttctgaagattttatggctaagaaattttcttttaaaaatattgccagagagatccctgcaagaattcaaacgttgcatcgcgaaccctgat

SEQ ID NO: 277628 - DNA, 436 bp, Unknown
  Bacterial polypeptide expressing nucleotide sequence isolated from the Sargasso Sea
aatggaagtctacaaaaaaaatcaaaatttaggttcttttagtaatgaccaaaaattaagtcatcaaagtaaacaccttttgttggaactttatagatgtgattatgaaaaattaaatgacgaatcctttttgcgctgtaccttaaacaaagctgccaaattggcaaaggcaacagttctaaatttgataagtaataagtttgagcctcagggggttacggcaattgccttactggctgaatcccatatttcaatacatacttggcctgaattaaattattctgccgtcgatatctttacatgtggtcaaaatatgttgccagaacttgctagtcaatatttaattgaagctttgaaggctgaagaacattacttgcgtgtgattaagagaaatccacctgaagtattgtttaaacagatgagaacggttctctag

SEQ ID NO: 277629 - DNA, 355 bp, Unknown
  Bacterial polypeptide expressing nucleotide sequence isolated from the Sargasso Sea
aatggaagttcctaaagaaaatcgagttttgcattcgtttagtaatggtgagaaattaattcatcaaagcaaacactttttgctagaactgtatagatgtgatggcgaaaaattaaatgatgaatcttttttgcgctgcacattaaatagggccgcaaaattggcaaaggcaacagttttgaatttgataagtaataagtttgaacctcaaggtgtaactgcaatcgcattattggctgaatcccatatttcaattcatacttggcctgaatctaactattcagcagtagatatctttacatgtggtcaaaatatgatgcctgaacaagctagtcagtatttaattaatctttga

SEQ ID NO: 277630 - DNA, 436 bp, Unknown
  Bacterial polypeptide expressing nucleotide sequence isolated from the Sargasso Sea
atggaaatctacaaaaaaagtcaaattttaagttcgttaagtgatgagcaaaaattaattcatcaaagtaaacaccttttgttggaactttatagatgcgatcgcgaaaaattaaatgacgaatcctttttgcgctgtattttaaatagagctgctaaattggcaaatgcaacagttttgaatttgataagtaataaatttgagcctcagggggttacagcaattgcattactggcagaatctcatatttcaatacatacttggcctgaatctaattattcggcagtcgatatttttacatgtggtcaaaatatgatgcctgaactagctagtcaatatttaattgaatctttgatggctaaagaacattctttgcgtgtcattgagcgaaatccaccttcagcagtctctaatcagatcagaacggttgtttgac

SEQ ID NO: 277631 - DNA, 436 bp, Unknown
  Bacterial polypeptide expressing nucleotide sequence isolated from the Sargasso Sea
aatggaaatctttaaaaaaagtcaaattttaagttcgttaagtgatgagcaaaaattaaggcatcaaagtaaacaccttttattggaactttataaatgcgatcgcgaaaaattaaatgacgaatcctttttgcgctgtattttaaatagagctgctaaattggcaaatgcaacagttcttaatttgataagtaataaatttgagcctcaaggggttacggcaattgcacttctggctgaatctcatatttcaatacatacttggcctgaatctaattattctgcagtcgatatttttacatgtggtcaaaatatgatgcctgaagtcgctagtcaatatttaattgaatctttgattgcaaaagaacatgctttgcgtgtaattgagcgaaatccacctcaagcagtttctaaacagatcaggacggttgtttaa

SEQ ID NO: 277632 - DNA, 436 bp, Unknown
  Bacterial polypeptide expressing nucleotide sequence isolated from the Sargasso Sea
atggaaatctacaaaaaaagtcaaattttaagttcgttaagtgatgagcaaaaattaagtcatcaaagtaaacaccttttgttggaactttatagatgcgatcgcgaaaaattaaatgacgaatcctttttgcgctgtattttaaatagagctgctaaattggcaaatgcaacagttttgaatttgataagtaataaatttgagcctcagggggttacggcaattgcattactggcagaatctcatatttcaatacatacttggcctgaatctaattattcggcagtcgatatttttacatgtggtcaaaatatgatgcctgaactagctagtcaatatttaattgaatctttgatggctaaagaacattctttgcgtgtcattgagcgaaatccaccttcagcagtctctaatcagatcagaacggttgtttgac

SEQ ID NO: 277633 - DNA, 415 bp, Unknown
  Bacterial polypeptide expressing nucleotide sequence isolated from the Sargasso Sea
atggattcatattctaaatattcaaaacaaacacatattgcttatgatcattttgtagaagaaaatggtaaaatatttgcaggtcatcattatttaattgatatgtgggattgtctttatttagaagatgaaaataaagttaaagatttaattaagagtgcagctgaagaagctggagcttcagttttacagataaatattcatcattttggagaaggacaaggagtatctggagtagccatattagctgaatcgcatattagtattcacacatggcctgaaagaaattttgcggcatttgatatttttatgtgtggtaatacaaaccccgaattatcattaaatttcttaaagaaaaagtttaagcctagaaaagtagaaataaaaaaattaaaaagaggacttattagctaaa

SEQ ID NO: 277634 - DNA, 238 bp, Unknown
  Bacterial polypeptide expressing nucleotide sequence isolated from the Sargasso Sea
ttgaacctcaaggtgttacagcaatcgcattattgggctgaatcccatatttcaattcatacttggcctgaatctagttattctgcagcagatatatttacatgtggtcaaaatatgatgcctgaactagccagtcaatatttaattgagtctttgatggctgaagaacattctttgcgtgtaattgagagaaatccacctgcagcagttcttaaagagattagatcgtttgtttaaa

SEQ ID NO: 277635 - DNA, 958 bp, Unknown
  Bacterial polypeptide expressing nucleotide sequence isolated from the Sargasso Sea
atgttttttgaaggcgcggaaaaaaagcttgagatcagactcacttccaatatggcatcactgcgccaacgagagtacggcttttggtcaaccttggtcgcctgtgccaatgcggaaatcctgtcaacaatccgtaatcctgcctgcgatgcttatctgctgagtgaatccagtctgttcgtctgggatgataaaattctgcttcttacctgcggcaatagcaccctagttgaagccgcctaccattttattcatgccgtaggggtggagcacattgccgcgctctgttatcagcgtaagaatgaataccaagcccagctacaaagcacacactttgctgacgatattgcgacattgcggaccttgatccccggaaaagcctttcgagttggtcacttagattcacatcatcactatttgttttgtactgacaatttgttttgcactgacggccaacctatgtcgtcaacctatgatacctgccttgaactgatgatgtaccacatccgtggcgagtttgctgattacctcaagttgcccacacaaaccgagcaggggatttatcaacgcttaggattgcagcgacttttccctgattttcaatttgatatgcactgttttcagcctgcgggattttcgttaaatgggatacgtggggctgactatgttaccttgcatatcacgccatcgatagggccgggagataactcctacgtcagctttgagactaatctggatttggctgtttatccctatccccttgttgcacaaatgattaagctatttatgccttcaagttgggatctcatccgttttaaccagccgcttatgactgctggatttcctgagcatgtatgtttagcgcatggttcaatcgtgactgagcatggctgtcagattgattttaatcactatcaacagcttcaaactgaagagttactacctgtattcctataat

SEQ ID NO: 277636 - DNA, 1132 bp, Unknown
  Bacterial polypeptide expressing nucleotide sequence isolated from the Sargasso Sea
atgctttttgaaaaaaaagaatacaaagaacgtctaaaaaaagtcaagatcagcatgcaaaaaaaaggtattgatcttctagtatctcaagatccggccaatatgaactatctaactggttacgatgcctggtctttctattatgctcaatgtgttttagttcatataaatgaagatgaacctatttgttttgtgagagctcaggatggaggaggagcatatattaaaacttttttacaagataaaaatattattgaatatgatgaaaagtatattcatacatggcccctacatccttacaaatatcttgtagaaattattaaaaagagaaaatgggacaatctgaacattggtttagaaatggatagtcattattttactgccttttgctatgagaccattaaaaagggtttaccaaatgcaaaattaaaagatgctgaacgattagttaattgggttcgagttgttaaatcaaatgcagaaataaaattaatacagtcagctgcccgtatagttgaaagcgggatgagaacagcatttaaaagtattaatccaggtgtaagacaatgtgatgctgtagcagatattcaaaaagctttatttaatggcacaaaagaatttggaggagactacccaagcattgcaactttattaccaactggaaagggaacttccgcctctcatttaacccatacagatgaaaagtttatttctggagaggcaacaattattgaaatagcaggtgtatacaaaagataccattgtcctatggctcgtacagttttgttaggagaaaaagatcaaaaaaaaattgacactatgaaagctaccaacgaagcgttaaacgccggtatttcagcaacaaaacctggaaatactgttgatgatgttgcccaaaagttttggggtgtattagataaatacaagataaaaaaagattctagaactggatactcaataggtattggttatcctccagattggggtgagcaaacatttaatatactaaaaggtgataaaaccattttacaacctaacgttacttttcatatgattgcagtaatgcaattcggcgattggggtgtagaagctagtgaagcagtcagagtaactgaaaatggttctgaattat

SEQ ID NO: 277637 - DNA, 406 bp, Unknown
  Bacterial polypeptide expressing nucleotide sequence isolated from the Sargasso Sea
aatgaccgcgcgcgacgggatcgcgccaccgcgcgcgacgttcggctcgcacgtgctggccgacctggccggcatcgacgcggtgctgctgcgcgacgccgctcggctcgagtcgatcctcaccgaagcggcgcagcaggcgggcgcgcgcgtgatcggtgcgcatttccatcatttcggcggtgaccatggcgtgacgggcgtcgtgctgctcgccgaatcgcacatcacgatccatacgtggcccgagcatcgcttcgcggccgtcgacgcgttcatgtgcggcgcggcgcgtgcggccgacgcggtcgatgcgatcgccgcggcgctcggcacgcaagcccaagtccggcagcaggttgcgcgcggcggtgcgccgacgtcggcgggccattcaagtccttga

SEQ ID NO: 277638 - DNA, 550 bp, Unknown
  Bacterial polypeptide expressing nucleotide sequence isolated from the Sargasso Sea
gatgttttttgaaggcgcggaaaaaaagcttgagatcagactcactcccaagatggcgtcattacgccaacgagagtacgacttttggtcaaccttagtggcctgcgccaatgcggaaatcttgtccacaatcagtaatcctgcctgcgatgcctatctgctgagtgaatccagtctgttcgtctgggatgataaaattctgctactcacctgcggtaatagcaccttagtggatgctgcctgccattttatcaacgccttaggtgtggagcatattgccgcactctgttatcagcgcaagaatgaataccaagcccagcgacaaagcaccagttttgtggacgatatcgcgaaattgcggaccctgatccctggtaaagcctttcgagtgggccatttagactcacatcatcactatctgttttgtactgacaagcaaactgtatcctcaaccgagacttgccttgaattgatgatgtaccacatccgtggcgaacttgccgattatctcaagctgccgacacaaactgagcaggggattatcagcggc

SEQ ID NO: 277639 - DNA, 221 bp, Unknown
  Bacterial polypeptide expressing nucleotide sequence isolated from the Sargasso Sea
cctgctggcggaatcgcacatctcaatccacacgtggcccgagagcggttatgccgccgtggatgtgttcacctgcggtgaccacacgatgccggaacaggcctgcgccgttctgcgggacgaactgcgggctcagcgccatgccctgaggagttttcgcagggaaacaccggcggctgtggccgataccgtgcgcgaaccgatccagctgcctggctgat

SEQ ID NO: 277640 - DNA, 664 bp, Unknown
  Bacterial polypeptide expressing nucleotide sequence isolated from the Sargasso Sea
aaaactaggatgtgcaaggcatacgagaacgagggctccctcgccccgctcgcgcccttcgacgccgaagtcttcgagggcgccgagaagaagctcgagatctacctcgaccgctcctccggctcgccgcacggcctgcgcagcttccagaccgccgtctgggccgacgtgatcgccgacgcgcaggcgacgatcctgcaccgccagtcgaacgccgagtttgacgcgtacctgctgtcggagtcgtcgctcttcgtcttctcgcaccgcatcgtgctcaagacgtgcggcacgacgacgctgctcctcgtgctgccgaagctcctccgcctcgcggaggcggtgggcacgtcgatcgagcacctgcactacggccactaccgcctcaagttccccgagcagcaggcgtacccgcaccagaccttcgaccaggagcacgagtacctcgagcgcacgctcggcggcgtcgtcacctcccacgtcctcggcccctcggacggccggtgctggtacgtgctctcggcggggcgcgtcgcgccgccgccggcgccgccgcccgccgacggccccgtcgacaccgacgacatcttcgagatcgcgatggagggcatggcgcaccacgtctgcgcgcgctacctccaggcgtcgcacccggggctcgcgg

SEQ ID NO: 277641 - DNA, 388 bp, Unknown
  Bacterial polypeptide expressing nucleotide sequence isolated from the Sargasso Sea
atggtgggaaaacactgcattctcgagctctacgactgcgactccagcaagctcgacgacgaagtctttctcagaagcgccatcacccaagcagccgaacgggctggcgccacacttctgaatctcatcacccaccaattccagccccaaggcgtaacgggcctggccctgctggcggagtcccacatctccatccacacctggcctgaggcgggttatgccgctgtggatgtgttcacctgtggtgaccacaccatgccggagaaagcatgcgcggttctcagtgaggagctgggctcaggccaccaaagcttgcgcagcttccggcgccgtacccccgccagcctggtggacagtgagcgtcagacgtcggtgccgattggctgaa

SEQ ID NO: 277642 - DNA, 302 bp, Unknown
  Bacterial polypeptide expressing nucleotide sequence isolated from the Sargasso Sea
aatgaaagttccaaaaaaaaatcaaacttttcaagcattaagtgatggggacaaattactttatcaaagtaagcattttttgttagagctttataactgtaattacgaaaaattaaatgatgaatcttttttgcgttgtacattaaataatgctgccaaacttgctaatgcaacagttttgaatcttattagtaataaatttgaacctcagggagttacagcaatagctttactcgctgaatctcatctttcaatacatacatggcctgaggctcattattctgcagttgatatttttacat

SEQ ID NO: 277643 - DNA, 469 bp, Unknown
  Bacterial polypeptide expressing nucleotide sequence isolated from the Sargasso Sea
atggagcagaccctctctgaactgcatcccaacccgggatgggggacaactgagattcatgccaccgacatggtcggtaaacactgcattctcgagctctacgactgcgatccaaaccggctcgacgacgaagcctttatccgcacaacgatcacctcagcagccaaaggcgctggtgcaacgctgctgaacctgatcacccatcaattccagccccagggggtcacgggtctggccctgctggcggaatcccacatttccatccacacctggccggaatccggctacgcagccgttgatgtgttcacctgtggtgaccacaccatgccggagcaggcctgcgcgattctctgcacggagcttcaagcgaaacgccatgcgctgaaaagctttctgcgcgaaacgcctgcagctattgccagtggagtgagagaacccgtcgagacaccgacccagctccccagctgaa

SEQ ID NO: 277644 - DNA, 973 bp, Unknown
  Bacterial polypeptide expressing nucleotide sequence isolated from the Sargasso Sea
gatgttttttgaaggcgcggaaaaaaagcttgagatcagactcactcccaagatggcgtcattacgccaacgagagtacggtttttggtcaaccttggtggcctgcgccaatgcggaaatcctatccacaatcagtaatcatgcctgcgatgcatatctgctgagtgaatctagtctgtttgtctgggacgataagattttgctactcacctgcggtaatagtactctagtggatgccgcctgccattttatcaacgccttaggcgtggagcacatcgccgcgctctgttatcagcgcaagaatgaataccaagctcagctacaaagctcgagctttgcggacgatatcactaaattgcggaccttgatccccggcaaagcctttcgagtgggccatttagactcacatcatcactatctgttttgtagtgacaatcagttttgtactggcgatctgttttgtacagacaaccaagttatgccctcaaccgagacttgccttgaactgatgatgtaccacatccgtggcgagcttgccgattatctcaagctgccaacacaaactgagcaggggatttatcaacggcttgaatttcagcaactctttcccgattttcagtttgatatgcattgttttcagccagctggtttttcgttgaatgcgatacgtgggacagactatgttaccttgcatatcaccccatcgatggggcaaggggagcattcctatgtgagcttcgagactaatctcgatttagcgacttacccccatcccgttgtggcgcgattagtcaatatattctccccaacgagttgggacttgattggttttcatcagcaccttcttaccgaaggattccccgctcatctgtgtctaggccaagctgtggtaaccgcagcatcaggcggggagattatttttagccattatcaattactcgaaacccaagtattacagcccgagtttatgtag

SEQ ID NO: 277645 - DNA, 466 bp, Unknown
  Bacterial polypeptide expressing nucleotide sequence isolated from the Sargasso Sea
atggcacaggtgtcctgtctgcatcccgatcccggacgcgcgcagctcgaaccctccagcagcactggatctgtccctttggacatggtgggcaaacactgcatcctcgagctctatgactgcgaccccagcaagctcgacgacgaagactttctcaggagcgccatcacccaagcagccgaacgggctggcgccaccttgctcaacttgatcacccatcagttcgaaccccagggagtcaccggtctggccctgctagccgagtcgcacatctcaatccacacctggcctgagtcgggctatgccgctgtggatgttttcacctgcggtgaccacaccatgcccgagcgggcctgcgccgtgcttagtgaacaactcagctcacgacgtcagagcatgcgcagcttccggcgcagcactcccgcagatgtgctggagacaacgcgccagcccagcgcctgctgag

SEQ ID NO: 277646 - DNA, 772 bp, Unknown
  Bacterial polypeptide expressing nucleotide sequence isolated from the Sargasso Sea
aggtggcagggtttcaacaacctcaccaaggcgctgagcttcaacatctatgacgtgtgttacgcgcgcaccgaagaagagcgtcagcgttacatcgaatacattgatgaagagtacaacgccgataggcttactcagatcttgaccgatgtcgccgagatcatcggcgccaacatcctcaacgtcgcgcgccaggactacgatccgcagggcgcgtcggtgacgatcctgatctccgaagaaccggtgatcgacaagaagctggccggcaaggagctgatctccgacgccgtggtcgcgcatatggacaagagccacatcaccgtccatacgtacccggaaacgcatccgcaggagggcatcgccacgttccgcgcggacatcgatgtggctacctgtggcgtgatttcgccgctgaaggcgctgaactacctgatcgagagtctggaatcggacatcgtgatcatggactaccgcgtgcgtggcttcacccgtgacgtgaagggcaagaagcactacatcgatcacaagatcaactcgatccagaacttcctggccaagaacatcaagtcgcgttacgagatgttcgacgtcaacgtctaccaggaaaacatcttccacacgaagatgcacctgaaggacttcgacctggaccagtacctgttcgaggaaaaggccaagaacatctcgttcaaggaacgcatgaagatcgaagcgctgctcaagcgcgagatcgaagagctgttccacggccgcaatctgtccgagtaag

SEQ ID NO: 277647 - DNA, 365 bp, Unknown
  Bacterial polypeptide expressing nucleotide sequence isolated from the Sargasso Sea
gctgcatggctttaacaatttaaccaaaagcttaagtttcagtatttacgatatttgttatgccccgaccgagcaggacaggcaggaatatatttcgtatatcgacgagcaatataatgccgaccgtctgaccgatatcctcagcgaagtggttgatattattggtgccaatattttgaatgtggcgcgccaggattacgatccacaaggggccagcgtcactattctggtctgtgaagagccgatagaaaaacccgaagacgccaaaaacgataattcagaacaacctggccctttgccggatgccatagtggcgcatctggataaaagccatatctgcgtgcacacctaccctgaacatcatc

SEQ ID NO: 277648 - DNA, 749 bp, Unknown
  Bacterial polypeptide expressing nucleotide sequence isolated from the Sargasso Sea
gagtttcagcatttacgatatttgttatgcccaaaccgagcaacatcgtcaggaatatatttcctatattgacgagcaatacaatgccgatcgcctgacggatatcctgagtgaagtcgtggatattattggcgctaacattctcaatgttgcccggcaggattacgatccacaaggtgccagtgtgaccattctggtctgcgaagagcctatagagggctcgccagacaactcagaaaacccaggcccattaccggactctgtggtggctcacttggataaaagccatatttgtgtacacacttaccctgaagtgcatccgcatgatggtatttgtactttccgtgctgatattgaagtctcaacctgtggtttgatttcaccgctcaaagccctgaacttcctgatccacagctttgagtcggacatagtgaccatagattaccgagtgcgaggttttacccgcgacgtcaatggtgtgaaacactacatcgaccatcctattcattcgattcagaattttatggacgagcagaccaaaaatgctttccagatggtggatgtgaatgtgtatcaggaaaacctgttccataccaaaatgatgctcaaagagtatgatttaaacaactacctgtttggtacaggggtggatgaactggatgacgccgctcgtaaagtcatcaataaaaaagtaaaacgtgaaatgcgggaaattttttacggccgcaatttaccggaaatggaataag

SEQ ID NO: 277649 - DNA, 814 bp, Unknown
  Bacterial polypeptide expressing nucleotide sequence isolated from the Sargasso Sea
atgaacaaacccttcgataaacttaaacttcatggctttaacaatttaaccaaaagtttaagctttagtatttacgatatttgctacgcaaaaaccgagcaacaacgtaaagaatatattgaatatatcgatgagcagtacagtgcagatagactaaccgacattttaggtgaagttgttgatattattggtgccaatattttaaatgttgcacgccaagattatgaaccacagggcgccagtgtaactattttggtttcggaagagcctgtagaagagcagcaaaattacgatgctgacgaagcaccaggcccattacctgactcagtggttgcgcacctagataaaagccatatttgtgtacacacatacccagaagctcaccctgatgatggtatttgtacattccgtgctgatattgaagtatctacgtgtggtattatttcgccgcttaaagcattaaacttcttaattcatagtttagagtctgacgtggtaacaattgactaccgtgtacgtggttttactcgcgacgtaaacggcgttaagcattatattgaccacgctattaactcaattcaaaacttcatgacagacgataccaaagaagcgtaccaaatgatggacgtaaacgtgtatcaagaaaacctgttccataccaaaatgatgttaaaagaaaccgacctgaacacatacttgtttggtctttctacaactgatttatcggatgatgaagaagaagaaattcgctctaagctaaaccgtgaaatgcaagaaatattctatggtcgtaacctgccagaaacagaataat

SEQ ID NO: 277650 - DNA, 556 bp, Unknown
  Bacterial polypeptide expressing nucleotide sequence isolated from the Sargasso Sea
ctggtctgcgaagagcctatagagggctcgccagacaactcagaaaacccaggcccattaccggactctgtggtggctcacttggataaaagccatatttgtgtacacacttaccctgaagtgcatccgcatgatggtatttgtactttccgtgctgatattgaagtctcaacctgtggtttgatttcaccgctcaaagccctgaacttccttatccatagctttgaatcagacatagtcaccatagattaccgggtgcgaggttttacccgcgacgtcaatggtgtgaaacactacatcgaccatcctattcattcgattcagaattttatggatgagcagaccaaaaacgctttccagatggtggatgtaaacgtgtatcaggaaaacctgttccataccaaaatgatgctcaaagagtatgatttaaacaactacctgtttggtacaggggtggatgaactggatgacgccgctcgtaaagtcatcaataaaaaagtaaaacgtgaaatgcgggaaattttttacggccgcaatttaccggaaatggaataag

SEQ ID NO: 277651 - DNA, 493 bp, Unknown
  Bacterial polypeptide expressing nucleotide sequence isolated from the Sargasso Sea
tatgattagtaaaatatttcccaaaattcaccctgaaggatacaagtttttagtaattgcaggaataataacattgttactttatgtctttagtgattttttaggtttaattggtttagttttaacaatctgggtttattatttttttagagaccctgaaagagtaatcattgatgataataattatctagtaagtcctgctgatggtgaaatcataaaagttgaggaagttgatggcccaaaagaactaggtttagaaaataaaagatttaataagatcagtgtttttatgaacgtatttgactgtcacgtaaatagaactccgtgtgctggaaaaattgaagaaattttatataagccaggaaaatttgttaatgcttccctagataaagcaagtgaagataacgagagaaattattttaaaataaaggatacagaaaataatgacataatcgtagtccaaatagcaggtcttgttgcgagaagaatagtt

SEQ ID NO: 277652 - DNA, 190 bp, Unknown
  Bacterial polypeptide expressing nucleotide sequence isolated from the Sargasso Sea
gcaaattgcaggtttaattgcgagaagaattgtttgtgaaacagacaagaatcaagaacttaaccaaggtgacagaattggaatgataagatttggaagcagagcagatgtttattatgaaaattatgagccgcttgtaaaagttggtcaaacagcaatctctggtgagactttattggctaaaaaataa

SEQ ID NO: 277653 - DNA, 256 bp, Unknown
  Bacterial polypeptide expressing nucleotide sequence isolated from the Sargasso Sea
aagcgaggacaatgaaagaaactactataaaattaaagatttacaaaacaacgacatagtggttgtacagattgcaggcttagttgctcgaagaattgtatgtgagtcaaataaagatcaagatataaaacaaggtgatagaataggcatgattagatttggaagtagagctgatgtttattatgaaaattatgaacctttagtcaaaataggacaaacaaccattgcgggagaaactttattagctaaaaaataa

SEQ ID NO: 277654 - DNA, 472 bp, Unknown
  Bacterial polypeptide expressing nucleotide sequence isolated from the Sargasso Sea
catgagcaaaatatttccaaaaatacacaatgaaggatacaaatttattattatttttgcaatcgtaactataattctctatttcataaacggatttctgggttttataggattggtattaacaatttggtgttattatttttttagagaccctgaaagaacctcaataggtgatgataactatcttacaagtccagctgatggcgttgtactacaagtaatggatactaatggtccaaaagaattaggtttagaaaataaacaaatgaaaaaaattagtatttttatggatgtctttgattgccatgtaaataggtctccatgttctggagcaatatctgagatactttataaaccaggaaagttttttaatgcatctttagataaggcaagtaaagataatgaaagaaattattataaaataaaaaattctgatggagaagaaataattgttgtacaaatagcaggtctg

SEQ ID NO: 277655 - DNA, 553 bp, Unknown
  Bacterial polypeptide expressing nucleotide sequence isolated from the Sargasso Sea
ttttttaggatttgttgggttggttctaacaatctggtgttactatttcttcagggaccctgatagaatttcaatagatgacgaaaattatcttataagccctgctgatggattagttttacaagttttagaaacagatggaccaaaagaattaggcttagaaaataaaaagtttacaaaagttagtatcttcatgaatgtttttgattgtcatgtaaatagatcaccatgttcaggaaaaatttctgaaatactatacaagccaggtaaatttattaatgcgtctttagataaagcaagtgaagacaatgaaagaaattattataaaataaaaaattcgcacggagaagatataatagttgtgcaaatagcaggtttagtagccagaagaatagtgacagaaacatcagttgatgaagagttgcagcaaggaacgagaataggaatgataagatttggtagtagagctgatttgtattttgaaaactaccaaccacttgtaaaagttaatcaaaaagctattgctggagaaactttgatagcaaaaagatag

SEQ ID NO: 277656 - DNA, 619 bp, Unknown
  Bacterial polypeptide expressing nucleotide sequence isolated from the Sargasso Sea
agaaggatataaattcctaattatttccttaataataacactcattcttttgtcaatttcaagcttttttggcattatttttatttttattacagtttgggtatattatttttttagagatcctgaaagaatcattatagatgatcaaaattatttagtaagccctgcagacggaagaatttcatcgatcagcgaagtaaaaggaccaatagaattaggtttagatagcaagcaattcaccaaagtcagtatttttatgaatgtttttgattgtcatgttaacagatcaccatcaaacggagaaataacagaaatattttataaaccaggtaagtttttgaatgcatctttagataaagctagcgaagaaaatgagagaaattattttaaaattaaagatgaaacgactaatgaaaatatagttattgttcaaatagcaggattaattgcaagaagaatagttactcaagtacaaaaaactcaaaaaatcaaacaaggagaaagacttggaatgattagatttggaagtagagttgatatttattttagccaaagaaagacaatggttaaagttgggcaaaacgttattgcaggggaaagtttaatagctagaaaataa

SEQ ID NO: 277657 - DNA, 535 bp, Unknown
  Bacterial polypeptide expressing nucleotide sequence isolated from the Sargasso Sea
gatgcttgataaaatatttccaaagttacatcaagaagggtataaatttttagttatatccgcgatactgacattgattttatggtcaatatccaacttttttggattcgtttttacgttaattactatatgggtctattatttttttagagatcctgaaagagttagtattaatgatgagaattatctaatcagcccagctgacggcaaaatttcctctattcaagaaataaacggaccagttgaacttggtttggataataagaaatttacaagagtgagtatttttatgaatgtctttgactgccatgtaaataggtctcctgctagcggtgaaatacaggatattttttataagcctggaaaatttctaaatgcatctttggataaggcgagcgaggaaaacgagagaaattactttaagataaaagagcataaaactggtgatacaattgttattgtccagatagccggtttaattgctagacgaattgttacacagatagaaaaaaaacagaccattaatcaaggtcaa

SEQ ID NO: 277658 - DNA, 455 bp, Unknown
  Bacterial polypeptide expressing nucleotide sequence isolated from the Sargasso Sea
tatgtttaccaagatatttccaaagatacacactgaaggatataagtttatagttattgctgcattcataactgtaattttgttaatcgttaataattttttaggattaattggctttttgttgactatttgggtttattatttttttagagatccagaaagaacaattattggagatgataattatttagtcagtccagcagatggagaagtaattaaggttgaagatgttgatggcccaaaagaagtcggacttgaaaataaaaagtttaaaaaaataagtatttttatgaatgtctttgattgtcatgtaaatagaactccttgttcgggtacagtggaagaaattttatataagccaggaaaatttttcaatgcatcactggataaagctagtgaagataatgaaagaaattattataaaattaaggacaaacatggaaatgctatcattg

SEQ ID NO: 277659 - DNA, 466 bp, Unknown
  Bacterial polypeptide expressing nucleotide sequence isolated from the Sargasso Sea
atgaataaaatatttccaaaactacacaacgaaggatacaaatttattattatttttgcaatcgcaacaataattctctatttcctaaatggttttttaggtttcgtagggttgatattaactatttggtgctattatttttttagagatcctgagagaatttcaataggagatgataattatttaacaagtccggctgatggaatagtattacaagtgaaggataccaaaggtccaaaagaacttggattagaaggtaaacagatgaaaaaaataagcattttcatggatgtctttgattgtcatgtaaatagatcgccttgttcaggagcaatatcagaaatactttataaaccaggaaaatttttcaatgcatctttagataaagcaagtgaggataatgagaggaactattataaaataaaaaattctgacggaaatgaaataattgttgtgcaaatagcag

SEQ ID NO: 277660 - DNA, 646 bp, Unknown
  Bacterial polypeptide expressing nucleotide sequence isolated from the Sargasso Sea
tttgaaaaatatttccaagatacacacagagggatataagtttttagctatatccggggtaataaccttagtttcgtggttaatgtcaaattttctagggtttatctttggaataattactatatgggtttactatttttttagagaccctgatagaacaataatattagatgataattttttagttagccctgcagatggagttatatctgggattaaagacattagcggccctgtagaattgggtttagaaaatcaaactttcacacgagtaagtatttttatgaatgtttttgattgccatgttaacagatcaccagttaatggaaaaatagaagatattttttataagccaggaaaatttttaaatgcttctttggataaagcaagtgatgaaaatgaaagaaactattttaggattaaagataataaaacacaggaggaaatagtcgtagttcaaattgcaggtctaatagcgagacgtattgttacccaaactaaaaaaaaacaagaaatagcacaaggcgaaagaattggcatgataagatttggaagtagagttgatttatactttaataatagaaaaattatggtaaaagttggtcaaaatgtaattgcgggcgaaagcttgatagcgcaaaaataa

SEQ ID NO: 277661 - DNA, 187 bp, Unknown
  Bacterial polypeptide expressing nucleotide sequence isolated from the Sargasso Sea
aattgccggattaattgctagaagaattatttgtgaagtaagtaaagatcaaaatttaaaacaaggtgacagaataggaatgattagatttgggagtagagtagatattttctttaaaaataaaaaaatattgactaaaccaggacaaaatgttgttgctggagaaagtttgttggctaaagaataa

SEQ ID NO: 277662 - DNA, 331 bp, Unknown
  Bacterial polypeptide expressing nucleotide sequence isolated from the Sargasso Sea
atgatagataaaatatttccaaaactgcataacgagggatacagatttatattaatattcatagtattaacaattatcctatatttaattaatggctttttaggtttcataggcttagttctaacgatttggtgttattatttctttagagatccagatagagtttccatagaagatgaaagctatttaataagtcccgcagatggagaagtattacagatattagaaacaaatggaccaaaagaactaggtcttgaaaacaaaaagtacaataaaattagtatttttatgaatgtatttgattgccatgttaatcgtacaccatgctcgg

SEQ ID NO: 277663 - DNA, 751 bp, Unknown
  Bacterial polypeptide expressing nucleotide sequence isolated from the Sargasso Sea
atggcacttccaggatttggacgtccaccggcatattattttatatgggttttaccgcggaattcttttaacaggctttgcggacttttagcggatgctaaacttccgcggtttttgatgacactgttaatacgtttattttcatggaaatatggtgtcaaccttgaagaggcctcaaaacaggtttctgagtacaaaaattttaacgaattttttacaagaaaacttcttccggatgtaagaactctggaccctgacaaagaagccgttctcagtcctgtggatggtataattggtgaatcagggttcataagcaatgaaatcctgattcaggcaaaggggctagagtatcgtttagcagacttattaaaagattctaaaaaatctaaattatacgacggtggaattttcattactatttatttagctccatacaattaccatcgtattcatagtatggtaagtggagaagtaagtcagttctgctatatcccgggagacttgtggacagtcagtcctattggggtacatcacgtaccagaactttttgcaaggaatgaaagattaataactttttttgaaactgatagaggggaatgtgctattgtaaaaatcggtgccactgtggttgggcgtattcgtgttgtttatcatgatataacctcaaacagattcggagcaagatttcaaaagagcgtactagaaccccctctcagggtagagcgtggtgatgagtttggtttattcgaat

SEQ ID NO: 277664 - DNA, 175 bp, Unknown
  Bacterial polypeptide expressing nucleotide sequence isolated from the Sargasso Sea
agacattgcgaattggccaaggtttggacttatcaggtttggatcgcgggtagatatatatttaccaactggagtacaacctcttgtttgtattggtcaaataatggtttctggtgaaacggtaatagcggatttaaacagtaaagaattggcacgtgatggtagaaaggaatga

SEQ ID NO: 277665 - DNA, 462 bp, Unknown
  Bacterial polypeptide expressing nucleotide sequence isolated from the Sargasso Sea
tatgtttagcaaaatatttccaaaaattcacgcagagggatataaatttttagttatagcagtaattataaccttagtgatttatagttttagtgattttttaggtctgataggtctagttctaacagtatgggtttattatttttttagagacccagagagagtaattattgaagatgacaattatcttgttagtccagcagatggagaaataattaaagttgaggaagtagacggtccaaaagaacttggccttgaaaacaaaaaatttaaaaaaataagtatttttatgaacgtttttgattgtcacgttaataggacaccttgtgcaggaaagatagatgagattttgtataagccaggaaaattctttaatgcctcattagataaagccagtgaagataatgagagaaattatttcaaaattaaaagatcctcacaacgacgatgtaattgttgttc

SEQ ID NO: 277666 - DNA, 166 bp, Unknown
  Bacterial polypeptide expressing nucleotide sequence isolated from the Sargasso Sea
ctcagttttatttcatcaaaccatcaacttgatcagggtgaaaggtttggactcatcagatttggttcaagagttgatatttatatgccattagatgctgttgagaaatgtaaagttggagataaggtcgttgcaggtgaatcaattttagctgccctaaaataat

SEQ ID NO: 277667 - DNA, 670 bp, Unknown
  Bacterial polypeptide expressing nucleotide sequence isolated from the Sargasso Sea
atgcagtttagaatacataatgaaggttgggtatattttgttattagttgcttaattaccataataataatacctttttatacagttttaggtatattattatgtattttatcagcatacattttttatttttttagagatccaattagatctatacctaaagatgatgtaatagtttctccggctgacggtttagtaactttcataggcaatgaaaagaatcctttgaaagatagtttagataataataattatactaaaattagcatttttcttagtgtctttgatgtgcatgttaacaggatgccgttagatgcttctattaagtcaataaattatgtacctggaaaatttttaaatgcaacattagataagtctagtaatgaaaatgaaagaaatataatttatgcaaaaaaaaatgaggatagtttttatatagtccaaatagctggattgattgctagacgtattgtttgtaatattaaaattaatcaagaagtaataaaaggtgatagaattggaattattaaatttggaagtagggtagacttatatatacctcaaaattacaatattttaatatcaaaaggtcaaaaagttgtaggtggcgaaacaataatttcaaatccaaagaatatacaaaatataaaaagctctattttaaaatgaa

SEQ ID NO: 277668 - DNA, 658 bp, Unknown
  Bacterial polypeptide expressing nucleotide sequence isolated from the Sargasso Sea
atgagcggtatattagataaaatttttccgaaaatccattcagaaggatataaatttttaattatttctattctgataacggtaattttatattttataagtagctttttgagcgtaatagcattgcttcttactatttgggtttattatttttttagagatccagaaagaatttcaattgatgatgaaaattatttagttagttcggcagatggagtaattgtaaatgtctctgaagttagcggaccaaaagaattaggtttagaaaatagaacttttaaaaaaattagcgtctttatgaatgttcttgattgccatgttaatagaacaccttgttcaggaaaaattgcagaaattctttacaagccaggaaagtttttgaatgcatctcttgacaaagctagcgaagacaatgaaagaaattattacaaaattataaacaaacatggagaagaaatagttgtagttcagatagcaggattaatagcccgtagaattgttactgaagtctcagaagatcaagaaattcaacaaggttcaagaattggaatgataaggtttggaagtagagtggacattttttttgaaaattatgaccctattgttaaagttaatcaaaaaacaattgctggcgaaactcttttagcaaaaaaataaa

SEQ ID NO: 277669 - DNA, 322 bp, Unknown
  Bacterial polypeptide expressing nucleotide sequence isolated from the Sargasso Sea
attggataaagtcaaaattgctctgcagtacatgctgccaaaacatttattatcacgtctagtgggtaaactggctgcggctgaagcaggcacgttaacaactgcggcgattaaatggtttatcaaacaatataaaatcgatatgagtgaagcggcacaaagcgaaccacaggcctataaaagttttaacgattttttcacccgcgcattaaagccggggattcgtccgataaatcaacatacgaatattatggtgcatccggttgatggtgccgttagccaacttggtccaataaaagaaggtcgaatcttccaagcaaaa

SEQ ID NO: 277670 - DNA, 451 bp, Unknown
  Bacterial polypeptide expressing nucleotide sequence isolated from the Sargasso Sea
atcaattggctttttccttacattttttgttctattgttttttagagatcctgaaagaaatagtccacaagattcaaatttaattattagctctgcagatggaaaggtctgcttaattgatgaagcttatcctccagccgaagttcccattgaggctgaaaagatgaagagaatttgtgtctttatgaacgtatttaatgttcatataaatagaagtcctgttcaaggaagagtagaacacatcgtatacaaaaaaggccaattcttaaatgcaagcttagataaggcaagcgataaaaatgaaagaagcagcttggttgtaaatactgacaatggagccaaaattataattgttcaaattgctggcttaattgctaggagaattttgagttttatttcatcaaaccatcgacttaatcaaggtgaaaggtttgggcttataagatttggt

SEQ ID NO: 277671 - DNA, 649 bp, Unknown
  Bacterial polypeptide expressing nucleotide sequence isolated from the Sargasso Sea
atgttagataaaatttttccaaaaattcataatgaaggatacaaatttattgtaatctttatcttaggtacaatcatattgtactttataagtagttttttaggttttataggactggttctaacaatttggtgttactatttttttagggatcctgatagaatttcaataggtgatgaaaactatcttacaagccctgcagatggattggttttacaagttttagagacagatggaccaaaagaattgggcttagaaaataaaaagtttaaaaaagttagcatcttcatgaatgtttttgattgtcatgtaaatagatcgccatgttcaggaaaaatttctgaaatactatataaaccaggaaaattttttaatgcatcattagataaagcaagtgaagacaatgaacgaaattattataaaataaaaaattcacacggtgaagatataatagtagtgcaaattgcaggtttggtagccagaaggatagttacagaaacctcagtcgatgaagagttgctgcaaggaaaaagaataggaatgataagatttggtagtagagctgatttgtattttgaaaattatgaaccactcgtaaaagtcaatcaaaaaactattgctggagaaactttgatagcaaaaagatagc

SEQ ID NO: 277672 - DNA, 552 bp, Unknown
  Bacterial polypeptide expressing nucleotide sequence isolated from the Sargasso Sea
tatgtttagtaaaatatttccaaaaattcacactgaaggatacaagtttatagtaatagctgtattcataactatcatattattgattattaataattttttaggattaataggaatcttgttaaccatatgggtttattatttttttagagacccagagagaacaatcataggagatgatagctaccttgttagtccagctgacggagaagtgattaaagttgaagaggtggatggtccaaaagaacttggactagaaaataaaaaatttaaaaaaataagtatttttatgaacgtctttgactgccatgtgaacagaacaccatgttcaggtattgttgaagacatattgtataaaccaggaaaatttttaaatgcatctttagataaagcaagtgaagacaatgagagaaattattataaaattaaagataagcatgggaataatattgtggtagttcaaattgcaagattagttgcaagaagaatagtttgcgaaacaaataataatcaagaattgagtcaaggcgatagaatcggtatgattagatt

SEQ ID NO: 277673 - DNA, 415 bp, Unknown
  Bacterial polypeptide expressing nucleotide sequence isolated from the Sargasso Sea
atgtttagtaaaatatttccaaaaattcacgctgagggatacaagtttcttgttattgcaggaattataacaatcatactttatactttaagcgattttttaggtttaattggttttgttttaacaatctgggtttattatttttttagagatcctgatagagtaattatcgaaaatgataattatttagttagtccagctgatggtgaaattttaaaagttgaggaggttgatggtccaaaagaattaggtttagaaaataaaaaatttaacaaaataagtgttttcatgaatgtttttgattgtcatgtgaacagaactccatgtgcaggtaaaatcgaggaaattttatataagcctggaaaattttttaatgcttctcttgataaagcaagtgaagacacaatgagagaaa

SEQ ID NO: 277674 - DNA, 576 bp, Unknown
  Bacterial polypeptide expressing nucleotide sequence isolated from the Sargasso Sea
taattttatacttcattaatggttttttaggttttgtaggcttagttctctcgatatggtgttattacttttttagagacccagaaagatattctattaacgatgaaaattatctaactagtcccgcagacggcatagtattgcaagttttagaaactagtggtccaaaagaattaggtttagaaaataaaaaatttaaaaaaattagtatatttatgaatgtatttgattgtcacgtaaatagaagcccatgttcaggaaaaattactgaaattatttataaggcgggaaaattttttaatgcctcactagataaagctagcgaacataatgagagaaattattataaaataaaaaacactaatagtgaggatataattgttgtacagattgctggtttagtagctcgtagaatagtagttgaaacatctgttgatgaggatatcaagcaaggtagtagaattggaatgattaggttcggaagcagagcagacttatattttgaaaattatgatccactagtgaaggtaaatcaaaaaatgatagcaggagagaccctgattgcaaaaagataaa

SEQ ID NO: 277675 - DNA, 700 bp, Unknown
  Bacterial polypeptide expressing nucleotide sequence isolated from the Sargasso Sea
atgtatatttttatcccacacctaattttaactagattaatgggctggatagccaactcaagaaataaaatcatcaaaaaccttcttataaagtcatttattaagctttataaacctaatctagaagaatcacttatctctgatattaatgactttccaacttacaattcatttttcacaagaaaattaaaaaatggggttaggccaatagaagattccaagcttacgattgtgtctcctgtggatggaacaatcatggatcatgggatggtggaaagtaatatgctaattcaagcaaagaagcatgaatatcctataaaagagttattgggtaaaaaatcacaaaactccaataaatttaagcattacttcattactatttatttagcgcctacagattatcatcgaatacattgcccttatgggggcttgatctcatctacttgccatttaggagaatctctatttagcgttaatgaaaaagcccaagtaaatattccaaatctctatattaaaaatgaaagggccgttatgaaggttgaaagtaactcactttcttattatttggtctctgtaggtgcatcaattgttgggagcattgttcctttttggtctgattctggtctcaaaacaagaaaagataacataaatgaatggaatgaaggtcctgaagaaaataagaaccaggccctcaaggaca

SEQ ID NO: 277676 - DNA, 533 bp, Unknown
  Bacterial polypeptide expressing nucleotide sequence isolated from the Sargasso Sea
tattctaacaatatgggtttactatttttttagagatccagaaagatttccaataaatgatgaaaattatcttgttagtccggctgatggattagtgataaaagttgaagaagttaatggtccttcagaactttccttagagaataaaaaatttaccaaagtaagtgtgttcatgaatgttttcgattgccacgtaaacaggattccatgtagtggtgaaattgaagaaattctatataaaccaggcaagtttttaaatgcatctctagacaaagccagcgaagacaatgaaagaaattattataaaattaaaaatagtaatggtgatcaggttgtagttgttcagattgctggtttgattgctaggcgtattgtgactgagacaaacaaaggagaaaaactaaaccaaggtgatcgaatagggatgattagattcggtagtagagcagacatatactttgaaaattatacacctttagtaaaagtaaatcaaagagcagtggctggtgagactttaattgcaaaaaaataaa

SEQ ID NO: 277677 - DNA, 610 bp, Unknown
  Bacterial polypeptide expressing nucleotide sequence isolated from the Sargasso Sea
aaatttttagccatttctataattataacatttataattttgattttttcaaaattttttggctcaattatgattttattaactgtttgggtctattatttttttagagatccagagcgacattcaattaacgacaactcttttttggtgagccccgctgatggtttgataactgatatttctgataaaactggcccagttgaacttcaactggaaaacacaacctttacaaaagtgagtatttttatgaatgtttttaactgtcatgttaatagatcacctttagcagggacagtagaagagattagttataaacctggaaagtttttaaacgcttctttagataaggcgagcgatgaaaatgagagaaattattatagaattaaatgtagtaaatctggtgaggaaattattatagttcaaatagcaggactaattgcgagaagaatagtcactgatgtagaacaggggcaaagtttaaaacaaggtgaaagaattggaatgatacgatttggtagcagagtagacatttattttaagaataaaaaaattttagcaaagcttggacaaaatgtagtagcaggagaaagtttagtggcttcagaatgat

SEQ ID NO: 277678 - DNA, 263 bp, Unknown
  Bacterial polypeptide expressing nucleotide sequence isolated from the Sargasso Sea
taaagcaagtgaagataatgagagaaattattttaaaattaaggacacggataataacgatattgttgtagttcaaatagcaggactagttgcaagaagaatagtttgtgagtctaataaagatcaagaattaaaacaaggtgatagaattggaatgataagatttggaagcagagcagatgtttactatgaaaattatcaacctttagtcaaagtaggtcaaaaagctatttcaggcgaaacactattagctaaaaaataaa

SEQ ID NO: 277679 - DNA, 361 bp, Unknown
  Bacterial polypeptide expressing nucleotide sequence isolated from the Sargasso Sea
gatgtttttgattgccatgttaatagatcgccagtaagtggaaaaatagaggatattttttataagccaggtaaatttttaaatgcttcattagacaaagcaagtgacgaaaatgaaagaaactattttaaaatcaaagataagaaaacgcaggaacaaatagtagtagttcaaattgcgggacttatagcgagacgaattattactcaaactgaaaaaaataaagaaatagctcaaggtgaaagaattggaatgataagatttggaagtagagttgatttatacttcaataaaagaaaaattatggtaaaagttggccaaaacgttattgcaggtgaaagcttaatagcacaaatataat

SEQ ID NO: 277680 - DNA, 359 bp, Unknown
  Bacterial polypeptide expressing nucleotide sequence isolated from the Sargasso Sea
aggagaggttactaaagttgactacattgaaggtaagtttatcaatgccacactagataaagctagtgatgagaatgaaagactaaaaatatccattaaaaacggaaataatttaatttatgttactcaaattgcaggtttaattgctagaagaatagttaattatgtcaaaccaaatgaaaatatcaaccaaggcgagagatatggtataattaaatttggaagtagagtagatattgaatttccaaatagctttaaattacttgttaatgaaggacaacagtgtatcggtggtgaaactattattgcccaggatattaaatctaaaattagtcaaagagaatttaaaaaaatatagc

SEQ ID NO: 277681 - DNA, 496 bp, Unknown
  Bacterial polypeptide expressing nucleotide sequence isolated from the Sargasso Sea
atgcaattacgaatacataatgaaggctgggtttattttgttattagttgtttaataacgattattataatacctttctatacaattttaggtatttttttagcaataatatcagcctatatattttatttttttagagatcctataagagctgtcccaaatgaaaaagtagttgtgtcaccagctgatggacttgtaacttatattggtgctgaaaaaaacccacttgatgacgataaagatcaaaatacatatacaaaagttagtatctttttaagtgtttttgacgttcatgttaatcgcatgcctgtaaaaggctctatttcttcgatacattatattccaggcaagtttcttaatgcaactttagataagtcaagcaaagaaaatgaacgcaatatcatttttgttaaaagcaataatgattatttttatattgtacaaatagctggtttaattgctaggcgcattgtttgtaatttaaaaataaatcaag

SEQ ID NO: 277682 - DNA, 490 bp, Unknown
  Bacterial polypeptide expressing nucleotide sequence isolated from the Sargasso Sea
atgaataaaatatttccaaaactacacaacgaaggatacaaatttattattatttttgcaatcgcaacaataattctctatttcctaaatggttttctaggcttcatagggttgatactaacaatttggtgttattatttttttagagatcctgagagaatttcaataggagatgataattatttaacaagtccagctgatggaatagtattacaagtgaaggatactaaaggtccaaaagaacttggattagaaggtaaacagatgaaaaaaataagcatttttatggatgtctttgattgtcatgtaaatagatcgccttgttcaggagcaatatcagaaatactttataaaccaggaaaatttttcaatgcatctttagataaagcaagtgaggataatgagaggaactattataaaataaaaaattctgacggaaatgaaataattgttgtgcaaatagcaggacttgtgcaagaagaattgtaac

SEQ ID NO: 277683 - DNA, 343 bp, Unknown
  Bacterial polypeptide expressing nucleotide sequence isolated from the Sargasso Sea
catgttaataggacacctagttcaggaaaagttacagaaattttatataaaccatggaaaattttttaatgcttctttagataaggcaagtgaagaaaatgagagaaattattataaaatttctaattctaatggagaggatataattgttgttcagattgcaggacttatcgcgagaagaatagtttgtgaagtgaaagctgacgatgaattaaatcaaggtgacaggatcggaatgattagatttggaagtagggctgatatttattttgagaattataatccactagttaaagtaaatcaaaaaactatagctggtgaaacacttttagcaaagaaataa

SEQ ID NO: 277684 - DNA, 217 bp, Unknown
  Bacterial polypeptide expressing nucleotide sequence isolated from the Sargasso Sea
aaaagtcaggaagaaatagtgatcgttcaaatcgctggtcttatagcaagaagaattgttacccaaactgaaaaaaatcaagaaataaagcagggtgaaagaattggaatgataagatttggaagtagagttgatttatactttaataaaagaaaaattatggtaaaagttggccaaaatgttatcgcaggtgaaagcttaatagcacaaatataat

SEQ ID NO: 277685 - DNA, 697 bp, Unknown
  Bacterial polypeptide expressing nucleotide sequence isolated from the Sargasso Sea
atattctgatatagaaaaatatagttcgtataatgatttttttaccagaaaactaaaacatggctccagagttatcgataatgtaaatacatcctttatttctcctgttgatggagaaatagttgatcatggattgattgaagagggacaactaatccaggcaaagaagtttaattattcactagaggatttaattggaagagattacaaatctctctacagcggggggtacttcataacaatttatttagctcctacagactatcacaggatacattgcccttttaatggacaaataactgattccaagcatttaggaacatctctctatagtgtaaataagaaagcacaagaatctataccttgtctttatattaaaaatgagaggtctgtcttacaaattgattctgatggtttcaaatactctcttgtttcagtaggagcttcggtggttggcagcattgtccccttctggagcactgatgaaaattcttctagaaagaaactaatccaagaatggaacgaaggacctggtcaaaaaatacaaataaacaaaggagatgagttagcttactttaggatgggctcaactgtcattcttctttttgaagattcaagtaaattagatttagattccttgaaagaaaatatgctagtaaaatttgggaataaattagtttcgttaaaaaatctataa

SEQ ID NO: 277686 - DNA, 670 bp, Unknown
  Bacterial polypeptide expressing nucleotide sequence isolated from the Sargasso Sea
atgcaattgcgaatacataatgaaggctgggtttattttgttattagttgtttaataacgattattataatacctttctacacaattttaggtatttttttagcaataatatcagcctatatttattatttttttagagatcctataagagctgtcccaattgaagaagtagttgtgtcaccagctgatggacttgtaacttatattggtgctgaaaaaaaccctcttgatgatgatatagatcaaaatacttatatcaaggttagtatttttttaagtgttttcgacgtacatgttaatcgcatgcctgtaaaaggttctatttcttcaatacattatattccaggaaagtttctcaacgcaactctagataagtcaagtaaagaaaatgaacggaatataatttttgctaaatcaaataatgataatttttatattgttcaaatagccggattgattgcgagacgtattgtttgtaatttaaaagtaaaccaaggagtagaaaagggtgacagaattggcattattaaatttggtagtagggttgatctatacgttcctgaaagttataatattttgattacgaaaggtcaaagagttgtaggaggcgaaacaattatttcaaatccaaaagatataaagaaaattaaaaattcaaaattaatatgaa

SEQ ID NO: 277687 - DNA, 527 bp, Unknown
  Bacterial polypeptide expressing nucleotide sequence isolated from the Sargasso Sea
tatgttagataaaatattaccaaaacttcataacgaaggatacagatttatagttatatttatagcagcaacagttattttatatttcttaaacggttttttaggtttcgtaggattagttttaacaatttggtgttattattttttcagagatcctgacagaatttctattcaagatgataattatttaacaagtccagcagatggtgaagttttgcaagttctagaagtcgatggtccaaaagaacttggtttagaaaatagaaaattccaaaaaattagtatttttatgaatgtgtttgattgtcatgttaatagatcaccatgctcaggaattatttcggagattttgtataaacctggaaaatttattaatgcctctttagataaatcaagcgaagataatgagagaaattattataaaataaaaagtgttttaggagaagacataatagttgttcagatagcaggattaattgcaagaaggattgttaccgattcaattaaagatcaacaattaaaacaag

SEQ ID NO: 277688 - DNA, 506 bp, Unknown
  Bacterial polypeptide expressing nucleotide sequence isolated from the Sargasso Sea
tatgcctcatcatttgatatcacgtttcacctacatcatcacaaggacacatcatcctctaaccagcttcttaattagactctatgtcagactttttaagataaatctagatgagtgtattgagaaaaatactgataactacaatactttttgtgatttcttcacaagaaaacttaaaaagggcatacatgtggtcaataaagataaggactcaatagtgtcttcatgtgacggcagaattcttcagtttggaaaaatacaagacaattctatacttcaagttaaaggcaaaagtacgccaatacgaacacttctgtgtaatgataaagaattagcatccatctataaagatggctcatttttgacaatatatctatcaccaaaggattatcatcgagttcacataccagctaatggcaaactaatgaaaacattacatgttcccgggagactttttagtgtggctgatcatgcggtagagtgtatagataacttatattcaaaaa

SEQ ID NO: 277689 - DNA, 406 bp, Unknown
  Bacterial polypeptide expressing nucleotide sequence isolated from the Sargasso Sea
acttggtttggataaacaaaaatttactagggttatcatttttatgaatgtatttgactgtcatgttaataggtctccaataaaaggtgaaataaaagatattttttacaagccaggaaaatttttaaatgcttctttggataaagctagcgaagaaaatgaaagaaactactacaagatcgaagaaagtaaatcaggcgaaacaattattgttgttcaaatagccggtttaattgctagaagaatagttactcagactgttaaaaaccaaatagtacatcagggacaaagaattggcatgattagatttggtagcagggttgatgtatactttactaaaagaaaaactttagttaaagttgggcaaaatgtcatagctggtgaaagtttaatagcaggtttttaa

SEQ ID NO: 277690 - DNA, 421 bp, Unknown
  Bacterial polypeptide expressing nucleotide sequence isolated from the Sargasso Sea
gtgaaaggaccagttgaattaggtttagatagcaaaacatttactagagtcagtatttttatgaatgtttttgattgccatgtaaacagatctccctcaaatggtgaaatagaggaaatattttataaaccaggaaagtttcttaatgcttctttagataaagcaagcgaggaaaatgaaagaaattattttaaaattaaagatgaagcaaacgaaaatattgttgttgttcaaatcgcaggattaatagctagaagaatagtaacacaagtacaaaaaactcaaaaaattaaacaaggtgaaagacttggtatgattagatttgggagcagagttgatatatatttcagtcaaagaaatataatggtaaaagttggtcaaaacgttattgcgggcgagagtttaatcgcaagaaaataaa

SEQ ID NO: 277691 - DNA, 538 bp, Unknown
  Bacterial polypeptide expressing nucleotide sequence isolated from the Sargasso Sea
tggactggttttacgatttggtgttactatttttttagggatcctgagagaatttcaataggggatgaaaactatcttacaagtcctgcagatggattggtcttacaagttttagagacagatggaccaaaagaattgggcttagaaaacaaaaagtttaaaaaaatcagcatctttatgaatgtttttgattgtcatgtaaatagatcaccatgttcaggaaaaatttcagaaatattatacaagccaggtaaatttattaatgcatcattagataaagcaagtgaagacaatgaaagaaattattataaaataaaaaattcacacggtgaagatataatagtagtgcaaattgcaggcttggtagctagaagaatagtgacagaaacctcagtcgatgaagagttgcagcaaggaaaaagaataggaatgataagatttggtagtagagcggatttgtattttgaaaattatgaaccacttgtaaaagtcaatcaaaaaactattgctggagaaactttgatagcaaaaagatagc

SEQ ID NO: 277692 - DNA, 427 bp, Unknown
  Bacterial polypeptide expressing nucleotide sequence isolated from the Sargasso Sea
atgtttagcaagatatttccaaaaattcactctgagggatataagtttttaattattgctgtaataatttccattatattttattcattaagcgatttcttaggtctaataggtatagttttgactatttgggtttattacttttttcgagatccagatagagtaatcatagaagatgataattatcttgttagtcccgctgatggagaggtaataaaagttgaggaagtaaatggtccaaaggaactaggattagaaggaaaaaaatttcaaaaaataagtatttttatgaatatctttgactgtcatgtgaatagaactccatgtgctggaaaaattgaggaaattttatacaagcctggaaaattttttaatgcctctcttgataaagctagtgaagataatgaaagaaattattataaaatta

SEQ ID NO: 277693 - DNA, 478 bp, Unknown
  Bacterial polypeptide expressing nucleotide sequence isolated from the Sargasso Sea
aatgaacatattcaaaagtgtcaaagaggaaattttagtgccaatccatcccgccggttggccctttattttcctgttctggcttatcacatttttagccacctatttctggtttccttttttgcttttgggtagcttcctcagcctgtggagtgtttatttttttcgtaatccaaaacgcacaacacctattggtgagtttctggtgatctccccagcggatggccgtgtgttgtcaaccggtgtgaccgatctaccagatgatttaccgttgcctgatggtaaatggcgccgggtttcgatttttatgaacgtgtttgatgttcacgtgaatcgcgccccagttgctggaaagatcattgcaacaccttatcatgaaggagtgttcctcaatgccagctttgataaggcatcagaaaaaaatgagcgtcaaaacatggttctcgagatggagtctggcctgcaggttggcgtggta

SEQ ID NO: 277694 - DNA, 313 bp, Unknown
  Bacterial polypeptide expressing nucleotide sequence isolated from the Sargasso Sea
gttacagaaattttatacaaaccgggaaaatttttaaatgcatctttagataaggcgagtgaagacaatgaaagaaattattataaaatttctaattctactggagaagaaataattgttgtccaaattgcaggacttatagcaagaagaatagtttgtgaagtaaaagaaaacgatgaattaaatcaaggtgatagaattgggatgattagatttggaagtagagcagatatctactttgagaattacaacccacttgttaaaattaatcaaaaaactattgcaggggaaacaattttagcaaaaaaataaa

SEQ ID NO: 277695 - DNA, 501 bp, Unknown
  Bacterial polypeptide expressing nucleotide sequence isolated from the Sargasso Sea
atttttttcgtgaccctaaaagaattatacctaagcaagataatttgattttatccccagcagatggaaaaattataaagattgaagagatgcatgatccaaatggtggagaaaaactaaaaattgtctctatttttcttagtgtctttaatgttcatacaaacagaatgcctgttgatgggaaatttatggatgttcagtatgttaaaggaaagttccttgcagcatttgaccatatggcgtcagaccataatgagagaactgaaattaaaatccagaccaaatttggaattataaaagtaaaacaaatagcaggtttaatagccaggagaatattatgctatgctaatgtaggtgaaaaaatggaggccggtggaaggctaggttttattaggtttggttcaagaacagatattatacttcctgctagcattaatcttgaaattaaacttaatcaaaaagtgcttggcggagagaccgtaattggcaaatatgaatagt

SEQ ID NO: 277696 - DNA, 202 bp, Unknown
  Bacterial polypeptide expressing nucleotide sequence isolated from the Sargasso Sea
attgtagtcgttcaaattgcaggattagttgcaagaagaatagtttgtgaaacaaataaaaatcaggaattaaatcaaggtgatagaattggtatgattagatttggtagtagagcagacgtttattatgaaaattatgaaccactagttaaagttggtcaaacagcaatttcaggagaaacactgctggcaaaaaattaat

SEQ ID NO: 277697 - DNA, 532 bp, Unknown
  Bacterial polypeptide expressing nucleotide sequence isolated from the Sargasso Sea
gatgcttgaaaaaatatttccgaagttacaccaagaggggtataagtttttggttatatccgtggtattaaccctgattctatggtcaatttctgatttttttggattcgttttaacgttaataaccatatgggtttattacttttttagagatcctgaaaggacaatcataaatgacgatacctacttggttagtcctgcagatggaagaatttctgctattcaggaaattaacggaccagttgagcttggtttagataataaaaaattcacgagagtaagtatttttatgaacgtgttcgattgtcacgtaaacagagctccttctaatggtgagatacaagatattttttataaacctggaaaatttttaaatgcttctcttaataaagcaagcgaagaaaacgagagaaattattttaaaataaaggatagcaaaacagatagcccaatcattgttgttcagatagcaggattaattgcacgacgaattgttacacaggtagaaaaaacacatacggttattcaagga

SEQ ID NO: 277698 - DNA, 528 bp, Unknown
  Bacterial polypeptide expressing nucleotide sequence isolated from the Sargasso Sea
taacggtctggtgttattatttttttagagatccagaaagattttctattgaagatgataattatttaacaagcccagcagatggagttgttttgcaagtcatagacaccaatggtccgcaggaacttgggctagaaaataaaaaatttaaaaaaattagtatttttatgaatgtatttgactgtcatgtaaatcgatctccatgctctggaatagtaacagaaattttatataagccaggaaaatttattaatgcgtctttagataaggcaagtgaagataatgagagaaattactataaaatcaaaaatagtatgggcgaagaaattgttgttgttcaaatagcaggactaattgcaagaaggattataactgaagtaaataaagatcaagagcttaagcaaggaacaaaaattggaatgatcagatttggaagtagagctgatatatattttgaaaattatattccacttgttaaagtgaatcaaaaaaccgtcgctggagaaactttattggcaaaaaaataaa

SEQ ID NO: 277699 - DNA, 409 bp, Unknown
  Bacterial polypeptide expressing nucleotide sequence isolated from the Sargasso Sea
aatgaatatagttgattctattaaagcctcaattttaactcctgtacatcctgcaggtataccatttatagctatattttttatattgaccgtgattataggttggttttggagtccactttattttgctggtataatcttaactatctggtgtgtatacttttttaggaatcctcttagagttactccagttttgtcaggagcaaataagaataatcttataatttcgcctgcagatggaagagtaattgaaatttctaaaataaatccaagtgaagaaattggtttacctaaaggggactggactagggtctctgttttcatgaatgtctttgatgttcacgtaaacagatcaccaatgctagggaaaattacatataaaaattatattccaggttcttttttttaa

SEQ ID NO: 277700 - DNA, 589 bp, Unknown
  Bacterial polypeptide expressing nucleotide sequence isolated from the Sargasso Sea
atgtttagtaagatatttccaaaaattcacgctgaaggttataaatttttagttatagccggaataatcacaatagtattttatatttttagtaatttcttaggtcttattggtttggtcttaaccatctgggtttattatttttttagagatccagagagagttattatagatgatgataattatcttgttagtccagcagatggtgaggtgatcaaagttgaagaagttgatgggcctaaagaacttggtctagagaataaaaaatttcaaaagattagtgttttcatgaatatttttgattgtcatgtaaacagaactccatgtgcagggaagattgaggaaatcttatataagccaggaaagtttgtaaatgcttcattagataaagcaagtgaagataatgaaagaaattacttcaaaattaaagaccctcataacaatgacattatagttgttcaaatagctggattggttgcacgaagaatagtttgtgagtcaaataaagatcaagagctgaaacaaggagatcgtattggcatgatacgatttggtagtagagctgatatctattatgaaaattatgagc

SEQ ID NO: 277701 - DNA, 472 bp, Unknown
  Bacterial polypeptide expressing nucleotide sequence isolated from the Sargasso Sea
gataattatcttacaagtccagcagatggcgttgtgtgcagggtgatggacacaaatgtcccaaaagaacttggcttagaaaataaaaagatgaaaaaggtaagtatatttatggacgtatttgactgtcatgtaaatagatctccttgttctggagcaatatcagaaatactttacaaacctggaaaatttttcaatgcatcattagataaagcaagtgaagataatgagagaaattattatagaattaaaaattccaacggagaagaaattattgtagtccaaatagccggattggtagcgagaagaatagttactgaagtttctaaagatgaactactagagcaaggttcaagaataggaatgattagatttggaagtagggcagatatgtattttgaaaattactctcccttagtaaaggttgatcaaaagactatagctggcgaaactcttattgcaaaaaaataat

SEQ ID NO: 277702 - DNA, 586 bp, Unknown
  Bacterial polypeptide expressing nucleotide sequence isolated from the Sargasso Sea
atgaataaaatttttccaaaattacacagtgaaggatacaaatttatgattatttttgcaatcgtaactataattctttatctcataaatggttttcttggctttatcggtttgttactaacaatttggtgttactatttttttcgtgatcctgaaagaacatctataggagatgataattacctgactagcccagcagacggtgttgtcctgcaagtaaaagataccaatggcccaaaggagcttggtttagaaaataaacaaatgaaaaaagtaagtatttttatggatgtatttgattgccatgttaatagatcaccatgttccggggcaatatctgaaatactttacaaaccaggaaaattttttaatgcatcattagataaagcaagtgaggataatgaacgaaactattacagaataagaaactcagatggaaaagatataattgttgttcaaatagcaggacttgttgcaagaagaattgtaactgaggtctctaaagatgagatcgtagatcaaggttcaagaattggaatgatcagatttggaagtagggcagatatgtattttgaagattataatc

SEQ ID NO: 277703 - DNA, 487 bp, Unknown
  Bacterial polypeptide expressing nucleotide sequence isolated from the Sargasso Sea
ctgcccaaaaacctgttcagcaggatctgtggattcgttgcaaatctgaaactgcccccgttcattctccagagactgattcgtctcttctgtcacttttatcctatcgacctcaacgaagcggaacaatctgtcgaagattttgattgtttcaatgctttctttactcgtaaactccggcaaggggtcaggcctcttgcagaagatcccaacgcattgctttgtccagttgatggcgtattaggagagtatggtatcattcgtaacgggaatctcctccaggccaaaggattggagtatcgattagaaaacctgcttcaggatcctgagagaaaagatctttacgaaggaggtcgttacatcacgctttacctggcgccccataattatcaccggatccacagtcctgccgaaggtcaggttagggaatttgcctacgttcccggaaatctatggactgtaggcgaactgggagtgatgcatgttc

SEQ ID NO: 277704 - DNA, 490 bp, Unknown
  Bacterial polypeptide expressing nucleotide sequence isolated from the Sargasso Sea
aacatcgatttgaagatgataactatctttactagtccagctgatggtgttgtactgcaagtaaaagataccaatggcccaaaggaacttggtttagaaaataaacaaatgaaaaaagtaagtatttttatggatgtatttgattgccatgttaatagatcaccatgttctggagcaatctctgaaatactttacaaaccaggaaaattttttaatgcatcactagataaagctagcgaagataatgaaagaaattattataaaataaaaaatcccgatggagaagagattattgtggtccagatagcgggattagttgctagaaggattgtcactgaagtttctaaagacgagcttgtagagcaaggttccagaataggaatgattaggtttggaagtagggcagatatgtattttgaaaactacactcctttagttaaggtcgatcaaaagactatagctggtgaaaccttaattgcaaaaaaataat

SEQ ID NO: 277705 - DNA, 652 bp, Unknown
  Bacterial polypeptide expressing nucleotide sequence isolated from the Sargasso Sea
tatgtttgaaaaaatatttccaaagatacacacagaaggatataagtttttagctatatcaggggtaataaccttagttttgtggttaatgtcaaattttctcgggtttattttcggcataatcacaatatgggtttattatttttttagagatcctgatagaacaataatatcagatgacaattttttagtaagtccagcagatggaattatatctggaatcaaagaaattaatggcccagtggaattgggtttagaaaatcaaactttcacacgagtaagtatttttatgaatgttttcgattgtcatgtaaatagatcaccagtaagcggaaaaatagaagatattttctacaagccaggaaaatttttaaatgcttccttggataaagcaagtgatgaaaatgaaagaaacttttttaagattaaagataagaaaacgcaggaagaaatactagtagttcaaattgcagggttaatagccagacgaattgttactcaaactgaaaaaaatcaagaaattgcacaaggtgaaagaattggaatgataagatttggaagtagagttgatttatactttaataaaagaaaaattatggtaaaagttggtcaaaacgttattgcaggcgaaagcttaatagcgcaaatataa

SEQ ID NO: 277706 - DNA, 838 bp, Unknown
  Bacterial polypeptide expressing nucleotide sequence isolated from the Sargasso Sea
aatgtatatttttatcccaaacctgattttgactagattaatgggctggttagctagctcaagaaataaaatcatcaaaaacctgcttataaagtcatttattaagctttataaacctaatctagaagaatcgcttatctctgatattaataactttccaacttacaattcattttttacaagaaaattaaaaaatggagttaggccaatagaagactccaagcttgcgattgtgtctccggtggatggaacaatcatggatcatgggatagtggaaaggaatatgctaattcaagcaaaaaaccatgaatatcctataaaagagttattgggtaaagaatcgcaaaacgccaataaatctaagcaatactttattactatttatttagcgcctacagattatcatcgaatacattgcccttatggaggcttgatctcatctacttgtcatttaggagaatctctatttagcgttaatgaaaaagcccaagtaaatatatcagatctctatattaaaaatgaaagggctgttatgaaggttgaaagcagctcactttcttattacttggtctccgtaggtgcatcaattgttgggagcattgttcctttttggtctgattctggtcctaaaacaagaaaagactgcatcaatgaatggaataaaggtccgcaagaaaataagaaccaggctcttaaaggacaagagctggcttattttaaaatgggttcaacagtaattttaattatcgaagattctgctcagttagatttacattccttgacgactaataagactgtaaaatttggatcagaattaattaaccttaaaaatctatag

SEQ ID NO: 277707 - DNA, 832 bp, Unknown
  Bacterial polypeptide expressing nucleotide sequence isolated from the Sargasso Sea
atgcataaactagttcctcatttatttctaactctcttactgggcctgcttgcaaacagcaaggtaagaatcattaaaaaacttctaataaagggttttatatggctctataagcccgaccttaatgaagccatacattctgatatagaaaaatatatttcatataatgatttttttacaagaaaactaaaacaaggctctagagttattgatgatgaagatacgtcctttatttctcctgttgatggagaaatagttgatcatggattgattgaagagggacaactaatccaggcaaaaaagtttaattattctctagaggatttaattggaagagattacaaatctctctacagcgggggttacttcataacaatttatttagcccctacagactatcacaggatacattgcccttttaatggacaaataactgattccaagcatttgggaacatctctctacagtgtaaataagaaagcacaagaatctataccttatctttatatcaaaaatgagaggtctttcttacaaattgattctgatggtttcaaatactcacttgtttcagtaggagcttctgtggttggcagcattgtccccttctggagcactgataaaaatttttctagaaagcaactaatccaagaatggaacgaaggacccggtcaaaaaaaacaaataaacaaaggagatgagttagcgcactttaggatgggctcaactgtcattcttctttttgaagattcaagtaaattagatttagattccttgaaagaaaatatgctagtaaaatttgggcataaattagtttcgttaaaaaacatatagg

SEQ ID NO: 277708 - DNA, 484 bp, Unknown
  Bacterial polypeptide expressing nucleotide sequence isolated from the Sargasso Sea
aagaataactcctaatcaagataatttgatagtatccccagcagatggaaaaattattaagatagatgaagtaaatgatccaaaaagtggtgaaaaacttaagatggtttctatttttctcagtgttttcaatgttcatgcaaacagaatgcctgttgatggaaagtttgttgatgttcaatacgtaaaaggaaagtttcttgcagcatttgaccataaggcatctgactttaatgagaggacggaaatccaaatcgaaacaagattcgggattattatggtaaagcaaatagcaggtttagtagccaggagaatattgtgttacgcaaatgttggagaaaaaatggaggccggtgcaaggctaggttttattaggtttggttcaagaacagatattatacttcctgctagtatagatctgcaaattgaacttgaccaaaaagtaattggtggagagaccatcataggtaaatatgaaaaataa

SEQ ID NO: 277709 - DNA, 775 bp, Unknown
  Bacterial polypeptide expressing nucleotide sequence isolated from the Sargasso Sea
atgatactttcctattggttgtatttagttccacatcatttaatgtcacgttttacttatatcatcactagaacacatcatccgttaacccaatacctgattaaactttatataagaatttttaaaattaatcttaaagaatgtgaagaggaaaatattgaaaactatcataccttttgtgatttttttacacgtaaactcaaaaaaggagttcataagattaatctagataataattctattgtttcatcttgtgatggaagaattctacagtttggaaagattacatatgaatctatattacaagtgaaaggtaaaaatactcctataaaagaattactggttaatgataaagaattgtcatccatctatactaatgggagttttttaacaatttatctctcaccaaaagattaccatcgtgtacatattccttttactggaaaactaatgaagactcttcatgtacctggtagattgtttagtgtagctgatcatgcagttgaatgtataaataacctttattcaaaaaatgaacgactggtttgtcattttaaaaataataattctttcttttctgtaatattagttggagcgattaatgtatcatcaatagagactcaatggaaaggagaagtgtcccctcccatgcctaaaaaagttatctctacaaaatatggtaataaaaatattagcttccataaaggcaatgaaataggaatgttcaaatcaggttctactgttatacttttgttcacggataaaattaacttat

SEQ ID NO: 277710 - DNA, 520 bp, Unknown
  Bacterial polypeptide expressing nucleotide sequence isolated from the Sargasso Sea
atgattaataacatttttccaaaaattcataaggaaggtcataagtttttagctatagctattattatcactttttttggcttattgatatctaaagggcttggtttaatactttttgttataacgatatgggtttattatttttttagagatcccgaaagaatatcaattaaagacgatagatttcttgttagtccagctgatggagtgatttctcatatttctgaggttccaggtccaaaagaattaggtttagaaaacaaatcttatactagaataagtatttttatgaatgtttttgattgccatgttaacaggacaccagcatctggaactgttgaagatattttttataagccaggaaaatttttaaatgcgtctttggataaagccagcgaagaaaatgagagaaattattataagataaagacaaaaaacaaaggagatgatattatcatagttcaaattgcaggtttaattgctagaagaatagtatgtgaagttaaaaaagaacaagtat

SEQ ID NO: 277711 - DNA, 811 bp, Unknown
  Bacterial polypeptide expressing nucleotide sequence isolated from the Sargasso Sea
atgcctcatcatttgatatcacgttttacctacatcatcacaaggacacatcaccctctaaccagcttcttaattagactctatgtcaaaatttttaagataaatctagatgagtgtattgagaaaaatattgataactataatacgttttgtgatttcttcactagaaaactcaaaaagggtgtacatgtggtcaataaagataaggactcaatagtgtcttcatgtgatggcagaattcttcagtttggaaaaatacaagaaaaatctatactacaagttaaaggcaaaagtacgccaatacaaacacttctatgcaatgataaagaattagcatccatctacaaagatggctcatttttgacaatatatctatcaccaaaggattatcatcgagttcacataccagctaatggcaaactaatgaaaacattacatgtgcctgggagactttttagtgtggctgatcatgcggtagagtgtatagataacttatattcaaaaaatgaaagattagtttgtcatttcaaagaggatgacaatcatttttctgtaattttcgttggtgcgataaatgtttcatctattgagacgcagtggaaaggtgaagtttctcctcctatgcccaaaaaattaatctctacaaaatatggcaataagaatataaagtttcataaaggagatgagattgggatgttcaaatcaggatcaacggtcattttactttttacagaaaatgtggagctatcaaacagtctaaaaataaatcaatctatcagagtaggaaaaaagattggtaagataaattaga

SEQ ID NO: 277712 - DNA, 150 bp, Unknown
  Bacterial polypeptide expressing nucleotide sequence isolated from the Sargasso Sea
taatatgctacttaatcaggggagaaagatttggacttataagatttggttctagagttgatatttacttgccattggatgctgttgaaaaatgtaaggttggagacaaggtagtcgcaggagaatcaatcctagcgtccttaaactaga

SEQ ID NO: 277713 - DNA, 838 bp, Unknown
  Bacterial polypeptide expressing nucleotide sequence isolated from the Sargasso Sea
aatgcattatctaattccacattttattttgacaaggctaatgggtatattggcagactcgaagaatcaatatattaaaaagtttcttataaattcatttataaagatttaccgcccaaaattggaggagtctcttattgtagacataaatgactacgctacttacaactcattttttacaagaaagctaaaagaggaagcaaggccaatagaaagttcgtatctcagtgttgtgtctccagtagatggaacaattgtggatcatggtttaattgaaagaaatatgctgattcaggcaaaaaagcataaatactctcttcatgaattattaggagaaaaggcaaataaagaacgtaatactcctggatattttattacaatatatttagcaccaacagattatcatagaatacattgtccctatgaaggatatatctcctctacatctcatataggggagtcattatttagcgttaatgaaaaagctcaagtagatatttcggatctatatataaaaaatgaaagggctgtaatgaacattaaaggtagcttgctttcatactcattagtttcagtaggcgcttcaattgtaggtagcatagtgcccttctggtttgataaagatacgaccgtaagaaaagattttgtaagagagtggaggaaggggccagaagaagttgaaagacaagtattaaaaggacaagaacttgcgtattttaaaatgggctcaactgtcataatagttttcgaagactctgataaattagatttgcattccttgacaaccaataagtctgtaaaatttggatcaaaattaataaaccttaagaaggtatag

SEQ ID NO: 277714 - DNA, 649 bp, Unknown
  Bacterial polypeptide expressing nucleotide sequence isolated from the Sargasso Sea
tatgatagataaagtttttccgaaaatacataacgagggttataagtttttagtaatctttggacttggaacacttgttttatatttaataagtggtttcttgggtctaataggtattattcttacaatatgggtttactatttttttagagatccagaaagatttccaataaatgatgaaaattatcttgttagtccggctgatggattagtgataaaagtagaagaagttaatggtccttcagaactttccttagaaaataaaaaatttaccaaagtaagcgtgttcatgaatgttttcgattgtcacgtaaatagaattccatgcagtggtgaaattgaggaaattttatataaacctggcaagtttttaaatgcatctctagataaagccagcgaagacaatgaaagaaattattataaaataaaaaatagtaatggtgatcaagttgtagttgttcagatagctggtttgattgctaggcgtattgttactgagacaaacaaaggagaaaaactaaaccaaggtgatcgaatagggatgattagatttggcagcagggcagacatatactttgaaaattataaacctttggtaaaagtaaaccaaagagcagtggctggcgagacattaattgcaaaaaaataa

SEQ ID NO: 277715 - DNA, 646 bp, Unknown
  Bacterial polypeptide expressing nucleotide sequence isolated from the Sargasso Sea
tatgagtaaaatttttccaaaattgcacaatgaaggatacaagtttattgttatttttgcaattgcaactgtaattctttatttgataaatggtttttttggttttgtcggtttggtattaactatttggtgttactatttttttagagatcctgaaagaacatctattggagatgataattatcttacaagtcctgcagatggagttgtgttgcaggtgatggacacaaatggtccaaaagaacttggcttagaaaataaaaagatgaaaaaggtaagtatatttatggacgtatttgactgtcatgtaaatagatctccttgttcaggagcaatatcagaaatactttataaacctggaaaatttttcaatgcatcattagataaagcaagtgaagataatgagagaaattattataggattaaaaattccaacggagaagaaattattgtagtccaaatagccggattggttgcgagaagaattgttactgaagtttctaaagatgaaattgtagagcaaggttcaagaataggaatgattagatttggaagtagggcagatatgtattttgaaaattactctcccttagtaaaggttgatcaaaaaactatagctggtgaaactcttattgcaaaaaaataa

SEQ ID NO: 277716 - DNA, 553 bp, Unknown
  Bacterial polypeptide expressing nucleotide sequence isolated from the Sargasso Sea
tttgttttttataaacatattccttctagttctatttatcttttgtttgaatttttttagagatcctaaaagaattgtccctacagatgaaaactgtatagtttctccagcagatggtaaaataatcaagataaaagaatttgaagatccagaaaccaaagaaaaattaagattagtgtcaatttttttaagtgtttttaatgtgcactcaaatcgaatgcctgttgatggtttaataaagagcgttgactatataaaaggtgattttttggctgcttttgatcacaaggcttctgagcaaaatgaaagaactgaaatttcaatagaaacaagattcggttctatggttgtaaaacaaatagcagggcttgttgctagaagaatcttgtgttatgcaaaaaagaatgaaaaaatgctagcaggggataggttaggcttcattaggtttggttctagaacagatatcattttaccaaataaagtatccttaaacgtcgagctggatcagaaagtgtatggcggtcaaaccattataggcaaatatgaagtctaa

SEQ ID NO: 277717 - DNA, 789 bp, Unknown
  Bacterial polypeptide expressing nucleotide sequence isolated from the Sargasso Sea
tcgctttcttagcccattcaaatttaagtctaataagatatcctcttatttggctattcaactcgatatatgaaccgaacttaaatgaagctagagagaaaaacctcaaagactactcaagtttgaatgacttttttataagaaagatcaaagaagaatctagaacttttgacgaagacttgcttgaaataggatcgccagtcgacggtgttatatcaagttttggagtaatagaagaaggtcgattaatacaagcaaaaggaatcgattattcgttaaaagatttagttgcgtctgaaacagagtacaaaaaatttgataacggatattttttgacaatttatttatcgcctaaagattatcatagaatccattctccatctgacggaaaggtttatttaacagaacatatacctggatctctttttagtgttaatgagagctctcagaggtcagtaagggatttatatgcaataaatgaaagaactcttatggggataaaaaataaaaattttaactttatgctagttaatgttggtgcagctatagtaggtaatattgttccctattggtataacgagaaactgaatgattttgataaaataattgattcttggaagctaggcccagaaaaaaaccttaaagttgtagaaaaaggacaagaaattgcattttttcaaatgggttcaacagtaatacttttgtttgaaagaaaattaaatcttaactccgattacctagaagagcttaagcctgtaaaattaggcgaaactttatttaaattataaa

SEQ ID NO: 277718 - DNA, 487 bp, Unknown
  Bacterial polypeptide expressing nucleotide sequence isolated from the Sargasso Sea
atgcataaactagttcctcatttacttctaactctcttgctgggtctgcttgcaaacagcaaggtaagaatcattaaaaatattctaataaagggctttatatggctctataagcccgatctcaatgaagcaatatattctgatatagaaaaatatagttcgtataatgatttttttaccagaaaactaaaacatggctccagagttatcgataatgtaaatacatcctttatttctcctgttgatggagaaatagttgatcatggattgattgaagagggacaactaatccaggcaaaaaagtttaattattcactagaggatttaattggaagagattacaaatctctctacagcgggggttacttcataacaatttatttagcccctacagactatcacaggatacattgcccttttaatggacaaataactgattccaagcatttgggaacatctctctacagtgtaaataagaaagcacaag

SEQ ID NO: 277719 - DNA, 646 bp, Unknown
  Bacterial polypeptide expressing nucleotide sequence isolated from the Sargasso Sea
tatggataatatttttccaaaaatacacaaagaaggttataagtttttagctatttcgataattgtaacatttatcgtctggctgttttctggaaccttaggtttcattttcatcttgttaactatctgggtttattatttttttagagatccagaaagaatttctataatggatgataaatttctagttagccccgctgatggattaatttctaatatttcaaatatctctggtcccatagaacttggtttagaaaacaagtcctataccaaagtaagtatctttatgaacgtatttaactgccatgttaatcgaacaccagtatcaggttctgtagaagaaattttatataagcctggtaaatttataaatgcgtctcttgataaagctagtgaagaaaatgaaagaagttattacaaaattaaaacaaaaagtggagatgaaattatagtagtacaaattgctggactgatagctagaagaattgtaactgatattaaaaaagatcaaaatttaaaacaaggtgaaagaatagggatgatcagattcggtagtagagttgatgtttattttagtaatatgaaactacttacaaaagtaggacaaaacgttttagcaggagagagcttaattgctgaacaatga

SEQ ID NO: 277720 - DNA, 589 bp, Unknown
  Bacterial polypeptide expressing nucleotide sequence isolated from the Sargasso Sea
attgggggtgtatgcctatgcctttgaaaatcaaattttaattttattatatcatgctttaggcgtattgtttttgtttagtttgtatttttttagagacccagttagagttatacccaatgattcttctgcaattatttctcctgcggatggtaaaatcctttctatcaaaattatagatgatgatgatgttggtaattcgtctcatcttatttcaatatatttaaatatttttaatgttcatgtaaatcgatttccttttgatggaattgttcaaaatgttgatgtaaaaagtggagaattttttgctgcatttaatcataatgcctctgatgtaaatgagcaagtagttaccatggtatcccatgaaaaacttaaatataaaataaaacagatagctggcatatttgctcgtcgaattttatgctacgcagagcctaaaatgagcgttataaagggtgggaggttaggttttattcgttttgggagtagaactgatctagttgtatcttctaatgttaatatctgcgtaaaagaaggtgacaagattaagggtggaaaaacagttttagctaagatacaaaaatga

SEQ ID NO: 277721 - DNA, 388 bp, Unknown
  Bacterial polypeptide expressing nucleotide sequence isolated from the Sargasso Sea
atggataaaatttttccaaaactgcataatgagggatataaatttttaattatctttggcatagggactattattcttaatttgattaatggttttttaggttttgttggattagttttaactatttggtgttattatttttttagagatccagaaagagtatcaatcgacgatgaaaattatttagttagtccagcagatggccttgttttaaaagttgaagattcagatggtccaaaagaattaaatttagaaaataaaaaatttaaaaaaatcagtatttttatgaatgtttttgactgtcatgtaaatagaacgccatgttcaggaaaagtaactgaaatattatataaacctggaaagttttttaatgcatctttagacaaag

SEQ ID NO: 277722 - DNA, 670 bp, Unknown
  Bacterial polypeptide expressing nucleotide sequence isolated from the Sargasso Sea
atgcaattaagaattcataatgaaggttgggtatattttgttattagttgtttaataacgattatcgttatccctttctatacaattttaggtatttttttatctattttatcagtatatattttttatttctttagagaccctataagagccgtcccaactgaagaagttgttgtttcaccagctgatggagttgtaacttatattggtagaaaaaaaaaccctcttgaggataataaagatcaaaatacttataataaggtcagtatttttttaagtgtttttgatgtgcatgttaatagaatgcctataaaaggttcaataaattcaaaacattatatacctggcaaatttattaatgctactttagataaatctagtgatgataatgaaagaaatataattactgttaaaagtaataaagataatttttatatcgttcaaatagctggattaattgctaggcggattgtttgtaatttaaaaattaatcaagaagttgaaaaaggaagtagaattggcattataaagtttggcagtagagtcgatctgtatcttccagaaaattatgatattttggttgcaaaaggtcaaagagtagtaggaggtgaaacaattatttctaatcccaaaaacatacttaaaattaataacgctaaatcaatatgag

SEQ ID NO: 277723 - DNA, 199 bp, Unknown
  Bacterial polypeptide expressing nucleotide sequence isolated from the Sargasso Sea
ttgtttgtcaaatttgcaggtttaattgctagaaggatagttacacaggtgcagaaatctcaaaaagtcaaacaaggtgaaagacttggaatgattagatttggtagtcgagttgatatatattttagtcaaagaaatacaatggttaaagttggccaaaatgttattgcaggtgaaagtctaatagcaagaaagtaaa

SEQ ID NO: 277724 - DNA, 488 bp, Unknown
  Bacterial polypeptide expressing nucleotide sequence isolated from the Sargasso Sea
aacttcaattgatgatgataactatttaactagtcctgcagacggtttagtcctacaagtattagaaacaaatggaccaaaagaacttgaactagaaaataaaaaatttacaaaaataagtatttttatgaatgtttttgactgtcacgtaaacaggacaccttgttctgggaaaatatcggagattatttataaacctggtaagttttttaatgcatcacttgataaggctagtgaagaaaatgaaagaaattattataaaattaaaaatagttctggagaagatgttattgtagttcaaatagcaggcttaattgcaagaagaattgtaactgaaacttctgaaaatcaagatcttaaacaaggagaaagaattggtatgatcagatttggaagcagagccgatgtttactttgaaaattataaacctttagtaaaagttaatcaaaaaactattgctggagaaactttgatagcaaaaaaataaa

SEQ ID NO: 277725 - DNA, 640 bp, Unknown
  Bacterial polypeptide expressing nucleotide sequence isolated from the Sargasso Sea
tatgtttagcaagatatttccaaagattcacacagaaggatacaagtttatagtcatagctgtattcataactatcatttttctaattattaataattttttaggattaataggaattttactaagtgtctgggtttattatttttttagagatccagagagaacaattataggagatgatagttacctagtaagtcctgctgatggagaagtgattaaagttgaagaggtagatggcccaaaagaacttggactagaaaataaaaaatttaaaaaaataagtatttttatgaacgtctttgattgtcatgtaaacagaactccttgctcaggaattgttgaagatattttatataaaccaggtaaatttttaaatgcatctttagataaagcaagtgaagacaatgagagaaattattataaaattaaagataagcatgggaatgatattgtagtcgttcaaattgcaggattagttgcaagaagaatagtttgcgaaacaaataaaaatcaggaattaaatcaaggtgatagaattgggatgattagatttggtagtagagcagacgtttattatgaaaattatgaaccattagttaaagttggtcaaacagcaatttcaggagaaactctgctggct

SEQ ID NO: 277726 - DNA, 649 bp, Unknown
  Bacterial polypeptide expressing nucleotide sequence isolated from the Sargasso Sea
tatgtttagtaagatatttccaaaaattcacacagaaggatacaagtttatagtaatagctgtattcataactatcatttttctaattattaataattttttaggattaattggaattttactaacagtctgggtttattatttttttagagatccagaaagagtaatcattggagatgatagctatttagttagtccagctgatggagaagtgattaaagttgaagaggtagatggtccaaaagaacttggactagaaaataaaaaatttaaaaaaattagtatttttatgaacgtctttgattgtcatgtaaacagaacgccatgctcaggtattgttgaagatatattatataaaccaggaaagtttttaaatgcgtctttagacaaagcaagcgaagacaatgagagaaattattataaaattaaagataagcatgggaatgatattgtagtcgttcaaattgcaggattagttgcaagaagaatagtttgcgaaacaaataaaaatcaggaattaaatcaaggtgatagaattgggatgattagatttggtagtagagcggacgtttattatgaaaattatgaaccactagtaaaagtcggtcaaacagcaatttcaggagaaacacttctggctaaaaattaa

SEQ ID NO: 277727 - DNA, 390 bp, Unknown
  Bacterial polypeptide expressing nucleotide sequence isolated from the Sargasso Sea
ataaaaaaattaagaaaataagtatatttatgaatgtttttgattgccatgtgaatagaacaccttgtagcggaaaaatagaggaaattttatataaaccaggaaaatttttaaatgcctctctagataaagctagtgaggacaatgaaagaaattattataaaattaaagatgttcacaataatgatattgtggtggtacaaattgctggtttgatagctcgtagaatagtgtgtgaatctaataaagatcaggatttaaagcagggtgatagaataggcatgataaggtttggaagtagagcagatgtgtattatgaaaattatgaaccattagttaagataggccaaacttcaatagcaggggagactttactagctaaaaaataat

SEQ ID NO: 277728 - DNA, 643 bp, Unknown
  Bacterial polypeptide expressing nucleotide sequence isolated from the Sargasso Sea
atgagcaagaagtacttagggatacatcgtgaaggatggaagttttttatcatctttatcctaatttctttttttagtttttttataactaaaactatattcttaatttctctctctctttcaatatttactctctggttttttcgtgaccctgaaagatattttgactctcaggataatcaggtattaagtgcagcagatggtaaaatctgttttattggagaagacgctgcaccaatagaaacaggtattgatcagaaaatgaataaagtaagtatctttatgaatgttttcaatgtgcacataaatagaagtcctgtcagtggagagattgagaaaattatttataaaaatggaaaattcttcaatgcaagccttgataaagcaagtgaatataatgaaagaaactcaataattattaaaaataatgatgaaaagataattgtggtccaaatcgcgggtttaatagctagaagaatattaagttttatttcggaaaatgatattatggcaaagggagagagaattggacttattcgctttggttctagagtagatatatatttaccattaaattatcaaatcaaagtaaatcaaaatgatattgttactgctggtaaaacaattattgctgaaagataat

SEQ ID NO: 277729 - DNA, 646 bp, Unknown
  Bacterial polypeptide expressing nucleotide sequence isolated from the Sargasso Sea
atgaataaaatatttccaaaactacacaacgaaggatacaaatttattattatttttgcaatcgcaacaataattctctatttcctaaatggttttctaggcttcatagggttgatactaacaatttggtgttattatttttttagagatcctgagagaatttcaataggagatgataattatttaacaagtccagctgatggaatagtattacaagtgaaggatactaaaggtccaaaagaacttggattagaaggtaaacagatgaaaaaaataagcatttttatggatgtctttgattgtcatgtaaatagatcgccttgttcaggagcaatatcagaaatactttataaaccaggaaaatttttcaatgcatctttagataaagcaagtgaggataatgagaggaactattataaaataaaaaattctgacggaaatgaaataattgttgtgcaaatagcaggacttgttgcaagaagaattgtaacagaggtttcaaaagatgaactagtggagcaaggatcacgaataggaatgattagatttggaagtagagctgatatatattttgaaaattacactccacttgttaagattaatcaaaaaacaattgcaggtgaaaccctaattgcaaaaaaataaa

SEQ ID NO: 277730 - DNA, 574 bp, Unknown
  Bacterial polypeptide expressing nucleotide sequence isolated from the Sargasso Sea
atgttaaattcaatttttccaaaaatacacaaagaagggtataagtttttagctatttctattattgcaactttcgttgtactattattttcaaatctcttagggttactattcgtaatattaactgtttggatatattatttttttagagatccagaaagatattgcattaataacgatgattatttaacgagccctgcagacggtcttataacttcaatctctgaggagacaggtccaatagaactgcagttggaaaacacaacatttactaaagtaagtatttttatgaatgtttttaattgtcatgttaatagagtacctgcttcaggaaaggtagaagaaataaattacaaacctggaaaatttttaaatgcatctcttgataaagctagtaaagaaaatgaaagaaactactataaattaaaatgcagcaaaactaatgaggaaattattattgttcaaatagcaggtttaattgccagaagaatagtatgcgaggtagaacagggacaagatttgaaacaaggccagaggattggaatgatccgatttggaagcagagttgatttat

SEQ ID NO: 277731 - DNA, 589 bp, Unknown
  Bacterial polypeptide expressing nucleotide sequence isolated from the Sargasso Sea
tgttgtagtaacaatcattttatatttcttaaatggttttttaggcctcgtaggctttgttcttacaatttggtgttattattttttcagagaccctgaaagaattgctattggagatgaaacttatttaactagcccggctgatggtgaagtactacaggttttagaaaccaatggacccaaagaacttggattagaaaatagaaaatttaaaaaaattagtatatttatgaatgtatttgattgtcacgttaataggtcgccatgttcaggaaaagtttctgaaatactatataagccaggaaaattttttaacgcatcactagataaagcaagcgaagacaatgagagaaactattataaaataaaaaattcacatgatgaagatgtgatagtagtacaaatagcaggtctggttgcaagaaggattgtgacagaaacatctgtagatcaagagttgcagcaaggtacaagaataggaatgattagatttggaagtagagctgatatgtattttgaaaattacgacacactagtaaaagtaggtcaaaaaactatagctggagaaactttgatagctaaaaggtag

SEQ ID NO: 277732 - DNA, 226 bp, Unknown
  Bacterial polypeptide expressing nucleotide sequence isolated from the Sargasso Sea
aattgcaggtctaattgctagaagaattattactaatgttgacgttggcaaagagttaaaggccggtgaaatttttggattaataaggtttggaagtagagtagatgtttatttcccaatagagtcaaaggttaaaattttagttggccagacatctatagctggagaaactgttcttgcagagttagaagaaaaaaaaaaattaaaaaaaacgactaaaaaatga

SEQ ID NO: 277733 - DNA, 592 bp, Unknown
  Bacterial polypeptide expressing nucleotide sequence isolated from the Sargasso Sea
tatgtttagtaaggtatttccaaagattcacacagaaggatacaagtttatagtaatagctgtattcataactattattcttctaattattaataattttttaggtttaataggaatattgctaactatctgggtctattatttttttagagatccagaaagagtaatcattcgagatgatagttatttagtaagcccagctgatggcgaggttataaaagttgaagaggtagatggtccaaaagaacttggactagaaaataaaaaatttaaaaaaataagtatttttatgaatgtctttgactgtcatgtaaacagaactccatgttcaggaattgtagaagatattttgtacaaaccgggtaaatttttaaatgcatctttagataaagcaagtgaggataatgagagaaattattataaaattaaagataagcatggaaatgatattatacttgttcaaattgctggtttagttgcaagaagaattgtttgtgaaacaaataaaaatcaggaattaattcaaggtgatagaattgggatgattagatttggaagtagagcggatgtctattacgaaaactatgaacca

SEQ ID NO: 277734 - DNA, 298 bp, Unknown
  Bacterial polypeptide expressing nucleotide sequence isolated from the Sargasso Sea
ttataaaaatggaaaattcttcaatgcaagccttgataaagcaagtgaacataatgaaagaaattcaataattattgaaaataatgatgaaaagataattgttgtccaaatcgcgggtttaatagctagaagaatattaagttttatttcggaaaatgatattatgacaaagggagagaggattgggctaattcgctttggttctagagtagatatatatttaccattaaattatcaaatcaaagtacatcaaaatgatattgttgctgctggtaaaacaattattgctgaaagatag

SEQ ID NO: 277735 - DNA, 632 bp, Unknown
  Bacterial polypeptide expressing nucleotide sequence isolated from the Sargasso Sea
tatgtttagcaagatatttccaaaaattcacgctgaagggtataaattcctagttattgcaggaattataactatcattttttatatttttagcagcttcttaggtttacttggtttagttctaactatttgggtttactatttttttagagatccagataggattattattaatgatgacaattatcttgtaagtcccgcagacggagaggtgattaaggttgaagagtcagatggtccaaaagaacttggattagaaaataaaaagtttaaaaaaattagtatattcatgaatgtttttgattgtcatgtaaatagaactccatgtagtggaaaaattgaagaaattttatataaaccaggaaaattcgtaaatgcatctttagataaagcaagcgaagacaatgaaagaaattattacaaaatcaaagatagtcacggtaatgatgttgttgttgttcaaatagcaggattagttgcaaggagaattgtttgtgagtcgagcaaggatcaagatttaaaacaaggtgatagaattggaatgataagatttggaagtagagcagatgtatactatgaaaattatgaaccccttgttcaaattggtcaaacttcaatagctggagaaactt

SEQ ID NO: 277736 - DNA, 577 bp, Unknown
  Bacterial polypeptide expressing nucleotide sequence isolated from the Sargasso Sea
gtattgttacttttttctaagctacttggtctatttttaatgataattaccatctgggtttattatttctttagagatccagaaagatatccaataaatgatgatgcttttttagtaagtcctgccgatggattgataacagatatttctgaaaaaactggtcctattgaattacaattagaaaatacatcttatactaaaataagtatttttatgaatgtttttaactgtcatgtaaatagaacaccgctttctggaaaagtagaagagattaattataagcctggaaagtttttaaacgcttcgttagataaagcaagcgaagaaaatgagagaaattattataaaattaaatgtagcagatctaacgaagacattattattgttcagatcgcaggtttaattgctaggagaatagtatgtgaagttgaacaagggcaaagcttaaaacaaggagaaagaatcggaatgatacgatttggaagtcgagtagatatttattttaagaataaaaaagttttagcaaaaattgggcaaaacgtagtagcaggagaaagcttaatagcatctgaataat

SEQ ID NO: 277737 - DNA, 611 bp, Unknown
  Bacterial polypeptide expressing nucleotide sequence isolated from the Sargasso Sea
tatgcaatttaaatttcatactgaaggctggacatatattgtatcggtattaattttaataattataataatacctttttttaatattttaggtatctttttaattatattattaatttttatattattcttttttagagatccaaacagatgcgttcctaatgataattttattatttctcctgctgatggtttaatatcatatgttggtgaatctaaactacctattgatgcttctgatacaaaaattccatataatagaataagtatatttttaagtatttttgatgttcacgtcaacagaatgcctattagtggtaaaattaaaaaaattaattatcatgatggtaaatttattaatgcatcttatgataaatctagtgaagaaaatgaaagaaatgtaatttctatagagcatgataatcaaatattttatgttgttcaaatagctggattaattgctagaagaattgtttgtcaagttgatgtaaatcaagaattaaataaaggtgatagaataggtataataaaatttggcagtagagtagatttatatttacctaaggagtacaatattcttgtttctaaaggtcaaaaagtaatagctggag

SEQ ID NO: 277738 - DNA, 187 bp, Unknown
  Bacterial polypeptide expressing nucleotide sequence isolated from the Sargasso Sea
aatagcaggtttaatcgcaagaagaatagtttgcgaagtcgagcaaggacaaaaccttaaacaaggagatagaataggaatgatacgttttggaagtagagtagatatttattttaaaaataaaaaagttttagctaaaattgggcaaaacgtagtagcaggagaaagcttaatagcttctgaataa

SEQ ID NO: 277739 - DNA, 586 bp, Unknown
  Bacterial polypeptide expressing nucleotide sequence isolated from the Sargasso Sea
gccgcaactatagtcttatattttatccatggatttttaggttttgtaggttttgtattgtcaatttgggtttattatttttttagagaccctgataggatttcaattgatgacgacaattacctaacaagtccagcagatgggctggtgttacaagttttagaatcaaatggaccaaaagaacttgaacttgaaaataaaaaattcaccaaaataagtatttttatgaatgtttttgattgccatgtaaacagaactccttgtacaggaaaaatttcacaaattgtttataaacctggaaaattttttaatgcttctcttgataaagcaagtgaagaaaatgaaagaaattactacaaagttcaaaatagctctggtgaagatattattatagttcaaattgcaggattgattgctagaagaattgttaatgaatctcacgaaggacaagagcttaaacaaggagaaagaattggtatgataagatttggtagtagggctgatatttattttgaaaattataaaccattggtaaaagttaatcaaaaaactattgcaggagaaactttaatagcaaaaaaataac

SEQ ID NO: 277740 - DNA, 655 bp, Unknown
  Bacterial polypeptide expressing nucleotide sequence isolated from the Sargasso Sea
atgatagatatattgtttccgaagctgcataaagaaggttatagatttttagctatagccggcgttataacatttattattttactgatttctaatttttttgggataataagtttgattattacaatatgggtatattatttttttagagatcctgaaagattcccaattaatgatgaaaattatttattaagtccagcggatggagttatttcacaaattacagaattaaatggacctcaagaactaggcttagataataaaaaatttacaagagtcagtatttttatgaatgtctttgactgtcatgttaacagagttccatcttcgggaaagattacacaaatattttataaacctggagaatatataaatgcatccttagacaaagctagtgaaaaaaatgaaagaaattatgttaaaatggttagcaagaatggagaagaattaattttagttcaaatagcaggtttaattgctagaagaattgtatgtgaaaaaaaagaaaatgatgaaattaagcaaggagacagaattggaatgataagatttggtagcagagttgatttatattttgaaaattatcaactgatggtgaatacaaatcaaaaaactattgcaggtgaaactattttagcgagaaaaacaaaatgat

SEQ ID NO: 277741 - DNA, 652 bp, Unknown
  Bacterial polypeptide expressing nucleotide sequence isolated from the Sargasso Sea
atgtttaatacaatttttccaaaaatacataaagaaggctacaaatttttagctatttcaattattactacatttgttgtattacttttttcaaaatttataggttttattttaataattttaacagtttgggtatattatttttttcgtgatcctgagcgttatccaattaacgatgagtcttatttagtaagtccagctgatggattaattactgatgtatctgagagatctggaccagaggagttaagattggaaaataccacttatacaagagtgagcatatttatgaatgtttttaattgtcatgtgaatagaatacctacaaatggaaagattgaagaaatttattacaaacctggaaagtttttaaatgcatctttggataaagctagtgaagaaaatgaaagaaatttttataaaataaaatcaaataataataatgaagaaataattattgttcaaatagcaggattaattgcacgaagaattgtctgtgaggctgaacaaggacaagaattaaaacaaggcgataggattggaatgataagatttggcagtagggtagatttatactttaaaaataaaaaagttttagtaaagttaggacaaaatgtagtagctggtgagagcctaattgcatcagaataat

SEQ ID NO: 277742 - DNA, 513 bp, Unknown
  Bacterial polypeptide expressing nucleotide sequence isolated from the Sargasso Sea
attatttttttagagatccagagagaacaattataggagatgatagttacctagtaagccctgcagatggagaagtgattaaagttgaagaggcagatggtccaaaagaagttggactagaaaataaaaaatttaaaaaaataagtatttttatgaacgtctttgattgtcatgtaaacagaacaccgtgttcaggtattgttgaagatattttatacaaaccaggtaaatttttaaatgcatctttagataaagcaagcgaagacaatgagagaaattattataaaattaaagataaacacgggaatgatattgtagtcgttcaaatagctggactagttgcaagaagaatagtttgtgaaacaaataaaaatcaggaattaaatcaaggtgatagaattggtatgattagatttggtagtagagcagacgtttattatgaaaattatgaaccactagtaaaagttggtcaaacagcaatttcaggagaaacactgctggctaaaaattaat

SEQ ID NO: 277743 - DNA, 646 bp, Unknown
  Bacterial polypeptide expressing nucleotide sequence isolated from the Sargasso Sea
catgagtaaaatatttccaaaaatacacaatgaaggttacaaatttattattatttttgcaatcgcaactataattctctatttcctaaacggatttcttggtttttttggattggtattaactatttggtgttattatttttttagagaccctgaaagaacttcaataggtgatgacaattatcttacaagtccagctgatggagttgtgttgcaagtaatggatactaatggtccaaaagaattaggtttagaaaataaacaaatgaaaaaaataagtatttttatggatgtatttgattgccacgtaaataggtctccatgttctggagcaatatctgatatactttataaaccaggaaagttttttaatgcatctttagataaggcaagtgaagataatgagagaaattattataaaataaaaaattctgatggagaagatataattgttgtccaaatagcaggacttgttgcaagacgtattgtaacagaggtttctaaagatgagcttttagaacaaggttcaagattaggtatgattagatttggaagtagagctgatatatattttgaaaattacactcctttagtaaaagttgatcaaaaaactatagctggtgaaactttaatcgcaaaaaaataa

SEQ ID NO: 277744 - DNA, 652 bp, Unknown
  Bacterial polypeptide expressing nucleotide sequence isolated from the Sargasso Sea
atgtttaatacaatttttccaaaaatacataaagaaggctacaaatttttagctatttctattattgctacatttgttgtattacttttttcaaaatttataggttttattttaataattttaacactttgggtatattatttttttcgtgatccagagcgttactcaattaacgacgagtcttatttagtaagtccagctgatggattaattactgatatatctgagagatccggaccagaggaactaagattggaaaataccacatatacaagagtaagtatatttatgaatgtttttaattgtcatgttaatagaatacctacaaatggtaagattgaagaaatttattacaaacctggaaagtttttaaatgcgtctttagataaagcaagcgaagaaaatgagagaaatttttataaactaaaagcaaacaaaaataatgaggaaataattattgtgcaaatagcaggattaatcgcaagaagaattgtttgtgagactgaacaaggacaagaattaaaacaaggcgataggattggaatgataagatttggtagtagagttgatttatattttaaaaataaaaaagttttagtaaagttaggacaaaatgtggtagccggtgaaagcctaatcgcatcagaatgat

SEQ ID NO: 277745 - DNA, 452 bp, Unknown
  Bacterial polypeptide expressing nucleotide sequence isolated from the Sargasso Sea
tgcagatggagaggtaattaaagtagaggaagtagatggtcctaaagaacttaatttagaaaataaaaaattcaaaaaaataagtatctttatgaacgtttttgactgtcatgttaatagaacgccttgttcgggcacagtcgaagaaattttatataaacctggaaaatttttgaatgcttcattggataaagcaagtgaggataatgaaagaaattattataagttaaaagataaacatggaaatgatattattgtagttcaaatagctggattagttgctagaagaattgtttgtgaaacaaatcaaaatcaagagttaactcaaggtgaaagaattgggatgattaggtttggcagtagagccgatgtttattatgaaaattatgaaccacttgtaaaagttggtcaaacagcaatctctggggagactttgttggctaaaaattaat

SEQ ID NO: 277746 - DNA, 555 bp, Unknown
  Bacterial polypeptide expressing nucleotide sequence isolated from the Sargasso Sea
ttttaggatttattttgattgtgataacaatatgggtttattatttctttcgtgatcctgagcgtttttcaataaatgatgatacttttttagtaagtcctgctgatgggttgattactgatatctctgagagatctggacctgaagagctaagactggagaatacaacgtatacaaaaataagtatatttatgaatatttttaattgtcacgtcaatagaattccaacttctggaaaagttgaagaaatttattacaaacctggaaaatttttaaatgcttctttggataaagcaagtgaggaaaacgagagaaattattttaaaattaaaagtatttcaaacaatgaggagataataattgtgcaaattgccggattaatagcaagaagaattgtttgtgatgtcgaacaaggccaagatttaaagcagggtaatagaattggaatgataagatttggaagtagagttgacgtttattttaaaaataaaaaagtgttagcaaaattaggtcaaaatgttgtatcaggtgaaagcttaatcgcttcagaataat

SEQ ID NO: 277747 - DNA, 292 bp, Unknown
  Bacterial polypeptide expressing nucleotide sequence isolated from the Sargasso Sea
aaatggaaaattcttcaatgcaagccttgataaagcaagtgaatataatgaaagaaactcaataattattaaaaataatgatgataagataattgtggtccaaatcgcgggtttaatagctagaagaatattaagttttatttcggaaaatgatattatggcaaaaggagagagaattggacttattcgctttggttctagagtagatatatatttaccattaaattatcaaatcaaagtaaatcaaaatgatattgttgctgctggtaaaacaattattgctgagagataa

SEQ ID NO: 277748 - DNA, 208 bp, Unknown
  Bacterial polypeptide expressing nucleotide sequence isolated from the Sargasso Sea
aacgatattatagttgtacaaattgctggtttagtagcacgtagaattgtttgtgaatcaaataaagatcaagatctaaaacaaggtgacagaataggaatgattagatttggaagtagagcagatgtttattatgaaaattatgaacctcttgttaaaattggtcaaacggctatagctggagaaactttattagctaaaaaataat

SEQ ID NO: 277749 - DNA, 655 bp, Unknown
  Bacterial polypeptide expressing nucleotide sequence isolated from the Sargasso Sea
atgatagacattttgtttccaaaactacacaaagaaggctatagatttttagctatatcagccattttaacttttattttactattagtttctaattttttaggagtagtaagtttaattataacgatatggatattttatttttttagagatcctgaaagatttccaattaatgatgaaaattttttagtaagtccagctgatggagttatatcgcaaattaccgaaataaatgggccaatcgaactaggattggaaaataaaaagtttaccagagtaagcatttttatgaacgtttttgattgtcacgtaaatagaattccaatttcgggaaaaattgataaaatatattataaaccaggaagctacataaatgcgtcacttgataaagcaagtgaaaaaaatgagagaaattatgttaaatttaaaaatgcaaaaggagaagatttagttttggttcaaatagcaggactgatcgcaagaagaattgtttgtgacgtacaagaaaatgatgaaattaaacaaggagatagatttggaataataagatttggaagtagagtggatctatatttcgaaaattttcaattacttgttcagcaaaaccaaaaaacaattagtggagaaaccataatagcaaaaagaaaaaattaac

SEQ ID NO: 277750 - DNA, 574 bp, Unknown
  Bacterial polypeptide expressing nucleotide sequence isolated from the Sargasso Sea
aatgcaatataaaattcataatgaaggatgggtgtatttggttatcaccttaattatagctattatttttattcctttttttattatacttagttttatttttttctttttaagtttttttatttattatttttttcgagatccaataagatctgtacctgttgaagaattaatagtatcgcctgctgatggaacagttacttttattggtgaggttgatgcaccagaaatattaaattcagattcaaaatattttaaaataagtatttttttaagtatttttaatgttcatgtaaatagaataccatgtaatggaacaattaaaaaagtaaattatataaatggaaaattttttaatgcttcttttaataaatcaagtaatgagaatgaaagaaatgaaataattttaagaaatagtgataatgaagaatttttgattgttcaaattgccggattaatagcccgaagaatagtttgcaatataaaagaaaatcaagatgtttttcaaggtcatagatttggaataattaagtttggtagtagagtcgatttatttattcctaaaaaatataca

SEQ ID NO: 277751 - DNA, 244 bp, Unknown
  Bacterial polypeptide expressing nucleotide sequence isolated from the Sargasso Sea
tccattggtgcggtgcagatagctggattggtggcaagaagaattgtttgttatctagaggaagggcagcaagttcttgcgggggagcgatttgggctcatacgcttcggcagcagggttgatatttatcttccctccggtgtcatgccacaagtcattgttggtcaaaggtgcattgctggcgaaacagtattagctgatcttagttcagacgaggtaagtagaattggtgaaatacgctaac

SEQ ID NO: 277752 - DNA, 649 bp, Unknown
  Bacterial polypeptide expressing nucleotide sequence isolated from the Sargasso Sea
tatgtttagtaagatatttccaaaaattcacacagaaggatacaagtttatagtcatagctgtattcataactataatttttctaattattaataattttttaggattaataggaatattactgactgtttgggtttattatttttttagagatccagaaagaacaattataggtgatgatagttacctagttagtcctgcagatggagaagtgataaaagttgaagaagtggatggaccaaaagaacttggtctagaaaataaaaaatttaaaaaaataagtatttttatgaatgtctttgattgccatgtaaacagaacaccgtgctcaggtattgtagaagacatattgtataaaccaggtaaatttttaaatgcatctttagacaaagcaagtgaacacaatgagagaaattattataaaattaaagataagcatgggaatgatattgtagttgttcaaattgcaggattagttgcaagaagaatagtttgcgaaacaaacaaaaaccaggaattaaatcaaggtgatagaattggaatgattagatttggtagtagagcagacgtttattatgaaaattatgaaccactagttaaagttggtcaaacagcaatttcaggagaaacactgctggctaaaaattaa

SEQ ID NO: 277753 - DNA, 649 bp, Unknown
  Bacterial polypeptide expressing nucleotide sequence isolated from the Sargasso Sea
atgtttagtaaaatatttcctaaaattcacgcagaaggttataaatttttggttatagctggaataattactattgtcttttatagttttagtgattttttaggattgataggtttagtcttatctatttgggtttattatttttttagagatcctgagagagtaataattgagaatgataattatctggtaagtcctgctgacggtgaggttataaaagtcgaggaagttgacggtccaaaagaacttgggttagaaaataagaaatttaagaagataagtgtttttatgaacgtttttgattgccatgtaaatagaaccccatgtagtggaataatagaggaaattttatacaaaccaggaaaatttttaaatgcttcacttgataaagctagtgaggataatgaaagaaattattttaagattaaagataatcacaataatgatatcattgtagttcagattgctggtctcgttgcaagaagaatagtttgtgaatctaataaagatcaaaaattaaatcaaggagatagaattggaatgattagatttggaagtagagcagatgtttattatgaaaactatgaacctttagttaaaattggtcaaaaagctatttctggagaaacattgttagctaaaaaataaa

SEQ ID NO: 277754 - DNA, 549 bp, Unknown
  Bacterial polypeptide expressing nucleotide sequence isolated from the Sargasso Sea
tatgactaagatttcttttattaagtttcaaaatattctaaaatcctattggctattttttttaccacaccatttattttctagatttacatatatcgttacaagaacttctcatccattgactgggtacttaataaaattatatataaagattttcaaggttaacatgaatgaatgtatagaatcagatataagtaaatataaaactttttgtgatttctttactagaaaattaaaaccaggtattcataaaatagacaaatcaaatcagtccattgtctcttcatgtgatggcaaaatcttagaatttggaaatatcaaaaatgattctattgtacaagttaaaggaaaattaattaagatagcagaattactagataatgataattccagtataaaaagtttcgaacatggatcttttgcatcaatatatttatccccaaaagattatcatcgtgtgcatatgccatataaaggcaagttatcaaaaaacatacatgtacctggaagattatatagtgttgcaaaacatgcagtaacttcaatcaa

SEQ ID NO: 277755 - DNA, 535 bp, Unknown
  Bacterial polypeptide expressing nucleotide sequence isolated from the Sargasso Sea
atgtttagtaagatatttccaaagattcacactgaaggatacaagtttatagtaatagctgtattcataactatcatttttctaattattaataattttttaggattaataggaatattattgactgtctgggtttattatttttttagagatccggagagaataattataggagatgatagttatctagttagtcctgcagatggagaagtaattaaagttgaagaggtagatggtccaaaagaacttggactagaaaataaaaaatttaaaaaaataagtatttttatgaacgtctttgattgtcatgtaaatagaacgccgtgctcaggtattgttgaagatattttatataaaccaggtaaatttttaaatgcatctttagataaagcaagcgaagacaatgagagaaattattataaaataaaagataaaagcggaaataatgtaattgtagttcaaatagcaggactagttgcaagaagaattgtttgtgaaacaaacaatggtcaagatctaaatcaaggagatagaa

SEQ ID NO: 277756 - DNA, 586 bp, Unknown
  Bacterial polypeptide expressing nucleotide sequence isolated from the Sargasso Sea
tttgtggttgggggaatactgacagcatggtgtgcgtactttttccgtgatcctgtcagacacacaccgatacgtgaaggattggttataagtcctgctgatggcattgtgcagatgatttcaaaggctgtacccccaagcgaagtggagatggaaatcgaagcattgacgcgaattagtatattcatgaatgttttcgatgttcacgtaaatcgctcgcctgttgatggtcaaatttcaggtctgggatatcgtcccggagcattcttaaatgcctcgttggataaggcgagtgaagagaatgagcgccaagcggtcaagataacgacggcagatggaatggagatcgtattagtgcaaattgccggtttagttgcacgccgaatactttgctgggtggaacgcgaacagccaatccgtgttggtgagcgtttcggtatgataagatttggcagtcgtgtcgatgtttatctgcctgagggagtgtcgcctttggtcgttgtcggtcagaaagctgtggctggtgaaaccgtattggcggatatgaagtcggatgaagcacaacgtaaaggaaacgctcgctgat

SEQ ID NO: 277757 - DNA, 646 bp, Unknown
  Bacterial polypeptide expressing nucleotide sequence isolated from the Sargasso Sea
catgagcaaaatatttccaaaaatacacaatgaaggatacaaatttattattatttttgcaatcgtaactataattctctatttcataaacggatttctgggttttataggattggtgttaacaatttggtgttattatttttttagagaccctgaaagaacctcaataggtgatgataactatcttacaagtccagctgatggcgttgtactacaagtaatggatactaatggtccaaaagaattaggtttagaaaataaacaaatgaaaaaaattagtatttttatggatgtctttgattgccatgtaaataggtctccatgttctggagcaatatctgagatactttataaaccaggaaagttttttaatgcatctttagataaggcaagtgaagataatgaaagaaattattataaaataaaaaattctgatggagaagatataattgttgtccaaatagcaggacttgttgcaagacggattgtaacagaagtttctaaagatgaacttttagaacaaggttcaagaataggaatgattagatttggaagtagagctgatatatattttcagaattatacacctttggtaaaagttgatcaaaaaactatagctggtgaaactttaatcgcaaaaaaatga

SEQ ID NO: 277758 - DNA, 506 bp, Unknown
  Bacterial polypeptide expressing nucleotide sequence isolated from the Sargasso Sea
catgatagataaaatatttccaaaagttcataatgagggatacagatttatagtaatatttatagccacaaccattatcctgtattttattgatggatttttaggttttgtaggatttattttaacaatatggtgttattatttttttagagacccagatagaatttcaattgaagatgaaaattatttgataagcccagcagatggagaagttttgcaagtgttggaaacaaatggaccaaaagaacttgggcttgaaaataataaatttcaaaaaattagcattttcatgaatgtgtttgattgtcatgttaatcgaacaccatgtagtggaactgtttcagaaattttatataaacctggtaaattttttaatgcatcattagataaatctagtgaagagaatgaaagaaattattatagaattaaaaatatctcaggtgaagaaatagtagtagttcaaatagcaggtttaattgctcgaagaatagtcactgatgtttcaa

SEQ ID NO: 277759 - DNA, 649 bp, Unknown
  Bacterial polypeptide expressing nucleotide sequence isolated from the Sargasso Sea
tatgtttaacacaatattcccaaagatacacaaagaaggatacaaatttttagctatttcaattttagtaaccttcattattttatttttttcaaaatttcttggatctgtatttatcttaataacattttgggtatattatttttttagagacccagatagatattctatcgaggatgacaattatctagttagtcctgcagatggcttaattactgatatatcagaaaaatctggaccagaagagttaagattagaaaatactacttttacaaaaataagtatttttatgaatgtatttaactgtcatgtaaacagagttccatcctcaggcaaagtggaagaaattttttataaaccaggaaaatttttaaacgcttctttagataaggcaagtgaagaaaacgagagaaattattttaaagtaaaattaaataatggggaagaaattataattgtacaaattgcaggattaattgctagacgaattgtttgtgaggtggaacaaggacaagaattaaaacaaggtgacagaataggtatgattagatttggaagtagagtcgacatttattttaaaaataaaaaagttttagctaaacttgggcaaaacgtagtagcaggagaaagcttattagcttccgagtaa

SEQ ID NO: 277760 - DNA, 679 bp, Unknown
  Bacterial polypeptide expressing nucleotide sequence isolated from the Sargasso Sea
ttgctttttatacccatcaatcgagcaggttggccctttattctattattttttatagtggctgttggcctattcctagcctcaccgtatttaggcattataggctttatacttacggtttggtgtatatatttttttagggacccctcaagagttacgcccaaacggcctggactagtgattagcccagctgatggtattgttcaaaaaatatctactgttacacctccaagggagttgcaactagggatagatagtatgaagcgagtttcaatttttatgaatgtttttgacgtacacgtgaatagaataccaatctccggcaccattacccagttaacatactgtaagggtaagttcttcaatgcgtccctagataaggctagtgagtttaacgaacgcctagctataactttgcaaactaatgaaaacattaatattggttttgtacaaattgctggattagtagcacgaaggattaaatgtaatttaaatgaaaatcagtcagttaatacgggcgaaaggtttggtataattcgatttggcagcagagtagatgtatatttacccctatccacaacaatcttttgcgttaagggccagaaaacagtagctggtgaaacagttatagcagactttgatagtaaagaggaaagccgtttaggagacatgatttaga

SEQ ID NO: 277761 - DNA, 634 bp, Unknown
  Bacterial polypeptide expressing nucleotide sequence isolated from the Sargasso Sea
atgtttaatacaatattccctaaaattcataaagaaggttataaatttcttgcaatttcgatcttagctaccttcatagttttaattttttcaaaatttttgggtctaattttaactctaatcagtgtttgggtttattacttttttagagatcctgatcgccaatctatcaacgatgatcattatctagtaagcccagctgatggattaattactgatatatctgagatatctggtccagaggaacttaagctagaaaatacaacttttacaaaaataagtatttttatgaatgtttttaactgtcacgtgaacagagtacctacgtcttgtaaagtagatgaaatatattataaaccaggaaaatttttaaatgcatcacttgataaagcaagtgaggaaaatgagagaaattattttaaaattaagtgtaatttagataaagaggagatagtaattgtacaaattgcagggttaatagctagaagaatagtttgcgaggttgagcaaggacaagaactaaaacaaggagacaggattggcatgataagatttggaagtagagtagatgtttattttaaaaacaaaaaagttttagataaaattggacagaatgtagtcgcaggagaaagtt

SEQ ID NO: 277762 - DNA, 286 bp, Unknown
  Bacterial polypeptide expressing nucleotide sequence isolated from the Sargasso Sea
ggacaatgagcgcaacggcctcgtgatcgaaaccggccacggattgatcggcgtcgtgcagatcgcgggcctcgtcgcccgccggatcgtctgcttttccgagaacggcgacgttcttgatgccggcgagcgcttcggccttatccgcttcggttcgcggctcgacgtctacctgccgaccaccgccacaccgcgcgttgccgtcggccagatggcgacggccggcgagaccgttctggcgggcttcggcggttttgatcttccgaccgtcggacggaaaatctga

SEQ ID NO: 277763 - DNA, 574 bp, Unknown
  Bacterial polypeptide expressing nucleotide sequence isolated from the Sargasso Sea
attgaataaattattatctataaccaaagagaaaatccaagcatattggctatattttattccacactacttgttctcaagattgacatacatcataacaaggacccgacatccacttacaacatttctaattagattttatataaagttttttaaagtcaacatgcaagaagctagtaaacaaaaaccagatgattataaaactttttgtgaattttttactagaaagcttaaaccgggtatacataaaataaataaaagtaaaaatgcaattgtatcatcttgtgatggtaaaattcttgagtatggaaaaatcaaagataataagtttttacaagttaaaggaaaaacaatatcaataaatgaaattatgttttatgataaaaaaattcaaaatcaatatatcgacggttcatttgtaactatttatctatccccaaaagattatcatagagtacatatgccatttgatggtaagcttgaaagaactatccatataccaggaagattatttagcgttgcaactcatgcagtaaaacaaattaagaatttatattgtaaaaacgaaagatta

SEQ ID NO: 277764 - DNA, 613 bp, Unknown
  Bacterial polypeptide expressing nucleotide sequence isolated from the Sargasso Sea
atgagtaaaatatttccaaaaatacacaatgaaggatacaaatttattattatttttgcaatcgcaaccataattctttatttgataaatggatttcttggttttgtaggattggtattaaccatttggtgctattatttttttagagaccctgaaagaacttctataggagacgaaaattatcttacaagtccagctgatggagttgtattacaagtaatggatactaatggtccaaaagaactaggtttggaaaataagcaaatgaaaaaaataagtatttttatggatgtgtttgattgtcatgtaaataggtctccatgttctggagcgatatctgagatactttataaaccaggaaagttttttaatgcatctttagataaggcaagtgaagataacgagagaagttattataaaattaaaaattctgatggtgatgatataattgttgtccaaatcgcaggacttgttgcaagaagaattgtaacagaagtttctaaagatgagctcgtagaacaaggttcaagaataggaatgattagatttggaagtagagctgatatgtattttgaaagttatactcctttggttaaagttgatcaaaaaacta

SEQ ID NO: 277765 - DNA, 652 bp, Unknown
  Bacterial polypeptide expressing nucleotide sequence isolated from the Sargasso Sea
atctgcgggttcgttgcaaatctgaaactgcccccgttcattctacagagactgatccgtctcttctgtcacttttatcctatcgacctcaacgaagcggaacaatctgtcgaagattttgattgtttcaatgatttttttactcgtaaactccggcaaggggtcaggcctcttgcagaagatcccaacgcattgctttgtcctgtggatggtgcattaggagaatatggaatcattcgtgacgggaatctcctccaggccaaaggattggagtatcggttagaagacttgcttcacgatcctgagagaaaagatctttacgatggaggtcattacatcacgctttacctggcgccccataattatcaccggatccacagtcctgccgagggtcaggttagggaatttgcctacgttcccggagatctgtggactgtgagtgaactgggagtggtgcatgttcccggtttgtttgccaggaatgagagaatcctgacataccttcaaaccaaagccggtgaatgtgcaatcattaaagtaggggctacagtggtaggaaaaattcgtgtaagctatcacgatcaagtttccaatcttcctggagcaacgttctctttgagccgcctggatactccatggcatgtgaaagagg

SEQ ID NO: 277766 - DNA, 649 bp, Unknown
  Bacterial polypeptide expressing nucleotide sequence isolated from the Sargasso Sea
atgtttactaaaatatttccgaaaattcacgcagagggttataaatttttagttatagccgggataattactgtattgttttatacttttagtgactttttaggtcttataggattagttttaactatttgggtttattatttttttagggatcctgagagagttataattgatgatgacaattatcttgtaagtcctgcagatggagaaataataaaagttgaagaagttgatggacctaaagaacttggtttagaaaataaaagattccaaaagataagtgtcttcatgaatgtttttgattgccatgtaaacagaacaccatgtggtggaaaaattgaagaaattttatataagccaggaaaatttttaaacgcttcattagataaagcaagcgaagacaatgagagaaattatttcaaaattaaagacaatcaaaataacgatatagttgttgttcaaatagctggtttagtagctcgtagaattgtctgtgaatctaataaagatcaacaacttaaacaaggtgatagaattggaatgataagatttggaagtagagcagatgtatattatgaaaattatcaaccattagtaaaagttggtcaaaaagctatttctggagagacattgttagctaagaaataaa

SEQ ID NO: 277767 - DNA, 652 bp, Unknown
  Bacterial polypeptide expressing nucleotide sequence isolated from the Sargasso Sea
tatgtttaacacagtttttccaaaaattcataaagaagggtacaaattcttagctatttcgataattgcaacttttataattttacttttttcaaatttttttggattattttttattgtaatatctatatggatttattattttttcagagatccagatagattttcaattaatgacaatgattttttggttagtccagctgatggaaagataatctctataaatgaacaaaaagggcctatggaattacaactagaaaatacaacatttaccaaagtaagtatttttatgaacgtatttaattgtcatgtaaatagaacacctctatctgggaaagttgaagaaataaattacaaacctggaaaatttttaaatgcatcattagataaagcaagtgaagataatgaaagaaattattacagaattaaatgcaacgtttctggtgaagaaattattatggttcaaatcgccggtttaatagcaagaagaatagtttgcgaggtagaacaaggtcaaaaacttgctcaaggagagagaattggaatgatacgttttggcagccgagtggatattttttttaaaaataaaaagatcttagcaaaaataggacagaatgttatagcaggggaaagtttaatagcttctaagtaa

SEQ ID NO: 277768 - DNA, 445 bp, Unknown
  Bacterial polypeptide expressing nucleotide sequence isolated from the Sargasso Sea
ttgataactgatatctccgaacgaactggacctatggaattacaactagaaaacacgagttatacaagagcaagtatttttatgaatgtatttaattgccacgttaacagaatacccctagcaggaacaattgaagagataaattataaacctggaaaatttttaaacgcttcattagataaagctagtgaagaaaatgagagaaattattacaaaattaaatgtagtaaatcaggtgaagaaattattattgttcaaatagcaggattaattgcaaggagaatagtttgtgaagttgagcaaggacaaaatttagaacaaggcgatagaataggtatgatacgttttggaagtagagtagatatttattttaagaataagaaagtcttagctaaagttggtcaaaatgtagtagcaggagaaagcttaatagcctctgaatgat

SEQ ID NO: 277769 - DNA, 598 bp, Unknown
  Bacterial polypeptide expressing nucleotide sequence isolated from the Sargasso Sea
aatgcaatataaaattcataatgaaggatgggtgtatttagttatcactttaattatagctattatttttattcctttttttattatacttagttttatttttttctttttaagtttttttatttattatttttttcgagatccaataagatctgtacctgttgaagaattaatagtatcgcctgctgatggaacagttacttttattggtgaggttgatgcaccagaaatattaaattcagattcaaaatatattaaaataagtatttttttaagtatttttaatgttcatgtaaatagaataccttgtaatggaacaattaagaaaattaattatataaatggaaaattttttaatgccacttttgataaatcaagtgatgaaaatgaaagaaatgaaataattttaaaaaatagtgataatgaagaattgttgattgttcaaattgctggattaatagcacgaagaattgtttgcaatataaaagaaaatcaagatgtttatcaaggtcatagatttggaataattaagtttggcagtagagttgatttatttattcctaataaatataaacctttagttattgagggacaaaca

SEQ ID NO: 277770 - DNA, 531 bp, Unknown
  Bacterial polypeptide expressing nucleotide sequence isolated from the Sargasso Sea
tattaacaatttgggtttactattttttcagagatcctgagcgaacttcaattgatgatgataactatttaacgagtcctgcagacggtttagtcctacaagtattagaaacaaatggaccaaaagaacttggactagaaaataaaaaatttacaaaaataagtatttttatgaacgtttttgactgtcatgtaaacagaacaccttgctcaggtaaaatatcggagattatttataaacctggtaaattttttaatgcatcacttgataaggctagtgaagaaaatgaaagaaattattataaaattaaaaatagttctggagaagatgttattgtagttcaaatagcaggcttaattgcaagaagaattgtaactgaaacttctgaaaatcaagatcttaaacaaggagaaagaattggcatgatcagattcgggagtagagctgatgtttactttgaaaattacgaacctttagtaaaagtaaatcaaaaaacttttgccggagaaactttgatagcaaaaaaataaa

SEQ ID NO: 277771 - DNA, 649 bp, Unknown
  Bacterial polypeptide expressing nucleotide sequence isolated from the Sargasso Sea
atgtttagtaagatatttccaaagattcacacggaaggatacaagtttatagtaatagctgtattcataactatcatatttctaattattaataattttttaggattaataggaatattgttaactgtttgggtttattatttttttagagatccagagagaacaattataggagatgatagttaccttgttagtcctgctgatggagaagtaattaaagttgaagaagttcatggtccaaaagaacttggactagaaaataaaaaatttaaaaaaataagtatttttatgaacgtctttgactgccatgtaaacagaacaccgtgctcaggtattgttgaagatattttatataaaccaggtaaatttttaaatgcatcattagataaagccagtgaagacaatgaaagaaattattacaagataaaagataaccatggaaatgatattattgttgttcagatagcagggttagtagcaagaagaattgtttgcgagactaataataatcaacaattaaaccaaggtgacagaattgggatgattagatttggtagtagagcagacgtttattatgaaaattatgaaccactagttaaagttggtcaaacagcaatctctggagaaacattgctagctaaaaattaat

SEQ ID NO: 277772 - DNA, 640 bp, Unknown
  Bacterial polypeptide expressing nucleotide sequence isolated from the Sargasso Sea
attgaataaaatattatctacgacaaaagagaaactacaagcatattggctatattttattccacactacttgttctcaagattgacatacatcataacaaggactcaacatccacttacaacatttctaattagattctatataaagttttttaaagttaacatgcaagaagctagtaaacaaaaaccagatgattataaaacattttgtgaattttttactagaaagcttaaaccgggtatacataaaataaataaaagtaaaaatgctattgtgtcctcttgtgatggtaaaattttagagtatgggaagattaaagataataagtttttacaagtaaaaggaaaaacaatatcaataaatgaaattatgttttatgataaaaaaattcaaaatcaatatatcgatggttcatttataactatttatctatccccaaaagattatcatagagtacatatgccattcgatggtaagcttgaaagaactatccatataccaggaaggttatttagtgttgcaactcatgcagtaaaacaaattaagaatttatattgtaaaaatgaaagattagtctgtaattttaataatcttgattcaaaaattgcagtcatttttgttgccgcaataaatgtttct

SEQ ID NO: 277773 - DNA, 536 bp, Unknown
  Bacterial polypeptide expressing nucleotide sequence isolated from the Sargasso Sea
agagtatcggttagagaccctgcttcaggatcctgagagaaaagatttttacgatggaggtcattacatcacgctttacctggcgccccataattatcatcggatccacagtcctgccgaaggtcaggttagggaatttgcttatgttcccggagatctatggacggtgagtgaattgggagtgatgcatgttcccgggttgtttgccaggaatgaaagaatcctgacgtaccttcaaaccaaagcgggtgaatgtgcgatcataaaagtaggggctacagtggtgggaaaaattcgtgtatgctatcacgatctattttccaatcttcctggagcaacgctttctttgaaccgcctggagactccatggcatgttgaaagaggcggggaaatcggagtctttgaattgggttccacggtgatttgcctgtttcagcccgggcaggtggaattcgattccctcaatttgggccagaccgtttatctgggtcagtctctgggaaagattttagataatacaacttcattgaactaat

SEQ ID NO: 277774 - DNA, 190 bp, Unknown
  Bacterial polypeptide expressing nucleotide sequence isolated from the Sargasso Sea
ttcaatagcaggcttagttgctagacgcattgtatgtgaggtaagcaaagatcaagaattaaaacaaggcgatagaataggaatgataaggttcggaagcagagttgatttattttttaataataaaaaaattttagctaaagttggtcaaaatgttgttgctggagaaagtttacttgctgtagaataa

SEQ ID NO: 277775 - DNA, 538 bp, Unknown
  Bacterial polypeptide expressing nucleotide sequence isolated from the Sargasso Sea
gttggagtatcgattagaagacctgcttcaggatcctgagagaaaaaatctttataatggaggtcattacatcacgctttacctggcgccccataattatcaccggatccatagtcctgccgaaggtcaggttagggaattttcttatgttcccggagatctatggactgttagtgaactgggagtgatgcatgttcccggtttgtttgcaaggaatgagagaatcctgacgtaccttcaaaccaaagccggagaatgtgcgatcataaaagtaggggctacagtggtaggaaaaattcgtgtatgctatcacgatcaagtttccaatcttcatggagcaactttctctttgagctgcctgcagactccatggcatgttgaaagaggcggggaaatcggggtctttgaattgggttccacggtgatttgcctgtttcaaccggggcaggtggaattcgattccctcaatttgggccagaccgtttatctgggccagtctctgggaaagatttgggataatacaacttcattgaactaa

SEQ ID NO: 277776 - DNA, 382 bp, Unknown
  Bacterial polypeptide expressing nucleotide sequence isolated from the Sargasso Sea
atgaataaagtaagtatctttatgaatgttttcaatgtgcacataaatagaagtcctgttagcggagagattgagaaaattatttataaaaatggaaaattcttcaatgcaagtcttgataaggcaagtgaacataatgaaagaaattcaataattattaaaaataatgatgaaaagataattgttgtccaaatcgcgggtttaatagctagaagaatattaagttttatttcggaaaatgatattatggcaaagggagagaggattggactcattcgctttggttctagagtagatatatatttaccattaaattatcaaatcaaagtaaatcaaaatgatattgttactgctggtaaaacaattattgctgaaagataat

SEQ ID NO: 277777 - DNA, 670 bp, Unknown
  Bacterial polypeptide expressing nucleotide sequence isolated from the Sargasso Sea
aatgcaatttaaaatacataatacaggatgggtttacttcgttatctctattttgttagctataatttttactcctttttttaatattattgctatatttttttttattttatctattttcattttttatttttttagagaccccgatcgtgcaattccccatgaagatgtaattatttctcctgctgatggtaaagttacttatgttggcaaatcagaatcaccaatagatttaaataaaaaaaatgaattttgtaaagtaagtatttttttaaatatttttaatgtacatgttaatagaattccatgtaatggtttaatacaaaaaattaaatattttcatggtaagtttcttaatgctactcttaataaaacaagtgaattaaatgaaagaaatataatcttaattaaaaaaaataatgatgatataattatagtatctcaaattgctggtttaattgctagaagaattatttgtgatattaatgaaaatcaagaagtttttaaaggtaatagatttggaataataaaatttggtagtagagtagatatatatatgccattaaattataaacctttagttgctgtaggacaaattgtcttgggaggcgaaactattttagccaatccaaataatattaaagaaattacaaaatctaatatcaattaa

SEQ ID NO: 277778 - DNA, 556 bp, Unknown
  Bacterial polypeptide expressing nucleotide sequence isolated from the Sargasso Sea
gattttttaggtttaattggttttgttttaacaatctgggtttattatttttttagagatcctgatagagtaattatcgaaaatgataattatttagttagtccagctgatggtgaaattttaaaagttgaggaggttgatggtccaaaagaattaggtttagaaaataaaaaatttaacaaaataagtgttttcatgaatgtttttgattgtcatgtgaacagaactccatgtgcaggtaaaatcgaggaaattttatataagcctggaaaattttttaatgcttctcttgataaagcaagtgaagacaatgagagaaattattttaagattaaagatacaaatggcaattacatcattgtagttcaaatagcaggtcttgttgcaagaagaatagtttgtgagtccaataaagatcaagaattaaaacaaggtgatagaattggaatgattagatttggaagtagggcagatgtatattacgaaaattaccaaccattagtaaaagtaggtcaaaaagctatttcaggtgaaacactattagcaaaaaaataaa

SEQ ID NO: 277779 - DNA, 640 bp, Unknown
  Bacterial polypeptide expressing nucleotide sequence isolated from the Sargasso Sea
gatgaggttagctccagagggaaatattattgtttatcctttatttattattttactttttacatgtggttatggctacgtatttgattttgaaagtatatttgtttttataattatattggtcgcattatttttattttgcttgaacttctttagagatccttttagaaatattccaaatgatgaaaatatcataatctccccagcagatggaaaggttataaagattaaagattttgaggatcctaatacccatgagaaactcaaattaatttcaatatttttaagtgtatttaacgttcattcaaataggatgcctgttgatggaaaatttaagagcgttaagtatgttaaaggtgatttcttagctgcatttgaccacaaagcttcagatcaaaatgaaaggactgagattactatagaaactaaatttggtagtatgattgttaagcaaatagctggtttagttgcaagaagaatattatgttatgcaaatgaaaatgaaagaatgtctgcaggtgataggttaggatttattaggtttggttctagaactgatattatcttacctgaaaatattgatattaagattggattaaatcaaaaagtatatggtggtgaaactataataggcacttat

SEQ ID NO: 277780 - DNA, 690 bp, Unknown
  Bacterial polypeptide expressing nucleotide sequence isolated from the Sargasso Sea
tgatagagaaaattctggttccaattcaccctgcaggttatccatttattggtgcgttcctaattttgacttttatacttggcttgtttctaggttcgacaagttttgttctgggcttagttttatcttgttggtgtatatacttttttcgcaatccaaagcgctacacccctcaaagagaagatttggtaatagctcctgcagacggaagagttttatcagttttagttatgaacccgccgttagaaatgggtttgcgaggcaacaactggaccagaatctccatatttatgaacgtattcgatgtccacgtaaatcgatctcccgtagaaggaaaagttattcacaaatattactttccaggatcttttgtaaatgcaagcctagacaaagcaagcgaaaaaaatgaacgagcatgcctaatttttgagaataaatctggtaaaactatcggagtggttcaaatagcgggactaatagccagaagaatattatgtaaagctgatgaaggtgaaatattactagctggccaaatatttggtataattcgttttggcagtagagttgacgtctggttgccaaatccagtcaaattaaatgtattagtgggccaacgaacgatagcaggagaaacaattctcgctgattttagatcctcagacgagcttggagaagtgagggtagaatgag

SEQ ID NO: 277781 - DNA, 448 bp, Unknown
  Bacterial polypeptide expressing nucleotide sequence isolated from the Sargasso Sea
attatttctcccagcggatggtaaaatagtcaaagttgtagaaattattgatcctgaaattggtgatgctaaattagtttctatatttctaaatgtatttaatgtacatgtaaatcgtgtaccaattgatggtaaagttatctctagtgaacacagatcaggtaaatttttagctgcatttgatcataaagcatcagatgagaatgaacaagttgttacaataatttcacataaaactggagattataaagtaaaacagatagcgggtttaattgctagaagaataatatgttacgctaaagaaggtttaaagctacataaaggtggtaggcttggttttattcgatttggaagtaggactgatttaattatgccttcaaatattaaattaaacgtaaaattaggtgaaaaagttaagggtggagaaacaattatcggtgaaatatga

SEQ ID NO: 277782 - DNA, 646 bp, Unknown
  Bacterial polypeptide expressing nucleotide sequence isolated from the Sargasso Sea
atggataacatttttccaaaattgcacaaagaaggctataaatttttagccatatcaataattataacgattattatttggtttttctctaatttcttagcaaccgttatgttgttaattactatttgggtgtactatttttttagagatcctgatcgtgtttctatcaatgacaactcttttttagtaagtcctgccgatggacttataacagatatatctgaaaggaacggtccagaggagttaggcctagaaaataaaaaatatacaagaataagtatttttatgaatatttttaattgccacgttaatagatcacctgttgaaggtaagattgaagaaattttctataagccaggaaaattttttaatgcttctttagataaagctagtaaagagaatgaaagaaattactataaaattttatctattaaaggtgaagaaataattattgtgcaaattgctggtttaatagccagaagaattgtttgtgaggtaagcaaagagcaaaatctgaaacaaggagagagaataggcatgataaggtttggtagtagagtagatattttttgtagcaataaaacaatactagcaaaacttggtcaaaacgtaacagcgggagaaagtttattagctaaagaataat

SEQ ID NO: 277783 - DNA, 467 bp, Unknown
  Bacterial polypeptide expressing nucleotide sequence isolated from the Sargasso Sea
ttatttagtaagtcctgcggatggtgaagtaattaaagttgaggaagtggatggtccaaaagaactaggattagaaaataaaaaatttaaaaaaataagtatttttatgaatgtctttgattgccatgtaaatagaacaccgtgttcaggtattgttgaagatattttatataaaccaggtaaatttttgaatgcatctttagataaagcaagtgaagacaatgagagaaattattacaaaattaaagataaacatgggaatgatattatagttgttcaaattgcaggtttagttgcaagaagaattgtttgtgaaacaaataaaaatcaggaattaaatcagggtgatagaattgggatgattagatttggtagtagagcagatgtttattatgagaattatgaaccattagttaaagtcggccaaacagcaatttcaggagaaaccttgctagctaaaaattaat

SEQ ID NO: 277784 - DNA, 614 bp, Unknown
  Bacterial polypeptide expressing nucleotide sequence isolated from the Sargasso Sea
aggctataagtttatagtaatagccgtattcataactatcatttttctaattattaataattttttaggattaataggaatattattaactatctgggtttattatttttttagagatccagagagaacaattataggagatgatagttacttagtaagccctgcagatggagaagtgattaaagttgaggtggtagatggtccaaaagaacttggactagaaaataaaaaatttaaaaaaataagtatttttatgaacgtctttgactgccacgtgaatagaacgccatgctcaggtactgttgaagatattttatataaaccaggtaaatttttaaacgcatctttagataaagcaagcgaagacaatgaaagaaattattataaaattaaagataagcatggaaatgatattgtcgtcgttcaaatcgcaggattagttgcaagaaggatagtttgtgaaacaaataaaaatcaggaattaaatcaaggtgatagaattgggatgattagatttggtagtagagcagacgtttactatgaaaattatgaaccacttgttaaagttggtcaaacagcaatttcaggagaaacactgctggcaaaaaattaat

SEQ ID NO: 277785 - DNA, 575 bp, Unknown
  Bacterial polypeptide expressing nucleotide sequence isolated from the Sargasso Sea
ggagggggtgaccctagtcatcgccgcactcttcacggtcttcaccatttttaacctctggtttttcagggatccgaaacgcctccatcctactggagctggattggtactcgcccccgctgagggccgggtgattgatatatctgaggttggagaaccttcatttgtggggcaagcaaggaaaatctccatcttcctaagcatatttgacgttcatattcagcgagctcctgtggagggagtagttaaccaccgtgaataccgtccgggtgcgtatagggtggcctgggcagataaagcgtcagaggagaacgaacaagcctcagttgggatcacaacagagatgggtaatgttctagttcgccagatagcgggtctagtagctaggcgcatcataacatacccgtcagaaggagaccgtttggagcgtggccaaagaatcggacttatccggtttggctctcgtgtcgacctatttctcccacttgattgggagataatatgctctgtaggggaccgggctcgagtgggatcttcggttctagctcgacatccagtagaggctatcggatgaa

SEQ ID NO: 277786 - DNA, 430 bp, Unknown
  Bacterial polypeptide expressing nucleotide sequence isolated from the Sargasso Sea
tatgcctatcaaaggcaccttacgtgaaatgatttatgtaccgggagagttgttttcagtgaatccgctgacagccgaaaacgtgccggatttattcgcccgcaacgaacgagtagtcacgatttttgatactgaactgggccctatggctttggtattagtaggcgcgactatagtggccagtattgaaaccgtctgggccggcactgtaactccacctgctggtaaagatgtcttccgctggacttatcccgccacaggaccacaagctgttactttagacaaaggtgctgaaatgggtcgctttaaattaggatccacagtgatcctggcgttccaggccggtcagattgagtttacagacaagcaatacccaacagcggtgacacgcatgggcgagccttttgccgagatagtctctaaaggttag

SEQ ID NO: 277787 - DNA, 649 bp, Unknown
  Bacterial polypeptide expressing nucleotide sequence isolated from the Sargasso Sea
tatgtttagtaagatatttccaaaaattcacactgaagggtacaagtttatagttatagctgtattcataactatcatttttctaattattaataattttttaggattaataggaatattactgactgtttgggtttattatttttttagagatccagagagaacaattataggagatgatagttacctagtaagccctgcagatggagaagtgatcaaagttgaagaggtagatggtccaaaagaacttggactagaaaataaaaaatttaaaaaaataagcatttttatgaatgtctttgactgtcatgtaaatagaacgccatgctcaggtattgttgaagatattttgtacaaaccaggaaaatttttaaatgcatctttagataaagcaagtgaagataatgagagaaattattataaaattaaagataagcatggaaatgatattgtagtagttcaaattgcaggattagttgcaagaagaatagtttgcgaaacaaataaaaatcaggaattaaatcaaggtgatagaattgggatgattagatttggtagtagagcagacgtttattatgaaaattatgaaccactagttaaagttggtcaaacagcaatttcaggagaaacactgctggctaaaaattaa

SEQ ID NO: 277788 - DNA, 187 bp, Unknown
  Bacterial polypeptide expressing nucleotide sequence isolated from the Sargasso Sea
aatagcaggtctaatcgcaagaagaattgtttgtgaagtagaacagggtcaagagttaaaacaaggtgatagaatagggatgattagatttggaagtagagtcgatatcttctttaaaaataaaaagattttagctaagcttggtcaaaacgttgtggctggagaaagtcttttagcatcagattaa

SEQ ID NO: 277789 - DNA, 370 bp, Unknown
  Bacterial polypeptide expressing nucleotide sequence isolated from the Sargasso Sea
agtgtttttatgaacgtatttaattgtcatgttaacagatcaccagtctcaggtaagatcgaggagatttattacaaaccaggtaaatttttaaatgcttctttagacaaggcaagtgaagaaaatgaaagaaattattataaaattaaaactattaacggagaagagattataattgtccaaattgctggcttgattgctagaagaattgtttgtgaggttgaacaagatcaaaatttgaaacaaggagaaagaattggaatgattagatttggaagtagagtagatatttattttaaaaataaagaggttttagccagacaaggtcaaaatgtagtcgctggcgaaagtttaatcgctagaaactaat

SEQ ID NO: 277790 - DNA, 646 bp, Unknown
  Bacterial polypeptide expressing nucleotide sequence isolated from the Sargasso Sea
catgagtaaaatatttccgaaaatacataacgaaggatacaaatttattattatttttgcaatcgtaactataattctctatttcctaaacggatttcttggttttataggattggtattaactatttggtgttattatttttttagagaccctgaaagaacttcaataggtgatgataactatcttacaagtccagctgatggagttgtattacaagtagtggatactaacggtccaaaagaattaggtttagaaaataaacaaatgaaaaaaatcagtatttttatggatgtgtttgattgccatgtaaataggtctccatgttccggagcaatatccgagatactttataaaccaggaaagttttttaatgcatctttagataaagcaagtgaagataatgagagaaattattataaaataaaaaattctaatggagaagacataattgttgtccaaatagcaggacttgttgcaagacggattgtaacagaggtttctaaagatgagcttgtagaacaaggttcaagaataggaatgattagatttggaagtagggctgatatgtattttgaaaattatactcctttggtaaaagttgatcaaaaaactatagctggcgaaactttaatcgcaaaaaaatga

SEQ ID NO: 277791 - DNA, 652 bp, Unknown
  Bacterial polypeptide expressing nucleotide sequence isolated from the Sargasso Sea
tatgtttaatacaatatttccaaagatccataaagaagggtataaattcttggctatttctgttctgctaacatttgtaaccctatttttttcaaagttaataggtttgttacttattataataactgtttgggtatattatttttttagagacccagaacgtttttcaatagatgacgatagttatctagtgagtcctgcggatggcttgataacagatgtgtcagaaaagtctggtccagaagagctaagacttgaaaatacttcatttacaagagtgagtatctttatgaacgtttttaattgtcatgttaatagagtgccgacctcatgcaaaattgaagaaatttattacaagccaggaaaatttttaaatgcgtctttagacaaagcttctgaggaaaacgagagaaattttttcaaaattacttcaaaaaaagataatgaagaaattattattgttcaaatagcaggattgattgcaagaagaatagtttgtgatgttgaacaaggtcaagatttaaaacaaggagacagaataggaatgataagatttggaagtagagtagatatgtattttaaaaataaaaaagtattggctaaacttggtcaaaatgtaattgctggagaaagtttaattgcatctgaataa

SEQ ID NO: 277792 - DNA, 349 bp, Unknown
  Bacterial polypeptide expressing nucleotide sequence isolated from the Sargasso Sea
tgtcatgtcaatagagttccagcatcaggaaaaattgaagaaatctattataaacctgaaaagtttttgaatgcttctttagataaagcaagcgaagaaaatgagagaaattattttaagattaaatcaaataaaaattctgaagaaattataattgttcaaattgcaggcttaattgctagaagaattgtttgcgaggtagaacaaggacaagatttaaaacaaggagatagaataggaatgataagatttgggagtagagtagatatttattttaaaaataaaaaagttttagctcaaaaagggcaaaatgttacagcgggcgaaagcttaattgcttcagattaat

SEQ ID NO: 277793 - DNA, 541 bp, Unknown
  Bacterial polypeptide expressing nucleotide sequence isolated from the Sargasso Sea
atgtttaatagtatttttccaagtattcacaaagaaggctataaatttttagctatttcaataattgtgacttttatagttttgcttttttcaaagtttttaggttcaattttgattttaataactatttggatatactatttttttagggacccggaacgatatcctataaatgatgatgcatttttagtaagtccagctgacggtttaataacagatgtttcagagcaaaccggacctatagaacttcaattagaaaacaaaacttacacaaaaataagtatttttatgaatgtgtttaactgtcatgtaaacaggacatcattatcaggaacagttgaagagattaattataaacctggaaagtttttaaatgcctcattagataaagcaagcgaagaaaatgagagaaattactataaaattaaatgtagtaaatctggcgaagaaatcattattgttcaaatagcaggtttaattgcgaggagaatagtttgtgaagtcgaacaaggacaaaatttaaaacaagggaaagaatagg

SEQ ID NO: 277794 - DNA, 649 bp, Unknown
  Bacterial polypeptide expressing nucleotide sequence isolated from the Sargasso Sea
atgacaaatactattttaccaaagatacataacgaaggatataaatttattgttatttttgtaatagctacaataattttatattttattcatgggtttttaggatttgtaggtcttattttaacaatatggtgttattacttttttagagatcctgaaagagtttctataggtgatgataattatttaacaagcccagcagatggagttgttcttcaagttttagaaacaaatggacccaaggaactaggtttagaaagtaaaaaatttacaaagattagtattttcatgaacgtatttgattgtcacgttaatcgttcaccttgctcaggtacagttgaggaaattacttatgtaccagggaaattttttaatgcttcattggataaagcaagcgaagataatgagagaaattattataaaataaaaagtagcaaaggagaagaaatagtagttgttcaaatagcgggattaattgcaagaagaattgtaaccgaaacttctaaaaattcggaattaaatcaaggatcaagaataggaatgataaggtttggaagtagagctgatttgtattttgaaaactatagtcctcttgttaaagtaaatcaaaaaaccatagcaggggaaactttgatagcaaaaaaataaa

SEQ ID NO: 277795 - DNA, 652 bp, Unknown
  Bacterial polypeptide expressing nucleotide sequence isolated from the Sargasso Sea
atgttagacattttgtttccaaaactacacaaagaaggctacagatttttagccttagcagcagttattacatttattctgctattaatttctaatttcctgggaataataagttttattttaactatatggatattctacttttttagagatccagaaagatttccaattaatgatgaaaattatttattaagtccagctgatggaactatatcacaaataacagaagtagatggaccaggtgaattaggcttggagaaaaaaaaatttacaagagttagtatctttatgaatgtttttaattgtcatgttaacagaattccttgctcaggaaaaattgataaaatattttataaacctggaaaatatataaatgcctcactggataaagccagtgaagaaaacgaaagaaactatgtacaaatgaataatggaagtggagacggactcgttcttgtacaaatagcaggtttaattgcaagaagaatagtttgtgaaataaaagaaaatgatgaaattaaacagggtgataaatttggtattataagatttggaagtagagttgatttgtattttgaaaactatcaattaatggttcaaaaaaatcaaaaaacaattggtggagaaacaataatagcaaaaaaaaaataga

SEQ ID NO: 277796 - DNA, 607 bp, Unknown
  Bacterial polypeptide expressing nucleotide sequence isolated from the Sargasso Sea
atgcccactaaactagataaaattttcccaaaacttcacgatgagggatataaatttttagcaatatttgcatttgccaccattatcctttatttcataaatggttttcttggttttattggactagtcttaacagtgtggtgttattatttttttagagatccagaaagatttacaattgaagatgaaaattatttaataagcccagctgatggggttattgtacagtctttagaaacaaatggaccaaaagatctgggtttagaaaataagaaatttaaaaaaattgctatttttatggatgtatttgattgtcacgtaaatagatctccatgttctggagttgtaacagaaatactgtataaacctggaaaatttattaatgcttcattggacaaagcaagcgaagacaatgaaagaaattactttaaaattaaaaataattcaggaggtgaaataattgttgtgcagattgcaggattaattgccagaagaattgttactgaagtttcaaaagatcaagaattaaaacaaggatcaaaaattggaatgattagatttggaagcagagtagatatatattttgaaaattatgatactatcgtta

SEQ ID NO: 277797 - DNA, 288 bp, Unknown
  Bacterial polypeptide expressing nucleotide sequence isolated from the Sargasso Sea
ttttaaatgcaagcttagacaaagcaagtgataaaaatgagagaagcagtttagtgttaaatactcaagatggaacaaaaatcatagttgttcaaattgcaggcttgattgctagaaggatattaagttttatctcatcaaacgaagagctcgatcaaggggaaaggtttggtttgataaggtttggttctagggttgatatttatatgccattggatgctattgagaaatgtagagtgggagatcgggtggttgctggagaatcgattttagcctctctaaaataag

SEQ ID NO: 277798 - DNA, 382 bp, Unknown
  Bacterial polypeptide expressing nucleotide sequence isolated from the Sargasso Sea
tatacaaaagtaagtgtttttatgaatgtgtttaattgccatgtaaatcgaattcccactagtggaaaaattgatgaaatttattataaacctggaaagtttttgaatgcatcattagacaaagctagcgaagaaaatgaaagaaactattataaaattaaatctaaacataatagtgaagaaataataatagttcaaatagctggattaattgcaaggagaattgtttgcgaggtagagcaggggcaagaattaaaacaaggagatagaatcggtatgataagatttggaagcagagttgacatttattttaaaaataaaaaagttcttgcaaaacttggacaaaatgtgattgctggagaaagtataattgcatcataac

SEQ ID NO: 277799 - DNA, 595 bp, Unknown
  Bacterial polypeptide expressing nucleotide sequence isolated from the Sargasso Sea
tatgattagtgatttatttccaaaattacatgaggaaggttacaggtttttagggatagcagttgttgcgacttttattcttttgttaatttctagttttttagggttaataagttttattataactatatgggtatattatttttttagagacccagaaagatttccaataaaagatgaaaattatttacttagtccagcagatggagttgtgtctcaaattttggaaataaatggaccaaatgaactaagcttagaaaaaaaaaaatatacaagagtaagtatttttatgaatgcatttaattgtcacgttaatagaattccatctacaggaaaaattgataaaatattttataaaactggaaaatttctaaatgcatctctggataaatcaagtgaagaaaacgaaagaaactacataaaaatgacaaattctaaaggtgatgaattagctatagttcaaatagctggattaatcgcaagaagaattgtttgcaatgttaaagaaagcgatgaaattaaacagggaaacagatttggaatgattagatttggtagtagagttgatttatattttgaaaattaccaaattatg

SEQ ID NO: 277800 - DNA, 574 bp, Unknown
  Bacterial polypeptide expressing nucleotide sequence isolated from the Sargasso Sea
actctatttttctcaaaatttttaggtgtaatatttatcataatctcggtctgggtttattatttctttagagatcccgagcgattttcgattaacgacgatttatttttagttagtcctgcagatggattaatcacagatatttctgaaagggcgggacctgaagagctgaggttagaaaacactacgtttacaaaagtaagtgtgtttatgaatgtatttaattgtcacgttaatagaataccaacatctggaagagtagaagaaatttattacaaaccaggaaaatttttaaatgcttcattagataaagcgagcgaggaaaatgaaagaaattattttaaaattaaaaccgtcaaagacgacgaagaaattataattgttcaaattgctggattaatagcaagaaggatcgtctgtgaggtagaacaaggtcaagatttaaaacaaggcgacagaataggaatgattagatttggtagtagggtagatatatatttcaaaaataaaaaagttttagctaaagttggtcaaaatgtagttgccggtgaaagtttgattgcttcaaaataat

SEQ ID NO: 277801 - DNA, 652 bp, Unknown
  Bacterial polypeptide expressing nucleotide sequence isolated from the Sargasso Sea
tatgtttaatacaatttttcctaaaatacataaagagggctataaattcttagctatttcaattcttttgacttttatagttttattcttatccaagtttttgggtttaatctttattttgataagtatttgggtatattattttttcagagatcctgatcgaatttcaattaacgatgactcatttttagtaagtcctgctgatggtctaataactgacatatcagaaagatctggacctgaggaactaagattagaaaatactacatatacaaaagtaagtatatttatgaacgtttttaattgccacgttaatagaattccaacaaatggtatggtcgaagagatttattacaaaccaggaaaatttttaaatgcatctttagataaagcaagtgaagaaaatgagagaaattatttcaagtttaaatcaagtaaaaataacgaagatattgtaatagttcaaatagccggattaattgctaggcgaatagtttgtgaggtcgaacaagggcaagagcttaagcaaggagatagaattggaatgataagatttggaagtagagtcgatatttattttaaaaataaaaaagtattagctaagcttggacaaaacgttgtcgcgggtgaaagtttaattgcttcagaataa

SEQ ID NO: 277802 - DNA, 526 bp, Unknown
  Bacterial polypeptide expressing nucleotide sequence isolated from the Sargasso Sea
gactgtttgggtttattatttttttagagatccggaaagaataataataggagatgatagatacctagttagtcctgcagatggagaagtgattaaagttgaagaggtagacggtccaaaagaacttggactagaaaataaaaaatttaaaaaaataagtatttttatgaacgtctttgattgtcatgtaaacagaacaccgtgctcaggtattgttgaggatattttatataaaccaggaaagtttttaaatgcatctttagataaagcaagcgaagacaatgagagaaattattataaaataaaagacaaacatggaaatgatattgtagtcgttcaaattgcaggattagttgcaagaagaatagtttgcgaaacaaataaaaatcaggaattaaatcaaggtgatagaattgggatgattagatttggtagtagagcagacgtttattatgaaaattatgaaccactagttaaagttggtcaaacagcaatttcaggagaaacactgctggctaaaaattaa

SEQ ID NO: 277803 - DNA, 542 bp, Unknown
  Bacterial polypeptide expressing nucleotide sequence isolated from the Sargasso Sea
actcggtcttctattaacaatttgggtttattatttttttagagatcctgaaagaattaccattgatgatgacaattacctggtgagcccagctgatggagaggttattaaagttgaagaagtagatggaccaaaggagtttaacttagaaagcaaaagatttagaaaaataagtatttttatgaatgtgtttgattgtcatgtaaatagaaccccttgcgctggaaagattgaagaaattttgtataaaccaggaaaatttttgaacgcttcttttgacaaagctagcgaagataatgagagaaattattataaaattaaagacaatcaaaataatgatattattttagtccaaattgctggtttagtagctagaagaattgtttgtgagactagcaaggatcaagagctcaaacaaggagaaagagttgggatgataagatttggaagtagagctgacatatactatgaaaattatgaaccattagtaaaagttggtcaaagagctatttcaggtgaaacgttattagctaagaaataac

SEQ ID NO: 277804 - DNA, 670 bp, Unknown
  Bacterial polypeptide expressing nucleotide sequence isolated from the Sargasso Sea
aatgcaatataaaattcacaatgaaggatgggtgtatttagttattaccttaattatagctattatttttattcctttttttattatacttagttttatttttttctttttaagtttttttatttattatttttttcgagatccaataaggtctatacctgccgaagagttaatagtatcgcctgcagatggaactgttacttttattggtgaagttgatgcaccagatataataaattcagattcaaaatatattaaaataagtatttttctaagtatttttaatgttcatgtaaatagaataccttgtaatggaacaatcaagaaagttaattatataaatggaaaattttttaatgcctcttttgataaatcaagtgatcaaaatgaaagaaatgaaataattttaaaaaatagtgataatgaagaattattaattgttcaaattgccggattaatagctcgaagaatagtttgcaatataaaagaaaatcaagatgtttatcaaggtcatagatttggaataattaagtttggcagtagagttgatttatttattcctaataaatataaacctttagttaccgagggacaaacagttattggtggtgaaagtattttagctaacccaaacaatattaaacatatatccagttcgattaaaatttaa

SEQ ID NO: 277805 - DNA, 537 bp, Unknown
  Bacterial polypeptide expressing nucleotide sequence isolated from the Sargasso Sea
gcttagttcttacagtttgggtttattatttttttagagatcctgaaagaattatcataaatgatgacaattatcttgttagtccagctgatggcgaagttataaaagttgaagaagttaatggcccaaaagaacttagtttggaaaataagaattttaaaaagataagtatttttatgaatgtatttgattgtcatgtaaatagaactccttgtagtggaaaaattgaagatattttatataaaccaggaaaattcttaaatgcatctttagataaagcaagtgaagataatgagagaaattattacaagattaaagacattcataataatgatatagttattgtgcagatagcaggtcttgtagcccgaagaattgtttgtgagtctaataataatcaagagttaaaacagggtgatagaattggaatgatcagatttggaagtagagcagacatatattatgaaaattacgaacccttagttaaaataggacaaacagtaatagcaggagaaactttactagctaaaaaataat

SEQ ID NO: 277806 - DNA, 646 bp, Unknown
  Bacterial polypeptide expressing nucleotide sequence isolated from the Sargasso Sea
aatgaataacatttttccaaaattacataaagaaggctataagtttttagcaatttctataattatcacatttattgtttggattttctcaattttccttgcaacaataatgttgttagtaacaatctgggtatattatttttttagagacccagatcgtatttcaataaatgacaattcatttttagtaagtccagcagacgggctagtaacaaatatttctgattcaaatggaccagaagaactaggtttagaaaataaaaagttcactaaaataagtatttttatgaatgtatttaattgccacgttaatcgaactccaattgcgggtaaagttgaagaaatattttataaacccggaaaatttcttaatgcatctttagataaagctagtaaagaaaatgagagaaattattacaaaattttaacttctaagggagatgaaattataatagttcaaattgcaggattaattgcaagaagaatagtttgtgaagtaagtaaggaacaaaatttaaagcaaggcgacaggataggaatgataagatttggtagtagagtagatctttttttcaataataaaaaaacattagctaaacttggacaaaacgttattgcaggagaaagtctattggcaaaagagtaa

SEQ ID NO: 277807 - DNA, 649 bp, Unknown
  Bacterial polypeptide expressing nucleotide sequence isolated from the Sargasso Sea
tatgctagataaaatttttccgaaaatacacacagaaggatataaatttttagttatattcgtagcagcgactatagtcttatattttatcaatgggtttttaggttttgtaggttttgtattatcaatttgggtttactatttttttagggaccctgataggatttcaattgatgatgacaattacttaacaagtccagctgatggactcgtattacaagttctagaaacaaatggaccaaaagaacttgaactagaaaatagaaaatttacaaagataagtatttttatgaatgtttttgactgccatgtaaacagaactccttgtgcggggaaaatttcacaaattatttataaacctggaaaattttttaatgcttctcttgacaaagcaagtgaagaaaatgaaagaaattactacaaagttcaaaatacctctggagaagatattattgtagttcagattgcaggattgattgcaagaagaattgtaaacgagtctcacgaagggcaagaacttaaacaaggagaaagaatcggaatgattagatttggtagcagggctgatatttattttgaaaattataaaccattggtaaaagttaatcaaaaaactattgcaggagaaactttaatagcaaaaaaataa

SEQ ID NO: 277808 - DNA, 649 bp, Unknown
  Bacterial polypeptide expressing nucleotide sequence isolated from the Sargasso Sea
atgtttagtaagatatttccaaaaattcatacagaaggatacaagtttatagtaatagctgtattcataactatcatatttctaattattaataattttttaggattaataggaatattgttaactgtttgggtttattatttttttagagatccagagagaacaattataggagatgatagttaccttgttagtcctgctgatggagaagtaattaaagttgaagaagttcatggtccaaaagaacttggactagaaaataaaaaatttaaaaaaataagtatttttatgaacgtctttgactgccatgtaaacagaacaccgtgctcaggtattgttgaagatattttatataaaccaggtaaatttttaaatgcatcattagataaagccagtgaagacaatgaaagaaattattacaagataaaagataaccatggaaatgatattattgttgttcagatagcagggttagtagcaagaagaattgtttgcgagactaataataatcaacaattaaaccaaggtgacagaattgggatgattagatttggtagtagagcagacgtttattatgaaaattatgaaccactagttaaagttggtcaaacagcaatctctggagaaacattgctagctaaaaattaat

SEQ ID NO: 277809 - DNA, 652 bp, Unknown
  Bacterial polypeptide expressing nucleotide sequence isolated from the Sargasso Sea
tatgtttaatacaatttttccaaaaatacataaagaaggctacaaatttttagctatttctataattgctacatttgtcgtattacttttttcaaaattaataggttttattttaataatcttaacagtttgggtatattacttttttcgtgatcctgagcgttactcaattaacgatgagtcttacttagtaagtccagccgatggattaattactgatatatctgagagatctggaccagaagaactaagattggaaaataccacatatacaagagtaagtatatttatgaatgtttttaattgtcatgttaatagaatacctacaaacggcaagattgaagaaatttattacaaacctggaaagtttttaaatgcgtctttagataaagcaagcgaagaaaatgagagaaatttttataagataaaagcaaacaaaaataatgaggaaataattattgttcaaattgctggtttaattgcaagaagaattgtttgtgaagctgaacaaggacaagaactaaaacaaggtgatagaattggaatgattagatttggaagtagagttgatttatactttaaaaataaaaaagttttagcaaaattaggacaaaatgtggtagctggagaaagcctaattgcatcagaataa

SEQ ID NO: 277810 - DNA, 649 bp, Unknown
  Bacterial polypeptide expressing nucleotide sequence isolated from the Sargasso Sea
tatgtttagtaagatatttccaaagattcacacagaaggatacaagtttatagtaatagctgtattcataaccatcatttttttaattattaataattttttaggattaataggaatattattgactgtttgggtttattatttttttagagatccagatagaacaattataggagatgatagttacctagtaagtcctgcagatggagaagtgattaaagttgaagaggtagatggtccaaaagaacttggattagaaaataaaaaatttaaaaaaataagtatttttatgaacgtctttgattgtcatgtgaacagaacaccatgctcaggtattgttgaagatattttatataaaccaggaaaatttttaaatgcatctttagataaagcaagcgaagataatgagagaaattattataaaattaaagataaacatggaaatcatattgtagtcgttcaaattgcaggtttagttgcaagaagaatagtttgtgaaacaaataaaaaccaggaattaagtcaaggtgatagaattgggatgattagatttggtagtagagcagacgtttattatgaaaattatgaaccactagttaaagttggtcaaacagcaatttcaggagaaacactgctggctaaaaattaa

SEQ ID NO: 277811 - DNA, 649 bp, Unknown
  Bacterial polypeptide expressing nucleotide sequence isolated from the Sargasso Sea
atgtttagtaagatatttccaaagattcacaccgaaggctacaagtttatagtaatagctgtattcataactattatttttctgattattaataattttttaggactaataggaatattactaactgtatgggtttattatttctttagagatccagaaagagttatcataggagatgatagctacttagttagccctgcagatggagaagtgattaaagttgaagaggaagatggtccaaaagaacttggattagaaaataaaaaattcaaaaaaataagtattttcatgaatgtctttgactgccatgtaaatagaacaccatgctcaggggtagttgaagatattttatacaaacctgggaaatttttaaatgcatctttagataaagcaagtgaggataatgaaagaaattattataaaataaaagataaccatggaaatgatattatagttgttcaaattgcaggattagttgcaagaagaatagtttgtgaaacaaataacaatcaacaacttaatcaaggtgatagaattggtatgattagatttggtagtagagcagatgtttattatgaaaattatgaacctttagtaaaagtaggtcaactagcaatttctggagaaacgttattagccaaaaaataaa

SEQ ID NO: 277812 - DNA, 646 bp, Unknown
  Bacterial polypeptide expressing nucleotide sequence isolated from the Sargasso Sea
atgagtaaaatatttccaaaaatacacaatgaaggatacaaatttattattatttttgcaatcgcaacaataattctctatttcctaaatggatttcttggttttatagggttggtattaaccatttggtgctattatttttttagagaccctgaaagaacttcaataggtgatgacaactatcttacaagtccagctgatggagttgttttacaagtaatggatactaatggaccaaaagaattaggtttagaaaataagcaaatgacaaaaataagtatttttatggatgtgttcgattgccatgtaaataggtctccatgttctggagcaatatccgagatactttataaaccaggaaagttttttaatgcatctttagataaggcaagtgtagataatgaaagaaactattataaaataaaaaattctgatggaaaggatataattgttgtccaaatcgcaggacttgtcgcaagaagaattgtaacagaagtttctaaagatgagctcgtggaacaaggttcaagaataggaatgattagatttggaagtagagctgatatgtattttgaaaattatacacctttggttaaagttgatcaaaaaactatagctggtgaaactttaattgcaaaaaaatgat

SEQ ID NO: 277813 - DNA, 649 bp, Unknown
  Bacterial polypeptide expressing nucleotide sequence isolated from the Sargasso Sea
atgtttagcaaagtttttccaaaaattcatccagagggatataagtttattgttatatcggtaattataacaattattctttatagcttaagtaattttttaggacttgttggattagtactttctatatgggtttattatttttttagagatcctgagagaattataattgaagatgacaattatttagttagtcctgctgatggtgaagtgattaaggttgaagaaattgatggaccaaaagaacttggacttgagaataaaagatttaataaaatcagtatcttcatgaatatttttgattgtcatgtaaacagaaccccatgtgctggtcaaatagaagaaattttatataaaccaggaaaatttttaaatgcttcttttgataaagctagtgaagataatgagagaaattattataaaattaaagataaacatggaaatgatattattattgttcagatagcaggacttattgctagaagaatagtttgcgaaacaaataaaaatcaagaattaaaacagggcgacagaattggaatgataagatttggaagtagagctgatgtttattatgaaaattatgactctttagttaaagttggtcaaaaagctatttcaggagaaacactgttagctaaaagataaa

SEQ ID NO: 277814 - DNA, 649 bp, Unknown
  Bacterial polypeptide expressing nucleotide sequence isolated from the Sargasso Sea
atgactgatatcatttttccaaaaattcatacagagggatacaaatttttagccattgctatcttaataacaatttttttatatttttttagtggttttttaggactagtaagtttggttttaacaatatgggtatactatttttttagagatccagaaagaatgtcaattaatgatgataattacttagttagtccagcagatggatcggtagtgcaagttcaagaaacgaatggaccaaaagaattaaatttagaaagtaaaaaatttactaaagtcagtatatttatgaatgtatttgattgtcacgtaaatagaattccatgtgacggaaaaatttctgatataatatataaacctggaaaatttttaaacgcatcattagacaaagcaagcgaagataatgaacgtaattattacaagattactaataacaaagaacaagatattattgtggtacagattgcgggtttaatagctagaagaatagtttgtgaaacatcaaaagatcaagagttaaaacaaggtgatagaatcggcatgatcagatttggaagtagagtagatgtgtattttgagaactatacttctctagttaaaataaatcaaaaaactgtagcaggcgaaacactattagctaaaatataaa

SEQ ID NO: 277815 - DNA, 676 bp, Unknown
  Bacterial polypeptide expressing nucleotide sequence isolated from the Sargasso Sea
aatgtttgctggggtaattatattccttatttctttagaaaaagttcacaaagaagggtataggctctttaccatctcaatgcttatttcatttggaatggaatttgtttttcaaccattaagtatatttttatatattttttctctattcgttttatggttcttcagggaccctgaaagaaatactccgctagataataatgcagtcatttctccggcagatggtacaatttgtaaaattgatcaggctccaatgcctaaagaaacaagcctaggtaatgaagcatgtcttagagtatgcatttttatgaacgttgtgaatgttcacattaatagagctcccataaccggaattattgatgatattatttatatagctggaaaattttttgttgctagtttagataaagccagcgaacataatgagagaaatattttagtaatgcaaaataaaaagaatgaaaagatcgtctctgttcaaattgcaggcttggttgcaaggaggatattatcttttgttgaaaaatctacatctatgaaagcaggcgagagatttggtttaataagatttggttctagagttgatgtttatatgccattgcattattctacgcagctaaaagaaggtgataaagtaaccgctggagaatcaattatcgctagctcttctacatga

SEQ ID NO: 277816 - DNA, 649 bp, Unknown
  Bacterial polypeptide expressing nucleotide sequence isolated from the Sargasso Sea
tatgtttaccaagatatttccaaaaattcactcagagggttataagtttttagttattgctgccttcattactattattttattaatctttaacaactttttaggtctaataggtttgttattaacagtatgggtttattatttttttagagaccctgaaagaactattataggtaacgatgattatcttgtaagtcctgctgatggtgaggttataaaagttgaagaggtggatggacctaaagaagttggtcttgaaaataaaaaattcaaaaaaattagtatttttatgaatgtatttgattgccatgtaaatagaactccttgttcaggaattgttgaagatattttatacaaacctggaaaattttttaatgcatctttagataaagcaagtgaagacaatgagagaaattattacaaaattaaagacaaacacggcaatgacataatagtagtgcaaattgcaggtttaattgcgagaagaattgtttgtgaaacagacaagaatcaagaacttaaccaaggtgacagaattggaatgataagatttggaagcagagcagatgtttattatgaaaattatgagccgcttgtaaaagttggtcaaacggcaatctctggtgagactttattggctaaaaaataa

SEQ ID NO: 277817 - DNA, 670 bp, Unknown
  Bacterial polypeptide expressing nucleotide sequence isolated from the Sargasso Sea
aaaattatcaattataggtttgtcatgagtaaaatatttccaaaaatacacaatgaaggttacaaatttattattatttttgcaatcgcaactataattctttatttcataaatggatttcttgggtttataggattggtattaaccatttggtgttattattttttcagggatcctgaaagaatttctattggcgacgacaattatcttacaagtccagctgatggagttgtattacaagtaatggacactaacggtccaaaagaattaggtttagaaaataaacaaatgaaaaaaataagtatttttatggatgtatttgattgccatgtaaacagatctccatgttccggagcagtatctgagatactttataaaccaggaaagttttttaatgcatctttagataaggcaagtgaagataatgagagaaattattataaaataaaaaattctgatggagaagatataattgttgttcaaatagcaggacttgttgcaagacggattgtaacagaggtttctaaagatgagcttgtagaacaaggttcaagaataggaatgatcagatttggaagtagagctgatatgtattttgaaaattatactcctttagtaaaagttgaacaaaaaactatagctggcgaaactttaattgcaaaaaaataag

SEQ ID NO: 277818 - DNA, 559 bp, Unknown
  Bacterial polypeptide expressing nucleotide sequence isolated from the Sargasso Sea
catgagtaaaatatttccaaaaatacacaatgaaggatacaaatttgtcattatttttgtaatcgcaactataattctctatttcataaatggatttcttggttttatcgggctgctattaactatttggtgttattatttttttagagacccagaaagagtttccataggtgatgataattatctcacaagtcccgcggatggagttgtactacaagtaatggatacaactggtccaaaagaacttggtttagaaaataaacaaatgaaaaaaataagcattttcatggatgtttttgactgtcatgtaaatagatcaccctgctcaggagcaatatcagaaatactttataaacctggaaaatttttcaatgcatcgttagataaagcaagtgaagataatgagagaaattattataaaataaaaaattctgatggagaagatataattgttgtccaaatagcaggacttgtagcaagaagaattgtgactgaagtttctaaagatgagcttgtagaacaaggttcaagaataggaatgatcagattggaagtagag

SEQ ID NO: 277819 - DNA, 454 bp, Unknown
  Bacterial polypeptide expressing nucleotide sequence isolated from the Sargasso Sea
tgcggatggtatcgtttcatccattgtggaagtgaatggtcctgttgagcttgccttacaaaataataaatatactagagttagtatttttatgaatgtttttgactgccatgtgaacagagcaccttctagcggagaaataaaggacattttctataaaccaggaaaatttttaaatgcttcacttgataaagcaagcgaggagaatgagagaaattattttaaaattaacgataataaaacaaacgactccatcattgttgttcagatcgcaggattaattgctagaagaattgttactcaagtagaaaaaacacagacagttgttcaaggacaaagacttggtatgattagatttggaagtagagttgatttatattacaatcaaagaaagaccatggttaaagtaggacaaaacgttatagctggagaaagtttaatagcgagctcttaa

SEQ ID NO: 277820 - DNA, 670 bp, Unknown
  Bacterial polypeptide expressing nucleotide sequence isolated from the Sargasso Sea
tatgcatttaaaaatacataacgaaggatgggtataccttgtttcttcaattattataacaataattgttacccctttttttaacattttaggtatttttttaggctttttatcaatttgtatattttatttttttagagatccaattagatctataccaaatgatgatgttataatttcacctgccgatgggcaaattgtttatataggtgaatctgacttgccagaagaattaaacattaaaaaaaaatctattaaaataagtatttttctagatttatataatgttcatgtaaacagaattcctgtatcaggaaaagttattgatataaaatatattcctggtaaattttttagagcaaatatagacaaatcaagcaaagaaaatgaaagaaatataatattaatagaaaatgaaaaaaaagaacatattgttgtttctcaaattgcaggattaattgctagaagaattgtttgtgatttaagtttgaatcaagaagtaattaagggtgatagatttggaatcattaaatttggcagtagagtagatatttatcttcctgaaagttataagccaatgataacaaaagatcagttagttattggaggagagacaattatttctaatccaaataaaattaatgagattatttctttcacaagaaaataa

SEQ ID NO: 277821 - DNA, 529 bp, Unknown
  Bacterial polypeptide expressing nucleotide sequence isolated from the Sargasso Sea
tatgtttaatacaatttttccaaagatacacaaagaagggtataaattcctggctatctccattttagccacattcgtagttctatttttttctaaatcaataggtttaatacttattttaattacagtatgggtatattatttttttcgagatccagaacgtttcccaataaacgatgatgcttttctagtaagtccagccgatggtctaataacagatgtgtctgaaagatcaggacccgaggagttaagattagaaaatacaactttcacaaaagtgagcgtctttatgaatgtttttaattgtcatgttaatagagtgccaataagcggaaaagttgaagaaatctattacaaacctggaaaatttttaaatgcctctttagataaagcaagtgaagaaaatgagagaaattattttaaaattaaatctaataaaaacaatgaggaaattatcatagttcaaatagcaggtttaatagcaagaagaattgtttgtgaagtagaacaaggccaagattttaaaaca

SEQ ID NO: 277822 - DNA, 649 bp, Unknown
  Bacterial polypeptide expressing nucleotide sequence isolated from the Sargasso Sea
atgtttagtaagatatttccaaaaattcacgctgaaggttataaatttttagttatagccggaataatcacaatagtattttatatttttagtaatttcttaggtcttattggtttggtcttaactatttgggtttattatttttttagagatccagagagagttattatcgatgatgataattatcttgttagtccagcagatggtgaggtgattaaagttgaagaagttgatgggcctaaagaacttggtctagagaataaaaaatttaaaaagattagtgttttcatgaatgtttttgattgtcatgtaaacagaactccatgtgcaggtaagattgaggaaattttatataagccaggcaagtttgtaaatgcttcattagataaagcaagtgaggataatgaaagaaattactttaaaattaaagaccctcacaacaatgatattatagttgttcagatagctggattggttgcacgaagaatagtttgtgaatcaaacaaagatcaagagttgaaacaaggagatcgtattggcatgatacgatttggtagtagagctgatatatattatgaaaattatgagccacttgtaaaagttggtcaaaaagctatttcaggtgagacactacttgcaaaaaaataat

SEQ ID NO: 277823 - DNA, 601 bp, Unknown
  Bacterial polypeptide expressing nucleotide sequence isolated from the Sargasso Sea
catgtttagtaagatatttccaaaaattcacgctgagggatacaagttcctagttatctctggaattattacaatcgtattttatagtttcagtaattttttaggtttaattggtttggtattaacaatctgggtttattatttttttagagatcctaatagagtaattattgatgacaataattatctggttagccctgctgatggagaaatcataaaagttgaagaagttgatggtccaaaagagctaggtttagaaaataaaaaatttaataaaatcagtgtttttatgaacgtatttgattgccatgttaatagaactccatgcgctggaaaaattgaggaaattttatataagcctggaacatttgttaatgcttctcttgataaagcaagtgaagataacgagagaaattattttaaaattaaagacacagataataacgatattattgtagttcaaatagcaggtctggtagcgagaagaatagtttgtgaatctaataaagatcaagagttaaaacaaggtgatagaattggaatgataagatttggcagcagagcagatgtttattatgaagattatcaacctttagtaaaa

SEQ ID NO: 277824 - DNA, 649 bp, Unknown
  Bacterial polypeptide expressing nucleotide sequence isolated from the Sargasso Sea
tatgtttagtaaaatatttccgaagatacacgcagaaggttataagtttttagttatagcaggtattataacgattatactttatagtttgagtgactttctggggttgattggcttagttttaacaatttgggtttattatttttttagagacccagagagagtaataattgaagatgaaaattatctagtaagtccggcagatggagagattatcaaagtagaagaagtcgacggtcctaaagaacttggtcttgaaaatagaaaattcaataagattagtatatttatgaatgtctttgattgtcatgttaacagaactccatgtagcggaaaaatagaagaaattttatataaacccggaaagtttgtaaatgcctcacttgataaagcaagtgaggataatgagagaaattattttaagattaaagatacacataacgatgatgtaattgtagtccaaatagctgggcttgttgctagaagaattgtttgtgagtcgaataaaaatcaagatttaaaacaaggagatagaataggaatgataagatttggcagtcgtgctgatgtttattatgaaaattatgtacctttggttaaggttggtcagaaagctatttctggagaaactttattagctaaaaaataa

SEQ ID NO: 277825 - DNA, 646 bp, Unknown
  Bacterial polypeptide expressing nucleotide sequence isolated from the Sargasso Sea
atgagtaaaatatttccaaaaatacacaatgaaggttacaaatttattattatttttgcaatcgcaactataattctctacttcattaatggttttcttggttttatcggattagtattaactatttggtgttactatttttttagagatcctgaaagaatatctataggagatgataattttcttacaagtcctgctgatggagttgtattacaagtaatggatactaatggtccaaaagaactaggtttagaaaataaacaaatgaaaaagataagtattttcatggatgtattcgattgtcatgtaaatagatcaccttgctcaggagcgatatcagaaatactttataaaccaggaaagttttttaatgcttcattagataaggcaagcgaagataatgagaggaattattataaaataaaaaattctgatggagaagaaataattgttgttcaaatagcagggcttgttgctagaagaattgtaacagaagtttctaaagatgaacttttagaacaaggttcaagaataggaatgattagatttggaagtagagccgatatatattttgaaaattatacacctttagtaaaagttaatcaaaaaacaatagctggtgagactctaatagcaaaaaaataat

SEQ ID NO: 277826 - DNA, 915 bp, Unknown
  Bacterial polypeptide expressing nucleotide sequence isolated from the Sargasso Sea
ttacaccaaagcacctgctttcacgccttgtaggcaaacttgcagaagcagaaatgggtagtgttacgacatttttcatcaaggcgtttattaagcaatacaatgttgatatgtcagaagcgctgcatgaggaaccagagcattatagaagctttaataagttcttcacacgcccgcttaaacctgaagcgcgcaccattgacgaaaacgatgacgtacttatccatgctgttgacggtacggtaagtcagtttggcgatatccatagcgacagtatttttcaggcgaaaggccatgactttagcctaactacattattaggtggcaagcctgatgtagctgcgacatttaaaaatggtaagtttgctaccatttatcttgcccctcgtgattatcacagaattcacatgcctgttgagggcacgcttactgatatgctgtatgtgccgggcgaacttttttcggtaaatcctcttacagcacaaaatattccaggtctgtttgcacgtaatgaacgcgttgtggcgctgttcgacacgcctgtaggcaaaatggcgatggtgcttgtgggcgcaaccatagtggcaagcattgaaactgtctgggctggcacggttacgccacctgcgggtaaaaacgttcagcactggtcatatgaaaaagacagtgaagcagcagttttccttgaaaaaggtgccgagctaggccgcttcaagctaggttcgaccattgtggtgtgtttcgaaaaagacatgattgattttgaagacctcgcccctggtatggttacacgtcttggtgagcctatggcgcttaaatcaaccgcacaggctacggctaaagatacgcacgttagcgatgaaacagccagtgacgaaaagagcgaggcttcgtcagagggcgctgacagctaat

SEQ ID NO: 277827 - DNA, 838 bp, Unknown
  Bacterial polypeptide expressing nucleotide sequence isolated from the Sargasso Sea
tctgtggatcctgcccaaaaacctgttcagcaggatctgcggatttgttgcaaatctgaaactccccccgttcattctccagagactgattcgtctcttctgtcacttttatccaatcgacctcaacgaagcggaacaatctgtcgaggattttgattgtttcaatgctttctttacccgaaaactccggcaaggggtcaggcctcttgcagaagatcccaacgcattgctttgtcctgtggatggcgcattaggagagtatggaatcattcgtgacgggaatctcctccaggccaaaggattggagtatcggttagaagacctgcttcaggatcctgagagaaaagatctttacgaaggaggtcattacatcacgctttacctggcgccccataattatcaccggatacacagtccagccgaaggtcaggttagggaatttggttatgttcccggagatctatggactgtgagtgaactgggagtgatgcacgttcccgggttgtttgccaggaatgaaagaattctgacgtaccttcaaaccaaagccggagaatgtgcgatcataaaagtaggggctacagtggtgggaaaaattcgtgtatgctatcacgatcaagtttccaatcttcctggagcaacgttctctttgagccgcctggagactccatggcatgttgaaagaggcggggaaatcggggtctttgaattgggttccacggtgatttgcctgtttcagccggggcaggtggaattcgattccctcaatttgggccagaccgtttatcttggtcagtctctgggaaagattttagataatacaacttcattgaactaa

SEQ ID NO: 277828 - DNA, 652 bp, Unknown
  Bacterial polypeptide expressing nucleotide sequence isolated from the Sargasso Sea
atgtttaattcaatttttccaaaaattcataaagaaggctttaaattcttagctatttctattttaacaacatttttagtcttatttttttctaagattattggtttcttatttctacttataactatatgggtatattacttttttcgagatccagatcgatattcaataaatgatgacgcttatcttgtaagtcctgctgacggtcttataactgacatttcagaaagatctggaccagaggaactcagattagaaaatactacttacacaaaaataagtatttttatgaacgtttttaattgccatgtaaatagagtaccagtatctggaaaggtggaagaaatttattacaagccaggaaaatttttaaatgcttcccttgataaagcaagcgaagagaacgaaagaaattattttaagataaaatcaaatagaaatggagaagaaataattttagttcagatagcaggattaatagcaagaagaatagtgtgtgaagtcgaacaaggtcaacaattaaaacaaggtgaaagaataggaatgattagatttgggagcagagttgatatatattttaaaaatagaaaagtattagcaaaattaggtcaaaatatagttgctggagaaagtttattagcttctgaataat

SEQ ID NO: 277829 - DNA, 649 bp, Unknown
  Bacterial polypeptide expressing nucleotide sequence isolated from the Sargasso Sea
atgtttaccaagatatttccaaaaattcacacagagggttacaagtttttagttattgctgccttcattactattattttattaatctttaacaacttcttaggtctaataggtttgttattaacggtatgggtttattatttttttagagaccctgaaagaactattataggtagcgatgattatcttgtaagtcctgctgatggtgagattataaaagttgaagaggtggatggacctaaagaagttggtcttgaaaataaaaaattcaaaaaaattagtatttttatgaatgtatttgattgccatgtaaatagaactccttgctcaggaattgttgaagatattttatacaaacctggaaaattttttaatgcatctttagataaagcaagtgaagacaatgagagaaattattacaagataaaagataagcacggcaatgacataatagtagtgcaaattgcaggtttaattgcgagaagaattgtttgtgaaacagacaagaatcaagaacttaaccaaggtgacagaattggaatgataagatttggaagcagagcagatgtttattatgaaaattatgagccgcttgtaaaagttggtcaaacggcaatttctggtgagactttattggctaaaaaataat

SEQ ID NO: 277830 - DNA, 649 bp, Unknown
  Bacterial polypeptide expressing nucleotide sequence isolated from the Sargasso Sea
tatgatagacaaaatatttcccaaaattcataacgaaggctataaatttttagttatattcggttttgcaaccctgattttgtattttataagtagttttttgggactaataggtttggtactaacaatttgggtttactatttttttagggatccagatagaatatccattaatgatgaaaattttttagttagcccagctgatggacttattttaaaagtagaagaaactgatggccccaaagaacttaaacttgaaaataaaaaatttaaaaaaataagtatctttatgaatgtttttgattgtcacgttaatagaacgccgtgttctggaaaaataacagaaatattgtataaacctggaaaattcttcaatgcatcactggataaagcgagcgaagaaaatgaaagaaattattataaaatttcaaacaatgcaggagaagatataattgttgttcagatagcaggactcattgccagaagaatagtaacagaagtaggagaaaactctgaattaaaacagggagatagaataggcatgataagatttggaagcagagctgatatttattttgaaaattacgatcctttagttaaagttaaccaaaaaactatagcaggagaaacacttttagcaaaaaaatag

SEQ ID NO: 277831 - DNA, 643 bp, Unknown
  Bacterial polypeptide expressing nucleotide sequence isolated from the Sargasso Sea
atgaacaagaagtacttagggatacatcgtgaaggatggaagttttttatcatctttatcctaatttctttttttagtttttttataactaaaactatattcttaatttctctctctctttcaatatttactctctggttttttcgtgaccctgaaagatattttgactctcaggataatcaggtattaagtgcagcagatggtaaaatctgttttattggagaagacactgcaccaattgaaacaggtattgatcagaaaatgaataaagtaagtatctttatgaatgttttcaatgtgcacataaatagaagtcctgtcagcggagagattgagaaaattatttataaaaatggaaaattcttcaatgcaagccttgataaagcaagtgaatataatgaaagaaactcaataattattaaaaataatgatgaaaagataattgtggtccaaatcgcgggtttaatagctagaagaatattaagttttatttcggaaaatgatattatggcaaagggagagagaattggacttattcgctttggttctagagtagatatatatttaccattaaattatcaaatcaaagtaaatcaaaatgatattgttactgctggtaaaacaattattgctgaaagataat

SEQ ID NO: 277832 - DNA, 502 bp, Unknown
  Bacterial polypeptide expressing nucleotide sequence isolated from the Sargasso Sea
agagatcctgaaagattttctattggtgatgagaattatcttacaagtccagctgatggagttgttctacaagtaatggatactaatggtccaaaagaattaggtttagaaaataaacaaatgaaaaaaataagtatttttatggatgtctttgactgtcatgtaaataggtctccatgttcgggagcaatatctgagatactttataaaccaggtaagttttttaatgcatctttagataaggcaagtgaagataatgagagaaattattataaaataaaaaattctaatggagaagatataattatagtccaaatagcaggacttgttgcaagacggattgtaacagaggtttctaaggatgaacttgtagaacaaggttcaagaataggaatgattagatttggaagtagagccgatatgtattttgaaaattacactcctttagtaaaagttgatcaaaaaactattgctggtgaaactttaatcgcaaaaaaatgat

SEQ ID NO: 277833 - DNA, 649 bp, Unknown
  Bacterial polypeptide expressing nucleotide sequence isolated from the Sargasso Sea
atgttagacaaaatttttccaaaaattcacaacgaggggtataaatttatcgttatttttatatttatatcaatcgtactttacttcattagtggatttttaggctttataggaatgatccttacgatttggtgttattatttttttagagatcctgatagaatttcaatagagaacgaaaactatcttaccagccctgcagatggattagttttacaagttttggaaagtaatggcccaaaagaacttggcctagagaataaaaagtttaaaaaaataagtatattcatgaacgtgttcgattgccatgtaaatagaactccatgttcaggcaaaattacagaaatattatataagcctggtaaattttttaatgcatcattagacaaagcaagcgaagacaatgaaagaaattattataaaattaaaaattcatttggggaagatgtaatagtagttcaaatagcaggattaattgctagaagaattgtaacagaatcatccatagacgatgaattaaaacagggatcaagaataggaatgataaggtttggaagtagagtagatttatattttgaaaattatgatgcactagtaaaagtaaatcaaaaaactattgctggtgaaactttgattgcaaaaaaataat

SEQ ID NO: 277834 - DNA, 646 bp, Unknown
  Bacterial polypeptide expressing nucleotide sequence isolated from the Sargasso Sea
atgagtaaaatatttccaaaaatacataacgaaggatacaaatttattattattttcgcaatcgcaactataattctttatttcctaaatggatttttgggttttatagggttgatattaaccatttggtgctattatttttttagagaccctgaaagaatttctatcggggatgacaattatctcacaagtccggctgatggagttgtattgcaagtaatggatactaatggtccaaaagaattaggtttagaaaataaacaaatgaaaaaaataagtatttttatggatgtctttgattgccatgtaaataggtctccatgttctggagcaataactgagatactttataaaccaggaaagttttttaatgcatctttagataaggcaagtgaagataatgaaagaaattattataaaataaaaaattctgatggagaagatataattgttgtccaaatagctggtcttgttgcaagacggattgtaactgaggtatctaaagatgagattgtggaacaaggttcaaaaataggtatgatcagatttggaagtagagctgatatgtattttgaaaattattcacctttagtaaaagttgatcaaaaaactatagctggcgaaactttaatcgcaaaaaaataat

SEQ ID NO: 277835 - DNA, 649 bp, Unknown
  Bacterial polypeptide expressing nucleotide sequence isolated from the Sargasso Sea
atgtttagtaaaatatttccaaaaattcacgcagaaggatacaagtttttagttatagctgggattataactataatattttatatttttagtgattttcttggattagtaggttttgttttaactatatgggtttactatttttttagagatcccgagagagttattattaatgatgataactttcttgttagtcctgctgatggagaagtaataaaagttgaagaagtagatggccctaaagaactgaatttagagaataaaagatttaaaaaaattagtattttcatgaatgtttttgattgtcatgtaaatagaagtccttgtggtggaaagattgaagaaattttatacaaacctggcaaattttttaatgcttcactagataaagcgagtgaagataatgagagaaattattttaaattaaaagataatcaaaacaatgatatcgtattagttcaaattgcaggtttagttgctcgtagaatagtttgtgaagcaaataaagatcaagaattaaatcaaggtgatagagttggaatgataagatttggaagtagagctgatgtttattatgaaaattatgaaccattagttaaagtaggtcaaacagctgtttcaggagaaacattgttagctaaaaagtaaa

SEQ ID NO: 277836 - DNA, 643 bp, Unknown
  Bacterial polypeptide expressing nucleotide sequence isolated from the Sargasso Sea
aatgttagcacctgaaggtaagaaaatacttatatcattattattattatctcttttattaggaataacaggttactattataattatcaaatattaattattttatattttatatctggatttcttctaatcttttcatgcaacttttttcgtgaccctattcgaaattcacctttggatatatcattaattgtttcaccagcagatggaaaagtagttcgtatagatgaagtaaatgataataaagttggaaaaaattctacaagaatatctatttttttgaatgttttcaatgtccatgtgaaccgaacacctttaactgctgaaatagaagaagtttcatataaggttggtaatttcaaagcagcatttgatcataaagcaagtgatgaaaatgaaagaacaaatattttatttaattcgagcaaaattaactatcgagttcttcaaatagctggcttaatagccagaagaatccattgctatgcacaagttggaaaagagatgaagaaaggagatcgtttaggttttattatgtttggttcaagaactgatattatattcccaaattctgttgaaataaaaatcgaagttggggataaagttaaaggtggagaaactgttattggaaagttatcatga

SEQ ID NO: 277837 - DNA, 568 bp, Unknown
  Bacterial polypeptide expressing nucleotide sequence isolated from the Sargasso Sea
ttaatctttaataactttttaggtctaataggtttgttatttacagtatgggtttattatttttttagagaccctgaaagaactattataggtaacgatgattatcttgtaagtcctgctgatggtgaggttataaaagttgaagaggtggatggacctaaagaagttggtcttgaaaataaaaaatttaaaaaaattagtatttttatgaatgtatttgattgccatgtaaacagaactccttgttcaggaactgttgaagatattttatacaaacctggaaaattttttaatgcatctttagataaagcgagtgaagacaatgagagaaattattacaaaattaaagacaaacacggcaatgacataatagtagtgcaaattgcaggtttagttgcgagaagaattgtttgtgaaacagacaagaatcaagaacttaaccagggtgccagaattggaatgataagatttggaagcagagcagatgtttattatgaaaattatgagccgcttgtaaaagttggtcaaacggcaatttctggtgagactttattggctaaaaaataat

SEQ ID NO: 277838 - DNA, 574 bp, Unknown
  Bacterial polypeptide expressing nucleotide sequence isolated from the Sargasso Sea
gtattttatagttttagtaattttttaggtttaattggtttagttttaacaatctgggtttattatttttttagagatcctgacagagtaattattgaagataataattatctagttagtcctgctgatggagagattataaaagttgaagaggttgatggtccaaaagagctaggtttagaaaataaaaaatttaataaaattagtgtttttatgaacgtatttgattgtcacgttaatagaactccatgcgctggaaagattgaagaaattttatataagcctggagcgtttgttaatgcttctcttgataaagcaagtgaagataatgagagaaattatttcaaaattaaggacacagataacaatgatattattgtagttcaaatagcaggtctggtagcgagacgaatagtttgtgagtctaataaagatcaagagttaaaacaaggtgagagaattggaatgataagatttggaagtagagcagatatatattatgaaaactaccaaccattagtaaaagtaggtcaaaaagctatttcaggtgaaacattattagctaaaaaataaa

SEQ ID NO: 277839 - DNA, 703 bp, Unknown
  Bacterial polypeptide expressing nucleotide sequence isolated from the Sargasso Sea
gcttcggactatgccagctttaatgaattttttacccgcccgttaaaagatggcttacgccctatcaatgctgatgctgacgtggtctgccagccagtagacggcgcgatcagtcagttaggtgatattgtcgatggtaagctgatccaggcgaagaaccacaactattcactgcaggctttattaggcggtgatgcggctacagctgctccttatgccggcggtaagttcgcgactatttacttagcgccaaaagattatcaccgtattcatatgccaattgcgggcaccttacgtgaaatgatttatgtgccaggtgatctgttttcagtgaacccattaacagccgaaaacgtaccggatttattcgcccgtaacgagcgtgttgtgaccatttttgatactgaactgggccctatggctttggtgttagtaggcgcaactatagtggccagtatagaaaccgtctgggctggtactgtgacaccgcctacaggcaaagatgtattccgttggacctaccctgccacagggcctcaagctgttaccttagaaaaaggtgctgaaatgggccgctttaaattgggatctacagtgatcctggctttccaggctggtcagattgaatttactgacaagcagtacccaacagcagtcacccgcatgggcgagccttttgccgagatagtatctaaggcttaaa

SEQ ID NO: 277840 - DNA, 673 bp, Unknown
  Bacterial polypeptide expressing nucleotide sequence isolated from the Sargasso Sea
ctgtcatcggcgggggattttccgcatttcaacgctttttttacccgatcgcttcgagagggcatgaggccattggccgcgagccagtggtgtcaccccgccgacggtgtactcagccagcgtggcgccatcgcggcttcagagttgttgcaggccaagggacgcacctacagcgtgcagcagttactggtaggcaccccagaggaggtggaccgctacgcccaggggagctttgcgacgacctatctctcgccgagggattatcatcgggtgcacatgcccatccgcggacatctggttaaaacacgatacgtcccgggcgatctgttttctgtcaatgctgcgacagtggatagggtcgatggcttgctggcgcgtaacgagcgcttggtctgtttttttgagaccgagcacggtggtgtggtggtggtgctcgtcggcgccatgattgttgcgggtatcgctacggtgtggggtggacgcgaacaccccggcgcaggcgagatacgagagcagatgtgggcggctaatgaggcaccgctgctggagcaggggcaggagatggggcgcttttttctgggttcaacggtggtgctggtcaccgaggcatcagatctgtcctgggcgaatgcggcaggcgatgcggtcaccgttcgctctgcgctcgcctaac

SEQ ID NO: 277841 - DNA, 646 bp, Unknown
  Bacterial polypeptide expressing nucleotide sequence isolated from the Sargasso Sea
atggacaatatatttccaaaaatacacaatgaaggatacagattcctaataatttttgcagtagttactattattttatactttatacatggatttttaggatttgttggactggttctgacaatctggtgctactatttttttagagatccagaaagattatcaatagatgatgacaattatttaataagtccagcagatggaactatattgcagattttagaaactaatggacccaaagaattagagttagaaaacaaaaaatttactaaaataagtatttttatgaatgtgtttgattgtcatgtgaacagaactccgtgtagcggaacagttacagaaattttatataaacctggaaaatttattaatgcttctctagataaagcaagtgaagataatgagagaaactattataaaattaaaaataacaaaggtgaagaaattattgtagtacaaatcgcaggtttaattgctaggagaatagtttgtgaaactaaaaaagaacaagagttgaaacaaggtagcaggattgggatgataaggtttggaagtagagttgatctatattttgaaaactataaatctctggtaaaagtaaaccaaaaaacaatagcaggggaaactttgttagcatcaaaataat

SEQ ID NO: 277842 - DNA, 772 bp, Unknown
  Bacterial polypeptide expressing nucleotide sequence isolated from the Sargasso Sea
ccctttaaaaataccttaattaaactatttattaagacttttcatgtagatatgagtatagctgaaaaagaaaatcctcatgattacaaatcttttaatgctttttttacaagaaaacttaaaaaagatgtgcgaaagatggtaattgatgatgattatattctttctcctgttgatgggtctattagccaaatggggtatattagtaaatataaattaattcaggctaaaaataaaaattatactttagagaagcttttaggtggtgatacagatcttgctgataaatttctaaatggctgctttgcaacactctatttgtcaccacgtgactatcatcgtattcatatgccagtcaccggtcgattaataaaatcaatttatgttccgggtaatctattcccagtaaatagaataggtgttgaaaatgttgatcaattattttcccgcaatgaacgtttcattagtattttcgaaacacgtcatggaatgatggcgcaaatcatggttggtgcagtgcttgttgggagtatggaaacggtttggttaggtgaaattacaccgagtgaaaaatgtactctcaaaattactgaatatactgaaaagtttattgatttaaatcaaggcgaggaatttggtcagtttaatatggggtcaacggtaattcttttattccagaaagataaattgtcatggttacctgatattaaaaatgatcgccctattaaggtaggacagctactagctaattcaacagcatcagtaaaataaa

SEQ ID NO: 277843 - DNA, 670 bp, Unknown
  Bacterial polypeptide expressing nucleotide sequence isolated from the Sargasso Sea
aatgaatattgttgattctattaaagcctcaattcttactccaatacatcccgcaggtataccatttatagccatattttttatattgacggttattgtaggttggttttggagtccactttattttgctggtatagttttgacagtctggtgtatatatttttttaggaacccttctcgaattacgccagttttgtcgggtgtaaataagaataatcttataatatcacctgcagacggtaaagttatagaaattgctaaaataaatccaagtgaagaaatgggtttacctgaaggagattggacaagagtatgtgtttttatgaacgtatttgatgttcatgtaaatagatcaccaatgctagggcaaattacgtataaaaattatattccaggttctttttttaatgctagtttagataaagcttcatcgcaaaatgaaagacttatacttggaatggatacagaaaatggcaaaaaaatagcttttgtacagattgcaggattagttgcaagaagaattatctgcgatgttgacataggttcgtctttaaaggcaggagaaatattcggtcttatcagatttggaagtagagttgatatttattttccatccgatgttgccgtaatggttttacaaggacaaaaaatgattgcaggtgaaactatt

SEQ ID NO: 277844 - DNA, 426 bp, Unknown
  Bacterial polypeptide expressing nucleotide sequence isolated from the Sargasso Sea
agccggtagttcgtgttagcgtctttatgaatgtatttgattgccatgttaacaggatcccatgtgatggtaggatcggtaaattggtttatgtgcctggccagtttctcaatgcctcacttgataaagctagcgaagaaaacgaaaggcaaatggttcgtatcgatctagaatctggcgcttttataggagcagtccagatagctggtttagtggctagaagaattgtttgttatttggaggaggatcaaatagtccttgctggagaacggttcggtttaatccggtttgggagccgtgtagatatctatctcccccatggagccgtatcgcaagcagtaataggtcaaaagtgtgtttctggagaaacagtattggctgatttaaaatcagatgaggcggctcgatctggtgaagttcgttaat

SEQ ID NO: 277845 - DNA, 556 bp, Unknown
  Bacterial polypeptide expressing nucleotide sequence isolated from the Sargasso Sea
gtgcattatttttttcgcgacccatcccgcgtcacgccggatcgcgatggcttggtgataagcccagcggacggtgttgtgcaatcaattattgaggtcacaccgccagatgagttgacaatgggatcggaaccgcgaaccaggattgcggtgttcatgaacgtgtttaacgtgcacgtgaaccggattcctatcgacggcaccatttcaactgcagcctacagaccaggcaagtttatcaacgcttccttcgacaaagcaagcgaacaaaacgagcggcaaagcctcaaaatcaccacggagagcggccaggacgtcggctgcatccaaatcgcaggactggtggcccggcgaattatttgccatgcgaaggttggtgatagaatgcgcgccggcgaacgcttcggcatgatacgcttcggaagccgcgttgacgtgtatctaccgaagggcgtggcaccgaaagtgctggtggggcagctggccgttgccggcgagactgtactggctgacttgggcagcgacgaagcaaccctgcacggcgaaacacgatagg

SEQ ID NO: 277846 - DNA, 457 bp, Unknown
  Bacterial polypeptide expressing nucleotide sequence isolated from the Sargasso Sea
attggataaagttaaaattgcgctgcagtacatgctgccaaagcacctgttatctcgcttagtcggtaaacttgccgcttccgaagctggcgcattaacgactgccgcgattaaatggtttatcaagcaatataaaatcgatatgagcgaagcggctcagagcgaacccgaagcctataaaagcttcaacgatttttttacccgtgcacttaagcctggtattcgcccaattaatactgcggccaacatcatggtgcacccggttgatggtgccgttagccaactcggccccatcaaggatggtcgtattttccaagctaaaggccatcactattcttcactcaccctactgggcgaccaagccgaagatgctaaacgcttcgaaggtggggattttgcgaccatttatctggctcccaaggattatcaccgcatccatatgccgattaagggcaca

SEQ ID NO: 277847 - DNA, 661 bp, Unknown
  Bacterial polypeptide expressing nucleotide sequence isolated from the Sargasso Sea
gcatccagctggatggccgttcattgccctcttcgcgagcgcggcaatttttatgacatggtggttcgcaccgctggggtttgccggtttggttctcaccgcgtggtgcatctattttttccgcgaccccccccgcgtaacgccagatcgcgatggcttaatcatcagccccgcggacggtgtagtgcaatccatcgttcaggccgcaccgccggacgagttggaaatgggatcagaaccgcgaacccgggtcgccgtgttcatgaacgtgtttaacgtgcacgttaaccgaattcccatccacggcaccatttcggcagcagcctaccggccaggccaattcattaacgcatcctccgacaaggcgagcgaacagaacgaacgccaaagcctcaaggtcacgaccgaaggcgggcgggacgttggtttcgtccaaatcgcgggactggtggcgcggcgaataatttgccatgcgaaagtcggtgatcgaatgcgcgctggcgaacgcttcggtattatacgcttcgggagccgcgtcgacgtttacctaccggacggcgtagctccgaaagtgatggttgggcagttggccgttgccggcgagaccatcctggctgacctgtccagcgacgaagtaccccagaacggcgaaacacgatag

SEQ ID NO: 277848 - DNA, 410 bp, Unknown
  Bacterial polypeptide expressing nucleotide sequence isolated from the Sargasso Sea
tgtgccattgacccgggtcagtgtcttcatgtcagtcttcaattgccacgtgaaccgcgccccggttccgggcaagatcactgccatcgcctatcgtccgggcaagtttttcaacgcctcgctggacaaagccagcaaggacaatgagcgaaacagcctcgtgatccgcatggacgacggccaggatattgccgtcgtccaaatcgccggtctcgtcgctcggcggattgtctgtttcgtcagcaagggtgatcatgtacaagcagggggtaggtttgggctgatccgctttggatcgcgcctcgatgtctacctgcccgatggcgtaaagccgcttgttcgcgtcgggcaaaccatgatcgccggggaaacggtgatcgccgaattggcaaaggatgatcaagcgtaag

SEQ ID NO: 277849 - DNA, 670 bp, Unknown
  Bacterial polypeptide expressing nucleotide sequence isolated from the Sargasso Sea
ttggttccaattcactctgcaggttttccttttataattatttttgcattggtatctctgattcttggttctatttctgattttttaggttggttaggaatttttttaactgcttggtgtgtttacttttttagagatccaataagagttgtaccaaatataaaggattctattatttctcctgctgatggaaaagtattacctataatagaagttcaacctcccgaagaaattggtataaaagaaaaaatgaaaaaaattagtattttcatgaatgtttttaacgtccatgtaaatcgagttccaataggaggaaaaataaaaaaattatcatatgaacctggtgccttttttaatgcttcacttgataaagccagtaaattaaatgaacgtatgtcaataaaacttgaagttgaaaaaggaatagagattgtatttgttcaaatagcaggattaattgctagaagaattaaatgtgaacttgatgaaaatcaaattgttaaaagtggagaaaaatttggtttaattagatttggaagtaggttagatatttatttaccattagattcaaatatcaatattttagaaggacaaacagtcatcgctggcgaaactataattgcgaatttaaaaagaaaaaaaactgggtcaaaaagtataaaaacttaaa

SEQ ID NO: 277850 - DNA, 568 bp, Unknown
  Bacterial polypeptide expressing nucleotide sequence isolated from the Sargasso Sea
gatgggtgttattctcacattttggtgtgtatattttttcagagatccagaacgagtaactccaaaaaaagataacatactagttgctcctgccgatgggaaaattttgtctatttcgactgagttagttccagaaaatctcacagaagataaacaaaacaaaatgaataaaatttcgattttcatgaatgtttttaatgttcatgtaaatagaatacctgtttcaggtaaagttatatggcttaaatacgttccgggagcattttttaatgcttcattagataaatccagtaaaaaaaatgaaagaatgatttctaaaattgaaattaaaaaagatgtttttgtctatgttgttcaaattgctggtctagtagctaggagaatcaaatgtgaattagaagaaaatcagtcagttaatataggcgacagatttggtataattaggtttggaagcagagttgacttgtatgttccagaaagttttaaaatcaattccttagaaaatcaaatttctatagctggagaaacaatacttgcagagttcgacaataaagatgtcaaaaagtag

SEQ ID NO: 277851 - DNA, 559 bp, Unknown
  Bacterial polypeptide expressing nucleotide sequence isolated from the Sargasso Sea
attctcacaatttgggtgtgtatattttttcagagatccagaaagagtaactccaaaaaaagataacatactagttgctcctgccgacggcagaattttgtctatttcgactgagttggctccagaaaatcttacagaagataaacaaaaaaaaatgaataaaatttcaatttttatgaatgtttttaatgttcatgtaaatagaatacctgtttcaggtaaagttatatggcttaaatatgtaccaggagctttttttaatgcttcattagataaatccagtaaaaaaaatgaaagaatgatttctaaaattgaaattaaaagagatgtttttgtctatgttgttcagattgctggattagtagccaggagaatcaaatgtgaattagaagaaaatcagtcagttaatataggcgataggtttggcataattaggtttggaagtagggttgacttgtatattccagagagttttaaaatcaattcattagaaaatcaaatttctgtagctggagaaacaataattgcagaattcgacaataaagatgtaaaaaagtga

SEQ ID NO: 277852 - DNA, 688 bp, Unknown
  Bacterial polypeptide expressing nucleotide sequence isolated from the Sargasso Sea
tttgctaaaagctatttttgttccaattaaccgcgctggctggccatttataggaatatttttttcaataaccgtaatagctacagttatcagcgaaccattgggctggataggtataatacttaccgcttggtgtatctactttttcagagacccagagcgctatacccctactcgagagggacttgttataagtcccgcggacggtgttatacaatcaattgaggctgccattccaccatcggagttagacatgggggatgaagagttaaatagaattgcaatattcatgaacgtttttgatgttcatgtaaaccgtatcccgataggtggaaaaatatccaaattagcttataatcgtggaagattctttaatgcatctctggataaggctagtgaattcaatgagcgccaaagtatacgacttacaatgcctaataaaaaggatatcgcatttgtgcaaatagctggcctaattgcgcgaagaataaaatgtgatattaaggaaaaacaattagtaattaccggcgagcgcttcggtttaattagatttggtagccgagtagacgtttacttaccaaaagaaacaccagctttggtaagcacggggcaacactgtatcgccggggaaacagttattgcggacttcaaaagtcaagaattgccccgaataggagaaattagatag

SEQ ID NO: 277853 - DNA, 537 bp, Unknown
  Bacterial polypeptide expressing nucleotide sequence isolated from the Sargasso Sea
catgtatttcagaatacacagtgaaggatgggtttttttagtatcgtgtggtgttttaaccattataatttttcctttttttcctataataggattcttactactaataattacttttatagttttttatttctttagagatccagtaagaagtattccaaatgatgacgtaattatttctccagcagatggtcaaatagtttctattgaagattcagaactgccagaagaaattaatatcaaaggaaattatttaaaaattagtatttttttggatgtatttaatgttcacgtaaatagaattcctatatcaggtgttgttaaagaaattcattatattcctggtaaattttttagagcaaatgttgataaagctagtaaagaaaatgaaagaaatataattttgattgaaagtgaacaaaaagaaaatattgtagttactcaaattgctggacttattgcacgacgtatagtttgtgatttgaaattaaatcaacaggtgctaaaaggtaacagatttggaataattaaatttgg

SEQ ID NO: 277854 - DNA, 685 bp, Unknown
  Bacterial polypeptide expressing nucleotide sequence isolated from the Sargasso Sea
ttaagtgtgttagccactccaattgctcgagaaggctggccattcatagcagtatttggcatagcaacgctcatcctatttatttactctacaactttaggttggattggcatagttttgacgctttggtgcatttatttttttagaaatccagaccgagttactcctcagcgagctggactgattatttctccagctgatggaatagtacaaatgatcacggaggtatccccaccaatccaacttgatatggctgcgtctgaagtcacaagaataagtgtctttatgaatgtttttgattgtcatgtaaatcgggctccttgtgacggcgaaattggacggctggtctatgttccaggaaagtttttaaatgcatcttttgataaggcgagcgacgaaaatgagcggcaaatgctaaggctcgatttagatgatgggagatccattggtgcggtgcagatagctggtttggtggcaagaagaattgtttgttacctagaggaaggacagcaagttctcgcgggggagcgctttgggcttatacgcttcggcagcagggttgatatttatcttccctccggggtcatgccacaagtcattgttggtcaaaggtgtattgctggcgaaacagtattagctgatcttagttcagacgaggtaagtagaattggtgaaatacgctaat

SEQ ID NO: 277855 - DNA, 874 bp, Unknown
  Bacterial polypeptide expressing nucleotide sequence isolated from the Sargasso Sea
catgagcattactgacaacctgaaaattgccggtcaatactgtctgcccaaacacgccctctcccgcctggtcggcaaacttgcggctgccgaagcaggcaacctcaccaccagggtgatcgaggcctttatcaagcagtaccaggtcgacatgagcgaggcgctgcacgagagtccggcccactacaagagcttcaacgaattcttcacccgtgaactcaagccggggatccgccccctggtcgaggatgccatgaccctggcgctaccggtggatggcaccgtcagccagctcggcccgatccagcagggtcgcatcatccaggccaagggccacgactacagcgcccgcgagctgctgggcggttatgaggatctggtggcgccgttcaaggatggtgacttcgccactatctacctggcgcccaaggattatcaccgcatccacatgccgctggacggcgtgctggagagcatggtgttcgtgccgggggacctcttctccgtcaacccgctcaccgccgagaacgtgcccaacctgtttgcccgcaacgagcgggtggtcgccaccttccgcaccccgcacggccccatggcgctggtgctggtcggtgccactatcgtggccagcatcgagaccatctgggccggcaacatagcgccgaccaaagagaagcgcgtcgtgcgctgggactacagcggcgacgaagccatcaccctgcaaaaaggtgccgagatgggcctgttcaaactgggcagtaccgtggtctgcctgtttggcccgggcatgcttgccggtttcgagccccatctggccaacggggtcaccacccgcatgggccagccctttgccaagctggcggcgcaggcatga

SEQ ID NO: 277856 - DNA, 643 bp, Unknown
  Bacterial polypeptide expressing nucleotide sequence isolated from the Sargasso Sea
atgaataaaaaatattttggtatacatagagaagggtggaaattttttatcgcctttatttcgctttcatttgtaagtttcttttttgctaaaactattttttttcttttttttcttctctcgttatttacactctggttttttcgtgaccctgaaaggcattttgactctaaggataaccaattgctaagtgctgcagatggaaaaatctgttttattggcgaagaaaatcctccttcagaaacacaatttaaagaaaaaatgaaaaagataagtatatttatgaatgtctttaatgttcatgttaatcgaagcccagttgatggaaatatagaaaaaataatttataagaatggtaaatttttcaatgcaagtcttgataaagctagcgagcataatgagagaaactctttcatcatcaaaactaacactgataagattgttgtggtacagattgcaggtttaattgctagaaggatattaagttttatttcagagggtgataagattgacaaaggtgatagaattgggcttatacgttttggttcaagagtagatatatactttcctccgacttatgacattaaggtaaaacaggatgatatagttgttgctggtgaaacaatcattgctgaaagatagt

SEQ ID NO: 277857 - DNA, 880 bp, Unknown
  Bacterial polypeptide expressing nucleotide sequence isolated from the Sargasso Sea
ttggataaagttaaaattgcgctgcagtacatgctgccaaagcacctgttatctcgcttagtcggtaaacttgccgcttccgaagctggcgcattaacgactgccgcgattaaatggtttatcaagcaatataaaatcgatatgagcgaagcggctcagagcgaacccgaagcctataaaagcttcaatgacttttttacccgcgcactaaagcctggcattcgcccaattaatactgcggccaatatcatggtgcatcccgttgatggcgcagtcagccagctcggccccatcaaggatggtcgtattttccaagctaaaggccatcactattcttcactcactttgcttggcgaccaagccgaagatgccaaacgcttcgaaggtggcgattttgcgactatttatctggctcccaaggattatcaccgcatccacatgccgataaagggcacgctgtcgaagatgacctatgtgccgggcgaactgttttccgttaaccccttaacggcacgccatgtacctggcctgtttgctcgcaacgaacgtgttgtggcgatttttgaaaccgaacttggcccgctggctatggtattagtgggtgcgaccattgtggctagcatcgaaaccgtttgggcgggcactattacgccgccaacgggtaagcaagtcttcacctgggaatacccaacagtaggtccagacgccattaccttagataaaggcgaagaaatgggccgcttcaaacttggcagtaccgtcgtcatgctgtttgctaaagatgctatcgacaccttcgccgaaggcgttgaacccgaagccgtaacgcgtatgggtcaagcctttgctaatctgaaaaatcaggcgtcagccgactaac

SEQ ID NO: 277858 - DNA, 649 bp, Unknown
  Bacterial polypeptide expressing nucleotide sequence isolated from the Sargasso Sea
catgtttagtaaaatttttccaaaacttcattccgagggatataaatttgttgttattgcaattatattaacaatcattctttataactttagtggttttttaggagctctcggacttgccatatcagtttgggtatattatttttttagagacccagatagagtaatcattgaagacgataattatttagttagtccagcggatggcgaagttataaaagtcgaagaagttgatggtcctaaagaacttaatttagaaaataaaaaatttaataaaattagtatatttatgaacgtgtttgattgtcatgtaaatagaactccatgcgcaggatcagtggaagaaattttatataaaccaggaaaattttttaacgcttcattagataaagcaagtgaggacaatgagagaaattattatagaattaaagatataaatgaaaaccaaatcgttgttgttcaaattgctggacttattgcaagaagaattgtttgtgaaacaaataaaaatcaagaattaaaacaaggcgaaagaattggaatgataagatttggaagtagagtagatatttattatgaaaattttaaacccttagtcaaaattggacaaaaggctatttcaggtgagactttgttagcaaaaaaataa

SEQ ID NO: 277859 - DNA, 703 bp, Unknown
  Bacterial polypeptide expressing nucleotide sequence isolated from the Sargasso Sea
gttggaaaaaaatttattctcaagcgtatttgcgactcccattgctcgcgaaggttggccatttattgcagtatttggaatcataacactcgtcctttttattttttcggcagttttaggttgggtcggcgtaatcctaacgctttggtgtatctatttctttcggaacccggatcgggtcacccctcagcgaactgggctgattatttctcctgcagatggtgtagtgcaaatgatcaccgagttatcccccccacttcaacttgatatgacaggcactgaggtcataagaataagcgtgttcatgaatgtctttgattgtcatgtaaaccgcgcaccgtgtgatggccaaattggcaggcttgtttacgttccagggaagtttctcaatgcctcttttgataaagcaagtgaagaaaacgaaaggcaaatgcttcgactggatttggaggatggcaggtttgttggtgcagtacagatagcaggcttagtggcaagacggattgtctgttatctagaagagggacaaaaggttttggcaggggagcgctttggacttatccgcttcggaagtagggtagatatttatcttccacctggtgtcatgcctcaagttgttgttggccagagatgtgtagctggtgaaacagtgctggctgatttgatctcggatgaggtaagtagaaccggtgaaatacgctga

SEQ ID NO: 277860 - DNA, 634 bp, Unknown
  Bacterial polypeptide expressing nucleotide sequence isolated from the Sargasso Sea
atgcgtagtcccatagccaaagaaggctttatatttataattcccctggcttttttggccgcggtattttactcgttctctaattactgggctaccggattatttgaaggactttttcttttttgctgctggttttttcgtgatcctgaacggagcatcccacaggaaccccgagtaatcgtctccccggccgatggcaaagtcgtagaaattattaaagagggtgacccgttattgccgaatgataactatataagggtcagtatatttttaaacgttttcaacgtgcatgtaaatcgcgtacctattgctggaaaaatagaagcaaagcggtacaataagggtaagtttctgaacgctgccaaccataaggcatcgttggataatgagcaaaacacaatcttactaaacaacggttcgaccaagatattggtcaaacagatcgcagggctgatcgcacggcgcatcgtttgttatgctaaagaaggagatgactatcggctagggcaaagatttggtctgattcgtttcggttcccgaaccgacatctttgttcccgaaggaacagagttaaaagctaagaaaggggatatcgtaagcggcggtagttcaatcattggatatttaaaataat

SEQ ID NO: 277861 - DNA, 880 bp, Unknown
  Bacterial polypeptide expressing nucleotide sequence isolated from the Sargasso Sea
attggataaagttaaaattgcgctgcagtacatgctgccaaagcacctgttatctcgcttagtcggtaaacttgccgcttccgaagctggcgcattaacgactgccgcgattaaatggtttatcaagcaatataaaatcgatatgagcgaagcggctcagagcgaacctgaggcttataaaagcttcaacgacttttttacccgtgcacttaagcctggtattcgcccaattaatactgcggccaacatcatggtgcaccccgttgatggcgccgtcagccaacttggtcccatcaaggatgggcgtattttccaagctaaaggccatcactattcttcactcactttgcttggcgaccaagccgaagatgccaaacgcttcgaaggtggtgattttgcgacaatttatctggctcctaaggattatcaccgcatccatatgccgattaaaggcaccctgtcgaagatgacctatgtgccaggtgagctgttttccgttaacccgctaacggcgcgccatgtgccaggcctatttgctcgcaacgaacgtgtagtggcaatttttgaaaccgagcttggcccactggctatggtattagtaggcgcaactattgtggcgagcatcgaaaccgtttgggcaggcactattacgccgccaaccggtaagcaagtattcacttgggaatatccaacggtaggccctgacgcgattaccttagagaaaggcgaagaaatgggtcgcttcaagcttggcagtaccgtcgtcatgctgcttgccaaagatgctatcgacaccttcgccgaaggcgttgaacccgaagccgtgacgcgtatgggtcaagcctttgctaatctgaaaaaccaggcgtcagccgactaa

SEQ ID NO: 277862 - DNA, 376 bp, Unknown
  Bacterial polypeptide expressing nucleotide sequence isolated from the Sargasso Sea
acagggaactatattaaagccaaatatggtaacacccggatcggagcaccaagaaaagatcagtgttgaaactgttgctaaggaaaccttaaggtgcctgcatgagtgtgttccagacaaccttccagctattacatttctttctggcggacaatcagaaactgtttcaactgaacacttagatgcaatgaataagattggaggttttccatggaagttaagcttttcatatggaagagctttacaagctggagctttaaaagcttggctaggtaaatcagaaaatgttgatgcagcacaaagtgcattttctcatagggctttaatgaataaaaaagcagcactgggccaatggtcaaaagatttagaagtttaa

SEQ ID NO: 277863 - DNA, 134 bp, Unknown
  Bacterial polypeptide expressing nucleotide sequence isolated from the Sargasso Sea
tatgagtatagaagaaatagcaaaacagatggttgttaaaggcaagggaatacttgctgcagatgaaagcactggcacaatggaaaaaagattaaagagtgtcaatgttgaatgtactgaaaaaaatagacttc

SEQ ID NO: 277864 - DNA, 433 bp, Unknown
  Bacterial polypeptide expressing nucleotide sequence isolated from the Sargasso Sea
atgtctgaacttaaagatatagcattaaaagttattggtaatggaaaaggaattcttgctgcagatgaaagcacaggcacaatgacaaaaagactcgatagtgtaaatgtcaagtcaagcaatcaaaatagattaatttttagagaaaccctatttagttcagaaagcatgaaaaattgtattggtggagttatcctttatgatgaaactataaagcaatctagctcctcaggagaaaaaattccgcaacttatatcgcactcaaatgcagtgcctggaattaaagtagatactggagcaaaagttttagctggttcatctgaggaaaaaattaccgaaggattagatggattgagagaaagactgcaagaatattataaacttggagcaagatttactaaatggagagctgtttatgtaatatcaaaagagt

SEQ ID NO: 277865 - DNA, 258 bp, Unknown
  Bacterial polypeptide expressing nucleotide sequence isolated from the Sargasso Sea
tgccaggtatagcgtttttatcaggtggacaaagtgaagtggaagctacaaaaaatttagatatcataaataaacataacaaatcaaaatttataatgactttctcttatggaagagcattacaacaaagtgcattaaaatactggtcaaaaaacttagatgatgctgagggaactcaaaaagtttttaatcatagagccaacatgtgcttattagctgccaaaggtaactggacagaacaagttgaaaaagcttaaa

SEQ ID NO: 277866 - DNA, 250 bp, Unknown
  Bacterial polypeptide expressing nucleotide sequence isolated from the Sargasso Sea
atgtctgaactcaataaaattgcacttaaaattttgtcagatggaaaaggtattcttgctgcagacgagagcactgcaaccatgagtaaaaggcttgagtcagttaaagttcagtcaaatgaacataacagacttatttttagaaaaactcttttttcatcagaaagtatgaaaagctgtatcggaggagttatattgtatgatgaaacaataaaacagatagtgaatctaaatcaattcccgaaataat

SEQ ID NO: 277867 - DNA, 604 bp, Unknown
  Bacterial polypeptide expressing nucleotide sequence isolated from the Sargasso Sea
agtttactcaatttcaaaaaaaaatccaagtaagctatgtatatattcaaatgctcatgcactagctcggtattcctcattagttcaagaatgtggaatggtgccaattgttgaacctgaattactaatggatggaaatcattctgcagccttatgttttaataaaacttctgaaattatcaaaaaatgttttgaggaacttataattcataaggtagatttgaaaggagttattttgaaaccgaatatgattttggatggaagcacttgtgaaaacaaaataacaaatgaggaagttgctgatttgacattaaaatgcttaaaagaatcagttccacaagaagttccgggtatagcttttctctcaggcggtcaaacagaaattgaagctacggaaaatcttaattttataaataaaaaaaataataccaaatttataatgacctattcttatggaagagcccttcaacaaagtgctttaaaatattggtcaaaaaatattcaagatgtaaagggtacccaagaaatatttaaccatagagcaaaaatgtgtactttagctgctaaaggagaatggtcaaaagaacttgagaaaaagatctaa

SEQ ID NO: 277868 - DNA, 358 bp, Unknown
  Bacterial polypeptide expressing nucleotide sequence isolated from the Sargasso Sea
aaacaatcacaacactttatagaagacaagcaccaatgtgacccaaatccagtaaattttgtgtttcatgggggctcgggatcttctcctcaagatattagagaagcgattgattatggagcgataaaaatgaatttggatacagatatgcaatgggcatttcataaaggcgttcacaattactataaaaaaaatgctgattaccttaaaactcaattgggtaacccagaaggagatggaaaacctaataaaaaatactatgaccctagaaagtggcttctagaaggcgaaaaaaagcttattgaaaggttaagacagtcatttatagacctaaacaatataaatagaaacgagtaag

SEQ ID NO: 277869 - DNA, 424 bp, Unknown
  Bacterial polypeptide expressing nucleotide sequence isolated from the Sargasso Sea
aatgtctgagttaaataatattgttttaaaaatcttatccaataaaaaaggaatattggctgccgacgaaagtaatggcactatgactaaaagactagactctgttggtgtaaaatcttcgcccgaaagcagattgaaatttagagaagttcttttgtcttcagaagaaggtatgaaaaatattggtggtgttatactttatgatgaaacaataagacaaaaaactgagtcgggtaaaaaaatacctgagctaataaatagctttggctcagtcactggaattaaagttgatactggtgctaaaaaaatggtaaattcacctgttgaaactattacagagggacttgatggtttgagagaaaggctggaagattattatgaacttggagctagattcacaaaatggagagctgtaatcatataa

SEQ ID NO: 277870 - DNA, 268 bp, Unknown
  Bacterial polypeptide expressing nucleotide sequence isolated from the Sargasso Sea
catgtctgaacttaataaaattgcactcaagataatttctgatggtaaaggtatacttgctgcagacgagagtaatggaacaatgacaaaaagactcgaggcagtgaatgtatcttcaaccccagaaaatcgacttttatttcgagaaatactcttttcatcaactagtattagggaatgtataggcggcgtcatactttatgatgaaactattaaccagacaacaagtttgaaaaattcaattccagatttaatttcctcctctggt

SEQ ID NO: 277871 - DNA, 209 bp, Unknown
  Bacterial polypeptide expressing nucleotide sequence isolated from the Sargasso Sea
aatgaatgaactaaaaaaaattgtaagtaaaattttatcaggaggaaaaggtattcttgcagctgatgaaagtactggaacaatgactaaaagattagaatctgtaaaagttaaatctaatgagcagaatagacttttatttagaaaaacacttttttcatctgaaagtatgaaaaattgtattggcggcgtgatattatatgatgaaa

SEQ ID NO: 277872 - DNA, 448 bp, Unknown
  Bacterial polypeptide expressing nucleotide sequence isolated from the Sargasso Sea
atgacagaactaaataaaattgcacttaaaataatttccaatggtaaaggaatacttgcggcagatgaaagtaatggaactatgaccaaaagacttgaagccgtaaatgtaaactcaactccagaaaatagacttttatttagagaaatacttttttcatcaaaaggaatgaaggactatataggtggtgttattctttacgatgaaactataaatcaaacttcaagctcaggaaaatcaatacctgaattaatatcaaactcaggtgcagtacctggaataaaagttgatacaggagcaaaaaatttagctaattccccagaagaaaaaattacagagggtttagatggtcttagagacagattaaaaatatattacgatctaggagcaagatttacaaaatggagaggtgtctattctataggtgaaaaatatccaagtaaactgc

SEQ ID NO: 277873 - DNA, 235 bp, Unknown
  Bacterial polypeptide expressing nucleotide sequence isolated from the Sargasso Sea
aatgtcattagaagaaattgcgaattatatagtttcagacggtaaaggaattcttgccgcagatgaaagtaatccaacatgtggcaaaagatttgattctattggggtagaaaattctgaggacaatagaagagattatagagagatgctttttaggtcaaaaggtatgaaaggaaatattggtggagtaattttatttgatgaaactctaaggcaggatggtaaagatggcact

SEQ ID NO: 277874 - DNA, 253 bp, Unknown
  Bacterial polypeptide expressing nucleotide sequence isolated from the Sargasso Sea
atggatttttcaagcttaaatgaaatagcgaaattcattgtttctgatgggaagggaatactcgctgctgatgagagcaacccaacatgtaccaaaagatttgataccatttcagttgaatcaactgagaaaaatagaagagattacagagagttgttatttagagcacctggaatggcaaacaatattgggggtgtcattttgttcgatgaaacaatcaggcaaaaaacagatgatggtcttctcttaatcg

SEQ ID NO: 277875 - DNA, 472 bp, Unknown
  Bacterial polypeptide expressing nucleotide sequence isolated from the Sargasso Sea
atgtctgaattaaacaaaatagcattagaaataattaataatggcaaaggaattctagcggctgacgaaagcactggaacaatgaccaaaagattagaaaacgtcaacattccgtcaactccagaaaataggctattgtttagagagactctttttagttcttcaagtatgaaagaatgtataggtggtgtaattttatatgatgaaactatcaaacaaacatcttctaaaaaaaacaagataacagatttaatttcatctatgggttctcaccctggtataaaagttgatactggagcaaaagttctggcaggatcaccaaatgaaaaaattacagaaggtcttgatgggttaagagaaagattaaaagaatattataatcttggtgcaaaatttacaaaatggagaggtgtatacaatatttcaaaagattatcccagcaaactatctatacaatcaaatgctcatgctt

SEQ ID NO: 277876 - DNA, 433 bp, Unknown
  Bacterial polypeptide expressing nucleotide sequence isolated from the Sargasso Sea
atgtctgaattaaataatatcgttttaaaaattttatcaaatggaaaaggtatcttggccgcagacgaaagtacgggaaccatgaccaaaagacttagtgcagtaaatgtggagtcgactccggaaaatagattgctatttagggaaacactttttttatccgaaggtatgaaaaaatgtatagggggagtaattttgtatgatgaaactataaaacaaagttctaaatcaaaaaaaactataccagaattaatttcatcttcaggtgctattcctggaataaaagttgatacaggagcaaaagtcttagctggttcacctaatgaaaaaataacagaaggtttagatggcttaagagaaagattaaaagaatactataagcttggagcaagatttacaaaatggagaggtgtttatattatttcagaataaa

SEQ ID NO: 277877 - DNA, 166 bp, Unknown
  Bacterial polypeptide expressing nucleotide sequence isolated from the Sargasso Sea
aatgtctgaattaaataaaattgcaattaaaataatttccaatggaaaaggtattcttgcggctgatgaaagcaatggaactatgacaaaaagacttgaagcagtaaatgtcaaatcaactgaagaaagtaggctttgcttcagagaaattcttttctcgtcggat

SEQ ID NO: 277878 - DNA, 474 bp, Unknown
  Bacterial polypeptide expressing nucleotide sequence isolated from the Sargasso Sea
agtacttcaacaatgactaaaagattagagtcggttaaagttcaatcaacagctgaaaaccgtttattatttagagaaacattgtttagtgcgtcaggtatgaccgaatatatcggaggtgtaattttatacgatgaaacaataaagcaaataacctcaaaaaaaaacaaaatcccggaattaatttctgctatgggcagtgtaccaggtattaaagttgatactggagcaaaagttttagctggttcaccaaacgaaaaaattacagagggtttggatggattaagagaaagattaaaagattattataacttaggagctaagtttacaaaatggagaggtgtttataacgtatcaaaagagcatccaagtaaactctcaatggaatctaatggacatgccttagctagatactctgcaatagttcaagaatgtaatatggttccaattgttgaacctgaagtattgatggaa

SEQ ID NO: 277879 - DNA, 280 bp, Unknown
  Bacterial polypeptide expressing nucleotide sequence isolated from the Sargasso Sea
aatgtctgaattatacgaaatagcagagaaaattcttcaaaatggaaaaggaattcttgcggctgatgaaagcactgggactatgaaaaaaagattagactcagtaaatgtagagtctaatgaaaaaaatagattaattttcagagaaacacttttttcatcaaactcaatgaaagaatgtattggtggcgtgatattatatgatgaaacaattaaacaaaatacttctcaaaataaatctataccagaattaatttctgaaagtggagctgtaccagga

SEQ ID NO: 277880 - DNA, 499 bp, Unknown
  Bacterial polypeptide expressing nucleotide sequence isolated from the Sargasso Sea
tatgtcggaattaaataaaatagctcataaaatactttcaaatggcaagggaatacttgcggcagatgaaagtaacggaactatgacaaaaaggcttgaggctgttgaagttaaatctacaccagataacagactcgcatttagagaaacactttttagttcagaaagcatgaaagattgtatcggtggtgtgattttatacgacgaaacgataaaccaaatttcaaattcagggaaatcaattcctgacttaatctctgctagtggagcagtcccgggaattaaagtagatactggtgcaaagattttggcaaactctccagaggaaaaaattactgaaggtctagacgggctaagagaaagattaaaaaaatactacaaacttggcgcaagatttacaaaatggagaggtgttttctcaataagcaataactatcctagtaagcttgcaattcattccaatgctcatgcacttgcaagatatgcagccttagttcag

SEQ ID NO: 277881 - DNA, 190 bp, Unknown
  Bacterial polypeptide expressing nucleotide sequence isolated from the Sargasso Sea
atgtcagaacttaataaaattgtacttaaaataatttctaatggaaaaggtattcttgcagcagatgaaagtaatggaactatgacaaaaagacttgaggcagtaggtgtaaaatcgacaccagaaaatagacttttattcagagaatcacttttttcatctgaaagtatgaaggaatacataggtggtg

SEQ ID NO: 277882 - DNA, 667 bp, Unknown
  Bacterial polypeptide expressing nucleotide sequence isolated from the Sargasso Sea
gacggtttaagagatagacttaaagattattatgatcttggggcaagatttacaaaatggagaggggtatacttaatttctgataaatatccaagcgatctagcaatttcagcaaatgcacatgcattggctagatatgcagctttagttcaagaagcaggaatggttcctattattgagccagaggtattgatggatggtaatcattcagcgagagtttgtcttaataaaacatctgaagtattaaaaaaatgttatgaggaattagaattaaataatgttgatttaacaggtacaattttaaaaccaaatatgattttacctggagccaattctaatgaaaaaatctctaaagaggaaatagctgaacttactttagagtgtttgaaaaataacgtaccttcatcagttccaggaattgcttttctatcaggcggtcaatcagagatagaagcaacagcaaatctcaacgaaataaatattaaaaataattcgagttttattatgacttattcatatggaagggctcttcaacagagtgcacttaaattttggtcaaaagatataagtaatataattgaaactcaggaaatatttgatcatagagcaaaaatgtgtactttggccgcaaaaggaaagtggtcagaaaatcttgaaaaatcgtagt

SEQ ID NO: 277883 - DNA, 468 bp, Unknown
  Bacterial polypeptide expressing nucleotide sequence isolated from the Sargasso Sea
aatgtcagatttgaacaaaattgccctacaaataatatcaaatggtaagggaatcctagctgcggatgaaagtaatggtaccatgactaaaagacttgaagcagtaaacgttgattcaaatcctaaaaatagacttaaatttagagagacactattttcatcggagtgtatgcgagaatgcataggaggagtaattttatatgatgagactatcaaacaggtatcaagccttggtaaaaaaattccagatttgattgctgatttaggagcacttcctggaattaaagttgatacaggtgcaaaaattttaccaaattcaaataatgaaaaaattactgagggtttagatggacttagagaaagattgaaagaatattataaattaggtgcaagattcactaaatggaggggagtttataacatcggtgaaaaatatccaagtaagctggcgattcattcaaatgctca

SEQ ID NO: 277884 - DNA, 521 bp, Unknown
  Bacterial polypeptide expressing nucleotide sequence isolated from the Sargasso Sea
ggttcaagagagtgggatggtgccaattgttgagcctgaggttttaatggatggaaagcatgaagcagaagattgcctagaaaaaacatctgaggtattaaaaaaatgctatgaggaattaattttaaataaagtggatttaaaaggaacgatacttaagccaaatatgattttacctgggtcagcaagtaatgaaaaaatagaggcaaaaaaaatagcagaattaacattaaaatgtttaaaagaatcagtgccaacagaagttcctggtattgctttcctttctggtggacaaacagaaaaagaagctgcaaaaaatttaaatgagataaataagttaaataatactaattttataatgacatattcttatggaagagcattacaacaaagtgcattaaagttttggtcaaaagatatcaatgatattgacggaacccaaagaatattcgatcatagagcaaaaatgtgctctttagctgctcagggaaaatggacagaagaaattgaaaataaataaa

SEQ ID NO: 277885 - DNA, 637 bp, Unknown
  Bacterial polypeptide expressing nucleotide sequence isolated from the Sargasso Sea
atccgcagcaaacggcaacgggagaagagcaagaacctgagttcggatgcggtgatccgcaacctcggcgagctgacccagggtcagccggtggtgcacctggatcacggggtcggccgctatctggggctggagaccatcgatgccggcggcctgcccaccgagtttctgaccctggaatatgccggcggcgacaagctgttcgtgccggtcaccagtttgcacctgatcagccgttataccggctcggacaacccgcccagccacaagctcggcggcgaggcctgggtcaaggcccggcgcaaggcggccgaaaaggtgcgcgacgtggcggccgagttgctggatgtctatgccatgcgggcagcccgtcacggctttgccttcaagcacgaccgcgaggcctatcgccagtttgccgccggcttcccgttcgaggagaccgatgatcagctcaacgccatcaatgcggtgctcggcgacatgtgccaggccaagagcatggatcggctggtgtgcggcgacgtgggcttcggcaagaccgaggtggcgatgcgggcggcgtttgtggctgtgcacggcggcaagcaggtggccgtgctggtgcccaccaccctgctcgcccagcagcactacg

SEQ ID NO: 277886 - DNA, 478 bp, Unknown
  Bacterial polypeptide expressing nucleotide sequence isolated from the Sargasso Sea
atgtctgaattaaataaaattgcacttaaaataatttccaatggcaaaggtatacttgcggctgatgaaagcaatggaactatgacaaaaagacttgaagcagtgaatatcaaatcaaccaaagaaaacaggctttcctttagagaaattcttttttcatcggatggtatgaacgatttcataggtggtgttattctttacgatgagaccataaatcaaatttcgagtacaggaaaatcaatacctgatttaatatctatttcaggtgcagttcctggaattaaagttgatactggcacaaaagatttagcaaattcccctaaggaaaaaattacagaaggattggatggccttagagatagattaaaaaaatattatgatcttggagcaagatttacaaaatggagaggtgtatattctattggtgaaaaatatccaagcgaactggcaatcagtagtaatgctcattcactagcta

SEQ ID NO: 277887 - DNA, 385 bp, Unknown
  Bacterial polypeptide expressing nucleotide sequence isolated from the Sargasso Sea
gggacaattttaaaacctaacatgatattgccaggatcgctctcaaaaaaaaaggtttccaatgaggaaatcgcagaaaaaactttggactgtttaaaaaaaaatgtgccaagcaaagttcccggggtcgcatttttatcaggtgggcaatctgaagttgaggctacaaaaaatttaaacgaaattaacaaaaaaaatgatactaattttttaataactttttcttacggaagagcgcttcaacaaagtgctttaaagacttggtctaaagaaatgaaaaatattgaaaaagttcagaatgtttttaatcacagagctatgatgaatggtctctcatctaaagctgaatggtttgaaaaactagaaaatagtagagcagcctaat

SEQ ID NO: 277888 - DNA, 534 bp, Unknown
  Bacterial polypeptide expressing nucleotide sequence isolated from the Sargasso Sea
gatgaacattgacaccctaaagaccaccgctgcagcgatggttgcacctggtaaaggcattcttgctatggatgaaagccacccgacgtgcaacaagcggttcgaggcgttgggtattccaacgacgccggagatgcggcgcgaatatcggaccatgctggtgacgacgcccaagctcggacagcacatcggtggagccattttgtttgacgagacgatacgcgattgtgtagttgatggtcgaagcttcgtcgaggtgcttactgagcagggaatcgtgccagggatcaaggtcgatgcaggagccaaggaccttgccctgcggtcgggggagaaagtcaccgaaggactagatggtttagggccgcgtcttgcggaatacagcgagttaggcgcgcgctttgccaagtggcgtgcggtttatgccattaccgatacgcggcctagtcaggcctgtttcagcgcgaatgcgcatggtttggctcgttatgctgcgttgtgtcaggagcacgatattgtgccgatcgtagagcc

SEQ ID NO: 277889 - DNA, 140 bp, Unknown
  Bacterial polypeptide expressing nucleotide sequence isolated from the Sargasso Sea
tatgagaattgaagacgtagcaaaaaaaatgtgtgaaaaaggtaaaggaatattagctgcagatgaaagcactgggacaattgcaaaaagatttaaaagtataaatgtagaaaatttggaaaaaaatagattaattttta

SEQ ID NO: 277890 - DNA, 319 bp, Unknown
  Bacterial polypeptide expressing nucleotide sequence isolated from the Sargasso Sea
aatgtctgaattaagtaaaatagctcttaaaattttatcaaatgggaaaggtattttagctgcggatgaaagcacagctacaatgacaaaaagattaaactcagtcaaagttgaatctactccggaaaatagactgctttttagagaaacactattttcatcttcatcgatgaatagttgcattggtggagttatattattcgacgaaactataagacaaacaacttcgtctgggaaaactattcctgagttaatagaatctaagggatctatcacgggtattaaagtcgatacaggaactaaggctatgctgatcaaa

SEQ ID NO: 277891 - DNA, 115 bp, Unknown
  Bacterial polypeptide expressing nucleotide sequence isolated from the Sargasso Sea
atgtctgaactaaacaaaattgcacttaaaataatttctaatggaaaaggtatccttgcagcagatgaaagcaatggaactatgacaaaaagacttgaagcagtaaaggtaaact

SEQ ID NO: 277892 - DNA, 309 bp, Unknown
  Bacterial polypeptide expressing nucleotide sequence isolated from the Sargasso Sea
aatggagaaaatcgtgaataaaactgaacagctggaaagaataagaacaaataaaggctttatagctgcgttagaccaaagcggaggttccacacctaaagctctccaattatatggaatttctgaagatcagtaccaagatgacgaagaaatgttcaaactaatccatgatatgcgaacaagaataatcacaagcccctctttcagccaaagcaacataattggagcaatattattcgaacaaactatggagcggcttatatccggggtgccaaccgctgattatctttggaaaacaaaaaaaatttg

SEQ ID NO: 277893 - DNA, 227 bp, Unknown
  Bacterial polypeptide expressing nucleotide sequence isolated from the Sargasso Sea
tatgagtatagaagatattgcaaaacaaatggtggctaagggaaaaggaatactagctgctgatgaaagcactggcacaatggaaaaaagattaaaaagtgttaatgtagagtgcacggagaaaaatagacttcactttagagaaacattattttcctccaagtcaatgcaaacttgtataagtggagtaattttatttgatgaaaccttaagacaaacttcaaata

SEQ ID NO: 277894 - DNA, 181 bp, Unknown
  Bacterial polypeptide expressing nucleotide sequence isolated from the Sargasso Sea
atgtctgaactaaacgatatagcgttaaaaattattggtaatggaaagggaattcttgctgcagatgaaagcacaggcacaatggcaaaaagactcgacagtgtaaatgttaagtcgagcactcaaaatagattaatttttagagaaaatctttttagttcagaaaagtatgaaaagttgt

SEQ ID NO: 277895 - DNA, 348 bp, Unknown
  Bacterial polypeptide expressing nucleotide sequence isolated from the Sargasso Sea
aatgtctgaattaaataatatagctttgcaaattatcagtagcggaaaaggaattctagccgcagacgaaagcactggaacaatgaccaaaagacttaagagttttaatgttgagtccagtactaataatagattattatttagagaaacactttttagctcttctagtatgaaagaatgtattggaggtgttattctttacgatgaaactataaaacaaactagcacatcaggaaaaaaagttcctgagttaatttcagattcaaattcaattcctggtataaaagttgatactggcgcaaaaactttagccaattctgaagaagagaaaattactgagggtcttga

SEQ ID NO: 277896 - DNA, 302 bp, Unknown
  Bacterial polypeptide expressing nucleotide sequence isolated from the Sargasso Sea
tatgacagaacttaataaaattgctcttaaaataatttctaatggtaaaggaattcttgctgccgatgaaagcaatggcactatgacaaaaagacttgaagcagttaaagttgattcaacaccagaaaacagactattatttagagaaatactattttcatcagagggtatgaaaaaatacataggaggtgttatcctttatgatgaaacaattaatcaaaattcaagcctagggaaaccaatacctgatttaatatccagttctggtgcggtgcccggcattaaagttgatactggtgcaa

SEQ ID NO: 277897 - DNA, 526 bp, Unknown
  Bacterial polypeptide expressing nucleotide sequence isolated from the Sargasso Sea
atgaccgaattaaataagatagcttgtaaaattttagaaaatggtaaagggatattagctgccgatgaaagcactggaactatgacaaaaagattagaaagtgtcaatgttaattcaacacctaaaaatagaattttatttagagagactttgttctcatcggacggaatgaaagaatttatcggtggtgttattttatatgatgaaacaattaagcaaaatacaacagatggaaaaagtattattgatttactttctgaaacaggttcaatagcaggtataaaagttgacacaggtgcaaaacaaatggcaggaagtccagatgaaaaaattactgaaggtttggacggtttgagagatagattaaaagaatattcaaagcttggagctagatttacaaaatggaggggtgtatataatatttcaaataaatatcccagcaaactttcaattcaatcaaatgctcatgcgcttgcgagatatgcggccataattcaagagtgtaacatggttccaattgtgaacc

SEQ ID NO: 277898 - DNA, 307 bp, Unknown
  Bacterial polypeptide expressing nucleotide sequence isolated from the Sargasso Sea
attcttgaggataatacaagagattatagagagatgctttttagatcaaaaggcatgaaaggaaatattggcggagtaattttatttgatgaaactctgaggcaggatgctaaagatggcactccccttaaagaattaatcactaatatgggtgccctgcccggcattaaggttgataaaggcttagtgcctcttgttgatggattagatgaagtagtgactcaagggttggatgggctcgatgaaagatgttccgaatatgattctttaggagcaaaatttacaaagtggctgtgcggtaataaaa

SEQ ID NO: 277899 - DNA, 500 bp, Unknown
  Bacterial polypeptide expressing nucleotide sequence isolated from the Sargasso Sea
gatgtctgaacttaataaaattgttctcaaaattatttctaatggcaaaggtatacttgcagcagacgaaagtaatggaactatgaagaaaagacttgatgcagtaaatgtatcttcaaacccagaaaatagacttttatttagagaaatactattttcatcaaaatgtattggagaatgtatagggggtataattctttatgatgaaacaataaatcagacaacaagttttgggaaatcaatacctgatttaattgcttcctcgggtgcaatccctggaattaaggtagacacaggagcaaaagatttagcaaactctcctgaggaaaaaattacagaaggcttagatggacttagagaaagattaaaaaaatattatgatcttggagcaagatttacaaaatggaggggtgtgtattcaataagtgaaaaataccctattaagcttgcaattcatagtaatgcacatttcgcttgcaagatatgctgccttggtccag

SEQ ID NO: 277900 - DNA, 280 bp, Unknown
  Bacterial polypeptide expressing nucleotide sequence isolated from the Sargasso Sea
atgacattaaatgaaatagctaaaaaaatgtgtgctaaaggaaaaggcatccttgctgcagatgaaagtactggaacaatagctaaaagatttaaaagtataaatgttgaaaacatagaaaaaaatagactaaattttagacaaacactttttaattcaagtgctatgaaagattttattggaggagtaattttatttgatgaaacaataagacaaaaaactaccttgggtccatcaattccagaattaatatctaaacacggggcttaccaggaataaa

SEQ ID NO: 277901 - DNA, 514 bp, Unknown
  Bacterial polypeptide expressing nucleotide sequence isolated from the Sargasso Sea
tatgtctgaactaaacaatatagcacttcaaattcttagtaacggaaaggggattcttgcagctgacgaaagtacaggaacaatgactaaaaggctggaaggtgttaatgtgccatcaactcctgaaaacagaatgttatttcgagaaactctattcagctctgcatgtatgaatgattgcattgggggtgtaattttatatgatgaaacaattaaacagatatcatcgaaaaaaaataaaattccagaattaatttcaagtatgggtcctcatccaggtataaaagttgatactggggcaaaagttttagcaggctcaccaaatgaaaaaattactgaaggtctagacggtcttagagaaagattgaaagaatatcaaaaccttggtgcaaaatttacaaaatggagaggtgtatacagtatatctaaagattatccaagcaaactaacattacaatcaaacgcacatgctttggctcgatattccgctttagttcaagaatgcaatatggtt

SEQ ID NO: 277902 - DNA, 196 bp, Unknown
  Bacterial polypeptide expressing nucleotide sequence isolated from the Sargasso Sea
tatgacattagaagaaattgcaaaaaaaatgtgtgctaaaggtaaaggaatattagcagctgatgaaagtacaggcacaatagcaaaaaggtttaaaagtataaacgtagaaaatactgaaaaaaacagattagtttttagacaaaccctttttagttcagaggctatgaaaaattatattggtggagttattctt

SEQ ID NO: 277903 - DNA, 328 bp, Unknown
  Bacterial polypeptide expressing nucleotide sequence isolated from the Sargasso Sea
atggccctcgttccactaagactacttttagatcacgctgctgagaatggttacggtattccagctttcaatgttaataaccttgagcaagttcaagcaatcatggaagcagcatatgaaactgatagtcctgtaatccttcaagcttcaagaggagcaagaaattatgcaggagaaatattcctacgtcatcttatacttgccgctacagaaacatatcctaatattccagtagtaatgcaccaagaccatggtaatgagccatcaacatgctattcagcagcaataaatggtttaacatcagtaatgatggatggctctctagagg

SEQ ID NO: 277904 - DNA, 319 bp, Unknown
  Bacterial polypeptide expressing nucleotide sequence isolated from the Sargasso Sea
aatggagaaaaacttgattaacacggaacagctgaaaagagtaagagaagataaaggcttcatagctgcgttagatcaaagcggaggatctactcctaaagctctccaattatatggaatttttgaagaccagtaccaagatgaagaagaaatgttcaatctaatccatgatatgcgaacaagaataatcaccagcccctctttcagccaaagccacataattggagcaatattatttgagcaaactatagagcggcttatctcaggggtgccaaccgcagattatctttggaaaacaaaaaaattgttccatttctaa

SEQ ID NO: 277905 - DNA, 465 bp, Unknown
  Bacterial polypeptide expressing nucleotide sequence isolated from the Sargasso Sea
aatgaaagatttaccataccagccatacttggacaaaatatccgggagtgatggattcattgcagcacttgaccagagcgggggtagtacgcccaaagctcttagactttacggtataacagagtcagagtactctaatgaagaagaaatgtatgaaaaggttcatcaaatgcgctcccgtataataacttcaaatagttttaggggtgatcgaattttgggtgccattctttttgagaaaacaatgaatggagaaatttcagggatggataccgcaaattatttatggagtaaaaagaatgttgtaccttttctcaagatagataagggactggatgaagtaaacgacggggtacaattaatgaagccaaatccgggactggaagatctactcgatcaggcagtaaataaaggtatttttggtaccaagatgcgttcagttattaaagatgacgatgaaaaagg

SEQ ID NO: 277906 - DNA, 416 bp, Unknown
  Bacterial polypeptide expressing nucleotide sequence isolated from the Sargasso Sea
tatgtcagagcttaataaaatcgcgaataatattcttggtaaaggaaaaggaattctcgctgctgatgaaagtactggaacaatgactaaaagattagagtcagtcaaagtaccctctactcctgaaaatagattgttatttagagaaacactatttagtgcatcaagtatgaatgaatgcattggaggagtaattttatatgatgaaacaataaaacaaatgtcctcaaaaaaatataatattccagaattaatttcaagtatgggcagtacgccaggcattaaagtagacaccggtgctaaagttttatcaaactccgtagaagaaaaaattacggaaggcctagatggtcttagagatagattaaaagaatattataaacttggagcaaggtttaccaaatggaggggtgttt

SEQ ID NO: 277907 - DNA, 166 bp, Unknown
  Bacterial polypeptide expressing nucleotide sequence isolated from the Sargasso Sea
aatgtcattagaagaaattgcgaattatatagtttcagacggtaaaggaattcttgccgcagatgaaagtaatccaacatgcggcaaaagatttgattctattgaagtagaaaattctgagaataatagaagagattatagagagatgctttttagatcaaaaggt

SEQ ID NO: 277908 - DNA, 490 bp, Unknown
  Bacterial polypeptide expressing nucleotide sequence isolated from the Sargasso Sea
caccagccacggcgcctacaagttcacccgcaagcccaccggtgaagtgctggccatcagccggatcgctgaaatccacaaagccatccccaacacccacctggtgatgcacggctcctcctccgttccgcaggaatggctggaaatgattaacaagtacggcggtgccatccccgagacctacggcgttcccgtcgaagagatccaggaaggcatccgcaacggtgttcgcaaggtgaacatcgacaccgacaaccgcctcgccttcaccgccgcagtgcgtgaagccgccatggccgatcctgccaacttcgacccccgccacttcaacaagccggcgcggaagtacatgaagcaggtctgcctggatcgctaccagcagttctgggctgccggcaacgccagcaagatcaagcaacgcgacatcaactactacgccggtctttacgccaagggcgctctcgaccccaagactgccgtcgccgcctga

SEQ ID NO: 277909 - DNA, 308 bp, Unknown
  Bacterial polypeptide expressing nucleotide sequence isolated from the Sargasso Sea
aatgtcagaactatactcaattacagaaaaaataatttctcatggtaaaggtattctagccgctgacgagagtacaggtacgatgactaaaagactagatgcagtaaacgttccatcaactgcagagaatagacttttatttagagaaacgcttttatcatctcagagtatgaaagattatattggaggagtaattttatacgatgaaacaataaaacagattgcatcaaataaaaaaacaattcctgagcttatttcaaattctggagctgttccaggaaataaagttgatactggagctaaggttt

SEQ ID NO: 277910 - DNA, 805 bp, Unknown
  Bacterial polypeptide expressing nucleotide sequence isolated from the Sargasso Sea
aatgactaaaagactagatgctgttaatgtaccatcaacaccagagaatagacttttatttagagaaacacttttttcgtctgaaagtatgaatgattgtataggaggagtaattttgtacgacgaaactataaaacaaatagcgtcaaacaaaaaaacagtacctgagcttatttcaagctctggcgcagtgccaggaataaaagtcgataccggagcaaaagtattagctaattcaaaaaatgaaaaaattactgaaggccttgatggtttaagagatagattaaaaatttattacaaactaggagctagatttacaaaatggcgaggtgtttatattatttctgataaatacccaagtaaacttgcagttcattcaaacgcacatgctcttgctcgttacgctgctttagtccaagagagtgggatggtgccgatcgttgagcccgaggtattaatggatggagatcataattcagaagattgctttaagaaaacttctgaggttttaaaaaaatgctacgatgaattaattttaaataagattgacttaaaaggaacaatactaaaacctaatatgattttacctggagttgattgcaaagagaaaatcgaatgtaaaaaaattgcagagttaacattgaaatgtttggaagaatccgtaccatctgaggttccgggtatagcatttctttcagggggacaaactgaaaaagaagcagtcgagaatttgaatgaaataaataaattaaataaatcaaattttattattacatattcttatggtagagctttacaacaaagt

SEQ ID NO: 277911 - DNA, 709 bp, Unknown
  Bacterial polypeptide expressing nucleotide sequence isolated from the Sargasso Sea
ggttttatcaaactcacatgaagaaacaattacggaaggtttggatggactaagagaaaggttaaaaaaatattatgagctaggtgcaagatttacaaagtggagaggtgtttataagataagcaataaatacccaagtcagcttgcaattcattctaatgcacatgcattagcaagatatgcagctttagttcaagaatgtgcaatggtgccaatagttgagccagaagtattaatggatggtgaacataattcagatatatgtttacaaaaaacatctgaagtaatcaaaaaatgttttgatgaactaattattcataaggtagacttgacaggtattattttaaaaccaaatatgattttatctgggaatcattcaaataataaaatttctaaagaggaggtttcagttaaaacgcttgaatgtattaaaaattcggtcccaaaagaagttcctggaattgcattcctgtctggtggtcaatcagatatagaggcaacagaaaatttaaatatgataaataaaaataacaacactaatttcataatgacatactcttatggaagagctcttcaacaagctgcccttagaacttggtcaaaagataccaaaaatattaaggaaactcagaatacttttaatcatagagctaagatgtgttcccttgctgctgaaggaaaatggtttagaaatcttgaaaataattag

SEQ ID NO: 277912 - DNA, 722 bp, Unknown
  Bacterial polypeptide expressing nucleotide sequence isolated from the Sargasso Sea
tgacacaggtgctaaagttttagcaaactctacgaatgagaaaattactgaaggcctagatggtcttagagatagactaaaagagtattacaagcttggagcgagatttactaaatggagaggagtttataatattactaaagaacaccctagtaaacttgcaatacattcaaatgcacacgcacttgcaagatattcagcattagttcaagaatgcaacatggttccaatagtagaaccagaagttttgatggatggaaaccactcagctcaagactgttttatgaaaacttcagaagtaataaaaaaatgttttgaagaattgattttacataagatagatttaacaggtataattttaaaacccaatatgatcttatcgggagctaattctgataaaaaaattccttgcaaagaagttgcaaatttaacaattgaatgccttaaaaattcagtcccatcagaagtccctggaatagcttttctatcaggtggccaaacagaagttgaggcaacagaaaatttaaacttaattaacaaggctaatagtactaacttcatcatgtcttattcttatggacgagctttacaacaaagtgcgcttaagcattggtcgaaagatttaaatgatattgagggtactcaaaaagtatttaatcatagagcaaaaatgaatactttagcagctcaaagtaagtggtcaaaggaacttgaaaattagt

SEQ ID NO: 277913 - DNA, 202 bp, Unknown
  Bacterial polypeptide expressing nucleotide sequence isolated from the Sargasso Sea
atgtcattagaagaaattgcgaattatatagtttcagacggtaaaggaattcttgccgcagatgaaagcaatccaacatgcggcaaaagatttgattctattgaagtagaaaattctgagaataatagaagagattatagagagatgctttttagatcaaaaaggtatgaaagaaaatattggcggagtaattttatttgat

SEQ ID NO: 277914 - DNA, 279 bp, Unknown
  Bacterial polypeptide expressing nucleotide sequence isolated from the Sargasso Sea
tatgaagataaatgaaattgcaaaacaaatggtatcaaatggtaaagggatacttgcagccgatgagagcactggcacaatgacaaaaaggctcgatagtgtcaaagttgagtcaaatgaaaaaaatagattaacttttagacatacgctttttacatccaaaaatattagtaaatatataagcggcgttatactttttgatgaaacaattagacagaataaagatgggaaaactattagtgaaatattgaataatcaaaatattcttcctggaataaa

SEQ ID NO: 277915 - DNA, 753 bp, Unknown
  Bacterial polypeptide expressing nucleotide sequence isolated from the Sargasso Sea
gaatcaaagtagataagggtgcaataccgttatccaaaaactcagaagaaaaatttactgaagggcttgatggtctttctgaaagattaaaagaatataaagttttgggagctgaatttacaaaatggagagcgataattaatattgatttaacgaagaattatccttcttcatattgtctggaatctaatgctttcatgcttgctagatatgccaaaacagttcaagataatgaaatggttcctattgttgaaccagaggttattatggatggtaatcatactatcgaagactgttttaaagtgacctcatcaacattaaaaaaagtttttcaacaactagaattacacgaagttaatctttcaggaattcttttaaaaccaaacatggtagtttctggaacaaaatgtgaagaacaagctacagttgaaaaagtagcaaaattaactgtacaatgcttaaatgaaaatgtaccaaaagaggttgctggtgtagtttttttatcgggtggacaaagtaaccaaaaagcaacccttcatctcaatgaaatgaataagctctttaaaaatcttccatggaagttaagctattcatatgggagggctttgcaacaaccagcaatttcatcgtggaaaggtgaaaaaaataacataaaaatatctcaaaatgctctttttaaaagaagcaaactaaattcatctgcgacatcaggaacctattcaccaaatgatgaacaacagatttatgagtaat

SEQ ID NO: 277916 - DNA, 717 bp, Unknown
  Bacterial polypeptide expressing nucleotide sequence isolated from the Sargasso Sea
actatgagtacaatgtcgaggtgacaaaggtgaccgtggatatggcccatgcgtgcggagtgtcggttgagggagagcttggttgtttgggtagccttgagtctggattagcaggagaggaagatggtgtcggagctgagggggttctatcaatggaccaattgctcactgacccagagcaagctgcggaattcgtgagtgagactggtgttgacgcgctcgccatagcaataggtacatctcatggagcttataaattttctagaccacccagcggtgatgtgctagcgatagacaggatcaaagaaattcattcaaggcttcctaacacccacctggtaatgcatggaagctcttcggtgcctcaggatttattgagtgagataaatgagtttggaggtgacatcccggaaacctatggtgtgcccttagaggagattcaagaagggataaaaaatggtgtccggaaggtgaatatcgacactgacctcaggttagcttcaacagctgctattagaaagcatctatcaaacaatgcttcggagttcgaccctcgaaagtacctagcagattccactgaagcaatgaaaaagatagttatagagagatatgaagccttcaatacagcgggtaatgcccaaaaaattgtaccgattccactggatgcaatgggttctcaatatgaaagtggtagcttaaatcagctcgttaactaaa

SEQ ID NO: 277917 - DNA, 576 bp, Unknown
  Bacterial polypeptide expressing nucleotide sequence isolated from the Sargasso Sea
gagctatagataaggatatgctggttaccgatccggatgaagcggccgactttgtaaataagacgagatgtgatgcgcttgctgtcgccattgggacgtcccatggcgcctataagtttacccggaaaccaaccggtgacattcttgccatggaagtggttaaggcaatccacgcaaaactacctgacacccacctagttatgcatggctcctcttcggttccacaagaattgcaagacatcatcaatcaaaatggtggagaaatgccccaaacctatggggttcctgtggaggagattgaaattgggataaagaacggtgtgaggaaggtgaatattgataccgataaccggatggccatcactggagccatacgcaaggttttaagtgagaaaaagacagagttcgacccacgcgcttacctgaaaccagctatcagtgctatggaggaagtgtgtatcgaccgtttcgaacgcttcaattgtgccgggcaggcatctaaaatcaagccgatcccgctgccggatatggcggctcgttatgctgatggagcactggacccgacggtgcattaaa

SEQ ID NO: 277918 - DNA, 305 bp, Unknown
  Bacterial polypeptide expressing nucleotide sequence isolated from the Sargasso Sea
aatgaccgaattaaataaaatagcattaaaaattttagaaaacggtaaaggaattcttgctgcagatgagagtaccggaacaatgactaaaagacttcaaagcgtaagcatagactcaactcccgaaaatagaattttatttagagaaacattgttttcttctaagggaatgactgaatgtattggtggtgtaatactttttgatgaaactattaatcaaaaaacgaatgatggaaaaatggttccagatctcctttcaaatatgggatcaattgctggtattaaagttgacactggtgctaaac

SEQ ID NO: 277919 - DNA, 495 bp, Unknown
  Bacterial polypeptide expressing nucleotide sequence isolated from the Sargasso Sea
aatgtcagaactaaataaaattgcactaaaaataatttctaacggtaaaggtatacttgctgcagatgaaagcactggtactatgactaaaagacttacagcggtaaatgtaaattctaccccagaaaatagacttttatttagggaaattcttttctcatctgaatgcatgaaagattgtattggaggagttattctttacgatgaaactataaaccaaactacaaattttgaaaaatcaatcccagaactaatttcagcatcaggcgcagtaccaggaattaaagttgatacaggtgctaaagaattagcaaactctcttgaagaaaaaattactgagggtttagatggccttagagatagattgaaaaaatattataaacttggagcaagatttacaaaatggagaggggtttactctattagtaataaatatccaactaagctagcaataaatagtaatgctcatgcacttgcaagatactcagctttagt

SEQ ID NO: 277920 - DNA, 375 bp, Unknown
  Bacterial polypeptide expressing nucleotide sequence isolated from the Sargasso Sea
aaaaattacagaaggacttgatggtttaagagaaagattaaaagaatattataaaattggagctagatttactaaatggagaggtgtttataacataacaaaagattacccaaccacaatatcaattcaatctaacgcacacgcactaacaagatacgcaccattagtccaagaatgcagtatggttccaattgttgaacctgaagtcttaatggacggagatcactctgctgatgaatgctttaacaaaacttcggttgtaattaaacagtgttttgaagatttaattttgcacaaagtagatttaacgggagtaattttaaaaccaaatatgattttagcaggttctgaatctaaaagtcaaattccaaatga

SEQ ID NO: 277921 - DNA, 670 bp, Unknown
  Bacterial polypeptide expressing nucleotide sequence isolated from the Sargasso Sea
gagttagtgttgaagggggaattgggttgcttaggttcattagagacagaaaaaggtgaggcagaagatggtcatggatttgaaggtgaactctctacagatatgctattaactgaccctgtagaagctgcagattttgttgcaaaaacaaaagttgatgctttagctatagctataggtacaagtcatggtgcttataaattcacaagaaaacctacaggagaagttcttgcaataagcagaattgctgaaatccataaagcacttccaaatacccatcttgttatgcatggatccagttcagttcctcaggaatggttagatatcattaacaaatatggtggtgaaattcctcaaacatatggtgttcctgttgaagaaattcaagagggaataagaaatggagtcaggaaagttaatattgatactgataacagacttgctttcactgctgcggttagagaggcagcatttgctgacaaggcaaacttcgaccctagacatttcaacaaacctgctagaaaatacatgaagcaagtttgtcttgatagatacaagcagttctggtgcgagggtcaagcaagtaagatcaaacaaaacagtaccaattattttgctgatctttacgctaaaggtgatttagatccaaaagtaaaagctactgtttaat

SEQ ID NO: 277922 - DNA, 649 bp, Unknown
  Bacterial polypeptide expressing nucleotide sequence isolated from the Sargasso Sea
cttaaggaatattataaacttggagcaagatttacaaaatggagaggtgtttataacatatcagaaaaatatccaagtaaactagcaatttcatctaacgctcatgcattagcaaggtattcggctcttgttcaagaatgtaatatggttcctattgttgaacctgaagtattaatggatggaaatcactcagctaatgattgtttcgataaaacatcagaagtaattaataaatgctttgaagaattaaacattcatgaggtagatctaactggaataatattaaaaccaaatatggttttgcctggcacaaagtctaaagaaaaagtatcaaatgaagaagttgctaaacttacactaaaatgtcttaaagaaaatgttcctaagtctgttcctggaatagcttttttatcaggtggtcaatcagatatagaagctacagaaaatttaaacttaattaataaatataatgatacaaattttattatgacttattcatatggtagagcgttacaacaaagtgcgctaaaattttggtctaaagacacaaaagatattaaaggaactcaaaatgtatttaatcatagagccaatatgtgttcgctagccgctcggggaaaatggtcaaaagaacttgaggaaaaataaa

SEQ ID NO: 277923 - DNA, 320 bp, Unknown
  Bacterial polypeptide expressing nucleotide sequence isolated from the Sargasso Sea
aatgtctgaacttaacaatatagctttaaaaattattggaaatggaaaaggaattctggctgcagatgaaagcactggaacaatgactaaaaggctagatagcgttaatgttgagtcaagctctaaaaatagattaatttttagagaaactctttttagctctgaaagcatgaaaaattgtattggtggagtaattctttatgacgaaactataaaacaatctagttcctcaggaaaaaaaattccagaattaatatctagctcaggcgcagtgcctggcatcaaagttgatacaggtgcaaaagttttggctaactctc

SEQ ID NO: 277924 - DNA, 139 bp, Unknown
  Bacterial polypeptide expressing nucleotide sequence isolated from the Sargasso Sea
aatgtctgaactaaaaaaaattgctcttcaaatattatcaaacggcaaaggtattttagctgctgatgaaagtacagccacaatgacaaaaagattagattcagtaaaagtacgttccgatgaaaataatagactgctt

SEQ ID NO: 277925 - DNA, 178 bp, Unknown
  Bacterial polypeptide expressing nucleotide sequence isolated from the Sargasso Sea
atgaatttaaagaacttaaataacatagccattcaaatggtacagaaagggaaaggaatactagcagcagatgaaagcaatcctacttgcaaaaaaagatttgattcaatcaatgttgaatctacagaacaaaatagaaacaaatatagagacatgcttttcaccacaacagggatgg

SEQ ID NO: 277926 - DNA, 154 bp, Unknown
  Bacterial polypeptide expressing nucleotide sequence isolated from the Sargasso Sea
aatgtctgaattaaataatatagctcttaaaattctagaaaacggaaaaggaattctagctgctgatgagagcaccggaacaatgactaaaagattagaaagtgtaaatgttccatcaactccagaaaatagattattattagagaaacattat

SEQ ID NO: 277927 - DNA, 559 bp, Unknown
  Bacterial polypeptide expressing nucleotide sequence isolated from the Sargasso Sea
atggttttaacaggaaataaagttcaagaacttttcgataaagcaaaagcaaacaaatttgctatacctgcagtaaatgtaattggatcaaactcaattaatgctactttagaaactgctgccaaactgaattcaccggtcataattcaattttcaaatggaggtgctatttttaatgctggtaaaagtttaagcaatgaaaaccaaattgctgcaattaaaggcgctgtttctggtgccaaacatgttcgtgaattaagcgatttgtatggagcaaccgttatcttacatactgatcatgcttccagaaaattattgccatggattgatggtttaattgatgaaagtgaaaaaaacttcaaattaaccggtgaacctctgtttagttctcatatgatcgacctttctgaggaaaagattgaagataacattgaaacatgctgtgaataccttaaaagaatgtcaaaaattggaatgacacttgaaatagaactcggtgtaaccggtggtgaagaagatggtgttgataatactggtattgatgaatcaaaaaagtgta

SEQ ID NO: 277928 - DNA, 289 bp, Unknown
  Bacterial polypeptide expressing nucleotide sequence isolated from the Sargasso Sea
aatgacagaactaaataaaatttcacttaaaattttatcaggtggaaaaggtattcttgctgctgatgagagtacgggaacaatgactaaaagacttgagtctgtaaaagtttcgtcaaatgaagaaaatagacttctatttagaaaaacactcttctcttcaggaagtatgaaaaactgtattggaggagtaatattatatgacgaaacaataaaacaatctagcgagtctaaaacaatctcagaattaataaatgaaagtggtgcagtggtaggtataaaagtagat

SEQ ID NO: 277929 - DNA, 438 bp, Unknown
  Bacterial polypeptide expressing nucleotide sequence isolated from the Sargasso Sea
aatgagtgatatagagaaaattgcaaaaaaaatggtagaaaaaggtaaaggcatattggctgccgacgagagtactggaacaatgacaaaaagattgtccagtgttaatgttgagtcaacacctgaaaatagacttaaatttagagaaacattattttcagctgaaggaatgaaaaatcatattagtggagtaattctttatgatgaaacaataaaacaaaaagcttcctctggaaaatcaataccagaattaattcaaagtttaggttcaattcctggcattaaagtagatactggggcaaaaaaattagctggatctcccgatgaaaaaattactgaaggattagatggccttagagaaaggttagcagaatattataaacttggtgcaagattcacgaaatggagagcggtatattcaatttctaataaataccc

SEQ ID NO: 277930 - DNA, 250 bp, Unknown
  Bacterial polypeptide expressing nucleotide sequence isolated from the Sargasso Sea
atggatctaagttcattgaactcaatagcacaatcaatggttgctcccaacaaggggatacttgctgcggacgaaagcacgccaaccattggaaaacgatttgccacaattgatacagaatcaactgaaagcaatagacaaatctatcgcaatttacttttcacgagcccgaatgtttcagagtatataagtggtgttattttatttgatgaaaccatcagacaatcgactaatgaggaacaccattgca

SEQ ID NO: 277931 - DNA, 691 bp, Unknown
  Bacterial polypeptide expressing nucleotide sequence isolated from the Sargasso Sea
aagaagaaaaattacagaaggtcttgatggtttaagagaaagattaaaaacctactatgaaatgggggctaggtttactaagtggagaggtgtttatttaatttcagataaataccctagcaaattatcaattaattctaatgcacacgcactagccaggtactctgctttagctcaagaatgtggcatggtgcctatagtggaaccagaagtattgatggaaggaaatcattctgcagatgattgttatgaaaaaacatcaatagtattaaaaaaatgtttcgatgagcttgaattacataaaatagatttaaaaggtataatattaaaaccaaatatgattttaccaggatcacaatcaacaaataaaatttcaaatgaagaaattgcaagtctaacaactaaatgtctaaaagaaaatgttccaacagaagtacctggaattgcatttttgtcaggcggacaaacagagattgaagctactgataacctaaatcaaattaatataaagaataatacaaactttattatgacctattcgtatggaagagcacttcaacaaagtgctttaaaattttggtcaaaagacataaataatattaatggtacgcaagagttatttaatcacagggcaaaaatgtgttctctagctgctcaaggtaagtggtcaaaagatattgagaataaataa

SEQ ID NO: 277932 - DNA, 167 bp, Unknown
  Bacterial polypeptide expressing nucleotide sequence isolated from the Sargasso Sea
aatgtccgaattaaacaaaattgttcttcaaataatatcaaatggtaaaggcattctagctgctgacgaaagtacagcgacaatgacaaaaagattggattcagtaaaagtccaatctaatgaaactaatagactactttttagacaaaactcttttttcgtctcaa

SEQ ID NO: 277933 - DNA, 289 bp, Unknown
  Bacterial polypeptide expressing nucleotide sequence isolated from the Sargasso Sea
atgtctgatctaaataatattgtaaataaaattcttgaaaatggtaaaggaattctggctgcagatgaaagcacgggaacaatgaccaaaagacttgatggtgtaggtgtgccctcaactccggagaatagattactttttagagaaactcttttttgttcatcaggaatgaaaaattgtattggtggagttatattgtacgatgaaacaattaagcaaacatcctcaaaaaaaaacaagataccagaattaattgagagtatgggatcttgcgcaggaataaaagtag

SEQ ID NO: 277934 - DNA, 253 bp, Unknown
  Bacterial polypeptide expressing nucleotide sequence isolated from the Sargasso Sea
cctggtattgttttcttatctaggaggtcaaactgaaattgaagcaactgaaaacttagatcagatgaataaaataggaaatttaccatggaacttaagtttttcatatggtagagccttacaggcttccgctttacaggcttggtcaggaaaagtggaaaatgaagaaattgcatctgcaacttttgatcatagggccaaaatgaattcgctagcaactttaggtaagtgggattctgaactagaaaagtag

SEQ ID NO: 277935 - DNA, 214 bp, Unknown
  Bacterial polypeptide expressing nucleotide sequence isolated from the Sargasso Sea
aatgtcgaaattaaataagatcgcgcttgaaattttaggagaaggtaaaggtatcttggcagctgatgaaagcaccgcaactatgactaaaagattaagcggtgtgaatgttccgtcaacaccagaaaatagattaatgttcagagaaactctatttagtgctactggaatgactgaatatataggtggagttattttatatgacgaaactata

SEQ ID NO: 277936 - DNA, 400 bp, Unknown
  Bacterial polypeptide expressing nucleotide sequence isolated from the Sargasso Sea
atgagtttagagtttgaaagtttgaatgatattgcggaggcaatgactgtgaaaggtaaaggtatattagcagccgatgaaagtagtccgacctgtaagaaaagatttgattctattgatgtagacagtacggaagagaatcgaaatatatacagagatatgttatttactacaaaaaggatggaagaatttattagcggtgtaatactgtttgatgaaactatcaggcaatctacaattaaagatggtgttagttttccagaatacttatcgggacttggcgtaatcccgggcataaaagttgatgcaggtgctaagcacttatccggcacggatagtgaaaagattaccgaagggctagatggtttagatgggaggcttaaggattatacaaaatgga

SEQ ID NO: 277937 - DNA, 394 bp, Unknown
  Bacterial polypeptide expressing nucleotide sequence isolated from the Sargasso Sea
gatgtctgaattatataaaatagcaaaaaaaattcttcataatggaaaaggtatccttgcagctgatgaaagcaatgggactatgaaaaaaagattggactcagtaaatgtaaagtctaatgaaaaaaacagattaattttcagagagacacttttttcttcaaactcgatgaaagaatgtataggtggtgtaatattatatgatgaaacaattagacaaaacacttcacaaaacaaatctataccagaattaattactgaaagtggagctgtaccaggaataaaagttgatacaggcgcaaaaactttagcaggttctaaagacgaaaaagttactgaaggattagatggtttacgagaaagattgaaagattattatcaacttgggagctag

SEQ ID NO: 277938 - DNA, 220 bp, Unknown
  Bacterial polypeptide expressing nucleotide sequence isolated from the Sargasso Sea
aatgagtgacttagaaaaaattgcaaaacaaatggtagcaaaaggtaaaggtattttagctgccgacgaaagcaccgggacaatgacaaaaagattaaccagtgtaaatgtagaatcaacatcggtaaatagacttaaatttagggagacattgttttcagcatcgagcatgagaaatcatattggtggtgtaattctttatgatgaaacaataaaacaa

SEQ ID NO: 277939 - DNA, 505 bp, Unknown
  Bacterial polypeptide expressing nucleotide sequence isolated from the Sargasso Sea
aatgtctgaattaaataaaattgcattaaagatagtttcgcctggtaaaggaatattagctgcagatgaaagcactgcaacaatgacaaaaagattagaaagtgtaaaaattaattcaactgaacaaaatagattaaaatttagaagtatactattctcttcaaaaagcatggaagattgtgtgggaggggttatactatatgatgaaacaatcaaacaaaagtataaagaaaaatcaatacctgaattaatttctgagtccggaacagtgcctggaattaaagtagataccggagccaaaaagctcgcaaaatctaatgaagaaaaaataaccgaaggactagatgggcttagagaaaggctaaaaaattattataacttaggagcacgctttacaaaatggagagctgtgtacttaatatctgataaatatcctagcaaactggcaattgatgtgaatgctcatgctcttgctagatatgcatctttggttcaagaggctggg

SEQ ID NO: 277940 - DNA, 463 bp, Unknown
  Bacterial polypeptide expressing nucleotide sequence isolated from the Sargasso Sea
aatgtcagaattaaataacattgcaattaaaatcattaaaaatggtaaaggaattttagctgctgatgaaagcactgggacaatgacaaaaagattagaagctgtaaatgttccttcaaccccagaaaatagattattgttcagagaaaccctttttagttcaccaagtatgactgaatgtattggaggtgtaattttatatgatgaaacgataaaacaaatatcctcaaaaaaaaataagatccctgaattaatttcaaaaatgggtgcagccccaggtataaaagttgatacaggtgctaaagttttggcaggttcaccaaatgaaaaagttacagaggggctagatggattaagagaaagattaaaagaatattacaaacttggtgcaaaatttacaaaatggagaggtgtttacagtatatctaagaattacccaagtaaactttcaattgaagctaat

SEQ ID NO: 277941 - DNA, 510 bp, Unknown
  Bacterial polypeptide expressing nucleotide sequence isolated from the Sargasso Sea
tatgtcagagttaaataaaattgcattaaaaatgatttcaaatggcagaggtattctagctgcagacgaaagtaatggaacaatgaccaagagattagaggctgtaaatataaattcaacgccagaaaatagacttttatttagagagacaattttaagttcagaaagtatgagagattgtattggtggagtaattctttacgatgaaacaattagacaaacaacaaaatttggaaaatcaatacctgatttaatttcctcatcgagtgcagtgcctggtataaaagttgatactggggcaaaaaatttagcaaattcatctggggaaaaaataacagaaggcctagacggacttagagaaagacttaagggatattataaactaggagcaagatttacaaaatggagaggtgtatataacataggttatgattatccaagcaaacaagcaatccacagtaatgcacaagccctagcgaggtactcagcattagtccaagaaagccatat

SEQ ID NO: 277942 - DNA, 158 bp, Unknown
  Bacterial polypeptide expressing nucleotide sequence isolated from the Sargasso Sea
aatgagtgaaatagaaaatattgcaaaacaaatggtagctaagggcaaaggtatactggctgctgacgaaagcactggaacaatgacaaaaagattatccagtgtaaatgttgagtcgactacagagaatagacttagatttagggaagtactgtttt

SEQ ID NO: 277943 - DNA, 289 bp, Unknown
  Bacterial polypeptide expressing nucleotide sequence isolated from the Sargasso Sea
catgattaccttgcggcagttgctcgaccacgcggccgaatacggctacggcgtgccggccttcaacatcaacaatatggaacagggcctcgcgatcatggccgcggcgaagaaaacatcgtcgccgctgatcatccaggcaagccgcggcgcgcgctcctatgccaacgacctggtgcttgccaagttgatcgagggcctgtcggagctctaccccgacattccgctggtgatgcatcaggaccacggcaacaacgaagcaacctgcatgaccgcgatcaaatacggc

SEQ ID NO: 277944 - DNA, 234 bp, Unknown
  Bacterial polypeptide expressing nucleotide sequence isolated from the Sargasso Sea
tatgtcagaacttcataacatagctgttaaaattcttgaaaaaggaaaaggaattctagctgctgatgaatccaccggaacaatgactaaaaggttagatggagtcaatgttccatcaacccctgaaaatagattgttgtttagagaaacgctattcagcgcaccaagtatgactgaatgtattggaggagttattttgtatgatgagacaataaaccaagtgtcttcaaagaa

SEQ ID NO: 277945 - DNA, 397 bp, Unknown
  Bacterial polypeptide expressing nucleotide sequence isolated from the Sargasso Sea
aatgtctgaattaaataatattgcattaaaaataattggaaacggaaaaggaattctagctgctgatgaaagcactggaacaatgaccaaaagacttgaaaatgtgaaagtgaaatctagctctgaaaatagattaaaatttagacacacgctcttttcttctaaaagtatgacaacatgtataggaggcgtgatcctatatgacgaaacaattaaacaagaatttgattctagaaaaattcctaaaataatttctgataaaggtgccgtaccaggaattaaagtagatactggagcaaaaaaattagcaaactcttctgaagaaaaaatcacagaaggtttagatggtttaagagataggctaaaagaatattataaacttggtgctagatcacaa

SEQ ID NO: 277946 - DNA, 290 bp, Unknown
  Bacterial polypeptide expressing nucleotide sequence isolated from the Sargasso Sea
aaaaaaaaatgtaccaagtcaagtacctggaatagcttttttatcaggaggtcaatcggaaattgagtcgagcaaaaatttaaatgccattaataaaattaatgatagtaattttttaattactttttcttatggcagaggattgcaggctagcgcactaaaagaatttggaaaaaaccaaagtaatattgaaaatattcaaaaagcatttaatcatagagctaaaatgaatggcttatcctcaaaaggggaatggtcagaagatttagaaaaagatcctgcatcttaaa

SEQ ID NO: 277947 - DNA, 567 bp, Unknown
  Bacterial polypeptide expressing nucleotide sequence isolated from the Sargasso Sea
aatctaatgcgcatgcattagcaagatatgcagcattagttcaggaagctgaaatggttccaataattgagcctgaagttctaatggatggctcacatgatattgataaatgttatactgtaaccacaaatgttttaaacgaatgctacaatgaactaataattcataaagtagatttgaaaggaacagttttaaaacccaacatgattatctctggaacagaatgtaaaaataaatccaattcagaagaaattgctaaaaaaactttagaatgtttaaaaaaaaatgtacctaaagaagtgcctggaatagcttttttatcaggtggccaatcagagattgagtctagtaaaaatttaaatgaaattaacaaaattaacgatactagttttttaattactttttcttatggcagaggcttacaggctagtgccctaagagaatttggaaaaaatcaaggtaatagtgtgaatattcaaaaagcttttaatcatagggcaaaaatgaatggtttatcttcaaaaggagagtggtcgccggacttggaaaaagaggctgtagcttaat

SEQ ID NO: 277948 - DNA, 806 bp, Unknown
  Bacterial polypeptide expressing nucleotide sequence isolated from the Sargasso Sea
actccattaaatagattattatttagggaaactctatttagctcaaaggctatgcgtgattgcgtaggtggagtaattttatatgatgaaactattaaacaaactacaagtaaaaagatatctgtatctgaattaattatatcaaatggagctttcccaggaattaaggttgacacaggcgctaaagttttagctggatctgagcaagaaaaaataactgaagggcttgatggtttaagagatagattaaaagaatattatcaattgggagcgagatttactaagtggagaggagtttatacgatttcgagtaagtatccaagtaaacttgctattagctcaaatgctcacgctttagcaagatattctgctctagttcaagaatgcaaaatggttccaatagtagagccagaagttttaatggaaggtaaccacaccgctgaagattgtctaaacaaaacaaaagaggttttgaataaatgttttgaagaattatctttacatggaatagatttgtctggaataattttaaaaccaaatatgattttgtcgggtacagagtgcaaaactcaaattaataatgatgaaatagcaaatttaactcttaaatgtttagaggaaactgtgcctgttgaagtacctggtattgctttcctatctggtggtcaaactgaaattcaggctactgaaaatctaaatttgataaataaaaaaaacaaaacgaaatttataatgacttattcttatggtagagcattacagcaaagtgccttaaaatattggtcaaaaaatataaatgatgtcga

SEQ ID NO: 277949 - DNA, 178 bp, Unknown
  Bacterial polypeptide expressing nucleotide sequence isolated from the Sargasso Sea
atgtcattagaagaaattgcgaattatatagtttcagacggtaaaggaattcttgccgcagatgaaagtaatccaacatgtggcaaaagatttgattctattgaggtagaaaattctgaggataatagaagagaatatagggagatgctttttagatcaaaaaggtatgaaaggtaat

SEQ ID NO: 277950 - DNA, 149 bp, Unknown
  Bacterial polypeptide expressing nucleotide sequence isolated from the Sargasso Sea
tatggtaaaaacactcgaagaaatagcaagctacattgtagcggatggaaaaggtattcttgcggccgatgaaagcactggaacaattaaaaaacgatttgactcaataaatgttgagtcaactgaagataacagaagagattatcgtg

SEQ ID NO: 277951 - DNA, 268 bp, Unknown
  Bacterial polypeptide expressing nucleotide sequence isolated from the Sargasso Sea
agttcctggggatgtccctggtattgttttcttatctggaggtcaaactgaaattgaagcaactgaaaacttagatcagatgaataaaataggaaatttaccatggaacttaagtttttcatatggtagagccttacaggcttccgctttacaggcttggtcaggaaaagtggaaaatgaagaaattgcatctgcgacttttgatcatagggccaaaatgaattcgttagcaactttaggtaagtgggagtctgaactagaaaagtag

SEQ ID NO: 277952 - DNA, 511 bp, Unknown
  Bacterial polypeptide expressing nucleotide sequence isolated from the Sargasso Sea
atgacggatttaaaaaatattgcaaaaaaaatcttagaaaaaggcaagggaattttagctgctgatgaaagcactggtacaatgacaaaacgtcttgaagcggttggagtttcttcaagccctgagaacaggttattatttagagaaacacttttttcttcttcagcaatgaaaagtttcattggtggagtaattttatatgatgaaacaatcaaacaaaaaagtttaacgaatataaaaattccagagttaatatctagtaacggtgcaattccaggaattaaggttgatacaggtgcaaaaattcttgccaactcacctgatgagaaaattacagaaggtttagatggactaagagaaagattaaaagagtattataaattaggtgctagatttacaaaatggagagctgtgtattcaatttcagaaaattatcctagtaagttatcaatatattcaaatgcacacgctcttgcaagatattctgcgttggttcaggagtgtgggatgg

SEQ ID NO: 277953 - DNA, 160 bp, Unknown
  Bacterial polypeptide expressing nucleotide sequence isolated from the Sargasso Sea
atgtctgaattaaataatatagtattaaaaattctcaataacggaaaaggtattcttgcagctgatgagagcactgcaacaatgactaagcgattagagtcggttaaaatacaatcaacacctgataaccgtttattatttagagaaaccattgtttagt

SEQ ID NO: 277954 - DNA, 199 bp, Unknown
  Bacterial polypeptide expressing nucleotide sequence isolated from the Sargasso Sea
atgtcagaacttaataaaattgcacttaaaataatttctaatggcaaaggtatccttgcggcagatgaaagcaatggaactatgacaaaaagacttgaggcagtaaatatatcttcaacaccagaaaatagacttttatttagagaaatactcttttcatctaaatgtatgaaagaatacataggtggtgtaattcttt

SEQ ID NO: 277955 - DNA, 526 bp, Unknown
  Bacterial polypeptide expressing nucleotide sequence isolated from the Sargasso Sea
atgagtgaattaaatagaatagctttaaaaattatctcatctggaaaaggtattttggctgcagacgaaagcaatggaacaatgaccaaaagacttgaagctgtaaatgtcaaatctaatgaagagaacagattaaaatttagaaaaattttattcacatcaaaaaatatggcagattgtataggcggagtaatattgtatgatgaaaccatcagacaaacatttgaagataaaccaattcctgaaataattagccaaacaggagctatcactggaattaaagtggatacaggagctaaaaaacttgcaaaatctgaaaatgaaaaaattaccgaaggactagacggtcttcgagaaagattaaaaaattattatgatcttggagctagatttactaaatggagagctgtatatttaatatcagatcaatttcctagcaaacttgctattgatactaatgctcatgctcttgatagatattctgctttagttcaagaggcaggaatggtgcctatagtgaaccaga

SEQ ID NO: 277956 - DNA, 415 bp, Unknown
  Bacterial polypeptide expressing nucleotide sequence isolated from the Sargasso Sea
aatgtctgaattaaataacatcgcattgaaaattttatctcacggaaaaggtattctggctgctgatgaaagtaccggaacaatgactaagagacttagcgctgtaaatgtggagtcaacttcagaaaataggttgctatttagagaaacacttttttcatctcaaagtatgaaaacatgtataggtggtgttattttgtatgatgaaactataaaacaaaactcaagctcaaaaaaaactattccggaattaatttcatcatcgggagctgtgccaggaataaaagtagatacaggagcaaaatctctgaaagattcacctgatgaaaaaattacagaaagattggatggcttaggagaaagattgaaagattactataagcttggagcaagatttaccaaatggagaggcatt

SEQ ID NO: 277957 - DNA, 352 bp, Unknown
  Bacterial polypeptide expressing nucleotide sequence isolated from the Sargasso Sea
aatgagtttcgatcagcagcttgaaattgtaaaaaatcgggaaggctttattgcggcccttgaccagagtggcggtagcactcctaaagcactccgtctttatggcattggagaatcggaatattccggagaggatcaaatgtacgaccgtattcatgagatgcgctcaaggattgttaccagtcctcaattcgagagtaccaggatacttggagcgattctctttgagcagactatgagacgccagatcgagggtctaggatccgctcaatatctctgggaacggaaacaggtcgtcccgtttctcaaagttgacaaaggcttagccgaagaaacaacggggtacagttga

SEQ ID NO: 277958 - DNA, 505 bp, Unknown
  Bacterial polypeptide expressing nucleotide sequence isolated from the Sargasso Sea
atgtccgatctatacaaaattgctatccaaatattatctaacggaaaaggtattcttgctgcagatgaaagtacagctacaatgacaaaaaggttggagtcggtaaatttagattctaacgaatataatagactaattttcagacaaactctttttacatctttgtcgatgaaggaatgtataggaggagtaattctatacgatgaaactataagacaaagatctactgatggaaaaactatacctgatctaataaattcaagtggatctttaacaggaatcaaagttgatacaggggctaaagctttggcgggatttaaagacgaaaaaattacagaagggttagatggtttgagagaaagactaaatgattattataaacttggagctagattcacaaaatggagaggtgtatatataatatcagaaaattttcctagtaaacaatcagttttatctaatgcacacgctttagcaagatatgcttcattagtacaagaagctg

SEQ ID NO: 277959 - DNA, 712 bp, Unknown
  Bacterial polypeptide expressing nucleotide sequence isolated from the Sargasso Sea
cctggcagctgatgagagtacaggcactatgacaaaaagacttgatagtgtcaatgtgccttcgacttcagaaaacaggttgatgtttagagaaactctatttacttcatcaagtatgactgattgtattggaggtgtcattttatatgatgagacaataaaacaaagctcatcgaaaaaaaaaaagattactgaattaatttctgaaatgggttctttaccaggtattaaagtagatacgggtgccaaagttttagcgggttcgacaggtgaaaaaattacagagggactagacggattgagagaaagattaaaagagtattataaaatcggcgcgaaatttacaaaatggaggggagtttatttaatatctaaagattatccaagtaggctttcgataagttcaaatgctcatgcattagcaagatattcggtattagttcaagaatgtaatatggtgccaatagtagagccagaagttttaatggacggtgaacactctgctgaagattgttacgaaaaaacttccaaagtaattgaaaaatgttttgaggaattaattttacacaaagtagatttaaaaggtattattttaaaacctaatatgattttagctggaaataagtcaaaaaataaaatttcaaatgatgaggttgcaagattaactttaaagtgtttaaaaaactgcgttccttcagaagttcctggaatt

SEQ ID NO: 277960 - DNA, 286 bp, Unknown
  Bacterial polypeptide expressing nucleotide sequence isolated from the Sargasso Sea
aatgactgaattaaataaaatctgcttaaaaatattgtctaatggtaaaggaattcttgctgcagatgaaagcacaggaacaatgacaaaaagactcgagacagtaaatgttgcatcgaacgagcaaaatagacttatatttagaaaatcacttttttcctcaaattctatgaaagattgtataggtggagttatattatatgacgaaacaatcaaacaatcgtttgaatcaaaaacaatccctgaattaatttctgagaatggggcggtgccaggaattaaagtg

SEQ ID NO: 277961 - DNA, 142 bp, Unknown
  Bacterial polypeptide expressing nucleotide sequence isolated from the Sargasso Sea
tatgattattgaagatatagcaaaaaaaatgtgtgcaaatggtaaaggaatacttgcagcagatgagagtaccggcacaatagaaaaaagatttaaaagtataaatgttgaaaatttagaaataaatagattaacttttaga

SEQ ID NO: 277962 - DNA, 175 bp, Unknown
  Bacterial polypeptide expressing nucleotide sequence isolated from the Sargasso Sea
aatgtcagaattaaataatattgctttaaaaatactttcaaaaggtaagggaattcttgctgctgatgaaagtactggaactatgagtaaaagacttaatagtgttaaagtagaatcaagtgaaaaaaatagattattatttagagagacactttttagctcctctagtatgaaa

SEQ ID NO: 277963 - DNA, 229 bp, Unknown
  Bacterial polypeptide expressing nucleotide sequence isolated from the Sargasso Sea
atgtcattaaataatattgaagatatagcagcctatattgtcgcagatggcaaaggtatcttagctgctgatgaaagcaatccaacttgtggaaaaagatttgactctattggtgttgagtccaccgaagagaatagaagagattacagagaaatgctttttaggtctaaaggaatgaaaggcaatattggtggagtaatattatttgatgaaactataagacaatcag

SEQ ID NO: 277964 - DNA, 223 bp, Unknown
  Bacterial polypeptide expressing nucleotide sequence isolated from the Sargasso Sea
atgaaacttgaagatatagcaaagaaaatgtgtgccaagggtaaaggaattttggctgcagatgagagcacaggaacaattgctaagcgcttcaagagtattaatgtagaaaacattgagaataatagattattttttagacaaaccttatttgattcaagtgcaatgaaagattacatcggaggagttatacttttcgatgaaactattagacaacaaacta

SEQ ID NO: 277965 - DNA, 460 bp, Unknown
  Bacterial polypeptide expressing nucleotide sequence isolated from the Sargasso Sea
atgaataatttaaataatattgaagaagtagctaactatatagtttcagacggaaagggtattttggcagctgatgaaagcaatcctacatgcgggaagcgtttcgattctattggagtagagtcaaatgaagaaaacagaagagattatcgagaaatgctttttagatcagcaggcatgaagggcaatataggtggggttattttgtttgatgaaacgatacgacaaaaagctgaagatggaactccattggtaaatataattttagaccaaggagcactgccaggtataaaagtagatcaaggtttgcaacccataggagaatctgaagaatcattaactcaaggacttgaaggtttagatgaaaggctcaaggagtattattctttgggagcaaaatttactaaatggagagcagtaattaaggtcggagattcactcccatcagaggaagcaatag

SEQ ID NO: 277966 - DNA, 527 bp, Unknown
  Bacterial polypeptide expressing nucleotide sequence isolated from the Sargasso Sea
ggataatactggtatcgattctacaaaactttatactcaacctgaagaagtagcttatgcatattcagagttggcttcaataagtgataattttataattgctgctgcgtttggaaatgttcatggagtatataagcctggaaatgttagtttaacccctaagattttaaaaaactctcaggaacatatatcaaaacaatttcaaactcctaaaaattcaataaattttgtttttcatggaggctcaggatcttcattagaagaaattcgagaagctatagactatggtgtaattaaaatgaatatagataccgaccttcagtatgcgtttacagaaggtgtaagagactatattatagaaaaaaaggaatttatttcaactcaaattggtaatcctgaaggtaatgatattccaaacaagaaattttatgatcctagggtatggttaagagaaggtgaagatacttttaagaatagattaaaaaaggcttttgaagatttaaataatatagatacattagattaaa

SEQ ID NO: 277967 - DNA, 376 bp, Unknown
  Bacterial polypeptide expressing nucleotide sequence isolated from the Sargasso Sea
gggactttattaaaaccaaatatggtaacgtttgggaaggataatagtaaccaaacatcaattgatgaagtggcaaaaaaaaccttagattgtttaattaaaaatgttcctgctgaacttccaggagttactttcctctctggaggtcagtcagacgtgctggcaacagcgcaccttgatgctatgaataaaattggtgggttttcatggaaactaagtttctcatatggtcgagcgctacaagcaccttcattaaaagcttggggaggtaagtcagaaaatgtctttatttctcaagatgaactttctcatagagctgaaatgaataaacttgcctctcttggccaatgggaagaagagttagaagatagataaa

SEQ ID NO: 277968 - DNA, 265 bp, Unknown
  Bacterial polypeptide expressing nucleotide sequence isolated from the Sargasso Sea
tatgtctgagttacatactatagcacagcaaatggtgcaaaaagggagagggattcttgctgcagatgaaagcacaggaacttgtacaaagcgttttgaaggtattggagtagaatctacagctgattcacgatgtgcatatcgaagtgcactttttacatctccaggattagaagaatatattagtggtgttattttatatgatgaaacatttagacaaaatgttcatcatacggatactcttattccacagtatttacaatca

SEQ ID NO: 277969 - DNA, 541 bp, Unknown
  Bacterial polypeptide expressing nucleotide sequence isolated from the Sargasso Sea
cttgctgcagacgaaagtactgcaactatgacaaaaaggcttgagtcggtaaaagttcagtcaaatgaacagaatagacttctttttagaaaaactcttttttcatcagaaagtatgaaaagctgtattggtggcgtaatattgtatgatgaaacaataagacaaaatagtgattctaaatcaattccagaaataataattaataatggggcaattccaggaattaaagttgatacaggtgcaaaacctttagcaggatcaattgaagaaaaaattactgagggtttagatggattaagagaaagattaaaagtgtattataaacttggagcaagatttaccaagtggagaggagtttactcaatttcaaacaaaaacccaagtaagctatgtatatattcaaatgctcatgctctagctcgttattcctcattagttcaggagtgtggaatggtgccgattgttgagcctgaattactaatggatggaaatcattctgcagctttatgttttgataaaacttctgaaattatcaaaaaat

SEQ ID NO: 277970 - DNA, 553 bp, Unknown
  Bacterial polypeptide expressing nucleotide sequence isolated from the Sargasso Sea
ataaaaggtctaagaccattagctggtggccatgatgttgagaccttctgctcaggattagatggacttgttgaaagagctgctgactactacgagcaaggtgcaagattcgcaaaatggagagcagtacttcaaataacagatgatggttgtccttctaaactttctataagggaaaatgcttggggtttagctagatacgctagatcagtacaagaatctggcttagttccaattattgaaccagaaatcctaatggacggttcacattcaattgaaaagactgcagcagttcaagaagaagtaatcaaggaagtttatctagcttgccaagtaaacggagtacttctagaaggaactctcctaaagccatcaatgacagtacaaggtgctgacagctcaacaaaagctgatccacagcaagtcgctgagatgacaatacgtacaatggaacgttgcgtaccagcaagtgtacctggtattactttcctttcaggtggcttgagcgaggaagcagcatcagtttatttaaatctgatgaataagatcgaca

SEQ ID NO: 277971 - DNA, 129 bp, Unknown
  Bacterial polypeptide expressing nucleotide sequence isolated from the Sargasso Sea
aatgtctgaactgaataaaatcgcacttaaaatcttatcaaatggaaaaggtattcttgcggctgacgaaagtacagccacaatgacaaaaagattagactcggtgaaagtgccttccaacgaaaagaa

SEQ ID NO: 277972 - DNA, 166 bp, Unknown
  Bacterial polypeptide expressing nucleotide sequence isolated from the Sargasso Sea
aatgaattttagtagtttaagtgaaatagcaagttatatagtttcagacggaaaaggaatattagctgccgatgaaagcaatcctacatgcaccaaacgatttgattcaattggagtagagtccaccgaggataatagaagagactatagagagttactttttaga

SEQ ID NO: 277973 - DNA, 172 bp, Unknown
  Bacterial polypeptide expressing nucleotide sequence isolated from the Sargasso Sea
atgatatttaatagtattgaagaaattgcaacttttatagttaaagatggaaaaggcatccttgcagctgatgaaagcaacccaacttgtggtaaaagatttgattctatcggtgttgaatctacagaagagaatagaagagactatagagagatgctttttagatcaaaag

SEQ ID NO: 277974 - DNA, 316 bp, Unknown
  Bacterial polypeptide expressing nucleotide sequence isolated from the Sargasso Sea
aatgagtgaattaaatagaatagctttaaaaattatctcttctggaaaaggtattttggctgcagacgaaagtaatgggacaatgaccaaaagacttgaatctgtaaatgttaaatcttctgaagaaaataggttaaaatttagaagtattttatttacgtcaaaaaatatgatggattgtataggtggtgtaatattatacgatgaaactatccgacaaacatttgaaggtaaaacgattcctgaaataattactcaaacgggagcaatacctggaattaaagtagatactggagctaaaaacttgcaaatctga

SEQ ID NO: 277975 - DNA, 511 bp, Unknown
  Bacterial polypeptide expressing nucleotide sequence isolated from the Sargasso Sea
atgtctgaattaaatagcatagcattaaaaattattggaaagggtaaagggattctagccgcagatgaaagcacaggaacaatgaccaaaaggcttcaagatgttaaattagaatcaagtcccgaaaatagattattatttagagaaactctttttacttctgatggcatgaaagaatgtattgggggtgttatactttacgatgaaactataaaacaattaagcaaatcaggaaaaaaaattccagaattaatttctgatatgagtacggttactggaataaaagtagatacaggtgcaaaaattttagctaactcaatagaggagaaaattacagaaggtcttgatggtttgagagaaagattaaaagaatattataaacttggagcaaggtttacaaaatggagaggtgtttatttaatatcggataaatacccaagcaaactagcaattaaaacaaattcacaggctcttgcaagatactcagcattagctcaagagtgtggtatgg

SEQ ID NO: 277976 - DNA, 265 bp, Unknown
  Bacterial polypeptide expressing nucleotide sequence isolated from the Sargasso Sea
aatgtctgaactaaataaaattgcactaaaaattatttcaaacggtaaaggcatacttgctgcagatgaaagcaatggcactatgactaaaagacttacagctgttagtgtgcattcaacccctgaaaataggctattgtttagagaaattcttttttcatctgaatgcatgaaagattgcattggaggagtcattctttacgatgaaacaataaaccaaacttcaagtttagaaaaatcaattcctgatttaatttctgcttca

SEQ ID NO: 277977 - DNA, 354 bp, Unknown
  Bacterial polypeptide expressing nucleotide sequence isolated from the Sargasso Sea
tatgcccctaattagtatgcgccaattattagatcatgcagcagaaaatgattatggtgttcctgcatttaatgttaacaatttagaacaaattagagcaattatggaaggtgctcaaaaaatgaatagtcctgttatagttcaagcttcagctggagcaagaaaatactctggagcaatatttataaaaaatatgatgaaagctgctgttgaagagtttccaacaatacctattgtaatgcatccagatcatggtggtacaccagatgaatgtagagaatgtatagatttaggatttacttcagtaatgatggatggttctttattagcagatcaaaaactccatcaaatttt

SEQ ID NO: 277978 - DNA, 593 bp, Unknown
  Bacterial polypeptide expressing nucleotide sequence isolated from the Sargasso Sea
taaatttccatcctcacaatcaataaagacaaacgctcacgctcttgctagatatgctgctttagtgcaagaagctaaaatggttccaataatagagcctgaagtattgatggatggatcgcacgatatcgataaatgttatcaagtgacaaccgatgtattaaatgaatgttataatgaacttgaaattcataaagtgaacttaaaaggaacagttttaaaaccgaatatggttattcctggatctgaatcaaaaataaaagtaagttcagcagaaatagcaaaaaaaactttagattgccttaaaaaaaatgttcctagcgaagtgactggaattgcttttttatctggaggacaatcagaaattgaggcaagtaaaaaccttaatgaaataaataaaataaataacacaaattttttgattactttctcttatggcagaggtttgcaatcaagtgctttaaaagaatttggtaaagatcaaaataatcaaaagaatattcaaaaagcttttgatcatagagcaaaaatgaacggactttcttcaaaaggagaatggtctgaaaatttagaaaaagaggctgcagcctaat

SEQ ID NO: 277979 - DNA, 538 bp, Unknown
  Bacterial polypeptide expressing nucleotide sequence isolated from the Sargasso Sea
atgagtgaattagaaaaaattgcaaaacaaatggtggctaaaggtaaaggtatattagctgctgatgaaagtactggaacaatgacaaaaagattatccagtgttaatattgagtcaacttcagaaaatagacttagatttagagaaacattgttttctgcacaaggtatgaaaaatcatattggaggagtaattttatatgatgaaacaattaaacaaaaaacctcttcgggaaagtcagtaccagatttaattaaaagttttggctctattcctggtattaaagtagatactggtgcaaaaaaattagccggttctcatgaagaaaaaataactgaaggattagatggactcagagaaagattaaatgaatattataaacttggagccagatttacaaaatggagagctgtgtataatatttcagacaattatccgtctgaactctctgttaaggcaaatgctcacgccttggctaggtatgctgctttagttcaagaagcaaaaatggtccctatcgtgaaccagaagttttaat

SEQ ID NO: 277980 - DNA, 523 bp, Unknown
  Bacterial polypeptide expressing nucleotide sequence isolated from the Sargasso Sea
aatgtctgaattaaataaaattgcacttaaaataatttccaatggcaaaggtatacttgcggctgatgaaagcaatggaactatgacaacaagacttgaagcagtaaatatcaaatcaacccaagaaaataggcttgccttcagagaaattcttttttcgtcagatggaatgaaggattgtataggtggtgttattctttacgatgaaaccataaatcaaatttcgaccgcaggaaaatcaataccggatttaatatctagttcaggtgcagttcctggaattaaagttgatactggcgcaaaagatttaccaaattcccctaaagaaaaaattacagaaggattggatggccttagagatagattaaaaacatattatgatcttggagcaagatttacaaaatggaggggtgtctattctattggtgaaaaatatccaagcgaactagcaattactagtaatgcccatgcactcgctaggtattctgcactagttcaagaaagtggaatggttccaatagta

SEQ ID NO: 277981 - DNA, 427 bp, Unknown
  Bacterial polypeptide expressing nucleotide sequence isolated from the Sargasso Sea
tatgactgaacttaataaaattgcacttaatataatttcaaatggtaaaggtatacttgcggcagatgaaagcaatggaactatgactaaaagacttgaagcggtaaatgtgtcctcaacatctgaaaatagacttttatttagagaaatactcttttcatcaaagggtatgaaaaaatatataggtggtgtcattctttatgatgaaacaataaatcaaattactagttctggaaaatcaattcctgatttaatttcttctgctggtgcagtaactggaattaaggttgatacaggtgcaaaagaactagcaaattcctctggtgaaaaaattacagagggtctggatggcttaagagaaagattaaagaaatattatgagctcggtgcaaggtttacaaaatggagaggtgtatataatattggc

SEQ ID NO: 277982 - DNA, 476 bp, Unknown
  Bacterial polypeptide expressing nucleotide sequence isolated from the Sargasso Sea
aatgtctgaattaaataaaattgcacttaaaataatttctaatggcaaaggtattcttgcagctgatgagagcaacggaactatgacaaaaagacttgaagcagtaaatgtcaagtcaactcaagaaaataggcttgctttcagagaaattcttttttcatcagatggaatgaaagattgtataggtggtgttattctttacgatgaaaccataaatcaaatttcgagcacaggagaatcaataccagatttaatatctagttcaggtgcaattcctggaattaaagttgatactggtgcaaaagatttagcaaattccactaaagaaaaaattacagaaggattagatggccttagagatagattaaaaaaatattatgatcttggagcaagatttacaaaatggagaggtgtctattatattagtgaaaaatatccaagcaaactggcaattagtagtaatgctcatgcacttg

SEQ ID NO: 277983 - DNA, 349 bp, Unknown
  Bacterial polypeptide expressing nucleotide sequence isolated from the Sargasso Sea
atgagttacgatcagcagcttgaaattgtaaaaaatcgggaaggctttattgcggccctcgaccagagtggcggtagcactcctaaagcgctccgcctttatggcattggagaatcggaatattccggagaggatcagatgtacgaccgtattcatgagatgcggtcaaggattgttaccagtcctcaattcgagagtgccaggatacttggagcgattctctttgaacagactatgagacgccagatcgagggtctaggatccgctcaatatctctgggaacggaaacaggtcgtcccgtttctgaaagttgacaaaggtttagccgaagaaagcaacggggtacagt

SEQ ID NO: 277984 - DNA, 236 bp, Unknown
  Bacterial polypeptide expressing nucleotide sequence isolated from the Sargasso Sea
catgtctgaattaaattctatagctttaaaaattttatcaaatggaaaaggaattttggcagccgacgaaagtacagctactatgacaagaagactggagtctgtaaaaattccctcaactccagaaaatagattgaatttcagagaaactctttttagctcaaatagtatggcagagtgtattgggggagtgatattatatgatgaaacaataaagcaacaatcatccaaaggtg

SEQ ID NO: 277985 - DNA, 178 bp, Unknown
  Bacterial polypeptide expressing nucleotide sequence isolated from the Sargasso Sea
tatgactaaaaatattgtaaacgaaatagcaaacaaattatgcctatcaccaaaaggaatattagctgctgatgaaagtactaatacaataaaaaaacggtttgaatcaattaatctagaatccaattttgaaagtagacgaaactacagagagctgttatttaaaactaaaaacctt

SEQ ID NO: 277986 - DNA, 176 bp, Unknown
  Bacterial polypeptide expressing nucleotide sequence isolated from the Sargasso Sea
catgtcagaacttaatcaagttgctttaaaaattctttcaaatggtaaaggtattcttgctgcagatgaaagcaatggaacaatgactaaaagatttaatgctgtaaatattacttcaactcctgaaaatagacttctttttagagaaactcttttttcatcagaaaaaatgaaag

SEQ ID NO: 277987 - DNA, 954 bp, Unknown
  Bacterial polypeptide expressing nucleotide sequence isolated from the Sargasso Sea
ctgctgatgaaagtactggaacaatgactaagagactggatgctgtaaatgtagagtcaactccagaaaataggttgctatttagagaaacacttttttcatctgaaagtatgaaaacatgtataggtggtgttattttgtatgatgaaactataaaacaaaacacgagctcaaaaaaaactattccagaattaatttcatcatcaggagcagtgcctggaataaaagtagatacaggagcaaaacctctggtggattcacctgatgaaaaaattacagaaggattggatggcttaggagaaagattgaaagattactataagcttggagcaagatttactaaatggagaggcatttataatatttcaaaaaactatcctagcaaattatcaattgatgcaaacgctaatgctttagctaagtactcttctatagttcaagaaaatggaatggttccaattgtagaacctgaagttttgatggatggagatcatacagctgaagattgtttaaataaaacttcggaagtaataaaaaaatgttttgaagagctaattcagcataaggttagtttggaaggaataattttaaaaccaaacatgatacttccagggaataaatcaaatgaaaaaattagtaatgaaaaaattgctcatttaacattaaaatgtttaaaagattctgttccaaaagaggttccaggaatagcttttttatcaggtggtcaaactgaaatagaggcagccgaaaatctaaatttaattaacaagtataatgatacaaattttataatgagttactcttatggaagagccctacaacaaagtgccattaagttttggtcgaaagatatcaaaaatattaaaggtacacaggaaatttttaatcatagagcaaatatgtgctcacttgcagctcaaggaaaatggtcaaaagaacttgaggcaaaataga

SEQ ID NO: 277988 - DNA, 253 bp, Unknown
  Bacterial polypeptide expressing nucleotide sequence isolated from the Sargasso Sea
attgattagcatgcgtcaattattggatcacgcggcagaaaatgactatggagttcccgcttttaatgtgaacaacttagagcagatgagggcaattatggagggcgctagggaaaccagtagcccggtcatagttcaagcatctgcgggcgctaggaaatatgctggtgctaattttttgcgacatctaatcttagctgcgatcgaggagtttcctaccataccgattgttatgcaccaggatcacggagcg

SEQ ID NO: 277989 - DNA, 192 bp, Unknown
  Bacterial polypeptide expressing nucleotide sequence isolated from the Sargasso Sea
tatgaatattgaagatatagcaaaaaaaatgtgcgctaaaggtaaagggatacttgcagcagacgaaagcacaggaacaatcgcaaaaagatttaaaagtatcaatgttgcaaatttagaaaaaaacagattatctttcagacaaactttgtttaactcaagtggaatgaaagattacataggaggagttat

SEQ ID NO: 277990 - DNA, 455 bp, Unknown
  Bacterial polypeptide expressing nucleotide sequence isolated from the Sargasso Sea
ctacaacgttaccagtagagttctagatgaatgttacaaagacttttccgtgcacaatgtcaatcttaaaggaacagttcttaaaccaaacatgatacttccaggtaaggattgtaaacaaaagacttctacagaagaaatagccaaaaaaacattagagtgtattaaaaaaaatatgccaagcgaagttcctggggttgcatttctgtctgggggtcaaagtgaattagaagcaacaaaaaatttgaatgaaatcaataaaattaatgatacatcttttaactttacattttcttacggtcgagccttgcaacaatcagccttaaagacttgggctaaatcgatgaaagatacggataaaatacaaaaagtttttaatcacagagctgaaatgaacggcgcgtccacaaacgcaaaatgggatgaaaagcttgatcaaagttttgctgcttaaa

SEQ ID NO: 277991 - DNA, 175 bp, Unknown
  Bacterial polypeptide expressing nucleotide sequence isolated from the Sargasso Sea
aatggacaccgaactacttgagaaaacagcgagagaacttgtagcgcccggaagagggattctggccgcggatgaaagcaacggaacaatgtcaaacagactcgaggcagtgggtgttgaaccatctccagaaactcgtcgagcctaccgagcaaatatcttcgccacacctgaa

SEQ ID NO: 277992 - DNA, 337 bp, Unknown
  Bacterial polypeptide expressing nucleotide sequence isolated from the Sargasso Sea
aacgctcacttctgaaaaatcatcttcaaaaacaattgctgaaaaaacaatttcttgtttcaaggaagtagttcctgaggatgtccctggtattgttttcttatctggaggtcaaactgaaattgaagcaactgaaaatttagatcagatgaataaaataggaaatttaccatggaacttaagtttttcatatggtagagccttacaggcttccgctttacaggcttggtcaggaaaagtggaaaatgaagaaattgcatctgcgacttttgatcatagggccaaaatgaattccctagcaacattaggtaagtgggagtctgaactagaaaagtag

SEQ ID NO: 277993 - DNA, 406 bp, Unknown
  Bacterial polypeptide expressing nucleotide sequence isolated from the Sargasso Sea
gatgccattggttcctatgcgaattttgcttgatcatgctgctgaacatggttatggcctagctgcgttcaacgtcaacaacatggaacagattcaggcaatcatggaggctgcaaaggaaacagattcgccagtaattgttcaggcatcacgtggtgcccgcgcatacagtcaagacaactatctacggcatcttatgttggctgcttcggaactgtacccaatgatcccaattgccatgcatcaagatcacgggaattcgccggccacatgtcagagcgcaattgatcatggattcacaagtgtgatgatggacggttctctaaaggaagatggcaagacgcctgctgattttgactacaacgttcaagtgacaaaggacgttgtggatcttgctcatcgtcag

SEQ ID NO: 277994 - DNA, 214 bp, Unknown
  Bacterial polypeptide expressing nucleotide sequence isolated from the Sargasso Sea
attaggcgctagttttgccaaatggagagcggttataaatatttctgcagacctaccatcaaacaattgcattagactcaatgcacatgctttggctagatatgcagcactttgccaacaagcacaaatggttcctattgtagaaccagaagtcctcatggatggaaatcatgatatagatcgatgttttgatgttacttcgaaattcttgcaa

SEQ ID NO: 277995 - DNA, 140 bp, Unknown
  Bacterial polypeptide expressing nucleotide sequence isolated from the Sargasso Sea
aatgagtattgaagaaatcgcaaaacaaatggtggccaaaggcaaaggaatacttgctgctgacgagagtactggcacaatggaaaaaagattaaagaacgttggggtagaatgtacggaaaaaaataggcttcatttta

SEQ ID NO: 277996 - DNA, 223 bp, Unknown
  Bacterial polypeptide expressing nucleotide sequence isolated from the Sargasso Sea
atgacattaaatgaaattgcaaaaaaaatgtgtgctgaaggtaaaggtatccttgctgcagatgaaagcactggaacaatagctaagcgatttaaaagtataaatgtcgagaacatagaaaaaaatagactaaatttcagacaaactctttttaattcaagtgctatgaaagattttattggtggtgtaattttatttgatgaaacgattaggcaaaagacta

SEQ ID NO: 277997 - DNA, 883 bp, Unknown
  Bacterial polypeptide expressing nucleotide sequence isolated from the Sargasso Sea
cgcgaggtgctgggcgatctgctggcccgcatcgcgctgcagcccaaggagttcgcgtcactggacgccttcatcaccagcaaggcccgtcacggcctgctggtggcaccgctcgagcgcggcttcttgctgcgagagccggggcaagcggagctcgcgctcatcaccgagaccgaactgctgggcggcaagatccgcagcaaacggcaacgggagaagagcaagaacctgagttcggatgcggtgatccgcaacctcggcgagctgacccagggtcagccggtggtgcacctggatcacggggtcggccgctatctggggctggagaccatcgatgccggcggcctgcccaccgagtttctgaccctggaatatgccggcggcgacaagctgttcgtgccggtcaccagtttgcacctgatcagccgttataccggctcggacaacccgcccagccacaagctcggcggcgaggcctgggtcaaggcccggcgcaaggcggccgaaaaggtgcgcgacgtggcggccgagttgctggatgtctatgccatgcgggcagcccgtcacggctttgccttcaagcacgaccgcgaggcctatcgccagtttgccgccggcttcccgttcgaggagaccgatgatcagctcaacgccatcaatgcggtgctcggcgacatgtgccaggccaagagcatggatcggctggtgtgcggcgacgtgggcttcggcaagaccgaggtggcgatgcgggcggcgtttgtggctgtgcacggcggcaagcaggtggccgtgctggtgcccaccaccctgctcgcccagcagcactacgacaactaccgcgaccgcttcgccaactggccggtgcgggttgaggtactgagcc

SEQ ID NO: 277998 - DNA, 687 bp, Unknown
  Bacterial polypeptide expressing nucleotide sequence isolated from the Sargasso Sea
gaagcaataaatgtcaaatcaactccagaaaataggctttccttcagagaaattcttttttcatcggatggaatgaaggattgtataggtggtgttattctttacgatgaaaccataaatcaaatttcgagtacaggaaaatcaataccagatttaatatctagttcagatacagttcctggaattaaagttgatactggtgcaaaagatttagcaaattctcctaaagaaaaaattacagaaggattggatggccttagagatagattaaaaaaatattatgatcttggagcaagatttacaaaatggagaggtgtctattctattggtgaaaaatatccaagcgaactggcaattagtagtaatgctcatgcattagccagatactctgcgttagttcaagaaagtggaatggttccaatagtagagcccgaggtattgatggatggaaaccattcttctgaagtttgtttaaataaaacatcagaagtaattaaaaagtgttttgaggaactaattttacacaaagttgatctctcaggaataatattaaaaccaaatatgattttacctgggagcctatcaaaaaataaaatttctagtgaagaaatttccattaaaacgttagaatgccttaaaaattctgtacccaatgaagtacctggaatagcttttttatctggtggg

SEQ ID NO: 277999 - DNA, 724 bp, Unknown
  Bacterial polypeptide expressing nucleotide sequence isolated from the Sargasso Sea
gatacaggggcaaatattggcaggatctaaagaagaaaaaattacagaaggtttagatggtttaagagaaagacttaatgattattatgaacttggggcaagatttacaaaatggagaggtgtttacttaatttcagataaatatcctagcaaactatctatttcatctaatgctcacgcgttagctaggtatgcagctttagttcaagaagcaggaatggttccaataattgaacctgaagtattaatggatggtaatcattctgcgaaagattgtttgatgaaaacatctgaagtaataaataaatgttatgaagagttagaattaaataatgttgatttaaagggaacaatattaaaaccaaacatgattttaccaggaaaaaattctgatgaaaaaatttcaagtgaggagatagcagaattaactttgaaatgtttaagagagaatgtgccttcatcagttccaggtatagcttttctttctggaggacaatccgaagtagatgcaacggcaaaccttaaccaaataaatattaaaaatgatacagatttcataatgacttattcttatggtagagctctgcaacaaagtgcgttaaaattttggtctaaagatataaataatataaaaggaacacaggaaatatttgatcatagggctaaaatgtgtactctagccgcccaaggaaaatggtcaaaaaatcttgaaaattcgcaataa

SEQ ID NO: 278000 - DNA, 325 bp, Unknown
  Bacterial polypeptide expressing nucleotide sequence isolated from the Sargasso Sea
atgtctgaactaaataaaatagctcttaaaatactttcaaatggtaagggaatacttgcggcagatgaaagtaatggaactatgacaaaaagacttcaggctgttgaagttaaatctacaccagaaaacagactagcttttagagaaactctttttagttctcaaagcatgaaagattgtatcggtggtgtgattttgtacgatgaaacgataaaccaattcacaagctcgggtaaatcaattccagaactaatttcaaaaagtggcgcagtgcttggtatcaaagtagatactggagcaaagaactggcaaactctcaagagga

SEQ ID NO: 278001 - DNA, 903 bp, Unknown
  Bacterial polypeptide expressing nucleotide sequence isolated from the Sargasso Sea
aatgacaaaaagacttgaagcggtaaaagtaaattcaaatgaggaaaatagacttaattttagaaaggcactttttacatccgagagcatgaaaaaatgcataggtggagtaattttgtacgatgagacaatcaaacaatcttcaggatctaaaactattcctgaattaattactgagagtggcgctattgtaggaataaaagttgatacaggagcaaagtctttggccggctcaaatgatgaaaagattactgaaggtcttgacggtttaagagaaagattaaaagaatattataaattaggagctagatttactaaatggagaggtgtttattctatctcagacaaatatccaagcaaattatcaattcactctaatgctcatgctttagcaagatatgctgctttggttcaagaatgtggcatggttcctatagttgagcctgaagtactgatggacggtaatcattcagctagagtatgttatgaaaaaacatctgaggttataaaaaaatgtttcgaagaattgataataagcaaaattgatttaactggagtgatattaaaaccaaatatgattttagacgggagcggtgtaacacaaaagattgatggtgaacaagttgcacaattaactttgaaatgcttaaaagagtctgttcctgaagaggtgcctggaattgcctttctttcaggtggtcaaggcgaaatcgaggctacagaaaatctaaatttgataaataaatcaaataatactaaatttattatgacatattcatatggaagagctttacaacaaagtgctctcaaatactgggcaaaagatataaatgatatatctggcactccaaaaacttttaatcatcgtgcaaatttatgttcacttgcggctcaagggaaatg

SEQ ID NO: 278002 - DNA, 256 bp, Unknown
  Bacterial polypeptide expressing nucleotide sequence isolated from the Sargasso Sea
tatgtcagagttgaacgaattagtattgaaaatagtatctaatggaaaaggtattctagctgctgatgaaagcaacagcacaatgactaaaagactagaagatatcaatattatttcaacgcctgaaaacagacttttatttagagaaacacttttttcatcgtcaggtatgaagaagtatattggaggagtaatattatacgatgaaacaatcaaccaaatatctagttcgggggaaaaaattccagaatttaat

SEQ ID NO: 278003 - DNA, 582 bp, Unknown
  Bacterial polypeptide expressing nucleotide sequence isolated from the Sargasso Sea
agctttcaacagatatgcttttaacagatcttgaagaagctgcagactttgttgcgaagactaaagttgatgcattagctatagcaataggaacaagtcatggtgcttataaattcacaaggaaaccaacaggagaggttcttgcgataagcagaattgctgagatccataaagctcttccaaatactcaccttgtaatgcatggttctagttcagttcctcaagaatggttggatatcattaataaatatggtggagagattccacaaacatacggtgtccctgtagaagaaattcaagaggggattagaaacggggttaggaaggttaatatcgatactgacaatagacttgcttttacagctgctgttagagaagccgcttttgcggacaaatcaaacttcgacccaagacatttcaataaacctgctagaaaatatatgaagcaagtttgtcttgatagatataagcaattctggtgtgaaggtcaagcaagtaagataaaacaaagcagcacaaattattatgctgatttatacgcaaatggcaaattagatccaaaagtaaaggcaatagtttaaa

SEQ ID NO: 278004 - DNA, 862 bp, Unknown
  Bacterial polypeptide expressing nucleotide sequence isolated from the Sargasso Sea
actggagacactactttttcaaactaaatcaatttctgaatatataagtggtgtcatactttatgatgagacccttaagcaaaaaacatctgaaaatcagccgatagttgaattgctttccgataatgatattattccaggtattaaagtggataaatcaactcatcctttagctatgtttccaaatgaagttatcactgaaggattagatggattacgtgaaagactagaagaatattatgaaattggagcaagatttactaagtggagagcagttattaatattggggataatcttcctacacaatatgcaataaatgttaattcttatcttttggcattatatgcatctttaagtcaagaagtaggattagttccaattgtagagccagaggtattaatggatggagatcattctatagatagatgttctgaagttactgatataactttgaataaagtttttgagcatctagatgaaagtaatgtattcttaccaggtattgtactaaagccaaatatggttttatcgggtgctgatgcatctaacagagctgatactagtaaagttgctgattatacaattgaagttctttcaaataatgttcctgctgaagttccaggaatagcttttctttcaggtggtcaagaagatcaagaatcaattgataatttgaattcaattaatttggttgctaaattaaaaaaatctccatgggagctcacttactcctatggaagagggcttcaagcatctcctttaaaaatatgggatggtaaagaagaaaatgtggttatggctcaagatgaatttgaaaaaagaggtatagctgcttccaaagccaggcaaggaatttattga

SEQ ID NO: 278005 - DNA, 469 bp, Unknown
  Bacterial polypeptide expressing nucleotide sequence isolated from the Sargasso Sea
tatggtaaaaacactcgaagaaatagcaagctacattgtagcggatggaaaaggtattcttgcggccgatgaaagcactggaacaattaaaaaacgatttgactcaataaatgttgagtcaactgaagataacagaagagattatcgtgagatgttattcagggcctcatcaatgtcagaggcaattggcggtgtcatactttttgatgaaactttacgacagtctgcagcaaatggagatttattaagagaagtaatttcaaatcaaaaatcacttcctggtattaaagtcgatcaaggcgtatcacccttcaatggcagtgacaaagaaacaataacaaaagggcttgatggcttagatgaacgctgtcaagaatattacacgataggagcaagatttactaaatggagagctgaaattaacataagtggaaacgatattcctactgatgaatgtattgatcaaaat

SEQ ID NO: 278006 - DNA, 595 bp, Unknown
  Bacterial polypeptide expressing nucleotide sequence isolated from the Sargasso Sea
atattatttcaaaaactatcctagcaaattatcaattgatgcaaatgctgatgctttagctaagtactcctctatagttcaagaaaatagaatggttccgattgtagaacctgaagtattgatggatggagatcatacagctgaggattgttttaataaaacctcagaagtaatcaaaaaatgttttgaaaagctaattcaacatgaggtcagtttggaaggaataattttaaaaccaaacatgatacttcctggaaataaatcaaatgaaaaaattagtaatgaaaaaattgctcatttaactttaaaatgtttaaaaagttgtgttccaaaagaagtgccaggaatagcttttttatcaggtggtcaaactgaaatagaagcgaccgaaaacctaaatttaatcaataagtataatgatacaaattttataatgagctactcatacggaagggccttacaacaaagtgccattaagttttggtcgaaagatatcaaaaatattaaaggtacacaggaaatttttaatcatagagcaaatatgtgctcactcgctgctcaaggaaaatggtcaaaagaacttgaggacaaataa

SEQ ID NO: 278007 - DNA, 269 bp, Unknown
  Bacterial polypeptide expressing nucleotide sequence isolated from the Sargasso Sea
tatgtcattaatttcgcttcggcaactattagatcatgcagctgaaaataattatggtgtacccgcatttaatgtaaataacttagaagcaataagagcaattatggaaggggctaaagaattaaatagccctgtaattctgcaagcatctggagctgccagaaaatatgctggaccaatttttgttaaaaaattagttgaagcagcaatggatgagttttcagaaattccaactgttctacatcaagatcatggtggctctccatcag

SEQ ID NO: 278008 - DNA, 2032 bp, Unknown
  Bacterial polypeptide expressing nucleotide sequence isolated from the Sargasso Sea
ttgtggcctcggcgtggtgctgaggtccgtaaccggagaaaacccgtgtctgaaattgcaacgaatgcgacccctgccatcgacggccttgccccgctccagtacgtacccctcggcaccttgcgcgtgtcgccgcacaacgcacgtaagaagccgcccactcgtatccgcgagatggcggaggacatcgccgtttcgggcctgctgcaaaaccttgtcgctcacgtgatcgatggcgaacccggccagcatggcgtgtgcgcgggacagcgcaggctcgccgcgatggacctgctcaaaagtgagggacgcgcacgcgacagcgacctgattccgattcgcatcgtgtcggaaggggaagcattggcgatctccctgatcgaaaacgcggagcgtgaaggcatgcatattgccgaccaatgcgtggcgttcggccgaatggccgcagaggggcgctccatcgccgacatcgccggccgtctcaacgtggcagagcgggacgtgcgccgagcgttaaagctggcgagtgtctcgccaaagctgatcgacgtgtttcgcgatgacgggatgtcgtacgagcaggtgtgcgcgctcgcattgagtgacagtcacgaacagcaagagcggatttggttcgacgctaaacaggattggcagaagcggcccaacgcaatccgaagtgtgatcacgcaagaggagacatgcgcgcgcgacaacccgcttgttgcttttgtcgggctggacgcttacgaggcggcaggcggatacgtgcgccgggatttgttcagcgatgcgaagaatagcggatacatcaacgatctggaattgctcagccgactggcagtagaaaggctgacggcggtagccgtggacaccggcgcggaaggctggtcgtgggtggaaacggctgtccaacgtgattcgacgctactcgcacgatatggccggttgcgcccggagacgcgggactttacccgcaaggaaaaggccgagtttcggaagcttgagaaggcccgtgatgacgctcgccaagcgttttttgcgcaccaagactcggatgcagcggaggacgacgacgcgaaaggcgaagcactggaagaggtcgcgcaagaggcggaagcggctttagccgaacttgccgagcgacgcaacgcttggacggacgagcagaaagcacgcgcgggcgcttacatctggatcgactattccggcaccctgcagatcgagcgaggactcgtcaagccaagcgagaaggccgcagtaaaggagtcgggtgtcgtcgggaccgagcaaatcacgcctgagaaggcaaaaccgctgcatggtgaaacgctgtgcgaacgtctgacggcgcatcgtaccgctgccgtccaggtggaactgatgaagcggccgaccgtcgccctcgcctatcagatgttcgcgatggtgccgcgcgtgttcgccgagcattacgaggcaggcgcgatggatgcactggatgcgcagttcacgccgacccatgaacgcctgttgcgcgcggccgacgacatggccgacagtccggcgtggctgttcatcgacggggagcggcagaagtggcgcgcggtgctgccttgcaaggttcgcgatctgttgccgtggcttctgtcgtgctccgaggacatgcttgccaatctgttcgctttctgtgtggcttcgaccgtcaacggcctgagtcgatgggaccggccgcacgatgtcaacacgttggccgacacccttggcctcgacatggccgcgtactggaagcccacccgcgcgagttacctgaaccacgtttcgaagcagcgcatcatcgacgtggtaacacaggcggtatcggccgacgcggcggcgcagctcgtgggtatgaagaagggcgaagcggcggcggccgccgaactgcggcttgcagaaagtggctggttgccagaggtgctggcgaaccggcagacggacacggtatgggaggacgatgaaccggacgcagacgaagccgacccggaggttgatcctgacattccgcattgac

SEQ ID NO: 278009 - DNA, 791 bp, Unknown
  Bacterial polypeptide expressing nucleotide sequence isolated from the Sargasso Sea
tatgaacgataaaatcttaaaggaaaatgcaaaaaaaatgatgtctaagccaaaaggtttattggcgatggatgagagctctcctacttgtgcgaaaaggttcgcaggagtcggtattgaggactctgagaataatagaaggagatatagagagctcatagttactacccctaatctaagtgattacataagcggagcaatcttgttcgacgagactttccaccaaaaaatgagtagcggtgagtattttagagattatctcaattcaattggcatattacctggaataaaggtcgacactggcgcaaaagatttctcaaatcacgaagatgaaaaagtgactgaagggcttgataatctgagagatagattgaaaaactatgcagatttgggcgcgaagttttgtaagtggagagctgtgattactataggtaaaaatataccatctgatgcttgtatcatatctaattgtaatgcactggcaagatatgcctctttatgtcaagaaaataatcttgttccaattgttgaaccggaaatacttattaatggggatcactcaattgaaacatgtgataaatacacgagacaaacactcgatatattatttgaacaactaaatctactcaacgttcaactaagtggtacgattttaaaaccaagcatggtaatttccggcgataagaatacaaacagggcagcccccgaaacagtggccgagatgactattaattgcctcaaagataaatgtccagatgatctaggaggagtagcatttttatcgggtgggc

SEQ ID NO: 278010 - DNA, 429 bp, Unknown
  Bacterial polypeptide expressing nucleotide sequence isolated from the Sargasso Sea
aatggagaagagtatattagttgaaattgcaaataaaatgatgatgaggccaaaaggtattttagcaatggatgagagtagccctacaattgcaaagcgccttgcctctatcaatgttgataatagtgaggaaaacagaagacgttatagagaactcatcgtcactgctccgaatctatcagattatataagtggggctatcctctttgaggagacatttgaccaaaagatgaacgacggtactttatttagagactatctcgccagtattggaatattgccaggtattaaagttgacaaaggagcaaaagatttatcttgtcatcctaatgagaaaattacagagggtttggacggccttagagaaagattggcagcatactatgagaatggagcaaaattttgtaaatggagagcggtgatagctat

SEQ ID NO: 278011 - DNA, 193 bp, Unknown
  Bacterial polypeptide expressing nucleotide sequence isolated from the Sargasso Sea
tatgtcagaacttaataaaatagcagttaaaattattggtaaaggaaaaggaattctggctgctgatgaaagcaccggaacaatgaccaaaagattagagtcagttaaagtttcatctacacctgaaaatagattattatttagagaaacactatttagcgcgacaggtatgaaagagtgtatcggaggagta

SEQ ID NO: 278012 - DNA, 376 bp, Unknown
  Bacterial polypeptide expressing nucleotide sequence isolated from the Sargasso Sea
atgtctgaactaaataacatcgttttaaaaattttatcaaatggaaaaggtattttggcagcggatgaaagtacgggaaccatgactaaaagacttggtgctgtaggtgtggaatcgactacagaaaatagattgctatttagagaaactcttttttcatcagaaagtatgaaaaaatgtataggtggagttattttgtacgatgaaacaataaaacaaaactcaaagtcaaaaaaaactataccagaattaatttcaacttctggggctgttcctggaataaaagttgatacaggagcgaaagttttagctggttcaccagatgaaaaaataacagagggattagatggtttaagagaaagattaaaagaatact

SEQ ID NO: 278013 - DNA, 379 bp, Unknown
  Bacterial polypeptide expressing nucleotide sequence isolated from the Sargasso Sea
aatgtcagaattaaacaaaatcgctcttcaaatattgtcaaatggcaaaggtatacttgcagctgacgaaagtacagccacaatgacaaaaagattaaattcagtaaaagtacattccgatgaaaataatagactccttttcagacagactcttttttcgtcttcatcaatgaaagactgtatagggggcgtaatactatatgacgaaactattagacaaaaaacttcaaatggaaaaactatacctgaactaatacattcaagtggatcattaactggaattaaagttgatactggagctaaaatattagctgggtctaaagaagaaaaagttactgaaggtttagatggtttgagagaaagactaaaagattattat

SEQ ID NO: 278014 - DNA, 504 bp, Unknown
  Bacterial polypeptide expressing nucleotide sequence isolated from the Sargasso Sea
aatgtctgaattaaaatcaatagtaaataagattgtctcatccggtaaaggaatattggctgctgatgaaagcactggaactatgacaaaacgattggaaagtgtaaatgtagtatcgacttcagataatagactaaactttagaaatacactttttacctcaagtgctatgaaaacatgtattggtggtgttattctatatgatgaaacaataagacaagaaaataactcaaagaaaattcctgaaattatttctcaaaatggaacagttccaggtattaaggttgatactggtgctaaagtacttgcaaattcgtctgaagaaaaaattacagaaggtttagatggtttaagggaaagattgaaagattattataatttaggtgcaagatttacaaaatggagaggtgtttattcaatatcagagaaatacccaagtaaactagcaatatcatccaacgcacatgctttagcgagatatgccgccctagttcaagaagctgg

SEQ ID NO: 278015 - DNA, 202 bp, Unknown
  Bacterial polypeptide expressing nucleotide sequence isolated from the Sargasso Sea
tatgaattttgaaagtttagaagatattgctaatcatatagtttcggacggtaagggaattttagctgctgatgaaagcacgcccacaattaccaagaggtttgacacgattgatacagaatcaaccgaagaaaatagaagagattaccgagaattattatttagagcggaaggcatgaaaaataacattggaggcgtgata

SEQ ID NO: 278016 - DNA, 277 bp, Unknown
  Bacterial polypeptide expressing nucleotide sequence isolated from the Sargasso Sea
aatgtcagaattgcacgctgttgcacataaaatggttaaaaaaggtaaaggaattttagctgctgatgaaagcacaccaacctgtactaaacgctttgcaagcattaatacagattcatcggcagaaagcagaaatttttacagaaatatgctgtttacaactgaagatattgaaaaatacatcagcggtgtcattttgtttgacgaaacttttcatcaatcagaattatcatcaggaatgaaatttcctgattatttaacatccaaagatatatta

SEQ ID NO: 278017 - DNA, 358 bp, Unknown
  Bacterial polypeptide expressing nucleotide sequence isolated from the Sargasso Sea
aaaaattcacaagaatatgtttcagataaatttaatttactttctaactctcttgattttgtgtttcatggtggctctggatcatcagttgaagaaattagagaagcaattgactatggtgttataaaaatgaatattgatacagatctacaatttgcatttactgaaggagttagagattacatgttaaaaaattctagttatcttatgactcagattggtaatcctgagggaagtgatataccaaacaaaaaatattatgacccaagagtttggcttagatcaggagaagaaactttaaaaataagacttattaaggcttttgaagatttaaataatatcaataccttagattaaa

SEQ ID NO: 278018 - DNA, 477 bp, Unknown
  Bacterial polypeptide expressing nucleotide sequence isolated from the Sargasso Sea
aatgtcagaactatactcaattactgaaaaaataatttctaaaagcaaaggtattctagctgctgatgagagcacaggtacaatgactaaaagactagatgctgtaaatgtacaatcaacacctgaaaatagacttttatttagagaaatacttttatcatctgaaagtatgaaagattgtataggaggagtaattttatacgatgaaactataaaacaaatagcatcgaacaaaaaaacaatacctgagcttatttcaaactctggagcagtaccaggaataaaagttgatactggagcaaaagtattagctaattcaaaaaatgaaaaaattactgaaggccttgatggtttaagagatagattagaaatatattacaaactaggagctagatttacaaaatggcgaggtgtttatattatttctgacaaatacccaagtaaacttgcaatttattcgaacgctcatgctctgct

SEQ ID NO: 278019 - DNA, 187 bp, Unknown
  Bacterial polypeptide expressing nucleotide sequence isolated from the Sargasso Sea
atgtctgaattaaataacatcgtattaaaaattttatctcacggaaaaggtatattggctgctgatgaaagtactggaacaatgactaagagacttggcgctgtaaatgttgagtcaactccagaaaataggctgatgtttagagaaacacttttttcatctgaaagtatgaaaacatgcatcggtg

SEQ ID NO: 278020 - DNA, 274 bp, Unknown
  Bacterial polypeptide expressing nucleotide sequence isolated from the Sargasso Sea
tgagtgtgttccagacaaccttccagctattacatttctttcaggtggacaatcagaaattgtttcaactgaacacttagatgcaatgaataagattggaggttttccatggaagttaagcttttcatatggaagagctttacaagctggagctttaaaagcttggctaggtaaatcagaaaatattgatgcagcacaaagtgcattttctcatagggctttaatgaataaaaaagcagcactgggccaatggtcaaaagatttagaagtttaa

SEQ ID NO: 278021 - DNA, 430 bp, Unknown
  Bacterial polypeptide expressing nucleotide sequence isolated from the Sargasso Sea
catggcgctcgttccgcttcggcttctgctcgaccacgccgccgagaacggctacggcatccctgcgttcaacgtgaacaacctggagcaggttcaggccatcatggaagcggctgatgagaccgacagccccgtgatcctgcaggcctcccgcggtgcccgtaactacgccggtgagatcttcctgcgtcacctgatcctggcagccaccgagacctatccccacatccccgtggtgatgcaccaggatcacggcaacgcccctgacacctgctattccgctgcaatcaacggcttcacctccgtgatgatggacggttccctggaagccgacgccaagactcccgccagctacgagtacaacgtggcagtcaccaagcaggtggtggatttcgcccactccgttggtgtgagcgttgagggtgagctg

SEQ ID NO: 278022 - DNA, 392 bp, Unknown
  Bacterial polypeptide expressing nucleotide sequence isolated from the Sargasso Sea
aatgtcagaacttaataaaattgcacttaaaataatttctaatggtaaaggaattcttgctgcagatgaaagcaatggaactatgacgaaaagacttgaggcagtagatgtacattcgacaccagagaatagacttttattcagagaattaatcttatcatctgaaagtatgaaagaatgtataggtggtgtaattctttatgatgaaacaataaagcaaaattcaagctttggaaaatcaatccctgatttaatttcatcttcaggtgctataccaggaataaaagttgatacaggcacaaaaaatttgacaaactcctcggaagaaaaaataacagagggtttggatggactaaaagaaagattaaaaaaatactataagcttggtgcac

SEQ ID NO: 278023 - DNA, 746 bp, Unknown
  Bacterial polypeptide expressing nucleotide sequence isolated from the Sargasso Sea
gatgggtgatttaaataatattgaagaaatagcaaactatatcgttgcagacggaaagggtattttggccgctgatgaaagtaatcccacttgtggaaaacgttttgattctattggggtagagtcaaatgaagaaaacagaagagattatcgtgaactgttgtttaggtcagaaggcatgaagggcaatataggcggagttatattgtttgatgaaaccatccgtcaaaaagctgaggacggcactcccttggtaaacgtaattctagatcaaggtgcacttcctggcataaaagtggaccaaggtttaaaaccaattggggactccgaggaatcattaactcaaggccttgaaggtttagatgaaaggctaaaagagtattattctttaggagcaaaatttactaaatggagggcggtgataaaggttggcgactcacttccttctgaagaggccgttactagcaatatgaatgcccttgctgaatacgcgaagcttgttcaagaaaacaatatggttcctatggtagaaccagaagtattgatggatggcaatcactcaattgatcaatgttttgaagcaacatcaagaagtttggaatgtcttttcaggcttcttaaagaaaagggagttaatatcaaagggaccattttaaaacctaatatggtaacttcaggatcggagtcttctaataaggcagatattaatgaagtggctaatcagacaatccgatgcttgaagatgc

SEQ ID NO: 278024 - DNA, 361 bp, Unknown
  Bacterial polypeptide expressing nucleotide sequence isolated from the Sargasso Sea
atgtctgaattaaataatattgctttaaaaattttatcaaatggaaaaggtatcctggcagcagatgaaagcacggggaccatgacgaaaagacttaaagctgtaaatgttgaatcaactgaagagaatagacagctatttagagaaacacttttttcatctgaaagtatgaacaaatgtataggtggagtaattttatatgatgaaacgattaaacaaaactcaaaatcaaaaaaaactataccagaattaatttcttcatctggagctgttcctggaataaaagtagatacaggagtaaaaattttggcaagttcacctaatgaaaaaataacagaaggattagatggtttaagagaaa

SEQ ID NO: 278025 - DNA, 532 bp, Unknown
  Bacterial polypeptide expressing nucleotide sequence isolated from the Sargasso Sea
atgaaattattaacattaaaatttattataacttttatatatctaatatcatcaagcccatcttatgcaatacaaactccaaatttgaaaaatttagttatacataaagatccaaaaaaacttgagaaaataaattttaaaaacataaataatgaaactattaatttaaataagttcgaaaattcattaattatcattaatttttgggcaacttggtgtgcaccatgtatagaagaaatgccttctttgagcagattacaagcaaactcaaattttaataatttgcaaataataccaatcaatgttggtagagaaagtattgaaaaatccaagaatttttatgaaaaactaaatataaataatttagaaatttactttgataaaaaaacagaattagtaaataagtttttattaagaggattgccaactactatatttataaataaaaaaggagaagaatttgctcgtataataggatttgttaattttgatgataaaaaaattataaaatggcttcagaaatatgactaaa

SEQ ID NO: 278026 - DNA, 271 bp, Unknown
  Bacterial polypeptide expressing nucleotide sequence isolated from the Sargasso Sea
atgaattttaatagtttaagcgaaatagcaagttacatagtttcagatggaaaaggaatattagctgccgatgaaagcaatcctacttgcaccaaacgatttgattcaataggagtagagtctaccgaggacaatagaagagactatagggagttactttttagatctgaaggcatgaaagggaatataggaggagtaatattatttgatgaaactatacgtcaaactgccgctgatggtacttcgttggtagatgttataactaacccaa

SEQ ID NO: 278027 - DNA, 217 bp, Unknown
  Bacterial polypeptide expressing nucleotide sequence isolated from the Sargasso Sea
aatgtcagaattgcacgctgttgcacataaaatggttgaaaaaggtaaaggaattttagctgctgatgaaagcaatccaacttgcaccaagcgctttgaaagcatcaatacagattcaacggcagaaagcagaaatttttatagaaatatgctttttacgactgaagatattgaaaaatacataagcggtgtatttttatttgacgaaacttttcac

SEQ ID NO: 278028 - DNA, 213 bp, Unknown
  Bacterial polypeptide expressing nucleotide sequence isolated from the Sargasso Sea
tatgaaatttgaaaatttatcacaaatagcacgttatatagtagaagatgggaaaggtatattagcagctgatgaaagtaatccgacttgcaaaaaaagattcgacacaatttctgttgagtctacagaaggcaatcgaagagattatagagaactcctattttcctcagagggaatggaaggaaatattggaggagttattctatttgatga

SEQ ID NO: 278029 - DNA, 448 bp, Unknown
  Bacterial polypeptide expressing nucleotide sequence isolated from the Sargasso Sea
aatgtcagaactaaataatacagcattaaaaattttaggaaacggtaaaggaattttagctgcagatgaaagcactgcaacaatgacaaaaagattaaatggtgtaaatgtcccctcaaccccagaaaacagattgttgttcagagaaacactttttagctcatcctcaatgaaagattgtattggaggtgtaattctttatgatgaaacaattaaacaaacatcatcaaaaaaaaatacaattccagaattaatctcagatacaggctcattgccaggtatcaaagtagacacaggagcaaaaattttagctggttctccagatgaaaaagttacggagggtcttgatggattaagggaaagattaaaagaatattataaattaggtgcaaaatttactaaatggagaggtgtttataatataactaaaagttatcccaagcaaact

SEQ ID NO: 278030 - DNA, 631 bp, Unknown
  Bacterial polypeptide expressing nucleotide sequence isolated from the Sargasso Sea
gagacttgtagactatgaatcgcagggtgcaaaattttgtaaatggagagccgttataacaattggtgataaaattcctagtgaatcctgtataagatcaaactgtaatgctttagctagatatgcatctttatgtcaagaaaataatctcgtaccgattgttgaaccagaagtattaattaatggtgatcactccatagaaaaatgcgatgaagttacaagggagacccttagatgtctatttgatgagctcaaatctattgatatatattttccaggtgtaattttaaaacctagtatggtaatttccggagacacgaatactcatcgcgctgactatgaaacagtagcagacatgacagtgaattgtttaaaagagttatgtcctaaagatttagggggtatagcttttttatcaggagggcagacaaatgacgaggcaactacacatcttaagatcatgaattctgggaaatacgaattaccatggcgagttactttttcatatgctagagctatacaacaatcagctcttaatgcatggtcaggaaaggatgaaaatcacgaagaagctcaatctatccttggtgaaagagccaagttatgttcagatgcttccataggcagctaa

SEQ ID NO: 278031 - DNA, 553 bp, Unknown
  Bacterial polypeptide expressing nucleotide sequence isolated from the Sargasso Sea
atgaatttagaagaaatagcaaaaaaaatgtgcgcaaaaggcaaaggtattcttgctgcggatgaaagttcaggaacaatagcgaaaagatttaaaagtattaatgtagaaagcacggaagcaaatagattgaaatttagagaaaccttattcagttcaagtgctatgagaaactatattggtggagttatattgtttgacgaaacaataaaacaaaaatctactttaggacctacaattccagagcttatttcaaaaaataatgcaatacctggaattaaagtagataaaggtgctaaacctcttgctagctctcaagaagaaactattactgagggtttagacggtctgcgagatagattaaaagaatattatactctaggagcaagatttacaaaatggagagcggtttataaaattagcgaaaattttccttcaaaattatcaattaaatcaaatgctcatgctcttggaagatatgcagcacttgtgcaagaagcaaaaatggttcctataatagaacctagaagttttgatggatggatctcatgac

SEQ ID NO: 278032 - DNA, 742 bp, Unknown
  Bacterial polypeptide expressing nucleotide sequence isolated from the Sargasso Sea
ctttacctggggataaaagtagatacaggcgctaaagatttagcatttaattctaacgaaaaaattactgaaggcttagatggtttaagagaaaggcttatagaatattttaatttaggggctaaatttgcaaaatggagagctgttataacaatagatgattcaattccaagtgatttatgcataaattcaaatgctcacgctttagcaagatatgcagcactttgccaagaaaatggaattgttcctattgttgagcctgaagttttaatggacggcgaacacacaattgaaagatgttatgatgttacaaaaaagactctcgatgtcgttttcaatgaattaattgctcatggtgtcaatttaaaaggaatctgcctcaaaccaaatatgataattgatggatcgctcacttctgaaaaatcatcttcaaaaatggttgctgaaaaaacaatttcttgtttcaaggaagtagttcctgaggatgtccctggtattgttttcttatctggaggtcaaactgaaattgaagcaactgaaaacttagatcagatgaataaaataggaaatttaccgtggaacttaagtttttcatatggtagagccttacaagcttccgctttacaggcttggtcaggaaaagtggaaaatgaagaaattgcatctgcgacttttgatcatagggctaaaatgaattccctagcaacattaggtaagtgggagtctgaactagaaaagtagg

SEQ ID NO: 278033 - DNA, 802 bp, Unknown
  Bacterial polypeptide expressing nucleotide sequence isolated from the Sargasso Sea
attagacaaaaaacttctgaaggttcaacatttccagattatttagataaagttggcattattccaggtataaaagttgatgctggtgcaaaaccattttcttctcaccctaatgagaaaatcactgaaggacttgataatttaactgaaagaatgaaagaatatagttcattaggtgctaaattcgcaaaatggagggcagtaatagctataggtgaaaatataccttcaagcgcatgcatgctagcaaattctcacgccttagctagatatgcaagtatatgccaagaaattaacattgttccaatagtcgaaccagaggttttaatggatggatctcataacataaataaatgctttgaagtaacaaatacaatgcaatcaattttgtttgaaacattagataaattagatattaatttttctggaataattcttaaacctaatatgataacaccaggtgctagctgtgttgaaaaatcaagtcccgaggagattgctgaattaacagttaaatgtcttggaaataatgttccaaaggaagttccgggaatagcttttttatctggaggacaatcagacgaagacgcctcaaataatcttagtaacattaataagataaataataatccatggaaggttacgttctcatatggaagagcacttcaattagaagctatgaaaaagtggggcgggaataaccaaaacataattgaagcgcaaaaaattataagtaaaagagcatatatgaatagtttagcagcatcaggtaaatatgatttatctatggaaagtaaataga

SEQ ID NO: 278034 - DNA, 354 bp, Unknown
  Bacterial polypeptide expressing nucleotide sequence isolated from the Sargasso Sea
tatgtcattggataatatagaagaaatagcatcatttattgttgcagacggtaaaggcattctggctgcagatgaaagcaatcctacctgtggaaaaagattcgactctattggagttgaatccactgaagaaaatagaagagattatagagagatgctatttagatctaagggaataaaaggcaatataggcggcgtaatactttttgatgaaactattagacaatccgcagaagacggctccttattaagagatctgatatctgaacaaggggcactgcctggcattaaagttgataaaggactaaagccaatagaagattgtcctggaagaacagtttacgtaagtttaga

SEQ ID NO: 278035 - DNA, 685 bp, Unknown
  Bacterial polypeptide expressing nucleotide sequence isolated from the Sargasso Sea
accgttacagttggattagatggcttagatgacagattaaaagaatatactgaaatgggtgcaaaatttactaaatggagagcagttataaaaattggagatggaattccatcagatgaatgtattgacgcaaatatggatgctctagctcaatatgctaaatctgctcaaaacaacggcatggtaccaattgttgaaccagaagttttgatggatggagatcattcaatagatgattgctatgatgctacagaaagatcattgaaatcacttttcaaacatttagaaaaatatgaagtaaatataaaaggaactcttctgaaaccaaatatggtaacgtctggttcagaacatgaagttcaggctggtattgacgaagtagcaaataaaaccattgaatgtctggtaaaaaatgttcctcaagatttaccaggagtagcatttttatcaggtggacagtctgatgttttggcaacagctcatcttgacgcaatgaataagataggaggattttcatggaaactaagcttttcttttggcagagctcttcaagcagctgcactgaaggcatggggcggtaagccagaaaatgtttttatagcacaagacgaactctcccacagagcagagatgaataagttagcatctctaggtcaatgggaaaaagatcttgaagaaagataaa

SEQ ID NO: 278036 - DNA, 625 bp, Unknown
  Bacterial polypeptide expressing nucleotide sequence isolated from the Sargasso Sea
aatggagaaaagcgtgaataacactgaacagctggaaagaataagaaccgataaaggctttatagctgcgttagaccaaagcggaggatccacacctaaaactctagaattatatggaatttcagaagatcagtacgaagatgaagaagaaatgttccaactaattcataatatgcggacaagaataatcacaagcccctcttttagccaaaaccacatactcggagcaatattatttgagcaaactatggagcggctcatctatggaatgccaaccgcagatttcctttggaagacaaaaaaaattgttccatttttaaaggttgataagggattagaagatccaaataatggtgtccgccttatgaaagacatacccgatttgagtgaaacccttaaaaaagctttagaacatggaattttcggaactaaaatgagatccgtaattgatgaagacaactccttgggaatagataaaattgtggatcagcaatttgaatttgggaaaataattttggacgctggattaacaccaattattgaaccagaagtaaccataaatatttctcataaatcaaaggctgaggaaattcttaagaaaagtttaacaaaaaatttaaataaa

SEQ ID NO: 278037 - DNA, 466 bp, Unknown
  Bacterial polypeptide expressing nucleotide sequence isolated from the Sargasso Sea
atgtctgaattaaataaaattgcacttaaaataatttcaaatggaaaaggaatccttgcagccgatgaaagcaatggaactatgaccaaaagacttgaaacagttagggtcaactcaaccccagaaaatagactatcgttcagagaaatacttttctcatcagatggaatgaaagattgtattggtggtgtgatactttatgatgaaactataaatcaaatttcaaaaaatggaaaatcaatacctgatttaatagccatgtctggcgcagtgcctggaataaaagttgatactggcgcaaaagatttggcaaagtcacctcaagaaaaaattacagaaggtttggatggacttagagatagattaaaaaaatattatgatcttggagcaagatttgcaaaatggagaggtgtctattctattaatgaaaaatgtccaagcgaaatggcaattagttctaatgctc

SEQ ID NO: 278038 - DNA, 864 bp, Unknown
  Bacterial polypeptide expressing nucleotide sequence isolated from the Sargasso Sea
ttcttttttcatcagacggaatgaaggattgcataggtggtgttattctttatgatgaaaccataaatcaaatttcgagtacaggaaaatcaattccagatttaatatctagttcgggtgcagttcctgggatcaaagttgatactggtgcgaaagatttagcaaattcccctaaagaaaaaattacagagggattagatggccttagagatagattgaaaacatattatgatcttggagcaagatttgcaaaatggagaggcgtctattctattggtgaaaaatatccaagcgaacttgcaattagtactaatgctcacgcacttgctaggtactctgcactagttcaagaaagtggaatggttccaatagtagaacctgaggtattgatggatggaaaccattctgcagaagtttgttttaataaaacttcagaggtaattaaaaagtgttttgaggaactaattttaaacaaagttgatctttcaggaataatattaaaaccaaacatgattttgtcaggtagcctatcagaaaataaaatttctagtgaagaagtttccagcaaaactttagaatgcctcaaaaattctgtacccaatgaagttcctggaatagcttttttatctggggggcaatctgaaattgaagctacagaaaatttaaatttaattaataaaaataataatacaaattttataatgacctattcgtatggaagagctcttcagcaaagtgctttaaaagtttggtctaatgatgttaaaaatgtggaggcaactcaaactacttttaatcatagagctaaaatgtgtaccttggctgctcaaggaaaatgggctatcgaacttgaaaataaataaa

SEQ ID NO: 278039 - DNA, 343 bp, Unknown
  Bacterial polypeptide expressing nucleotide sequence isolated from the Sargasso Sea
atggatctaagttcattgaactcaatagcacaatcaatggttgctgcaaacaaggggatacttgctgcggacgaaagtacgccaaccattggaaaacgatttgccacaattgatacagaatcaactgaaagcaatagacaaatctatcgcaatttacttttcacgagcccgaatgtttcagagtatataagtggtgttattttatttgatgaaaccatcagacaatcgactaatgatggaacaccatttgcagagcatctcacgtctcttgggattgttccaggcatcaaagtggacaaaggcgttaaaggcatccctttttgtgatggagaaaccgttacag

SEQ ID NO: 278040 - DNA, 526 bp, Unknown
  Bacterial polypeptide expressing nucleotide sequence isolated from the Sargasso Sea
atggcgctcgttccgcttcggctactgcttgaccacgctgctgagaacggctacggcattcctgcgttcaacgtgaacaaccttgagcaggttcaagccatcatggaagcggctgacgagaccgacagccccgtgatcctgcaggcttcccgtggtgctcgcagctacgccggtgagatcttcctgcgccatctgatcctggctgcaacggagacctatccccacatccccgtggtgatgcaccaggaccacggaaacgagccttcgacttgctactcagcagccatcaacggcttcacctccgtgatgatggatggatccctggaagctgacgccaaaacacctgccagctacgagtacaatgtcaatgtcaccaaacaggtggtggacttcgctcactccgtgggtgtgagcgtggagggtgagctgggttgcctgggctccctggaaaccggcaagggagaggccgaggacggccacggtttcgaaggcgagctgtccaaggacatgctgctcaccgacccgg

SEQ ID NO: 278041 - DNA, 499 bp, Unknown
  Bacterial polypeptide expressing nucleotide sequence isolated from the Sargasso Sea
tgttcctattgttgagcctgaagttttaatggacggcaaacacacaattgaattatgttatgatgttacaaaaaagactctcgatgtcgttttcaatgaattaattgctcatggtgtcaatttaaaaggaatttgcctcaaaccaaatatgataattgatgggacgctcacttctgaaaaatcatcttcaaaaacgattgctgaaaaaacaatttcttgtttcaaggaagtagttcctggggatgtccctggtattgttttcttatctggaggtcaaactgaaattgaagcaactgaaaacttagatcagatgaataaaataggaaatttaccatggaacttaagtttttcatatggtagagccttacaagcttccgctttacaggcttggtcaggaaaagtggaaaatgaagaaattgcatctacgacttttgatcatagggccaaaatgaattccctagcaacattaggtaagtgggagtctgaactagaaaagtag

SEQ ID NO: 278042 - DNA, 884 bp, Unknown
  Bacterial polypeptide expressing nucleotide sequence isolated from the Sargasso Sea
aatgagtttcgatcagcagcttaaaattgtaaaaaaacgggaagggtttattgcggcgctcgaccagagtggcggcagcactcctaaagcactccggctttatggcattggagaatcggaatattccggagaggatcaaatgtacgaccgtattcatgagatgcggtcaaggatagttaccagtcctcaattcgagagtaccaggatacttggagcgattctctttgaacagactatgggacgccagatcgaggggctaggatccgctcaatatctctgggaacggaaacaggtggtcccgtttctcaaagttgacaaaggcttagctgaagaaattaacggggtacagttgatgaagccgatgccggatttagatgctcttcttgaggaagcagggaaaaattctgtttttggaacaaagatgcgttcggtgatcaaggtctccaatcctgagggagtaaaagcagtggtggatcagcagtttgaaatcggaaagcggatcatcgcagcaggtttggtgcctattttggaaccagaagtggatattaacagttccaccaaggcagaagcagagcagatgctgttggatctactgatggaaaacatcaaaggtctggattcaagtcagaaaatcatgctgaagcttagcctgcctgaccagaataatcattatgctctctgtatcgaacatccgaatgtgattagagtggtggcgctttcaggaggctactctagggaagaagccaatgccagactatcgcgaaaccaaggcatgaccgccagtttcagccgtgctctgaccgaggggctttctgctggacagtccgatagtgagttcaatcagaaattagattcaaccatcgatagcatttttcaggcttcga

SEQ ID NO: 278043 - DNA, 646 bp, Unknown
  Bacterial polypeptide expressing nucleotide sequence isolated from the Sargasso Sea
aaagaatattataaacttggagcaaagtttacaaaatggagaggtgtctacactatttcgaaagatttcccgagcaaattatcaattcattctaatgcacacgcattagctagatattccgcattagtacaagaatgtaatatggtgccaattgttgaaccagaggttttgatggatggagaccattccgctaaagagtgttttcaaaaaacctccgaggtcattaagaagtgttttgaggagcttattcttcataaggtcgatttaaaaggagtaatattaaaaccaaatatgattctagctggaaataaatcaaaggaaaaaatctctaatgaagaggtagcaaaattaaccttggaatgcttaaaaagttctgtcccttcagaagttcctggtatagcttttttatctggtggacaatcagagctggaagcgacagaaaatttaaatttgataaataaattgaataatactggttttataatgagttactcctacggaagagcattgcagcaaggtgctcttaaattttggtcgaaaaatattaaagatattgaaggaactcaaaaggtatttaaccacagagcaaaaatgaatactcttgctgctcaaggaaaatggtctaaagaaattgagagtaagtaaa

SEQ ID NO: 278044 - DNA, 622 bp, Unknown
  Bacterial polypeptide expressing nucleotide sequence isolated from the Sargasso Sea
atgtctgatttaaataagatagcaaaaaaaattctagaaaatggaaaaggaattttggctgcagatgaaagcactggaacaatgactaagagattagagaatgtaaatgttccatcaactccagaaaacagattactatttagagaaactctatttagtgcatcaagcatgattgaatgtattggcggagtgattttatatgatgagacaataaaacaagagacctctaaaaaaaataaaattccagaactaatttcaaaaatgggatccttcccaggtataaaagttgatactggtgctaaaatactggctggatcaccaaatgaaaaaattacagagggcttagatggattaagagataggttaaatgaatattataaacttggagcaaaatttacaaaatggagaggtgtctataatatatcaaaagattttccgagcaaactatcgatacatgcaaatgctcatgcactagcaagatattctgcattggttcaagagtgcaacatggttccaatagttgagccagaagtattaatggatggtgagcattcagcaaaggattgttatgaaaaaacatctgaagtaattaaaaaatgttttgacgaactaattttacaca

SEQ ID NO: 278045 - DNA, 580 bp, Unknown
  Bacterial polypeptide expressing nucleotide sequence isolated from the Sargasso Sea
tttccaagtaagctgcaaataaatagtaatgctcatgcacttgcaaggtactcagccttagttcaagaaagtggcatggttccaattgttgaacctgaagtacttatggatggaaaccactctgcagaggtttgcttaaataaaacatcagaagttattaaaaaatgttttgaagaattaattttacataaagttgatctttcaggaattatattaaaaccaaacatgatcttggcaggtaaccaatataaaaaaaaaatctcaagtgaagaagtttcagctaaaacattacaatgtcttaaaagttcagttcctagtgaagtgccaggaattgcttttttgtcaggaggtcagtctgaaattgaagctacagaaaatttaaatacaataaataaaaacaacaattctcactttataatgacattctcttatggaagggctcttcagcaaagtgcgctcaaaatctggtcaaaaaatattaaagacatagagactacacaaaaaacttttaatcacagagctaaaatgtgcaccttggccgctcaagggaagtgggcgagtgaaattgaaaacaaataaa

SEQ ID NO: 278046 - DNA, 871 bp, Unknown
  Bacterial polypeptide expressing nucleotide sequence isolated from the Sargasso Sea
tctggcggcagacgaaagtactggaacaatgactaagagacttgatggcgtcaatgttaaatctagtcctgaaaataggttattttttagagaaaccctttttacctctgctagaatgaaagattgtattggtggagttatactttatgatgagactataaaacagactagtaaatctggaaaaaaaattccagaattaatttctgatttaaattctgtacctggaataaaagttgatactggtgcaaaaactttggctaactctgaagaagaaaaaattacagaagggcttgatggattaagagataggttaaaagagtattataaacttggagcaaggtttacaaaatggagggcggtttacataatctctgataaatatcctagtaaattgtctatacaaacaaatgctcatgctcttgctagatactcttcattagttcaagaaagtggaatggtaccaattgtcgagcctgaattattaatggatggaaatcatactgccgatgattgttataaaaaaacatctgaagtaattaaaaaatgcttcgatgaacttgaattacataaaatagatttaaagggtataattttaaaacctaatatgattttacccggatcaagctcgaacaaaaaaatttcaaatgaaaaaatagcaaaacttacagtaaaatgcctaaaagaaagcgttccatcagaagttcctggaattgcttttttgtctggaggccaaaccgaagtcgaagcaactgaaaacttaaatcaaataaatattcaaaataacactaactttattatgacattctcttatggaagagcgctccagcaaagtgctttaaaattttggtctaaagacataaaaaacatttga

SEQ ID NO: 278047 - DNA, 792 bp, Unknown
  Bacterial polypeptide expressing nucleotide sequence isolated from the Sargasso Sea
aaaaagattaaaaagtgtcaacgttgagtccaatgaaaaaaatagattaaattttagagaaactttgtttagttcggaaggaatgaaaaattatattggtggagttattctatttgaggaaacattaaagcaaaaaagtaaaaaaggtatttcaataccagatttaatagctcagagtggttctgtcccaggaataaaagttgataaaggtgccaaaactttggcaggatctccagatgaaaaaattacagaaggactggacggtttgagagatagattaaatgagtattataaattgggtgcaagatttacaaagtggagagcggtatattccatctcagaaaaatatccatctttacaggcaataaagtcaaatgctcatgcacttgctagatatgctgcattagctcaagaggcaaaaatggttccaatagttgagccagaagttttgatggatggaaatcacaatatagaaaaatgttttaatgtaactacagatgttttgaatgaatgttatgaacagttagcaattcataaaatttcgcttgaaggcactatacttaaaccaaacatgatattacctggttcaagctgtaaagagaaagttagttctcaagaaattgcaaaaaaaaccatggaatgtttaaaaaaaaatgttcctagtgaagtaactggtattgcttttctttctggaggacaaactgaaaaagaagctacaaaaaatttaaatgaaattaacaaaataaatgatacaaattttcttatatctttttcttacggaagagctcttca

SEQ ID NO: 278048 - DNA, 886 bp, Unknown
  Bacterial polypeptide expressing nucleotide sequence isolated from the Sargasso Sea
aattttagacaaactcttttcaactcaagtgcaatgaaagattacattggaggagtaattttatttgatgaaaccatcagacaaaaaactactctaggtccttcagtaccagaattaatttctaaccatggggctatacctggaataaaagtcgataaaggtgctaaaccattagcaggatcttacgatgaaacaattacagagggtttggacggtttacgagaaagattgaaggaatattatgatctaggtgcaagatttacaaaatggagagcggtatataaaatttcgaataaattcccctcatctcaatcaattaaatcaaatgcacacgcgttagcaagatatgctgctctagttcaagaagcaaaaatggtgccgattgtcgagccagaagttttaatggacggatcacacaatattgacagatgttatcaagttacaacaaatgttcttaatgaatgttacaatgaacttgaaattcataaagtcgatttaaaaggaacagtcttaaaacccaatatggtaatacctggttcagagtgtaaagataaatctagccacgaagaaatagctaaaaaaacattggactgcttaaaaaaaaatgtaccaaatgatgttcctggaattgcttttttgtctgggggacaatcagaaattgagtctagtaaaaatcttaatgagattaacaaaattaacgatagcaactttttaattaccttttcatatggcagaggattgcaagccagtgcattgaaagagtttggaaaaaatcaagagaatgttgctaaaatacaaaaagcttttaatcatagagctaaaatgaatggtctttcttcaaaaggagaatggtctgaagatttagaaaaagagttcgcagcttaat

SEQ ID NO: 278049 - DNA, 746 bp, Unknown
  Bacterial polypeptide expressing nucleotide sequence isolated from the Sargasso Sea
aatgctggataaactgaagacgcaaaccggttttattgcagcgttagatcaaagcggcggtagtacccctaaagcgttacgcttatatggcatcgaagagtcagagtacagctcagacgaagagatgtttaatcttgttcatgaaatgcgtacgcgcattatcaccagcaccccttttagcggcgagcgcgttcttggcgcaatcttgtttgaaaacacccttgatagagaaattgaaggcatgtcttctgcacactacctgtggcagaaaaagcgtgttattcctttcttaaaggtagataaaggactagctgaagaaagcaatggcgttcaagtaatgaagccaatgcctggtcttgatgcactgctagctaaagcggtagcgcaagacgtgtttggcactaagatgcgaagtgttgttaagcttgcgaatcaccaaggtattaaagatgttgttgctcagcaatttgaagtgggtaagcaaatcttagccgcaggccttgttccgattatcgagccagaagtagacatccacagtccacaaaaagcggaagctgaagctcttcttaaattagagatcctaacgcagctaaaccttctaaacgaaggccaggaagttatgctcaagctaacgcttccaacagaagcaaacttctataaagagcttgttgatcaccctcgcgtgcttaaggttgtagcgctttctggcggctatagccgtgaagaagcaaacgcgaagctggcag

SEQ ID NO: 278050 - DNA, 475 bp, Unknown
  Bacterial polypeptide expressing nucleotide sequence isolated from the Sargasso Sea
agtcatacaattgatagatgttatgaagttactagtcaggttttaattgactgtttcaatgaattaaaaataaataatgtaaatcttaaaggaatagttttaaaaccaaacatgatacttcctggtgcaaattacaaacaaaaagcttctacagatgaaattgctagcaaaacacttgattgtttaaaaaaaactatgcccaaagaagttccgggtgttgcgtttctatctggaggacaaagcgaaattgaggcaacaaaaaatttaaatgcaataaataagattaatgatacaaattttaattttactttttcttatggtagagctttacaacaatctgctctcaaaacatgggcaaaatcaatgaatgacgtaaaaagtattcaaaaagttttcgatcatagagctaaaatgaatggtgcctcgacagaggcgaaatgggaagagaagaacgagcaaaattttgctgcttaaa

SEQ ID NO: 278051 - DNA, 747 bp, Unknown
  Bacterial polypeptide expressing nucleotide sequence isolated from the Sargasso Sea
gatagtggagcagtcccaggaattaaagtagatactggtgcaaagaacttggcaaactctccagaagaaaaaattactgagggactagatgggcttcgagaaagattaaaaaaatactatgagcttggtgcaagatttacaaaatggagaggtgtttattctataagtgataactatcctagcaaacttgcaattcattctaatgctcatgcccttgcaagatatgcagcattagttcaagagtgtgagatggttcctatagttgagccagaagttttgatggatggtgatcattctgcagatcaatgtttaaagaaaacttcagaagttataaaaaaatgctttgaagaattaattctacacaaaattgacttgtcagggattatattaaaaccaaacatgattttagctggaagtaattcaaaaaataagatttctaatgaagaggtttcaaataaaacacttgaatgtcttaaaaattcagtgccgacagaagttccagggattgccttcttgtctggaggtcaatctgaagtggaggcaacagaaaatttaaatttaataagcaaaaacaatagtacaaattttataatgacttattcatatggtagagccttgcaacaaagtgctcttaaattttggtctaaagatatcactaaattcgcagaaacacaggatgtgtttaatcatagagcaagaatgtgtactctagctgctcaaggcaaatggacaagcgatcttgagaat

SEQ ID NO: 278052 - DNA, 415 bp, Unknown
  Bacterial polypeptide expressing nucleotide sequence isolated from the Sargasso Sea
atgggtatagaagaaatagcaaaacaaatggtagctaaaggcaagggaatacttgcggctgatgaaagcacagggacaatggaaaaaagattgaagagtgtaaatatagaatgtactgaaaaaaatagacttcactttagagaaacattgttttcgtctggctcaatgaagaactgtataagcggtgttatattatttgatgaaaccctaagacaaacttcaagtagtggtatttctattccagaattaattaaaaaaagtggatctattcctggtattaaagttgataaaggagcaaaagttttagctggttcagacaaagaaaaagttactgaaggcttagatggtttaagaggtagaatggaagagtactacaaattaggagcaagatttgcaaaatggcgtgctgtgtatt

SEQ ID NO: 278053 - DNA, 686 bp, Unknown
  Bacterial polypeptide expressing nucleotide sequence isolated from the Sargasso Sea
tttgaaaagtaaattcatctacggaaataaaactcaaaaactttttgagcttgcaaaagaaaaaagatttgctttaccagctataaatgtttctgggaccaatacaataaatgcagtactagaaactgctagtgaagtgaatagtccagttataattcaattctcacatggtggatcccattttattgctggaaaaggtattaacaattctagccacaatgcatcaatttcaggatctattgctggcgcttaccatatccataatgtttgtgaaaattacaaagggaaagtaataatccataccgaccattgttcaagaaaaaatcttccatggatagatggtttattaatacatggaagtgacttttataaaaaaaatggatatcccttatttagctctcatatgattgatctttcggatgaatcaatagaagataatattaatacatgtaaagagtacctgaaaaaattaaccgatcttgagatgactttagaaatagaactcggaataactggaggtgaagaagatggtgtggataatactggtattgattctacaaaactttatactcaacctgaagaagtagcttatgcatattcagagttggtttcaataagtgacaattttataattgctgctgcatttggaaatgttcatggagtatataagcctgggaatgttagtt

SEQ ID NO: 278054 - DNA, 721 bp, Unknown
  Bacterial polypeptide expressing nucleotide sequence isolated from the Sargasso Sea
gaatataatgttgcagttacaaaaaaagtagtagattttgctcattcagttggagttagtgtgaaaggagaactaggttgcttaggttcattagaaacagggaaaggagaagcagaagatggtcatggatttgaaggtgaactttctacagatatgcttttgactgatcctcaagaagctgcagattttgttgcgaaaacaaaagttgatgcattagctattgctataggtacaagtcatggtgcttataaattcacaaggaaaccaacaggtgaagttcttgcaattagcagaattgctgaaattcataaagcacttccaaatacccatcttgtaatgcacggatctagttcagttcctcaagaatggttagatatcattaacaaatatggtggtgaaattcctcaaacatatggtgttcctgttgaagagattcaagagggaataagaaatggagtcaggaaagttaatattgataccgataacagacttgctttcactgccgcggttagagaggcagcatttgctgataaggcaaactttgacccaagacatttcaacaaacctgctagaaaatacatgaagcaagtttgtcttgatagatacaagcagttctggtgcgaaggtcaagcaagtaagatcaaacaaaacagcactaattattttgctgatctttacgcaaaaggtgatttagatccaaaagtaaaagctgctgtttaat

SEQ ID NO: 278055 - DNA, 427 bp, Unknown
  Bacterial polypeptide expressing nucleotide sequence isolated from the Sargasso Sea
aataatagaagagactatagagagatgctttttagatcaaaaggtatgaaagaaaatattggcggagtaattttatttgatgaaactttgaggcaggatgccaaagatggcactccccttaaagaattgatcagtaattcgggtgcccttcccggcattaaggttgataaaggtttagtacctctggttgatggatcagatgaagtagtgactcaaggattggatgggctggatgaaagatgttccgaatatgattctttaggagcaaaatttacaaagtggcgtgcagtaataaaaatcggagatagcatgccatctgatgattgtattaatgcaaacgccaaagcactagcagattatgctgcaattgctcaatctaataacatggtgccaatagttgaacctgaagttttaatggatggcgacc

SEQ ID NO: 278056 - DNA, 505 bp, Unknown
  Bacterial polypeptide expressing nucleotide sequence isolated from the Sargasso Sea
tatggtcccaatagtagagcctgaagtattaatggatggagagcattcagcggatatttgtttaagcaaaacatcagaggtcataaaaaaatgctttgaagaactaatcttacataaagttgatctttctggaattattttaaaaccaaatatgatattagctggcactcaatcaaaagaaagggctaccagtgaagaggtttccaataaaacacttgagtgtcttaaaaattcagttccttccgatgtgcctggcattgcctttttatcaggaggtcagtctgagttagaagctacagaaaatttaaatttaataaataaaatcaacaatactaattttattatgacatactcatatggaagagctcttcagcaaagtgctcttaaagtatggtctaaaaatataaaagatatagagggaactcaaaaaactttcaatcacagagctaaaatgtgtacattggctgctcagggtaaatgggtaagagaacttgagagtaaataa

SEQ ID NO: 278057 - DNA, 838 bp, Unknown
  Bacterial polypeptide expressing nucleotide sequence isolated from the Sargasso Sea
aatgtaaataacttagaagcaattagagcaataatggagggggctaaagaattaaatagtcctgtaattcttcaagcgtctggtgccgctagaaaatatgctggtcccatttttgtaaaaaaattagttgaagcggcaatggatgagttttcagacattccaactgttttacatcaagatcatggtggttctccctcagattgtaaaaattgtattgaacttggatttacctctgtaatgatggatggctccttaatggatgatcaaaaaacaccatcagactttgattacaatgttagagttacaaaagaaacaactgatatggcgcatgctttaggtgtttccgttgagggagaaattggatgtttaggttctttggaaactggaactggtgaaaaagaagacggagtaggtgctgaaggtaaacttgatcatgatcaattactgacggatccaaatgaagcatcagattttgtaaaagcaactaatgttgacgcattagctattgcaattggaacaagtcacggtgcttataaattttcacgaccaccgacaggagatatattagctatagatagaattaaagaaattcactcaagacttccgaatacacatttggttatgcatggatcatcttctgtaccacaagatttaataaaaaccattaatgagtatggtggaaaaataaaagagacatatggtgtacctgtttcagaaattcaagaaggtattaaacatggtgtacgcaaagttaatgttgatacagatcttcgattagcagctacagctgcagtgagaaaatattttcatgaaaatccctctcaatttgatcctcgta

SEQ ID NO: 278058 - DNA, 724 bp, Unknown
  Bacterial polypeptide expressing nucleotide sequence isolated from the Sargasso Sea
tcctgcatcatatgagtataatcttgatattactagacgtgtgagcgaaatggctcatcatgctggcgtttctgttgagggcgaacttggcgtgcttggctcgcttgagactggagagggtgaacaggaggatggtcacggcgctgctggaaaactctctgaagaccagctattaacagatcctgatcaggcggttgtttttgtgaaagatactaaagttgacgcattggctatcgctatgggaacaagtcatggagcatataaatttacgcgtaaaccagatggtgaaattctcgctatgaatgtggttgaggaaattaataatcggttgccaaacattcatcttgttatgcacgggtcgtcgagtgtgccgcaggaattacaggatgttttcaatgcacatggcggtgaaatgccgcaaacctggggcgtaccacttgaagaaattgaacgtggcatcaaacatggtgtacgaaaggtcaatattgatacggattgccgactagcgatgcttggtattatacgtaaaattgctaacgaaaataaagctgaatttgacccacgcaaatttctcaagccagcgatggatgctatggaggctttgtgtgcagaccggtttgagcggtttggaacagctgggaacgccgcacgaattaagcctatttccttgtcagcaatggctgtgcgctataccaatggatcgctcgatccatcaatcaattga

SEQ ID NO: 278059 - DNA, 806 bp, Unknown
  Bacterial polypeptide expressing nucleotide sequence isolated from the Sargasso Sea
tatgaatattgaagaaattgcaaaaaaaatgtgccctaaaggtaagggaattttagctgcagatgaaagcactggaaccatagcgaagagatttaaaagtataaacgtagaaaatttggaaaaaaataggttaacttttagacaaaccttatttgattctagcggaatgaaagattacatcggtggggtaattctttttgacgaaacaatcaaacagaaatcaacattaggaccaaccattccagaattaatatcaaaaagtggtgccattccaggaatcaaagtagataaaggagcaaagcctcttgcaggatcaaatgaggaaacggtcactgagggactggatggcttaagagaaagattaaaagaatattataatttaggggcaagatttactaaatggagagcagtgtataagattagcaataaacatccgtcatcgcaatcaattaagtccaatgctcatgcgcttgcaagatatgccgctttagtacaagaagctaatatggtgccaattatagaaccagaagttttaatggatggatcacatgatatcgaaacgtgttataagacaaccacgaatgttcttaatgagtgctataatgaattagaaatacataaaattttcttaaaaggaactgttctaaagcctaatatgataatacctggttctgattgtaaaaataagtcaagttcagaagaaatagcaaaaaaaaccctggactgcctaaagaaaaatgttccaagtgaagttcctggtatcgcttttttatctggtggccaaactgaaattgaagcaagtaaaa

SEQ ID NO: 278060 - DNA, 652 bp, Unknown
  Bacterial polypeptide expressing nucleotide sequence isolated from the Sargasso Sea
tatggcgcatgcctgcggtgtgtcggttgagggagagattggctgtctcggttcactggaaaccggagaggcgggtgaagaagacggtattggcgctgcgggcaagctcagtcacgaccagttgctgaccgacccggaagaggcggcacagtttgttgcagacactgacgtagatgccttggcgattgcctgcggcacgagtcacggtgcctacaagttcacccgcccccccacaggcgatatcctggcgatggatcggatcaaggcgattcactcgcgcattcccaacactcatctcgtgatgcacggctcgtcagctgtaccccagaactggttggaggtgatcaatgaattcggaggcgagattcccgaaacctacggcgtgccggttgagcaggtggttgaagggatcaagcacggggtaaggaaggtcaacatcgacactgatttgcgccttgcctccacagggtcgattcggcgttttctggcagagcaccccgctgaatttgatccgcgcaaatatctcgccgccagtctggaggccatgaaagcgatttgtattgaccgttacgaagccttcggcaccgcgggcaatgcctccaagattcaaccgctgtcactcgccgatatgcaggcgcgctacgcagcatag

SEQ ID NO: 278061 - DNA, 532 bp, Unknown
  Bacterial polypeptide expressing nucleotide sequence isolated from the Sargasso Sea
tattctgccttagttcaagaatgtaatatggttccaatagttgagccagaagtattaatggatggagaccattctgctgatatttgcctaagaaaaacatcagatgttattaaaaagtgttttgatgaattaatattaaacaaagttgatctttcaggaattattttaaaacctaacatgatattggctggtaataactcaaaagttaagatttctaatgaggaagttgctcaaaaaacacttcaatgtcttaaaaactcagtcccaactgaagtgcccggaattgcttttttgtctggaggtcagtcagaaatagaggcaacagaaaatttaaatttaataaataaaaataataatactcaatttattatgacctactcctatggaagggcactacagcaaagtgctctgaaaatatggtcgaaaaatactaaagatataaaagcaacccaaagtacctttaatcatagggctaagatgtgtaccttggctgctaaaggagaatggtctttcgaacttgaaaataagtaaa

SEQ ID NO: 278062 - DNA, 653 bp, Unknown
  Bacterial polypeptide expressing nucleotide sequence isolated from the Sargasso Sea
gatgctgatttcacttcgccaacttctcgatgatgctgccgatcatggctatggtgtaccggcatttaacatcaataatatggagcaggggctggcgatattaaaagcggctgaccgggtagatgccccggttatcattcaagccagccgcggcgcgcgcaattatgctggcgatgtgatgttgcaagccatggtcaaagcgttggctgaaatgtatccgcatattccggtttgcatgcatcaggatcatggcaacaatgaagccacctgtatgacagctatccaatatgggtttacctcggtaatgatggatgggtctctggaagctgatgccaaaacaccagcctcttatgactacaatctggatataacaaaacgggttactgaaatggcgcatcatgcgggcgtctcggtagagggtgagcttggtgtgttaggatcgcttgaaaccggtaagggtgagcaagaagatggtcatggtgcaacgggcaaattatccgaagatcagctcttgacagacccggatcaggctgtggattttgtcaaacagaccaaggtcgatgccctcgcgatcgccatgggtaccagtcatggggcctataaattcacccgcaaaccagatggcgaaattttagcgatgaatgtggtggaag

SEQ ID NO: 278063 - DNA, 580 bp, Unknown
  Bacterial polypeptide expressing nucleotide sequence isolated from the Sargasso Sea
tgaattagcaattaaaacaaacgcacatgctttagcaagatatgcagcgctagttcaagaaacaaaaatggttcctatagttgaaccagaagttttaatggatggacaacacgacataatgaaatgctataaggttaccgctaacgttcttcaagaatgttataaagaattaaaattacacaatgtaaatcttaaaggaacaatattaaaacctaatatgattttacctggaaataaatcaaaagataaaagcaactctgcagaaatagctaaattaacgcttaagtgtttaaaagaaaacgtaccgaatgaagttccaggaatagcttttctttcaggaggacaaacagaaattgaagcaactcaaaatttaaatgaaataaataaaattaatgatacaaattttttaattagcttttcttatggaagggctttacaacaaagcgctctgaagaattgggcaaaagatattaaggatactagcaatacccaaaaaatctttaatcatagatctaaaatgaatggcctttctacttctgcaaaatggactatggaacaagaaaatcaaataaacgcctaa

SEQ ID NO: 278064 - DNA, 505 bp, Unknown
  Bacterial polypeptide expressing nucleotide sequence isolated from the Sargasso Sea
aatggtacctatagttgagccagaagttttaatggatggcgatcattctgcagatcaatgtttaaagaaaacctcagtagttataaaaaagtgcttcgaagaattaattttacataaaattgatttatcaggcatcatattaaaaccaaatatgattttagctggaagtaattcaaaaaataaaatctctaatgaagaagtttcaaataaaacacttgaatgtattaaaaattcagtgccaacggaagtcccaggaatagctttcttgtcggggggtcagtctgaaatagaggcagcagaaaatttgaatttaattagcaaaaacaatactacaaattttataatgacctattcatatggtagagctttacaacaaagtgctcttaaattttggtctaaagacatcactaaaatcactgaaacacaggatgtgtttaatcatagagccagaatgtgtacgttagctgctcaaggaaaatggacaaacgaacttgagaataaataa

SEQ ID NO: 278065 - DNA, 607 bp, Unknown
  Bacterial polypeptide expressing nucleotide sequence isolated from the Sargasso Sea
atggagaggtgtttataacatatcaaaagatcatccaagtaaactatcaattcaatctaatgcacatgcattagctagatactctgcattggttcaagaatgtaatatggttccaattgttgaacctgaagtcttaatggacggcgaacattcagcaaaagattgttatgaaaagacttctgaggtaataaaaaaatgttttgaagaattaatcttacataaagttgatttgaaaggaattattttaaagccaaacatgattttagctggtaacaaatgtaaaaacaaaatatcaaacgaggaggtagcaaaattaactcttaaatgtttaaaagactctgttccgtctgaggtaccaggaatagcttttttgtctggtggtcaatcagaaatagaagcaactgaaaatctaaatttgattagtaaatacaatgataccgactttataatgagttactcttatggacgagctcttcaacaaagcgcattaaaattttggtcccaggacacattaaatattgatggaactcaaaaaatttttaatcaaagagcaaaaatgaatacactagctgctcagggtaagtggtcaaaagaacttgagaattaa

SEQ ID NO: 278066 - DNA, 514 bp, Unknown
  Bacterial polypeptide expressing nucleotide sequence isolated from the Sargasso Sea
tatgacattaaatgaaatagctaaaaaaatgtgcgccaaaggaaaaggtatcctcgctgcagatgaaagtactggaacaatagctaaaagatttaaaagtataaatgttgaaaacatagaaaaaaatagactaaattttagacaaactctttttaattcaagtgctatgaaagattttattgggggggtaattttatatgatgaaacaataagacaaaaaactaccttgggcccatcaattccagaattaatatctaaacatggagctataccaggaattaaagttgataaaggtgcaaaacctcttgctggatctagtgatgaaaccgtaacagagggtttagatggtttacgcgaaagattaaaggaatattatgatttaggtgcgagatttactaaatggagagctgtctttaaaatttcagataaaattccatctgcccaatctattaagtctaatgcccacgcattagcgagatacgctgctttagttcaagaagctaaaatggtaccg

SEQ ID NO: 278067 - DNA, 731 bp, Unknown
  Bacterial polypeptide expressing nucleotide sequence isolated from the Sargasso Sea
tataaaagttgatacaggtgcaaaagttttagctggatcaccagatgaaaaaattacagaaggcttagatggtttaagagaaaggttaaaagaatattacaaactaggtgcaaaatttaccaagtggagaggcgtttacaatatatcgaaaaattacccaagtaaactttcaattcaagcaaatgctcatgccttagcaagatactcgtcgttagttcaagaatgcaacatggttccaattgttgagccagaagtattaatggatggagagcattcatcaaaagaatgttatgaaaaaacttcggaagtaattaaaaaatgttttgatgagcttattttacacaaagtaaatttaaaaggaataattctaaaaccaaatatgattttgcctggcaataaatctaaagaaaaaatttcaaatgaagaagtggctaaattaactttggaatgtttaaaaaattcagtaccgtcagaagttccaggaatagcttttttatctggtggccagtcagaattagaagcaacagaaaatttgaatttaataaataaatataataattctaattttataatgagttattcttatggaagagctcttcaacatagtgcattgagattttggtctaaagatatacaaaatatcgagggtactcaaaaaatttttaaccacagagcaaaaatgaatactttagcgtctcagggaaaatggtcaaaagatcttgagaattaac

SEQ ID NO: 278068 - DNA, 513 bp, Unknown
  Bacterial polypeptide expressing nucleotide sequence isolated from the Sargasso Sea
aatgtgaaatggtcccaattgttgagcctgagatattaatggatggaaaccactctgctgaagattgtttaaataaaacatcagaggtaattaaaaaatgttttgaggaactaattttacacaaagttgacctatcaggaattatcttaaaaccaaatatgattttagctggaaaccagtcaaaatataaaatttctaatgaggaagtttcacttaaaacactccaatgtttaaaagattcagtgccaaatgaagtgcctggaatagcttttttatctggaggacaatctgaaatagaagctacagaaaatttaaacttgataaataaaaataataatacaaattttataatgaccttttcatatggtagagctcttcaacaaagtgctctaaaagtttggtcaaaagatatcaaaaatactgaggcaactcaaaatacttttaatcatagagctaacatgtgtactctggctgctcgaggaaaatggtcgagcgaacttgaaaacaaataaa

SEQ ID NO: 278069 - DNA, 419 bp, Unknown
  Bacterial polypeptide expressing nucleotide sequence isolated from the Sargasso Sea
catggctataatctctcttagacaacttctagatcacgcagctgaaaataattatggcgtcccagcttttaacgtaaataatttagagcaaattagagcaattatggaaggtgcaaaagaggtgaacagtcctgtaattgttcaagcatccgccggagcaagaaaatatgcaggtccacgatttattaaaagtatgatggaggctgcagttgaagagtttcctgaaatccctattgtaatgcatcaagatcatggaggttcacctaaagattgtaaagtatgtatagatcttggttttagttcagtcatgatggatggatcattattagaagaccaaaagacgccttctgactttgaatataacgttaaagttacaaaagaaactgtagatatggctcatagtgtaggtgtttctgtcg

SEQ ID NO: 278070 - DNA, 661 bp, Unknown
  Bacterial polypeptide expressing nucleotide sequence isolated from the Sargasso Sea
atgtctgaattaaataaaattgcacttaaaataatttccaacggtaaaggtatacttgcggctgatgaaagcaatggaactatgacaaaaagacttgaagcagtaaatgtcaaatcaactccagaaaatagactttccttcagagaaattcttttttcatctcatggaatgaaggattacataggtggtgttattctttacgatgaaacaataaatcaaatttcgagcacaggaaaatcaatagcagatttaatatctagttcaggtgcagttcctggaattaaagttgatactggtgcaaaagatttggcaaattcccccaaagaaaaaattacagagggattagatggcctaagagatagattgaaaaaatattatgatcttggagccagatttacaaaatggagaggcgtctattctattggtgaaaattatccaagcaaactggcaataagtagtaatgcgcatgcacttgctagatactctgcactagttcaagaaaatggaatggttccaatagtagaacctgaggtattaatggatggaaaccattctgcagaagtttgttttaataaaacatcagaagtaattaaaaaatgttttgaggaactaattttacataaagttgatttatcaggaattattttaaaaccaaatatga

SEQ ID NO: 278071 - DNA, 337 bp, Unknown
  Bacterial polypeptide expressing nucleotide sequence isolated from the Sargasso Sea
aatgtctgaattaaataaaatggcgcttagaataatttctgatggtaaaggaatccttgcagctgatgaaagtaatgcaaccatgacaaaaagacttgaagctgtaaatgtcaaatcaaccccagaaaacagactctcattcagagaaattcttttctcatcagagggaatgaaagattgtattggtggtgtgatactttacgatgaaactataaatcaaatttcaagtaaaggaaaatcaatacctgatttaatatctgcatctggtgcagtgcctggaattaaagttgatactggcacaaaagatttagcaaattcacgccaagaaaaaattaca

SEQ ID NO: 278072 - DNA, 737 bp, Unknown
  Bacterial polypeptide expressing nucleotide sequence isolated from the Sargasso Sea
aatgtctgaattaaataacattgcgctcaaaattctggagaaaggtaaaggaattttagcggctgatgaaagtactagcacaatgactaagagattagatagtgtgaatgttccatcaactcctgaaaatagattattatttagagaaacactatttagttcatcatgtatgactgaatgtattggaggagtaatattatatgatgaaacaataaaacaaaaaacctctaaaaaaaataaaattccagaattaatttcagaaatgggagctgctccaggaataaaggttgatactggcgcaaaagttctggcaggttctccagatgaaaaaattacagaaggcctagatggactaagagaaagactgaaagaatatttcaaacttggtgcaaaatttaccaaatggagaggtgtttataatataacaaaaaattttccaagcaaattgtcaatacaatctaatgcacacgcattagcaagatactcttcattagttcaagaatgtaatatggttccaatagttgagcccgaagttttgatggagggtgaacattctgcaaaagaatgttatgaaaaaacctcggaagtaatcaaaaagtgttttgaagagctaatattgcatagggtagatttaaagggaattatacttaaacctaatatgatcctagcaggaaacaaatcagaagataagatttcaaacgaagaagtagcaaaattaacattaaaatgtttaaaaa

SEQ ID NO: 278073 - DNA, 556 bp, Unknown
  Bacterial polypeptide expressing nucleotide sequence isolated from the Sargasso Sea
atgcctctggttcctttgcgtattttgcttgatcatgctgctgaaaatgattacgggttggctgcttttaacgtcaataatatggagcagatccaagctattctggaggcggcaaaagagacagattctccggttattgtacaggcctcacggggtgcacgggcatacagtcaggataattatttgcgacatctgatgcttgcagcagcagagctttatcctggaataccaattgccatgcatcaagatcacggtaattcaccggcaacgtgtgaaagcgcgatcgataacggcttcaccagtgtgatgatggatggctcactcaaagaagatggaaagactcctgctgattttgattacaacgtccaggtaaccactgaagttgtaaagcaggctcattcgcgaggcgtttcagttgagggagaactcggctgtcttggttcgctcgagagtgggcagggtgaggctgaggacggtcatggagccgaaggtgtactctcgcaggatcaattactcacagatcctgatgaagctgctcggtttgttgaggcaacag

SEQ ID NO: 278074 - DNA, 676 bp, Unknown
  Bacterial polypeptide expressing nucleotide sequence isolated from the Sargasso Sea
ttttcctctcatatgttagatttatcagctgaggagattgactttaatcttttagagtgtgaaaggttattaaaaagaatgtccaaaatagggctcagtttagaaattgaattgggagtaactgggggagaggaagacggcgtcggatcagatgatgatataggagcagataatcctcttctttacacacaaccggaagattgtcttcgcgcttacaagcttttgtctccaataggacactttagtttagcagcctcttttggaaatgtgcatggagtgtataaacctggaaatgttaagcttcgtcctgaaattttaaaaaattctcaagatcttgtaagagaaacttgtggaactggagaaaaacctttggatcttgtatttcatggtggttcaggatctgataaagaaaaaatagcagaggctctatcttatggtgtttttaaaatgaatattgatacagatactcaatttgcttttgcaaacgcggttggagaatatgtaaatcaaaatgaaaaagctttcaagtatcaaattgatcctgatgatggaactccatataaaaagcagtatgaccctagaaagtttcttcgattagcagaagaatctatggttaaaaggcttgatgaagcattttcagatttaggttctgttgggaaatctttagctttataac

SEQ ID NO: 278075 - DNA, 811 bp, Unknown
  Bacterial polypeptide expressing nucleotide sequence isolated from the Sargasso Sea
atcagaaaaaaatagattggtattcaggcagacactttttagctcggaggcaatgaaacattatatcgggggagtaattctttttgatgaaacaattaagcaaaaaactacacttggtccaactgttccagaactaatttcaaaaaatgatgctgtgccaggaattaaagttgacaaaggagctaaatccctcgcagggtcatctgatgaaactgttactgaaggtttagatggtttaagagaaagattaaaagattactacgagttaggtgcaagatttacaaaatggagagctgtttataaaattggaaatcaatttccatcctctcaagcaatcaaatcaaatgcgcatgctcttgccagatacgctgctcttgttcaagaagcaaaaatggttccaatagttgaacctgaagtattaatggatggatctcatgacattgataaatgttatcaggtcacaacagatgtactaaatgaatgttataatgagctagtaattcataaagtagatctaaaagggacagttttaaaacctaatatggtaattcatggatctgaatcaaaaaagaaatcaagtagcgaagaaattgcaaaaaaaactttagaatgcttaaagaaaaatgtccctagcaatgtaccaggaattgcttttctatctggcgggcagtcagaagtagaggcaagcaagaacttaaatgaaataaataaaataaatgatacgaagtttttaatcacattttcatatggaagaggtttacaggcaagtgccttaaaagcttttggaaaagaccaaaatgataaaagtaat

SEQ ID NO: 278076 - DNA, 454 bp, Unknown
  Bacterial polypeptide expressing nucleotide sequence isolated from the Sargasso Sea
aattaaaattagtccaaattttatggttgctgctgcttttggtaacgttcacggagtatacagacctggtaatgttaaacttactccaactattttacaaaaatcccaggaatatgtgtctctcatgcataacacagaatcaaaccctataaattttgtttttcatggaggatcaggatcatctagaaatgaaataagagaggcaattggctatggagcagtaaaaatgaatttagacacagacatgcagtgggctttctgtagtggtgtgaacgaataccataaaaaacaccaactgtatttgaacagccagattggtaatccagacggagaagataagccaaataaaaaatattacgatccaaggaaatggcttcttgaaggtgaaaaatcaatgattgagagactaagaaagtcatttactgaccttaacaacgtcaacacaaatatctaa

SEQ ID NO: 278077 - DNA, 637 bp, Unknown
  Bacterial polypeptide expressing nucleotide sequence isolated from the Sargasso Sea
tatgacagaacttaataaaattgcacttaaaataatttctgatggtaaaggtattcttgcagccgatgaaagcaatagtacaatgacaaaaagacttgaggcggtaggtgtgtcctcaactcctgaaaatagacttttattcagagagtcaatcatgtcatctcaaagcatgaaagaatgcattggtggtgtaattctttatgatgaaacaataaatcaaacgacaagttttggaaaatcaatccctgatttaatttcttcttcaggcgcagtacctggaattaaagttgatataggtacaaaagatttggcaaactcttctgaggaaaaaataaccgaaggcttagatggactaagggaaagattaaaaaaatactacagtcttggggcgcgatttacaaaatggagaggagtctatattataagcgataaatatccgagtacgttagcaataaatagtaatgcacatgcacttgctcgctattccgctttagtgcaggaaagtaaaatggttccaatagtcgaaccagaagtgttaatggaaggagatcattctgctgatagctgcctaaaaaaaacatcaaaaggaattaaaaaatgttttgatgaattaatattacataaagttgatcttcag

SEQ ID NO: 278078 - DNA, 749 bp, Unknown
  Bacterial polypeptide expressing nucleotide sequence isolated from the Sargasso Sea
catgtctgatttaaataaaatagcattagaaattctaaatagtggtaaaggaattttagctgctgatgaaagtactggaacaatgacaaaaagattagataatgtcagtgttccatcaacgccagaaaatagattattgtttagagaaactctatttagttcttcttgtatgaaggaatgtattggtggagtaattttgtatgatgaaacaataaaacaaacatctttaaaaaatattaaaattcctgatttaataacatcaatgggttctcatcctggtataaaagttgacactggtgcaaaggttttagctggatcgacaaatgaaaaaattacagaaggtttggatggtttaagagaaagattaaaagaatataataatcttggagcaaaatttacaaaatggcgaggtgtttatataatatcaaaagattatcctagtaaactgtctatacaatctaatgctcatgcactagcgcgctactctgctttagtccaagaatgtaatatggttccaattgttgagcctgaagtattaatggatggaaatcactcagctgaagagtgttatcaaaaaacatcggaagtaataaaaaaatgttttgatgaattaatcttacataaaatcgatttatcaggaattattttaaaacctaatatgattttatctggtaacaaatctaaaaataaaatttctaatgaacagatcgcaaagtttactatagaatgccttaaaaattcagtccctt

SEQ ID NO: 278079 - DNA, 478 bp, Unknown
  Bacterial polypeptide expressing nucleotide sequence isolated from the Sargasso Sea
atgctggataaactgaagacgcaaaccggttttattgcagcgttagatcaaagcggcggtagtacccctaaagcgttgcgcttatatggcatcgaagagtcagagtacagctcagacgaagagatgtttaatcttgttcacgaaatgcgtacacgcattatcaccagcaccccttttagcggcgagcgcgttcttggcgcaatcttgtttgaaaacacccttgatagagaaattgaaggcatgtcttctgcacactacctgtggcagaaaaagcgtgttattcctttcttaaaggtagataaaggactagctgaagaaagcaatggcgttcaagtaatgaagccaatgcctggtcttgatgcactgctagctaaagcggtagcgcaagacgtgtttggcactaagatgcgaagtgttgttaagcttgcgaatcaccaaggtattaaagatgttgttgctcagcaattgaagtgggtaa

SEQ ID NO: 278080 - DNA, 418 bp, Unknown
  Bacterial polypeptide expressing nucleotide sequence isolated from the Sargasso Sea
aatgaattaaaaataaataatgtaaatctaaaaggaatagttttaaaaccaaacatgatactacctggtgcaaattacaaacaaaaagcttctacagaagaaattgctagcaaaacacttgattgtttaaaaaaaactatgcccaaagaagttccgggtgttgcgtttctatctggaggacaaagtgaaattgaggcaaccaaaaatctaaatgcaataaataagattaatgacacaaattttaattttactttttcttatggtagagctttacaacaatctgcgctcaaaacatgggcaaaatcaatgaaggacgttaaaagtattcaaaaagttttcgatcatagagctaaaatgaatggtgcctcgactgaagcgaaatgggaagaaaagaacgagcaaaattttgctgcttaaa

SEQ ID NO: 278081 - DNA, 680 bp, Unknown
  Bacterial polypeptide expressing nucleotide sequence isolated from the Sargasso Sea
gattacagaaggcttagatggattaagagagagattaaaagagtattataaacttggtgcaaaattcacaaaatggagaggtgtttacaatatatctaaaagttgtcctagcaagctttctatccaatcaaatgctcatgcgctagccagatattctgctttagttcaagaatgtaatatggttccaatagtcgagccagaggtactaatggatggtgatcattcagctaaagattgttattcaaaaacctctgaagttattaaaaaatgttttgaagaactaattttacataaagttgatctgacaggaataattcttaaacctaacatgattttggctggcaataagtttaaagataaaataactagtgaggaggttgcaaaattaaccctagaatgtttgaagaattctgttccgtcagaggttccgggaatagcttttttatctggaggtcaatcagagatagaggcaacggaaaacttggatctaataaataaaaataacgatacaaattttattatgagtttttcatatggtcgagcgttacaacaaagtgccttaaaattttggtcaaaggacatactaaatattgagggaacgcaaaagatttttaaccaccgagctaaaatgaatacattagcggctcaaggaaaatggtctaaagatcttgaaagttaat

SEQ ID NO: 278082 - DNA, 589 bp, Unknown
  Bacterial polypeptide expressing nucleotide sequence isolated from the Sargasso Sea
gatggcgctaataagcttaagacaattactggatcacgcggctgagaatgactatggcgttcccgcatttaatgtcaataatttggagcaggttcgggctattatggagggcgctgcgtcagtgaatagcccagttattttgcaagcctctgcgggcgctcgaaaatatgctgggtcgaactttctgaaacatttaattcaaggagctatcgaagaatttccccacataccaattgtaatgcaccaggatcatggagtttcgcctgcagtatgtcagcgttcaattcagcttgggttttcctcagttatgatggatggttctctcgcagaggacggaaagacgccaacagattttgactacaatgttcgcgtcacaaaaacgacagttgaaatggctcacgcatgcggagtctctgtggaaggcgagattggctgcttaggctcgctggaaacaggaatggcaggagaagaagacgggataggagcagagggaaagttatcgatggagcaattactcactgatcctgaggaggcatatcggtttgttgatgcgactggggttgatgctctggcgattgcggttggaacg

SEQ ID NO: 278083 - DNA, 754 bp, Unknown
  Bacterial polypeptide expressing nucleotide sequence isolated from the Sargasso Sea
atttaaccagttaggtattttacctggaattaaagttgataaaggagcaaaacagttagcgaatacagaagacgaaaaaataacggaaggactagatggtttacgtgatcgcttaaaagaatattatgagcttggcgcacgattcactaaatggcgcgcagtaattacgattggtgaaaatatgccaactgcttattgtatgtcaacaaatgctcatgccttagctcgttatgctgcattatgtcaagagcaaggactcgttcctattgtggagccagaaattttaatggatggaactcacactattgaagagagttatcaattaactacagaaacactatataatgttttttatgaattagtttctcaaggagttgaattggaaggaatggtattaaagccaaatatggttttatcaggatatgattgtagtgaacaagcttcagttgagcaggtagcagaaatgaccgtagattgttttttaaatactgtgcctgctgcagttcctggaattgcttttttatcaggaggacaaacggatgagttggcgacagctcacctaagtgcaatgaatcagattgatggatcaccatggaatctgaccttttcatatggacgcgctttgcaggctccagctcttaaagcatggtccggaaaagatgagaatatttcaaatgctcaagaagcctttatgaatagagcaaagtttaatagccttgcaacgaaaggcgagtattctaaggatatggaataa

SEQ ID NO: 278084 - DNA, 484 bp, Unknown
  Bacterial polypeptide expressing nucleotide sequence isolated from the Sargasso Sea
atgtcactaaataatattgaagatatagcagcctatattgtcgcagatggcaaaggtattttagctgctgatgaaagcaatccaacttgtggaaaaagatttgattctattggtgttgagtccaccgaagagaatagaagagattacagagaaatgctttttagatctaaaggaatgaaaggcaatattggtggagtaatattatttgatgagactataagacaatcagctgctgacggaacattacttagagatttaataactagtcaagatgcccttcctggaataaaagttgataagggtcttcaacctattgatgattgtcctggagaaaccgtgacagttggattagatggattagatgagagattaaaagaatattcatctatgggagctaaattcactaaatggagggctgttataaatataggtgatggaattccaactgataaatgtattgacgcgaatatgcaggcattagcgg

SEQ ID NO: 278085 - DNA, 719 bp, Unknown
  Bacterial polypeptide expressing nucleotide sequence isolated from the Sargasso Sea
aggtgcaaaaaatttagctaactcgtttgaggaaaaaattactgaggggttagacggactaagagatagattaaaaaaatattatgaacttggtgcaagatttacaaagtggagagctgtctacaatataaataataagtaccctagtaaacttgctattcattctaatgcgcacgcacttgcaagatattcagcattagttcaagaatgtgggatggtcccaattgtagagccagaggtattaatggatggtgaccattcagctgatatttgttttattaaaacttccgaagttattcagaaatgttttgaagagcttattcttcataaagttgaccttaaaggagtaatattgaagccaaacatgatattagatggaaaaaactcaaaaaacaaaatttcaaatgaagaagtttcatttaaaacacttgaatgtcttaaaaaaagtgttccaagcgaggttcctggagttgcatttttgtctggaggtcaatctgaaatagaagcagttgaaaatttaaatttaattagtcgaaataacgataccaatttcataatgacattttcttacggaagagcccttcagcagagtgctcttaaaatttggtcaaaagacactaaaaatataaaagatactcaaaaaatatttaatcatagagctaaaatgtgtagtttggcatctcaaggaaaatggtcaaaagaacttgaaagtaaataaa

SEQ ID NO: 278086 - DNA, 430 bp, Unknown
  Bacterial polypeptide expressing nucleotide sequence isolated from the Sargasso Sea
tatgactttagaagaaatagcaaaaaaaatgtgtgaaaaaggtaaaggtattttagctgcagatgaaagcactggaaccattgcaaaaaggtttaaaagtataaacgtcgaaaataacgaaaaaaatagattggtttttagacaaactctttttagctctgacgctatgaaaaattatattggtggagttattctttttgatgaaactattaaacaaaaaactactatggggccatcaataccggaattaatttcaggaaacaatgctattccaggcattaaagttgacaaaggtgccaagcctttagctggatcaattgatgaaacggttaccgagggacttgatggattaagagaaagattaaaagaatactacgatctgggtgcaagatttacaaaatggagagcagtttataaaattgggaaataa

SEQ ID NO: 278087 - DNA, 641 bp, Unknown
  Bacterial polypeptide expressing nucleotide sequence isolated from the Sargasso Sea
aatgaatttatcctttcctcctggagttgtaactggaaaaaatgttcaaaaagtttttgaattggctaaagcaaaaaaattcgcacttcccgctgtaaatgtgattggctcaaattcaattaatgctgttctcgaaactgcctctactctcaaaagccctgtgattattcaattttcaaacggtggatctcaatttaattcaggaaaagctttatccaatgaaaatcaaaaatctgctatttatggagcaattgcaggagcaaaacatatccatgaattagcaagacgctatggagcatacgttattctccacacagatcattgctcaaagaaattattaccatggattgacggattattagatgcaaatgaagattattttaataaaaatggagtttcattatttagttctcatatgatagatctttccgaagaacctttgattgagaacattgaaatttgcaaaaaatatcttcaaagaatgtcattgatggaaatgacattagaaattgaattaggtgtaaccggaggtgaggaggatggtgtagacaatactagtatagacatttctaaattatacacacaaccagaagaggtattatacgcttacaaggaattaactatgataagcccacagttta

SEQ ID NO: 278088 - DNA, 325 bp, Unknown
  Bacterial polypeptide expressing nucleotide sequence isolated from the Sargasso Sea
tatgaagattgaagatatcgcaaaaaaaatgtgtgctaaaggcaaaggcatactcgctgcggatgagagcaccggcacaatggaaaaaaggttaaaaagtgttggtgtagagtctaatgaaaaaaacagactaaactttagagaaattcttttttcatcgtcagcgatgaaagattatattggtggagttattttattcgatgaaactataaggcaaaaaagtaaaaatggaatttctataccagaattaatttcaaaaaataattcgataccgggaattaaagttgataaaggggcaaaaaatttagctggatcgcaaaagaaa

SEQ ID NO: 278089 - DNA, 720 bp, Unknown
  Bacterial polypeptide expressing nucleotide sequence isolated from the Sargasso Sea
tgggctatagtgaagaacactatgaaaaaactagtagtcctttattttcatcacacatgcttgatctttctggagaggaaattgattttaatctctctgagtgtgagagaatgcttaaacgaatggctcccatcggaatgagcttagagatagaactcggagtaacaggaggtgaagaagatggtgttgggtctgatgatgacattggagcagataatccaaaactgtatactcagccagaagactgtctgagagcgtaccaattgctttctccgatcggtcattttagtctagctgcatcctttgggaatgttcacggtgtgtataagccaggaaatgtaaaactacgtccagagattctgaagaactcacaggacttggtaaaagaaacctgcgggactgaagataaaccactagatcttgttttccatggaggatctggatctgataaggcgaaaattgcagaagctttatcctacggtgtattcaaaatgaatattgatacagatacacagtttgctgtctcaaaagcagtgggtgcatatgttgaggaaaactcaaaagctttcaaataccaaattgatccagacgatggaaccccttacaaaaagaagtatgaccctagagcgtggctaagagctggtgaggtatctatggtagaacgtctagatgaggcttttcaggatcttggttctgttgggaaaacactcgctccttaat

SEQ ID NO: 278090 - DNA, 657 bp, Unknown
  Bacterial polypeptide expressing nucleotide sequence isolated from the Sargasso Sea
attctaaaggagtctcagtgaggggagaattagggtgtttaggttcacttgaaacaggtactggagaaaaggaagatggagttggtgcagagggagttttaacccactcacaacttttaacagatccagaagaagcagcagaattcgttgatcaaactaatgtagattgtttggctattgctattggtacaagtcatggagcatataaatttactaaaccacctacaggagaagttttagctataaaaagaataaaagatatacatacaaaaatacctaatacacaccttgtcatgcatgggtcatcctctgttcccaaagaattattagatattattaatcaaaatggaggtaaaattatcgaaacatatggagttcctgttgaggaaattcaagaaggcataaaacatggtgttagaaaggttaatattgatactgatttaagacttgcagccaccgcagccattagaaaatattttaatgacaatccagatcaatttgatcctagaaaatatttaatcgaaagtaaaaacgaaatgaaaaatattgttataaaaagattaaaagaatttaaaagtgctgatcaagcttcaaaaataaaaccaatacctctttcagtaatgtcaaaaagatatttatcaggtgaattatattaaa

SEQ ID NO: 278091 - DNA, 555 bp, Unknown
  Bacterial polypeptide expressing nucleotide sequence isolated from the Sargasso Sea
caaatgctcatgctctagctagatactcagctctagctcaagaatctggcatggtgccaatagttgagcccgaagtattaatggatggaaatcattccgctgatgattgttataaaaaaacatctgaagtaattaaaagttgttttgatgaacttgaattaaataaagttgatttgaagggagtaatattaaagcctaatatgatactacctggatctagatcagacaaaaaaatttctaatgaagaaatagcaaaacttactgtaaaatgtctaaaagatagcgttccttctgaagttcctggaattgcatttttgtctggtggtcaaactgatattgaggctacagaaaatctaaatcaaattaatatttataacaatacagattttattatgacattttcttatggaagagcacttcagcaaagtactttgaaattttggtccaaggatataaaaaacattaaagatacccaaaaattatttaatcacagagcaaatatgtgtcatctggcagctcaaggtaaatggtcaaaagagcttgagaatcaataaa

SEQ ID NO: 278092 - DNA, 809 bp, Unknown
  Bacterial polypeptide expressing nucleotide sequence isolated from the Sargasso Sea
ttattgtttagagaagctctttttacatcagatagtatgaaagattatatcggtggtgttatcctttatgatgaaactataaaacaatccagcaagtctggaaaaaagattcctgaattaatttcaaatttaaactctgtgcctggaataaaagttgatacaggtgcaaaaaccttggctaactcaaaagaagaaaaaattaccgaaggacttgatggtttaagagaaaggttaaaagaatattataaacttggtgcaagatttacaaaatggaggggagtttacacaatctccgataaataccctagccaactatcaattaaatcgaacgcacatgctctagctagatattctgcattagctcaggaatgtggaatggtgccaatagttgaaccggaagtacttatggacggtaatcactctgctgatgtttgttataataaaacatcagaagtaattaaaagttgctttgatgaacttcaattaaataaagttgatttaaaaggcataatattaaaaccaaatatgatattacctggatccagttcgaataaaaaaatttctaaagaagaaattgcaaaactaaccgtaaaatgtttgaaagacagtgtgccctcggaagttcctggaattgcatttttgtcaggtggacaatcggatattgaagctacagaaaatcttaatcaaattaacattcaaaataatacaaattttataatgacattctcttatggaagagcacttcaaaaaagtgctctcaaattttggtctaaagatataaaaaatattacagatacccaaaagttatt

SEQ ID NO: 278093 - DNA, 547 bp, Unknown
  Bacterial polypeptide expressing nucleotide sequence isolated from the Sargasso Sea
ggacgctcttgctgattatgcaaagtgtgcacaagataatggaatggtaccaatagtcgaacctgaagttctaatggatggagatcataatattgatgaatgttatcaagctactgagagatcattaaaatctttatttaaccacattgaaaaaaagggcgtaaatataaaagggactttattaaaaccaaacatggtgacgtctgggaaggataatagcaaccaagcgtcaattgatgaggtagcagaaaaaaccttagattgtttaattaaaaatgttcctgctgaacttccaggagttgctttcctttctgggggccaatcagatattttggcaacagcacaccttgatgctatgaataaaattggtgggttttcatggaaactaagtttttcatatggtcgagctctccaagcaccttcattaaaagcttggggaggtaagtcagaaaatgtctttatttctcaagatgaactctctcatagagctgaaatgaataaacttgcctctcttggtcaatgggcagaagaattagaagatagataa

SEQ ID NO: 278094 - DNA, 935 bp, Unknown
  Bacterial polypeptide expressing nucleotide sequence isolated from the Sargasso Sea
tatgtcattaatttcgcttcgacaactcttagatcatgctgctgaaaataattatggcgtaccagcttttaatgtaaataacttagaagcaattagagcaataatggagggggctaaagaattaaatagtcctgtaattcttcaagcgtctggtgccgctagaaaatatgctggccctatttttgttaaaaaattagttgaagcggcaatggatgagttttcagacattccaactgttttacatcaagatcatggtggttctccttcagattgtaaaaattgtattgatcttggttttacttctgtcatgatggatggttctttgttggatgatcaaaaaacaccttctgattttgattataatgtaaaagttacaaaacaaaccacagatatggcacacgcattaggagtttctgtggagggagaaattggatgtttaggctcattggaaactggaactggtgaaaaagaagacggagtaggtgctgaaggtaaacttgatcatgatcaattactaacagatccaaatgaagcctcagattttgtaaaagcaactaatgttgatgcattagctattgcaattggcacaagtcacggtgcttataaattttcacgaccacctacaggtgatattttagctatagacagaattaaagaaatacactcaagacttccaaatacacatttggttatgcatggatcatcatcggtgccacaagatttaataaaaactattaatgaatacggtggaaaaataaaagagacatacggtgtacctgtttctgaaattcaagaaggtataaaacatggtgtacgtaaagttaatgttgatacagatcttcgattagcagccacagctgcagtgagaaaatattttcatgaaaatccctctccatttgatcctcgtaaatatttgcttctttctaaagatgcaa

SEQ ID NO: 278095 - DNA, 648 bp, Unknown
  Bacterial polypeptide expressing nucleotide sequence isolated from the Sargasso Sea
taaaaaaatattatgaccttggagcgagatttacaaaatggagaggtgtgtattctataagtgaaaaatatccaagtaaacttgcaatcaattgtaatgctcatgcgcttgctagatactccgcgctagttcaagagagtggaatggttccaatagtagaacctgaggtgttaatggatggaaaccattctgctgaggtttgcttaagtaaaacttcagaagtaattaaaaaatgttttgatgaactaattttgcacaaaatcgatctttcaggaattattttaaaaccgaatatgatactagcaggaaaaaattcaaatgataaaatttccagtgaggaggtttcacatgcaacacttgaatgccttgaaaagtcagtgccaaatgatgttcctggaatagcttttttatcaggaggtcaatctgaaattgaagctacagaaaatttagatttaataaataaaaataataatactaattttataatgacttattcatatggaagagctcttcagcaaagtgccctaaaagtttggtcaaaaaatattaatgatatagagggaacacaaaatattttcaatcatagggcaagaatgtgtactttagcagctcaaggtaaatggactcaagaaattgaaaataaataaa

SEQ ID NO: 278096 - DNA, 532 bp, Unknown
  Bacterial polypeptide expressing nucleotide sequence isolated from the Sargasso Sea
aatgtcagaactaaataaaattgctctaaaaatactttctaacggtaaaggtatacttgctgcagatgaaagcaatggtactatgactaagagacttaaagctgtaaatgtaaattcaactcctaaaaatagactattgtttagggaaattcttttttcatctgaatgcatgaaagattttattggaggagttattctttacgatgaaacaataaaccaaactacaagttttggaaaatcaatccctagcctaatttcaggctcaggcgctgtgccaggaattaaagttgatacaggtgctaaagaattagcaaattctcctggggaaaaaattactgagggtttagatggccttagagatagattgaaaaaatattatgaacttggagcaagatttacaaaatggaggggggtttactctattagtaataaatatccaactaccctagcaataaatagtaatgctcacgcacttgcaagatactcagctctagttcaagaaagtggtatggtcccaatagtagagcccgaa

SEQ ID NO: 278097 - DNA, 382 bp, Unknown
  Bacterial polypeptide expressing nucleotide sequence isolated from the Sargasso Sea
tatgcccttaattagtatgcgccaattattagatcatgcagcagaaaatgattatggtgttccagcatttaatgtaaataatttagaacaaattagagcaataatggaaggtgcacaacaaatgaatagcccagttatagttcaagcttcagctggagcaagaaaatactctggggcaatatttataaaaaatatgatgcaagctgcagttgaagagtttccaacaatacctattgtaatgcatcaagatcatggcggtacaccagatgaatgcagagaatgtatagaattaggatttacttcagtaatgatggatggctctttattagcagaccaaaaaactccatcaaattttgaatataatgtaaaagtaacaaaagag

SEQ ID NO: 278098 - DNA, 469 bp, Unknown
  Bacterial polypeptide expressing nucleotide sequence isolated from the Sargasso Sea
atgaatattgaagaaatagcaaaaaaaatggtggagcaaggtaaaggcattcttgcagcagatgagagcacgggcacaatggaaaaaagacttaaaagtgtaaatgttgattgcactgagcaaaacaggcttcactttagagaaacacttttttcatcaagcgctatgaaatctaacattagtggagttattttatttgatgagacaattagacaaaaaactagcgaagggataactgtccctgagcttataaaaaaaaatggtgctttgcctggaataaaagttgataagggagcaaaacctctcgcggggtctaataaggaaaaaataacagagggtctggatggtcttggaactcggatgaaagaatattataaattaggagcaagatttgcaaaatggagggctgtttactcaatatcaacaaatttaccaagtgaccaatgcattaaatctaatgctcacgcac

SEQ ID NO: 278099 - DNA, 288 bp, Unknown
  Bacterial polypeptide expressing nucleotide sequence isolated from the Sargasso Sea
agaaaaatatgcctaaagatgttcctggcgtagcctttctttctggaggtcaaagtgaggttgaggcaacaaaaaatctaaatgctattaataaaattaacgatacatcttttcatttcactttttcttatggcagggccctacaacaatcggctttaaaaacatggtcaaaatcaatgaaggatgtaagcaaaatccaaaaagtttttgatcatagagctaaaatgaatggagcttctaccgaagcaaaatggagcgaaaagcttgagcaaagttttgcagcctaaa

SEQ ID NO: 278100 - DNA, 826 bp, Unknown
  Bacterial polypeptide expressing nucleotide sequence isolated from the Sargasso Sea
atgcctttaattagtttaaaacaacttttagatcacgcagctgaaaatcaatacggtcttccagcatttaatataaataatatggaacaaggtctctcgattatggatgctgcaaatgcactaaatgctccagtaattattcaagccagtagaggagccaggtcatatgctaatgacattatactatctaaactaattgaaggattaatagagctttaccctcatattccaatttgcatgcatcaagatcatggtaatagtcctgctacatgtatgtcagctatcaaatatggtttcagttctgtaatgatggatggttcattattagaagatggaaagacaccatcaaattatgattataatgttgaagttaccaaaaaagttgctgaaatggcacatttttttggagtttcagttgagggtgaattaggagttttaggatctttagagactggaactggagaagcagaagatggtcatggagctgaaggtaatttagaaataaatcaattactaacagatcctgatcaagcagttgattttgtaaaaagaacaaatgtagatgcacttgcaatagcgatgggcacaagtcatggcgcttataaattttctaggaagccagatggtaacatattggctatgaacattattgaacaaattcataagaaactgccgaacactcatttagttatgcacggttcatcttcggtaccacaagatcttcaagatataatcaatgaaaatgggggtgaaatgccacaaacctggggtgtaccactagaggaaattgaaagaggaataaaaaatggtgttagaaaaaattaat

SEQ ID NO: 278101 - DNA, 643 bp, Unknown
  Bacterial polypeptide expressing nucleotide sequence isolated from the Sargasso Sea
ctccgaatatgattctttaggagcaaaatttacaaagtggcgtgcagtaataaaaatcggagacagtatgccatctgatgattgtattaatgcaaacgccaaagcattagcagattatgctgcaattgctcaatctaataacatggtgccaatagttgaacctgaagttttaatggatggcgaccattcaattgatctttctttagatgcttgcgcaagatcttttcaagctctttttgatgctctagacaataatggcgtaaacataaaagggaccatattaaaaccaagcatggttactcccggctcgctatctgaaaaagtagcaatcagagaagtggctgaaatgacagtaaagtgcctcaaagagaatattccttcagatcttcctggagttgcttttttatcaggagggcaaacagagcttgaggcaaccgctcatttaaatgaaatgaataaaataggtgattttccatggaaacttagcttctcatatgggcgagcccttcagcaaagtgctctaaaagcctggtcagggcaaagcgaaaatattttcatagcccaagatgagctatctcatagggctgaaatgaataaactagcagcacttggacaatgggatattaaacttgaagatagataa

SEQ ID NO: 278102 - DNA, 409 bp, Unknown
  Bacterial polypeptide expressing nucleotide sequence isolated from the Sargasso Sea
aatggctttaaattattacaaaaatgagcttaaagaaaatgctcaattactagcttctaaaggaaaaggaatattagcggtagatgaatccactaaaacagtaggtaaaagactcgctggaattggcgttgagaatactgaagacaataggaaggcatatagaggaatgctttttactacagaaggtcttggcaaatatataagtggagcaatcctcttcgaagaaactctttatcagaatcatcaagatggtgagtcaatggttaagaaactaaatgatttaggtattattccaggtataaaggtggataaaggccttaatccactccctggaggaggagatgtagaaactttttgttctggcttagatgggctagttgaaagagcagcaaaatattatgaacaaggt

SEQ ID NO: 278103 - DNA, 778 bp, Unknown
  Bacterial polypeptide expressing nucleotide sequence isolated from the Sargasso Sea
aaaaacaaaatcccagaattaatctcagaaatgggtagtgttgcaggtataaaagtcgacactggagcaaaagttttagctggttcacctcaggaaaaaattactgaaggtttagatggactaagagaaagattaaaagaatattataagttaggagctaagtttacaaaatggagaggtgtatataccatttcaaaagagtttccgagtaaactatcaatacaatccaatgcgcatgcattagctagatattctgcattagttcaagagtgtaatatggtaccaatagttgagcctgaagtattgatggatggaggacattcagcaaaagaatgctttataaaaacatctgaggtaattaaaagatgttttgaggaactaatcttacataaagttgatttgaagggagtaatactaaaaccaaatatgattttaagcggaaatgaatgtaaagagaaaatatcaaaagaagatgtggcaaagttaactcttaaatgtttaaaaaactctgttccatcagaagtaccaggaatagcatttttatctggtggtcaatcagaaatagaggcaacagaaaatttagatttaattaataaatataatgatactaactttataatgagttactcttttggacgtgctcttcaacaaagtgcattaaaattctggtctaaagacacgcaaaatgttttggggacccaaaaaatttttaaccaaagagcaaaaatgaatactttagcagctcagggtaaatggtctaaagaacttgagaattaat

SEQ ID NO: 278104 - DNA, 844 bp, Unknown
  Bacterial polypeptide expressing nucleotide sequence isolated from the Sargasso Sea
agcctatgctggagatataatgctttcacgtttagtaatcgctctgtccgaaatgtaccccgacattcctatatgtttacaccaagatcatggaaataatgaggcgacttgcctatcagcaattaaacttgggtttacttcagtgatgatggacggatcactgcaaagtgacatgaaaacacctgctgattataactataacgtagaaattaccagaaaggtttgttttgcggctcattgtgttggagcgtctgttgagggcgaattaggggtactaggaagcttagaaaccggggaagccagcgaggaggatggttcaggggccgaaggaaaattaaatcaagatcagttgttaacagatccagcacaagcgcatgatttcgttaaaaaaactagtgtagatgcattggcaatagcttgcggaactagtcatggtgcttacaagtttagtagaaaacctgatggtgacatactagcgatgacggtgatcgaagaaattcataaccgtattccaaatacacatttagttatgcacggttcgtcatcagttcctcaatatttgcaagatttaataaatgataatgggggggagatgcctcaaacttacggtgttcctatcgaagaaatagagcgaggaattaagtccggggtaagaaaaataaatatcgatacagattgccgtatggccattacaggaaccttcaggaaggtagcgaaagaaaataaaaaagaatttgacccaagaaaattttttattcccgcaatgcgtgaaatggaaattttatgtcgggatcgatttgaaagatttggtacagcgggaaatgctgataagataaaaattatt

SEQ ID NO: 278105 - DNA, 545 bp, Unknown
  Bacterial polypeptide expressing nucleotide sequence isolated from the Sargasso Sea
aaaaggttaaaaagtgtaaatgtagagtcgaatgaaaaaaatagactacattttagagaaacattatttacatcggactccatgaaaacatctataagtggggtaattttatatgatgaaacaataaggcaaacttcaagcaaaggaattttaatccctgaattaattaaaaaaagcggatccataccaggcataaaagttgataagggagcaaaacttcttgctggttcaaatgatgagaaaataactgagggacttgatggtttaagagaaagaatggaagagtattacaagttgggagcaagatttgcaaaatggagagctgtatactctatttcgactaaacatccaagcgagcaatgtattaaagcgaatgctcatgcattagcaagatacgcggcaatagttcaagaagcaaaaatggtgcctatagttgagccagaagttctaatggatggaagtcatacaattgatagatgttatgaagttactagtaaggttttgattgaatgttttaatgaattaaaaataaataatgtaaatct

SEQ ID NO: 278106 - DNA, 781 bp, Unknown
  Bacterial polypeptide expressing nucleotide sequence isolated from the Sargasso Sea
catgtctgaactaaataacattgcacttgaaattttaaaagatggcaaaggtatactagctgcagatgaaagcacaggtactatgaccaaaagactagataatgtaaatgtgccgtcaactccagaaaacagattactatttagagaaacactatttagtgcatcaggtatgactgaatgtataggcggtgtaatattatatgatgaaacaataaaacaacaaacttcaaaaaaaaatctgatcccagaattaattttaaatatgggctcttatccaggaataaaagtcgatactggcgccaaggttttagcagggtcaccaggtgagaagattactgaaggcttagatggattgagagaaagattaaaagaatattataaacttggtgcaaaatttacaaaatggaggggcgtttataacatatctaaaagttatcctagtaaactttctattcagtcaaatgctcatgcactagcaagatattctgctttagttcaagagtgcaatatggttccaattgtagagccagaagtattaatggatggtgatcattcggcaaaagattgtttttcaaaaacttcagaggtgattaaaaaatgctttgaagagctaattttacacaaagttgatttgaaaggaataatacttaagcctaacatgattttggctggcgataaatgtaaagataaaatttcaaacgatgaagttgcaaaattaactttgaaatgtttaaaaaattcagttccttcagaagttccgggaatagcttttttatctgga

SEQ ID NO: 278107 - DNA, 713 bp, Unknown
  Bacterial polypeptide expressing nucleotide sequence isolated from the Sargasso Sea
aaaatccttggcacgttctgataaagaaaaaattactgaaggattagatggtttaagagaaagattaaaagaatattataagctgggtgctagatttactaaatggagaggtgtatatataatttcagacaaacatccaagcaaagctgcaatatcaactaatgctcatgctttagctagatattctgctttggtgcaagaatcgggaatggttcctattgttgagccagaagttttaatggatggaaatcactctgcagaagtttgtttggaaaaaacaagtgaggttataaaaaaatgttttgacgaactaattagtcaaaatgttgatctcaagggagtcatccttaaacctaatatgatattacctggctctgagtcagtagagaaaatttcaagtgaaaaaatatctgaatatactcttaaatgtctatttgaaagtgttcctgatgaagttcctggtattgcattcctttctggtggtcaaagtgaaatcgaagcaactaaaaatttaaacacaataaataaaaaaaatacttctaaatttataatgacctactcatatggtagagctctacagcaaagtgctctaaaacattggtctaaaaatacaaatgatattgagggaactcaaaaaatttttaatcatagagcaaatatgtgcagtctagcttctaaaggtgaatggacagagcagcttgaaaaaaaataag

SEQ ID NO: 278108 - DNA, 474 bp, Unknown
  Bacterial polypeptide expressing nucleotide sequence isolated from the Sargasso Sea
catgtcattgaatacactagaagaaatagctaattatattgtctcagatggaaaaggaattcttgcagctgatgaaagtaatcttacttgtggaaagcgttttgattcgataggcgtcgaatctacagaaattaatagacgagattacagagaaatgctgttcagagctgatgggatgcaagacaacataggcggagttattttatttgatgaaacaattagacagagtgctgaagatggcacgccattggttgaattaattaaaaatcaaggagctttgcctggcattaaagttgataagggtctagctcccttagaatcctctcatgaggaaactgttacgcaaggtctagaggggctagatgagagatgcaaagaatatgtttcactcggagcaaaatttactaagtggagagcagttattaaaatatctcctagcttgccaacagacgagtgtattgaagcaaatatgaa

SEQ ID NO: 278109 - DNA, 905 bp, Unknown
  Bacterial polypeptide expressing nucleotide sequence isolated from the Sargasso Sea
catacaatcatcaccagagaacagacttttgtttagagaaatactttttgcttcggagagtatgatagattgtattggtggagttattttatttgatgagacaataaatcaaacatcaaattatggaaaaacaattccaactatgatctcagaaacaggtgcagttcctggaattaaagtagacactggcgcaaaagatttagcaaattctttagatgaaaaaattacagagggcttagatgggctaagagaaagattaaaaaagtactacgagcttggggcaagatttacaaaatggagaggggtatataacattggagaaaaataccctagcaaaattgctataaattcaaatgcacatgcattagcaagatattctgctttggcccaagaaagtggaatggtaccaattgtagaaccagaagtattaatggatggtgaacattcagctgatgactgtttaattaaaacatctgaagtgattaaaaaatgctttgaagaacttataattcataaaattgatctaacaggagtaattttaaaaccaaacatgatcctggcaggaaataaatcaaaaaataaaatttccaatgaggaggttgcctctaaaacccttgaatgtctaaaaaaatctgttccaaatgaggttcctggaattgctttcttatctggtggtcaatcagagatagaggcaactgaaaatttaaacctaataaataaaaataatgatactaattttataatgacttattcatatggaagagctctccagcaaagtactctaaaattttggtcaaaagatattaaaaatattaaaggaacccaaaatatttttaatcatagagctaaaatgaacactttagctgctcaaggaaaatggtctaacgaacttgagaataaataaa

SEQ ID NO: 278110 - DNA, 715 bp, Unknown
  Bacterial polypeptide expressing nucleotide sequence isolated from the Sargasso Sea
gatgtctaactatgaagagcaactaaaaaaaatccgcagtgctgacggctttattgccgcgcttgaccaaagcggtggtagcacaccaaaagcactccaactatatggtgtcgaaggtgatgcatataataatgatgaagaaatgttcacggttgttcatgagatgcgtactagaatcgttactagcccagcttttgatgggtctagaattcttggggctatactcttcgaaaatacacttgatagagatatagaaaatatcaattcagctagttacctttgggaagtaaaaaatgttgctccattcttaaaggttgataaagggttagctgacgaaaccgatggcgtacaaatattgaacccaatgccagatctattgcaactactggataaagctaaagcaaaaaatgtatttggtacaaaaatgcggtctgtaatcaaatctgctaatccaaatggaattgaacaagtggttgaacaacaatttgctatcgggaaacagataatttctatgggtctaacacccattattgaacctgaagtagatatccattcacctgataaagctgaagcagaatcattacttagacagcaattattgactcatctgaatagtttatcggaaaaggaaatggtcattttcaaactgacacttcccgaggaaaataatttctatgaggactgccagaaacaccctaatcttttaagacttgta

SEQ ID NO: 278111 - DNA, 812 bp, Unknown
  Bacterial polypeptide expressing nucleotide sequence isolated from the Sargasso Sea
ctttgatgagactctaagacaaaaggcgcaagatggatcatatttaagagacgtaattttgagccatggatcactacctggaattaaagtagaccaaggtgtaaaagaactggaagataatcctaatgaaaaaattacaacaggattagatggcctaaatgaacgttgtagagaatatgatacattaggcgctaagtttactaaatggagagcggtaatcaatattggtaatggcataccgtctgcaaaatgtatcaatgaaaatatgttagctttatccgagtacgccctaatagctcaagaaaataatatggtgccaatagtagagcctgaggtcattatggatggcccgcatacaatagatcaatgctacgatgttactaagaatacattatctgtactttttgaaatgcttgataaaaaaaatataaatattaggggcacccttttaaaacctaacatggtagtttcaggaacagaaaatagtcatcaagcaaattataaggaagttgcagaaaaaactcttgaatgtctaaattcgtctgtgcctgatgaattgccaggtattgtttttctatcgggtggtcaatctgatattgatgcaacggcacacttagatgagatgaataaaattggtggttttaaatggaaactaagcttctcttatggaagagcattgcagcaagcagcattgaaagtttggtcaggtaatgacagtaatctagagcatgcacaaaaagcatttggccatcgtgcaatcatgaatatgaaagcttctttgggtgaatggagcgaatcacttgagacttaat

SEQ ID NO: 278112 - DNA, 867 bp, Unknown
  Bacterial polypeptide expressing nucleotide sequence isolated from the Sargasso Sea
agccgcttgtagatgagttaaaagacactcctattgttcttcatcaagaccacggaggatcaccagaagattgtaaaatttgtatggaccttggatttacttccgtaatgatggatggatcattaaaagaagatcaaaaaactccttcagactttgactacaatgttaaagttacaaaagagacagttaatattgcacattctttaggcatctctgttgaaggagagcttggttgtcttggttcacttgaaacaggaactggcgaaaaagaagatggtgttggtgctgaaggcatattaactcaagaccaattactaactgatcctgatgaagcttcaacatttgtaagtcaaacaaaagtagatgctcttgcaattgcaattggaacaagtcacggagcatataaattttctaaaccacccactggtgaaacactcgctatggaaagaataagacaaatacattccaaaataccaaatactcatttagttatgcatggatcttctagtgtacccaataatttaattgctgatataaacaaatatggtggaaaaataaaagagacctatggtgtaccgctcgatgaaattaaagaaggaattaaaaatggagttagaaaggtaaacgtggatactgacttaagattagcatcaactgctgcaataagaaaatatttttttgaaaatccatctgagtttgatcctagaaaatatttgtcactttcaaaagatgcaatgaaagaagttgtcaaaaataagttagaagaatttggagctgctggaaatgcatcaaaaataaaaccttcatcattatcaattatggcctccaggtatcaatctggagagttgagttcgataacaaattaaa

SEQ ID NO: 278113 - DNA, 468 bp, Unknown
  Bacterial polypeptide expressing nucleotide sequence isolated from the Sargasso Sea
tatgcccttaataagtatgcgtcagttattagatcatgcagcagaaaatgattatggagtacctgcatttaatgtaaataatttagagcaaattagagcaattatggaaggtgctcaatatgtgaatagtccagttattgttcaagcttccgctggagcaagaaaatattcaggaccaatatttatcaaaaatatgatgcaggctgcagttgaggagtttcccaaaatacctattgtaatgcatcaagatcatggaggttcacctgaagaatgtaatgaatgtatagaattaggatttacttcagtaatgatggatggatcattattatcagatcaaaaaacaccatcaaattttgaatataatgtaaaagttacaagagagacagtaaaaattgctcactctaaaggagtttcagtcgaaggtgagttaggatgtttaagttcgctgaaacaggtatgggagaaaaa

SEQ ID NO: 278114 - DNA, 814 bp, Unknown
  Bacterial polypeptide expressing nucleotide sequence isolated from the Sargasso Sea
attgtatgatgaaactattaaccaaaaatcaaaaaatttaaaaattcctgaacttatttccagcagaggtgtaattcctggcattaaggttgatactggagctaaagttctagctagttctccagatgaaaaaattactgaaggtcttgatgggttaagagatagactcaaaaactactttcaattaggagcaaaattcactaaatggagaggggtctattcaatttcaaaaaattttccaagcaaagtagcaattcaatcaaatgctcatgctttagcacgatatgctgcattagttcaagaagtaaacatggttccaatagttgaaccagaagtgctaatggatggtaaccattctgcaaaagagtgttttgaaaaaaccattgaagttgtaaaaagctgttttgaacaattaattttacataaagtagacttatcaggaattattttaaaaccaaatatgattcttgcgggcaacaaatctgaaaataagttatctagcgaggaagtcgcaaagatgaccgtagaatttttgaaaaattccgtgcccccagaagtaccaggggtagcttttttatcgggaggtcaatcagagttagaggcaacagaaaatcttaatctcattaacaaatacaatagtacaaattttattatgacatattcctatggaagagcccttcaagaaagtgctctaaaacactggtcaaaaaatttagatgacattgaaggaactcaaaaaatttttaatcatagagctgaaatgaatacactttctgccgaaggaaaatggtctttagaaattgaaaataagtaa

SEQ ID NO: 278115 - DNA, 735 bp, Unknown
  Bacterial polypeptide expressing nucleotide sequence isolated from the Sargasso Sea
aatgtcagaacttaatagtatagcaataaaaattcttaaaaatggtaaaggcattttagcggctgatgaaagcactggaacaatgactaaaaggttggatagtgtaagtgttccctctacaccgaaaaacagattattatttcgagaaacaattttcagttcatcctcgatgaaggattatattggaggtgtaattttatttgacgaaacaataaaacaaacaacatcgaaaaaaaaaacaattccagaattaatttcaaaaatgggctcgattccgggtattaaagtagatacaggtgcaaaaattttagctagctcaccaagcgaaaaaattacagagggtttagacggattgagagagaggttaaaagaatactataagctgggtgcaaagtttacaaaatggagaggtgtgtacagtataactaaagattatccgagtaaaatttcaatacattctaatgcacatgcattggcaagatactctgctcttgttcaagaatgtaatatggttccaatagttgagccagaagtattaatggacggtgatcattctgctaaagagtgttttatagcaacttctgaagttatagaaaaatgttttgaagaacttattgcacataaagttaatttgaatgaaattatactaaagcccaatatgattttagcagggaataaatctaaagataaaatctcaaacgaagaagttgcaaaattaactttagaatgtttaaa

SEQ ID NO: 278116 - DNA, 343 bp, Unknown
  Bacterial polypeptide expressing nucleotide sequence isolated from the Sargasso Sea
tacaaacaaaaagcttctacagaagaaattgctagcaaaacacttgattgtttaaagaaaactatgcctaaggaagttccgggggttgcatttctatctggaggacaaagtgaaattgaggcaaccaaaaatctaaatgcaataaataagattaatgatacaaattttaattttactttttcttatggaagggctttacagcagtctgcgcttaaaacttgggcaaaatcaatgaaagatgttaaaaatattcaaaaagtttttgatcacagagctaagatgaatggtgcctcaaccgaggcgaaatgggaagaaaagaacgagcaaaattttgccgcttaaa

SEQ ID NO: 278117 - DNA, 679 bp, Unknown
  Bacterial polypeptide expressing nucleotide sequence isolated from the Sargasso Sea
ccttgatggtctcagagaaagattaaaagaatattacggactaggtgcaagatttacaaaatggagagctgtttataaaattggaaataaatttccttcttctcaatctataaagtcaaatgctcatgcgcttgctagatacgctgctctagtacaagaggcaaaaatggttccaattgtagagcctgaagtgctaatggatggatatcacgatatagataaatgttatcaggttacaactaatgttttaaatgaatgttataatgaactcgaaattcataaagtggatctcaaaggaacggttttaaaaccaaatatgattattccaggatccaattcatcaaaaaaatcaacttctgaagaaattgcaaaaaaaacattggattgtctcaaaaaaaatgttccaagtaaagtgacaggtatagcttttttatctggaggacaatctgaaatagaagcaagtaaaaatttaaatgaaataaacaagataaatgacacaaattttttaattactttttcatacggtaggggtcttcaagcaagtgccctaaaagcgtttggaatggaccagaataatcaaaataatattcaaaaagctttcgatcatagagcaaaaatgaacgggctttcttcaaaaggagagtggtctgaaaatttagaagaaggagaagcagcttag

SEQ ID NO: 278118 - DNA, 328 bp, Unknown
  Bacterial polypeptide expressing nucleotide sequence isolated from the Sargasso Sea
atggcattgattagcttgcggcaactgctggatcacgcagccgagcacgactacggcgtgcctgcttttaatgtaaataatcttgagcagacccgggcaattatggaggccgcagatcagactgactccccggtgatcatgcaggccagcgctggcgcacggaaatacgccggcgctccgttcctgcgtgctctgatggaggcggcaatgacggaatttcctcatgtgccggtcgttgtccatcaggaccatggcacctcgcctgccgtttgccagcgctccattcaactgggctttagttcagtaatgatggatggttcactcggcg

SEQ ID NO: 278119 - DNA, 571 bp, Unknown
  Bacterial polypeptide expressing nucleotide sequence isolated from the Sargasso Sea
atgtcagaactaaataaaattgcactaaaaataatttctagcggtaaaggtatacttgctgcagatgaaagcaatggaactatgactaatagacttacagcagtaaatgtaaattcaactcctgaaaatagactattgtttagggaaattcttttctcatctgaatgcatgaaagattgtattggaggggttattctttatgatgaaacaataaaccaaactacaagttttggaaaatccattcctgacctaatttcagcctcaggcgctgtgccaggaattaaagtcgatacaggtgctaaagaattagcaaactctcataatgagaaaattactgagggtttagatggtcttagagatagattgaaaaaatattatgaacttggagcaagatttacaaaatggagaggagtttactctattagtaataaacatccaactaagcttgccatgaatagtaatgctcacgcacttgcaagatactctgctctagttcaagaaagtggtatggtcccaatagtagagcctgaagtattgatggatggagagcattcagcagatatttgttaag

SEQ ID NO: 278120 - DNA, 806 bp, Unknown
  Bacterial polypeptide expressing nucleotide sequence isolated from the Sargasso Sea
aattttatatgatgaaacaatcaaacagaagtataattcaaaaacaattcctgaaataatatctgaaacaggagctgtgcctggaattaaagttgatacaggagctaaagctctggcaaattcacataatgaaaaaattactgaaggacttgatgggctaagagaaagactcaaagagtactataaactcggagcaagatttgcaaaatggagaggtgtatataatattgcagaaaatttaccaagcaaactttctattcacacaaacgcacaagctttagcaaggtattcatctttagttcaagaagctaaaatggttcccatagttgaacctgaacttttgatggatggaaaccatacagctgaaacttgtttaagaaaaaccactgaggtaattaaacaatgctttgaggagcttaaattaaataatgttgatttgacagggattatattaaaaccaaatatgattttacctggatcaaattctgaaaaaaaaaaatctagcgaagaaattgcagaattaactttaaaatgtctcatagacagtgttcctactgaagttcccggtatagctttcctttcgggtggtcaaacagaaattgaagcaacaaaaaatctaaatttaataaataaaaaaaataaatcaaaattcattatgacttattcttatggtagagcattacaacaaggtgctttaaaatattggtcaaagaatattgatgattttgagggtacccagaaaatctttaatcatagagcaaatatgtgtagtttagctgctaaaggtgaatggacagagcagattt

SEQ ID NO: 278121 - DNA, 531 bp, Unknown
  Bacterial polypeptide expressing nucleotide sequence isolated from the Sargasso Sea
tcatcagtaatgatggatggctcgttaatgagcgatggtaaaacgccttcaagttatgaatacaacgttgaagttactcgcgaaacagtggctatggcacatgcgtgcggtgtatcggttgagggcgagctaggtgtattaggttcacttgaaacgggtgaagcgggcgaagaagacggtgtaggcgcagaaggtaaattaacaactgatcaaatgctaactgatcctgaagaagcagctgactttgtaaataaaacccatgttgatgcgcttgcgattgcatgtggtacatcgcacggggcttacaaatttacgcgcccaccaacagatgatattttagcaattgatcgcattaaagccattcacgcacgtattcctaacacgcatttagtaatgcatggatcgtcgtcggtaccacaagaatggctagagatcataaaccagtacggtggcgaaattcctgaaacctacggtgtaccagttgagcaaattgttgaaggtattaagcacggtgttcgtaaagtaaatatt

SEQ ID NO: 278122 - DNA, 670 bp, Unknown
  Bacterial polypeptide expressing nucleotide sequence isolated from the Sargasso Sea
gcattcctgtggcgtgtcggttgaaggtgaactgggctgtcttggatctcttgagagtggcatggccggggaagaagacggctctggcgctgaaggcaaattgagtcatgatcagttactgaccgatcccgaagaagccgcgcagtttgttaaggaaaccggtgttgatgcgctcgccattgctatcggaaccagccacggcgcttataaattcactcgcccgcccacaggcgatatcctggcgattgaacgcattaaggagattcatgcgcggatacccgatacccatctggtcatgcatggctcgtcgtcggtgccccaggactggcttgccatcatcaatgagtttggtggcgacatgggtgagacctacggtgtgcccgtggaagaaattcaggaagggatcaagcatggcgttcgcaaggtcaatatcgataccgatcttcgcatggcgtctacgggttcgattcggcggttcatgcatcagaatccttctgcctttgatccgcgtaaatacctcaaagaagcgaccaaggcgatgagcgagatctgcgtcgatcgttacgaagcatttggtaccgctgggaatgcgtcaaagattcgttcgctcgaccttgaagagatggtcaagcgctacgacagcggcgagctggatccgaccgtccattag

SEQ ID NO: 278123 - DNA, 402 bp, Unknown
  Bacterial polypeptide expressing nucleotide sequence isolated from the Sargasso Sea
tatgtcgttaaatactttagaagaaatagctgaatacatagtctcagatggtaagggaattctggcagcagacgaaagcaatcctacttgtggaaagcgttttgattctattggggttgagtctacagaaactaataggcgagattacagggaaatgttatttagagctaccggcatgaaagacaatattggaggcgtaatcttatttgatgagacgattagacaaaacgctgaagatggaactcctcttgtagatttaattaagaatcagggagcattgcctggcattaaagttgataaaggcttggctccattagagtcttctccagatgaaacagttactcagggcctggatggacttgacgaacgttgcaaagaatacgtttcacttggagcaaaatt

SEQ ID NO: 278124 - DNA, 735 bp, Unknown
  Bacterial polypeptide expressing nucleotide sequence isolated from the Sargasso Sea
aatgagtgaactatattcaatatcaaaaaaaataatttctacaggaaaaggtattttggctgcagatgaaagcacggctactatgactaaaagactagatgccgtaaaagtgccatcaacaccagaaaatagacttttatttagagaaacacttttatcatctcaaagcatgaagaattgtattggaggagtaatcttatatgatgaaacagttaaacagattgcgtcaaataaaaaaacaattcctgaattaatatcaagcactggtgctgtaccaggaataaaagtagatactggaacaaaagcgttagctaattcgaaagatgaaaaaattactgagggattagatggtttaagagatagattgaaagaatattataaacttggagcaagatttacaaaatggcgagctgtttatgtcatttcagataaatttccaagcaaactttcaattcataagaatgctcatgctctagcccgttatgctgcattagtccaggaaactggcatggtacctatagttgagcctgaagttttaatggatggagaacataacgctcaagattgttttgtgaaaacctctgaagttttaaaaaaatgctatgatgaattaattttaaataaagtagatcttaaaggaactatacttaagcctaatatgattttacctggatcaaatagtaaagaaaaaatagaatgtaaaaaggttgctgaactaacattaaaatgtttaaa

SEQ ID NO: 278125 - DNA, 439 bp, Unknown
  Bacterial polypeptide expressing nucleotide sequence isolated from the Sargasso Sea
atgtcattaatttcgcttcgacaactattagatcatgcagctgaaaataattatggtgtacctgcatttaatgtaaataacttagaagcaatcagagcaataatggaaggggctaaagaattaaatagccctgtaattctgcaagcatctggagctgccaggaaatatgccggaccaatttttgttaaaaaattagttgaagcagcaatggatgagttttcagacatcccaactgttctacatcaagatcatggtggttctccatcagattgtaaaaattgtatcgatcttggttttacttctgtgatgatggatggttctttattggatgatcaaaaaacaccttcagattttgattataatgttagagttactaaagaaactactgatatggcacatgcattgggagtttctgtagaaggtgaaattggatgtttag

SEQ ID NO: 278126 - DNA, 490 bp, Unknown
  Bacterial polypeptide expressing nucleotide sequence isolated from the Sargasso Sea
atgtcattaatttcgcttcgacaactattagatcatgcagctgaaaataattatggtatacccgcatttaatgtaaataacttagaagcaatcagagcaataatggaaggggctaaagaattaaatagtcctgttattctgcaagcgtccggtgctgctagaagatatgctggaccaatttttgttaaaaaattagttgaagcagcaatggacgagttttcagatattccaactgttctccatcaagatcatggtggctctccatcagattgtaaaaattgtatcgatcttggttttacttctgtcatgatggatggttctttattggatgatcaaaaaacaccttcagattttgattataatgttagagttactaaagaaactactgatatggcacatgcattgggagtttctgtagaaggtgaaattggatgtttaggctctttagaaactgggactggtgaaaaagaagacggtgtgggcagaaggc

SEQ ID NO: 278127 - DNA, 725 bp, Unknown
  Bacterial polypeptide expressing nucleotide sequence isolated from the Sargasso Sea
atccaaaaatatattacctggtattaaagtagatcagggtttggaagattttagtccttatgagatgttaacaaaaggcttagatggtttgtcagaaaggcttgggaaatactatgaactaggagcacgatttgctaaatggagggctgtaataactcctggagatagtataccaacggatgattgtatattagcaaatgcaaaaaatctcgctaagtattctaagaaatgtcaacaagctaatctcgttcctattgtggaaccagaagtgcttatggatggagctcatactattgatgagtcttttgatattacttcacgaacactaaatatggtttttgatcagctagatgaacataatgttagtttgcaaggcattgttttaaagccaaatatggttttatctggctatgagtgttcttatcaggcaagtattgaagaagttgctgaaaaaactgtaaactgcttatctactcatgtgccatcagaagttcctggaatagcttttctatcaggtggtcagtctgatgaagatgcaacattgcatttaaatgaaatgaacaaatatgaaacagattggaacttaaccttttcttacggtagagctctgcagcagtcagcattaaaaacttggtcaggtaaaaaagaaaatgttacagatgctcaagaaacatttattgaaagcgccaaggctaacagtctagctacagttgcaggattgtaat

SEQ ID NO: 278128 - DNA, 490 bp, Unknown
  Bacterial polypeptide expressing nucleotide sequence isolated from the Sargasso Sea
atgtcagaattgcacgctgttgcacataaaatggttgaaaaaggtaaaggaattttagctgctgatgaaagcacaccaacttgcactaaacgttttgaaagtattaatacagattcaactgcagaaagcagaaatttttacagaaatatgctttttacaactgaagatattgaaaaatacataagcggtgtaattttatttgatgaaacttttcatcaatcagaattatcatcaggaataaaattcccagaatatttaacatccaaaaatatattacctggtattaaagtcgatcagggtttggaagattttagtccttatgagaagctgacaaaaggcttagatggtttgtcagaaaggcttgggaaatactatgcgctaggagcacgatttgcaaaatggcgagctgtaatcacaccaggagatagtttacctactgatgattgtatactagcaaatgctaaaaatcttgctaagtatgcacaggaat

SEQ ID NO: 278129 - DNA, 592 bp, Unknown
  Bacterial polypeptide expressing nucleotide sequence isolated from the Sargasso Sea
atgtcagatttaaattccacagcacttaaaataatttcatcaggtaaaggtattctggctaccgatgaaagcactggaacaatgactaaaagacttgaaagcgtaaacgtagattctactgccgaaaacagattaaaatttagaaagatacttttttcatcagaaacaatgaaaacatgtattggtggagttattttatacgatgaaacaattaaacaatcttttaattcaagttcaatttctgcactaatatccgcgtcaggagctgtacctggaataaaagttgatacaggagctaaaactttatcaagttcaaaaaatgaaaaaattacagaaggacttgatggattaagggaaagattacaaacatattataagttaggagcaagatttgcaaaatggagaggtgtatatataatttctgaaatatatccaagtaaagtagcaatttcttcaaatgcacatgctttagcaagatatgcatcgctagtgcaagaatctggaatggtccctatagtagaacctgaagttttaatggatggcaatcatgattctaaaacatgtttaattaaaacaaccagaagttattaaa

SEQ ID NO: 278130 - DNA, 897 bp, Unknown
  Bacterial polypeptide expressing nucleotide sequence isolated from the Sargasso Sea
gatgaaagtaatccaacttggtggaaaaagatttgaatctattggtgttgagtccaccgaagagaatagaagagattacagagaaatgctttttaggtctaaaggaatgaaaggcaacattggtggagtaatattatttgatgagactataagacaatcagctgctgacggaacattgcttagagatttaataactagtcaagatgcccttcctggaataaaggttgataagggtcttcaacctattgatgattgtcctggagaaaccgtgacagttggattggatggattagatgagagattaaaagaatattcatctatgggagctaaattcactaaatggagggctgttataaatataggtgaaggaattccaactgataaatgtattgacgcgaatatgcaggcattagcggattatgcaaaatgtgttcaagataatggaatggttcctatagttgagccagaagtattaatggatggagttcactctattgatgattgctatgacgcatctgctcgttctttaaaatcgctgtttgatcatcttgataataagggggtaaatataaagggcactatcctaaaacctaatatggttacttctggaaaagactcagaaattcaagctagcattggcgaggtcgctaagagaactttagaatgtttaactaagaatgttccatctgatcttcctggcatagcgtttttatctggaggtcagtcagatatcttggctactgctcatttagatgcgatgaacaagattggtggcttttcttggaaattaagtttctcttatggacgggctcttcaagctgcagcattgcaagcatggggtggaaagccagaaaatgttttcatttctcaagatgaattatctcacagggcagaaat

SEQ ID NO: 278131 - DNA, 544 bp, Unknown
  Bacterial polypeptide expressing nucleotide sequence isolated from the Sargasso Sea
cgcgttatcaagatattccgcattagtacaagaatgtaatatggtaccaattgttgaaccagaggttttaatggatggagatcattcagctaaagagtgttttcaaaaaacctccgaggtcattaagaagtgttttgaggagcttattcttcataaggttgatttaaaaggagtaatattaaaaccaaatatgattctagctggaaataaatcaaagaacaaaatctctaatgaagaggtagcaaaattaaccttggattgcttaaaaagttctgtgccctcggaagtttctggtatagcttttttatctggtggacagtcagaactagaggcaacagaaaatttaaatttaataaataaattaaataagactggttttataatgagttactcatacggacgagcattgcagcaaagtgctcttaaattttggtctaagaatataaaagatattcagggaacccaaaaagtatttaaccacagagcaaaaatgaatactcttgctgctaaaggtaaatggtctaaagaaattgagagtcgataa

SEQ ID NO: 278132 - DNA, 661 bp, Unknown
  Bacterial polypeptide expressing nucleotide sequence isolated from the Sargasso Sea
aatgttgatttcactgcgccagctgttggatgatgccgccgaacgcggctacggcgttcccgccttcaacattaacaatatggaacaggggcttgccattctgcaggcagccgacaaacgtgatgcaccggtgatcattcaggcaagccgcggtgcgcggaactatgccggtgacatcatgctgcaggcgatggtcaaggcgctggcagaaatgtatccgcatatccctgtctgcatgcatcaggatcacggcaataatcaggccacctgcatgacggccattcaatatggctttacctcggtgatgatggatggttcgctcgaggctgacgccaaaaccccggcatcttatgattacaatctgggaatcaccagacaggttaccgagatggcccatcatgccggtgtttcagtggagggcgaacttggcgttctggggtcgctggaaaccggcgggggtgaacaggaagatggacatggcgccgaaggcaaattgtccgaggatcagctgctgaccaatcctgatcaggcggtggattttgtcaggcagacgagggttgatgcgctggccattgccatgggaaccagccatggtgcctataaattcacccgcaagccggatggcgatattctggcgatgagtgtggttgaggaaatcaac

SEQ ID NO: 278133 - DNA, 837 bp, Unknown
  Bacterial polypeptide expressing nucleotide sequence isolated from the Sargasso Sea
tatgaaagattatattggaggagttattctttttgacgaaacaatcaaacaaaaaacaactttaggtccaactgttcctgaattaattttaaaacaaggcgccataccaggtataaaggtagataaaggagcaaagctacttgctggctcaaatgacgaaactgttacggagggtttagatggcttaagggagagattgaaagaatattatagtctaggagctagatttacaaaatggagagctgtatataaaattggtgaaaagtatccttcaacacaatcaataaaatcaaatgctcatgctttagcaagatacgcggctttagtacaagaagctaatatggttccaataatagaaccagaagttttaatggatggatcacatgatatccagagatgttatcaagtaacaactaatgtactcaatgagtgctataatgaattaaatattcataaaattaacttaaaaggaactgttttaaaacctaatatgattatacctggatctgactgcaaaaaaaaatcaagtccagaagaaatagcaaaaaaaactttagactgtctcaagaaaaacgtaccaagtgaagttcctggtattgcttttttatctggtgggcaatcagaaattgaggcaagcaaaaatttaaatgaaataaataaaattaacgatacaaattttttaataactttttcttatggaagaggacttcaggcaagtgctttaaaagagtttggcaaaaaccaggaaaatattgaaaatatacaaaaagcttttaatcacagagctaaaatgaatggcctgtcttcaaaaggaaaatggtctgaaaattttagaaa

SEQ ID NO: 278134 - DNA, 572 bp, Unknown
  Bacterial polypeptide expressing nucleotide sequence isolated from the Sargasso Sea
aatgtctgaactgaacaacatagccttaaaaatcttatctaatggaaagggtatcttggctgcagatgaaagcactggtacaatgacaaaaagattagaaagcgttaatgtcgagtctacgccagataaaaggttaaattttagagaaacattatttactgcagctgggatgaaagaattcattggtggagtaattttgtttgacgaaacaataaaacaaaaagtaaaaagtacaattcccgaaattataaaaaaatctgggtctctaactggaatcaaggttgatactggcgcaaaaaaactggctaattctggtgaggaaaaaattactgaaggacttgatggtttaagagaaagacttaaagaatattacgacttgggtgcaagatttacaaaatggagaggtgtttatttaatttcaaatgactacccatctcaaatttcaatagactcaaatgcccatgccctcgctagatatgcggctcttgtgcaagaggcgaatatggttccgatagttgaaccagagttgttaatggatggaaaacatgactccgatatgtgcttaaaaaaaa

SEQ ID NO: 278135 - DNA, 890 bp, Unknown
  Bacterial polypeptide expressing nucleotide sequence isolated from the Sargasso Sea
aatctttgtgaaaaaactagttgaagcagcaatggatgaattttcagaaattccaacagttttgcaccaagaccatggtggttctccaaaagattgcaaaaattgcatagaacttggttttacatctgtgatgatggatggttcgctattagatgatcaaaaaactccttcagattttgaatataatgtaagagttacaaaagaaacaactgatatggctcatgcattaggagtttcagtcgaaggggagataggctgtttaggctctttggagactggaacaggtgaaaaagaagatggggttggtgctgaaggtaaacttgatcatgaccaactattaactgatcctgatgaagcttcagatttcgttaaagctacaaatgttgatgcattagctatcgctattggtacaagccacggtgcttataaattttctagaccaccaactggagatattttagcaatagatagaataaaagaaatacactcaagacttccaaatacacatttagttatgcacggctcatcatcagttccacaagatttaataaaaactattaatgaatatggaggaaaaataaaagagacatatggtgtaccagtttctgaaattcaagaaggtataaaacatggtgtaagaaaagttaacgttgatactgatttaagattagctgctacagctgcagtaagaaaatacttccatgagaatccctcacaattcgatcctcgtaaatatttattactttctaaggatgctatgaaagaagttgttaaaagtagattgcaagaatttggaactgcaggaaatgcttcttctataaattcaatttctctgggtgcaatggcaacaaaatataaatctggagaatttaaagcagtcataaattaaa

SEQ ID NO: 278136 - DNA, 653 bp, Unknown
  Bacterial polypeptide expressing nucleotide sequence isolated from the Sargasso Sea
gctgccggcctccgtcaagccgggcgtcgtcacgggtgaggccctgtgggacctgctcgagcacgcgaaggagaacaagtacgccatcccggcggtgaacgtggtctcgtcgtgctcgatcgcctcgtgcctcgaggccgccaaggagtacggcggccccatgatcgtccagttctcgcgcggcggcggccagttcattgctggcaaggcggcacccaacgccgacgacgcggcgtgcatcgccggcacggtcgcggccgcgctccacacgcgcgcgattgctgcgctctacggcgtgccggtcatcctgcacaccgatcactgccagcgctcgtggctgccgtggttcgacggcctgatggaggccaacgaggactacttcaagaagaacggcgagccgctcttctcgtcgcacatgctcgacctctcggaggagccgctggaggagaacatcggcacgtgcgtcgagtacctcgagcgcatgtccaagtgcaacgtgctcctcgagatggagctcggtgtcaccggcggcgaggaggacggcgtcgacaactcggacgtcgactcgtcgaagctgtacacgcagcctgacgaggtgtacgaggtgtacaaggcgctctcggcggtcgagggtggccgcttcacgatcgcgg

SEQ ID NO: 278137 - DNA, 725 bp, Unknown
  Bacterial polypeptide expressing nucleotide sequence isolated from the Sargasso Sea
tatggacaccgaactacttgagaagacagcgagagaacttgtagcacctggtagaggaattctcgccgcggatgagagcaatggaacaatgtcaaacagactagaggcagtaggggtagaaccctctccagaaactcgtcgagcataccgttcaaacatattcgctacgccagattatgaatctgcaattagtggtgttattctctttgatgagacaattcgtcaaactatggacgacggtacaccaatcccagaatatctcgcaagtagaggagttcacccaggaataaaagtagatacaggagctaaggaattggctcatcattctggtgaaaaggtcacagaaggattggacggactacgggaaaggtgcatggaatacttcgctttgggcgctagatttgcaaaatggcgagcagtaatcagaattggagatggaatgcctagtgatgcaaatatttccactaatgcccatgctcttgcaagatacgcagccatctgccaagaacagggtttggttccaatcatcgagccggaagtcttgatggacggcgatcacgattcacgaacctgcttcgaggtcactgcaagaattctcgacgccacatttgcagagtgtgaaattcagggtgttcatatccctggggctttactcaaaccgaacatggtcttacccggcaaatcctgcgaagaccaaggaactcgcgagaaagcagcgcagatga

SEQ ID NO: 278138 - DNA, 562 bp, Unknown
  Bacterial polypeptide expressing nucleotide sequence isolated from the Sargasso Sea
agaattaggtgtaacaggaggagaagaagatggtgttgataatactgacattgactcatctaaactttatactcagccagaagaagttgcctatgcatattctgagctgagctcaattagcgataattttatgatcgctgcagcatttggtaatgttcatggagtatataaaccaggaaacgtaaaattaactcctaaaattttaaagaattcacaggagtttgtttcagaaaaattcaatttgccttcaaattctcttgattttgtattccatggtggttcaggttcttctgttgaagagataagagaagctatagattatggtgtcataaaaatgaatatagatacagacctacaatttgcatttaccgaaggtattagagattatatgatcggagagtctgaatatttaatgaaacaaataggtaatccagatggtgatgacatacctaataaaaaatattatgatcccagagtatggcttagaaaaggagaagagacgtttaaaacaagactcataaaagcctttgaggatttaaataatatcaataccttagattaa

SEQ ID NO: 278139 - DNA, 882 bp, Unknown
  Bacterial polypeptide expressing nucleotide sequence isolated from the Sargasso Sea
atggaacaaatacaagcaataatggaggctgcgaaagaaactgatagtcctgttattgttcaagcttcgcgtggagcgcgtgcttattctcaagataattatttgcgccatttaatgcttgctgcagttgagctctatcctgaaattcccgttgttatgcaccaagatcatggcaacagtcccgagacttgcttgtcagcaataaagcaagggtttacttctgtaatgatggatggctctttactagaggatgctaaaactcctgctgactttgcttataactgtgaagtaactaaaaaagtttgcgatgcagctcatgctcttggggtttctgttgaaggtgagcttgggtgtttagggtctcttgagagtggccaaggcgagcaagaagatgggcatggttttgaaggaacccttagcaaagaaaagttacttacagatccagaagaagcttttcgttttgttaaagccacaaaagtcgatgcacttgcagttgctattggcacaagtcacggggcttataaatttagtagtcctccaacaggagaaaccttagcaataaatagaattattgaaattcatgaaaagctacccaatacccatttggttatgcatggttcttcttctgttcctaaggagttgcaagatttaattaatgatcatggggggcaaatgaaacctacttatggtgtccctgtagaagaaatacaaatggctattaagcatggagttagaaaaatcaatgtagacacagataatcgcatggccattactggtactattagaaaaatgttgcagcaaagtcctcatgagtttgatccaagattttatttaaaacctgcaagacaagcgatgaaggaagttgttaaacaacgaatgatc

SEQ ID NO: 278140 - DNA, 532 bp, Unknown
  Bacterial polypeptide expressing nucleotide sequence isolated from the Sargasso Sea
ggggttggtacctattgttgaaccagaggttctgattgatggagatcttactatcgaggttgatcaaaatatcaccatcaaaaccctaacaaaggtctacgaaatgctggatctttacaaagtgtcgctagaaggtacgcttctcaagcccaacatggttacctccggatcaagctcctctaatcgagctcctgctaccgaagtcgcctccagaacagtagaagctttcgaaaaatccgttccttcatctgtacctggaatcgtttttctctcgggaggacaaccagatgatgaagctactttaaatatgaatgaaattgcactatttggtcaaaataacaacgcaccgtgggaattaagctactcatttggtcgtggcctacaagcgctgcctttaaatacttggcttggtataaaagaaaatgtcccttcggcacaacaagcatttattcagcgatgcatacttactagtgccgctcgccaaggtaaatattctgcgcaaatggaagatgaactaactagagctaactaa

SEQ ID NO: 278141 - DNA, 568 bp, Unknown
  Bacterial polypeptide expressing nucleotide sequence isolated from the Sargasso Sea
actggcaataagtagtaatgctcatgcacttgctagatactctgcactagttcaagaaaatggaatggttccaatagtagaacctgaggtattaatggatggaaaccattctgcagaagattgttttaataaaacatcagaagtgataaaaaaatgttttgaggaactaattttacacaaagttgatttatcgggaattattttaaaaccgaatatgattttgtctggcaacatatcagaaaataaaatttctagtgaagaagtttctatcaaaacattggaatgccttaaaaattgtgtacctaatgaagttcctggaatagcttttttatctggaggacaatctgaaattgaggctacggaaaatttaaatttaataaataaaaacaacaatactaattttataatgtcctattcatatggaagagctcttcaacaaagtgctttaaaagtttggtctaacgatattaaaaatgtagaggcagctcaaactacttttaatcatagggctaaaatgtgtactttagctgctcaaggaaaatggtcaagtaaacttgaaaataaataa

SEQ ID NO: 278142 - DNA, 513 bp, Unknown
  Bacterial polypeptide expressing nucleotide sequence isolated from the Sargasso Sea
aaagtggtatggttccaatagtagagccagaggtattaatggatggagaacattctgcagatgtttgtttaaataaaacatcagaggttataaaaaaatgttttgaagaattaatcttacataaagttgatctttcgggaattattttaaaaccaaatatgatattatctggtaatcaatcaaaagaaacaaactccagtgaagagatttcaaataaaacactagagtgtattaaaaattcagttcctggcgatgtgcctggggttgcctttttatcaggaggtcagtctgagttagaagctacagaaaatttaaatttaataaataaaaacaacaataccaattttgtaatgacattctcttatgggagagctcttcagcaaagtgctcttaaagcatggtctaaaaatataaaaaatatagaggcaactcaaaaagtttttaatcacagagccaaaatgtgtacattggctgctcagggtagatgggtgagagaacttgagagtaaataaa

SEQ ID NO: 278143 - DNA, 504 bp, Unknown
  Bacterial polypeptide expressing nucleotide sequence isolated from the Sargasso Sea
tggttccaatagtagaacctgaggttttgatggatggaaaccattctgctgaagtttgtttaaataaaacatcagaggtaattaaaaagtgttttgaggaactaattttacacaaagttgatctttcgggaataatattaaaaccaaatatgattttgtctggtagcttatcagaaaataaaatttctagtgaggaagtttccatcaaaaccttagaatgtattaaaaattctgtacccaatgaggttcctggaatagcttttttatctggagggcaatctgaaattgaagctactgaaaatttgaattcaattaatcaaaataataatacaaattttataatgacctattcatatggaagagctcttcaacaaagtgctttaaaagtttggtctaatgatattaaaaatgtcgaggcaactcaaaatacttttaatcatagagctaaaatgtgcaccttagctgctcaaggaaaatggtcgagcgaacttgaaaataaataaa

SEQ ID NO: 278144 - DNA, 937 bp, Unknown
  Bacterial polypeptide expressing nucleotide sequence isolated from the Sargasso Sea
gatgaaagtcccgcaaccatgactaaaaggttagagggtgtaaaagttgactcaacttatgaaaataggattttatttagagaaacattatttacttcgagagaaatgagtgaatgcatcggtggagtaattttatatgacgaaacaataaaacaaaaaactagcaatggtaaaagtgtgcctgaggcactttctgaggttggatcaatagccggaataaaagttgacactggagcaaaacaattggcaggtagtcctgatgaaaaaattacagaaggtcttgatggcttaagagaaagattaaaagaatactcaaaacttggagcaaagtttactaaatggaggggtgtgtataatatttcaaacatataccctagtaaactttcaattcattctaacgcacatgcattagcaagatactcagctcttgttcaagaatgtaatatggttccaatagtagagccggaacttttgatggatggaaatcattcagctgaagattgttataacaaaacctcattagtaataaaaaaatgttttgatgaattaatactacataatgttgatttaactggtcttattttaaaaccaaatatgatacttgcaggtgtagattcaaaaaatcaaatatctaatgaggatactgctaaacttactgttaaatgtttaaaagagtcagtgcccagtgaagttccaggtgttgcgttcctttcagggggtcaatcagaaatacaagctactgaaaatttaaatcttataaataaattcaatactacaaattttattatgtcctattcttatggtagagctctacaacaaagtgctttaaaacattgggccaaagatactaaagattataaaggcacgcaggaagttttcaatcatagagctaaaatgtgcagtttagcttctcaaggaaaatggagagcgaactgaa

SEQ ID NO: 278145 - DNA, 441 bp, Unknown
  Bacterial polypeptide expressing nucleotide sequence isolated from the Sargasso Sea
aatggatctaagttcattgaactcaatagcacaatcaatggttgctcccaacaaggggatacttgctgcagacgaaagcacgccaaccattggaaaacgatttgccacaattgatacagaatcaactgaaagcaatagacaaatctatcgcaatttacttttcacgagcccgaatgtttcagagtatataagtggtgttattttatttgatgaaaccatcagacaatcgactaatgatggaacaccatttgcagagcatctcacttctcttgggattgttccaggcatcaaagtggataaaggcgttaaaggcatccctttttgtgatggagaaaccgttacagagggattggatgggctagatgaaagattggatgagtattacgagcttggtgctcgattcgcaaaatggagagccgttattagcatctcagatgatct

SEQ ID NO: 278146 - DNA, 652 bp, Unknown
  Bacterial polypeptide expressing nucleotide sequence isolated from the Sargasso Sea
atgtcagagttaaacaatattgccttaaaaatcataagtaaaggaaagggtatacttgctgcagatgaaagcactggtactatgaccaaaagattggaaagtgtaaatgtatcctctactcctgaaaatagacttctgtttagagaaacgctttttagctcacaagttatgtctgaatgtattggtggagttatcttatatgatgaaacaataaaacaattatcctcaaagaaagaaaaaatacctgaactaattgcaagtatgggggcttatgcaggtataaaagttgatacgggagcgaaagttttagcgggatctcctaatgaaaaaattacagaaggtctcgacggattaagagaaagattaaaagaatattataaacttggtgctaaatttacaaaatggagaggtgtttttaatatttcagaggaatatccaagtagactatcaatagaatcaaatgctcacgcattagctaggtattcagcgttagttcaagagaataatatggtcccaattgttgagccagaggtcttaatggatggaaatcatagtgccgaagattgttataacaaaacctcagaagttttaaaaaaatgttttgatgaacttattttacacaaagtgaaatttaaaaggaattatacttaaa

SEQ ID NO: 278147 - DNA, 685 bp, Unknown
  Bacterial polypeptide expressing nucleotide sequence isolated from the Sargasso Sea
tttgggtgccatactttttgaaaaaacaatgaacggagaaatattcgggatggatactccgaactacttatggaaaaaaaagcaggttctcccttttctcaagatagataaaggacttgaagaagtagatgaaggggtgcaattaatgaagccgaatccgggactggaagatctacttgatcaggcaataagtaaagatatttttggcactaagatgcgttcagttatcaaagatgcaaatgaaaaaggaattgcatctgtagtaaagcagcaatttgaaatagccaaaaaaataattcagaaaaatcttgttcctattatagaaccggaagtggatattcattgcgaaaacaaagctgatgctgaaagtatgttgattgataatctaaagaatcatattgagcagttgagctcagaccaaaaaatttttctgaaactaaccattccaaacgaggttaatttatacgcagcatttgttaatcatcccaatgtaatgagggtttttgctttgtctggaggttatagcagagaggagtctaacaaacttttagcattgaacaaaggaatgcttgcaagtttcagcagagcacttactgagggattgtcgtctaaacagtctgatgaagaattcgattcagttctggacgcttccattgaaagtatacatcaggcctctaatagttag

SEQ ID NO: 278148 - DNA, 592 bp, Unknown
  Bacterial polypeptide expressing nucleotide sequence isolated from the Sargasso Sea
atttcggataattatccaagcaaactatctatttattccaatgcgcatgctcttgcaagatattctgcactagttcaagagtgtgggatggtcccaattgtggagcctgaagttcttatggatggtaatcatagtgcagaagaatgttttaataaaacttctgaggtaattaaaaaatgttttgatgaactcaataaacataaagtagatcctgctggtgtaattttaaaaccaaatatgattttaccagggtcaagttctaaaagagaggtaaatacaaaaacaattgcagagcttactttaaaatgcttaaaaatgtcagtaccatctgaagtccctgggattgcttttttatcaggtggtcaatcagaatttgacgctgcgagaaacttaaatagtataaatttaattaatgatacaaatttcataatgacgtattcatatggtagagcattacaacaaagtgctttgaaattttgggcaaaagacattcagaatattaaaggtacgcaagaaatgtttaatcatagagcaaaaatgtgctcattagcttctaaaggtaaatggtcagaggatcttgaaaaaatttaaa

SEQ ID NO: 278149 - DNA, 793 bp, Unknown
  Bacterial polypeptide expressing nucleotide sequence isolated from the Sargasso Sea
tatggaattgataagtcagagtattctaacgatgaggaaatgtttgaaaaaattcatcaaatgcgtacccgcataataacttcaaaaagttttacaggagatagaattttaggtgctatactttttgaaaaaacaatgaattcagaaatttctgggatgaacactgcacattacttatggagcaaaaagcaggttgtgccttttttaaaggtagacaagggacttgatgatgtaaaagaaggagtgcagttaatgaaaccaaatccgggactagaaaatttactttctcaggcagtaaataaaaaaatatttggtactaagatgcgttcagttatcaaagaagccaatgaaaaaggggttgcaggagtcgtggaacagcaatttgaaattgccaaaataataattcaaaataatcttgtgcctattattgaacctgaagtagatattttttgtgaaaataaacctgatgttgaaaaaatgttgtttgaacatcttaagaatcagattgaccaactaaactcaaatcagaaaattttactgaaattaacaattcctagtgaggcaaatatatatgcgcctttcattaatcatcctaatgtaattcgagtctttgctctttctggtggatacagtagggatgattcaaataaacttttagcattgaacaagggtatgcttgctagctttagtagggctctgactgaaggcttatctgctcaacaatcagacgaagaatttaacaaagtactagatgcttccatagaaagtatttttaatgcctccaattgttaga

SEQ ID NO: 278150 - DNA, 512 bp, Unknown
  Bacterial polypeptide expressing nucleotide sequence isolated from the Sargasso Sea
tggcatggttccaattgtagaacctgaagtattaatggatggtaatcattctgccaatatttgtttaaacaaaacttctgaagttataaaaaaatgttttgaagagctaataaatcacaaaattgacttaagtggtgtaatattaaaacctaacatgattttagatggagcaagtgctgaaaaaaaaataacaagtacagaagtggctaaattaactttgcaatgtttaaaagactcagttcctcaagaggttcctggcatagcatttctttcaggtggtcaaagtgaaatagaggctacagaaaatcttaatacaataaaccaaaaaaataatacaaattttattatgactttttcttatgggcgagctttgcaacaaagtgcgctaaaatattggtcaaaaaatatcgaggatacaaacggaacccaaagggtttttaatcatagagcaaatatgtgttcgcttgcttcacaaggaaaatggtcaaaagaatttgaaaaaaagatctaaa

SEQ ID NO: 278151 - DNA, 598 bp, Unknown
  Bacterial polypeptide expressing nucleotide sequence isolated from the Sargasso Sea
tatttaatttcagaaaaatatccctctaagctagctataaatgtcaatgcacacgcattggctagatatgcatcaatagtccaagaggctggcatggttccaatagtagaaccggaagttcttatggacggaaatcattcagctgaagattgttttaataaaacttcggaggttgtaaaaaaatgttttgatgaattaatttttcaaaaagttgatctgaaaggcattttgcttaagccaaatatgattttaccagggtcaaaatcaaatcaaaaaataactagtgatgaaattgctgaacttacaataaagtgtttaattaacagtgttcctagcgaagtgccgggtatagcatttttgtctggtggtcaaagtgaattagaagcaacaaaaaatttaaatacaataaataaacataataaatcgaaatttgtaatgacctattcatatggaagggctttgcaacaaagtgccttaaaacactggtcaaaagatattaaagatattgaagggacacaaaaaatatttgatcatagagccaacatgtgttcccttgcttcgatgggtaagtggtttgaagaagttgataaaatctaaa

SEQ ID NO: 278152 - DNA, 705 bp, Unknown
  Bacterial polypeptide expressing nucleotide sequence isolated from the Sargasso Sea
gctgacgaaagtacaggcacaatgggagaaaagattaaaaagtgttaacgtagaatgcacagagaaaaacagacttcattttagagaaacattattctcctcgagcgcaatgaaaacttcaataagcggtgtaatattatttgatgaaactcttagacaaacatcaagtaaaggtttgcctattcctgaattgattaaaaaatctgggtctatacctggtattaaggtcgacaaaggagttaaacttttggcaggatctgataaagagaaagtaacagaaggattggatggacttagaggtagaatggaggaatattataaactcggagccagatttgcaaaatggcgagctgtctattcaatttcctctaaacacccaagcgaacaatgtattaaatcaaatgcacactccttggcaagatatgcagcgatagtacaggaggcaaaaatggttccgattgtcgaaccagaagttttaatggacggagatcattcaattgatagatgttacgatgttacaagtaaagttttaaatgagtgttataaagaacttgtaattcataaagttaatctaaaaggaacagttttaaaaccaaacatgatactccctggtgcagactgtaaatctaaatctactcctgaggagatagcaaaaaaaacattggaatgtcttaaaaaaaatatgccaacagaggtgccgggagt

SEQ ID NO: 278153 - DNA, 732 bp, Unknown
  Bacterial polypeptide expressing nucleotide sequence isolated from the Sargasso Sea
ctcttgttgaggtcattgcaaattcaggctctttacctgggataaaagtagatacaggcgctaaagatttagcatttaattctaacgaaaaaattactgagggtttagatggtttaagagagaggcttatagagtattttaatttaggggctaaatttgcaaaatggagagctgttataacaatagaagattcaattccaagcgatttatgcataaattcaaatgctcacgctttggcaagatatgcagcactttgccaagaaaatggaattgttcctattgttgagcctgaagttttaatggacggcgaacacacaattgaaagatgttatgatgttacaaaaaagactctcgatgtcgttttcaatgaattaattgctcatggtgtcaatttaaaaggaatttgtctcaaaccgaatatgataattgatggatcgctcacttctgaaaaatcatcttcaaaaataattgctgaaaaaacaatttcttgtttcaaggaagtagttcctgaggatgtccctggtattgttttcttatctggtggtcaaactgaaattgaagcaactgaaaacttagatcagatgaataaaataggaaatttaccatggaacttaagtttttcatatggtagagccttacaagcttccgctttacaggcttggtcaggaaaagtggaaaatgaagaaattgcatctgcgacttttgatcatagggccaaaaaaattccctagc

SEQ ID NO: 278154 - DNA, 649 bp, Unknown
  Bacterial polypeptide expressing nucleotide sequence isolated from the Sargasso Sea
attaaaaaaatattatgatcttggagcaagatttacaaaatggagaggtgtctattctattagtgaaaaatatccaagcgaacttgcaattactagtaatgctcatgcattagctagatactctgcattagctcaagaaagtggaatggttccaatagtagaacctgaggtattgatggatggaaaccattctgcagaagtttgtttaaataaaacatcagaggtaattggaaagtgttttgaggaactcattttacacaaagttgatctctcaggaataatattaaaaccaaatatgattttgcctggaagcgaatcagaaaataaaatttctagtgaggaagtttccatcaaaacgttagaatgtcttaaaaattctgtacccaatgaagttcctggaatggctttcttatctggagggcaatctgaaattgaagccacagaaaatttaaatttaattaataaaaataataatacaaattttataatgacctactcatatggaagagctcttcagcaaagtgctttaaaagtttggtctaatgatattgaaaatgtagaggcaactcaaactacttttaatcatagagctaaaatgtgtaccttagctgctcaaggaaaatggtctagcgaacttgaaaataaataa

SEQ ID NO: 278155 - DNA, 494 bp, Unknown
  Bacterial polypeptide expressing nucleotide sequence isolated from the Sargasso Sea
catcgccatcggcaccagccacggcgcttacaagttcaccaagccgccaaccggcgacgtgctctccatcgagcgcatcaaggaaatccacaagcgcatccccaacacccacctggtgatgcacggttcttcctccgtgccgcaggaatggctgaaggtgatcaacgaattcggcggcgacatcaaggaaacctacggtgtgccggtcgaggaaatcgtcgaaggcatcaagcacggcgtgcgcaaggtcaacatcgacaccgatctgcgactggcctccactggtgccatccgtcgcatgatggccgagcacccgagcgagttcgacccgcgcaagttcttcgccaagaccatcgtcgccatgcgtgacatctgcatcgcccgctacgaagccttcggcaccgccggtaacgcctccaagatcaagccgatctctctggaaggcatgtaccagcgctatgccagcggtgagctgaacgccaaggtcaactgat

SEQ ID NO: 278156 - DNA, 803 bp, Unknown
  Bacterial polypeptide expressing nucleotide sequence isolated from the Sargasso Sea
aatgtctgaactaaacaaaatcgctcttcaaataatatcaaacggcaaaggtatacttgcagctgatgaaagtacagctacaatgacaaaaagattagattcagtaaaagtacattctgataaaaataatagactgctttttagacaaactcttttttcatcttcatcaatgagtaaatgtataggtggagtaatactatatgatgaaacaataagacagagagcatctaatggaaaaactataactgatctaataaactcaagtggttctttggcagggattaaagttgatacaggagccaaaacattggcaggatctaaagaagaaaaagttacagaaggtttagatggtttaagagaaagacttaatgattattataaacttggagcaagatttacaaaatggagaggtgtttactcaatttctgataaatatcccagcaaactatctatttcatcaaatgctcacgcgttggctagatatgctgcattagttcaagaagcaggaatggttcctataattgaacccgaagttttaatggacggtgatcactctgctaaagattgtttgattaaaacatctgaagtaataaataaatgttacgaagagttagaattaaataatgttgatttgaagggaacaatattaaaaccaaacatgattttaccaggaataaattctggtgaaaaaatttctagtgaagaaattgcagaactaaccttagattgtttaaaaaataatgtaccatcatcagtccctggcatagcttttctatcgggggggcaaacagaaatagaagcta

SEQ ID NO: 278157 - DNA, 544 bp, Unknown
  Bacterial polypeptide expressing nucleotide sequence isolated from the Sargasso Sea
gcagctgacttcgttgccaagaccaagtgcgacgccctggccatcgccatcggcaccagccacggcgcttacaagttcacccgcaagcccaccggtgaagtgctggccatcagccgcatcgccgagatccacaaagccatccccaacacccacctggtgatgcacggctcctcctccgttccccaggaatggctggagatgatcaacaagcacggtggtgccatccccgagacctacggcgttcccgtcgaggagatccaggaaggcatccgcaatggtgtgcgcaaggtgaacatcgacaccgataaccgcctcgccttcaccgctgctgtgcgtgaagcggccatggccgatcccgccaacttcgaccctcgccacttcaacaagccggctcgtaagtacatgaagcaggtctgcctcgaccgctatcagcagttctgggccgccggcaatgccagcaagatccagcagcagaccatcaactacttcgccggtctgtacgccaagggtgcactcgatcccaaggccgccgtcgccgcttgat

SEQ ID NO: 278158 - DNA, 605 bp, Unknown
  Bacterial polypeptide expressing nucleotide sequence isolated from the Sargasso Sea
gaggggtgtttataacatatcaaaagaacatccaagtaaactctcaattcaatctaatgcacacgcgttagctagatactctgcattagttcaagaatgtaatatggtaccaattgttgaacctgaagtcttgatggatggtgagcattcagcaaaagattgttataaaaagacttccgaggtaataaaaaaatgttttgaagaattaatcttacataaagttgatttaaaaggaattatattaaagccaaatatgattttagatggtaataaatgtaaaaataagatatcgaatgaagaagtggcaaagttaactcttaaatgtttaaaagcctctgttccatcagaggtaccaggaatagcatttttatctggtggtcaatcagaaattgaggcaacagaaaatttaaatctaattaataaatacaatgataccaattttataatgagctattcttatggacgagctcttcaacaaagtgcgttaaaattatggtcccaagacacaaaaaatgttgaaggaactcaaaaaatttttagccaaagagcaaaaatgaattctttagctgctcagggcaaatggtctgaagaacttgagaattaat

SEQ ID NO: 278159 - DNA, 710 bp, Unknown
  Bacterial polypeptide expressing nucleotide sequence isolated from the Sargasso Sea
atctggaagtgttgtttatcctgaatatttagcttcaaaaggaattattcctggaataaaagttgatgcaggtgcccatagtctttctggctcagaagatgaaaagatcacccttggccttgatggccttgatgagagattaagcaattatagaaaattaggtgctcgatttgcaaaatggagagcagtgatcaatattacagagctaaaccctagcgattattgtatcaaagcaaatgcgcatgccttggcaagatatgcagccctatgtcagtcaaataatgttgtaccaattgttgaacctgagattttaatggatggcgatcatgatattgaagatagctttgttgtaacggaagaagttctgcatactgtttttgatgagctttatacgcaaggtgttcagtatgaggagatggttttaaagcccaatatggtcttatcaggatacggtgcaaatgatagagctggggttgatgaggttgcgtctgcaaccgttcaatgctttttaagaagcgtgcctgctgcggttcctggaattgcattcttatcagggggccaatccgatgaagacgcaactgcgcatttaaatgccatgaatcagattttgggtgataataaaccttggcatctttcattttcttatggtcgtgctcttcaacagcctgccttaaaagcatggcagggatcagatgataatatttcaaacg

SEQ ID NO: 278160 - DNA, 664 bp, Unknown
  Bacterial polypeptide expressing nucleotide sequence isolated from the Sargasso Sea
tagtgttgaaggagagttaggttgcttaggttcattagaaacagggaaaggtgaagcagaagatggtcatggatttgaaggtgaactttctactgacatgcttctgactgaccctgaagaagctgcggattttgttgccaagacaaaagttgatgcattagctattgctataggtacaagtcatggtgcttataaattcacaaggaaacctacaggagaagttcttgcaataagcagaattgctgaaattcacaaagcacttccaaatacccatcttgtaatgcatggatctagttcagttcctcaagaatggttggatatcattaacaaatatggtggtgaaattcctcaaacatatggagttcctgttgaagagattcaagagggaataagaaatggagttaggaaagtcaacatcgatactgataacagacttgctttcactgccgcggttagagaggcagcatttgctgataaagcaaactttgacccaagacatttcaacaagcctgctagaaaatacatgaagcaagtttgtcttgatagatacaagcagttctggtgcgaaggtcaagcaagtaagatcaaacaaaacagcactaattattttgctgatctttacgcaaaaggagatttagatccaaaagtaaaagctactgtttaa

SEQ ID NO: 278161 - DNA, 656 bp, Unknown
  Bacterial polypeptide expressing nucleotide sequence isolated from the Sargasso Sea
tgatgaaagatgtgcagagtatttttcattaggagctaaatttaccaagtggagagcagtaataaaacaagacggttcatttccttcagatgattgtcttaaggcaaatatggaggctttggcagagtatgcaaagatagttcaaaacaacaatatggttccaattgtcgaacctgaggttctcatggatgggtctcattcaattgaagattgttactcagcgacatctagagcgctcgaaacgttgtttaattctctgactgatcatgaagttaatatcaaaggaacaattctaaagcccaacatggttaccagcggttcaactgcaagcgagcaagcgaatatctctttagtagcagaaaaaactgtgcagtgcttacaaaacagtctttctgatgatttgcctgcagtaacttttttgtcaggtgggcagtctgatattgattcaactgcgcacctagacaagatgaacaaagtatcatctaatccttggaagttaagcttttcttatggaagagcgctccaacaagctgctcttaaagcttggagcggtaatgttgagaacgagactgttgcgcaagaagcgttttctcacagagctaaaatgaataaattagctgctttaggagaatgggaaaagtctctggaaaattaat

SEQ ID NO: 278162 - DNA, 562 bp, Unknown
  Bacterial polypeptide expressing nucleotide sequence isolated from the Sargasso Sea
atgtctaaattaaatagcatagcacttaaaatacttgagaatggaaaaggtattcttgcagctgatgaaagcactgcaactatgacaaaaagattagagtcagttgatgttcaatcaacagccgaaaaccgtttattatttagggaaacattatttagcgctactggcatgacagatcacattggaggggtgatcttatatgatgaaacaataaaacaagaaacttcaaaaaaagaaaaaatcccagaattaatttcaaaaatgggtagtgctccaggtatcaaagtagacacaggtgcaaaagttttagctaattcgccaaatgaaaaaattaccgaaggcttagatggattaagggaaagactcaaagaatacaatcaacttggtgctaaatttacaaagtggaggggtgtatacaatatatctaaagaatatccgagtaagctatcaatacaatcaaatgcgcatgctttagcaaggtattcggctttagtccaggaatgcgatatggttccaatagtcgagcctgaagtattaatggatggtgatcattctgctaaag

SEQ ID NO: 278163 - DNA, 781 bp, Unknown
  Bacterial polypeptide expressing nucleotide sequence isolated from the Sargasso Sea
actgaagataacagacagaaaatatagagaaatgctttttagatctcccgctatggcagaggctatcggcggtgtaattttatttgatgagacactgagacaaaaagcacaagatggatcatatttaagagatgtaattttaaaccatgggtcacttcctggaattaaagtagaccaaggagtaaaagagctggaagataattctaatgaaaaaatcacaactggattggatggcctaaatgaacgttgcagagaatacaatgcattgggtgctaaatttactaaatggagagcggtaatcaatattagtgatggcatgccatctacaaaatgtatcaatgaaaatatgctagctttatccgagtacgcccttatagctcaagaaaataatatggtaccaatagtagagcctgaagtcattatggatggcccgcatacaatagatcaatgctatgaagttactaagaatacattatccgtactttttgaaatgcttgataaaaaaaatataaatattagaggcaccctgttaaaacctaacatggtagtttcaggaacagaaaatagtcatcaagcaaattataaggaagttgcagaaaaaactcttgattgcctcaattcgtctgtgcctgacgaattgccaggtattgtttttctatcgggtggtcaatctgatattgatgcaacggcacacttagatgagatgaataaaattggtggttttaaatggaaactaagcttctcttatggaagagcattgcagcaagcagcattaaaagtt

SEQ ID NO: 278164 - DNA, 724 bp, Unknown
  Bacterial polypeptide expressing nucleotide sequence isolated from the Sargasso Sea
atgtctgaactaaataacattgcacttaaaattttaaaaaatggtaaaggtatattagccgccgatgaaagcacagggactatgaccaaaagattagatggtgtaaatgtgccttcaactccagaaaacagattattatttagagaaacgctatttagtgcaacaggtatgagtgaatgtataggcggtgtaatattgtatgacgaaacaataaaacaacaaacttccaaaaaaaaattagtcccagaattgattttaaatatgggctcctatccaggaataaaggtcgatacaggtgctaaagttttagcaggttcaccagatgaaaaaattactgagggtttggatggattaagagaaagattaaaagaatattataaacttggtgcaaaatttacaaaatggaggggtgtttataatatatctaaaagatatcctagtaagctttcaattcaatcaaatgcccatgcgctagcaagatactctgcgttggtccaagagtgcaatatggttccaatagtcgagccagaggtactaatggatggtaatcattcagcgaaagattgtttttcaaaaacttcagaggtgattaaaaaatgttttgaagaattaattttacacaaagttgatttgaagggaataatacttaaacctaacatgattctggctggcaataaatgtaaagataaaatttcaaatgatgaagttgcaaagttaactttgg

SEQ ID NO: 278165 - DNA, 628 bp, Unknown
  Bacterial polypeptide expressing nucleotide sequence isolated from the Sargasso Sea
tatgattgatttaagtgaagagcctcttgaagaaaacatagaaatctgtaaaacttaccttgagcgtatgagcaaaatgggtatgactctagaaatagaattaggtataacaggtggtgaagaagatggtgtagataacagtgatgtggacgaatctaaattatacacgcaaccagaagaagtagcttatgcttacgaagagttaagtaaagtaagtgaccaatttacaattgcagctgcatttggaaatgttcatggagtttataaaccaggaaatgtaaagttaactccaaaaattcttaaaaattctcaagagtatatcacaaaaaaatatggtgtagataataaccatattgattttgtattccacggtggatcaggttctactttagaagaaattagagaagctattggttacggtgttattaaaatgaatatcgatacagatatgcaatacgcatttatgtctggtattagagattatatgggcgaaaaagcagattatttaaaatctcaaattggtagtccagatggaccagattcacctaacaaaaaatactacgatccacgtgtttggttacgtaaaggtgaacaaacttttgtagagcgtcttaaaaaagcatttgaa

SEQ ID NO: 278166 - DNA, 361 bp, Unknown
  Bacterial polypeptide expressing nucleotide sequence isolated from the Sargasso Sea
aatggctttaaattattacaaaaatgagcttaaagaaaatgctcaattactagcttctaaaggaaaaggaatattagcggtagatgaatccactaaaacagtaggtaaaagactcgctggaattggggttgagaatactgaagacaataggaaggcatatagaggaatgctttttactacagaaggtcttggcaaatatataagtggagcaatcctcttcgaagaaactctttatcagaatcaccaagatggcgagtcaatggttaagaaactaaatgatttaggtattattccaggtataaaggtcgataagggcctaaatccactttcaggaggaggaaatgtagaaactttttgctct

SEQ ID NO: 278167 - DNA, 833 bp, Unknown
  Bacterial polypeptide expressing nucleotide sequence isolated from the Sargasso Sea
gcataggtggcgtaatctttatgatgagacaataaaccaaactacaagtttaggaaaatcaatccctgatttaatttactcttcaggtgcgctaccagggattaaagttgatactggtgcaaaaaatctagcaaactcttctgaagaaaaaataactgaaggtttagacggacttcgagaaagattaaaaaaatactatgaacttggtgcaagatttacaaaatggagaggggtttataatataagtaataaatatccaagcatactctcagttaatagtaatgctcacgcgttagcacgatattcagctttagttcaagaaagtaaaatggtgccaatagtcgaaccagaggtattaatggatggagatcattctgcggaaatttgcttaaaaaaaacctcagaggtaataaaaaaatgttttgatgaattaattttacataaagttgatctttcaggaattatattaaaaccaaatatgattttggctggaaacatgtctagagagcaactctctaatgaggaagtttcagaaaaaacacttgagtgtcttaaaaattcagttcctagtgaagtaccaggaattgcttttttatcaggaggtcaatcagaaatagaagctactgaaaatttaaatttaattagcaaaaataataatactaattttataatgacttactcatatggaagagcacttcaacagagtgctctaaaagtatggtctaaaaatatcaaagatatagagtcaactcaaaatatttttaatcatagagctaaaatgtgttcactggctgctaagggtaattggtcaaaagaacttgaaactaaataaa

SEQ ID NO: 278168 - DNA, 679 bp, Unknown
  Bacterial polypeptide expressing nucleotide sequence isolated from the Sargasso Sea
ttagatggtttaagagaaagattaaaagaatattatgatctcggggcaagatttactaaatggagagcagtttataaaatcagtgatcgttttcctacctcacaatctattaaatccaatgctcacgctttagcaagatatgccgccttagtgcaagaggcaaaaatggtcccaatagttgaaccggaggttttaatggatggttcacataatattgataaatgttttcaagtcacaacaaacgttctaaatgagtgttataatgaactagagactcataaagttaatttaaaaggcacggtgcttaaaccgaacatgataataccaggctcaaaatgtgaagaaaaatctagcactgaggaaatagcaaaaaaaactttagaatgtcttaaaaaaaatgttccagatagagttcctggtatagcctttttatcaggcggacaatctgagattgaggcaagtaaaaatttaaatgagatcaataaaattaatgacactaattttttaattacattttcttatggaagaggcttacaagcatcagctttaaaagaattcggcaaaaatcaaaaaaatactaaaagtattcaaaaagctttcaatcatagagcaaaaatgaatggtctatcttcaaaaggagaatggtcagaaactcttgaaaaagaatttgccgcataat

SEQ ID NO: 278169 - DNA, 877 bp, Unknown
  Bacterial polypeptide expressing nucleotide sequence isolated from the Sargasso Sea
atgtctgaattaaataacatcgcattgaaaattttatctcacggaaaaggtattctggctgctgatgaaagtactggaacaatgactaagagactcagcgctgtaaatgtggagtcaaccccagaaagtagattgctatttagagaaacacttttttcatctgaaagtatgaaaacatctataggtggtgttattttgtatgatgaaactataaaacaaaattcgagctcaaaaaaaactattccagaattaatttcatcatcaggagctgtgcctggaataaaagtagatacaggagcaaaatccctagtggattcacctgatgaaaaaattacagaaggattggatggcttaggagaaagattaaaagattactataagcttggagcaagatttactaaatggagaggcatttatattatttcaaaaaactatcctagtaaattatcaattgatgctaacgctaatgctttagctaagtactcttctatagttcaagaaaatggaatggttccaattgtagagcccgaagtgttgatggatggagatcatacagctgaagattgtttaaataaaacttcagaagtaatcaaaaaatgttttgaagagctaattcagcataaggttagtttggaaggaataattttaaaaccaaacatgatacttccaggaaataaatcaaatgaaaaaattagtaatgaaaagattgctcatttaactttaaaatgtttaaaagattctgttccaaaagaggtaccaggaatagcttttttgtcaggtggtcaaacagaaatagaagcaactgaaaatttaaatttgattaataaatttaacgatacaaattttataatgagctactcgtatgaagagccttaca

SEQ ID NO: 278170 - DNA, 555 bp, Unknown
  Bacterial polypeptide expressing nucleotide sequence isolated from the Sargasso Sea
caaatgcacatgcattggctagatatgcatctttagttcaagaaactggaatggtaccaattgtggaacctgaagttcttatggatggagctcataattcaaaaacctgcttagaaaaaacatcagaagtaattaaaaaatgttttgaagaattgattttacaaaatattgatcttaaaggggttatattaaaacccaacatgatactacctggaactacgtcagatgaaaaaattaactctgaaaaaatagccgaattaactttgaagtgtttgaatgatagtgttccaaaagaggttcctggaatagcatttttatctggtggtcaatcagaattacaagctactgaaaatttaaatacgattaatataaaaaataattctaattttaaaatgactttttcttatggaagggctcttcagcaaagtgctttaaaattttgggctaaaaaccaagatgatataaaaaaaactcaagaagtatttaatcatagagccaatatgtgtactcttgctgcaaaaggagaatggaaaaaagaacttgagaaacaataaa

SEQ ID NO: 278171 - DNA, 826 bp, Unknown
  Bacterial polypeptide expressing nucleotide sequence isolated from the Sargasso Sea
aaaggtatcctggctgcagatgaaagcactggaacaatgactaagagactaaatgccgttaaggtggaatctactccagaaaatagattgctgtttagagaaacacttttttcatctgaaagtatgaaaacctgtataggtggtgttattttatatgacgaaactataaaacaaaaatcgagctcggaaaaaaccattcctgagttaatttcatcatcaggtgctgtgcctggaataaaagtagatacgggagcaaaacctctggcggattcacctgatgaaaaaattacagaaggattagatggcttaggagaaagattgaaaaattactataagctcggagctagatttactaaatggagaggtatttatattatttcaaaaaactatcctagcaaattatcaattgatgcaaacgcaaatgctttagcgagatactcttatatagttcaagaaaatggaatggttccaattgtggaacctgaggtattgatggatggggatcactcggctgaagattgtttaaataaaacttcagaagtaataaataaatgctttgaagaactaatcaaacacaaggttaacttggaaggaataattttaaaaccaaatatgatactgccaggaaataaatcaaataataaaattggtaatgaaaaaattgctcatttaaccttgaaatgtttaaaagaatcagttccaaaagaagttcctggaatagcttttttatcaggcggtcaaacagaaatagaagcaactgaaaacttaaatttaattaataaattaaatgataaaaattttataatgagctattcttttggaagag

SEQ ID NO: 278172 - DNA, 478 bp, Unknown
  Bacterial polypeptide expressing nucleotide sequence isolated from the Sargasso Sea
atgagcatcgaactgctggctgaaaccgcccaggccatggtcgccccgggcaagggcatcatcgccatcgacgaatccaccggcacgatcgccaagcgcttcgccagcgtcggcatcgagaacaccgaagagaaccgccgtgcctaccgcgaactgctgctgaccacgccgaagctcaacgaacatatttccggcgcgatcctgtacgacgaaaccatccgccagagcacccgcgacggcgtgccgttcgccaagtacatggccgaccacggcatgatcccgggcatcaaggtcgacaagggcgcgcacccgctggccggctgcccgggcgagctggtcaccgaaggcctggacggcctgcgcgagcgcctgcaggagtactacaagctcggcgcccgcttcgccaagtggcgcgcggtcatcaacatcggcgagagcatcccgtcgggcacctgcatcgagtccaacgcgcacgcgc

SEQ ID NO: 278173 - DNA, 829 bp, Unknown
  Bacterial polypeptide expressing nucleotide sequence isolated from the Sargasso Sea
tatgcatcaagatcacggcgcttcgcccgcggtgtgccagcgctcgattcaactaggcttcagctcggtgatgatggatgggtcgttgttggaggatcaaaaaacgcccgcagaatacgattacaacgtcgacgtaacccgcagggtcgtggacatggcccacgcttgcggcgtctcggttgaaggcgagctgggctgtctcgggtcattggaatccggcattgctggtgaagaagatggcgtcggcgcggaaggtgttttatccatggagcaaatgcttacggatccggagcaagccgcagattttgtccagaaaaccggagtagacgctctagcgattgcgatcggtacttcacacggcgcgtacaagttcagccgaccgcccacaggggatattcttgcaatagagcaggtgaaagccattcatagccgcttacccaatacgcaccttgtaatgcacggcagctcgtcggtgccccaggaattgattgcagaaattaatcaatacggtggcgaaattccggaaacctatggcgtgccggttgcagaaatacagcagggcatcaaacatggggtgcgcaaagtaaatatcgatacagacctgcgtcttgcgtccacagcggcgattcgtaaatttctggcgagtaacaaatccgagtttgatccgcgtaaatatctaacggcctccacagaggctatgaaggcagtggtcattgaccgctataaggcgttcggtacagagggccaggcgcaaaagctcaggccttattccctcgacgctatgcacgatcaatattcatctggggctctaaatcaggtgattcaataa

SEQ ID NO: 278174 - DNA, 823 bp, Unknown
  Bacterial polypeptide expressing nucleotide sequence isolated from the Sargasso Sea
ggcgtaatattgtatgatgaaacaataaaacaacaaacttccaaaaaaaatttgattccagaattaatttttaaaatgggctcttttccaggaattaaagtcgacacgggtgctaaagttttagcaggatctccaaatgaaaagattactgaaggcttagatggattaagagaaagattaaaagagtattataaacttggtgcaaaattcacaaaatggagaggtgtttacaatatatctaaaaatcatcctagcaaactctctatacaatcaaatgctcatgcacttgctagatattctgctttagttcaagaatgtaatatggttccaatagtcgagccagaggtattaatggacggcgatcattcagctaaagattgttattcaaaaacttctgaagttattaaaaaatgttttgaggaacttattttacacaaagtcgatttgactggaataatacttaaaccaaacatgattttagctggcagtgagtgtaaagataagataacaaatgaggaagttgcaaaattaactttagagtgtctaagaaattctgttccttcagaaattcctggagtagcatttttatccggaggtcaatctgaaatagaagcaacagaaaacttgaatctaataaataaaaataataatactaattttattatgagtttttcgtatggtagagctctgcaacaaagtgccttaaaattttggtcaaaagacatacaaaatattgagggaacacaaaagatttttaaccaccgagctaaaatgaatacattagcagctcaaggaaaatggtcaaaaaatcttgaaaattaat

SEQ ID NO: 278175 - DNA, 775 bp, Unknown
  Bacterial polypeptide expressing nucleotide sequence isolated from the Sargasso Sea
gaaagtaataattcatactgatcattgttcaagaaagaatcttccatggatagatggtttactaagacatggaagtgatttttacaaaaaaaatggatatccactatttagctcacatatgattgatctctctgatgaatcaattgaagataatataaatacatgtaaagaatacctaaaaaaattaaccgatcttgagatgactttagaaatagaactcggaataactggaggtgaagaagatggtgtggataatactggtattgattctacaaaactttatactcaacctgaggaagtagcctatgcatattcagaattggtttcaataagtgacaattttataatcgctgctgcatttggaaatgttcatggagtatataagcctgggaatgttagtttaacgcccaagattttaaaaaattctcaggagtatatatcaaaacaatttcaaactcctaaaaattcaataaattttgtttttcatggaggttcaggatcctcattagaagaaattcgagaagctatagactatggtgttattaaaatgaatatagataccgatcttcagtatgcatttacagaaggtgtaagagactatattattaaaaagaaagaatatatttcaactcaaattggtaatcctgaaggtgatgatataccaaacaaaaaattttatgatcctagagtatggttaagagaaggggaagatacttttaagaatagattaaaaaaggcttttgaagatttaaataatatagatacattagattaa

SEQ ID NO: 278176 - DNA, 547 bp, Unknown
  Bacterial polypeptide expressing nucleotide sequence isolated from the Sargasso Sea
ggtgaagaggatggagttgacaatacaaatgttgatagttctagactctatacacaaccagaagaagtagcatatgcatatgaagagttaatgaaagtttctcctaggtttacaatagctgcagcatttggcaatgttcatggagtctacagaccaggaaatgttcaattaacgcctgttatattaaaaaactctcaagaatatattcagaaaaaatacaacacaaatcaaaacccaattgattttgtttttcatggtggttcaggttcaagcatagaagaaataagagaagcgattggatatggagttatcaaaatgaatattgacacagaccttcaatttgcatatacagaaggagtaagagattatgtgagttcaaaaattgattatcttggttctcaaataggaaacccagaaggtgctgatgagcccaataaaaaatattatgacccaagaaaatggattagagaaggagaatttacatttcaaaaaagattagaaaaagcattttctgacttaaataacgttaattcactatctaaataaa

SEQ ID NO: 278177 - DNA, 640 bp, Unknown
  Bacterial polypeptide expressing nucleotide sequence isolated from the Sargasso Sea
aatgtcagaactaaataaaatcgcactaaaaataatttctaacggtaaaggtatacttgctgcagatgaaagtaatggtactatgacgaagagacttaaagccgtaaatgtaaattcaactcctgaaaatagactattgtttagggaaattcttttctcatctgaatgcatgaaagattgtattggtggtgtcattctttatgatgaaacaataaaccaaactacaagttttggaaattcaatccctgacctaatttcagcctcaggtgctgtgccaggaattaaagtcgatacaggtgctaaaaatttagcaaattctcctgaagaaaaaattactgagggtttagatggcctcagagatagattaaaaaaatattatgaaattggagcaagatttacaaaatggaggggggtttactctattagtaataaatatccaaccaagctagcaataaatagtaatgcccacgcacttgcaagatactcagctctagtacaagaaagtggtatggttccaatagtagagcctgaggtattaatggatggagcacattctgcagatgtttgttttagcaagacatctgaggttataagaaaatgttttgaagaattgatcttacataaagttgatctttcagga

SEQ ID NO: 278178 - DNA, 847 bp, Unknown
  Bacterial polypeptide expressing nucleotide sequence isolated from the Sargasso Sea
aatagaattttgtttagagaaacattgttttcctcaaaaggaatgacggaatatataggtggtgtaatactttttgatgaaactataaatcaaaaagctaatgacggaaaagaagtttccaatctcctttccgatatgggatctttaactggtataaaagttgatactggagcaaaacaattggctggaagtcctaaggaaaagattactgaagggcttgatggtttaagagaaaggctaaaagaatattataaaattggagctagatttacaaaatggagaggtgtttataacataaccaaagattaccctagcaaactatcaattcattctaattcccatgtattggcaagatatgcagcattagttcaagaatgtaatatggttccaattgttgaacctgaggttttaatggatggagatcactctgctgaagaatgttttaacaaaacctcttcagtaattaaaaaatgttttgaagatttaattttgcacaaggtagatttaacagggatgattttaaaaccaaacatgattttagcagggactgagtcaaataatcagatatctaatgaagaaacagctaaacttacaataaaatgtttaaaagaatctgtaccaagtgaagtgcctggaattgcctttttatcaggaggacaatctgaagtacaagctactgaaaacttaaatttaataaataaatttaatgattcaggttttataatgtcctactcctacggaagagcattacaacaaagtgcattaaaacattggtcaaaagatataaaagacattaaaggaactcaaaaggtttttgatcatagagcaaaaatgtgctctttagctg

SEQ ID NO: 278179 - DNA, 532 bp, Unknown
  Bacterial polypeptide expressing nucleotide sequence isolated from the Sargasso Sea
gatggcgctaataagcttaagacaattactggatcacgcggctgagaatgactacggcgttcccgcatttaatgtcaataatttggagcaggtccgggctattatggagggtgctgcgtcagtaaacagcccagttattttgcaagcctctgcgggcgctcgaaaatatgctggatcgaacttcctgaagcatttaattcaaggagctatcgaagaatttccccacataccaattgtaatgcatcaagatcatggagtttcgcctgcagtatgtcagcgttcaattcagcttggtttttcctcagttatgatggatggttcccttgcagaggacggaaagacgccaaccgattttgactacaatgttcgcgtcacaaaaacgacagttgaaatggctcatgcatgcggagtctcagtggaaggcgagattggctgcttaggctcgctggaaacaggaatggcaggagaagaagacgggataggagcagagggaaagttatcgatggagcaattactcactgatcctgaggag

SEQ ID NO: 278180 - DNA, 902 bp, Unknown
  Bacterial polypeptide expressing nucleotide sequence isolated from the Sargasso Sea
attgtttagggaaattcttttttcatctgaatgcatgaaaaattgtattggaggagttattctttatgatgaaacaataaaccaaactacaagttttggaaaatcagttcctgacctaatttcagcctcaggcgccgtgcctggaattaaagttgatacaggtgctaaagaattagcaaactctcctgaagaaaaaattactgagggtttagatggccttagagatagattgaaaagatattatgaacttggagcgagatttacaaaatggaggggagtttactgtattggtaataaatatccaactaagctagcaataactagtaatgctcatgcacttgcgagatactcggctttagttcaagaaagtggtatggttccaatagtagaacctgaagtattgatggatggaaatcattctgcagaagtttgcttaagtaagacttcagaggttataaaaaaatgttttgatgaattaattttacataaagtagatctttcaggaattattttaaagccaaatatgatattatctggcaatcggtcaaaagaaaaaatatctggtgaagaggtttcatataagacacttgagtgtcttaaaaattcagttccaagtgatgtgcctgggattgcctttttatcaggaggtcaatccgaaatagaagctacagaaaatttaaatttaataaataaaaataataataccaattttattatgacatattcatatgggagagctcttcagcaaagtgctcttaaagtatggtctaaaaatataaaagaaatagaggaaacgcaaaaaatttttaatcacagagctaaaatgtgtacattggctgctcatggtaaatgggtgagtgaacttgagagtaataaaaagaaatttatttatcttatttctc

SEQ ID NO: 278181 - DNA, 646 bp, Unknown
  Bacterial polypeptide expressing nucleotide sequence isolated from the Sargasso Sea
atgtcagaactcaataaaattgcactaaaaattttatccagtggaaaaggtattcttgctgcagacgaaagcaccgccactatgacaaaaagacttgagtccgtaaaagttccctcaaatgaacaaaataggcttctttttagaaaaactcttttttcatcagaaagtatgaagagctgtataggtggcgtaatattgtatgatgaaacaataaaacaaaatagtgagtctaaatcaattccagaaataatagttaataatggggcaatcccgggaattaaagttgatacaggtgcaaaacctttggcgggatcagttgaagaaaaaattactgagggtttagatggattaagagaaagattaaaagagtattataaacttggagcaagatttactaagtggaggggagtttactcaatttcaaaaaaaaatccaagtaagctatgtatatattcaaatgctcatgcactagctcggtattcctcattagttcaagaatgtggaatggtgccaattgttgaacctgaattactaatggatggaaatcattctgcagccttatgttttaataaaacttctgaaattatcaaaaaatgttttgaggaacttataattcataaggtagatttgaaaggagttatttgaa

SEQ ID NO: 278182 - DNA, 722 bp, Unknown
  Bacterial polypeptide expressing nucleotide sequence isolated from the Sargasso Sea
ggcatcatatgagtataatcttgatataccccgtcgtgtcactgaaatggcacaccatgccggtgtctcagttgagggtgaactcggtgttcttggctcgcttgaaactggcgggggtgaacaggaagacgggcacggcgctacgggcaagctgtccgaggaccagctattgacggaccctgatcaggcagttgacttcgttaaagataccaaggttgacgcgttggccattgcgatggggacaagccatggcgcctataaattcacgcggaagcctgacggcgaaatccttgccatgaatgtggtagaagaaattaatcgccgcttgccaaatatccatctcgtaatgcatggatcatcaagcgtaccacaagaattgcaggatgttttcaatgcacatggtggagaaatgccccaaacatggggcgtgccgttagaagaaatcgagcgcggaattaaacatggagtgcggaaggtcaatattgacactgattgccgtttagcgatgcttggtgtcattcgcaaaattgccaatgaaaataaaagcgaattcgacccgcggaaattcctaaaaccagcaatggaagcaatggaggcgttatgtgcggaccggtttgaacggtttggaactgccggtaatgcctctcggattaagcctatttcattatcggcaatggcagggcggtatgccagcggtgcctttaacccttcaattaattagt

SEQ ID NO: 278183 - DNA, 589 bp, Unknown
  Bacterial polypeptide expressing nucleotide sequence isolated from the Sargasso Sea
aatgacagaacttaaccaaatagctttaaaaattttattagatggtaagggtattttagcagctgatgaaagcacgggaacaatgactaaaagattggagtcagtaaaagttaaatcaaatgaagcgaatagacttttatttagaaaaacacttttttcagcagaaagaatgagggattgtatcggtggagtaattttatatgatgaaacgattaaacagcaaagtgattccaaaacaattccagaattagttaatgaaaatggtgcaataccagggataaaagtagatactggagcaaaagctttagcaacatcacctgaggaaaaaattactgaaggtcttgatgggttaagagaaagattgaaagaatattataaactaggtgcaagatttacaaaatggagaggtgtttatataatttcagataaatatccaactaaactatccatttattcaaatgcgcatgctctagctagatacgccgctttagttcaagaatgtggaatggttccaattgtagaacctgaagtgttaatggatgggagtcattcagccatgatttgttataataaaacttcagaaataata

SEQ ID NO: 278184 - DNA, 616 bp, Unknown
  Bacterial polypeptide expressing nucleotide sequence isolated from the Sargasso Sea
atgtccgagttaaataaaattgcattaaaaattgtttcttctggtaaaggaatattagcagcagatgagagtactgccacaatgacaaaaagactggaaagtgtaaaagttaaatctaacgaagaaaatagacttaaatttagaggtacattatttttatcaagtggcatgaaagaatgtattggtggagtaattctttatgatgaaactattaagcaaaaatataaagataaatttattccggaattaatttctgaaagtggcactataacaggaattaaagttgatactggcgtaaaaaaactagcaaaatcagataatgaaaaaattactgaaggattagatggacttagagacagattaaaagaatactaccaactaggggcaagatttacaaaatggagagctgtttatgtaatttcagaaagtcatcctactaaattagcaataaataccaatgctcatgctctcgcaagatatgcatcattagttcaagaatcaggaatggtaccaatagtagagcctgaagttctcatggatggtaatcattcagccgaagactgttttaataaaacttcagaagtaattaaaaaatgttttgatgagttaatttttc

SEQ ID NO: 278185 - DNA, 775 bp, Unknown
  Bacterial polypeptide expressing nucleotide sequence isolated from the Sargasso Sea
ttgagcaaaatatcagggaatagcggattcattgcagcacttgaccagagcggagggagctcacccaaagcactgcgactttatggaatcacagagtcagagtattctaacgaagacgaaatgtttgaaaagattcatcaaatgcgtacccgtataataacttctaaaagttttacgggtgaccgaatattgggtgccatactatttgagaaaaccatgaacggagaaatttctgggatggatactgcacattacttatggaataaaaagcaggttgtgccttttctcaaggtagacaaaggactggtagatgtaaacgacggggtgcaattaatgaagccgaatcccggactggaaaaactgcttgatcaggctgtaaataaagatatttttggcactaagatgcgttcagttatcaaagatgccaatgaaaaaggggtggcagctgtcgtggaacagcagtttgagactgccaaaattataattcataaaaaccttgtaccaatcatagaacctgaagttgatattcattgtgaaaataaatcagaagctgaacaaatgctgtttgaaaatctgaagaatcaaattgagcagttgacctcagagcagaaaattctactgaaattaaccattccaaacgaggtcaatctatatagacctttcattaatcacccaaatgtactgcgagtttttgctctgtctggaggatacagcagagaggagtccaacaaacttctagcattgaacaaccagtatgcttgcaagcttcagcaga

SEQ ID NO: 278186 - DNA, 475 bp, Unknown
  Bacterial polypeptide expressing nucleotide sequence isolated from the Sargasso Sea
atgaatttggaagaaatagctagaaaaatgtgtgctaaaggcaaagggatactagcggctgacgaaagtacagggacaatagcaaaaagattcaaaagcattaatgtcgataatacagaaaaaaatagattaatttttagacaaacactttttagttcaaaagctatgaaaaattatattggaggagtaattctttttgatgaaacaattaaacaaaaaactacattaggaccatctattcctgaacttattttaaaaaatgatgctattccaggaattaaagttgataagggagctaaacctcttgctggttcaaatgatgaaacagtaacagaaggtctagatgggctaagagaaagattaaaggaatattacgaactaggagcaagatttacaaaatggagagcggtttataaaattggaaacaaatttccttcatcacaatgcataaaatcaaatgcccatgctttagcta

SEQ ID NO: 278187 - DNA, 384 bp, Unknown
  Bacterial polypeptide expressing nucleotide sequence isolated from the Sargasso Sea
tatgaccttgaatgaaatagcaaaaaaaatgtgtgcaaaaggtaagggtattttggcagctgacgaaagcaccggcaccatagcaaaaagatttaaaagtattaatgttgaaaacatagaaaaaaataggttaaattttaggcaaactctttttaattcaagtgcaatgaaagattatataggtggagtaattttatttgatgagactataaggcaaaaaactactttgggcccctctataccagaattaatttcaaaacatggtgctatcccaggaataaaagttgataaaggtgcaaaacttttagctgggtctaatgatgaaacagttactgaaggtttagatggattgcgtgaaagattaaaagagtattatgattttag

SEQ ID NO: 278188 - DNA, 760 bp, Unknown
  Bacterial polypeptide expressing nucleotide sequence isolated from the Sargasso Sea
aatgaattttaatagtttaagtgagacagcaagttatatagtttcggaaggaaaaggaatattagctgcagatgaaagcaatcctacctgtactaaacgatttgattcaataggagtagagtctaccgaggataatagaagagactatagagagttactttttagatctgaaggcatgaaaggaaatataggaggagtaatattatttgacgaaactatacgtcagaacgccgctgatggtacttctttggtagatgttataactagccaaggttccttggcaggcatcaaggttgataaaggtttgcaacaaataggtgattcagaggagagtcttactcagggtttagaaggccttgatgaaagattaaaagaatattatgaacttggcgctaaatttactaagtggagagcagttattaacattggagaagacatgccctcttctgaagctatttcagcaaatatggaagcccttgctgattacgcaaaaatcgttcaaaacaataatatggttccaatggttgagccagaagtattgatggatggaaatcattcaatagatcattgttttgaagcaacttcccgttgcctagatgccttattcacttaccttttagaaaaaggtgttgacataaaaggaactattttgaagcccaatatggttacatctggatctaattattctgatcaagccgatgttgaagaggtagcccgaaagactattgattgccttaaggcttatgtgcttgatgattta

SEQ ID NO: 278189 - DNA, 493 bp, Unknown
  Bacterial polypeptide expressing nucleotide sequence isolated from the Sargasso Sea
atgtcgttaaatactttagaagaaatagctgagtatattgtctcaaatgggaaaggaatcttggcagcagacgaaagcaatcccacttgtggcaagcgttttgattctattggagttgagtctacagaaactaataggcgagattacagggaaatgttatttagagctaccggcatgaaagacaatattggaggcgtaatcttatttgatgagacgattagacaaaacgctgaagatggaactcctcttgtggatttaattaagaatcagggagcattgcctggcattaaggttgataaaggcttggctccattagagtcttctccagatgaaacagttactcaaggcctggatggactggacgaacgttgcaaagaatatgtttcacttggagcaaaatttaccaagtggagagcagtgataaagatatctgacacaatcccttctgatgaatgcattgaggctaatatgcgagcatggcaaagtacgcaaa

SEQ ID NO: 278190 - DNA, 649 bp, Unknown
  Bacterial polypeptide expressing nucleotide sequence isolated from the Sargasso Sea
atgtcagaactaaataaaattgctctaaaaataatttctaacggtaaaggtatacttgctgcagatgaaagcaatggtactatgactaagagacttaaagcggtaaatgtaaattctacaccagaaaatagactattatttagagaaattcttttcacatctgagtccatgcaagattgtattggtggagttattctttacgatgaaacaataaaccaaactacaagttctggaaaatcaatccctgaactaatttcagcctcaggtgccgtgccaggaattaaagttgatacaggtgctaaagaattagcaaactctcctgaagaaaaaattactgagggtttagatggtctcagagatagattgaaaaaatattatgaacttggagcaagatttacaaaatggaggggggtttactctattagtaataaatatccaagtatgctagcaattaacagtaatgctcatgcacttgcaagatactcagctttagtacaagaaagtggtatggtcccaatagtggagcctgaagtattaatggatggagcgcattctgcagatgtttgtttaagtaagacatcagaagttataagtaaatgttttgaagaattaatcttacataaagttgatctttcaggaattattttaa

SEQ ID NO: 278191 - DNA, 755 bp, Unknown
  Bacterial polypeptide expressing nucleotide sequence isolated from the Sargasso Sea
catggcactgtctggttactcctctgagctgatcgcaacagctcaatctctcgccacccctggcaaaggaattctggctgttgacgagtccaccaaaaccattggtaagcgacttggcaccatcggggttgagaacaccgaggccaatcgccaggcttaccgagggatgctcttcacgacagccggtctcggagagttcatcagcggtgcgatcctctacgaggaaaccctctttcagaaccatgcagacggtgagtcgatggtcaacaagctcggcaagctgggaatcatccctggaatcaaggtcgataagggattgagacctttaggaggagctggctctgtcgaaaccctctgcacaggcctcgacggattggtggagcgcgcctccgattactacgcacagggggctcgctttgccaaatggcgggctgttcttcagatcacatccgacggctgcccttcgcccctttcggtccgcgaaaacgcttgggggctggcccgttacgcccgttctgtccaggaatctggtctggtgccgatcattgagcctgagatcctgatggatggtgatcacaccattgaaaccactgcacgcattcaggagcatgtaatccaggaggtttatcacgcgtgtcatgcaaacggtgtcctgcttgaaggcaccttgctgaagccctcaatgactgtgcaggctgctgagtgtgcggagaaggtcgatccggccaaggttgctgcaatgaccgttcgtactc

SEQ ID NO: 278192 - DNA, 336 bp, Unknown
  Bacterial polypeptide expressing nucleotide sequence isolated from the Sargasso Sea
aatgggaataataactttaagacaattattagatcatgcagcagaaaagggttatggagttccagcatttaatattaataatatggaacagggtttagcgatcttaaaggcggcatatgagactgactccccagtaatcatgcaagcaagtaaaggcgctagggcttacgctggagacattatgttgtcgcatatcgtaatagcactttcaaaaatgtatccctcgattccaatatgtatgcatcaagatcatggtaataatgaggcaacatgcatgtcagcaattgggcatggatttacttcagtgatgatggatgggtcactcgagagtgatca

SEQ ID NO: 278193 - DNA, 738 bp, Unknown
  Bacterial polypeptide expressing nucleotide sequence isolated from the Sargasso Sea
aagatgcgaaaacacccgcatcctatgattataacatcgaagttacggcgaaggtaaccgagatggcgcacctagtaggagtctccgttgaaggtgagttgggttgtctgggctctctagagaccggcatgggcgataaagaagacgggcatggttttgaaggctcactcgacaaggacatgctggttaccgatccggacgaggccgcagattttgtcaaaaagactaagtgcgacgcgctggctgttgccattggcacgtcgcatggggcctataaattcacccgcaagcccaccggtgacattctagctatggacgtagtaaaggcgattcacgccaagctcccggacacacatttggtaatgcatggatcgagctcagtgccgcagaacctacaggacatgatcaacgaatttggtggcgagatgccgcagacctatggtgtgccggtggaagaaattgaaacaggcattaaaaacggcgtgcgcaaggttaatatcgacactgataatcgtatggccatcaccggtgccatccgcaaggtcctaactcagaagaaggcagagtttgaccctcgcgcctacttaaagcccgcccttgcggctatggaagaggtctgcgttgatcggttcgagcgtttcaactgctctggacaggcatctaggatcaaggccattccactttctgacatggctgcgcgttacgccgatgggtcgctggatccaacggtccactgaa

SEQ ID NO: 278194 - DNA, 505 bp, Unknown
  Bacterial polypeptide expressing nucleotide sequence isolated from the Sargasso Sea
tatggttccaatagtagagccagaagtattaatggatggtgatcattcagctgaaaattgctctgaaaaaacttatttagtaattaaaaaatgttttgatgagttgatacaacataaggttgatctaacaggaataattttaaagccaaacatgatcttagcaggtaataaatctaataataaaatttctaatgaagaagtttcatctaaaacacttgagtgtctaaaaaaatctgttccaagagaagtgccaggaattgcttttttatctggaggtcaatctgaaattgaggcaacagaaaatttaaacttaattaataaaaataatgatactaattttataatgacctactcatatggcagagctcttcagcaaagtgctcttaaattttggtcaaaagacattaaaaatattaaagggactcaagatatttttaatcatagagctaaaatgtgttctttagctgctaaagggaaatggtctaaagaacttgaaaataaataa

SEQ ID NO: 278195 - DNA, 417 bp, Unknown
  Bacterial polypeptide expressing nucleotide sequence isolated from the Sargasso Sea
tcaaggaaatccacaagcgcatccccaacacccacctggtgatgcacggctcttcctccgtgccgcaggaatggctgaaggtgatcaacgaattcggcggcgacatcaaggaaacctacggtgtgccggtcgaggaaatcgtcgaaggcatcaagcacggcgtgcgcaaggtcaatatcgataccgacctgcgtctggcctctaccggtgccattcgccgcatgatggccgagcatccgagcgagttcgatccgcgcaagttcttcgccaagaccatcgtcgccatgcgtgacatctgcatcgcccgctacgaagccttcggcaccgctggcaacgcctccaagatcaagccgatctccctggaaggcatgtaccagcgctatgccagcggtgagctgaacgccaaggtcaactgat

SEQ ID NO: 278196 - DNA, 712 bp, Unknown
  Bacterial polypeptide expressing nucleotide sequence isolated from the Sargasso Sea
atgtctgaattaaataacattgctttaaaaataattggaaaaggaaaaggaattctagctgctgatgaaagcactggaacaatgaccaaaagacttcaaagcgtgagcgtagaatctaatgcagaaaatagattaaaatttagacatgcgctcttttcttccgaaagtatgacaacatgcataggaggcgtaattctatatgacgaaacaattaaacaagaattcaattctaaaaaaattcctaaaataatttctgataaaggtgccgtgccaggaattaaagtagatactggagcaaaaaatttagcaaactcttctgaagaaaaaattactgaagggctagacggtttaagagacaggttaaaagaatattataaacttggcgctagattcacaaagtggagaggtgtatacataatttcaaataattacccaagtaaaattgcaatttcaacgaatgcgcacgcattggctagatattctgctttggtgcaagaagctggcatggttcctatagtagagccagaagttttaatggatggcaatcattctgcagaaatttgtttaacaaaaacttcagaagtaattaaaaaatgttttgaagaattaatattacaaaaagtagatttaaaaggagtaatattaaaaccaaacatgatattgccaggatcaaaatataatcaaaaaatatcaagtgatgaaattgctgcgc

SEQ ID NO: 278197 - DNA, 649 bp, Unknown
  Bacterial polypeptide expressing nucleotide sequence isolated from the Sargasso Sea
atgtctgaacttaatagaattgcacttaaaataatttctaatggcaaaggtatccttgcggcagatgaaagcaatggaacaatgacaaaaagacttgatgcagtaaatgtaccttctacaccagaaaatagacttttatttagagaaacactcttttcttcagagagcatgcaagaatgtataggtggtgtaattctttacgatgaaacaataaaccaaaaatcaagtcttggaaaaccaataccagatttgatttcatcatcaggtgctgtgcccggaattaaagttgatactggtgcaaaagatttagcaaattcttacgatgaaaaaattacagaaggcctagatggacttagagaaagattaaaaaaatattatgagcttggtgcaagatttacaaaatggagagcagtttacaatattagtggtaaacttccaagtaagttggcagttcacagcaatgctcatgcacttgcaagatattcggctctagttcaagagagtaaaatggttccaatagtagaacctgaggtattaatggatggagatcattctgctgaactttgtttaaataaaacatcagaagttattaaaaaatgttttgaagcaataatattacataaagttgatctttctggaattatttgaa

SEQ ID NO: 278198 - DNA, 727 bp, Unknown
  Bacterial polypeptide expressing nucleotide sequence isolated from the Sargasso Sea
gacccgaattatcacaatgccggctttctcaggtgatcgggtcctaggcgcaattctcttcgaaggcacaatggacagggacgtccaggggcttccaacaggtacctatctttgggctacgaaacagatcgtcccgttccttaagatcgataaggggctagctcccgtcgaaaacggcgttcaactgatgaaatctatcctaggtctagaattgaccttggaacgagcccgtgcaatgggcatcttcggtacaaaaatgcgctcggttgtaaaggaagcgaataccgaaggaattcagaaaatcattgagcagcaactcgaagtcggaaagcaggtcgtcagacacggtctgatcccaattctcgagcctgaggtggacatccactgcccccaaaagggtgaagctgaaaaaatcctgcttgatagtcttatgttgggactcgactctcttgtcgaaaatgagaaggtgatgcttaagctcacccttccggaggtcaacggcttctacacaccctgcatcgagcatcctaacgtgctcaaagtggttgcactttctggtggatactcaagggatgaggcaagtaggcggctggcgcaccagccaaagatgatcgccagcttctcacgcgcgctagtcgaaggacttagcgcacaacagtcggacgaggaattcaatacagggttagacgcatcaattcaaagcatttatgatgcatcgatatcctag

SEQ ID NO: 278199 - DNA, 775 bp, Unknown
  Bacterial polypeptide expressing nucleotide sequence isolated from the Sargasso Sea
actgctttttagagagactctattttcatcagaaagtatgaaagaatacataggtggtgttattctttatgatgaaactataaatcaaactacgagttttggaaaatctatacctgatttaatttcttcttcaggagcattacctggaattaaggttgatacaggtacaaaagatttagcaaactcttcagaggaaaaaataactgaaggtttagatggactaaaagacagattaaaaaaatattatgaacttggagcaagatttacaaagtggagaggtgtttatattataagtaacaaatatccaagcaaattagcaattaagagtaatgcaaatgccttagcgcgttattcggctttggtgcaagaaagcggaatggttccaatagtagaacctgaagtgttaatggatggcgatcattctgctgaattatgtctaaataaaacatcagaagttattaataaatgctttgaagaactaatacttcataaagttgatctttcaggaattattttaaaaccaaatatgatactagctggcaataaatcaaaatcaaaaatatctaatgaggaggtttcgcagaaaacacttctgtgtcttaaaaactcagtcccaaatgaagtacctggtattgcttttttatctggaggtcaatcagaaatagaggctacagaaaatttaaatttgataaataaaaataataatactaagttcattatgactttttcatatggaagagctctccaacaaagtgctcttaaaaatatggtctaa

SEQ ID NO: 278200 - DNA, 690 bp, Unknown
  Bacterial polypeptide expressing nucleotide sequence isolated from the Sargasso Sea
cttgaaaaataacttcatttttggaaaaaaaaatcaacaaatatttaagcttgcaaaagaaaagaaatttgctcttcctgctgtaaatgtatctggaacaaatacaataaactctgtattagaaactgcatctgaaatcaacagccctgttataattcagttttctaatggtggatcacaatttattgcaggaaaggggatgcctaataaaggttttaattcatcaatttcagggtcaatagcaggagcataccatattcataagactattaatgagtataatgctaaggtaataattcatacagatcattgttcaaaaaaactgcttccatggatagacggtcttatagattatggaaaagattactacagaaagaataaatatccattgttttcatcacatatgattgatctttcagaagaacctattgaagagaatatttctatttgtaaggaatatctaaaaaaattaactgatctagaaatgacattagaaattgaacttggagttacagggggtgaagaagatggtgttgacaatactgatattgattcatcaaagttatacactcagccagaagaagttgcgtatgcatattctgagcttatctctgtaagtgacagatttatgattgctgcagcatttggtaatgtccacggagtatataagccaggaaatgtcaagcttac

SEQ ID NO: 278201 - DNA, 706 bp, Unknown
  Bacterial polypeptide expressing nucleotide sequence isolated from the Sargasso Sea
ttagcaaatgcttccgaagaaaaaattactgaaggtttagataatctaagggacagattaaaaaagtattatgagattggagcaagatttacaaaatggagaggtgtttactctataggtgaaaaatatccaagcaagctagcaataaattgtaatgctcatgcacttgctagatattctgctcttgttcaagaaaatggaatggtgcctatagtagagcctgaattattaatggatggaaatcactctgcagatgtttgtttaagcaaaacatcagaagtaattaaaaaatgttttgaggaattaattctacataaaattgatttatcaggaatcattttgaaaccaaatatgatattacctggaaatgactcaaaagataaaattactggagaggaaatttcgattaaaacaattgaatgtcttaaaaattcagtgccaagggaagttccaggaatagcctttctatcaggaggacaatctgaattggaggcaactgagaatttaaatttaataaataaaaataatgatactaatttcataatgacatactcatttggtagagccttgcaacaaagtgcactgagagtttggtcaaaaaatacaaaggatatagaaggaactcaaagaacttttaatcatagagcaaaaatgtgtaccttagctgctcaaggaaaatggatgagtgaatttgaaaataaataaa

SEQ ID NO: 278202 - DNA, 845 bp, Unknown
  Bacterial polypeptide expressing nucleotide sequence isolated from the Sargasso Sea
aagtatgactgaatatatcggaggagtaattttgtatgacgaaacgataaaacaagtaacttcaaaaaaaaacaaaattcctgaattaattttagaaatgggcagtgtcccgggtataaaagttgatacaggtgcaaaagttttagctggttcacctaatgaaaaaattactgaaggtttagatgggttaagggagagattaaaagaatactattatttaggcgctaggtttacaaaatggagaggcgtatataatatatctaaagaatacccaagcaaactctcaatacaatccaatgcacatgcattagctagatattctgcattagtccaagaatgtaatatggtgccgatagttgaacctgaggtgttaatggatggtaaccattcggtacaagagtgctttaacaaaacttctgaggtaataaaaaaatgttttgaggaacttatcttacataagattgatttgaaaggagtaatattaaagcctaatatgattttacctggtaatgaatgtaaagataaaatatcaaatgaagaagttgcgaaattaactcttaagtgtttaaaaaactccgttccatcagaagtaccagggatagcatttttatctggtggtcaatcagaaatagaggcaactgaaaatctaaatttaattaataaatataatgatactgactttataatgagttattcctttggacgtgctcttcagcaaagcgcattaaaattttggtcacaagatataagaaatattgaaggaactcaaaaaatttttaaccagagagcaaaaatgaatacttttgctgctcagggtaaatggtctaaagaacttgagaattaac

SEQ ID NO: 278203 - DNA, 472 bp, Unknown
  Bacterial polypeptide expressing nucleotide sequence isolated from the Sargasso Sea
atgacaagaactgcacaagcggaaaaaatgacttttggccctggtttcgttgccgcattagatcaaagcggcggttctactcccaaagccctaagtttgtacggcatagatgaaaatgcctacaataatgacgatgaaatgtttaacttaattcaccaaatgaggtgcaggattatgcagtcgccagcattcaagggagataaagtaatcggcgctatcctttttgaaaacacaatggatcgggaagtagcgggcaaggcggcagctgactttttatggggtgaacgcggcgtcgttccatttttaaaggttgataagggtttggcggatgagggcaatggcgttcaattgatgaaaccgatgccggaacttacgagtttgcttgaaagagcaaaggcggcgggtatctttggcacaaaaatgcgctccgtaataaatgaggcgaataataaaggtatcgaagaaatgcaac

SEQ ID NO: 278204 - DNA, 769 bp, Unknown
  Bacterial polypeptide expressing nucleotide sequence isolated from the Sargasso Sea
atgtctgaattaaacaatatagctttaaaaattttagagaatggaaagggtattttagcagctgacgaaagtacaggcacaatgacaaaaagattagaaggtgtaaacgtttcttccactcctgaaaatagattgttatttagagaaacattgtttagttcaacagctatgactgaatgtattggaggagtaattttatacgatgaaaccattaggcaacagtcatcaaaaaaaaataagatcccagaattaatttcaaagatgggttcggcaccaggcattaaagtagatactggtgctaaaattctagcgggctcaccagaggaaaaaattacagagggtctagatggattaagagaaagattaaaagaatattataaattaggtgcgaaatttacaaaatggagaggcgtttataacatatcaaaaaattttccaagtagactttcaatggaatcaaatgctcatgcactagcaagatattcagcattagttcaggaatgtaacatggttccaatcgtagaaccagaggttttaatggacggagatcatgcagctgatgagtgttataataaaacttctgaagtaatcaaaaaatgttttgagcaattaattattcataaagtcaatttaaaaggtataatcttaaaaccaaatatgatcttagccggaaataagtctaaaaataaaatatcaaatgaggaggtcgcaaaattaacactgaaatgtttgaaagactcagttccatcagaagttcctggaatagctt

SEQ ID NO: 278205 - DNA, 947 bp, Unknown
  Bacterial polypeptide expressing nucleotide sequence isolated from the Sargasso Sea
agacgaaagtaatggaacaatgactaaaaggcttgaaaatgtaaatgtattttcaagtgctgaaagtagattaaggtttagaagcatacttcttgcatcagatgctatgaaaacttgcattggaggagtcatattgtatgatgaaactattaagcaaactgttaattctgatactatttccaaacttatatctaaatctgaagcagtaccaggcattaaagttgacacaggagcaaaaattttatctagctcaaaagaagaaaaaataacagaaggtttagatggtttaagagaaagacttgaagaatattataagttgggagcaagattcacaaaatggagagctgtatataatatttctgaaaaatttccaagcaaggtagctatttctactaattcacatgctttagcaagatactcttctttggcacaagaagctggtatggttcctatagtagagccagaagtattaatggagggaaatcatgactcgaaaatttgttaccaaaaaacaagtgaggtgattaaaaaatgttttgatgaattaatattacaaaagattgatttaaaaggaataattttaaaacctaatatgattcttcctggaacatcatctcaagaaaaaactggcccagaagaaattgcagaactaactataaaatgtttaaaagaaagcgtgccgaatgaagtgcctggtattgcatttttgtctggaggtcagtcagaagttcaagcaacagaaaacttaaatatgattaatttaaaaaatgatacaacttttaaaatgacatattcatacggaagagctcttcaacaaagtgcattgaaatattggtctaataaccaggataatgttgccggtacacaatcaatatttaaccatagagcaaaaatgtgtactcttgccgcaaaaggacagtggaaaaaaaattttgaagaaaattaga

SEQ ID NO: 278206 - DNA, 721 bp, Unknown
  Bacterial polypeptide expressing nucleotide sequence isolated from the Sargasso Sea
gagcaaaaacttctggctgtttctcctgaagaaaagatcacagaaggtcttgatggattaagagaaagattaaaacaatattataaacttggagcaaggtttacaaagtggagaggtgtttatacaatatctaaaaattatccaagcaaattatccattcattcaaatgcacatggtttagcaagatatgcggcacttgttcaagaatgtgaaatggttccaattatagagccagaagttttaatggatggagatcattctgctaaaacatgttttgagaaaacttctgaagttataaagaaatgtttcgacgaattgatacttcacaaaattgatttaagtggattaattttaaaaccaaatatgattttagatggttcaagtgctacaaaaaaaatcagcaatgaggaagttgcagatttgactttaaaatgcttaaaagaaacagtgcctcaagaagtacctggaattgcatttctttcaggtggtcaaagtgaaatcgaagctacagaaaatcttaatttaataaataagaaaaataataccaattttattatgactttttcttacggaagagctttgcaacaaagtgcattaaaatactggtcaaaaaacattaaagacattacaggtactcaaaaaatctttgatcatcgtgcaaatatgtgctctcttgcagctcaaggaaagtggtctaaacaatttgaaactcagggataaa

SEQ ID NO: 278207 - DNA, 1078 bp, Unknown
  Bacterial polypeptide expressing nucleotide sequence isolated from the Sargasso Sea
gatgtcatattcgttaaaacctggtgttgtgactggagaggattatttaactcttctaaaagcagcaaaagagggtggttacgcattgcccgcagtaaatgcagttggcactaattcaatcaatgctgtgttagaagcggccgcaaaaaataatgctgatgtaatagtacagttttcaaatagtgcgggacaattttacgctggtaaaagtctttcagacgcatttgaggcaaaggtgattggatcggtatcagcagctcaacatgttcatcttcttgctgaaaaatatggtgtttgtgttgtccttcatactgaccatgctaataaaccattgataccatgggtggaagctcttgtagcacatagtgaatcgcattatgaaaataccggatctccattattctcatcacacatgttggatctttcagcagaagagattgactttaatttatctgaatgtaaaagattgcttgagaggatggctcctattggtatgagtctagagatagaattaggcgttacaggtggtgaagaagatggcgttggctctgatgatgatataggtgctgataatccgttactttatacacagcctgaggattgccttcaggcttgggagttgctatcacctattggtcattttagtttggcagcgtcatttggcaatgttcatggggtctataaacctggaaatgtaaagttacgtccagaaattttgaagagctctcaggaattagtagaaaacacatgtggaacaggttctaaaccattagatcttgttttccatggaggatctggatccgataaatcaaaaatatctgaggcactaacctatggtgtctttaagatgaatattgatacagatacacaatttgcttttgcaaaggcagtgggggattatgttaatgagtttcctagagcctttaaataccaaattgacccagatgatgatacaccttacaaaaagcaatacgatccaaggaaatttctaagattagctgaacagtccatggtaacaagacttgatgaggcctttcatgacctagggtctgtaggtaaatctatagctaaacgataa

SEQ ID NO: 278208 - DNA, 673 bp, Unknown
  Bacterial polypeptide expressing nucleotide sequence isolated from the Sargasso Sea
aatgctggataaactgaagacgcaaaccggttttattgcagcgttagatcaaagcggcggtagtacccctaaagcgttgcgcttatacggcatcgaagagtcagagtatagctcagacgaagagatgtttaatcttgttcacgaaatgcgtacacgcattatcaccagcaccccttttagcggcgagcgcgttcttggcgcaatcttgtttgaaaacacccttgatagagaaattgaaggcatgtcttctgcacatttcttatggcagaagaagcgcgtaattccgttcctaaaggtagataaaggattagctgaagaaagcaacggcgtgcaggtaatgaagccaatgccaggtcttgatgcactgctagctaaagcggtggcgcaagatgtatttggcactaaaatgcgaagtgttgttaagcttgcgaatcaccaaggtattaaagacgttgttgctcagcaatttgaagtgggtaagcaaattttagccgcgggccttgttccaatcattgagccagaagtggatattcacagtccacaaaaagcggaagcagaagcattacttaagctagagattttgacgcagcttaatctgctaaacgaaggtcaggaagtcatgcttaagcttacgcttccgacagaggcaaacttttataaagagcttgttgat

SEQ ID NO: 278209 - DNA, 1015 bp, Unknown
  Bacterial polypeptide expressing nucleotide sequence isolated from the Sargasso Sea
gatgtctgagttatacaaaatagcagaaaaaattcttcacaatggaaaaggaatccttgcggctgatgaaagtactgggactatgaaaaaaagattggactcagtaaatgtagagtctagtgaaaaaaatagattaatattcagagaaacacttttttcatcaaactcaatgaaagaatgtataggtggtgtgatattatatgatgaaacaattagacaaaacacttctcaaaaaaaatctataccagaattaatttctgaaagtggggccataccaggaataaaagtggatacaggtgcaaaaactttagcaggttctaaagacgaaaaaattacagaaggattggatggtttaagagaaagattgaaagaatattatctacttggtgctagatttacaaaatggagaggtgtttatattatctctgatgcttttccaagtaagttatcaatggtagctaatgctcatgctttagctagatatgctgcactagcgcaagaagctggtatggtgccaattgtagaaccagaagttttaatggatggaaaacactcggctaaagattgttttaataaaacatctgaggttatcaaaagatgctatgacgaattagatattaataaagttgatctgaaaggcacaattttaaagcccaatatgatacttactggaacagattcgaatgagacaatttctaataacgaagtagctgaaatgacattagaatgtttaaaaaataatgtaccatctgaagttccaggcattgcatttttatctggaggacagacagaagttgaggcaacaaataatctgaatcaaataaatgttaaaaatgatacaagttttattatgacctactcatatggaagggctcttcaacaaagtgctttaaaattttggtctaaagacataaacaatatcaaaggaactcaggaagtgtttgatcatagagctaaaatgtgtactttagcagcacaagggaagtggtcagaaagtcttgaaaattcaaaataa

SEQ ID NO: 278210 - DNA, 982 bp, Unknown
  Bacterial polypeptide expressing nucleotide sequence isolated from the Sargasso Sea
atgcctctggttcctttgcgtattttgctcgatcatgctgctgaaaatgattacggtttggctgcttttaacgtcaataacatggagcagatccaagctatcatggaggcggcaaaagagacagattctccagttattgtacaggcctcacggggtgcgcgggcgtacagccaggataattatttgcggcatctgatgcttgcagcagcagagctttaccctgggataccaatcgcaatgcatcaagatcacggcaattcaccggcaacgtgtgagagtgcgatcgataacggcttcaccagtgtgatgatggacggctcactcaaagaagatggaaagactcctgctgattttgattataatgtccaggtaaccactgaagttgtgaagcaggcgcattcgcaaggcgtttcggtcgagggagaactcggttgtctcggttcactcgaaagtgggcagggtgaggctgaggacgggcacggagcagagggagtgctttcccaagatcaattactcacagatcctgatgaggctgctcggtttgttgaagcaacgggcgtggatgcgcttgcagtcgcaataggtacaagtcacggagcatacaaattcagtcgcaagcctgatggtgatgttcttgcaatgaagcggatcgaggaaattcatgccaaactgccaaactgccatctagtcatgcacggttcatcgagtgtgcctcaggagttgcaagatatcatcaataaatatggcggggaaatgcctcaaacctacggtgtaccagttgaggaaattcagcgaggcattaagcacggtgtgcgtaaaattaatgttgatacggattgccgaatggcaattacgggtgcaattcgtaaggttcttgctgaatcaccagcgaagttcgacccacgggattatctgaaaccagcaagggcggccatgcagaaggtgtgcgctgagcgaatggtacagttcggtcaggccggta

SEQ ID NO: 278211 - DNA, 1012 bp, Unknown
  Bacterial polypeptide expressing nucleotide sequence isolated from the Sargasso Sea
aatgtctgaattaaataacatcgctttgaaaattttatctcacggaaaaggtattctggctgctgatgaaagtactggaacaatgactaagaggctcaacactgtaaatgtggagtcaactcaagaaaataggttactatttagagaaacacttttttcatctgaaagtatgaaaacatgtataggtggtgttattttgtatgatgaaactataaaacaaatctcgagctcaaaaaaaactattccagaattaatttcattatcgggagctgtgcctggaataaaagtagatacaggagcgaaatctctgccagattcgcctgatgaaaaaattacagaaggattggatggcttaggagatagattgaaagattactacaagcttggagcaagatttactaaatggagaggcatttatattatttcaaaaaaatatcctagcaaattatcaattgatgcaaacgctaatgctttggctaagtactcatctatagttcaagaaaatggaatggttccaattgtagaacctgaagtgttgatggatggagatcatacagctgaagattgtttaaataaaacttcggaagtactcaaaaaatgttttgaagagctaattcagcataatgttagcttggaaggaataattttaaaaccaaacatgatccttccaggaaataaatcaaatgaaaaaattagtaatgaaaagattgctcatttaactttaaaatgtttaaaagattctgttccaaaagaggtgccaggaatagcttttttatcgggtggtcaaaatgaaatagaggcagctgaaaacctaaatttaattaacaaatataatgatacaaattttataatgagttactcttatggaagggccctacaacaaagtgccattaagttttggtcgaaagatatcaaaaatattaaaggtacacaggaaatttttaatcatagagcaaatatgtgctcacttgcagctcaaggaaaatggtcaaaagaacttgaggcaaaatag

SEQ ID NO: 278212 - DNA, 1015 bp, Unknown
  Bacterial polypeptide expressing nucleotide sequence isolated from the Sargasso Sea
atgagagatttgaacactattgaagaggtagctaagtatataatagaagatggaaaggggattctggctgctgatgaaagtaatccaacctgtggaaaacgttttgattctattggagtagagtccaacgaagaaaacagaagagattatcgtgaaatgttattccgatcagaaggcatgaagggcaatataggtggagttattttattcgatgaaaccattagacaaaaagctaaagatggcactcctttggtgaatataattttagatcaaggagctttaccgggcattaaagtagacaaaggactacaaaatattggagattctgaggaatcattaacacaaggccttgaaggcttgaatgagagactaaaagagtattattctttaggagcaagatttactaaatggagggctgtaataaaagttagtgattcattgccttctgaagaagccattttgagcaatatgagtgctctagctgaatacgctaagttggtacaagaaaataatatggtacccatggtagaacctgaggtcttaatggatggcaatcactcaattgatcaatgctttgaggcaacatcgagaagtttagaatgcctgtttggccttttgaatgacaaaggagttaatattaaaggaactatattaaaaccaaatatggtaaccgccggctcagattctccagttaaagctgatattgaagaagtggctaatcagaccctcaaatgtctaaagatgcatgttcccgatgatctgcccggggtaacatttttatcaggtggccagtcagacgtagattcaacagctcatttagatgccatgaacaaaataggaggctttacctggaaactaagtttttcatatggaagagcattgcaacagccagctttgaaggcttggatgggtaagaatgaaaatacttctttagcacaagaggctttatctcatagagcacatatgaatagtctagcttctgaaggttcgtggagttcttcgttagaaaattaga

SEQ ID NO: 278213 - DNA, 920 bp, Unknown
  Bacterial polypeptide expressing nucleotide sequence isolated from the Sargasso Sea
agttctaaatcagctagaaaatatgctgtccaatattttaaaaaaaatggttgaagctgccactgaagaatttttagaaattccaattgttttacatcaagaccatggaggatcccctgaagattgtaaaaattgtattgaattaggatttacatcagtaatgatggatggatctcttaaagaagatcaaaaaacaccttcagattataattataacataaaagtaacaaaaagaactgttgatatagcccattccgtaggcgtttctgtagagggtgagttaggatgccttggttctcttgaaactggaacaggtgaaaaagaagacggcgtgggtgcagatggtattttatcacatgatcaattattaactgatccaaatgaagcttcagattttgtaaatcaaacgaatgttgatgcattagcaatagcaattggtactagtcacggtgcatataaattttcaaaaccacctacaggtgaaactctagccatgggtagaattagggaaattcatgaaagattacctaatacgcatctggtaatgcatggttcttcatcagttccaaaagaattaatatcgatcattaacaaatttggtggaaaaataaatgagacatatggagttccattaagtgaaattaaagagggtatcaaaaacggtgttagaaaaataaatgttgatacggatctaagacttgcttctacagcagcaattagaaagtttttttttgaaaatccatctgagtttgatccacgaaaatatttagttctttcaaaagatgaaatgaaagatattgttaaaaatagattagaagaatttggcactgctggaaatgcatcaaaaataaaaccttcctcactatcagttatggtttctagatataaatctggtgaacttacatcaattgtaaactaaa

SEQ ID NO: 278214 - DNA, 407 bp, Unknown
  Bacterial polypeptide expressing nucleotide sequence isolated from the Sargasso Sea
tatgaatattgaagaaatcgccaaacaaatggtagcgaaaggtaagggaattcttgctgcggatgaaagtaccgggacaatggaaaagagattaaaaagtgtaaatgttgagtctaacgaaaaaaatagacttcattttagagaaactttatttacatctcctgctatggcaacatgtataagtggagttattttatttgatgagacgataagacaagtttcaagtagtggaatatctattcctgaattaattaaaaaaaatggatcaatacctggaataaaagttgataaaggagcaaaatctttagcaggttctaataatgaaaaaattacagaaggtcttgatggattaagatctcgaatggaagaatattataaacttggagcgagatttgctaaatggcgag

SEQ ID NO: 278215 - DNA, 1021 bp, Unknown
  Bacterial polypeptide expressing nucleotide sequence isolated from the Sargasso Sea
atggatagggaattgttggaaaaaaatgctagatttttggtctccccaggaagaggcatacttgctgcagatgagagcaacgggacgatgtccaatcgcttggaagcagtaggtgtggaagcatcatctgagaccagaagggcataccgtgccaatctcttctccacggagggttatgaatctgcaattagtggcgttatcctattcgatgaaacgatccgtcagactatgaaagatgggactccaatacccgtcgaactttccagtaggggaatccttccaggaataaaggtcgacactggagcaaaggaactggctaatcatgagggagagaaaatcacagagggactcgatggacttagagaaagatgttctgagtatttcgcaatgggtgctagattcgctaaatggcgtgcagtaattaggatcgatgaaggacttccaaccaaagcttgtattgccacgaatgcacatgccttggcaaggtactcagcaatctgccaggagcaagggctagtccctataatcgaaccagaggttctgatggatggagaccatgatgctagaagatgctacgaagtaacggcagaaattttggatgctaccttctctgagtgtgaaagccaaggtgtacatattcccggagctttgctaaagccaaatatgataattcaaggcaatgattgtgagaaccagatttctcgagaggaggttgcaaatctcactgtcgaatgtctaacaaatcatgttcctcacgatctccctgggatagtattcttatctggaggacaatctgacgaagatgcgaccgcacacctcaatttgatgaataagatgactctcgagcacccttgggagctatcatactcctatggtagggcgcttcaagcagacgccctacgaaagtgggcagaggaaactgaagattctgatatatctagccaaacagcattttcgcatagggcgaaaatgaatagcctggccaggtttggtgattggaatcaggagctagagtcgtaat

SEQ ID NO: 278216 - DNA, 1066 bp, Unknown
  Bacterial polypeptide expressing nucleotide sequence isolated from the Sargasso Sea
tatgtcattaatctcacttcgacaactattagatcatgcagctgaaaataattatggtgtacctgcatttaatgtaaataacttagaagcaatcagagcaataatggaaggggctaaagaattaaatagtcctgtaattctgcaagcgtctggtgctgcgagaaaatatgctggaccaatttttgttaaaaaattagttgaagcagcaatggatgagttttcagacattccaactgttctccatcaagatcatggtggttctccatcagattgtaaaagttgcatcgatcttggttttacctccgtaatgatggatggttctttattggatgatcaaaaaacaccttcagattttgattataatgttaaagttacaagacaaactacggatatggctcatgcattgggagtttctgtagaaggtgaaattggatgtttaggttctttagaaactgggactggtgaaaaagaagatggtgttggagcagaaggtaaacttgatcatgatcaattgttaacagatccagatgaggcatcagattttgttaaagcaacaaatgttgatgctctcgcaattgccataggaacaagtcatggtgcatataaattttctcgaccgcctacaggtgatattttagcaattgatagaattaaagaaatacattcaagacttccaaatacccatttagttatgcatggatcatcttctgtaccacaagacttaataaaaactattaatgaatacggtggaaaaataaaagaaacttatggtgtacctgtttctgaaatacaagagggtattaaacatggtgttagaaaagttaatgttgatacagatttacgattagcagctacagctgcagtaagaaaatattttcatgagaatccttctcagtttgatcctcgaaaatacttattactttcaaaagacgctatgaaagaagttgtaaaaagtagattagaggaatttggaacagcagggaatgcctcttctattaattccatatctctaggagaaatggctacaagatataaatctggtgaatttaaagcagttattaactaa

SEQ ID NO: 278217 - DNA, 883 bp, Unknown
  Bacterial polypeptide expressing nucleotide sequence isolated from the Sargasso Sea
aggcttgcttttagagaaattattttttcatctgatggaatgaaggattgcataggtggtgttattctttacgatgaaaccataaatcaaatttcaagcacaggaaaatcaataccagatttaatatctacttcaggtgcagttcctggaattaaagttgatactggtgcaaaagatttagcaagttcccctgaagaaaaaattacagaaggcttagatggtcttagaaatagattaaaaaaatattataatcttggagcaagatttgcaaaatggagaggtgtctattctattagtgaaaaatatcccagcaaactggcaattagtagtaattctcatgcacttgctaggtactctgcactagttcaagaaagtggaatggttccaatagtagaacctgaggtattgatggatggaaaccattctgctgaagattgtttaaataaaacatcagaggtaattaaaaagtgttttgaggaactaattttacacaaaattgatctctcaggtataatattaaagccaaacatgattttgtctggcagcctatcaaaaaataaaatttctagtgaagaagtttccatcaaaactttagaatgtcttaataattctgtacccaatgaagttcctggaatagcttttttatctggaggacaatctgaaattgaagctacagaaaatttaaatttaatttataaaaataataatacaaattttataatgacctactcatatggaagagctcttcagcaaagtgctttaaaagtttggtctaatgatattaaaaatgtagaagcaactcaaactacttttaatcatagagctaaaatgtgtaccttagctgctcaaggaaaatggtctagcgaacttgaaaataaataaa

SEQ ID NO: 278218 - DNA, 697 bp, Unknown
  Bacterial polypeptide expressing nucleotide sequence isolated from the Sargasso Sea
atgagtaatctagaagatatagcaaaacaaatggtaatgcctggtaaaggtatattagctgcagatgaaagctctggaacaataaaaaagaggtttgactctattggtgttgagtcaacagaggaaaatagaagaaattatagggaaatgctttttcaaagcaaaaatgcaatggaaaactatatttctggggttatattgttcgatgaaacactaagacaagaaagtaaaaacggacaacctcttgttgaggtcattgcaaattcaggttctttacctggtataaaagtagatacaggcgctaaagatttagcatttaattccaacgaaaaaattactgagggtttagatggtttaagagaaagacttatagaatattttaatttaggggctaaatttgcaaaatggagagctgtcataacaatagaagattcaattccaagtgatttatgcataaattcaaatgctcacgctttagcaagatatgcagcactttgccaagaaaatggtattgttcctattgttgagcctgaagttttaatggacggcaaacacacaattgaaagatgttatgatgttacaaaaaagactcttgatgtcgttttcaatgaattaattgctcatggtgtcaatttaaaaggaatttgcctcaaaccaaatatgataattgatgggacgctcacttctgaaaaatcat

SEQ ID NO: 278219 - DNA, 796 bp, Unknown
  Bacterial polypeptide expressing nucleotide sequence isolated from the Sargasso Sea
atgtcagatcttaataaaattgctttaaagatattatctaatggtaaaggcatccttgctgcagatgaaagtaatggaactatgacaaaaagattagaagcagtaaaaattacttcaactcctgaaaataggcttctttttagaaaaactcttttttcatcagaaagtatgaaggattgtattggaggtgttattttatatgatgaaacaataaatcaaacattaagttctgatgaaacaattccaaacatgattaataaatcagacactgtgccaggaattaaagtggatactggtgcgaaagttttattgaactcacctgaagaaaaaattacggaaggattagatggattaaaagaaagattaaaaagatattatgaacttggcgcaaggtttacaaaatggagaggtgtttataatataagtgaaaaatacccaagcaagctagcaataaattctaacgcacaagctttagcaaaatactctgctcttgttcaagaatgttttatggttccaatagttgagccagaagtattaatggatggggatcattctgcagaagattgcttaaacaaaacttctgaagtaattcaaaaatgttttgaagaattaattttacataaagtagatctaactggaattattttaaaaccaaatatgattttagcaggaaataaatcaaaagataaaatatctaatgaagaagtttcaatgaaaacacttgaatgcctaaaaaatctgtaccgagtgaagtgccaggaattgcttttttgtccggaggtcaatctgaaataga

SEQ ID NO: 278220 - DNA, 902 bp, Unknown
  Bacterial polypeptide expressing nucleotide sequence isolated from the Sargasso Sea
aagcacagaagagaataggaatgcatatagagatatgcttttcaccacaccaggtatggaaaagtttatcagtggagtaattctctttgatgagacatttcgtcaatcatccttagcagatggtaaacgatacccagattatcttaagaatttgggtgtgattcctggtatcaaagtagataagggtgcccatcctcttcctggctcagaagaagaaaaagttacagagggattagatggtttgaattcaaggttgaaagagtattatgatcttggtgctagatttgctaagtggagagcggtcattactattggagaatcagcacctagcggtacttgcctggtagcgaatgcccatgctctcgcaaggtatgcttcattatgtcaagaaaatggaatcgttcctattgtagagcctgaaattctcatggaaggagagcataccattgaagaaagttttattgtaacagaagaggtcctccatgcaactttcaatgaattacactcccagaatgttctcttagaggggatggtcttaaaacctaatatggttttatctggatatggatgctcagagcaagcaaatgtagatgaagtagctgaaatgaccgttactgtattaaagcgctgtgtcccatcagctgttccaggaattgcctttttatcaggtgggcagagtgatgaagatgcgacagcacacctaaataaaatgaatcagatattaggaaataataacccttggaatctgacatattcttatggaagggcattgcaggcaccagctttagccgcttggggtggtaagcaagagaatgttaaaaaagcacaagatgcattttataaacgtgcaaaattaaatagtttagcttctaaaggagaatatggttccgatatggaataat

SEQ ID NO: 278221 - DNA, 509 bp, Unknown
  Bacterial polypeptide expressing nucleotide sequence isolated from the Sargasso Sea
tatggtgccaattgttgagccagagcttttaatggatggcaaacataacataaatgtatgcaatgatgtcacttcaatgataatggaagaaactttttaccaattagcaaataataatgtggacgtggaaggcatcgttttaaaaccaaacatgattttaaatggaagtgaaagtaatacaaaaaataatccaagcgaagttgcaaaacttactttaaattgtcttaaaaaaaatgttccctcaggagtaccaggaatagcttttttatctggagggcaatctgaatttgaagccacgatgaaccttaatgaaataaataaagttaatgactcgaaatttgcttttacattttcatatggaagagctttacaacaaagcgcacttaaaatctgggcaaaagatttaaaagacactaaaagtgtacaacatgcttttgaggaaagggcaaaaatgaacagcctagcagcccaaggcaagtggaataaagagcttgaaaaagctgcttaaa

SEQ ID NO: 278222 - DNA, 997 bp, Unknown
  Bacterial polypeptide expressing nucleotide sequence isolated from the Sargasso Sea
aatggataaaaatatccttgaagaaacagcaaaaaaaatgatgactaaaccaaaaggcattttagcaatggatgaaagtagcccgactattgctaaacgtctagcatcaataaatactgaaaataacgagattaatagaagaaaatatagagaattaattgttactgcgccgaatctttccagttacataagcggagcaatattatttgaagaaacatttgagcaaaaaatgtcagacgggatcctttttagagactaccttaattcgataggaatacttccaggtattaaagtagataaaggagcaaaagatttttcatgtcatcctaatgaaaaaatcactgaaggtctcgatggtctaagagagcgattagctggttactatactaacggagctaagttctgtaaatggagagcagttataactatcgatcaggatattccatctgaagcttgtattgaatcaaacatgaatgcgctggctagatatgcctccttatgtcaggaaaacaatttagtaccaatagtggaaccagaagttcttattaatggagctcatactatagaacaatgcgacacagtgactagaaaatcacttgaatccttatttaaaaatcttgatatgttaaatgtccatcttccaggaactgtacttaaaccaagcatggtaatttcgggacaagataacggctcgagagccgacaacaacacggttgctaacatgacagttgactgtctatccgactgtgttccagacactacttctgggattgcatttttatcaggtgggcaaagtgatacagaggctgaagagcatttgaatattatgaataaaaaaaataacctaccatggagagtgactttctcatatgcaagggcaatacaagccgcagcacttgcagcttggcaaggagatgacacaaatttagctaatgctcaaaagattctgataaatcgtgctagtagatgttcaaaagcatctataggtgaattatag

SEQ ID NO: 278223 - DNA, 406 bp, Unknown
  Bacterial polypeptide expressing nucleotide sequence isolated from the Sargasso Sea
atgggggtatataaaccaggaaatgttaagctaactcctaaaatcttaaaaaattctcaggaacacatttcaaaaacactcgatttaccatataatcctgttgactttgtttttcatggaggatcaggctcgtcgaaagaagaaattaaagaggctatcggttatggtgttgttaaaatgaatattgatactgatttacaatatgcatttacagaaggaataagagattacatgaataataaatttgattatttaaattctcaaattggaaatccagaaggggcagatattccaaataaaaaatattatgacccaagaatatggcttagattaggagaaaaaacgtttattgaacgtttaaaaaaagcttttgaagatttaaataatgttaatacattagattaaa

SEQ ID NO: 278224 - DNA, 507 bp, Unknown
  Bacterial polypeptide expressing nucleotide sequence isolated from the Sargasso Sea
tatgaatttaaatgaaatagcgaaaaaaatgtgtgctaaaggtaaaggtattcttgccgctgatgagagtactggcacaatcgctaaaagatttaaaagtattaatgtagaaaatttggagaaaaatagactaaattttcggcaaactctatttaattcgaaagctatgaaagaattcataggcggtgtaattttattcgatgaaacaataagacaaaaaacaaccttaggaccatctatacctgaattaatttctaaacatggtgcagttcctggtataaaagttgacaaaggagctaaacctttagcaggatcaagtgatgaaacaattacagagggtttagatggtttaagagaaagattaaacgaatattataatttaggggctaggtttaccaagtggagagctgtatacaaaatttcagaaaaatttccctcaatccagtcaatcaaatctaatgcccaggcgctagcaagatatgcggcattggtccaagaagcaaaaat

SEQ ID NO: 278225 - DNA, 889 bp, Unknown
  Bacterial polypeptide expressing nucleotide sequence isolated from the Sargasso Sea
atgaacaacgagcaattaaacaaggtacaacatgatgatggcttcatagccgccctagatcaaagcggcggcagtagccctaaagctttaatgaactacgggatagaggacaacgcctacgacaacgacgaggaaatgttcaacttaattcatgaaatgcgaaccagaattatgacaagtaatagtttcaatggagatcgaatccttggagctatcctcttcgaaaatacaatggatcgtgaagtcttaggccaaagtacggcttcatatctatgggaagagaagagggtcgtcccatttttgaaagtagataaaggtcttggcgatgaagaacacggtgttcaattaatgaaaccaatgcctgatttgggcagtcttcttgaacgggcaaaggagaaccaaatatttggaacgaagatgcgttcagttattaaatcagccaacgaaagtggtatcaactcaatagtcgatcagcagttcgaggtaggaaagcagattcttgacgcaggacttatccccattattgagccagaagttgatatccacagcacagacaaaggcgagtgtgaatcaattcttttagattcaatagttcagaaccttgagggactgagcggctctcaagcaattatgttaaaactcacgctcccagaagaggataatttttacagggagctaattagcgaccaacgggtactacgggtagttgccctctctggaggatattcacgactcgagtcaaatgagaggttagggaggaacaacggtatggttgcaagtttttcacgggctttaactgaaggattatccgcccagcaatctgatacagacttcgacgaacttctcgatagctccatacagagtatctttgatgcatcttcgtcataat

SEQ ID NO: 278226 - DNA, 655 bp, Unknown
  Bacterial polypeptide expressing nucleotide sequence isolated from the Sargasso Sea
aaaagagtattatgatttaggtgcgagatttacgaaatggagagctgtctataaaatttcagataaatttccatctgcccaatctattaaatcaaatgctcacgcgttagcaagatacgctgctttagttcaagaggctaaaatggtgccgatagtcgaaccagaagttttgatggatggttcacataacatagataaatgctatcaagttacaacaaatgtacttaatgagtgttataacgaactagaaatacataaagttgatttgagtggaactgttcttaaacctaatatggttatacctggctcggagtgcaaagataaatctaatacagaagaaattgcaaaaaaaactttagactgcttaaagaaaaatgttcctggtgatgttcctggaattgcctttttatcgggcggtcaatctgaaatcgagtctagtaaaaatcttaatgaaataaacaaaataaatgatagtaattttttaattactttctcttatggaagagggttgcaagcaagtgcattaaaggaatttggaaaaaatcaagaaaatacagaaaatattcaaaaagcctttaaccatagagcaaaaatgaacggtctgtcatctaaaggggagtggtctgaagaattagagaaagaatttgcggcctaa

SEQ ID NO: 278227 - DNA, 571 bp, Unknown
  Bacterial polypeptide expressing nucleotide sequence isolated from the Sargasso Sea
ctactctccatagacaaccacgtgcaactattaaagccgattaatgaccttaaaaattctttgaaactggcaaaagaaaacgaagtatttggtacaaaaatgcgctctgtaataattggcgcaaacgaaactggcatcaaagatatcgtcgatcagcaatttgatgtagcatcagaaatattatcatatgggctcataccgataatcgaaccagaggtggccatcacaattcctgacaaaaaagaagctgaagatttactgtatgaaaaccttaggagcaggcttgatcaaattgggtcgaacaaaaaagtaattctaaaactcagcctccctgatcaagacaatttatacgagccactaacaaaccatcccaatatattgcgaatagtcgctttaagtggtgggttcaaaaagaacgaagccgttgccaagctgacgcgaaatacgaaaattatcgcaagtttttcaagagctttggcggaaggcttaaaaagaaacgatcctaaagaacagtttgaaaaacaattagagcaaactatccaaagcatttacgaggcatctctgacttaag

SEQ ID NO: 278228 - DNA, 719 bp, Unknown
  Bacterial polypeptide expressing nucleotide sequence isolated from the Sargasso Sea
taaaggtttacaacctttaaatggctctgaaattgaaacattaactcaaggtttagatgatcttgatgaaaggtgtgtagaatatgctgcacttggcgcaaaatttactaaatggagggccgtcataagtataggtcaaaacattccatctcaagaatgcatagatgcaaatatggaagcacttgcaagttatgctaaaactgcacaaaaacatggcatggttccaatagttgagccagaggtgcttattaatggcgaacattcgattgaagattgttacgatgccacaagcagatcaataaaatcgctttttgattatcttgatagttatgatgtcgatatttctggaaccatattaaaaccaaatatggtgacaccaggcctagaccacgcacatacagcaacagttgaggaggttgctgaagctactgttaaatgtctcaacgataatgttcctacagaattaccaggtattgcattcttatccggtggtcaaacagaaatagaatcaactgaacaccttaatatgatgaataaaattggtggtttcccatggaagttaagtttttcttatggaagagcgcttcaagcatcagcactttcagcatggttaggtaaaaaagagaatatttccgcagctcaagatgcattttctcacagagccgaaatgaataaacttgcttcacttggaaagtggagtcacagcttagaggaataag

SEQ ID NO: 278229 - DNA, 895 bp, Unknown
  Bacterial polypeptide expressing nucleotide sequence isolated from the Sargasso Sea
taatcctgaaaatagattaatatttagagaaactctttttaaatctgatagcatgaaagattgtataggtggcgttatactttacgatgaaactataaaacaatccagtatcacaaaaaaaaaaattcctgaattgatttcagatttaaattctatacctgggataaaagttgatacaggtgcaaaaaatttggctaactctaaagaagaaaaaattactgaaggacttgatggtttaagggaaagattaaatgaatattataaacttggagcaagatttacaaaatggagaggtgtttacataatttcagataaataccctagtaaattatcaatcaaatcaaatgcccatgctttagctagatattctgctttagctcaagaatgtggaatggttccaattgttgaacctgaattgttgatggatggaaatcactctgctgatgaatgttataaaaaaacttcagaggtaattaaatattgttttgaagaacttgaattgaataaggtaaatttaaaaggtgtaatattaaaacccaatatgatattacctggctcaaactcaaatattaaaatttcaaatgaagaaatagcaaaacttactgtaaaatgtctcaaagatagcgttccttcggaagttcctggaattgcatttttgtctggaggtcaaactgatatagaggctacagaaaatttaaatctaattaatattcacaacgatacaaattttattatgacattttcttatggcagggcacttcaacaaagtgctttgaaattttggtctaaagacataaaaaatattagtggtacgcaaaaagtatttaatcatagagccacaatgtgttctctagcagctcaaggtaaatggtcgaaagagcttgaaaacaaataa

SEQ ID NO: 278230 - DNA, 643 bp, Unknown
  Bacterial polypeptide expressing nucleotide sequence isolated from the Sargasso Sea
aaagaatattacaacttggtgcaaaaattaccaaaatggagaggtgtctacagtatttctaaagattatccaagcaaactatgtattcagtcaaatgcacatgcgttggcaagatattctgcattagtccaggaatgcaatatggtaccaattgtagaaccagagatattaatggaaggtgatcatactgctaaagattgttttcaaaaaacttctgaagttatcaaaaaatgttttgaggagcttgttttgcataaagttgatttaacaggaattatattaaaaccaaatatgattttagctggagataaatctaaagataaaattacaaacgaggaaatagcaaaattaactatagaatgtctaaaagattcggttccctcagaagtccctggtattgcttttttatcaggaggacaatcagaaattgaagctacagaaaacttaaatttgataaataaatataataccacaaattttataatgagtttttcctatggacgagccctacaacagagtgctttaaaattttgggcaaagaatattaaagatattgagggtactcaaaaagtatttaatcacagagctaaaatgaatacattagctgcccaaggaaaatggtctaaagaacttgagaattaat

SEQ ID NO: 278231 - DNA, 680 bp, Unknown
  Bacterial polypeptide expressing nucleotide sequence isolated from the Sargasso Sea
tactgaaggtttagacgggcttagagaaagattgaaaaattattatgagcttggtgcacgttttacaaaatggagagctgtatatttaatatcagacaattatccaagcaagttagcaataaatgttaatgcgcatgcgttagcaagatacgcatctcttgttcaagaagcaggaatggttcctattgtagagccagaagttttaatggaaggaaatcattccgctcaagattgttttaataaaacttcggaagtaataaaaaaatgttttgatgaactaatttttcaaaaagtcgaccttaaaggggttttgctcaagccaaatatgattttaccaggattaaattcaaatcagcaaatctcaagtgatcaaattgctgaattaacacttaattgtataattaatagtgtgccgagcgaagtgccgggtatagcttttttatctggaggacaaagtgaatttgaagcaacaaaaaatttaaatacaataaataaaaataataggacaaaatttataatgacttattcctacggaagagcattacaacaaagtgcattaaagcattggtcaagtaatataaatgatgttgaaggaacccaaaaagtttttaatcatagagcgaacatgtgctctttagcttcaatgggcaaatggactgaggaagttgataaaaactaaa

SEQ ID NO: 278232 - DNA, 634 bp, Unknown
  Bacterial polypeptide expressing nucleotide sequence isolated from the Sargasso Sea
atgtcagaattaaataacatcgccctaaaaattatagaaaaaggtaaagggattttagctgctgatgaaagtactggaacaatgacaaaaagattagattctgtaaatgttccatcaacaccagaaaatagactgctgtttagagagaccttatttagcgcaacaagtatgactgaatgtattgggggtgtaattttatatgatgaaacaataaaacaattatcctcaaaaaaaaataagatccctgaattaatttcaaatatgggtgcagccccaggaataaaagttgatacaggtgctaaagctctagctggctcactagatgaaaaagttacagagggtttagatggattaagagagagattaaaagaatattacaaacttggggcaaaatttacaaaatggagaggtgtttacagcatatctaagaattacccgagtaaactttcaattgaggctaacgctcacgctttagcgagatattctgcattggttcaagaatgtaatatggttccaatagttgagccagaagtcttaatggacggtgaacattcagcaaaagagtgttatgaaaaaacttcaaatgtaatcaaaaaatgctttgaggaattattttgcataaagttgatttgac

SEQ ID NO: 278233 - DNA, 613 bp, Unknown
  Bacterial polypeptide expressing nucleotide sequence isolated from the Sargasso Sea
aatgtcagagatacacaatacagcaaatcaaattatttcaaatggtaaaggtattcttgctgctgacgagagtacaggaacaatgacaaaaagattagagtcagttgaaatagagtctactgaaataaatagacttatttttagagaagctttgttttcttcttcatcaatgaaagaatgcattggcggcgtaatactgtatgatgagacgattaaacaaaaatcatcaaatggcacacctatagctgaactaataaagaaaaatggatcttacactggaattaaagttgatacaggcgcaaagagtcttgcgggatctaaaaatgaaaaaattacagagggtctagacggattaagagagcgattaaaaaattattataaattgggggctagatttacaaaatggagaggagtttatttaattgatcacaaatatccaagtaaattatgtattgcagctaacgctcatgcactagcaagatatgctgcgctagttcaggaagcgggaatggtacctattatagaaccagaggttttaatggatggaaatcattcatctgatgattgtttgttaaaaacatcagaagtaataaaaaaatgtttgaagaattag

SEQ ID NO: 278234 - DNA, 595 bp, Unknown
  Bacterial polypeptide expressing nucleotide sequence isolated from the Sargasso Sea
atgtctgaattaaataacatcgcattaaaaattttatctcacggaaaaggtattctagctgctgatgaaagtactggaacaatgactaagagacttagtgctgtaaatgtggagtcaactccagaaaataggttgctattcagagaaacacttttctcatctgaaagtatgaaaacatgtataggtggcgttattttatatgatgaaactataaaacaaaacacgagctcaaaaaaaactattccagatttaatttcgttatcaggagctgtgcctggaataaaagtagatacaggagcaaaatctatgatggattcacctgatgaaaaaattacagaaggactggatggcttaggtgaaagattgagggattactacaaacttggagcaagatttactaaatggagaggtatttatgttatttcaaaaaactatcctagcaaattatcaattgatgctaacgctaatgctttagctaagtactcttctgtagtccaagaaaatggaatggttccaattgtagaacccgaagtattgatggatggagatcatacagccgaagattgtttaaataaaacctcagaagtaatcaaaa

SEQ ID NO: 278235 - DNA, 712 bp, Unknown
  Bacterial polypeptide expressing nucleotide sequence isolated from the Sargasso Sea
agtacctctggttgatggatcagatgaagtagtgactcaaggattggatgggctcgatgaaagatgttccgaatatgattctttaggagcaaaatttacaaagtggcgtgcagtaataaaaatcggagatagcataccatctgatgattgtattaatgcaaacgccaaagcattagcagattatgctgcaattgctcaatctaataacatggtgccaatagttgaacctgaagttttaatggatggtgaccattcaattgatctttcttttgatgcttgcgcaagatcttttcaagctctatttgatgctctagaaaataatggtgtaaacataaaagggaccatactaaaaccaagcatggttactccaggctcgctatctgaaaaagtagcaatcagagaagtggctgaaatgacagtaaggtgccttaaagagaatattccttcagatcttcccggagttgcttttttatcaggagggcaaacagagcttgaagcgaccgcgcatttaaatgaaatgaataaaataggcggcgagttcccatggaaacttagcttctcatatgggcgagctcttcagcaaagcgctttgaaagcctggtcaggaaaaagtgaaaatcttttcatagctcaagatgagctatctcacagggctgaaatgaataaactagcagcgcttggccaatgggatatcaaacttgaagatagataa

SEQ ID NO: 278236 - DNA, 505 bp, Unknown
  Bacterial polypeptide expressing nucleotide sequence isolated from the Sargasso Sea
atgacaattgaagatattgcaaaacaaatggtaaccaaaggaaaaggtatacttgctgcagatgaaagcactggaaccatgggtaaaagattaaaaagtgtaaatgtagaatctactgaggaaaatagacttcattttagagaaacattattcagttcagctgcaatgaaaagctcaattagtggtgttatattatatgatgaaacattaagacaaacctcaagcaagggaatttccattcctgatttgattaaaaaaagtggttcaataccaggaattaaagttgataagggagtaaaacttcttgctggttcaaatgatgaaaaaataaccgaaggtcttgatggacttagagaaagaatgaaagaatactacaaattaggtgcaaggtttgctaaatggagagctgtttactcaattacccaaaaacatccgagtgaacaaagtataaaagcaaatgctcatgcactagctagatacgctgctatcgtacaagaagctcaaa

SEQ ID NO: 278237 - DNA, 486 bp, Unknown
  Bacterial polypeptide expressing nucleotide sequence isolated from the Sargasso Sea
aatgtcattagaagaaattgcgaattatatagtttcagatggtaaaggaattcttgccgcagatgaaagtaatccaacatgtggcaaaagatttgattctattgaggtagaaaattctgaggataatagaagagattatagagagatgctttttagatcaaaaggcatgaaaggaaatattggcggagtaattttatttgatgaaactctgaggcaggatgctaaagatggcactccccttaaagaattaatcagtaatatgggtgccctgcccggcattaaggttgataaaggcttagtgcctcttgttgatggattagatgaagtagtgactcaagggttggatgggctcgatgaaagatgttccgaatatgattctttaggagcaaaatttacaaagtggcgtgcggtaataaaaattggagacagtatgccatcagatgattgtattaatgcaaatgccaaagcattagcagattatgctgc

SEQ ID NO: 278238 - DNA, 931 bp, Unknown
  Bacterial polypeptide expressing nucleotide sequence isolated from the Sargasso Sea
aatgactaaaagacttcaaagtgttaatgtagaatctactcctgaaaatagaattttatttagagaaacattattttcttcaaaaggaatgacggattgtataggtggtgtaatactttttgatgaaactataaatcaaaaaactaataatggagaaaaagtttctgaacttctttcaaaaatggggtccttagctggtataaaagttgatactggagcaaaacaattagctgggagtcctaaagaaaagattacagaaggtcttgatggtttaagggaaaggctcaaagaatattataaaattggggctagatttaccaagtggagaggtgtttataacataaccaaagattgtccaagcaaattgtcaattgattctaatgcacacgctttagcaagatacgcagcgttagttcaagaatgcaatatggtcccaattgttgaacctgaagttttgatggatggaaatcactctgctgatgaatgttttaacaaaacctctgtggtaattaaaaaatgttttaaggatctaattttgcataaagtagatttaacaggggtgattttaaaaccaaatatgattttggcaggtactgaatctaaaaatcaaatttccaacaaagaaactgctaaacttacaataaaatgcttaaaagaatctgtgccaaatgaagtacctggcattgcttttttatcagggggacaatctgaagtacaagctactgaaaacttaaatctaataaataaatttaatgatacaaattttataatgtcctactcctatggaagagcattacaacaaagtgcactaaaacattggtctaaagatataaaagatattaaaggaactcaaatgatttttgatcatagagcaaaaatgtgtactttagctgctcaaggaaagtggtcaataaatcttgaaaataactaa

SEQ ID NO: 278239 - DNA, 754 bp, Unknown
  Bacterial polypeptide expressing nucleotide sequence isolated from the Sargasso Sea
gacaggtgcgttgccaggaattaaagttgatactggagctaaagttttagctaattcttctgatgaaaaaattactgaaggcttagatggtttaagagatagacttaaagagtattacagtcttggagctagatttgctaaatggagaggtgtgtatataattacagacaagtatccaagtaaaatttctattatatcaaatgcacattctttagctagatactctgctttagttcaagagtccggaatggtaccaatagtagaacctgaagttttaatggatggtgatcataccgctgagatttgttatgaaaaaacttccgaagttataaagagatgttacgaagagttaattttacataaagtagatctatctggaactatattaaaaccaaacatgatattgcctggaataaaaagtgaccaaaagttatcgagtaaagaaattgcagaattaacaattaaatgtttgactgaaaatgtaccaaaagaagtgcctggtattgcatttttatctggaggacaaagtgaaattgatgcaacaaaaaatttagatgctataaataaaataaataactcaaattttataatgacctattcttatggcagggcactacaacaaagtgcacttaaacattggtcaaaaaatttggatgatatccaaggtactcaaaaagtttttaatcatagagctagaatgtgtagctctgcatctaaaggtgaatggtcagaagagattgaaaaaaaacagtaa

SEQ ID NO: 278240 - DNA, 817 bp, Unknown
  Bacterial polypeptide expressing nucleotide sequence isolated from the Sargasso Sea
atgtctgaactaaataatattgctttaaagattattggcgacggaaaaggaatattggctgccgatgaaagcactggaacaatgtccaagagactcgaaaatgttaacatagtatcaagtgccgaaagtagattaacttttagagaaacactttttagttctgatagcatgaaaacttgtatcggtggagttattctttatgatgaaacaataaaacaaactggctctaatggaaaaaaaattccagaattaatatcaaatgcaagttcagtgcctggtattaaagtagatacaggagcaaaagttttagcaaattcatcagatgaaaaaattactgaaggattagacggtttaagagagaggctaaaagaatattacaaacttggggcaagatttaccaaatggagagctgtgtatataatttctaaagattgccctagtaaattatcaattacctcaaatgctcatgcattagctagatatgctgcattagctcaagagagtggcatggttcctatagtggaaccagaagtattaatggatggtaaccatacagcggaagactgtttaaagaaaacttctgaagtaattaaaaaatgttatgatgaactaattcttaacaaaattgaactaaaaggaacaatattaaaaccaaatatgattttaccaggaaataaatctaaagaaaaaatatcaagtgaggaaattgcgaaattaacccttgagtgccttaaagaatctgttccaactgaagtgccaggtatagctttcttatcaggaggacaaacagagacagaagcaactgaaaatttaaact

SEQ ID NO: 278241 - DNA, 721 bp, Unknown
  Bacterial polypeptide expressing nucleotide sequence isolated from the Sargasso Sea
aatgtctgaattaaataaaattgcacttaaaataatttccaatggcaaaggcattcttgcagctgatgaaagcaatggaactatgacaaaaagacttgaagcagtaaatgtcaaatcaacaccagaaaatagacttgccttcagagaaatacttttttcatcagatggaatgaaagattgtattggtggtgttattctttacgatgaaaccataaatcaaatttcaagcacaggaaaatcaataacagatttaatatctagttttggtgcagttcctggaattaaggttgatactggtgcgaaagatttagcaaattcccctaaagaaaaaattacagagggattagatggacttagagatcgattaaaaaaatattatgatattggagcaagatttacaaaatggagaggcgtctattctattgatgaaaaatatccaagcaaacttgcaatcagtagtaatgctcatgcacttgctaggtactctgcactagttcaagaaagtggaatggttccaatagtagaacctgaggtattgatggatggaaaccactctgcagaaatttgttttaacaaaacatcggaggtaattaaaaagtgttttgaggaactaattttacacaaagttgatctctcaagaataatattaaaaccgaatatgattttgcctggcaacctatcagaaaataaaatttctaatgaagaagtttctattaaaaca

SEQ ID NO: 278242 - DNA, 694 bp, Unknown
  Bacterial polypeptide expressing nucleotide sequence isolated from the Sargasso Sea
aatgtctgaattaaataacatagctctaaaaattattggaaatggaaaaggaatccttgcggctgacgaaagtacaggaaccatgactaaaagacttgatagtgtaaatgttaaatctaattcagaaaatagattattattcagagaaactcttttcacgtctgatagaatgagagattgcattggtggagttatactttatgacgaaaccataaaacaatgcggtagctcaggaaaaacaatcccagaaataatctctgaaacaggatctgtgcctggaataaaagttgatacaggagcaaaagatttagcaaactcgaaagaagaaaaaattactgaaggtcttgatggtttaagagaaaggttaaaaacatattatgctttgggtgcaaggtttactaaatggagaggtgtatatttaatttctgataattaccctagtaaattatcaattaattctaatgctcatgcactagctaggtactctgctttagcgcaagaatgtggcatggtgcctatagtagaaccagaagtattaatggagggaaatcattctgcagatgattgttatgaaaaaacatcaatagtattaaaaaaatgtttcgatgaacttgaattacataaaatagatttaaaaggcaataatattaaaaccaaatatggattttgcctggatcaaaatctacaaagaaaa

SEQ ID NO: 278243 - DNA, 745 bp, Unknown
  Bacterial polypeptide expressing nucleotide sequence isolated from the Sargasso Sea
tatgtcattaaatacattagaagaaatagctgaatatatagtttcagatggaaaaggaattttggcagcagacgagagcaatccaacatgtgggaagcgatttgattctattggtgtcgagtcaactgagtctaataggcgtgattatagagagatgctatttagatcaagtggtatgaaagacaatatcggaggcgtaattttatttgacgaaacgataagacagaatgctcaagatggaactcctcttatagaacttataaagaatcaaggagctttgccaggtataaaagtcgataagggccttgcacctttagactcatcgccggaggaaactttaacacaaggtcttgatggtctagatgagagatgtaaagaatatttcacgcttggtgcaaaattcactaagtggagagcagtcattaaaatatctgatgacattccaacagatgcatgtatccaagccaatatggaagctctagctagatacgcaaaaattgttcaagaaaataatatggtgcctatggttgagcccgaagtcctgatggatggcaatcactcaattgagagatgttatgaggtaaccagcaaatcattgaatacactttttaaatgcttaaaagatcaaggagtgaatattgcaggcacaattcttaaacctaacatggtaacttctggatcaactgctgaagctcaagcatcaattcaagaggtggcagaaatgaccgttcaatgccttaaggaa

SEQ ID NO: 278244 - DNA, 445 bp, Unknown
  Bacterial polypeptide expressing nucleotide sequence isolated from the Sargasso Sea
atgacacttaacaatattgaagaaatagcaacttttattgtagaagatggaaaaggtatccttgctgctgatgagagcaatcctacttgtggtaaaagatttgaatctattggagttgaatcaacagaagaaaatagaagggattacagggaaatgctttttagatcaaaaggaatgaagggaaatattggtggagtgatactttttgatgaaactataagacaatcatctgaagatggcacgctattgagagatattatttcaaatcaaggtgccttaccaggaattaaagtcgataaaggattacaacccattgaggattgtccaggcgaaacagtaacaatcggattagatggtttggatgaaagattaaaagaatattcatcgatgggagcaaaatttacaaagtggagagctgtcatcaatattggagatggaataccta

SEQ ID NO: 278245 - DNA, 518 bp, Unknown
  Bacterial polypeptide expressing nucleotide sequence isolated from the Sargasso Sea
tatggccctcgttccactaagactacttttagatcacgctgctgagaatggttacggtattccagctttcaatgttaataatcttgagcaagttcaagcaatcatggaagcagcatatgaaactgatagtccagttatcctccaagcttcaagaggggcaagaaattatgcaggagaaattttcttacgtcatctaatccttgccgctacagaaacatatccaaatattccagttgtaatgcaccaagaccatggtaatgagccatcaacatgctattcagcagcaataaatggtttcacatcagtaatgatggatggttctctagaggcagatgcaaaaacacccgcaagttacgaatataatgttgcagttactaaaaaggttgtagattttgctcattcagttggggttagtgttgaaggagaattaggttgcttaggttcattagaaacagggaaaggagaagctgaagatggtcatggttttgaaggtgaactttctacagaatatgctttga

SEQ ID NO: 278246 - DNA, 943 bp, Unknown
  Bacterial polypeptide expressing nucleotide sequence isolated from the Sargasso Sea
gctttcaatgttaataaccttgagcaagttcaagcaattatggaagcagcatatgaaactgatagtcccgtaatcctccaagcttcaagaggggcaagaaattatgcaggagaaattttccttcgtcatctaatccttgctgctacagaaacatatcctaatattccagtggtaatgcaccaagaccatggtaatgagccatcaacatgttattcagcagcaataaatggtttcacatcagtaatgatggatggttctctagaggcagatgcaaagacacccgctagttacgaatataatgttgcagttacaaaaaaagtagtagattttgctcattcagttggagtcagtgttgaaggagaattaggttgcttaggttcattagaaacaggaaaaggtgaggcagaagatggtcatggatttgaaggtgaactttctacagatatgcttttgactgatcctgaagaagcggcagattttgttgctaaaacaaaagttgatgcattagcaattgcaataggtacaagtcatggtgcctataaattcacaaggaagccaacaggagaagttcttgcaataagcagaattgctgaaatccataaagcacttccaaatacacatcttgtaatgcacggatctagttcagtgcctcaggaatggttggatatcattaacaaatatggtggtgaaatccctcaaacatatggtgttcctgttgaagagattcaagagggaataagaaatggagttaggaaagtcaacattgataccgataacagacttgctttcactgccgcggttagagaggcagcatttgctgacaaggcaaactttgacccaagacatttcaacaaacctgctagaaaatacatgaagcaagtttgtcttgatagatacaagcagttctggtgcgaaggtcaagcaagtaagatcaagcaaaaca

SEQ ID NO: 278247 - DNA, 904 bp, Unknown
  Bacterial polypeptide expressing nucleotide sequence isolated from the Sargasso Sea
aatggatctaagttcattgaattcaatagctcaatcaatggttgctcccaataaagggatacttgctgcggacgaaagcacgccaaccattggaaaaagatttgcaacaattgatacagagtcaacggaaggcaatcgtcaaacatatagaaatttacttttcaccagtccaaatgtttctgaatacataagcggcgtcattttatttgatgaaaccatcaggcaatcaaccgatgatggaatcccatttccagagcaccttacttcactcggtattgtcccaggaattaaagttgataaaggaataaaaggcattccattttgcaaaggagaaactgtcacggaaggattggatgggctagctgaaagattaagcgaatactatgaattaggcgctagatttgccaaatggagagcggttataaatatttctgcagacctaccatcaaacaattgcatcagactcaatgcacatgcgttggctagatatgcagcactttgccaacaagcacaaatggttcctattgtagaaccagaagtcctcatggatggaaatcatgatatagatcgatgttttgatgttacttcgaaagtcttgcaagaggtcttcgctgaactcaataaacagaaagtagctttaaatggaatcgtacttaagccaaacatggttatttcaggcatggatgctgcaaacagagcggatattccaacagtggccagtgcaacagtaaaatgcttaactgagaatgtccctgatgaagttccaggtatcgcattcctatctggcggacagacctcagaagaggcaaccgcacatctgagctcaatgaatgaaatgggatcttacccgtggcaattgactttttcttatggcagatctcttcaagccgaaccactcaaagta

SEQ ID NO: 278248 - DNA, 621 bp, Unknown
  Bacterial polypeptide expressing nucleotide sequence isolated from the Sargasso Sea
aatgtcattagaagaaattgcgaattatatagtttcagatggtaaaggaattcttgccgcagatgaaagtaatccaacatgtggcaaaagatttgattctattgaggtagaaaattctgaggataatagaagagattatagagagatgctttttagatcaaaaggcatgaaaggaaatattggcggagtaattttatttgatgaaactctgaggcaggatgctaaagatggcactccccttaaagaattaatcagtaatatgggtgccctgcccggcattaaggttgataaaggcttagtgcctcttgttgatggattagatgaagtagtgactcaagggttggatgggctcgatgaaagatgttccgaatatgattctttaggagcaaaatttacaaagtggcgtgcggtaataaaaattggagacagtatgccatcagatgattgtattaatgcaaatgccaaagcattagcagattatgctgcaattgctcaatctaataatatggtgccaatagttgagcctgaagttttaatggatggtagccattcaattgatctttcttatgatgcttgcgcaagatcttttcaagctctttttgatgctctagacaataatgg

SEQ ID NO: 278249 - DNA, 912 bp, Unknown
  Bacterial polypeptide expressing nucleotide sequence isolated from the Sargasso Sea
aatgaacgatttatctcaaactattttacctggcgtaatagtgggtgacgaggtaagtgcaatatataaccatgcgcgtgctaaccagtatgcgctgccagctgtaaatgtagttagcacaacctcaattaatgcaactcttgaggctgcgaaagaaatgaagtcaccggttattattcagctttcaaatggtggtgcacagtttttttgtggtaaaggcctctcattaccagaacaacaaggtgcagtacttggtgcggtgagcgcagctaggtatgtacatagtgttgcggcgcactacgaaatccccgttatgcttcataccgatcacgcagccaaaaaattattaccatggattgatggtttgttggatgagggtgaaaggcattttagattgacaggtaagccgttgtttaactcacacatgatcgatttatctgaagagccgctagaagagaacatagagatatgtgagcgctacctagcacgcatggctaaaatagggatgacactagaaattgagcttggttgtacaggcggagaagaagacggtgtcgataattcccaccttgatagctcagcgctttatacgcagccagaagatgttgcttacgcttatgaacgcttaagtgctattagtcctaattttatcattgccgcttcttttggcaacgtgcatggtgtttataaaccaggaaatgttgtccttacgcctactattttaaaagactcacaagcatatgtagcgaaaaaatttaacttaccgagtaattcaattaactttgtatttcatggtggcagtggttcagaggaagaaaaaattgcagagtcattaacgtatggtgtagttaaaatgaacattgataccgatacgcagtgggcatgttggaacggtgttttagattactacaa

SEQ ID NO: 278250 - DNA, 730 bp, Unknown
  Bacterial polypeptide expressing nucleotide sequence isolated from the Sargasso Sea
aatggatctaagttcattgaactcaatagcacaatcaatggttgccgctaacaaggggatacttgctgcggacgaaagcacgccaaccattggaaaacgatttgccacaattgatacagaatcaactgaaagcaatagacaaatctatcgcaatttacttttcacgagcccgaatgtttcagagtatataagcggtgttattttatttgatgaaaccatcagacaatcgactaatgatggaacaccatttgcagagcatctcacgtctcttgggattgttccaggcatcaaagtggataaaggcgttaaaggcatccctttttgtgatggagaaaccgttacagagggactggatgggctagatgaaagattggatgagtattacgagcttggtgcaagattcgcaaaatggagagccgttattagcatctcagaggatctgccatcaaagaattgcatcagactgaatgcgcatgcattggcaagatatgccgcactctgtcagcaagcacagatcgttccaattgtagagcctgaagttctaatggatggaactcatgatatcgatagatgctttgatgttacatcagaagttttgcaagaagtttttgccgaattaaataatcaacaagttgctttaaatgggattgtactcaagccaaacatggttatttcaggaatgaatgctgccaatagagcagatattcccactgtggcgagtgcaaccgga

SEQ ID NO: 278251 - DNA, 794 bp, Unknown
  Bacterial polypeptide expressing nucleotide sequence isolated from the Sargasso Sea
aatgtcattagaagaaattgcgaattatatagtttcagacggtaaaggaattcttgccgcagatgaaagtaatccaacatgcggcaaaagatttgattctattgaagtagaaaattctgagaataatagaagagattatagagagatgctttttagatcaaaaggtatgaaaggtaatattgggggagtaattttatttgatgaaactctgaggcaggatgccaaagatggcactccccttaaagaattaatcagtaattcaggtgcccttcccggcattaaggttgataaaggcttagtacctctggttgatggatcagatgaagtagtgactcaaggattggatgggctcgatgaaagatgttccgaatatgattctttaggagcaaaatttacaaagtggcgtgcagtaataaaaatcggagatagcatgccatctgatgattgtattaatgcaaacgccaaagcattagcagattatgctgcaattgctcaatctaataacatggtgccaatagttgaacctgaagttttaatggatggtgaccattcaattgatctttcttttgatgcttgcgcaagatcttttcaagctctatttgatgctctagaaaataatggtgtaaacataaaagggaccatactaaaaccaagcatggttactccaggctcgctatctgaaaaagtagcaatcagagaagtggctgaaatgacagtaaggtgccttaaagagaatattccttcagatcttcccggagttgcttttttatcaggagggcaaacagagcttgaag

SEQ ID NO: 278252 - DNA, 760 bp, Unknown
  Bacterial polypeptide expressing nucleotide sequence isolated from the Sargasso Sea
tatgtcactaaacagtatagaagatattgcaacttatatagttgcagatggtaaaggaatactagctgcagatgaaagtaatccaacctgtggaaaaagatttgactctataggagtcgaatcaactgaagttaacagaagagattacagagaaatgctttttagatctaaaggaatgaaaggaaatataggtggagttatattatttgacgagactattagacagtcagctgatgatggaactttgttgagagatttaatatcagatcaaggcgcccttcctggaattaaagttgataaaggccttcagcctattgaagactgcccaggagaaacggtaacagtaggtctcgaaggacttgacgaaaggctgaaagaatatgcaactatgggtgcaaaatttactaaatggagagctgtaataaatattggggatggaattccaactaataaatgcatcgatgcgaacatggaagctttagcagattacgcaaaatgcgctcaagataatggtatggtgcctattgtagagcccgaagtgctcatggatggcaatcattgtattgatgaatgttatgacgcaactgagcgctcattgaaatctctattttcttaccttaaaaaaaaaggtgtcaacatcaagggcacgctattaaagccaaacatggtaacttctggaaaagacgctgaagagcaagctggaattaatgatgttgcagaaaaaacattagactgtttaataacaaatgttccgtcgagt

SEQ ID NO: 278253 - DNA, 671 bp, Unknown
  Bacterial polypeptide expressing nucleotide sequence isolated from the Sargasso Sea
aatggctttaaattattacaaaaatgagcttaaagaaaatgctcaattactagctactaaaggaaaaggaatattagctgtagatgaatcaactaaaacagtaggtaaaagactagctggaattggcgttgagaatactgaagacaataggaaggcatatagaggaatgctttttactacagaaggtcttggcaaatatataagtggagcaatcctcttcgaagaaactctttataagaaccaccaagatggcgagtcaatggttaagaaactaaatgatttgggtattattccaggtataaaggtcgataaaggcctaaatccacttccaggaggaggagatgtagaaactttttgctctggtctagatggtttagttgaaagagcagcaaaatattatgaacaaggtgccagatttgcaaagtggagagcagttttgcaaattacaaatgatggttgtccttcaaaactatcaattcaagagaatgcttggggattagcaaggtatgcaagatcagttcaagaatctgggctagtacctattattgaacctgaaatcttaatggacggcgaccatactattgaaaaaactgctgaagttcaagaagaggtaataaagcaggtttatattgccctgtcagcaaatggagtttttctagaaagcactctat

SEQ ID NO: 278254 - DNA, 698 bp, Unknown
  Bacterial polypeptide expressing nucleotide sequence isolated from the Sargasso Sea
aatgagtttagagtttgaaagtttgaatgacattgcggaggcaatgacagttaaaggtaaaggtatattagcagcagatgaaagtagtccgacctgtaagaaaagatttgattccataaatgtagatagcactgaaaagaatcgaaatatatacagagatatgttatttactacaaaagggatggaagaatttattagcggtgtaatactgtttgatgaaactattaggcaatccacaattagagatggttttagttttccagattatttatcgggacttggtgtaattccgggcataaaagttgatgcaggtgctaaacacttatccggcacggatagtgaaaagattaccgaagggctagatggtttagatgggaggcttaaggattattacaaaatgggagctcgctttgcaaaatggcgggccgtcataacaattggtaataatgagccttctggtacttgcattacagctaatgcacatgctttggcaagatatgcgtctttatgtcaggagaatggtattgtacctattgtagaacctgaaattctcatggatggagatcatacaattgaagagagttttgtcgtttctgaggaagttttacacactgttttttacgagttgtatggacaaaatgtggaactagaggggatggttcttaagcccaacatgattctatcaggctatgactgta

SEQ ID NO: 278255 - DNA, 914 bp, Unknown
  Bacterial polypeptide expressing nucleotide sequence isolated from the Sargasso Sea
tacaaaattgctaaaaaaattcttcaaaatggaaaaggaatcctggcagctgatgaaagcactggaactatgaaaaaaagattagacttagtaaatgtagagtctaatgaaaaaaatagattaatatttagggaaacacttttttcttcaaactcaatgaaagaatgtattggcggtgtgatattatatgatgaaacaattaaacaaaaaactttgcaaaacaaatctataccagaattaatttctgaaagtggagctgtgccaggaataaaagttgacacaggtacaaaaactttagcaggttctaaagatgaaaaaattactgaggggttagatggtttaagagaaaggttaaaagattattatcaacttggtgctagatttactaaatggagaggtgtttatgtaatctctgatacgttcccaagtaaattatcaatctcagctaatgctcatgctttagctagatacgcagcactagcacaagaggctggtatggtgccaattgtagagccagaagttttaatggatggaaaacactcagcaaaggattgttttagtaaaacatcagaggttattaaaagatgctatgaagaattaaatataaataaagttgatctaaaaggtacaattttgaaacctaatatgatcctgccaggaactatgtctaatgaaacaatttctaatattgaagtagctgaaatgacattagaatgtttaaaaaataatgtcccatctgaagttccaggtgtagcatttttatctggtggacagtcagaaattgaagcaacaaataatcttaaccaaataaatgttgaaaataacactaattttattttgacctattcatatggacgagctcttcagcaaagtgctttaaaaatttggtctaaagacactaataatatagaggg

SEQ ID NO: 278256 - DNA, 737 bp, Unknown
  Bacterial polypeptide expressing nucleotide sequence isolated from the Sargasso Sea
agttgacaaaggagcaaaacttttagcaggatcagataaggaaaaagttacagaaggcttagatggactaggagaaagaatggaagagtattatgagttgggagcaagatttgctaagtggcgtgctgtctactcaatttcttctaaacttccaagcgaacaatgtataaaatcaaatgctcacgctttggcaagatacgctgcgttagtacaagaatcaaagatggttccaatagtagaacctgaagttttaatggatggaaaccatacaattgataactgctacgatgttactagcaaagttttaaaagaatgttacaaagaacttgcaattcataatgttaatcttagaggaactgttcttaaaccaaacatgatacttcctggttcaaattgtaaacaaaaagctaccacagaagagatagccaaaaaaaccttagaatgtcttaagaaaaatatgccaagtgaagttcctggtgttgcttttctatctggggggcaaagtgaagtagaagcaacaaaaaatttaaatgctattaataaaattaatgatacttcatttaattttactttctcctacggtagagctttacaacaatcagctttaaaaacttgggcaaaatcaatgcaggatacaaaaaaaattcaaaaggtttttgatcatagagccaaaatgaatggcgcctctacagaagcaaaatgggatgaaaagcttgaacaaagttttgctgcttaaa

SEQ ID NO: 278257 - DNA, 910 bp, Unknown
  Bacterial polypeptide expressing nucleotide sequence isolated from the Sargasso Sea
tatggaaatagaaaaaattgcaaaactcatggtagctaagggtaagggtatactcgctgctgatgagagtaacggaactatgggaaaaagattgcagagtgttaacgtggagtctactgaaaaaaataggctgcattttagagaaacactgtttacttcaaacgcaatgaaaacttctatcagtggagttattttatatgatgagactataagacaaaagtcaagtgaaggtataccaataactgaacttatcaaaaagagtggttcaattcctggtatcaaagttgatacaggggcaaaacctctagctggatccaacgatgaaaaggtaaccgaaggacttgatggtttaagagaaagaatgttcgagtactataaactaggagcaagatttgcaaaatggcgagctgtttatgatattacatcgaagcatcctagtgaacaatgtataaaagctaatgctcatgctttagcaagatatgcagcaatagttcaagaagcaaatatggtacctatcgttgaaccagaagttttaatggacggtgaccatactataaacaaatgttacgaagttacgagcaaagttttaattgaatgttacaaggagttaaagataaataatgttagacttgagggaactattttaaaaccaaacatgatacttcctggcgcaagttgtaaacaaaaaacaacttctgatgaaattgctaagaaaacactcgaatgcttgaaaacaacaatgcccaaagaagtacctggggctgccttcctttcaggaggacaaagtgagatagaagcaacaaaaaatttgaatgcaataaacaaaattaatgatactaaatttaattttacattttcttatggacgtgcactaccacaatcagcattgaaaactgggctaagtcaatga

SEQ ID NO: 278258 - DNA, 877 bp, Unknown
  Bacterial polypeptide expressing nucleotide sequence isolated from the Sargasso Sea
ccagcttttaatgtaaataatcttgaacaggttcaagcgatcatggaggctgcttacgaaactgatagccctgtaattcttcaagcttcaagaggagcaagaaattatgctggagaaattttccttcgtcacctgatccttgccgcaacagaaacttatccaaatattccagttgtaatgcatcaggatcatggtaatgagccatcaacttgttattcagcagctattaatggttttacatcagtaatgatggacggatctttagaagcagatgcaaaaacacccgcaagttatgaatataatgttgccgtaacaaaaaaagtagtagatttcgcacattcagtgggagttagtgttgagggagaattaggttgcttaggatccttagagacagggaaaggtgaagctgaagatggtcatggattcgaaggtgaactttcaacagatatgcttttaactgatcctgaagaagctgcagactttgtagcgaaaactaaagttgacgctttagctatagcgataggaacaagtcatggggcatacaaattcacaagaaagccaacaggagaggttcttgctataagcagaattgctgagatccataaagctctaccaaatactcaccttgtaatgcatggatctagttcggttcctcaagaatggttagatatcattaataaatatggtggagaaattccacagacatacggtgtacctgtagaagaaattcaagagggaattagaaacggggtaaggaaggtaaatatcgatactgataatagacttgcatttacagcagcagttagagaagctgcttttgctgatacagcaaactttcgacccagacatttccataaaccctgcagaaatacatgaa

SEQ ID NO: 278259 - DNA, 813 bp, Unknown
  Bacterial polypeptide expressing nucleotide sequence isolated from the Sargasso Sea
tatgtcactaaataatattgaagatatagcagcctatattgtcgcagatggcaaaggtatcttagctgctgatgaaagcaatccaacttgtggaaaaagatttgattctattggtgttgaatccaccgaagagaatagaagagattacagagaaatgctttttagctctaaaggaatgaaaggcaatattggtggagtgatattatttgatgagactataagacaatcagctgctgacggaactttacttcgagatttaataaccagtcaagatgctcttcctggaataaaggttgataagggtcttcaacctattgatgattgtcctggagaaaccgtgacagttggattggatggattagatgagagattaaaagaatattcatctatgggagctaaattcactaaatggagggctgttataaatataggtgaaggaattccaactgataaatgtattgacgcgaatatgcaggcattagcggattatgcaaaatgtgctcaagataatggaatggttcctatagtagaaccagaagtattaatggatggagttcactctattgatgattgctatgacgcatctgatcgttctttaaaatcgctgtttgatcatcttgataaaaagggggtaaatataaagggcactatcctaaaacctaatatggttacttctggaaaagactcagacattcaagctagcattggcgaggtcgctaagagaactttagaatgtttaactgagaatgttccgtctgatcttcctggcatagcatttttatctggaggtcagtcagatatcttggctactgc

SEQ ID NO: 278260 - DNA, 844 bp, Unknown
  Bacterial polypeptide expressing nucleotide sequence isolated from the Sargasso Sea
gaaattatctcaaatggtaaaggtattttagcagcagacgaaagtactggtacaatgactaaaagactggagagcgtgggggtgtcatcaacctcagaaaacagactatcttttagaaatatacttttcagttcaagctgtatgaggaagtatattggtggagtaattttatatgatgaaacaattagacaattatataataatataaaaattcctgaaattatttctaacatgggatctcaccccgggattaaagtagatactggtgctaaagtattagctggatccaaagaggaaaaaattactgaaggattagatggtctaagagaaagattgaaggagtaccatagcctaggtgcaaagtttacaaaatggagaggtgtatatactatttcagaaaaatatcctagtaagttatctataacatcaaatgcacacgcactagcaaggtactctgcaatagtgcaagagtgcaatatggtcccaatagttgaacctgaggtattaatggatggtaaccacagtgcaaatgattgtttaaaaaaaactactgaggttataaaaaaatgttttgatgagttgattttacataacgtagatttaagtggtataattttaaaaccaaatatgatacttccaggaaataattcaaaacaaaaaatctcaagtcaagaggtggcaaatttaactattgaatgtttaaaaaattcagttccctcagaagttccgggcattgcgtttttatcaggcggacagtcagaggttgaggctacagaaaatttaaatttaataaataaaaataacaatacaaaatttataatgactttttcatacggaagagcat

SEQ ID NO: 278261 - DNA, 876 bp, Unknown
  Bacterial polypeptide expressing nucleotide sequence isolated from the Sargasso Sea
aatgttaccagaaactcttgaagaaatagcaaattatattgttgctgatggaaaaggaatcctagctgctgatgaaagcacgggaactatcgaaaagagatttaagtcaattgatgttgaatcaactgaagaaaacagaagaaagtatagagaaatgttatttcgatcttctgctatgactgaagcgataggtggagtaattctttttgatgaaactcttaggcaaaatgcagcagatgggacaccattaagagaagttattctttcacagaaatctcttccaggaatcaaagtagatcagggagttcagccttttaatggaagcgatacagaaaaaataactcaaggattggatggcttagacgaaagatgtaaagaatatgataacttgggagctaaatttactaaatggagagctgttatcaacattggagattcaattccttcaaatgattgcataaatgataatatgaaatctttagctaaatacgcatctattgcgcaacaaaataacatggtcccaattgttgaacctgaagttattatggatggtaatcactcagttgaccaatgctatgatacaacaaagaatgttttgcagaaactttttgatttactagaaaaagaaaatgttaatattaaaggaactttacttaaaccaaatatggtagtttcaggaacagaaaatgaatatcaagctcctgttcaggaagttgcagaaaaaactgttgagtgcctaaaattatcaatcccgagtgacctcccaggagtagtttttttatcaggaggccaatcagacttggatgctacggctcatcttgatgcaatgaataaaattggaggatttaattggaaactaagtttctcatatggaaa

SEQ ID NO: 278262 - DNA, 808 bp, Unknown
  Bacterial polypeptide expressing nucleotide sequence isolated from the Sargasso Sea
atgctgccaaaaacactagaagatattgctaaataccttgttgcagaaggcaagggcatacttgccgcagacgaaagctcaaaaacaattgagaaacgatttaaagcgattcatgtggcttcaaccgcagaaaatcgccgcaaataccgagaaatgttgttccgctcctcgagcctacccaaagctatcagcggtgtcatcttatttgatgagacgctgagacaacaagccgcagacggtacttttctaagagatattttacacgctcaaggcaccttagctggcatcaaagtcgacttgggccccaaacctttcaatgaacaaactggagaaactctcacaactggcttagaaggcttaatggaacggtgccgagagtataaagcgctgggtgcaacatttacaaaatggcgagctgttattcatatcagcgacaccaaaccctcagacagctgcattcatgccaacatgcaagccttggcagaatacgctgctattgtacaacaaaatcaaatggttcctattgtagagcctgaagttattatggacggtaaccacacgattgatagatgctacgacgtcacaaaaaaaacactaactgtgctctttgaacaactaaaacaaaaagatgttaatatcaaaggtacactattaaaaccaaatatggtcatttcaggcaccgagaatcctcatcaagcctcgatccaagaagtagcagaaaaaacactccgctgcctcactgcaaccgtacccgaaacactacctgggattgttttcttatctggtggtcaatcagatattgatgcaa

SEQ ID NO: 278263 - DNA, 830 bp, Unknown
  Bacterial polypeptide expressing nucleotide sequence isolated from the Sargasso Sea
aatgacaattttaaataatatcgctcttgaaataatatcagacggtaaaggtatattggccgctgacgaaagtacagcgacaatgacaagaagactcgatagtgttggagtatcatccacatctgaaaataggttggcttttagaaatatacttttttcatctgaaagtatgaggaaatgtattggaggagtaattttatatgaagagacaattagacaatcatataacagtaaaagaatacctgaaattatttcaaacatgggatctcatattggaattaaagtagataccggggcaaaaactttagcagggtcacctcatgaaaagattacagaaggtcttgatgggttaagagaaagactaaaagagtattataatttaggcgcgaaatttacaaaatggagaggtgtgtatattatatctcaaaaatatcctactaagttatcgatgaaatcaaatgctcatgcattagctagatatgctgctattgtgcaagaatgtaaaatggttccaatagtagaaccagaggtacttatggacggcagtcattcagcaaatgaatgtttagaaaaaacttccaaagttattaaagaatgttttaatgagctaatgttacataacgttgatttgagtggcctaatcctaaaaccaaatatggtactagcagggagtgactcaggagataaaatttctggtgacgaagtggcaaaattaacacttgaatgtctaaaaaattcagtcccgaaagaagtgcctggaatagcatttttgtcaggtggtcaatctgaagttgaagcaacagaaaatttaaatttaataaataaatata

SEQ ID NO: 278264 - DNA, 861 bp, Unknown
  Bacterial polypeptide expressing nucleotide sequence isolated from the Sargasso Sea
tatgcccttaattagtatgcgccaattattagatcatgcagcagaaaatgattatggtgttcctgcatttaatgtaaataatttagagcaaattagagcaattatggaaggtgctcagcaaatgaatagccctgttattattcaagcttcagctggagcaagaaaatactctggaccaatatttataaaaaatatgatgcaagctgcagttgaggagtttccaacaatacctattgtaatgcatcaagatcatggcggtacaccagatgaatgtgaggaatgtatagaattaggatttacttcagtaatgatggatggctctttattatcagatcaaaaaaccccttcaaattttgattataatgtaaaggtgacaaaagaaactgtaaaaattgctcatgctaaaggagtctctgtagaaggtgaattaggatgtttaggttccctagaaactggtatgggagaaaaagaagatggggtaggggccgaaggagttttatctcactcacaacttttaactgatcctgcagaagctgcagattttgtagatcaaacccaagttgattgcttagctattgcaattggaactagtcatggagcatataaatttactaaaccacctacaggagaagtattagcaataaacagaattaaagatattcatcaaaaaatacctaatacccatcttgtaatgcatggctcttcttctgtgcctaaagaattattggatattattaatgataatggaggtaaaattagtgagacctatggagtgccgattaaagaaattcaagaaggaattaaaaatggagttcgtaaggtcaatatcgatactgatttgagacttgctgctacagcagc

SEQ ID NO: 278265 - DNA, 857 bp, Unknown
  Bacterial polypeptide expressing nucleotide sequence isolated from the Sargasso Sea
tttaacgtaaataatcttgaacaggttcaagcaattatggaggctgcttacgaaactgatagccctgtaattcttcaagcttcaagaggagcaagaaattatgctggagagattttccttcgtcacttgatccttgccgcaacagaaacttatccaaatattccagttgtaatgcatcaggatcatggtaatgagccatcaacttgttattcagcagctattaatggttttacatcagtaatgatggacggatctttagaggcagatgcaaaaacacccgcaagttatgaatataatgttgcagtaacaaaaaaggtagtagatttcgcacattcagtgggagttagtgttgagggtgaattaggttgcttaggatccttagagacaggaaaaggtgaagctgaagatggtcatggatttgaaggtgaactttcaacagatatgcttttaactgatcctgaagaagctgcagactttgtagcgaaaaccaaagttgatgctttagctatagcgataggaacaagtcatggtgcatataaattcacaagaaagccaacaggagaggttcttgctataagcagaattgctgagatccataaagctttaccaaatactcatcttgtgatgcatgggtcaagttcagttcctcaagaatggttagatatcattaataaatatggtggagaaattccacagacatacggtgtacctgtagaagaaattcaagagggaattagaaacggggtaaggaaggtaaatatcgatactgataatagacttgcatttacagcagcagttagagaagctgcttttgccgacacagccaacttcgacccaagacatttcaataaacctgc

SEQ ID NO: 278266 - DNA, 788 bp, Unknown
  Bacterial polypeptide expressing nucleotide sequence isolated from the Sargasso Sea
ctccggtgccaagcacgttcacgccgttgccgaagcctacggtgtaccggtcatcctgcataccgaccacgccgccaagaagctgctgccgtggatcgacggtctgctggacgcgggcgagaagcactttgccgaaaccggcaagccgctgttctcctcccacatgctggatctgtccgaagagtctctggaagagaacatcgacatctgctgcgagtacctgacccgcatggccaagatgaacatgactctggagctggaactgggttgcaccggtggcgaagaagacggcgtcgacaacagccacatggaccagtccgccctgtacacccagccggaagacgtggcctacgcctacgagcgtctgtccaagatcagcccgcgcttcaccatcgctgcctccttcggcaacgtacacggtgtttacaagccgggtaacgtcaagctgaccccgtccatcctggatgcttcccagaagtacgtttccgagaagttcggtctgccggccaagtccctggacttcgtattccacggtggttcaggttccactctggaagagatccgcgagtccatctcctacggcgtggtgaagatgaacattgacaccgacacccagtgggcgacctgggaaggcattctgggcttctacaagaagaacgaagcctacctgcaaggtcagctgggcaacccggaaggcgctgacaagccgaacaagaagttctacgatccgcgtgtatggctgcgtgctggccagactaccatgatcgctcgtctggagaaggcgttct

SEQ ID NO: 278267 - DNA, 496 bp, Unknown
  Bacterial polypeptide expressing nucleotide sequence isolated from the Sargasso Sea
atggcactgataactttaagacaacttcttgaccatgcagctgaaaaccaatacggagtacccgcctttaacataaataatatggaacaaggcttggcaatactcaaggctgctgatagcaccgattctccggttattcttcaagcaagtaggggtgcaagggcttacgctggcgacattatgttatcacatatcgtggcggcgctagccaaaatgtatccaacaattccaatctgcatgcaccaggatcatggtaacaatgaggctacatgtatgacagctattgggcatggttttacatcggttatgatggatggctctttagaaagtgaccaaaaaacaccagcaagttatgattataatgttcaaatcacaaaaaaagttgctgagattgcgcattgggtaggagcatctgtggaaggagagcttggggttttaggaagtttagaaactggtgaagcagctaaagaagatgggtctggagcggaaggaaaac

SEQ ID NO: 278268 - DNA, 886 bp, Unknown
  Bacterial polypeptide expressing nucleotide sequence isolated from the Sargasso Sea
atcggaaatagattaaaatttagaaaaactctttttacatctgagtctatgaaatcctgtataggaggtgtaattttatacgacgaaacaataaaacaatcagtagggtcaaaatctgtatctgaattaatttctagttcgggtgcagtagctggaataaaagttgatacgggagcaaagacattatcaagctctaaagaagaaaaaattactgaaggtttagatggcttaagagaaagattgaaagaatattataagctaggagcaagattcgcaaagtggagaggtgtgtacacgatatccaaaacttatcctaccaaagttgcaatttctacaaatgctcacgcattggctagatacgcagctttagcccaagagtctggaatggttccaattgtggagcctgaagtccttatggatggaactcataattcaaaaacctgtttagaaaaaacaacagaagtaattaaaaaatgttttgaagaactgattttgcaaaaaattgatcttaaaggagttatcttaaaaccaaacatgatactaccaggaacaacttcagatgaaaaaattaattctgaaaaaatagctgagctaacactaaaatgtttaaatgatagtgttccaaaagaggttcctggaatggcatttttatcaggtgggcaatctgagattcaagccacagaaaatttaaatatgattaatttaaaaaataattctaattttaaaatgactttttcttatggaagagctctacagcaaagtgctttgaaattttgggctaaaaaccaagatgaaataaaaaaaactcaagaaatatttaaccatagagctaatatgtgtacactagccgcaaagggaaagtggaaaaaagaacttgagaaatagt

SEQ ID NO: 278269 - DNA, 631 bp, Unknown
  Bacterial polypeptide expressing nucleotide sequence isolated from the Sargasso Sea
atgacattagaagaaattgcaaaaaaaatgtgtgctaaaggcaaaggcatattggcagcagatgagagtactggcacaatagcaaaaagatttaagagtataaatgttgaaaatactgagaagaatagattggtctttagacaaactctttttagttctagatcaatgaaaaattacattggaggagttattctttttgacgaaactataaaacaaaaaactacacttggtccaactatacccgagttaatttcacaaaatggagctattccaggaattaaagttgataaaggggctaaacctttagctggatcacttgatgaaactgtaacagaagggcttgatggtcttcgagaaagattaaaagagtactacgaactcggagcaagatttgcaaaatggagagcagtcataaaaattggaattaaatttccatcatctcaatcaataaaatctaatgctcatgctcttgctagatacgctgcgcttgttcaagagtcaaaaatggttccaatagtagaacctgaagtattaatggatggatctcatgatatagataaatgttaccaagtcacaactgatgtactaaacgaatgttataatgaacttgaaattcataaagtcgattaaa

SEQ ID NO: 278270 - DNA, 749 bp, Unknown
  Bacterial polypeptide expressing nucleotide sequence isolated from the Sargasso Sea
ttgagagatattatttcaaatcaaggtgccttaccaggaattaaagtcgataaagggttgcaacccattgaggattgtccaggcgaaacagtaacaatcggattagatggtttggatgaaagattaaaagaatattcatcgatgggagcaaaatttacaaagtggagagctgtcatcaatattggagatggaatacctacggataaatgcattaatgcaaacatgcaagccttagctgattatgcaaaatgtgctcaagataatggaatggttccaatagttgagcctgaagtattaatggatggagaacattcgattcatgattgttatgccgcaactgatcgatcattaaagactttgtttgctcatttagaaaaaaatggtgtcaacatcaaaggcacacttttaaaacctaacatggttacctctggaaaagattttatcgaacaagcaggaatcgatgaggtcgcccataaaactttagactgtttaattaaaaatgtacctgcagaacttcctgggataacctttctctctggaggtcagtcagatattttagccacagctcatttagatgctatgaataggattgggggatttacatggaagttaagcttttcctatggaagagctcttcaagctccggctttaaaagcttggaatggaaaaccagaaaatgtatttatttctcaagatgaattatctcatagagcagaaatgaacaagcttgcttctcttggacaatggga

SEQ ID NO: 278271 - DNA, 734 bp, Unknown
  Bacterial polypeptide expressing nucleotide sequence isolated from the Sargasso Sea
aatggctttaaattattacaaaaatgagctaaaagaaaatgctcaattactagcttctaaaggaaaaggaatattagcggtagatgaatccactaagacggtgggtaaaagactcgctggaattggagttgagaatactgaagaaaacaggaaggcatatagaggaatgctttttactacagaaggtcttgggaaatacataagtggagcaatcctcttcgaagaaactctttatcagaatcacccagatggtgagtcaatggttaagaaactaaatgatttaggtattattccaggtataaaggtagacaaaggtctaaatccacttcctggagcaggagatgtagaaactttttgctctggtctagatgggttagttgaaagagcagcaaaatattatgaacaaggtgcaagatttgcaaagtggagagcagttctgcagattacaaatgatggttgtccttcaaaactatcaattcaagagaatgcttggggattagcaaggtatgcaagatccgttcaagaatctggtttagtgccaattatagaaccagaaatcttaatggacggcgatcatattattgaaaaaactgctgaagtccaagaagaagtaataaagcaggtttatattgcctgtccagcaaatggagtttttctagaaggaactctattaaaaccttctatgactgttaatggagcagattgtccacaaaggctgatccctatcaagttgc

SEQ ID NO: 278272 - DNA, 849 bp, Unknown
  Bacterial polypeptide expressing nucleotide sequence isolated from the Sargasso Sea
tatgtcactaaataatattgaagatatagcagcctatattgtcgcagatggcaaaggtatcttagctgctgatgaaagtaatccaacttgtggaaaaagatttgattctattggtgttgagtccaccgaagagaatagaagagattacagagaaatgctttttaggtctaaaggaatgaaaggcaacattggtggagtaatattatttgatgagactataagacaatcagctgctgacggaacattgcttagagatttaataactagtcaagatgcccttcctggaataaaggttgataagggtcttcaacctattgatgattgtcctggagaaaccgtgacagttggattggatggattagatgagagattaaaagaatattcatctatgggagctaaattcactaaatggagggctgttataaatataggtgaaggaattccaactgataaatgtattgacgcgaatatgcaggcattggcggattatgcaaaatgtgctcaagataatggaatggttcctatagttgagccagaagtattaatggatggagttcactctattgatgattgctatgacgcatctgctcgttctttaaaatcgctgtttgatcatcttgataataagggggtaaatataaagggcactatcctaaaacctaatatggttacttctggaaaagactcagaaattcaagctagcattggcgaggtcgctaagagaactttagaatgtttaactgagaatgttccatctgatcttcctggcatagcgtttttatctggaggtcagtcagatatcttggctactgctcatttagatgcgatgaacaagattggtggcttttc

SEQ ID NO: 278273 - DNA, 796 bp, Unknown
  Bacterial polypeptide expressing nucleotide sequence isolated from the Sargasso Sea
aatggctattatatcactcaggcaacttttagatcatgcagcagcgaataactacggtgttcctgcttttaatgtcaataatttagagcaaataagagcaattatggaaggagctaatgaagttaatagccctgtcatagttcaagcttctgctggagcaagaaaatatgcaggtccaaaatttataaaaagtatgatggaagctgcagttgaagaatttcctcaaattcctattgttttgcaccaagatcatggagggtcacctgctgattgtaaagtatgtatagatcttggttttagctctgtaatgatggatggttctttacttgaagatcaaaaaacaccgtctgattttgattataatgttaaagttaccagagaaactgttaatatggctcataatttaggtgtttctgtagaaggtgagttagggtgcttaggttcacttgaaacaggtatgggagataaggaagatggagttggagctgagggagttttatcgcatgaccaattattaacagaccctgaagaagcagcagaatttgttaaatccactaatgtagacgctctagcaatcgctataggaacaagtcacggagcttataaattctctagacctccctctggagatattttggcaatagatagaattaaagaaataaataataaattacctaatacacacttagtaatgcatggctcttcttcagtgcctcaagatttaataaagattattaatgaaaatggtggtaaaataaaagaaacgtacggcgtacctgtttctgaaatacaagaa

SEQ ID NO: 278274 - DNA, 832 bp, Unknown
  Bacterial polypeptide expressing nucleotide sequence isolated from the Sargasso Sea
atcccttgccgcctcgcggggcgcgcgcgcctatgcgggggatcgcctgctggcgcggttgattgacgggctggtcgagaccttccccgaagtcccggtctgcatgcatctcgatcatggcagcgatctggccacctgcgccaccgcgatccagcatggcttcacctcggtgatgatggacggctcgctgctggccgatggcaagacacccgccgattacgcctataaccgcgatatcaccgcgcgcgtggtcgagatggcgcatgcctgcggtgtctcggtcgaaggcgaactgggggtgctcggctcgctcgagaccggcatgggcgatcaggaagacggccacggtgcgaccgagaagctctcggaagagcagttgctgaccgaccccgaagaagccgaacgcttcgtgcgcgaaaccggcgtcgatgcgttggctgtggcgatgggcaccagccacggcgcctacaagttcacccgccagcccgatggcgacattctcgcgatgaatgtcatcgaagagatcaaccgccgcctgcccaatacccatctggtcatgcatggctcgtcctccgtccccgaggatctgcggcagatgatcaacagctatggcggcgatatgcgcccgacttggggcgtgccggtcgaggaaatccagcgcggtatccgctcgggcgtgcgcaaggtgaatatcgacaccgacaaccgcatggcgatgacggcaggcgtgcgcaaagtcctgtccgagacgcccggcgaattcgatccgcggaaatatctgaccgagggcaaggcgctgatgcagcagctttgcaaggcgcggttcgaagcg

SEQ ID NO: 278275 - DNA, 841 bp, Unknown
  Bacterial polypeptide expressing nucleotide sequence isolated from the Sargasso Sea
aaaataatttctaggggtaaaggtatacttgctgcagatgaaagcaatggaactatgactaatagacttacagcagtaaatgtaaattcaactcctgaaaatagactattgtttagggaaattcttttctcatctgaatgcatgaaagattgtattggaggggttattctttatgatgaaacaataaaccaaactacaagttttggaaaatccattcctgacctaatttcagcctcaggcgctgtgccaggaattaaagtcgatacaggtgctaaagaattagcaaactctcataatgagaaaattactgagggtttagatggtcttagagatagattgaaaaaatattatgaacttggagcaagatttacaaaatggagaggagtttactctattagtaataaacatccaactaagcttgccatgaatagtaatgctcacgcacttgcaagatactcagctctagttcaagaaaatggtatggtcccaatagtagagcctgaagtattaatggatggagagcattcagcagatatttgtttaaacaaaacatcagagattataaaaaaatgctttgaagaactaatcttacataaagttgatctttctggaattattttaaaaccaaatatgatattagctggcactcaatcaaaagaaaaagctaccagtgaagaggttgcagacaaaacacttgagtgtcttaaaaattcagttccttctgatgtgcctggcattgcttttttatcaggaggtcagtctgaattagaagctacagaaaatttaaatttaatatataaaaaaaacaatactaattttattatgacatactcatatggaa

SEQ ID NO: 278276 - DNA, 667 bp, Unknown
  Bacterial polypeptide expressing nucleotide sequence isolated from the Sargasso Sea
tatgacattagaagaaatagcaaaaaagatgtgtgccaaaggtaaaggaatattagcagcagatgaaagcactggtacaattgctaaaagatttaaaagtataaatgtagaaaatactgagaaaaataggttagtttttaggcaaactcttttcagctccaaagctatgaaaaattatattggaggagtaattctttttgacgaaaccataaaacaaaaaactacacttggaccaaccataccggaattaatttcaaaaaatgatgctataccaggtattaaagttgataaaggcgccaaatctttggctggatcaccggatgaaactataactgaaggtttggacggtctgagagaaagattaaaagaatattacgaacttggtgcaagatttacaaaatggagagcagtttataaaattggaaatcactatccatctttgacgtctataaaatcgaacgcacatgctctcgctagatatgcctcactagtgcaagaagcaaaaatggtgccaatagtagagcctgaggttttaatggatggatctcatgatatcgataaatgttatcaagtaactactgatgtactaaatgaatgctataatgagcttgcaattcataaagtaaatttaaaaggaacagttttaaaaccaaacatgatacttcca

SEQ ID NO: 278277 - DNA, 892 bp, Unknown
  Bacterial polypeptide expressing nucleotide sequence isolated from the Sargasso Sea
atgtcagaactacataaaattgctggagatcttgttgctgctggtaaaggtatacttgcagcagacgaaagtactggaactatgactaaaagattaaagtcagtaaatatagattcgaatgaaacaaatagattaatgtttagaaattttttatttacttctactgaaatgaaaaaatgcattggaggtgttatactctttgatgaaacaattaatcaaaaagttggtgaaaagagtataccttttattattaaagaaaacggatctattccagggataaaagttgataccggtgctaaagtgctcgctggttctgaaaatgaaaaagtaaccgaaggtcttgatggtttaagagaaagattaaagatttattataaactaggttcaagatttacaaaatggagaggagtttataatatttcaaaatcatgccctagcagacttgcagttcatgctaatgctcatgcattgggaagatatgcggctttggcacaggaatcgggtatggttccaatagtagagccagaggttttaatggacggttcacacggttctgatgtgtgtttaaaagtttcatgcgaagtaattaaaaaatgttttgatgaacttttaataaacaaagtcgatttgaaaggaattattttaaaacctaatatgatattaccaggttcagaatctgctgagaaatcaacttcaaaagtaattgccgaaatgacattagaatgtttaaaggatagcgtgcctagtgaggtgccaggaattgcctttttgtcaggaggtcaaagtgaaatacaagcttctgagaatttaaatgaaattaatttaattaataatactaattttactataacattttcttatggaagagcattgcagcatagtgctcttaggt

SEQ ID NO: 278278 - DNA, 482 bp, Unknown
  Bacterial polypeptide expressing nucleotide sequence isolated from the Sargasso Sea
catggctataatctctcttagacaacttctagatcatgcagctgaaaataattatggcgtcccagcttttaatgttaataatttagagcaaattagagcaattatggaaggtgcaaaagaagttaatagtcctgtaattgttcaagcatctgctggagcaagaaaatatgcaggcccacgatttattaaaagcatgatggaggctgcagttgaagagtttcctgaaatccctattgtaatgcatcaagatcacggaggatcacctaaagattgtaaagtatgtatagatcttggttttagttcagtcatgatggatggatcattattagaagaccaaaagacgccttctgactttgaatataacgttaaagttacaaaggaaactgtggatatggctcatagtgtaggtgtttctgttgaaggtgagttaggttgcttaggttctcttgaaactggtatgggtgaaaagaagatggtgttgg

SEQ ID NO: 278279 - DNA, 565 bp, Unknown
  Bacterial polypeptide expressing nucleotide sequence isolated from the Sargasso Sea
atgcccttaataagtatgcgtcaattattagatcatgcagcagaaaatgattatggagtacctgcatttaatgtaaataatttagagcaaattagagcaattatggaaggtgctcaatatgtgaatagcccagtgattgttcaagcttcagctggagcaagaaaatattcaggaccaatatttataaaaaatatgatgcaagctgcagttgaggagtttcccaaaatacctattgtaatgcatcaagatcatggaggtacacctgaagaatgtaatgaatgtatagaattaggatttacttcagtaatgatggatggttcattattatcagatcaaaaaacaccatcaaattttgaatataatgtaaaagtgacaagagagacggtaaaaattgctcactctaaaggagtttcagtcgaaggtgagttaggatgtttaggttcgcttgaaacaggtatgggagaaaaagaagatggagttggagcagaaggggttttgactcattcacaacttttaaccgaccctcaagaggcatcagaatttgttgataaaactcatttgatgt

SEQ ID NO: 278280 - DNA, 637 bp, Unknown
  Bacterial polypeptide expressing nucleotide sequence isolated from the Sargasso Sea
gggtgcaagatttgctaaatggcgagctgtttattccatttcttctaaacatccaagcgaacagtgcataaaatcaaatgctcatgctctagcaagatatgctgcgttggttcaagaagtaaaaatggttccaatagtagaacctgaagttttaatggatggagatcatactattgaaaaatgttatgatgttactagtagagttttgaccgaatgctacaaagaacttgcaatacacaatgttaatcttaaagggacagttctcaaaccgaatatgatacttcctggtgcagactgcaaacaaagagctactacagaacagatagctaagaaaactttggaatgtcttaaaaaaaatatgccaaaagaagtacctggagttgcttttctatctggtggtcaaagtgaagttgaagcaacgaaaaatttaaatgaaattaataaaattaatgatacctcgtttcattttacattttcttatggtcgtgctttacaacaatcagctttgaaaacttgggcaaaatcaatgaaagatatagctaaaattcaaaaagtttttgatcatagagcaaaaatgaatggtgcttcaactaaagcaaaatggaatgaaaagctagagcaaagttttgcggcttaa

SEQ ID NO: 278281 - DNA, 709 bp, Unknown
  Bacterial polypeptide expressing nucleotide sequence isolated from the Sargasso Sea
tatgacaatagaagaaatagcaaaattaatggtaacaaaaggcaaaggaattcttgctgccgacgaaagcacaggaacaatgggtaaaagattaaaaagtgtaaatatagaatcgaatgaaaaaaatagactacattttagagaaacattatttacatcagactctatgaaaacatccataagtggagtaattttatatgatgaaacgataagacaaacttcaagtaaaggagttttaatccccgaattaattaaaaaaagtggatctataccaggcataaaagttgataagggagcaaaacttcttgctggttcagatgatgaaaaaataaccgagggacttgatggtttaagagaaagaatggaagagtattacaatttgggagcaaggtttgcaaaatggagagctgtatactcgatttcatctaaacatccaagcgagcaatgtattaaagcgaatgctcatgcattagcaagatattctgcaatagttcaagatgcaaaaatggtaccaatagttgagccagaagttttaatggatggaaatcatgcaattgataaatgttatgaagttactagtaaggttttaattgaatgtttcaatgaattaaaactaaataatgtaaatctaaaaggaatagttttaaaaccaaacatgatactacctggtgcaagtgtaatcaaaaagcttctacagaagaaatgctag

SEQ ID NO: 278282 - DNA, 589 bp, Unknown
  Bacterial polypeptide expressing nucleotide sequence isolated from the Sargasso Sea
atggatctaagttcattgaattcaatagctcaatcaatggttgcacccaataaagggatactcgctgcagatgaaagcacgccaaccataggaaaaagatttgcaacaattaatacagagtcaacggaaggcaatcgtcaaacatatagaaatttacttttcaccagcccaaatgtttctgaatacataagcggcgtcattttatttgatgaaaccatcagacaatcaaccaatgatgggatcccatttccagagcaccttacttcacttggtattgtccctggaattaaagttgataaaggaattaatggcattccattttgcaaaggagaaactgtcacggaaggattggatgggctagctgaaagattaagtgaatattatgaattaggtgctagatttgccaaatggagagcggttataaatatttctgcagacctaccatcaaacaattgcattagtctcaatgcgcacgcattggcgagatatgcagcactttgccaacaagcaaaaatggttcctattgtggaaccggaagtcctcatggatggaaatcatgatatagatcgatgttttgatgttacttcgg

SEQ ID NO: 278283 - DNA, 556 bp, Unknown
  Bacterial polypeptide expressing nucleotide sequence isolated from the Sargasso Sea
atgtcactaaataatattgaagatatagcagcctatattgtcgcagagggcaaaggtatcttagctgctgatgaaagcaatccgacttgtggaaaaagatttgattccattggtgttgagtccaccgaagagaatagaagagattacagagaaatgctttttagatctaaaggaatgaaaggtaatattggtggagtaatattatttgatgagactataagacaatcagctgctgatggaactttgctaagagatttaataactagtcaagatgcccttcctggaataaaggttgataagggcattgagccaattgatgattgtcctggagaaaccgttacggttggattggatggattagatgaaagattaaaagaatattcatctatgggagctaaatttactaaatggagggctgtcataaatataggtgaaggaattccaactgataaatgtattgatgcgaatatgcaggcattagccgattatgcaaaatgtgctcaagataacggaatggttcctatagtagaaccagaaagtattaatggatggagtc

SEQ ID NO: 278284 - DNA, 686 bp, Unknown
  Bacterial polypeptide expressing nucleotide sequence isolated from the Sargasso Sea
tatgaatgaacagggattaatgaatacagcttcagcaatggtgaaaagtggcaaaggaatcctcgctgcagatgaaagtacgcctacaataggtaaaagatttgagcaaataggtgttaaatcaacatctgaaatgagaaatgaatatagagatatgttatttacggcagaaacgatggaagataatataagtggtgttattatgtttgatgagacattaagacaatcaactacatgtgataataatattccttttgtaaagcttctatctgataaaggtgttcttccaggtattaaagtagatacaggagcaaaagatttagcaggtgcaccaggagaaaaaattacagaaggtctagatagtttgagagatagactagtagaatattactctttaggtgcaagatttgcaaaatggagagctgttattactataggtaaaaatattccatcagaacattgtatagtagctaatgctaatgctctagcaagatatgcttctttatgccaagagtctaatattgtacctatcgttgaaccagaggtgctaatggatggtgaacatagcgtagaaacttgtttcgatgtcactagcaacaccctagattgcgtatttaatgtacttagaatccataatattatgcttgagggcattgttctaaagcctaatatggtgatttctggtt

SEQ ID NO: 278285 - DNA, 937 bp, Unknown
  Bacterial polypeptide expressing nucleotide sequence isolated from the Sargasso Sea
aatgtctgatatagaaaaaattgcaaaaactattgtagctaaaggcaaaggtatattggctgctgacgaaagtaccgggactatgacaaaaagattgtcaggagttaacgttgaatctaccgaaaaaaatagacttaaatttagagaaactttatttactgcagaaagtatgaaaaattacattggtggagttatactctatgacgaaactataaaacaaaaaacttctactggaaaaacggtaccggaattaataaaaagctttggctcaattcctggaataaaagtagatactggtgcaaaaaaattagctggctctcctgaagaaaaaattaccgaaggtttagatggattaagagaaagattgaatgaatattttaaattaggagcaaaatttacaaaatggagagctgtatacaacatttcagacaaatacccttctgaattagctattaggtcaaatgctcatgctttagctagatacgctgccctagtacaagaagcaaacatggtcccaattatcgaaccagaagtattaatggatggtgaacatgatattaataaatgctacgaggttacctctaaagttttaaaggaatgctataaagaattaaaactacataatgtaaatcttaaaggaacgatattaaaacctaatatgatcttacctggaaataaatcaaaaaataaaagcaatccttctgaaatagcaaaaatgacactcaaatgcttatcagaaaatgttcccaacactgttcccggaatagcttttctttcgggtggtcaaagcgaaattgaggcaacccaaaatttaaatgaaattaataaaattaataatacaagttttttaatgagtttttcttatggaagagctttacaacaaagtgcccttaaaaattggggtaaaaatattcaagatatatcaaatactcaaaaa

SEQ ID NO: 278286 - DNA, 817 bp, Unknown
  Bacterial polypeptide expressing nucleotide sequence isolated from the Sargasso Sea
atgtcattaataagtatgagacagcttctagatcatgccgcagagaactcttatggtgttcctgctttcaacgttaacaaccttgaacaaatgagagctatcatggaagcggctgacgaaacaaatagtcctgttattgttcaggcctctgcaggtgcaagaaaatatgctggccctaactttctaagacatctaattttagctgcaatagaagagtttccgcatattccggtagttatgcaccaagaccatggggcatctccagcagtatgtcagagatctatacagcttggtttttcttcagtgatgatggatggatctttagaagaggacatgaagactccagcatcatacgattacaatgtttctgttactaagcgaacagttgatatggcacatgcctgcggggtttctgttgaaggagagttaggctgtttgggctcacttgaaactggagaggctggtgatgaagacggtagtggagctgaagggattctaacccatgaccagttattaactgatccggaagaagcagcaagctttgtgaaagatactcatgttgatgccctagcaattgcaattggaacgagtcatggtgcatataaatttacgaggccaccaactggcgatattcttgcaatcgatagaataaaagaaatacacaaaaggattccagatacacatttggttatgcatgggtcgtcagcagttcctcaggattggttagaaattattaataagtttggtggagatattcctgagacttatggggttccagtagaagaagttcaagaaggaataaagcatggagtagaaa

SEQ ID NO: 278287 - DNA, 557 bp, Unknown
  Bacterial polypeptide expressing nucleotide sequence isolated from the Sargasso Sea
aatgtcagaactaaataaaatcgcactaaaaataatttctagcggtaaaggtatacttgctgcagatgaaagcaatggtactatgactaaaagacttacagcagtaaatgtaaattctactccagaaaatagactattgtttagggaaattcttttctcatctgaatgcatgaaagattgtattggaggagttattctttacgatgaaacaataaaacaaactacaagttttggaaaatcaatccctgaactaatttcagcctcaggcgctgtgccaggaattaaagttgataaaggtgctaaagaattagcaaactctcctgaagaaaaaattactgagggtttagatggccttagagacagattgaaaaaatattatgaacttggagcaagatttacaaaatggaggggggtttactctattggtaataaatatccaactgggctagcaataaatagtaatgctcatgcacttgcgagatactcagctttagttcaagaaagtggtatggtcccaatagtggagcctgaggtattaatggatggagaacattctg

SEQ ID NO: 278288 - DNA, 820 bp, Unknown
  Bacterial polypeptide expressing nucleotide sequence isolated from the Sargasso Sea
tccactaaaacagtaggtaaaagacttgctggaattggcgttgagaataccgaagataataggaaggcatatagaggaatgctttttactacagaaggtcttggcaaatatataagtggagcaatcctcttcgaagaaactctttatcagaatcaccaagatggtgagtcaatggttaagaaattaaatgatttaggtattattccaggtataaaggtcgataaaggtctaaatccacttccaggagctggagatgtagaaactttttgctctggcctagatgggttagttgaaagagcagcaaaatattatgaacaaggtgcaagatttgcaaagtggagagcagttcttcaaattactaatgatggttgtccttcaaaactatcaattcaagagaatgcttggggattagcaaggtatgcgagatcagttcaagaatcaggtttggtaccaattattgaacctgaaatcttaatggacggcgatcacactattgaaaaaactgctgaagtccaagaagaggtaataaagcaggtttatattgcctgtcaagcaaatggagtttatctagaaggcactctattaaaaccttctatgactgttaatggagcagattgtccaacaaaggctgatcctatgaaagttgctgaaatgaccatcagaactatggaaagatgcgttcctgcgtctgttcctggaatagttttcttatcaggagggttaagcgaagaagctgcttctatttatttaaataatatgaacactctttacaggaaagctttatggaatgtttcattctcctatggaagagcattacagc

SEQ ID NO: 278289 - DNA, 833 bp, Unknown
  Bacterial polypeptide expressing nucleotide sequence isolated from the Sargasso Sea
ggtaattttatatgatgaaacgataaggcaaatttcaagtaaaggaattttaatccctgaattaattaaaaaaagcggatctataccaggcataaaagttgataagggagcaaaacttcttgctggttctaatgatgagaaaataactgagggacttgatggtttaagagaaagaatggaagagtattacaagttgggagcaagatttgcaaaatggagagctgtatactctatttcgtctaaacacccaagcgagcaatgtattaaagcgaatgctcatgcattagcaagatatgcggcaatagttcaagaatcaaaaatggtaccgatagttgagccagaagttttaatggatggaagtcatacaattgataaatgttatgaagttactagtaaggttttaattgaatgtttcaatgaattaaaaataaataatgtgaatctaaaaggaattgttttaaaacctaacatgatactacctggtgcaagttgcaatcaaaaagcttctacagaagaaattgctagcaaaacacttgattgtttaaaaaaaactatgcctgaagaagttccgggtgttgcgtttctatctggaggacaaagtgaaattgaggcaaccaaaaatctgaatgcaataaataagattaacgatactaattttaattttactttttcatatgggagagctttacaacaatctgctctcaaaacatgggcaaaatcgatgaaagatattaaaggtattcaaaaagttttcgatcacagagctaagatgaatggtgcctcaactgaggctaaatgggaagaaaagaacgagcaaaattttgccgcttaaa

SEQ ID NO: 278290 - DNA, 820 bp, Unknown
  Bacterial polypeptide expressing nucleotide sequence isolated from the Sargasso Sea
atggctttaatcagtatgcgacaacttcttgatcatgccgcagagcatggttacggtgtacccgcgtttaatgtaaataaccaagagcaaatgcgtgcaattatggaagcggctgataaaacaaacagcccagttattgtacaaggttctgcgggcgcacgtgcgtatgccggtgcaccttttattcgtcatatgattttagctgcagttgaagaatggccacatattccagtggttatgcatcaggatcatggtacatcaccgggtgtatgtcagcgttcaattcagctaggtttttcatcagtaatgatggatggctcattaatgagcgatggtaaaacaccttcaagctacgattataacgttgatgtaacacgtaaaacagttgaaatggcgcatgcgtgtggcgtatctgtagagggtgagctaggtgtattaggttcacttgaaactggtgaagcgggtgaagaagatggtgttggcgctgagggtaaacttaccactgagcaaatgctaacaaatccagaagaagcggcagactttgtaaataaaacccatgttgatgcgctggctattgcctgtggtacatcacacggtgcctacaaatttactcgtccaccaaccgatgacattttagcgattgatcgtattaaagaaattcacgcgcgtataccaaatacccacttagtaatgcatggttcgtcttctgttccacaagagtggttagaagtgattaaccaatacggtggcgaaattccagaaacttacggcgtgccagttgagcaaatcgttgaaggtattaaatatggtgtgcgtaagg

SEQ ID NO: 278291 - DNA, 719 bp, Unknown
  Bacterial polypeptide expressing nucleotide sequence isolated from the Sargasso Sea
aatgaatttttcgaatttaaactccatagcgaactatattgttgaaaatggaaaaggtattcttgcagcagatgaaagcaatcctacttgtaaaaaaaggtttgatacaatttctgtagaatctacagaagaaaatcgaagagattacagacagcttttatttcaggctgaggggatgtcaaataatataggcggggtaatcctttttgatgaaactattcgacaaaatactaataatggaactccccttgtagatttaataaaacaaaaggaagcacttccaggaataaaagttgataagggccttgctccttttgaaaactcagatatagaaaaagttacacaaggtatagaggatcttgactctaggtgtgcggaatacttcaatatgggtgctctttttacaaaatggcgagctgtaataagcattggaaataacttaccttcacaaggatgcattgaagaaaatgcaaaacttcttgctagatatgcaaagattgtacaaaaaaataatatggttcctatagttgaacctgaagtcctaatggatggtagtcatagtatcgaagaatgttatgacgctacctcaagaacattaaagtcactttttcaaaatcttgaggaagaaaatgtcgacataacaggaactatactaaagccaaatatggtaacaccaggatcggagtgccaagaaaagatcggtgttgaaactgttgcta

SEQ ID NO: 278292 - DNA, 675 bp, Unknown
  Bacterial polypeptide expressing nucleotide sequence isolated from the Sargasso Sea
aaccacttttcagctctcacatgattgacttatcagaagagcttcttgaggaaaacatagaaatttctaaaaaatacctggagagaatgagcaaaatgggcatgacccttgaaatcgaattaggtattacaggaggtgaagaagacggagtagataactctgacgtagacagctctaaactatatactcagccagaagaagtagcttatgcttatgaagaattaagcaaagtttctaacagattcactgtagcggctgcttttggtaacgtacacggtgtatacaaaccgggtaacgtaaaacttacaccaaaaatccttaaaaactctcaggattacatacaggagaaatacaacacaggtgttaaccctgtagattttgttttccacggtggttcgggttctacacttgaagaaatcagggaagcaatcacttatggtgtaatcaaaatgaacattgacactgaccttcagtttgcatttacagaaggtatccgtgattatgtttctaaaaacattgaatatcttaaaactcaaataggtaaccctgaaggggccgattctccaaacaaaaaatattacgatccaagaaaatggatgcgtgaaggagaacttacatttaatgcaaggcttgcaaaagcttttgaagacctgaacaacgttaataccctataat

SEQ ID NO: 278293 - DNA, 913 bp, Unknown
  Bacterial polypeptide expressing nucleotide sequence isolated from the Sargasso Sea
atgagtgaaatagagaatattgcaaaaaaaatagtggcaaaaggtaaaggtatattggctgctgatgaaagcactggaactatgacaaaaagattatccagcgtaaatgttgaatcaactttagaaaatagacttagatttagagaaactttgttttcatcagaaagtatgaaaaattatattggaggagtaatactttatgatgaaacaataaaacaaaaagcttcatccggaaaaactatacctgatttaattaaaagttttggatcaattcctggaattaaagtagatactggcgcaaaaaaattagctggttctcctgatgaaaaagttactgaggggttagatggattaagagaaagattaaatgaatattataatttaggggcaagatttacaaagtggagagctgtttataatatttccgataaacatcccaccgaattagctattaaatctaatgcgcatgcgttagcgagatacgcttctctggtgcaagaggcaaaaatggtgcctatcgttgagcctgaagtattaatggatggagagcatgatatcaacaaatgttatgaggtcacaactaaagttctaaaagaatgctataaagaactaatcttacacaaagtgaatcttaaaggaacaatacttaaaccaaatatgatattgccaggaaacaaatcaaaaaacaaaagcaatatgtcagaaattgctaaaatgacaattaaatgtttaaaagaaagtgtgcctaatgaagttccaggaatagcttttttatctggtggtcaaactgaaattgaagccacacaaaatttgaatgaaataaataaaattaataatacaaattttataatgagtttttcttatggaagagcattgcaacaaagtgctctcaaaaattggctaaagatataaa

SEQ ID NO: 278294 - DNA, 631 bp, Unknown
  Bacterial polypeptide expressing nucleotide sequence isolated from the Sargasso Sea
atgaatatcgaagaaatagcaaaattaatggttacaaaaggcaaaggcatacttgcagctgatgagagcactggcacaatggaaaaaagattaaaaagcgtgaatgtagagtgtacagaaaaaaatcgacttcattttagagagacgcttttctcttcaggttcaatgaaaacatcaataagcggtgtaattttatttgatgaaacaataagacaaactactaacagcggtgagtccattccagaattaattaaaaaaagcggatctatacctggaataaaagttgacaaaggggcaaaacttttggcgggctctgaagatgagaaaattacagaaggtttagatggtttaagagatagaatggcagaatattataaattaggagcaagatttgcaaaatggagagcggtatattccatatcttctaaatatccaagcgaacaatgcatcaaatctaatgctcacgcattagcaagatatgctgcgatcgttcaggaggcaaaaatggttcccatagtagaacctgaagttttaatggatggggatcacacaattgacaaatgctatgatataacaagtagagtattaaacgaatgctataaagaactatccgttcacaaagtaaattgag

SEQ ID NO: 278295 - DNA, 699 bp, Unknown
  Bacterial polypeptide expressing nucleotide sequence isolated from the Sargasso Sea
aatggctattatatcacttagacaacttttagatcacgcagcagagaacaattatggtgttcctgcatttaatgtcaataatttagagcaaataagagcaataatggaaggagctaatgaagttaatagccctgtaatagtccaggcatctgcgggtgcaagaaaatatgcaggcccaaagtttattaaaagtatgatggaagctgctattgaagagttttctaaaattccaattgttatgcaccaagatcatggaggctcacctgcagattgtaaggtatgtatagatcttggttttagctctgtaatgatggatggttctttacttgaagatcaaaaaacaccttctgattttgcttacaatgttaaggttactaaagaaaccgttgatatggctcataatttaggtgtgtcagtagaaggagaactaggatgtctagggtcacttgagacaggtatgggtgaaaaagaggacggagtaggggcagagggtgttttatcacatgatcaattgctaacagaccctgaagaggctgctgagtttgttcaatctacgaatgtagatgctctagcaattgctattggaacgagtcatggagcttataaattttcaagaccaccgtctggggatattttagcaatagaaaggattaaagaaatcaataataaattacctaatactcatttagtaatgcatgg

SEQ ID NO: 278296 - DNA, 616 bp, Unknown
  Bacterial polypeptide expressing nucleotide sequence isolated from the Sargasso Sea
cgagctgtcttattcaatttcttccaaacatccaagtgaacaatgtatcaaatcaaatgctcatgctttagcaagatatgctgcgttagttcaagaagcaaaaatggttcctatagtagagcctgaagttttgatggatggtaatcacaatattgataagtgttatgatgttactagcaaagttttagtggaatgttataaagaactcactattcacaatgttaatcttaaaggaacagtccttaaaccaaatatgatccttcctggtgcagattgtaaagataaggcttccgcagaagagatagctaagaaaacgttagactgtcttaaaagaaatgttccaggtgacgtgcctggagttgcttttttatctggtggccaaagtgaagtggaggctacaaaaaatttaaatgctattaacaaaattaatgacacttcttttcattttacattttcttatggcagagctttacaacaatcagctttgaaaatgtgggcaaaatcgatgaaggaaacagataaagttcaaaaagtttttgatcatagagccaaaatgaacggggcctctactgaagcaaagtggaacgaaaagcttgagcaaagttttgcagcttaa

SEQ ID NO: 278297 - DNA, 574 bp, Unknown
  Bacterial polypeptide expressing nucleotide sequence isolated from the Sargasso Sea
tatgactagaaatattgtaaacgaaatagcaaataaattatgcttatcaccaaaagggatactagctgccgatgaaagcactaatacaataaaaaaaagatttgaatcaattaatgtagaatccaattttgaaaataggcgaagctacagagagttattatttaaaacaaaaaaccttaatgaatttataagtggggttatcttatacgatgaaactattaaacaaaatacttctgaaggtataccattcccaaaatatttatcagatataggtattatacctggaatcaaagtagataaaggcgcaataccactttctaaagattcagatgagaagtttactgaaggtcttgatggtcttaacgaaagattaaaagaatacaaaattttaggagctgaatttacaaaatggagggcaataattaatatcgacttaatgaagaattatccttcttcatattgtatggaatctaatgcttttatgcttgctagatatgccaaaacagttcaagataatgaaatggttcctattgttgaaccagaagttattatggatggaaatcatactatgaag

SEQ ID NO: 278298 - DNA, 832 bp, Unknown
  Bacterial polypeptide expressing nucleotide sequence isolated from the Sargasso Sea
gttattttatttgatgaaactttgagacaaaagagtaaagatggaacttcaattccagaacttatttctaaaaataactcaatacccggtataaaagtagataaaggagcgaaaaatttagctggttcacataatgaaaaagttactgagggattggatggcttggctgcaagattaaaagaatattatgatttaggtgctagattcacaaaatggagagcggtatataatatagataaagataaaccctccacacaatgtataaaatctaatgcacatgctttagctagatatgctgctttagtgcaagaggcaaacatggtgcctatcgtagagccagaagttttaatggatggggatcatgatattgacacttgctataagattacaacacaagttttgaatgaatgttataatgaattagaaatacataatgtaaatttaagtggaacaattttaaaaccaaatatgatactgccgggatcactttcgaaaaagaaggtgtcaaatgaagagatagctgaaaaaactttgagctgtttaaagaagaatgtaccaagcaaagttccgggtatagcatttttatcaggaggacaatctgaaatagaagctacgaaaaatttaaatgagattaataaaaaaaatgataccaattttttaataactttctcctatggacgagcacttcaacaaagtgctttgaaaacttggtcaaaagagatgaaaaatattgataaagttcagaaggtttttaaccacagagcaatgatgaatggtctctcatcaaaagctgaatggttagaaaaattagaaaatagtagagcagcctaaa

SEQ ID NO: 278299 - DNA, 943 bp, Unknown
  Bacterial polypeptide expressing nucleotide sequence isolated from the Sargasso Sea
gaagaaattgcgaattatatagtttcagacggtaaagaaattcttgccgcagatgaaagtaatccaacatgtggcaaaagatttgattctatcgaagtagaaaattctgaagataatagaagagattatagagaaatgctttttagatcaaaaggtatgaaaggcaatattggaggagtaattttatttgatgaaactctgaggcaggatgccaaagatggcactccccttaaagaattaatcagtaattcgggtgcccttcccggcattaaggttgataaaggcttagtgcctctggttgatggatcagatgaagtagtgactcaagggttggatgggctcgatgaaagatgttccgaatatgattctttaggagcaaaatttacaaagtggcgtgcagtaataaaaatcggagatagtatgccatcagatgattgtattaaggcaaacgccaaagcattagcagattatgccgcaattgctcaatctaataacatggtaccaatagttgaacctgaagttttaatggatggcgaccatacaattgatctttcttttgatgcttgtgcaagatcttttcaagctctttttgatgctcttgaaaataatggcgtaaacataaaaggcacaatactaaaaccaagcatggttactcccggctcgctatctgaaaaagtatcaatcagaaaagtggctgaaatgacagttgagtgcctcaaagagaatattccttctgatcttcctggagttgcttttttatcaggggggcaaacagagcttgaagcgacagctcatctcaatgaaatgaataaaataggtaagttcccatggaaacttagcttctcatatggacgagcccttcagcaaagtgctcttaaagcctggtcagggaaaagcgaaaatcttttcatagctcaagatgagctatctcatagagctgaaa

SEQ ID NO: 278300 - DNA, 661 bp, Unknown
  Bacterial polypeptide expressing nucleotide sequence isolated from the Sargasso Sea
aatgtctttaatatcacttagacaacttttagaccatgcagctgaaaataattatggcatccctgcatttaatattaataatctagagcaagttagagcaattatggaaggtgcaaaagaactaaacagccctgttattttacaagcatctaaagcggcaagaaaatatgctggaccaatttttgttaaaaaaatggttgaagctgctatggaagaattttcagaaattcctacagttcttcatcaagatcatggtggatctccagaagattgtaagaattgtatagaattaggttttacttctgtaatgatggacggatctcttaaagaggatcaaaaaacaccttctgattttgaatataatgtaagagttaccaaaaaaactgttgatattgctcactctagtggagtttctgttgagggtgaaattggttgccttggttctttagaaactggaacaggggaaaaagaagatgatgttggtgccgagggtgttctatctcacgatcaattattaacagatccagatgaagcatcaaactttgttgatcaaaccaatgttgatgcacttgcaatcgctattggaacaagtcacggtgcatataagttttcaaaacctccaactggggaaacactagctatggatagaataaaagaaatt

SEQ ID NO: 278301 - DNA, 571 bp, Unknown
  Bacterial polypeptide expressing nucleotide sequence isolated from the Sargasso Sea
aatgagcgaattaaataaaatctcacttcagattttgtcaggtggtaaaggaattctagcagctgatgaaagtaacgctaccatgactaaaagactagaagccgtaaacattgagtcaaatcaggagaatagacttaattttaggaaaattcttttttcctcagaaagcatgaagagttgtataggtggagttattttatacgatgagacaattaaacaaaatattggagcgcaaacaattccagaacttcttggcgatagtggttcattgactggaataaaagttgatacaggagcaaaaaatctagcaggatccccagatgaaaaaataactgagggtttggatggactaagagaaagattaaaagaatattataaacttggagcaagatttacaaaatggagaggtgtatacaaaatttctaccagttttccaagtaaagtctctattgtctcaaatgcgcatgcacttgcgagatatgctgctttagttcaagagtgtggaatggttccgattgtggagcctgaattattaatggatggtgaccaccctgcaaaaatctgttttgaa

SEQ ID NO: 278302 - DNA, 664 bp, Unknown
  Bacterial polypeptide expressing nucleotide sequence isolated from the Sargasso Sea
tatggccctcgttccactaagactacttttagatcacgctgctgagaatggttacggcattccagctttcaatgttaataaccttgagcaagttcaagcaatcatggaagcagcatatgaaactgatagtcctgtaatactccaagcttcaagaggggcaagaaattatgcaggagaaattttcctacgtcatctaatacttgccgctacagaaacatatcctaatattccagttgtaatgcaccaagaccatggtaatgagccatcaacatgctattcagctgcaataaatggtttcacatcagtaatgatggatggttctctagaagcagatgcaaaaacacccgctagttacgaatataatgttgcagttactaaaaaagtagtggattttgctcattcagttggagttagtgttgaaggagagttgggttgcttaggttcattagaaacaggaaaaggtgaggcagaagatggtcatggatttgaaggtgaactttctacagatatgcttttgactgatcctgaagaagcggcagattttgttgctaaaacaaaagttgatgcattagctattgctataggtacaagtcatggtgcttataaattcacaaggaaacctacaggtgaagttcttgctataagcagaattgccgaaattcat

SEQ ID NO: 278303 - DNA, 776 bp, Unknown
  Bacterial polypeptide expressing nucleotide sequence isolated from the Sargasso Sea
accatttgcagagcatctcacgtctcttgggattgttccaggcatcaaagtggataaaggcgttaaaggcatccctttttgtgatggagaaaccgttacagagggattggatgggctagatgaaagattggatgagtattacgagcttggtgcaagattcgcaaaatggagagccgttattagcatctcagatgatctgccatcaaaaaattgcatcagactgaatgcgcatgcattggcaagatattccgcactctgtcagcaagcacagatcgttccaattgtagagcctgaagttctgatggatggaactcatgatatcgatagatgctttgatgttacatcagaagttttgcaagaagtttttgccgaattaaataatcaacaagttactttaaatgggattgtactcaagccaaacatggttatttcggggatggatgctgccaatagagcagatattcccactgtggcaagtgcaaccgtgaaatgcttatctgaaaatgttcctgatgaagttcctggtatcgcattcttatccggaggtcaaacctcggaagaagcgacagcacatttgagctcgatgaatgaaatgggcccacatccttggcagttaacattctcctatggcagagccctacaggccgaaccactgaaggtatggtctggagtggatggaaatattgaggcagctcaagaggctttcattaaacgctcaaggcttaatagtctggccagaacaggaaattaccatccgcaaatggaagaagcataag

SEQ ID NO: 278304 - DNA, 877 bp, Unknown
  Bacterial polypeptide expressing nucleotide sequence isolated from the Sargasso Sea
aatgctggataaactgaagacgcaaaccggttttattgcagcgttagatcaaagcggcggtagtacccctaaagcgttgcgcttatatggcatcgaagagtcagagtacagctcagacgaagagatgtttaatcttgttcacgaaatgcgtacacgcattatcaccagcaccccttttagcggcgagcgcgttcttggcgcaatcttgtttgaaaacacccttgatagagaaattgaaggcatgtcttctgcacactacctgtggcagaaaaagcgtgttattcctttcttaaaggtagataaaggactagctgaagaaagcaatggcgttcaagtaatgaagccaatgcctggtcttgatgcactgctagctaaagcggtagcgcaagacgtgtttggcactaagatgcgaagtgttgttaagcttgcgaatcaccaaggtattaaagatgttgttgctcagcaatttgaagtgggtaaacaaatcttagccgcaggccttgttccgattatcgagccagaagtagacatccacagcccacaaaaagcggaagctgaagctcttcttaaattagagatcctaacgcagctaaaccttctaaacgaaggccaggaagttatgctcaagctaacgcttccaacagaagctaatttctacaaagagcttgtcgatcaccctcgtgtacttaaagtagtggcgctatctggcggctatagccgtgaagaagcaaatgcgaaactggcagaaaaccaaggtatgattgcgagcttctctcgcgcattgactgaaggcgtttctgcaaagcagtctcaagaagaattcgaggccacgctagataaagcgattgaagatatttaccaagcctctaaggcgtaa

SEQ ID NO: 278305 - DNA, 757 bp, Unknown
  Bacterial polypeptide expressing nucleotide sequence isolated from the Sargasso Sea
tatgtcacttaataatatagaagaaattgctgcttttattgttgcagatggaaagggtattttagccgctgatgaaagcaatccaacttgtggtaaaaggtttgattcaattggagttgagtcgacagaagaaaatagaagagattacagagagatgctctttagatcaaagggcatgaaagagaatataggcggagtaatattatttgatgaaactttaaggcaatctgctgcagacggaacattattaagggatttaatattagatcaaggcgcccttccaggaataaaagtagataaaggccttcaacctattgatgattgtcctggagaaacagtaacagttggactagatggtcttgatgagagactaaaagaatacgtagcaatgggagcaaaattcactaaatggagagctgtaatcaatattggggatggaactccaacagataaatgtattgatgcaaatatgcaggccttagctgattatgcaaaacatgcacaaaacaataggatggtacctattgtagaaccagaagttttgatggatggagaacactccatcgatgaatgttatgaggcaaccaaacgttctttaaagtctctattttctcatcttgaagacaagggagttaatattaaaggaacccttttgaaaccaaatatggttacttctggaaaaagcgctgatgttcaagctagtatagaagaagttgctaagaaaactttggaatgcttaattgcaaatgttccctca

SEQ ID NO: 278306 - DNA, 646 bp, Unknown
  Bacterial polypeptide expressing nucleotide sequence isolated from the Sargasso Sea
atggcacttataactttaagacaactgctagaccacgcagctgaaaaccaatatggagtacccgcctttaacataaataatatggaacaaggcttggcaatactcaaggctgctgctaaaacggactcaccagttattctccaagcaagtaggggtgcgagggcttacgcaggtgacattatgttatcacatatcgtagcggctctagccaaaatgtatccaacgattccaatctgcatgcatcaagatcatggtaacaatgaggctacgtgtatgacagctattggacatggttttacatctgttatgatggatggctctttagaaagtgaccaaaaaacacccgcaagttacgattataatgttcaaatcacaaaaaaggttgctgagattgcacattgggtaggagcatccgtggaaggagaactaggagttttaggaagtttagagactggtgaagcagccaaagaagatgggtctggagcagaaggaaaacttaatgctaaacagcttttaacagacccagaccaagcgctcgattttgttaaaaagactgatgttgatgctctcgcgattgcttgtggtaccagtcacggagcatataagttcagtcggaaacctgatggagatatactggctatggatg

SEQ ID NO: 278307 - DNA, 879 bp, Unknown
  Bacterial polypeptide expressing nucleotide sequence isolated from the Sargasso Sea
tatgtcactaaataatattgaagatatagcagcctatattgtcgcagatggcaaaggtatcttagctgctgatgaaagcaatccaacttgtggaaaaagatttgattctattggtgttgaatccaccgaagagaatagaagagattacagagaaatgctttttaggtctaaaggaatgaaaggcaatattggtggagtgatattatttgatgagactataagacaatcagctgctgacggaactttacttcgagatttaataaccagtcaagatgctcttcctggaataaaggttgataagggtcttcaacctattgatgattgtcctggagaaaccgtgacagttggattggatggattagttgagagattaaaagaatattcatctatgggagctaaattcactaaatggagggctgttataaatataggtgaaggaattccaactgataaatgtattgacgcgaatatgcaggcattagcggattatgcaaaatgtgctcaagataatggaatggttcctatagtagaaccagaagtattaatggatggagttcactctattgatgattgctatgacgcatctgatcgttctttaaaatcgctgtttgatcatcttgataaaaagggggtaaatataaagggcactatcctaaaacctaatatggttacttctggaaaagactcagacattcaagctagcattggcgaggtcgctaagagaactttagaatgtttaactgagaatgttccgtctgatcttcctggcatagcatttttatctggaggtcagtcagatatcttggctactgctcatttagatgcgatgaacaagattggtggcttttcttggaaattaagtttttcttatggacgcgc

SEQ ID NO: 278308 - DNA, 808 bp, Unknown
  Bacterial polypeptide expressing nucleotide sequence isolated from the Sargasso Sea
gatgaaactctgaagcaggatgccgaagatggcactccccttaaagaaataatcagtaattcaggtgcccttcccggcattaaggttgataaaggcttagtacctctggttgatggatcagatgaagtagtgactcaaggattggatgggcttgatgaaagatgttccgaatatgattctttaggagcaaaatttacaaagtggcgtgcagtaataaaaatcggagatagcatgccatctgatgattgtattaatgcaaacgccaaagcattagcagattatgctgcaattgctcaatctaataacatggtgccaatagttgaacctgaagttttaatggatggcgaccattcaattgatctttcttttgatgcttgcgcaagatcttttcaagctctatttgatgctctagaaaataattgtgtaaacataaaagggaccatattaaaaccaagcatggttactcccggctctttatctgacaaagtagcaattagagaagtggctgaaatgactgtaaagtgtctcaaagagaatattccttcagatcttcccggagttgcttttttatcaggagggcaaacagagcttgaggcgaccgctcatttaaatgaaatgaataaaataggcgagtttccatggaaacttagcttctcatatgggcgtgcccttcaacaaagtgctttgaaagtctggtcagggaaaagcgaaaatatcttcatagctcaagatgagctatctcatagggctgaaatgaataaactagcagcacttgggcaatgggatatcaaatttgaagaaagataac

SEQ ID NO: 278309 - DNA, 575 bp, Unknown
  Bacterial polypeptide expressing nucleotide sequence isolated from the Sargasso Sea
tatgaatttagaagaaattgcaaaaaaaatgtgcgaaaagggtaagggtatactagccgcagatgaaagcactggcacaattgaaaaaagatttaaaactataaacgtagaaaacaccgagattaatagagtttctttcagagaaactctttttagctcacaggcaatgaaaaattacataggtggagtaattttatttgatgaaacgatcagacaaaaaagctcggaggggattccaataccagaattaataaaaaataatggtgctataccgggtataaaagttgataaaggggcaaaaaaattagctggttcaactgatgaaactattacagaaggattggacgggcttagagaaagacttaaagagtatcatgatttaggtgcaagatttaccaaatggagagcagtttttaaaataacctcaaactttccttcccctcaatgtattaaatctaatgcacatgcgcttgctcgatatgcatcactcgttcaagaagcaaatatggtcccaatagtggagccagaggttctaatggatggcgaccataatatagaaaagtgttttcaagtaa

SEQ ID NO: 278310 - DNA, 730 bp, Unknown
  Bacterial polypeptide expressing nucleotide sequence isolated from the Sargasso Sea
atgacattaaatgaaattgctaaaaaaatgtgcgctaagggcaaaggtattcttgcagcagacgaaagtactggaacaatagcaaagagatttaaaagtataaatgtagaaaacattgaaaaaaatagactgaactttagacagactctttttaattcaagcgcaatgaaagactatattggaggagtaattttatttgatgaaacaataaaacaaaaaactacattaggtccttcaattcctgaattaatttcaaaacatggtgctgtaccaggaataaaagttgataaaggagcaaaacctcttgcaggatctaatgacgagactgtaacagagggtttagatggtttgcgtgaaagattaaaagaatattataatttgggtgcaagatttacaaaatggagagctgtatataaaatttcagataattttccatcatctcaatcaataaagtcaaacgcacatgctttagctagatacgctgctttagttcaagaagctaaaatggtgcccatagttgagcctgaagttttaatggatggctcacataacattgataaatgctaccaagtaacaacggacgttcttaatgagtgttttaatgaacttgagattcacaaaattgatttaaaaggtacggtgcttaaacctaatatggtaatacctggttcagaatgcaaagataaacctagctctgaagaaatagcaaaaaaaactttggattgttgaa

SEQ ID NO: 278311 - DNA, 840 bp, Unknown
  Bacterial polypeptide expressing nucleotide sequence isolated from the Sargasso Sea
tatgttatttactgcaccagacttaggtagatatattagtggtgcgattttatttgaggagacattatatcagaatcatgcagatggtgaaagcatggttgagaaactaaacaagcaaggaatcatacctggtattaaagttgataaaggattgaaaccattagttggtgcattgcatcatgaaacatattgttctggtcttgatggattgacagagagagcagcaaaatattatgaacaaggtgcaagatttgcaaagtggagagcagtattacagatcacaaaagatggcccatctgattttgcaattaaagaaaatgcatggggtcttgcaagatatgctcgtgcagttcaagaagcaggattagttcctatcgtagaaccagagatattaatggatggagatcatcacattgagaaaactgctgctgttcaagaacgtgtaatcaaagaagtatatgcagcatgtgcaacagcaggagttctactagagggaactctactcaaaccatctatgacagtttgtggtgctgagtgcccagatcaagctgactataagaaagttgcaggatacacaatcagaacattattacgttcagttcctgctgcggttgctggaattaatttcctatcaggtggtctaagtgaagaagcagcatctatatatctaaacgaaatgaacgctgcacctgatctaccttggaatgtatctttctcatatggtcgtgcattacaacactctgctatcagagcatggggtggaaatgatatagaagcagggcaaaagtttattattgcaagagcaaaagcaaactctgaagcatctattggttgttatgt

SEQ ID NO: 278312 - DNA, 514 bp, Unknown
  Bacterial polypeptide expressing nucleotide sequence isolated from the Sargasso Sea
aatggttcctatagtcgaacctgaggtattaatggatggagatcatacaattgataaatgttacgaggttacaagtaaagttatcaacgaatgttataaagagcttttaattcacaaagttaatcttaaaggaacggtattaaaaccaaacatgattctaccaggtgctagctgtaaacaaaaagttagttctgaagaaatagctaaaaaaactcttgagtgccttaaaaaaaatataccaacagatgtaccaggtgttgcatttctatcgggagggcaaagtgaagtagaagccacaaaaaatttaaatgcaattaacaaaattaatgatacggcatttaattttacattctcttacggtagagcgttgcaacagtcagctttaaaaacttgggcgaaatctatgaaggatacgagtaaaattcaaaaagtttttgatcatagggcaaaaatgaatggtgcttcttccgaagcaaaatggaatgaaaagcttgaacaaagttttgcagcctaa

SEQ ID NO: 278313 - DNA, 811 bp, Unknown
  Bacterial polypeptide expressing nucleotide sequence isolated from the Sargasso Sea
agaatagattatagggagatgctttttagatcaaaaggtatgaaaggtaatattggaggtgtaattttatttgatgaaactctgaggcaggatgccaaagatggtactccacttaaagaaataatcagtaattcgggtgcccttcccggcattaaggttgataaaggcttagtgcctctggttgatggattagatgaagtggtgactcaagggttggatgggctcgatgaaagatgttacgaatatgattctttaggagcaaaatttacaaagtggcgtgcagtaataaaaattggagatagtatgccatctgatgattgtattaaggcaaacgccaaagcattagcagattatgccgcaattgcgcaatctaataatatggtgccaatagttgaacctgaagttttaatggatggcgaccattcaattgatctttcttttgatgcttgtgcaagatcttttcaagctctttttgatgctctagacaataatggtgtaaacataaaagggaccatactaaaaccaagcatggttactcctggctcgttatctgacaaagtagcaatcagagaagtggctgaaatgacagtaaagtgcctcaaagagaatattccttcagatcttcccggagttgcttttttatcaggggggcagacagagcttgaggcgaccgctcatttaaatgaaatgaataaaataggtgagtttccatggaaacttagtttctcatatgggcgagcccttcagcaaagtgctctgaaagcctggtcagggaaaagcgaaaatatcttcatagcccaagatgagctat

SEQ ID NO: 278314 - DNA, 745 bp, Unknown
  Bacterial polypeptide expressing nucleotide sequence isolated from the Sargasso Sea
atggatctaagttcattgaattcaatagctcagtcaatggttgctcccaataaagggatacttgctgcagacgaaagcacgccgaccattggaaaaagatttgcaacaattgaaacagagtcaacggaaggcaatcgtcaaacatatagaaatttacttttcaccagtccaaatgtttctgaatacataagcggcgtcattttatttgatgaaaccatcaggcaatcaaccgatgatggaatcccatttccagagcaccttacttcactcggtattgtccctggaattaaagttgataaaggaataaaaggcattccattttgcaaaggagaaactgtcacggaaggattggatgggctagctgaaagattaagtgaatattatgaattaggtgctagatttgccaaatggagagcggttataaatatttccgcagacctaccatcaaacaattgcatcagactcaatgcacatgcgttggctagatatgcagcactttgccaacaagcacaaatggttcctattgtagaaccagaagtcctcatggatggaaatcataatatagatcgatgttttgatgttacttcgaaagtcttgcaagaggtcttcgctgaactcaataaacaaaaagtagctctaaatggaatcgtacttaagccaaacatggttatttcaggccatggatgcttcaaacagagcggatattccaacagtggccagtgcaacagtaaaatgcttaactgag

SEQ ID NO: 278315 - DNA, 806 bp, Unknown
  Bacterial polypeptide expressing nucleotide sequence isolated from the Sargasso Sea
ccccgccgtgtgccagcgctccatccagctcggcttcagctccgtgatgatggacggctcactgggtgaagatggcaaaaccccgaccagctacgaatacaacgtagatgttacccgtcgcaccgttgaaatggcccacgcctgtggtgtctccgtagaaggtgaactgggctgcctgggctccctcgaaaccggccaggccggcgaagaagacggcattggcgccgaaggcaccctggaccacagccagatgctgaccgatcccgaagaagccgccgacttcgtccagaaaacccaggtcgacgccctggccattgccatcggcaccagccacggcgcctacaagttcacccgtccgcctacaggtgacatcctggccatcgaccagatcaaagccatccacgcccgcatcccggacacccacctggttatgcacggctccagctccgtacctcaggagtggctgaaagtgatcaacgaattcggtggcgagatcccggaaacctacggtgtaccggtggaagaaatcgtcgaaggtatcaagcacggcgtgcgcaaggtcaacatcgacaccgacctgcgcctggcctctaccggtgcggttcgtcgcttcatggcccagaacccggcggaatttgacccgcgcaaattcctcaaggccaccatggttgccatgaccgacatctgtgtcgcccgctacgaagccttcggctgtgccggccaggccagcaagatcaaaccgctgaacctcgaacagatgttcgaacgttatgcggctggcgagctggacccgaaggtcaagtaag

SEQ ID NO: 278316 - DNA, 904 bp, Unknown
  Bacterial polypeptide expressing nucleotide sequence isolated from the Sargasso Sea
ggctaaaggaagaggaatactggctgcagatgaaagcaccggcactatgggtaaaagattaaaaagtgtaaatatagagtctaatgaaaaaaataggcttcattttagagaaacattatttacttctagtgcaatgaaatcatcaataagtggagttatattatatgatgaaacaattaaacaaagttcaagtcaaggaattccaatacctgaacttataaaaaaaaatggatcaattccgggtataaaagttgataaaggagtaaagctgttagcaggctcaagtggtgaaaaaataactgagggactagatggtttaaaggacagaatggacgagtattacaaactgggggcaagatttgcaaaatggagagctgtgtattctatttcatctaatcaacctagtgagcagtgtataaaagcaaatgcacatgccttagcaagatatgcagctattgttcaggaagctaaaatggttccaatagttgaaccagaagttttaatggatggggatcacacaattgataaatgttatgaagttactagtaaagttttaattgaatgttttaaagaattgaaaattaataatgttaaactagaaggaacagttttaaaacctaacatgatacttcccggttcaagttgtaagaaaaaagccaatacagatgagatcgcaaagaaaactcttgattgtttaaagaaaactatgcccaaagaagttcccggtgttgcttttctgtctgggggacaaagcgaggtagaagcaaccaaaaatttgaacgcaataaataaaattaacgatactaatttcaattttacattttcttacggaagagcgttacaacaatctgctctaaaaacttggtcaaaatctatgggagatacaaaaaatattcaaaaagtt

SEQ ID NO: 278317 - DNA, 749 bp, Unknown
  Bacterial polypeptide expressing nucleotide sequence isolated from the Sargasso Sea
catgaaaatagaggaaattgcaaaattaatggtggctaaaggaagaggcatactggctgcagatgaaagtaccggcactatgggtaaaagactaaaaagtgtcaatatagagtctaatgaaaaaaataggctgcattttagagaaacattatttacctcaagcgcaatgaaatcatcaataagtggggtcatattatatgatgagacaattaaacaaagttcaagtgagggaattccaatacctgaacttataaaaaaaaatggatcaatcccgggtataaaagttgataaaggagtaaaactgctagcaggctcaagtggtgaaaaaataactgagggactagatggtttaagggaaagaatggacgagtattacaaactgggggcgagatttgcaaaatggagagctgtgtattctattttatctcgtcagcctagtgagcaatgtataaaagcaaatgctcatgccttagcaagatacgcggctattgttcaggaagctaaaatggtcccaatagttgaaccagaagttttaatggatggagatcacacaattgataaatgttatgaagttactactaaagttttaattgaatgttttaaagaattgaaaattaataatgttaagctagaaggaacggttttaaaacctaacatgatccttcccggttcaagttgtaagaaaaaagctaatacggatgagatcgcaaagaaaactttagattgcttaaagaaaactatgcccaaag

SEQ ID NO: 278318 - DNA, 873 bp, Unknown
  Bacterial polypeptide expressing nucleotide sequence isolated from the Sargasso Sea
aatgaaaaaaataggcttcattttagagaaacatctatttacttcaagcgcaatgaaatcatcaataagtggagtcatattatatgatgagacaattaaacaaagttcgagtaagggaattccgatacctgaacttataaaaaaaaatggatcaatcccgggtataaaagttgataaaggagtaaagctgctagcaggctcaagtgatgaaaaaataactgagggtctagatggtttaagggaaagaatggacgattattacaaactgggggcaagatttgcaaaatggagagctgtgtattctatttcatctaatcaaccaagtgagcaatgtataaaagcaaatgctcatgccttagcaagatacgcggctattgttcaggaagctaaaatggttccaatagttgaaccagaagttttaatggatggggatcacacaattgataaatgttatgaagttactagtaaagttttaattgaatgttttaaagaattgaaaattaataatgttaaactagaaggaacggttttgaaacctaacatgatacttcccggttcaaattgtaagaaaaaagccaatacggatgagatcgcaaagaaaactctagattgtttaaagaaaactatgcccaaagaagttcccggtgttgcttttctatctgggggacaaagcgaggtagaagcaactaaaaatttgaacgcaataaataaaattaacgatactaatttcaattttacattttcttacggtagagcgttacaacaatctgctctaaagacttggtcaaaatctatagaagatactaaaaatgttcaaaaagtttttgatcacagagcacaaatgaatagtgcatcaactgaaggtaaatggga

SEQ ID NO: 278319 - DNA, 787 bp, Unknown
  Bacterial polypeptide expressing nucleotide sequence isolated from the Sargasso Sea
gggaaatattggtggagtgatactttttgatgaaactataagacaatcatctgaagatggcacgctattgagagatattatttcaaatcaaggtgccttaccaggaattaaagtcgataaaggattacaacccattgaggattgtccaggcgaaacagtaacaatcggattagatggtttggatgaaagattaaaagaatattcatcgatgggagcaaaatttacaaagtggagagctgtcatcaatattggagatggaatacctacggacaaatgcattaatgcaaacatgcaagccttagctgattatgcaaaatgcgctcaagataatggaatggttccaatagttgagcctgaagtattaatggatggagaacattcgattgatgattgttatactgcaactgatcgatcattaaagactttgtttgctcatttagaaaaaaatggtgtcaacatcaaaggcacacttttaaaacctaacatggttacctctggaaaagattttatcgaacaagcaggaatcgatgaggtcgcccataaaactttagaatgtttaattaaaaatgtacccgcagaacttcctgggataacttttctctctggaggccagtcagatgttttagccacagctcatttagatgctatgaataagattggaggctttaaatggaagttaagcttttcttatggaagagctcttcaagctccagctttaaaagcttggaatggaaaccagaaaatgtttttatttctcaagatgaattatctcatagagcagaaatga

SEQ ID NO: 278320 - DNA, 436 bp, Unknown
  Bacterial polypeptide expressing nucleotide sequence isolated from the Sargasso Sea
aatgtcgcacttcgtctctccgtacagcgcggagctcatcgcgaccgcggcgttcctcgcctcccccggcaagggcatcctggccgcggacgagagcacgggcacgatcggcaagcgcctcgcgggcatcggcgtggagaacgtcgagccgaatcgccgcgcgctccgcgagctcctcttcaccgcccccgggttcgacgcgttctgctccggcgtgatcatgttcgaggagacgctcgggcagagcgcctcggacggcgaggcgttcccggcgctcctcgcgcggcgcgggatcgtccccggcatcaaggtggacaagggcgtcgtcactcttccgggcaacgcccacggcgaggtcacgacgcagggcctcgacgggctcgccgagcgctgcgcggggtactacgcccgcggcgcgcggttcgccaagtggcgc

SEQ ID NO: 278321 - DNA, 891 bp, Unknown
  Bacterial polypeptide expressing nucleotide sequence isolated from the Sargasso Sea
actgatagtccagttatcctccaagcttcaagaggggcaagaaattatgcaggagaaattttcttacgtcatctaatccttgccgctacagaaacatatccaaatattccagttgtaatgcaccaagaccatggtaatgagccatcaacatgctattcagcagcaataaatggtttcacatcagtaatgatggatggttctctagaggcagatgcaaaaacacccgcaagttacgaatataatgttgcagttactaaaaaggttgtagattttgctcattcagttggggttagtgttgaaggagaattaggttgcttaggttcattagaaacagggaaaggagaagctgaagatggtcatggttttgaaggtgaactttctacagatatgcttttgactgatcctgaagaagctgcagattttgttgctaaaacaaaagttgatgcattagctattgctataggtacaagtcatggtgcttataaattcacaagaaagcctacaggagaagttcttgcaataagcagaattgctgaaattcataaagcacttccaaatacccatcttgtaatgcatggatctagttcagttcctcaggaatggttggatatcattaacaaatatggtggtgaaatccctcaaacatatggtgttcctgttgaagagattcaagagggaataagaaatggagttagaaaagtcaacattgataccgataacagacttgctttcactgccgcggttagagaggcagcatttgctgataaggcaaactttgacccaagacatttcaacaaacctgctagaaaatacatgaagcaagtttgtcttgatagatacaaacagttctggtgcgaagggcaagcaagtaagatcaaacaaaacagtaca

SEQ ID NO: 278322 - DNA, 864 bp, Unknown
  Bacterial polypeptide expressing nucleotide sequence isolated from the Sargasso Sea
aatggagaaaatcgtgggtaaggctgaacaactagaaagaatacgaacaggtgaaggctttatagctgcattagaccaaagcggaggatccacacctaaagctctccaattatatggaatttctgaagatcagtaccaaaatgaagaggaaatgttcaaactaattcacgatatgcgaacgagaataatcacaagcccctctttcagccataaaaacatccttggagcaatattatttgagcaaactatggagaggtttatctctgggattccaaccgccaattttctttggaaatcaaaaaaaattgttccatttttaaaggttgataagggattaaaagatctgaaagacggtgttcgcctcatgaaggacatccctgatttgggcgaaacccttaaaaaagcttcagagtatggaattttcggaactaaaatgagatccgttatcgatgaagacaacgctttaggtatagacaaaatcgtagaccaacagtttgaaatcgggaaaataattttagacgctggattaataccaattattgaacctgaagtgaccataacgatttctcagaaatcacaagctgaggaaagtcttaaaaaaagtttaataaaatatttaaaaaaattacagcctaatcaaaatgttttactaaaattaactcttccagaacaagaaaacttttatgaagagttagttaaacatccaaatgttttgagagttgttgctttgtctggaggttattcacttacagaggcaaacaagcgattagaggaaaattctggggtgatcgcctctttttcaagagcattaacgcaaagcttgtttattcatcaaaacaacgatgaatttaatttggcgctaga

SEQ ID NO: 278323 - DNA, 655 bp, Unknown
  Bacterial polypeptide expressing nucleotide sequence isolated from the Sargasso Sea
atggccctcgttccactaagactacttttagatcacgctgctgagaatggttacggtattccagctttcaatgttaataaccttgaacaagttcaagcaatcatggaagcagcatatgaaactgatagtcctgtaatcctccaagcttcaagaggggcaagaaattatgcaggagaaattttcctacgtcatctaatccttgctgcaacagaaacatatcctaatattccagtggtaatgcaccaagaccatggtaatgagccatcaacatgctattcagcagcaataaatggtttcacatcagtaatgatggatggttctctagaagcagatgcaaaaacgcccgctagttacgaatataatgttgcagttactaaaaaagtagtagattttgctcattcagttggagttagtgttgaaggagagttgggttgtttaggttcattagaaacaggaaaaggtgaggcagaagatggtcatggatttgaaggtgaactttctacagatatgctcttgactgatcctgaagaagctgcagattttgttgcgaaaacaaaagtcgatgctttagctattgctataggtacaagtcatggtgcttataaattcacaaggaaaccaacaggagaagttcttgcaattagcagaattgctg

SEQ ID NO: 278324 - DNA, 673 bp, Unknown
  Bacterial polypeptide expressing nucleotide sequence isolated from the Sargasso Sea
tatggccctcgttccactaagactacttttagatcacgctgctgagaatggttacggtattccagcattcaatgttaataaccttgagcaagttcaggcaatcatggaagcggcatatgaaactgatagtcctgtaatcctccaagcttcaagaggcgcaagaaattatgcaggagaaattttcctacgtcatctaatccttgccgccacagaaacgtatcctaatattccagtggtaatgcaccaagaccatggtaacgagccatcaacatgctattcagcagcaataaatggtttcacatcagtaatgatggatggttctctagaggcagatgcaaaaacaccagctagttacgaatataatgttgcagttactaaaaaagtagtagattttgctcattcagttggagttagtgttgaaggcgaattgggttgcttaggttcattagaaacaggaaaaggtgaagcagaagatggtcatggatttgaaggtgaactttctacagatatgcttttaactgatcctgaagaagctgcagattttgttgctaaaacaaaagttgatgcattagccattgctataggtacaagtcatggtgcttataaattcacaagaaaacctactggagaagttcttgcaataagcagaattgccgaaatccataaagcactc

SEQ ID NO: 278325 - DNA, 904 bp, Unknown
  Bacterial polypeptide expressing nucleotide sequence isolated from the Sargasso Sea
catggcgacagaccccgcaatccatcagcaacagtttgaccgcattgcaactggcaagggcttcatcgccgcgctggaccagtccggcggctccacgcccaaggcgctggcgctttatggcgtgatggaagacgcctattccaatgacgaggagatgttcgcggaaatccagaagatgcgcgcgcgcatcatcaccgcaccggatttcaacagcgacaagatcctgggcgcgatcctgtttgaaaagaccatggacaacgccatcgacggcacgcccgtgcccgcctacctctgggaacaatgcggcgttgtacccttcctgaaggtcgacaagggcctcgcggatgaagcagacggcgtccagctaatgaagccgatgcccgatcttaatgcgcttttggaacgcgcggttgccgctggcatctttggcaccaagatgcgctccgtcgtcaaagaagccaacgccgccggcatcaaatccgtggtggcgcagcagttcgaggttggcttgcagatcgcccgcgctggcctggttccgatcatcgaacccgaggtggacatcaactccgccaccaaatccgaggccgaagcgctgctcaaggacgaaatcaaagcccagcttgacgccctgccagagggcaccaaggtttcgctcaaactgacgatccccaatgaggcaggcctctatgacagcctcgcggatcaccccgccgtggtgcgtgtggtggcgctgtctggtggctacaccaccgatgatgcttgcgcgcgcctgtcgcaaaacagcaagatgatcgcgtctttctcgcgcgccctgaccgaggggctgaatgtggcgatgtcggatgcggattataatgcggccctcggctccaacatcgacaagatctacaaagcctcgctctga

SEQ ID NO: 278326 - DNA, 556 bp, Unknown
  Bacterial polypeptide expressing nucleotide sequence isolated from the Sargasso Sea
catgacagatttacatcaaacagcattaaatattgtatccaaaggtaagggtattctagctgcagatgaaagtacagcaacaattacaaagagatttgatgcaataaatgtagaatcaaattttgaaaatagattaaaatttagagaaatattattttcatctagcggaatgaaagattacattggtggagtaattttatttgatgaaacaattaagcaaacaacgaataaaggtattaatattccagaactaattaatactagcaaatctattgttggaataaaagttgatgcaggtgctaaatcactagcaggctcctcagaagaaaaagtcactgaaggactagatggtctaagaggcagatttaaagaatattataaattaggagctagatttgctaagtggagagccgtttacactatatcaagtaattatccctcaaaattagctataaaagcaaatgcacatgcattagctagatatgcagccttagctcaagaaaacaacatagtgccaattgtagaaccagaagttttaatggatggagattcatga

SEQ ID NO: 278327 - DNA, 1012 bp, Unknown
  Bacterial polypeptide expressing nucleotide sequence isolated from the Sargasso Sea
aatgactgattcactagaaaagatagcaaaatatattgtttccgatggaaaaggaattcttgctgctgatgaaagcaatccaacatgcaccaaaagatttgattcaatcggagttgaatctacggaagataatagaagagattatagagaattacttttttcagctgatggtatggaaggcaatattggaggagtaatactatacgatgaaaccataaggcaaacttcgtcagatggaaaaaagctaattgatattatttcagcaaatggagcattgcccggtataaaagtagataagggactcgaagttataaatgatcaaaatgaaacaattaccaagggattagaggatttagatgatagatgcaaagaatataacgaaatgggtgctaaatttactaaatggagatcagtcataaatattggtgattccatcccatctgatgaatgcattaatcaaaatatggatattctcgcgaaatacgcaaagattgcacaaaataataatatggtaccaattgttgagcctgaagttcttatcaatggagtgcatgatatccatagagcttatgaagtttcttcagcatgcttatcagttttatttgaagagctagaaaagaaaaatgcattaattgagggatgcatcttaaagcctagtatggtaactcctggtatggattcagaacatacatccacagttgaagaagttgcaagaatgacgatagattgtctaaaaaataatgttcctgattcgttaccagggataacctttctatcaggaggtcagaccgagcttgaggctacagagcatctaaacgcgatgaatcagataggtggattccaatggaaattgagcttttcatatgggcgcgcacttcagcagtctgcacttaaggcttggcagggattaaaatcaaacaaagaagctgcacaacaagcattttctcacagagcagagatgaataagcttgctgcgcttggacagtggaataaagagcttgaaacgaaataa

SEQ ID NO: 278328 - DNA, 1066 bp, Unknown
  Bacterial polypeptide expressing nucleotide sequence isolated from the Sargasso Sea
atggcacttatcagcatgcgccagatgctcgaccacgccgccgaattcggctacggcgtgccggccttcaacgtcaacaacctcgagcagatgcgcgccatcatggaagccgccgacaagaccgattcgccggtcatcgtccaggcctccgctggtgcccgcaagtacgctggtgcgccgttcctgcgccacctgatcctggctgccatcgaagagttcccgcacatcccggtgtgcatgcaccaggaccacggcaccagccctgacgtgtgccagcgctccatccagctgggcttttcctcggtgatgatggacggctcgctgaaagaagacggcaagaccccggccgattacgactacaacgtccgcgtaacccagcagaccgtagccttcgcccacgcctgcggcgtgtccgtggaaggcgagctgggttgcctgggcagcctggaaaccggcatggccggtgaagaagacggcgtcggcgccgaaggcgtgctggatcacagccaactgctgaccgacccggaggaagccgctgacttcgtcaagaagacccaggtcgatgccctggccatcgccatcggcaccagccacggcgcctacaagttcaccaagccgccaaccggcgacgtgctctccatcgagcgtatcaaggaaatccacaagcgcatccccaacacccacctggtgatgcacggttcttcctccgtgccgcaggaatggctgaaggtgatcaacgagttcggcggtgacatcaaggaaacctacggtgtgccggtcgaggaaatcgtcgagggcatcaagcacggcgtgcgcaaggtcaatatcgacaccgacctgcgtctggcttccaccggtgcgatccgccgcatgatggccgagcacccgagcgagttcgacccgcgcaagttcttcgccaagaccatcgtcgccatgcgcgacatctgcatcgcccgctacgaagccttcggcaccgctggcaatgcctccaagatcaagccgatctccctggagggcatgtaccagcgctatgccagcggcgagctgaacgccaaggtcaactgag

SEQ ID NO: 278329 - DNA, 715 bp, Unknown
  Bacterial polypeptide expressing nucleotide sequence isolated from the Sargasso Sea
atgaatttttcaggacttagtgatattgcaagatatatagttgctgacggaaagggaattcttgcagcagatgaaagcaatccaacttgcaccaaaagatttgattctatttctgttgaatctactgaagacaatagaagaaattacagagaaacattatttacttctgaaggaatgaagaacaacattggtggaacaatattatttgatgaaactatcagacaaaaatctagagatggccgattgttaacagaagtaattatagctcaaggagctttaccaggaattaaggttgataaaggcttaaaccctttcaaccaatcagataatgagacccttacacaaggactagatgatctagatgaaagatgttctgaatatgaaaaattgggagcaaaatttactaaatggcgagctgttataaatataagcgcagatattcccacacaagaatgcattgatgcaaatatggatgctttagcccaatatgcaaaaattgcacaagaaaataatatggttcctattgttgagcctgaggttttgatggatggagagcattcagcagaagattgtttaaacgcaacttcaagatcattaaaatccctatttgattttcttgataactacaatgttgatattacaggaacattattaaaaccaaatatgataactgctggctctgataatccagatcaaatttcagaaggtgaagtag

SEQ ID NO: 278330 - DNA, 739 bp, Unknown
  Bacterial polypeptide expressing nucleotide sequence isolated from the Sargasso Sea
cctgggaattaaagtcgataagggattgcaaccaattgaagattgcccaggtgagacggtaactatcggactagatggcttggatgaaagactaaaagaatatgcatcaatggaagcaaaattcacaaaatggagagctgttatcaatattggtgatggaatcccaacagataaatgtattgatgcaaatatgcaggccttagctgattatgcaaaatgtgcccaagataacggaatggttccaatagttgagcctgaagtgttaatggatggagaacattctatcgacgattgttatgctgcaaccgatcggtcattaaaatctttatttgctcatttagaaaaaaatgacgttaatatcaaaggaacacttttaaagcctaatatggttacttctggaaaagattctaatgatcaagcagggattgatgaagtggcaacaaaaaccttggaatgcctaattaaaaatgttcctgcagaacttccagggataacttttctttctggaggtcagtcagatgttcttgcaacagctcatctagatgctatgaataaaattggaggtttttcgtggaagttaagtttttcttatggaagagctcttcaagcggcagccttaaaagcttggagtggaaaaccagaaaatgtattcatttctcaggatgaattatctcatagggcagagatgaacaaacttgcttctcttggccaatgggaagaagaacttgaagacagataa

SEQ ID NO: 278331 - DNA, 955 bp, Unknown
  Bacterial polypeptide expressing nucleotide sequence isolated from the Sargasso Sea
aactgatagtccagttatcttccaagcttcaagaggggcaagaaattatgcaggagaaattttcttacgtcatctaatccttgccgctacagaaacatatccaaatattccagttgtaatgcaccaagaccatggtaatgagccatcaacatgctattcagcagcaataaatggtttcacatcagtaatgatggatggttctctagaggctgatgcaaaaacacctgctagttacgaatataatgttgaagttactaaaaaagttgtagattttgctcattcagttggagttagtgttgaaggagaattaggttgcttaggttcattagaaacagggaaaggagaagctgaagatggtcatggatttgaaggtgaactttctactgatatgcttttgactgatcccgaagaagcggcagattttgttgccaaaacaaaagttgatgcattagcaattgctataggtacaagtcatggtgcatataagttcacaaggaagcctacaggagaagttcttgcaataagcagaattgctgagatccataaagcacttccaaatacacatcttgtaatgcacggatctagttcagtgcctcaggaatggttggatatcattaacaaatatggtggtgaaattcctcaaacatatggtgttcctgttgaagagattcaagagggaataagaaatggagttaggaaagttaacattgataccgataacagacttgctttcactgccgcggttagagaggcagcatttgctgataaggcaaactttgacccaagacatttcaacaaacctgctagaaaatatatgaagcaagtttgtcttgatagatacaagcagttctggtgcgaaggtcaagcaagtaagatcaaacaaaacagcacaaatttctttgctgatctttacgcaaaaggtgatttagatccaaaagttaaagctactgtttaa

SEQ ID NO: 278332 - DNA, 612 bp, Unknown
  Bacterial polypeptide expressing nucleotide sequence isolated from the Sargasso Sea
tatgacaatagaagagattgcaaaacaaatggtaaccaaaggaaaaggtatacttgctgcagacgaaagcactggaaccatgggtaaaagattaaaaagtgtaaatgtagagtctactgaagaaaatagacttcattttagagaaacattattcagttcaagtgcaatgaaaagctcaattagtggtgtcatattatatgatgaaacattaagacaaacttcaagcaagggaatttccattcctgacttgattaaaaaaagcggttcaataccagggattaaagttgataagggagtaaaacttcttgctggttcaaaagatgaaaaaataaccgaaggtcttgatggacttagagaaagaatggaggaatactacaagttaggtgcaaggtttgctaaatggagggctgtttacttaattacccaaaaacatccaagcgaacaaagtataagagcaaatgctcatgcactagctagatacgctgctatcgtacaagaagctaaaatggttccaatagtagaacctgaagtattaatggatggagatcattcaatcaataaatgtttcgaagtgactagtaaagttttagctgaatgctacaaagaacttaa

SEQ ID NO: 278333 - DNA, 1075 bp, Unknown
  Bacterial polypeptide expressing nucleotide sequence isolated from the Sargasso Sea
tatggccctcgttccactaagactacttttagatcacgctgctgagaatggttacggtattccagctttcaatgttaataatcttgagcaagttcaagcaatcatggaagcggcttatgaaactgatagtccagttatcctccaagcttcaagaggggcaagaaattatgcaggagaaattttcttacgtcatctaatccttgccgctacagaaacatatcctaatattccagtagtaatgcaccaagaccatggtaatgagccatcaacatgctattcagcagcaataaatggtttcacatcagtaatgatggatggttctctagaggcagatgcaaaaacacccgctagttacgaatataatgttgcagttactaaaaaagttgtagattttgctcattcagttggagttagtgttgaaggagaattaggttgcttaggttcattagaaacaggtaaaggtgaagcagaagatggtcatggatttgaaggtgaactttctactgatatgcttttgactgatcctgaagaagctgcagattttgttgctaaaacaaaagttgatgcattagctattgctataggtacaagtcatggtgcttataaattcacaaggaaacctacaggggaagttcttgcaataagcagaattgctgaaattcacaaagcacttccaaatacccaccttgtaatgcatggatctagttcagttcctcaagaatggttggatatcattaacaaatatggtggtgaaattcctcaaacatatggagtccctgttgaagagattcaagagggaataagaaatggagttaggaaagttaacatcgataccgataacagacttgcttttactgctgctgttagagaggcagcatttgctgataaagcaaactttgacccaagacatttcaacaagcctgctagaaaatacatgaagcaagtttgccttgatagatacaagcagttctggtgcgaaggtcaagcaagtaagatcaaacaaaacagcactaattattttgctgatctttacgcaaaaggcgatttagatccaaaagtaaaagctactgtttaa

SEQ ID NO: 278334 - DNA, 907 bp, Unknown
  Bacterial polypeptide expressing nucleotide sequence isolated from the Sargasso Sea
tatgacattaaatgaaattgcaaaaaaaatgtgcgctgagggaaaaggtatccttgccgcagatgaaagcacaggaacaatagctaaaaggtttaaaagtattaatgttgagaacatagaaaaaaatagacttaattttagacaaactctttttaattcaaatgctatgaaagatttcattggcggagtaattttatttgatgaaacaattagacaaaaaacttcttttggtcctacaattccagaattaatttctaaccatggagctgtaccaggtattaaagtcgataaaggcgcgaaacctcttgctggatctagtgatgagactataacggaaggtctagatggtttaagagaaagattgaaagaatactatgatttaggtgccagatttacaaaatggagagcggtgtataaaatttcaaatgaatttccatcagttcaatcaattaaatctaacgctcatgcactagcaaggtacgctgctttagttcaagaggctaaaatggtaccaatagttgaaccagaagttttaatggatggttcacataatattgataaatgctaccaagtcacaacaaacgtgcttaatgaatgttataatgaactagagattaataaagttgatttgaaaggaactgttcttaaacctaatatggttatacctggctcagaatgcaaagataaatctagtactaaggaaattgccatgaaaacattagattgtttgaaaaaaaatgtgccagctgaagtaccaggcatagcttttttatccggcggacagtcagaaatagaggctagtaaaaacttaaatgaaattaataaaataaatgatactaactttttaattactttctcttatggaagagggttacaagctagtgcattaaaagaatttggaaaaaat

SEQ ID NO: 278335 - DNA, 1021 bp, Unknown
  Bacterial polypeptide expressing nucleotide sequence isolated from the Sargasso Sea
atggaattaactactttaaatgacgtagcaaatgcaatggtcgctgatggcaaaggtatcttagcagccgatgaaagcacagggaccattggtaaaagatttgatcaaattaatctagagagcaccgttgaaaatagaaatgcatatcgcgatctcttgtttagtacaaaggatattgaaaattacatcagcggtgttattatgtacgatgagacattccgtcaatcttctttagatagtaatatattatatcctaaatatttatccgataagggaataatacctggaataaaagtagatatgggggctcacaatctatctggaactgagggagaaaaaataactgaaggtcttgatggcctaaatgaaagattaaatgaatatagaaaattgggtgctaggtttgcaaaatggagagcagtgatagttatttcagaagaaaatccaagtgggtatgcaattgccacaaacgctcatgctcttgcaagatacgcatcgttatgtcaatcaaacgatatcgttccaattgttgagccagaaatattaatggatggaactcatgatattgatgacagctttgtggttacggaagaagtattgcatacagtattttttgaactttattctcaaggggttcatttcgaagaaatggttttaaaaccaaatatggtcttgtcaggttatgagtgttcatcgcaggctagcgttgatgaagttgccaatgcaaccattgaatgttttatgcgaactgtgccagcagctgttccaggaattgctttcttatctgggggtcaaagcgatcagcacgcgaccgcgcatctgaatcgaatgaatcaattacttggaaataataaaccatggaaccttaccttttcatatggaagagcactacaacaatcagcaataaaagcatggggtggatctgaacaaaatattacaaatgctcaaaatgctcttatacatcgagctaaattaaatagcttagcgacaacaggtgaatattctgaggatatggaataaa

SEQ ID NO: 278336 - DNA, 979 bp, Unknown
  Bacterial polypeptide expressing nucleotide sequence isolated from the Sargasso Sea
cactaaaacagtaggtaaaagactcgctggaattggcgttgagaatactgaagaaaataggaaggcatatagaggaatgctttttactacagagggtcttggcaaatatataagtggagcaatcctcttcgaagaaactctttatcagaatcaccaagatggtgagtcaatggttaagaaactaaatgatttaggtattattccaggtataaaggtcgataaaggcctaaatccacttccaggagggggagatgtagaaactttttgctctggcctagatgggttagttgaaagagccgcaaaatattatgaacaaggtgccagatttgcaaagtggagagcagttttgcaaattacaaatgatggttgtccttcaaaactatcaattcaagagaatgcttggggattagcaaggtatgcaagatcagttcaagaatctgggttagtaccaattattgaacctgaaatcttaatggacggcgaccatactattgaaaaaactgctgaagttcaagaagaggtaataaagcaggtttatattgcctgtcaagcaaatggagtttttctagaaggcactctattaaaaccttctatgactgttaatggagcagattgtccaacaaaggctgatcctatgaaggttgctgaaatgacaattagaactatggaaagatgcgttcctgcatctgttcctggaatagttttcttatcaggagggttaagcgaagaagctgcttctgtttatctaaataatatgaacactctttacaggaaagctttatggaatgtttcattctcctatggaagagcattacagcactcatgcttaaaggcctggaaaggaagcgacgttgaaggaggtcaaaaagcattaatagcaagagctcaagcaaactctgaagcttcaaaaggtgcctatgtagcaggatctcaaccttcatctgatgagcaattgtttgtggcaggctacacttattaa

SEQ ID NO: 278337 - DNA, 742 bp, Unknown
  Bacterial polypeptide expressing nucleotide sequence isolated from the Sargasso Sea
tattgttccccgaattaaggtggatacaggcgctaaaccactgccaggccataatggagagacagtaacagaaggtcttgatgggctaagagataggttaactgagtattattcactgggtgctagattcgctaaatggagagctgttataaacatcgatgacgttcttcccactgatttttgtatcaaggcaaatgcgcatgctcttgcgaggtattccgctctttgccaggaacaaaatatcgttccaatagttgagcctgaggtgctcatggatggtggtcattcaattgagcgctgtgaggaagttacaaataaagtgcttaagactgtatttaatgagttacaagagcatgccgtgaatttagaaggcattgtattaaagccaaatatgataatttctggcgcaaaagcagataatcgagcgaattcagatacggtcgctgaggcaaccatccgttgcctcaaagaaaatgttccagaatcagttccaggaattgcttttctatctggcggacaatcttctgaggaagcaaccgaacatctgaatttaatgaataagatgggtgatcttccctgggaattgtcattttcatatggacgcgcacttcaagcttctccattgaatgtttggtctggcagtgaagataacttttcagcaggtcagcaagctttcttgaaaagagccaaattaaatagtcttgctcacgctggagaatatcaaaaagatatggaagattag

SEQ ID NO: 278338 - DNA, 688 bp, Unknown
  Bacterial polypeptide expressing nucleotide sequence isolated from the Sargasso Sea
tacagaaggtctggatgggctcagagcaagaatggaagaatattataaattaggagcacgatttgcaaaatggcgagctgtttattcgatatcatctaaatatccaagtgaacaatgtataaaatcaaatgcgcatgcgttagcaagatatgcggcattagttcaggaggcaaaaatggttcctattgtagaaccagaggttttaatggatggtgatcactcaattgaccaatgtcatgaagtaaccagcaaagtactttcagaatgttacaaggagttaaagatacacaatgtgaatcttaaagggactgttctaaaacccaatatgatcctacccggaacaagttgcaaacaaaaagtcacatcatcagaaatagcaaaaaaaacattagaatgtcttaaaaaaaatattcctagtgaggttcctggcgttgcatttctttctggtggacaaagcgaagtagaagctacaaaaaacttaaacgaaattaacaaaattaatgacacctctttccattttactttttcttatggaagagccctacaacagtctgctttaaaaacctgggcaaaatctatgaaagatacaattaaaatacaaaaagtttttgatcacagagctaaaatgaatggtgcttcgaccgaggccaaatggaatgaaaagcttgaacaaggttttgctgcttaa

SEQ ID NO: 278339 - DNA, 1009 bp, Unknown
  Bacterial polypeptide expressing nucleotide sequence isolated from the Sargasso Sea
aatgtctgaattaaattcaatagctctaaaaattatttcatcaggcaagggaatacttgctgctgatgaaagtaatggaactatgactaaaagattagatggtgttggaatttcttcaacccctgaaaatagattaaaatttagaaataccctttttacatctgaaagtatggaatcatgtataggcggagtaattttatatgacgaaacgataaagcaatctgttggctctaattcaatacctttaataatatcgaaaactggagcaataccaggaataaaagttgatactggagcaaagactttatcgagctcaaaagaagaaaaaattacagaaggtttggatggtttaagagaaagattaaaagaatattataaactaggagcaagatttgcaaaatggaggggagtttatactatttcagaatcttaccctagcaaagtagcaatctctacaaatgctcatgcgctagctagatatgcatcattagttcaagagtctggaatggttcctattgtagaacctgaagttcttatggatggagctcacaattcaaaaacttgtctagataaaacttcagaagtaatcaaaaaatgttatgaggagcttgaaattaataaagttgatttaaaaggaacaattttaaaacctaatatgatcttaccaggatcaaagtctgatgaaaaaataacaagtgaagaaatagcaaaactaacattgcaatgtttgaaaaacagtgttccttctgaagtaccaggaatggcttttttatcaggtggtcagagcgaattggaagctacagaaaatttaaatttaataaatgttcaaaataatactgatttcattatgactttttcctatggaagagctcttcagcaaagcgctcttaaacattggtcaaaaaatattgaagatataaaaggtacacaagaagtttttaataacagggctaagatgtgcagtttagctgctagaggtaagtggtcatacgaacttgataataaataa

SEQ ID NO: 278340 - DNA, 1018 bp, Unknown
  Bacterial polypeptide expressing nucleotide sequence isolated from the Sargasso Sea
atgaatttagaagagattgcaaaaaagatggtggctaaaggtaagggaattttagcggcggatgaaagtactggaacaatgggtaaaagattaaaaagtgtaaatatagaatcaactccagaaaatagattaagttttagagaggctctttttagctcagaaggtatgaaaaattatattggaggtgttatacttttcgaagaaactttgaaacaaaaaagtacaaaaggaatatcagtacccgaacttatcatggagagcggatctattccaggtatcaaagttgataaaggagctaagagtttagctggttcttcagaggaaaaagttacggaaggtttagacggacttagagaaagactaaacgaatattataaacttggtgctagattcacaaaatggagagcggtatacaatatctctgaaaaatacccctcgtctcaagctattaaatctaatgctcatgcacttgcaagatatgctgctttagcacaagaaacaaagatggttccaatagttgagccagaagttttaatggatggcgaccacgatattaacaaatgctatgatgttactacagatgttttaaatgaatgttacaatcaacttgaaattcataaagtatttcttaaaggaactattttaaaaccaaatatgattttgcctggagttaacagtaaaaataaatcaagctcagaagaaattgcaaaaaaaacaatcgaatgtcttaagaaaaatgttccaagtgaagtaactggtattgcttttttatctggaggacaaagcgaaaaagaagctactaaaaatttaaatgaaataaacaaaataaacgatacaaattttcttatatcattttcttatggaagagccctgcagcaaagtgctttaaaaacttggtcaaaaaatatgaaagatattaaaaaagttcatagtgtatttaaccatagggcaaaaatgaatggtctttcatcaagagctgaatggtctgaaaatttagaacaagaatttgctgcttaaa

SEQ ID NO: 278341 - DNA, 1020 bp, Unknown
  Bacterial polypeptide expressing nucleotide sequence isolated from the Sargasso Sea
ttaggaggctaaaaatgtcattagaagaaattgcgaattatatagtttcagacggtaaaggaattcttgccgcagatgaaagcaatccaacatgcggcaaaagatttgattctattgaagtagaaaattctgagaataatagaagagactatagagagatgctttttagatcaaaaggtatgaaagaaaatattggcggagtaattttatttgatgaaactctgaggcaggatgccaaagatggcactccccttaaagaattaatcagtaattcgggtgcccttcccggcattaaggttgataaaggcttagtacctctggttgatggatcagatgaagtagtgactcaaggattggatgggctcgatgaaagatgttccgaatatgattctttaggagcaaaatttacaaagtggcgcgcagtaataaaaatcggagatagcatgccatctgatgattgtattaatgcaaacgccaaagcattagcagattatgctgcaattgctcaatctaataacatggtgccaatagttgaacctgaagttttaatggatggcgaccattcaattgatctttcttttgatgcttgcgcaagatcttttcaagctctatttgatgctctagaaaataatggtgtaaacataaaagggaccatattaaaaccaagcatggttactccaggctcgctatctgaaaaagtagcaatcagagaagtggctgaaatgacagtaaggtgccttaaagagaatattccttcagatcttcccggagttgcttttttatcaggagggcaaacagagcttgaggcgacagctcatttaaatgaaatgaataaaataggtgagtttccatggaaacttagcttctcatatgggcgagcccttcagcaaagtgctctgaaagcctggtcagggcaaagcgaaaatatcttcatagctcaagatgagctatctcacagggctgaaatgaataaactagcagcacttggacagtgggatatcaaacttgaagatagataac

SEQ ID NO: 278342 - DNA, 1009 bp, Unknown
  Bacterial polypeptide expressing nucleotide sequence isolated from the Sargasso Sea
tatgtctgaattaaatactttagctctaaaaattcttgaaaatggaaaaggaattttagctgcagatgaaagtacaaacacaatgaccaaaagattagatgatgtcaacgttccatctactcctgaaaatagattattatttagagaaactttattcactgcatcaagcatgactgaatgtattgggggagtcattttatatgatgaaacaattagacaggaaacttcaaaaaaaaataaaatcccagaattaatttcaagtttaggatctcatcctggtataaaagtagacactggtgcaaaggtacttgcagggtcgccaaatgaaaaaattactgaaggtttggatggacttagagaaagattaaaaaattattataaacttggggcaaaatttactaaatggagaggtgtctacagtatatctcaaaattatcctagcaaactatcaatccaatctaatgctcatgctttagctcgatactctgcattggttcaagaatgtggcatggttccaattgttgagccagaattattaatggatggtgagcattcagcaaatgattgttataaaaaaacttcagaggttattaaaaaatgttttgaggaacttattttacataaagttgatttaactggaataattttaaagcccaacatgattttggatggtaataaatttaaggataaaatatctagcgatgaagttgcaaaattaacattagattgtcttaaaaattctgtaccttcagaagtacctggtattgcttttttatctggtggacaatcagaaatacaagcaacagaaaatctaaatttaataaacaaaataaacacgactaattttataatgagctattcttatggaagagctttgcaacaaagtgctcttagattttggtcaaaaaatactcaagatattgaaggtacccaaaaagtatttaatcatagagctaaaatgaataaattagctgctcaagggaagtggtctaaggaacttgagaactaa

SEQ ID NO: 278343 - DNA, 862 bp, Unknown
  Bacterial polypeptide expressing nucleotide sequence isolated from the Sargasso Sea
atgaatttttcaggacttaatgatattgcaaaatatatagttgctgacggaaaaggaattcttgcagcagatgaaagcaatccaacttgcactaaaagatttgattctatttctgttgaatctactgaggacagcagaagaaattatagggaaacattatttacttctgaaggaatgaagaacaacattggtggaacaatattatttgatgaaactattagacaaaaatctagagatggccgattgttaacagaagtaattatagctcaaggagctttaccaggaattaaggttgataaaggcttaaaccctttcaatgaatcagataatgagaccctgacacaaggactagatgatctagatgaaagatgttctgaatatgaaaaattgggagcaaaatttactaaatggcgagctgttataaatataggcgaagatattcccacacaagaatgcattgatgcaaatatggatgctttagcccaatatgcaaaaattgcacaagaaaataatatggtccctattgttgagcctgaggttttgatggatggagagcattcagcagaagattgtttaaacgcaacttcaagatcattaaaatctctatttgattttcttgataactataatgttgatattacaggaacattattaaaaccaaatatgataactgctggctctgataatccagatcaaatttcagaagatgaagtagcatcattaactcttgaatgtttaaaaaaacatgtgcctgatgatcttccaggcattgcctttctctctggagggcaatcagatattaaagccactcatcatttagatgcgatgaataaaatgggtggcgggtcttggaaattaactt

SEQ ID NO: 278344 - DNA, 904 bp, Unknown
  Bacterial polypeptide expressing nucleotide sequence isolated from the Sargasso Sea
atgacggaattgaaaaatatcgcaaagaaaatcttggaaaaaggcaaaggaattttagctgctgatgagagcactggtacaatgacaaaacgtcttgaggcggttggagtaacttcaagccctgataacagactattatttagagaaacgcttttttcttctgcggcaatgaaaagtttcgtcggtggggtaattttatacgatgaaacaataaaacaaaaaagtttaacaaataaaaaaattccagaattaatatctagttctggagccgttccaggtataaaggttgatactggtgcaaaaattcttgctaactctcctgatgagaaaattacagaaggtttagatggactaagagaaagattaaaagaatattatcgattaggtgctagatttacaaaatggagagccgtgtattcaatttcagagaattatccaagtaagctgtctatatattcaaatgcacacgctcttgcaagatattctgcattggttcaggagtgtgggatggttccaattgtagaacctgaagttcttatggatggcaatcatagtgctgaagagtgttttaataaaacttctgaagtgattaaaaaatgttttgatgagcttttcaaacataaggtagatcccagtggtataattttaaaaccaaatatgattttaccaggctcaaactctgaaaaaaaaatcaatacaaaagaaattgcagaactaacactaaaatgtttaaaaatgtctgttccttctgaagttcctggaattgcttttttatcaggtggacaatcagaatttgaagcttcaaaaaatttaaatagtattaatttaattaatgatacaaatttcataatgacatattcttatggaagagcattgcaacaaagtgcttttaaattttgggcaa

SEQ ID NO: 278345 - DNA, 1027 bp, Unknown
  Bacterial polypeptide expressing nucleotide sequence isolated from the Sargasso Sea
cgctgaaaacggctacggcctgccggcattcaacgtgacaaacctggaacaagtccaggccgtgatggaagccgccaaggaagccggcgcacccgtcatcctgcaagccagcgcaggcgcccgcaaatacgccggcgaatcgttcatcaagcacctgatccaggccgctgtcgaggcttatccggagatcccgctggtcatgcaccaggatcacggccaaagcccggccatctgccagggcgccatcgacctgggcttcggctcggtgatgatggacggctcgctgcgcgaagacggcaagacgcccgccgatttcgactacaacgtcgacgtgacgcgccgcgtggtcgagatggcccacaaggtcggcgtgacggttgaaggcgaactcggctgcctgggctccctggaaaccggcatggccggcgaggaagatggccacggcgcggaaggcaagcttgaccactcgtcgctgctgaccgacccggaagaggctgcccagttcgtcaaggcgacccagctggacgccctggccatcgccatcggcaccagccacggcgcctacaagttcacgcgcaagcccacgggcgacatcctggccatcagccgcgtgaaggaaatccacgcgcgtatcccgaacacccatctggtgatgcacggctcgtcgagcgtgccgcaagaactgctggccatcatcaaccagtacggcggcaagatgaaggaaacctacggcgtgcccgtcgaggaaatccaggaagccatcaagtacggcgtgcgcaagatcaacatcgacaccgacatccgcttggcaatgacgggcgcggtgcgcaagttcctggccgaaaacccggacaagttcgacgcccgcgaatggctcaagccggcgcgcgaagccgccaagcaaatctgcaaggcgcgctatatccagttcggctgcgaaggtcaggccggcaagatcaagcccattagcctgtccgtgatggcgcagaagtaccaaagcggcgatctggcgcaagtggtgcaataa

SEQ ID NO: 278346 - DNA, 981 bp, Unknown
  Bacterial polypeptide expressing nucleotide sequence isolated from the Sargasso Sea
tatgtctgaactaaataatattgtaaataaaattcttgaaaatggtaaagggatcctggctgcagatgaaagcacgggaacaatgacaaaaaggcttgatggtgtaggtgtgccctcaaccccagaaaatagattactttttagagaaactcttttttgttcatcagaaatgaaaaattgtattggcggagtcatactctacgacgagacaattaaacagacatcctcaaaaaaaaacaagataccagaattaattgagggtatgggatcttgtgcaggaataaaagtagatacaggtgcaaaaagtttagctgggtcaccaaatgaaaaaattacagaagggttagatggtttaagggatagactaaaggaatattttaaacttggagcaaagttcactaaatggagaggtgtttacaatatatcaaaagatttcccgagcaaattatctattcattctaatgcacacgcgttagctagatattccgcattagtacaagaatgtaatatggtaccaattgttgaaccagaggttttgatggatggagaccattcagctaaagagtgttttcaaaaaacctccgaggtcattaagaagtgttttgaggagctaattcttcataaggttgatttaaaaggagtaatattaaaaccaaatatgattctagctggaaataaatcaaaggaaaaaatctctaatgaagaggtagcaaaattaaccttggattgcttaaaaagttctgtgccctcggaagttcctggtatagcttttttatcaggtggacagtcagaactggaagcgacagaaaatttaaatttgataaataaattgaataagactggttttataatgagttactcttacggacgagcattgcagcaaggtgctcttaaattttggtctaagaacataaaagatattgaggggacccaaaaagtatttaaccacagagcaaaaatgaacactcttgctgctcaagg

SEQ ID NO: 278347 - DNA, 1018 bp, Unknown
  Bacterial polypeptide expressing nucleotide sequence isolated from the Sargasso Sea
aatgatacttaataatattgaagaaatagcaactttcattgtggaggatggaaagggcattcttgctgcggatgagagtaatcctacttgtggtaaaagatttgattctattggggttgaatcaactgaagaaaatagaagggattacagagaaatgctttttagatcaaaaggaatgaatggcaatattggtggagtaatactttttgatgaaaccataagacaatcatcagaagacggcaccctattgagagagattatttctaaccaaggcgcccttccaggaattaaagtcgataaaggattacaaccaattgaggattgtccaggcgaaacagtaacaatcggattagatggcttggatgaaagattaaaagaatattcatccatgggagcgaaatttacaaagtggagagctgtaatcaatattggagatggaatacctacagataaatgcattaatgcaaatatgcaagccttagctgattatgcaaaatgtgctcaagataatggaatggttccaatagttgagcctgaagtattaatggatggagaacattcaattgatgattgttatgaagcaactgaccgatcattaaagtctttgtttgctcatttagaaaaaaatgatgtcaatattaaaggcacacttttaaaacctaacatggttacatctggaaaagattctattgaacaagcaggaatagatgaggtcgctcaaaaaactttagattgtttaattaaaaatgtaccagcagaacttcctggaataacttttctttctggaggtcaatcagatgttctagcaacagctcatttagatgctatgaataaaattggcggttttacctggaagttaagtttttcttacggaagagctcttcaagctccagctctaaaagcttggaatggaaaaccagaaaatatatttatttcacaggatgaattatctcatagagcagaaatgaataagctagcttctcttggacaatgggaagaagagcttgaagatagataa

SEQ ID NO: 278348 - DNA, 511 bp, Unknown
  Bacterial polypeptide expressing nucleotide sequence isolated from the Sargasso Sea
atgtctttaatcagtatgcgacaactattagatcatgcagcggaaaatgcatacggcgttcctgcttttaatgttaataatttagaacaaataagagcaattatggaaggtgcaaatgaaatgaacagccctgtaattatgcaagcttcagctggagcaagaaaatatgcaggagcaaaatttattaaaagtatgattgaagcagctgttgaagaattttctaatataccaatagtaatgcaccaagatcacggagcaacaccagatgattgtaagaaatgtatggatttaggatttagctcggtaatgatggatggatctctgttagctgatcaaaaaaccccatccgactttaattacaacatagaagtcacaaaaaaaactgttgatattgcacatcctataggagtttctgtagaaggagaattaggctgtttaggctctttagagacaggaatgggtgaaaaagaagacggtgttggtgctgaaggtatattaactcgtgaacaac

SEQ ID NO: 278349 - DNA, 616 bp, Unknown
  Bacterial polypeptide expressing nucleotide sequence isolated from the Sargasso Sea
aatggatttgaaaaacttagaagcagttgctgaagcaatggttattcctgggaaaggcattcttgctgcagacgaaagcactggaactataggcagtaggctttctcagattaatactgaaagttcttctgaaacacgtaatgcttacagagacctcttatttagtgccgatggtatagaagaatatataagtggtgtgattatgtatgatgaaacccttagacaatcttcattaagtgatggtaagccatatccagaatatttatccgaaaaaggtattcttccaggaatcaaagttgatactggtgcccatgatttacctggtagtgagggggaaaaaataactcaagggcttgatggtttaaacgatagattgaaggaatatagaggaatgggtgcccgttttgcaaaatggcgggctgttataaatattaccgaagataatcctagtggttattgtatcagtactaatgcacatgcattagcaagatatgccggtttatgtcaggcgaatgatatagtcccaattgtagagcctgaaattttaatggatggtgatcatgatattgatgacagttttgtagtaaccgaggaagttctccatactgtttttttt

SEQ ID NO: 278350 - DNA, 1018 bp, Unknown
  Bacterial polypeptide expressing nucleotide sequence isolated from the Sargasso Sea
atgtcacttaataacatagaagatattgctgcatttattgttgcagatggcaagggtattcttgcagcagatgaaagcaatccgacatgcggcaaaaggtttgattcaattggtgttgaatccactgaagaaaacagaagagattatagagagcttctttttagatctaaaggcatgaaagataatattggtggagtcatattatttgatgaaactattaggcaatctgctaaagatggaactttgttaagagatgtaattaaaaatcagggcgcccttcccggcattaaggtagacaaaggcttacaaccacttgaagactgtccaggagaaactgttacggttggattagatgggttagatgaaagattaaaagagtactcatctatgggcgctaaatttactaaatggagagctgtaatcaatattggagatgggcttccaacagacaaatgcatagatgcaaatatggaggcattagcagattatgcaaaatgtgctcaagacaatgaaatggttcctatagttgaaccagaagtacttatggatggagagcattcgattgatgaatgttatgaagcaacagaacgctcacttaagtctctttttgaacatttagataaaaaaggagttaatatcaaaggaactctattaaagccaaatatggtgacgtctggcaaggatgcaagtgtgcaggctggcattgatgaagttgcaaagaaaactcttgattgtctaattgcaaatgttccagctgatcttccaggaattacttttttatctggaggccaatcagatgtccttgcaacagctcatttagatgcaatgaataaaatcggagggttctcatggaaattgagtttttcatacggaagagcgcttcaagcagctgcgttacaagcttggggaggaaagtcagagaatgtatttatttctcaagatgagctctctcacagagcagaaatgaataaattagcttccttaggtgaatgggaagaagacttagaagatagataag

SEQ ID NO: 278351 - DNA, 1066 bp, Unknown
  Bacterial polypeptide expressing nucleotide sequence isolated from the Sargasso Sea
catgcctctcgtatcaatgcgtcaactgctggaccatgccgccgaaaacggctatggcatcccggcattcaacgtgaacaatctggagcaggtgcaggccatcatggccgcggccgacaaggtcaatgccccggtcatcatgcaggcgtcggccggcgcgcgtaagtacgcgggtgagccgttcctgcgtcacctgatcgaagccgcagtcgagtcatatccgcatattccggtcgtgatgcaccaggaccacggccagtcgccggcggtctgtatggcggcgatccgcagcgggttcaccagcgtgatgatggacggttcgctcgaagccgacggcaagacggtcgcctcgtacgaatacaacgtcgaagtctcgcgcaaagtggttgaagcggcgcattcgatcggcatcacggtggaagcggaactgggcgtgctcggttcgctggaaaccatgaagggcgacaaggaagacggccacggcgcggaaggcacgatgacccgcgaacagctgctgaccgacccggagcaggctgccgacttcgtcaagcagacgcaatgcgacgccctggcgatcgcgatcggcacgtcgcacggcgcgtacaagttcagcaagaagcccacgggcgacattctgtcgatccagcgcatcaaggaaattcatcagcgcattccgaacacgcacctggtgatgcacggttcgtcgtcggtgccgcaggaactgctcgcggaaatccgcgaattcggcggcgacatgaaggaaacctacggcgtgccggtcgaagaaattcaggaaggcatcaagcacggcgtgcgcaaggtcaatatcgacaccgacctgcgtctggcgatcaccggcgcgatccgtcgctacatggcgaccaacccgggcaagttcgatccgcgcgactacctgaagccggcgcgcgaagccgcgatgaagatctgtctcgagcgcttcacccaatttggctgcgaaggccaggcaggcaagatcaagccggtttcgcttgataaaatcgcggagaagtacaaatcgggcgagctcgcgcaagttgtccgctaa

SEQ ID NO: 278352 - DNA, 975 bp, Unknown
  Bacterial polypeptide expressing nucleotide sequence isolated from the Sargasso Sea
aatgtctgaattacatgctgtagcacataaaatggttgagaaaaataaaggtattttagcagctgatgaaagtaatcctacatgtactaaacgttttgaaagcatagacactgagtcaaccgctgaaagtagaaatttgtatagaagcattcttttttcttcaaaagatattgaaaaatatattagtggtgttatcctgtttgatgagacttttcaccaatcagaactttcatccggtctaaaaattcctgaatatttatcatctaaagatattcttccaggtattaaagttgatgaagggttagaaaattttggatctaatgaaaaactaaccatgggtttagatgggttatcagaaaggcttggcaagtattatgccttaggggcaagatttgccaaatggagagcagtaattactccgggaaatggaactccaacagatgaatgtatcctagcaaatgcaaaaaatttagctaaatatgcacaaaagtgtcagaacgccaatttagtgcctattgttgaaccagaagttttaatggacggagaccacactattgacgattcttttgatattacttcaagaactttgaatactgtatttgatcaattagaccaacataatgttagtttacaaggaatggttttaaagccaaatatggtattatctggatatagttgttcatatcaagcagatattgttgaagttgcagaaaaaactgttaattgcttatcagctcatgttccttctgaagttcctgggatagcgtttttatctggcggtcaatctgatgaagatgctacaatacatttaaatgaaatgaataaatatgaaactgattggaatttaacattttcatatggtagagctttacagcaacctgctttaaaggcatggtcaggtaaggttgaaaattcagaaaaagcagaacaagctttaattgatagagctaaagcaaatagtttagcaacggctgc

SEQ ID NO: 278353 - DNA, 1075 bp, Unknown
  Bacterial polypeptide expressing nucleotide sequence isolated from the Sargasso Sea
atggccctcgttccactaagactactattagatcacgctgctgagaatggttacggaattccagctttcaatgttaataaccttgagcaagttcaagcaattatggaagcagcatatgaaactgatagtcctgtaatcctccaagcttcaagaggggcaagaaattatgcaggagaaattttcctacgtcatctaatccttgctgctacagaaacatatcctaatattccagttgtaatgcaccaagaccatggtaatgagccatcaacatgttattcagcagcaataaatggtttcacatcagtaatgatggatggttctctagaggcagatgcaaagacacccgctagttacgaatataatgttgcagttactaaaaaagtagtagattttgctcattcagttggagttagtgttgaaggagaattaggttgcttaggttcattagaaacagggaaaggagaagctgaagatggtcatggatttgaaggtgaactttctactgacatgcttttgactgatcctgaagaagctgcagattttgttgctaaaacaaaagttgatgcattagctattgctataggtacaagtcatggtgcttataaattcacaaggaaacctacaggagaagttcttgcaataagcagaattgctgaaattcataaagcacttccaaatacccatcttgttatgcatggatctagttcagttcctcaagaatggttggatatcattaacaaatatggtggtgaaattcctcaaacatatggtgttcctgttgaagaaattcaagaggggataagaaatggagttaggaaagtcaacattgataccgataacagacttgctttcactgccgcggtaagagaggcagcatttgctgacaaagcaaactttgacccaagacatttcaacaaacctgctagaaaatacatgaagcaagtttgtcttgatagatacaagcagttctggtgcgaaggtcaagcaagtaagatcaaacaaaacagcaccaattactttgctgatctttacgccaaaggtaatttagatccaaaagtaaaagctactgtttaat

SEQ ID NO: 278354 - DNA, 1012 bp, Unknown
  Bacterial polypeptide expressing nucleotide sequence isolated from the Sargasso Sea
atgtctgaacttaataaaattgctcttaagataatttctgatggcaaaggtattcttgctgcagatgaaagtaatggaactatgactaaaagacttgaggcagtaaatataacctcatcaccagaaaatagacttttatttagggaaatactcttttcatctgaaagtatgaaaaaatacataggtggtgtaattctttatgatgaaacaataaaccaaacaacaagttttggaaaatcaatacctaatttaatttcctcttctggtgcactgcctggaataaaggttgatactggtgcaaaagatttggcaaattcttctgatgaaaaaataactgaaggcttagatggacttagagaaagattaaaaaaatattatgaacttggggcaagatttacaaaatggagaggtgtttataatataagtaataagtatcctagtaaaatagcaattaacagtaatgctcatgcactcgcgcgctattctgctttagtacaagaaagtggaatggtaccaatagtcgaaccagaattattaatggatggtgatcattcagctgatatttgtttaaaaaaaacatcagaagttataaaaaaatgttttgatgaattaatatcgcataatgttgatctttcaggaatcattttgaaaccaaatatgattttgcctgggaaccgttcaaatgataaaatctctagtgaagaagtttctcaaaaaacactagaatgtttaaaaaagtcggttcctactgaggtgccagggatcgcctttttatctggaggccaatcagaaatagaggctacagaaaacttaaatttgataaatcaaaataataatactaaattcataatgacttactcttacggaagagctttacagcaaaatgctttaaaactttggtcaaaaaacactaaagatattcaatcaactcaaaatacttttaaccacagagttaaaatgtgttctttagctgccaaaggaaaatggtcgaaagaacttgaaaataaataaa

SEQ ID NO: 278355 - DNA, 1006 bp, Unknown
  Bacterial polypeptide expressing nucleotide sequence isolated from the Sargasso Sea
atggaaaatattgaagatatagcatcttatatagtttcagatggcaaaggaatattggcagcggatgaaagcaacccaacttgcactaaaagattcgattcaataggagtggaatcaacagaagacaaaagaagagagtatagagaaatgctttttaggtctgagggaatgaaaggcaatataggtggagttattctctttgatgaaacaattagacaagatgctaaagacggaacctctttagttgaggttattaggaatcaaggagctgtacctggaattaaagtagaccaaggcctagaggttattaatgatcaagaggaaacagtaacaaaagggctagaagggctgaatgagagatgttcagagtactattctcttggagctagatttacaaaatggagggcagtgataaagattggaaataccattccctcaaaagaatgtattaatagaaatatggaagccttagcggaatacgctcttattgctcaggctaatggaatggttcctattgttgagcctgaagtgcttatggatggagatcattctattgaacaatgttatgaagcctcttcaaggagtttagatgctttatttagtatgcttacctctaagggtgtaaatataaaagggactatcttaaagcccaatatgattacttcaggatctaatgttactagtaaggcaaatatagacgaggtagcgtcaatgactcttaaatgtctaaaaagccatgtacctgatgagcttccgggtgttgcttttctatcaggcgggcaatctgatttagatgccactgctcaccttgatgcaatgaacaaaataggaggttttaagtgggctctttgtttttcttatggaagagcccttcagcagcctgctcttaaagtttggcttggcgataacaaaaactcctccttagcacaggcagcactttcacatagagctttgatgaatagattagcttctcaaggaagatgggaacaagacttagaaagttaat

SEQ ID NO: 278356 - DNA, 1060 bp, Unknown
  Bacterial polypeptide expressing nucleotide sequence isolated from the Sargasso Sea
ttgaaaaataactttatctacggaaaagaaaaccaaaaattatttaatctcgctaaagaaaaaaagtttgcattacctgcgattaacgtatcaggaaacaatactataaattctgtcctagaaacctcgtcagagttaaatagcccagtaattattcagttttctaatggtggctctcaatttatagctggtaaaggtatgtcaaatgaaaattttaaagcttctattgctggctcagttgctggtgcatatcatatacacaaagtaattgataattataattctaaggttataattcataccgatcactgttccaggagtatattaccatggatagatggattgcttgattatggtaaagtattttacaaaaaaaatgggtatcccctattttcatctcatatgattgatttatcggaagaatcattagaggataacataggcacatgtaaagaatatcttaagaagctaactgatttagagatgacacttgagatagaactaggtgtaacaggaggagaagaagatggagttgacaatactgatattgactcatctaaactttatactcaaccagaagaagttgcctatgcatattctgagcttagctcaattagcgataattttatgatcgctgctgcatttggtaatgttcatggagtatataaaccaggaaacgtgaaattaactcctaaaattttaaaaaattcacaggagtttgtttcagaaaaattcaatttaccatctaattcacttgattttgtattccacggtggttctggttcttcagtagaagaaataagggaagctatagattatggtgttataaaaatgaatatagatacagaccttcaatttgcatttaccgaaggtattagagattatatgattggagagtctgaatatttaatgaaacaaataggtaatccagatggtgatgatatacctaacaaaaaatattatgaccctaggatatggctaagaaaaggagaagagacttttaaaacaagacttataaaagcctttgaggatttaaataatatcaataccttagattaaa

SEQ ID NO: 278357 - DNA, 1018 bp, Unknown
  Bacterial polypeptide expressing nucleotide sequence isolated from the Sargasso Sea
atggatctaagttcattgaattcgatagctcagtcaatggttgctcccaataaagggatacttgctgcagacgaaagcacaccaaccattggaaaaagatttgcaacaattgatacagagtcaacggaaggcaatcgtcaaacatatagaaatttacttttcaccagtccaaatgtttctgaatacataagcggcgtcattttatttgatgaaaccatcaggcaatcaaccgatgatggaatcccatttccagagcaccttacttcactcggtattgtccctggaattaaagttgataaaggaataaaaggcattccattttgcaaaggagaaactgtcacggaaggattggatgggctagctgaaagattaagtgaatattatgaattaggcgctagatttgccaaatggagagcggttataaatatttctgcagacctaccatcagacaattgcgtcagactcaatgcacatgctttggctagatatgcagcactttgccaacaagcacaaatggttcctattgtagaaccagaagtcctcatggatggaaatcatgatatagatcgatgttttgatgttacttcgaaagtcttgcaggaggtcttcgctgaactcaataaacaaaaagtagctttaaatggaatcgtacttaagccaaacatggttatttcaggcatggatgctgcaaacagagcggatattccaacagtggccagtgcaacagtaaaatgcttgactgagaatgtccctgatgaagttccaggcatcgcattcctatctggcgggcagacctcagaagaggcaaccgcacatcttagctcaatgaatgaaatgggaccgcacccgtggcaattgactttttcttatggcagagctcttcaagccgaaccactcaaagtatggtctggccaggaaggaaacattgaagcagcacaagaaacattcatcaagcgatctaggttaaacagtctcgctagaacaggaaattatcacccacaaatggaagaagcataaa

SEQ ID NO: 278358 - DNA, 596 bp, Unknown
  Bacterial polypeptide expressing nucleotide sequence isolated from the Sargasso Sea
aatggctttaaattattacaaaaatgagcttaaagagaatgctcaattactagcttctaaaggaaaagggatattagcggtagatgaatctactaaaacagtaggtaaacgactcgctggaattggcgttgagaatactgaagacaataggaaggcatatagaggaatgctttttactacagaaggtcttggtaaatatataagtggagcaatcctcttcgaagaaactctttatcagaatcaccaagatggtgagtcaatggttaagaaactaaatgatctaggaattattccaggtataaaggtcgataaaggtctaaatccacttcctggagggggagatgtagaaactttttgctctggcttagatgggttagttgaaagagcagcaaaatattatgaacaaggtgcaagatttgcaaagtggagagcagttctgcaaataacaaatgatggttgtccttcaaaactatcaattcaagaaaatgcttggggattagcgaggtatgcaagatcagttcaagaatctggtttggtaccaattattgaacctgaaattttaatggatggcgaccatactatgaaaagactgcaga

SEQ ID NO: 278359 - DNA, 1051 bp, Unknown
  Bacterial polypeptide expressing nucleotide sequence isolated from the Sargasso Sea
gatggcgttaatttcattaagacagttactagatcatggtgccgaaaaaggatatgccgttccagcgtttaacataaataacatggagcagggcttggcaattttaaatgctgctaagaaatgtgatgcacctgtgattcttcaggccagtcgtggtgctcgctcttatgctggagatataatgctatcacatatggtccaagctcttactaaaatgtatccagatattcctatatgtatgcatcaagatcatggaaatagcgaagctacgtgtctctcagctattaggcatggatttacgtctgtaatgatggatggttcattggagtctgatatgaagacaccagcgacttacgagtacaatgtcgatataaccgcaaaggtaacattttctgctcacgctgttggtgcatcagttgaaggtgagctgggcgttttagggtctttggagactggagaagcagagtctgaggatggttcaggtgctgaaggaaaactaagccaagaccaacttttaactgatccagaccaggctctagattttgtaaaaaagacaaaagtcgatgcattggctattgcatgcgggactagtcatggagcctataaatttagcaggaaaccagatggtgatattttagccatgaaggtaattgaaacaattcatggaaagttgccacagacacatcttgttatgcatggttcgtcttcagtgcctcagagtttacaagacttaattaatgaaaacgggggtgagatgcctcagacatatggggtccctgtggaggagattgaaaggggtataaaatctggggttcggaaagtaaacatagacacagattgcagaatggcaatggcaggacaattcaggaaggtggcaatggaaaagccttcagaatttgacccccgtaaatttttggttcctgcgatgaaagaaatggaagacttatgcttggatcgctttgaaaggtttggtaccgccggaaatgctaagaatcttaagccgatatctttggacgatatggctattcagtattcaaaaggtttaatttaa

SEQ ID NO: 278360 - DNA, 1015 bp, Unknown
  Bacterial polypeptide expressing nucleotide sequence isolated from the Sargasso Sea
aatgataccaaaaactttagaagatattgcaagctatattgtaaaggacggcaaaggaatactagcagctgacgaaagcactggaacaatagaaaaaagatttaagtcaattgacgtggtgtcaactgaagataacagaagaaaatatagagaaatgctttttagatctcccgctatggcagaggctatcggtggggtaattttatttgatgagactctaagacaaaaagcaaaagatggatcatatttaagagatgtaattttaaaccatgggtcacttcctggtattaaggtagaccaaggagtaaaagaactggaagataaatctaatgaaaaaatcacaactggattagatggcctaaatgaacgttgtagagaatatgatgcattgggtgctaaatttactaaatggagagcggtaatcaatattggcgatggcatgccatctacaaaatgtatcaatgaaaatatgctagctttatccaagtacgcccttatagctcaagaaaataatatggtaccaatagttgaacctgaagttattatggatggccagcatacaatagatcaatgctatgacgttactaagaatacattatctgtactttttgaaatgcttgataaaaaaaatataaatattaagggcacccttttaaaacctaacatggtagtttcaggaacagaaaatagtcatcaagcaaattatagggaagttgcagaaaaaactcttgattgcctgaattcctctgtgcctgacgaattaccaggcattgtttttctttctggcggtcaatctgatagagatgcaacggcacacttagatgagatgaataaaattggtggttttaaatggaaactaagcttctcttatggaagagcattgcagcaagcggcattgaaagcttggtcaggtaatgacaataatctagagcatgcacaaaaagcatttggccatcgtgcaatcatgaatatgaaagcttctttaggtgaatggagcgaaacacttgagacttaa

SEQ ID NO: 278361 - DNA, 664 bp, Unknown
  Bacterial polypeptide expressing nucleotide sequence isolated from the Sargasso Sea
gcgggtttggacggactcggaaagcggtgcgcggagtattacgccatgggcgcgcggttcgcgaagtggcgggcggtgttgaagattgacgtcgccaaggggtttccgagcgcgttggcggtgacggagaacgcgaacgcgttggcgagatacgcgacggtttgtcaagagaacggcttggtgccgatcgtggagccggagattctcatggacggcgatcacgacataaacgtgtgcttcgacgtgacgcgtcgcgtgcacgatgcggtgttttcggcgttgcgcgcgcacgggacgcaactcgacgggatgattctcaagccaaacatggtcacggctggctcgtcgcaccccaaggcgcaaggattcgacgatgaagtcgcggatatgaccgttcgcgcgttggccgaagtcgtcccgcccgcggtgccgggcgtcttgttcttatccggcggacaaaccgaggcgcaagcgacggatcggttggcgttgatgaacaagaaggatttccgaaccgcgccgtggacgctctccttctcctacggacgcgcgctccaagcgagctgcctcaaggcgtggggcggtaaggcggaaaacgtcaaggcggcgcaagacgccttcgcggcgcgctgcaaagccaactccgacgcggcgaagcgatgat

SEQ ID NO: 278362 - DNA, 1018 bp, Unknown
  Bacterial polypeptide expressing nucleotide sequence isolated from the Sargasso Sea
atgtcacttaataacattgaagatattgctgcatttattgttgcagatggcaagggtattcttgcagcagatgaaagcaatccgacatgcggcaaaaggtttgattcaattggtgttgaatccactgaagaaaatagaagagattatagagagcttctttttagatctaaaggcatgaaagataatattggtggagtcatattatttgacgaaactatcaggcaatctgctaaagatggaactttgttaagagatctaattaaagatcagggcgcccttcccggcattaaggtagacaaaggcttacaaccacttgaagactgcccaggagaaactgtcacggttgggttagatgggttagacgaaagattaaaagagtactcatctatgggtgctaaatttactaaatggagagctgtaatcaatattggagatgggcttccatcagacaaatgtatagatgcaaatatggaggcattagcagattatgcaaaatgtgctcaagacaacggaatggtccctatagttgaaccagaagtacttatggatggagaacattcgattgatgaatgttatgaagcaacagaaagctcacttaagtctctttttgagcatttagataaaaaaggagttaatatcaaaggaactttgttgaagccgaatatggtgacgtctggtaaggatgcaagtgtgcaggccggcattgatgaagttgcaaagaaaactcttgattgtctaattgcaaatgttccagctgatcttccaggaattacttttttatctggaggccaatcagatgtccttgcaacagctcatttagatgcaatgaataaaattggagggtttaattggaaattgagtttttcatacggaagagcgcttcaagcagctgcattacaagcctggggaggaaagtcagagaatgtgtttatttctcaagacgagctttctcacagggcagaaatgaataaattagcttccctaggtcaatgggaacaagaactagaagatagataaa

SEQ ID NO: 278363 - DNA, 1015 bp, Unknown
  Bacterial polypeptide expressing nucleotide sequence isolated from the Sargasso Sea
atgataccaaaaacattagaggagattgcaaattatattgttcgtgatggtaaagggattctagcggcagatgaaagtacaggaacaattgaaaaaagatttaagtcaattgatgttgaatcgactgaagataatcgtagaaagtatagagaaatgttatttagatctccagcaatggcagaggcgattggcggtgtaatactttttgatgaaactctaagacaaaaagctagcgatggaaactatctaagagaagtcattcttgatcacggctcactaccaggtatcaaagttgaccagggagttaaagaacttgaaagcggtagcaacgagaaaattacaactggtttagatgggcttaacgaacggtgtcaggaatatgatgaacttggagcaaagtttacaaaatggagagctgttattcatgttagtgacgatttgccgtcagacaaatgtataagagaaaatatgaatgcattggctgaatatgctttgattgctcaacaaaacaatatggtaccaattgtagagcctgaggttattatggatggatcccattctgtggaaaggtgtcatgtagttactaatcaagcactattaattttatttgaaatgctggataaaaaaaatgttaatatcaaaggaactcttcttaaaccaaatatggtagtttcaggaacagaaaatagctatcaagccactattcaagaggttgcaaataaaacaattcaatgcctgaaatcatctgttccagatgaattgcctggaatcgtctttctatctggtggtcagtctgatcttgatgcaacagcgcatctcgacgctatgaataaaataggtggcttcaaatggaaactaagtttttcctatggaagagctttacagcaagcagctcttaaaacttggtcaggcaacgatagtaagcttgaagctgctcaaatggcatttggtcacagagctataatgaatatgaaggctgcagaaggacagtgggataaatctctcgaaagataat

SEQ ID NO: 278364 - DNA, 1012 bp, Unknown
  Bacterial polypeptide expressing nucleotide sequence isolated from the Sargasso Sea
tatgtctgaactaaataatattgtaaataaaattcttaaaaatggtaaaggaatcctggctgcagatgaaagcacgggaacaatgaccaaaaggctagatggtgtaggtgtaccctcaaccccggaaaatagattactttttagagaaactcttttttgttcatcagagatgaaaaattgtattggcggagttatattgtacgatgaaacaattaagcagacatcctcaaaaaaaaacaagataccagatttaattgagagtatgggatcttgtgcaggaataaaagtagataccggtgcaaaagttttagctgggtcacctaatgaaaaaattacagaggggttagatggtttaagggatagactaaaagaatactataaacttggagcaaagttcactaaatggagaggtgtttacaatatatcaaaagatttcccgagcaaattatctattcactctaatgcacacgcgttagctagatattccgcattagtacaagaatgtaatatggtgccaattgttgaaccagaggttttaatggatggagaccattccgctaaagattgttttcaaaaaacctccgaggtcattaagaaatgttttgaggagcttattcttcataaagttgatttaaaaggagtaatattaaaaccaaatatgattctagccggaaataaatcaaaggaaaaaatctctaatgaagaggtagcaaaattaaccttggaatgcttaaaaagttctgtgccctcggaagttcctggtatagcttttttatctggtggacagtcagaactggaagcgacagaaaatttaaatttgataaataaattgaataagactggttttataatgagttactcttacggacgagctttacagcaaggtgctcttaaattttggtctaagaacataaaagatattgagggaacccaaaaagtatttaaccacagagcaaaaatgaatactcttgctgctcaaggaaaatggtctaaagaaattgagagtcgataa

SEQ ID NO: 278365 - DNA, 1009 bp, Unknown
  Bacterial polypeptide expressing nucleotide sequence isolated from the Sargasso Sea
aatgacactagaagaaatagcaacctacatagtttcagatggcaaaggtattttggcagctgatgaaagtaatccaacttgtggtaaaagatttgattcaattggtgttgagtccactgaagaaaatagaagagattatagggaaatgctgtttagatctgagggtatgaatggaaatattggtggagtaattttgtttgatgaaacaattagacagtctgcttcagatggaactctattaagagatttaatatcggatcagggtgcacttccaggcataaaagtagataaaggacttcaaccaatagaagattgtccaggcgaaaccgttacagttggattagatggcttagatgacagattaaaagaatatactgaaatgggtgcaaaatttactaaatggagagcagttataaaaattggagatggaattcccacagatgaatgtattgacgcaaatatggatgctctagctcaatatgctaaatctgctcaaaacaacggcatggtaccaattgttgaaccagaagttttgatggatggagatcattctatagatgattgctatgatgctacagaaagatcattaaaatcacttttcaaacatttagaaaaatatgaagtaaatataaaaggaactcttctgaaaccaaatatggtaacgtctggttcagaacacgaagttcaggctggtattgacgaagtagcaaacaaaaccattgaatgtctggtaaaaaatgttcctcaagatttaccaggagtagcatttttatcaggtggacagtctgatgttttagcaacagctcatcttgacgcaatgaataagataggaggattttcatggaaactaagcttttcttatggcagagctcttcaagcagctgcactgaaggcatggggtggcaagccagaaaatgtttttatagctcaagacgaactctcccacagagcagagatgaataagttagcatctctaggtcaatgggaaaaagatcttgaagaaagataa

SEQ ID NO: 278366 - DNA, 1012 bp, Unknown
  Bacterial polypeptide expressing nucleotide sequence isolated from the Sargasso Sea
atgagtaatcttgaagatatagcaaaacaaatggtaatgcctggtaaaggcatattagctgcagatgaaagctctggaacaataaaaaagaggtttgactctattaatgttgagtcaacagaagaaaatagaagaaattatagggaaatgctttttcaaagcaaaaatgcaatggaaaactatatttctggagttatattgtttgatgaaacactaagacaagaaagtaaaaacggacaacctcttgttgaggtcatttcaaattcaggctctttacctgggataaaagtagatacaggcgctaaagatttagcatttaattctaacgaaaaaattactgaaggcttagatggtttaagagaaaggcttatagaatattttaatttaggggctaaatttgcaaaatggagagctgttataacaatagaagattcaattccaagtgatttatgcataaattcaaatgctcacgctttagcaagatatgcagcactttgccaagaaaatggaattgttcctattgttgagcctgaagttttaatggacggcgaacacacaattgaaagatgttatgatgttacaaaaaagactctcgatgtcgttttcaatgaattaattgctcatggtgtcaatttaaaaggaatctgcctcaaaccaaatatgataattgatggatcgctcacttctgaaaaatcatcttcaaaaataattgctgaaaaaacaatttcttgtttcaaggaagtagttcctgaggatgtccctggtattgttttcttatctggaggtcaaactgaaattgaagcaactgaaaacttagatcagatgaataaaataggaaatttaccgtggaacttaagtttttcatatggtagagccttacaggcttccgctttacaggcttggtcaggaaaagtggaaaatgaagaaattgcatctgcgacttttgatcatagggctaaaatgaaattccctagcacattaggtaagtgggagtctgaactagaaaagtagg

SEQ ID NO: 278367 - DNA, 1024 bp, Unknown
  Bacterial polypeptide expressing nucleotide sequence isolated from the Sargasso Sea
atgagcaccgataacccactccaggcgacgatccaggcactcgttcaggatggcaaagggttgctggcggccgacgaaagcgggccgaccatcgcaaagcgtttcaagacgatctccgtcgaatcgaccgaagagaatcgccgcgcatggcgcaccctgttgctgtcgacaccaggcctcggggaattcgtcagcggcgtgatcctgtatgaagagacgctcgggcaatgtgcggacgatggcacgccgttgcccaaactcgccgcccgtcagcagatcgtgcccggcatcaaggtcgatgcgggcaagatcccgctcgcgctcgcgcccggcgacgaaatcacgcaagggctcgatgggcttgcggcgcgcctcgacggctaccggcggcaaggcgcgcggttcgcgaaatggcgtgcggtgtacaacgtgtccgccacgctgcccggccatgcggcgatcgaagccaacgccgaagcgctggcgcgctatgcggcgatctgccaggaggccggagtcgtgccgatcgtcgagccggaagtgctgatggatggcgatcattcgatcgaccgctgcgcgcaagtgaccgacgccgtgctgcacgccgtattcaacgcgctgcaccggcatcgggtcgtgctcgcgcacatgttgctcaagccgagcatggtcgtcgcgggcagcacgcacgctacacaggcggcccccgccgaagtcgcggaggcgacggtacgcctgctgcgcagcgccgtgccggccgaagtacccggcatcttcttcctgtccggcggacagacgcccgaggaagcgacggcgcatctcgatgcgatgaatcgcattgccgggcggccgtggctgctgagcttctcatatggccgcgcgctgcaggagccgccgctggccgcgtggaaggggcaggcggccaacgtacgcgccgcgcaggcggcgctgctgctgcgcgcacgcctgaacggtgcggcctgtcgcggccagtacgacgccgcgatggagcgcaccgcgtgaa

SEQ ID NO: 278368 - DNA, 1009 bp, Unknown
  Bacterial polypeptide expressing nucleotide sequence isolated from the Sargasso Sea
catgacagaactaaataatatagttttaaaaattcttgaaaaaggaaaaggtattttggctgcagatgaaagcactggaacaatgaccaaaagattgcaaggtgttaatgttatttcaactccagaaaatagattgttgtttagagaaactctttttagctcattaagtatgactgaatgcatcggcggtgtaattttatatgatgaaactataaagcaaaaaagttcagaaaaaattatgatcccagaactaatttcaaatatgggctcgtatccaggcataaaagtagatactggagctaaagttttatcaggatcacctgatgaaaaaattactgaaggcttagatgggttaagagaaagattaaaagagtattaccaactaggagcaaaatttacaaaatggagaggtgtgtatagtatatctaaaaattttcctagcaaactttcaatacacgccaatgcacacgcattagcaaggtattctgcattagttcaagaatgcaatatggttccaatagttgaacctgaagtcttaatggatggcgaacattctgcaagagaatgttatcaaaaaacatcggaagtaataaaaaagtgcttcgaagaactaattttacataaagtcgatttgaaaggaatcatattaaaacctaatatgatcctagctggaaataaatctaaggataaaatttctagtgaagaagtagcaaaattaactttagaatgtctaaaaaattccgtaccttctgaagttcctggtattacttttttgtctgggggccaatcagaaacagaagcaacagaaaatttaaatttgataaacaagtataataatactaattttataatgagctattcatacggaagagcccttcaacaaagtgctttaaaattttggtcaaaagacatacaaaatattgagggcactcaaaagatttttaaccaccgagtaaaaatgaatacattggctgctcaaggaaaatggtctaaagatcttgagaattaa

SEQ ID NO: 278369 - DNA, 1060 bp, Unknown
  Bacterial polypeptide expressing nucleotide sequence isolated from the Sargasso Sea
attgattagcatgcgtcaattattggatcacgcggcagaaaatgattatggagtccccgcttttaatgtgaacaacttagagcagatgagggcaattatggagggcgctagggaaaccagtagcccggtcatcgttcaagcatctgcgggcgctaggaaatatgctggtgctaattttttgcgacatctaatcttagctgcgatcgaggaatttccctctataccgattgttatgcaccaggatcatggagcgtcacctgccgtttgccagagatctattcagttaggattttcctcggtcatgatggacggatctttgttggaagatcaaaaaacacccgctgactatgagtacaatgtcgaggtgacgaaggtgaccgtggatatggctcatgcgtgcggagtctcggttgagggagagcttggttgtttgggcagccttgagtctggattagcaggagaggaagatggtgtcggagctgagggggttctatcaatggatcaattgcttactgacccagagcaagctgcggaattcgtgagtgaaactggtgttgatgcgctcgctatagcaataggcacatctcatggagcctataaattttctagaccacccagcggtgatgtgctggcaatagataggatcaaagaaattcattcaaggcttcctaacactcacctggtaatgcatggaagctcttcggtgcctcaggacttactgagtgagataaacgagtttggaggtgacatcccggaaacctatggtgtgcccttagaggagattcaagaagggataaaaaatggtgtccggaaggtgaatatcgacactgaccttaggttagcttcaaccgctgccattagaaagcatctatcaagcaatgcttcggagttcgaccctcgaaagtacctagcagattccactcaagcaatgaaaaagatagttatagagagatatgaagccttcaatacagcgggtaatgccgaaaaaattgtgccgatcccactggaagcaatgggttctcggtatgaaagtggtagcttaaatcaggtcgttaactaa

SEQ ID NO: 278370 - DNA, 671 bp, Unknown
  Bacterial polypeptide expressing nucleotide sequence isolated from the Sargasso Sea
tactgagggtctggatggacttgattcaagaatgaaaaattattatagcttaggcgctaggttcgcaaagtggagagctgtgataaatatctctgaagaaaataatttaccttctgatgcatcactaattgcaaatgcaaatgctttagcaagatatgcaagtatttgccaagaaaataatatagttccaattgttgagcctgaagttttaatggatggagatcatccaattgaacttactttagaaaaaacgtctaaaacgttatcaattgtttttgatcatttaaactttttagatgtatatcttgaaggtattattttaaaaccaagcatggttattgaaggtgttaattgtccaaaaaaaaatgactccaaaatgattgcatcttcaactataaaatgtctttcagaaaatgtacctcaagatgttccaggtatagcatttttgtctggtggacaatctgatgatgatgcaactaataatttgaatgagatgaatattcagtcccaagataataattggaaattaactttttcttatgggagagcccttcaacaagctgccatgacattctggagtggaaaagatgaaaatattgagagtgcaaaaaaaatagttatggaacgagcaaaggttaatagcctcgcagcagcaggaaaattaagttaaa

SEQ ID NO: 278371 - DNA, 730 bp, Unknown
  Bacterial polypeptide expressing nucleotide sequence isolated from the Sargasso Sea
tatgtcactaaataatattgaagatatagcagcctatattgtcgcagatggcaaaggtatcttagctgctgatgaaagcaacccaacttgtggaaaaagatttgattctattggtgttgagtccaccgaagagaatagaagagattacagagaaatgctttttaggtctaaaggaatgaaaggcaatattggtggagtaatattatttgatgagactataagacaatcagctgctgacggaacattacttcgagatttaataactagtcaagatgcccttcctggaataaaggttgataagggtcttcaacctattgatgattgtcctggagaaaccgtgacagttggattggatggattagatgagagattaaaagaatattcatctatgggagctaaattcactaaatggagggctgttataaatataggtgaaggaattccaactgataaatgtattgacgcgaatatgcaggcattagcggattatgcaaaatgtgctcaagataatggaatggttcctatagttgagccagaagtattaatggatggagttcactctattgatgattgctatgacgcatctgctcgttctttaaaatcgctgtttgatcatcttgataataagggggtaaatataaagggcactatcctaaaacctaatatggttacttctggaaaagactcagaaattcaagctagcatggcgaggttgctaagagaacttagc

SEQ ID NO: 278372 - DNA, 1069 bp, Unknown
  Bacterial polypeptide expressing nucleotide sequence isolated from the Sargasso Sea
aatggcgttaatttccctacgacaactactcgatcacgcggcagaacatggatacggtgtgccagcgttcaacgtaaacaaccttgagcaaatgcgcgccatcatgcaggccgcagaagccaccgacagccctgttatcgtgcaagcctctgcgggtgcgcgtaaatatgcgcgtccacaattcttaaaatacctgatgacggctgcacttgagcagtatcccgatatcccagtttgtatccaccaagaccatggtactgaccctgatatttgtcagcgttctatccaattaggtatgtcatcagtaatgatggacggctcattaatggccgacggtaaaaccccagcgtcttacgagtacaacgttgatgtgactcgcagaactgttgcattcgcccacgcgtgtggtgtgtctgtcgagggcgaaatcggttgtttaggcagcttagaaaccggtactgccggtgaagaagacggtgtgggcgctgaaggcgtattaagccacgaccaactgctgaccagcccagaagaagcggcacgcttcgttgctgatacccatgttgacgcgctagcgattgcaattggtaccagccacggcgcatacaagttcagccgtaaaccaacgggtgatgtactgcgtatcgaccgcatcaaagaaatccatgcccgcattcctaacactcacttagtgatgcatggatcttcttctgtgccgcaagaatggcttaagatcatcaaccaatacggtggtcaaattcctgaaacttacggcgtgccattagaagaaatcgttgaaggtatcaaacacggcgtgcgtaaagtgaacatcgataccgacttgcgcttagcgtctactggtgcggtacgtaaatacttggccgaacacccaagcgagttcgacccacgtaagttcctgaaagcctctatggaagcgatggcagacatctgtaccgttcgctacgaggcctttggttgtgcgggtcaagcctctaagattaagcctttgtctttacaagcaatgtacaaagcgtatcaatcaggtgctttagaccctaagatcaacctgtaa

SEQ ID NO: 278373 - DNA, 1069 bp, Unknown
  Bacterial polypeptide expressing nucleotide sequence isolated from the Sargasso Sea
atggcgttaatttccctacgacaactactcgatcacgcggcagagcatggatacggtgtgccagcgttcaacgtaaacaaccttgagcaaatgcgcgccatcatgcaggccgcagaagccacagacagcccagttatcgtgcaagcctctgcgggtgcacgtaaatatgcgcgtccacaatttttaaaatacctgatgacggctgcacttgagcagtatccagatatccccgtctgtatccaccaagaccatggtaccgatcctgacatctgtcagcgttctatccagttaggtatgtcatcagtcatgatggacggctcattaatggccgacggtaaaaccccagcttcttacgagtacaacgttgatgtgactcgcagaaccgtagcattcgcccacgcttgtggtgtgtctgtagagggtgaaatcggttgtttaggcagcttagaaactggtactgctggtgaagaagacggtgtgggcgcagaaggcgtattaagccacgaccaactgctgaccagcccagaagaagcggcacgcttcgttgccgatacccatgttgacgcgctggcgattgcgattggtactagccacggtgcatacaagttcagccgtaaaccaacgggtgatgtactgcgtatcgaccgcatcaaagaaatccatgcccgcattcctaacactcacttagttatgcacggttcttcttcagtgccacaagaatggttacagatcatcaaccaatacggtggtcagattcctgaaacttatggcgtgccattagaagaaatcgtagaaggtatcaaacacggcgtgcgtaaagtgaacatcgacaccgatttacgcttagcgtctaccggtgcggtacgtaaatacttggccgaacacccaagcgagttcgacccacgtaagttcctgaaagcctctatggaagcgatggcagacatctgtactgttcgctacgaagccttcggttgtgcgggtcaagcttctaagattaagccattgtctttacaagcaatgtacaaagcttatcagtcaggtgctttagatcctaagatcaacctgtaag

SEQ ID NO: 278374 - DNA, 1048 bp, Unknown
  Bacterial polypeptide expressing nucleotide sequence isolated from the Sargasso Sea
atggccctcgttccactaagactacttttagatcacgctgctgagaatggttacggtattccagctttcaatgttaataaccttgaacaagttcaagcaatcatggaagcagcatatgaaactgatagtcctgtaatcctccaagcttcaagaggggcaagaaattatgcaggagaaattttcctacgtcatctaatccttgctgctacagaaacatatcctaatattccagtggtaatgcaccaagaccacggtaatgagccatcaacatgttattcagcagcaataaatggtttcacatcagtaatgatggacggttctctagaggcagatgcaaaaacacccgctagttacgaatataatgttgcagttactaaaaaagtagtggattttgctcattcagttggagttagtgttgaaggagagttaggttgcttaggttcattagagacaggaaaaggtgaagcggaagatggtcatggatttgaaggtgaactttctacagatatgcttctgactgatcctgaagaagctgcagattttgtagctaaaacaaaagtcgatgctttagctattgctataggaacaagtcatggtgcttataaatttacaagaaaacccacaggagaagttcttgcaataagcagaattgctgaaattcataaagcacttccaaatacccatcttgtaatgcatggatctagttcagttcctcaagaatggttggatatcattaacaaatatggcggtgaaattcctcaaacatatggtgttcctgttgaagaaattcaagagggaataagaaatggagttaggaaagtcaacattgatactgataacagacttgctttcactgcagcggttagagaggcagcatttgctgataaggcaaacttcgacccaagacatttcaacaagcctgctagaaaatacatgaagcaagtttgtcttgatagatacaagcagttctggtgcgaaggtcaagcaagtaagatcaaacaaacagcactaattattttgctgatctttacgcaaaaggtgatttgga

SEQ ID NO: 278375 - DNA, 1075 bp, Unknown
  Bacterial polypeptide expressing nucleotide sequence isolated from the Sargasso Sea
catggcgctcgttccgctccgcctgctgctcgaccacgccgccgagaacggttacggcatccctgcgttcaacgtgaacaacctggagcaggtccagtcgatcatggaggctgcctatgagaccgacagccccgtcatcctgcaggcctcccgcggcgcccgtgcctacgccggtgagaacttcctgcgtcatctgatcatcgctgcggtcgagacctatcccgacatccccgtggtcatgcaccaggaccacggcaacagccctgccacctgcttcggtgcagctgccaatggcttcacctcggtgatgatggatggctccctggaagccgacgccaagacccccgcgtcctacgagtacaacgttgctgtcaccaaggaagtggtggacgtggcccacgccatcggcgtgagtgtggagggcgagctgggttgccttggttccctcgagactggcaagggtgaagccgaggacggccacggcttcgagggtgccctctcccacgatcagctgctgaccgatcccgctgaggctgctgacttcgtcgccaagaccaaggttgatgccctcgccatcgccatcggcaccagccacggcgcttacaagttcacccgcaagcccaccggtgaggtcctggctatctcccgcatcgccgagattcacaaagctatccccaacacccacctggtgatgcatggttcctcctccgttccccaggaatggctggagatgatcaacaagttcggtggccagatccctgagacctacggcgtccctgtcgaggaaatccaggaaggcatccgcaacggcgtgcgcaaggtgaacatcgacaccgataaccgcctggccttcactgcagctgtgcgagaagcagccgccgctgatcccgccaacttcgatccccgtcacttcaacaagccggcccgcaagtacatgaagcaggtctgccttgatcgctacacccagttctgggctgctggtaatgccagcaagatcaagcagcgcgacatcaactactacgccggcctctacgccaaaggtgaactcgacagcaaggtggctgttgcagcctga

SEQ ID NO: 278376 - DNA, 661 bp, Unknown
  Bacterial polypeptide expressing nucleotide sequence isolated from the Sargasso Sea
tatgagcatagaagaaatagcaaagcaaatggtggctaaaggcaaaggtattcttgcagctgatgaaagcacaggcacgatggaaaagagattaaaaagtgtcaacgtagaatgcaccgaaaaaaatagacttcattttagagagacattgttttcttcgacttcgatgaagagctgtataagcggagtgatactgtttgatgaaactcttagacaaacttcgagtaagagtatttctattccagaattaataaaaaaaagtggatctattcctggtataaaagtcgacaaaggggcaaaacttctatccggttcggataaagaaaaagttaccgaaggcttagacggtttaagagaaagaatggaagaatattataagctaggtgctagatttgcaaaatggcgtgctgtatattcgatttcttccaaacaccctagtgagcagtgcataaaatcaaacgctcatgctttggcaagatatgctgcattggtacaagaagcaaaaatggttccaatagtagagcctgaagttctaatggatggaaatcatacgattgatcaatgctatgatgttactagtagggttttggctgagtgttataaagaactctcaatccacaatgtaaatcttaaaggaactgttcttaaaccaaacatgata

SEQ ID NO: 278377 - DNA, 631 bp, Unknown
  Bacterial polypeptide expressing nucleotide sequence isolated from the Sargasso Sea
tatgagtattgagaatattgcaaaacaaatggttgctaaaggaaaaggtattttagccgctgatgaaagcacaggcacaatggaaaaaagacttaaaagtgtaaatgttgagtgtacagagacaaatagattaaactttagagaaactttattcacatcaagctcaatgagagataacattagcggtgtaattttatttgacgagacattaagacaaaagtcaagttcagggattacaattccagagttaataagtaaaagtggtgttttaccaggtataaaagttgacaaaggtgcaaagccactcgccggttccaaaaatgaaaaaattacagaaggtttagatggtttaaaagctagaatggaagaatatcataaattgggagcaagatttgctaaatggagagcagtgctttctataagtgctgatcaacctagcatgctttcaataaaagcaaacgctcatgccttagctagatatgcttcgatagtccaagaagcagatatggtgcctataatagaacctgaagttttaatggatggtgatcataatatagataagtgttacgaggtaacaagtcgagttcttaatgaatgttataaagaattagaattacataatgttatttga

SEQ ID NO: 278378 - DNA, 1075 bp, Unknown
  Bacterial polypeptide expressing nucleotide sequence isolated from the Sargasso Sea
catggcgctcgttccgcttcggcttctgctcgaccacgctgccgagaacggctacggcatccctgcgttcaacgtgaacaacctggagcaggtgcaggcgatcatggaagcggctgacgagaccgacagccccgtgatcctgcaggcctcccgtggcgcccgcaactacgccggtgagatcttcctgcgtcacctgatcctggccgccaccgagacctatccccacatccccgtggtgatgcaccaggaccacggcaacgagccttccacctgttactccgctgccatcaacggcttcacctccgtgatgatggatggctctctggaggccgacgccaagactcccgccagctacgactacaacgttgccgtcaccaagcaggtggtggacttcgcccactccgtgggcgtgagtgtggaaggcgagctgggctgcctgggttccctggaaaccggcaagggtgaagccgaggacggccacggtttcgagggcgagctgtccaaggacatgctgctgaccgatccagctgaagcagctgatttcgtcgccaagaccaagtgcgacgccctggccatcgccatcggcaccagccatggcgcttacaagttcacccgcaagcccaccggtgaagtgctggccatcagccgcatcgctgagatccacaaagccctgcccaacacccacctggtgatgcacggttcctcctccgttccccaggagtggctggagatgatcaacaagcacggtggtgccatccccgagacctacggcgttcccgtcgaagagattcaggaaggtatccgcaacggtgtgcgcaaggtgaacatcgacaccgacaaccgtctggccttcaccgctgccgtgcgtgaagccgccatggctgatcccgccaacttcgatccccgccacttcaacaagcctgctcgcaagtacatgaagcaggtctgcctcgaccgctaccagcagttctgggccgccggcaacgccagcaagatccagcagcaaagcatcaactactacgccggcctctacgccaagggcgctctcgaccccaaggctgccgtcgctgcctga

SEQ ID NO: 278379 - DNA, 1018 bp, Unknown
  Bacterial polypeptide expressing nucleotide sequence isolated from the Sargasso Sea
atgtcattagaaaatattgaagaaatagcatcatttattgttgcagatggcaaaggtattttagctgcagatgaaagcaatcctacctgtggaaaaagattcgattcaatcggagtcgagtccacagaagaaaatagaagagattatcgagaaatgctttttagatccaaaggtatgaaatcaaatatcggcggcgtgatactttttgatgaaactataagacaaacggcaaaggatggaaccttattaaaagatttgatatctgatcaaggagcacttcctggtattaaagtagataaaggattgcaaccaatagaagattgtccaggtgagactgttactattggattagaaggcctagatgaaagattaaaagaatatgcatcaatgggtgctaaatttactaaatggagagcagtaatcaatataggtgatggcattcctactgataagtgtattgatgcaaatatggatgctcttgcaaattatgcaaagtgcgcacaggacaacggaatggtaccaatagttgagccagaggttttaatggatggagatcatgatattgaagaatgttataaagcaaccgaaagatcattaaagtctttattcatccatcttgagaataaaggtgtaaatataaaaggaaccttattaaaaccaaacatggttacgtctggaaaggataataataatcaagctggaatcgatgaagttgctaaaaagactttagattgtttaattaaaaacgttcctgccgaacttcctggaataacttttctttcaggagggcaatcagatgttttagcgactgctcatctagacgctatgaataaaattggaggcttttcatggaaattaagtttttcttatggacgggctcttcaggctccctcactaaaagcttggggaggaaagccagaaaatattttcatttctcaagatgagctttcacatagagctgaaatgaacaaattggcctcgcttggtcaatgggaagaagaattagaagatagataaa

SEQ ID NO: 278380 - DNA, 1063 bp, Unknown
  Bacterial polypeptide expressing nucleotide sequence isolated from the Sargasso Sea
aatgctaatcactttaagacaacttttagatcatgctgcagagaataattatggtgtccctgcttttaatattaacaatatggagcagggattggccataatgagtgcagcaaaaaaatgcaattcaccagtaataattcaagcaagcaggggtgcaagatcatatgctggtgatcaaatcttacaatctattattaaaggtttagtttctatgtttcctgaaatacctctttgtatgcatcaagaccatggaaattctcaggctacgtgtatgacagcaattcaatatggatttacatcagtaatgatggatggatctttagaggaagatggaaaatcaccggcttcttatgaatataatttaaatataacaaaaaacgtttcaattatggctcatcatggtggagtgtctgttgagggagaattaggagttttaggaagtttagaaactggaatgggagaaaaagaagacgggcatggcgctgagggcaaactttcagaaagtcaattacttacagatcctgaacaagcttttgactttgttaagaatactaaagttgatgctcttgcgattgcaatgggtactagtcatggagcatacaagttttcaagaaaaccagatggtaatattcttgcaatgcatgttattgaagaaatacaccgtcgattacctaacacccatttagtaatgcacggctcttcatcagtaccacaggaattacaagatatttttaatgaatttggcggtgaaatgccacaaacttatggtgttcctcttggagaaattgagagaggtataaaaaatggtgttagaaaagttaatattgatactgattgtagattagctatggctggagaaattagaaaaatttgtcagactaaaaagtctgaatttgatttaagaaaatttttaaaaccagctcaagatgctatggaaaaagtttgtgttgacagatttcaaagatttaatacagcaggaaatgcatcaaaaattactccactttctcttgctgaaatggccattagatataaaaatggtgaacttgatcctattttagcttaa

SEQ ID NO: 278381 - DNA, 769 bp, Unknown
  Bacterial polypeptide expressing nucleotide sequence isolated from the Sargasso Sea
atgggcattgaagaaatagcaaaacaaatggtagcaaagggcaaaggaatattagcggcagatgaaagcactggcacaatggaaaagagattaaaaagtgtcaatgttgaatgtactgaaaaaaataggctaaattttagagaaactttattttcttcaagttcaatgaaaacttctattagtggagttatattatttgatgaaacattaagacaaacttccagtagtggggtttcaattccagaacttataaaaaaaagtggttctattccgggtattaaagtcgataaaggagcaaagcttttagcgggttctgataaggaaaaaattacagaaggtttggatggtttgagaaatagaatggaagagtactatagattgggtgcacgatttgcaaaatggcgtgctgtatactctatttcatctaaacatcccagtgagcaatgcatcaaatcaaatgctcatgccttagcgagatatgcggcaatagttcaagaggcaaaaatggttccaatagtagagcctgaagttttaatggacggtgatcacactattgatgcttgctttgatgttactaataaagttttatctgaatgttataaagaacttcttttacataatataaatctgaaaggtacagttcttaaaccaaacatgattattcccggtgctagttgcaaaaaaaaagccacaacagaagagatagcaaaaaaaactttggaatgtcttaaaaataatatgcctaaagaagtacctggcgtagcttttc

SEQ ID NO: 278382 - DNA, 1018 bp, Unknown
  Bacterial polypeptide expressing nucleotide sequence isolated from the Sargasso Sea
catgtcactaaataatattgaagatatagcagcctatattgtcgcagatggcaaaggtatcttagctgctgatgaaagcaacccaacttgtggaaaaagatttgattctattggtgttgagtccaccgaagagaatagaagagattacagagaaatgctttttaggtctaaaggaatgaaaggcaatattggtggagtaatattatttgatgagactataagacaatcagctgctgacggaactttacttcgagatttaataactagtcaagatgcccttcctggaataaaggttgataagggtcttcaacctattgatgattgtcctggagaaaccgtgacagttggattggatggattagatgagagattaaaagaatattcatctatgggagctaaattcactaaatggagggctgtcataaatataggtgaaggaattccaactgataaatgtattgacttgaatatgcaggcattagcggattatgcaaaatgtgctcaagataatgcaatggttcctatagtagaacctgaagtattaatggatggagttcactctattgatgattgctatgacgcatctgctcgttctttaaaatcgctgtttgatcatcttgataaaaaggggataaatataaagggaactatcctaaaacctaatatggttacttctggaaaagactcagacgttcaagcaagcattggcgaagtcgctaagagaactttagaatgtttaactgagaatgttccgtctgatcttcctggcatagcatttttatctggaggtcagtcagatatcttggctactgctcatttagatgcgatgaacaagattggtggcttttcttggaaattaagtttttcttatgggcgggctcttcaagctgcagcattgcaagcatggggtggaaagccagaaaatgttttcatttctcaagatgaattatctcacagggcagaaatgaataaactcgcttcccttggcaaatgggaagaagaactcgaagacagataa

SEQ ID NO: 278383 - DNA, 1012 bp, Unknown
  Bacterial polypeptide expressing nucleotide sequence isolated from the Sargasso Sea
aatgtcagaactaaataaaattgccctaaaaataatttctcacggtaaaggtatacttgctgcagacgaaagcactggtactatgactaagagacttaaagcggtaaatgtaaattcaacacctgaaaatagactattgtttagggaaattcttttctcatctgaatgcatgaaaaattgtattggaggtgtcattctttacgatgaaacaataaaccaaactacaagttttggaaaatcaatccctgacctaatttcagcctcaggcgcagtgccaggaatcaaagttgatacaggtgctaaagaattagcaaactctcccgaagaaaaaattactgaaggtttagatggcctcagagatagattaaaaaaatattataaacttggagcaagatttacaaaatggaggggggtttactctattagcaataaatatccaaccaggctagcaataaatagtaatgctcatgcacttgcaagatactcagctctagttcaagaaagtggtatggttccaatagtggagcctgaggtattaatggatggagatcattctgcggatgtttgtttaagaaaaacatctgaggttataaaaaaatgttttgaagaactaatcttacataaagttgatctctcaggaattattttaaaaccaaatatgatattatctggaactcaatcaaaagaaaaaataactagtgaagaagtttcacacaaaacacttgagtgtcttaaaaattcagttcctagtgatgtgcctgggattgcctttttatcaggaggtcaatctgagtcagaagctacagaaaatttaaatttaataaataaaaacaataatactaattttattatgacatactcatatggaagagctcttcagcaaagtgctcttaaagtatggtctaaaaatataaaagaaattgaagaaactcaaaaaatttttaatcatagagctaaaatgtgtacattggctgctcagggtgaatgggtgagagaacttgagagtaaataa

SEQ ID NO: 278384 - DNA, 979 bp, Unknown
  Bacterial polypeptide expressing nucleotide sequence isolated from the Sargasso Sea
atggtgcaaaaaggtaaaggtatcttagcagcagatgaaagtacaccaacatgtaaaaagagatttgatagtattaatgtggagagcacggaagaaaatcgtaataaatatcgtaatatgttatttactgcagatggtatagaaaattttatcagtggagttatactttttgatgaaactctacgacaaagcactatggaaggcagtgtgccttttccagatcatttaaccaagttaggtattttacctggaattaaagttgataaaggtgcaaaacagttagcaaatactgaaaatgaaaaaattacagatggattagatggcttaagagaccgattaaaagaatattatgaacttggtgcacgatttgcaaaatggcgtgcagtaattacaattggtgaaaatatgccaactgcttattgcatatctacaaatgcacatgctctagcacgatacgcagctttatgtcaagagcagggcctagttcctattgtagagccagaaatattaatggatggcactcacacaattgatgaaagttatcagcttactacagaaacgctttataacgttttttatgaattagtttcccaaggagtagagctagaggggatagtgttaaagccaaacatggttttatctggatatgattgttctgatcaagcttctgtagaacaagttgccgaaatgacagtggactgttttttaaataccgtacctgctgtagttcctggtattgcctttttatcaggaggccaaagtgatgagttggcaacagcacacttaaatgcaatgaatcagattgatggcacaccatggaatctgaccttttcatatggacgtgctctgcaggctccagctcttaaagcatggtcagggaaagatgagaatatttcaaatgctcaagaatcctttatgaaaagagcaaagttcaatagccttgcaacgaaaggcgagtattctaaggatatggaataat

SEQ ID NO: 278385 - DNA, 1015 bp, Unknown
  Bacterial polypeptide expressing nucleotide sequence isolated from the Sargasso Sea
atgaattttgaaagtttagaagatattgctaatcatatagtttcagatggtaagggaattttagctgctgatgaaagtacgcccacaattaccaagaggtttgacacgattgatacagaatcaaccgaagaaaatagaagagactatcgagaattattattcagagcggaaggcatgaaaaataacattggaggcgtgatactttttgatgaaactttaagacaagaagcgaaagacggaacgatgctttcggatattatttatgctcagggagctcttccaggaataaaagtagataaaggaattaagccgcttgactcttcgccagatgaaaatttaactcaaggcttagatggccttgatgaaagatgtgcagagtatttttcattaggagctaaatttactaagtggagagcagtaataaaacaagacggttcatttccttcagatgattgtcttaaggcaaatatggaggctttggcagagtatgcaaagatagttcaaaacaacaatatggttccaattgttgaacctgaggttctcatggatgggtcccattcaattgaagattgttactcagctacatctagagcactcgaaacgttgtttaattctttgactgatcatgaagttaatatcaaaggaacaattctaaagcccaacatggttaccagcggttcaactgcaagtgagcaagcgaatatttctctagtagcagaaaaaactgtggagtgcttacaaaacagtctttctgatgatttgcctgcagtaacttttttgtcaggtgggcagtctgatattgattcaactgcgcatttagataagatgaataaaatatcatccaatccttggaagttaagcttttcttatggaagagcacttcagcaagctgctcttaaagcttggagcggtaatgttgagaacgagactgctgcgcaagaagcgttttctcacagagccaaaatgaataaattagctgctttaggagaatgggaaagttctttggaaaattaat

SEQ ID NO: 278386 - DNA, 1066 bp, Unknown
  Bacterial polypeptide expressing nucleotide sequence isolated from the Sargasso Sea
atggccataatatctcttagacaacttttagatcatgcagctgagaataactatggtgtgcctgcatttaatgtcaataatttagagcaaatcagagcaattatggaaggggctaatgaagttaatagtcctgtcatagtccaagcatctgctggagcaagaaaatatgcaggtccaaaatttataaaaagtatgatggaagctgctgttgaagagtttcctcaaattccaattgtgatgcatcaagatcatggtggatcacctgcagattgtaaagtatgcatagatcttggttttagttctgtaatgatggacggttctttgcttgaagatcaaaaaacaccttctgattttgcttacaatgtcaaagttactaaggaaacagttaatatagctcatagtttaggtgtttctgtagaaggtgagttaggatgtttaggatctcttgaaacaggcatgggagaaaaagaagatggagttggagccgagggcgtattatcgcatgaccaattattaacagatcctgaagaagcagcagagttcgttaaatctactaatgtagacgctctagcaatcgctataggaacaagtcacggagcatataaattctctagacctccctctggagatattttggcaatagatagaattaaagaaattaataataaattacctaacacacatttagtaatgcatggttcttcttcagtgcctcaagatttaataaaaattattaatgaaaatggtggtaaaattaaagaaacgtatggcgtacctgtgtcagaaatacaagaaggcattaaacatggtgttagaaaaataaatatagatactgacttacgacttgcatcaactgcggcaataagaaaacattttgttaatgatccttcgcaatttgatccaagaaaatatttgattgactcaaaagagtggatgaaaaaaattgttatagctcgtttaacagagtttggttgtgcggaaaatgcaaccaagattaaatcaattcctctttcaactattgcttcccagtataaatctggtgaacttgcaccttctgtaaattaaa

SEQ ID NO: 278387 - DNA, 1081 bp, Unknown
  Bacterial polypeptide expressing nucleotide sequence isolated from the Sargasso Sea
atgtctaagaaaattttcgacttcgtaaaacccggcgtgatcactggtgatgacgttcagaaagtgttcgccatcgcgaaagagaacggcttcgctctgccggccgtcaactgcgtcggtaccgactccgtcaacgccgtactggaagctgccgccaaggtgaaagcaccggttatcgttcagttctccaacggtggtgccgtgttcaccgccggtaagggtctgaaactggaaggacagcaagctgctatcatcggtgccatctccggtgccaagcacgttcacgccgttgccgaagcctacggtgtaccggtcatcctgcacaccgaccacgcctccaagaagctgctgccgtggatcgacggtctgctggacgcgggcgagaagcactttgcagaaaccggcaagccgctgttctcctcccacatgctggatctgtccgaagagtctctggaagagaacatcgacatctgctgcgagtacctgacccgcatggccaagatgaacatgactctggagctggaactgggttgcaccggtggcgaagaagatggcgtcgacaacagccacatggaccagtccgctctgtacacccagccggaagacgtggcctacgcctacgagcgtctgtccaagatcagcccgcgcttcaccatcgctgcctccttcggcaacgtacacggtgtttacaagccgggtaacgtcaagctgactccgtccatcctggacgcttcccagaagtacgtttccgagaagttcggtctgccggccaagtccctggacttcgtattccacggtggttcaggttccactctggaagagatccgcgaatccatctcctacggcgtggtgaagatgaacatcgacaccgacacccagtgggcgacctgggaaggcattctgggcttctacaagaagaacgaagcctacctgcaaggtcagctgggcaacccggaaggcgccgacaagccgaacaagaagttctacgatccgcgtgtatggttgcgtgccggccagactaccatgatcgctcgtctggagaaggctttctccgacctgaacgccatcgacgtactgtaat

SEQ ID NO: 278388 - DNA, 806 bp, Unknown
  Bacterial polypeptide expressing nucleotide sequence isolated from the Sargasso Sea
aatgagcatagaagaaatagcaaaattgatggtggttaagggcaagggaatattggctgccgacgaaagtaccggcacaatggagaaaagacttaaaagtgttaatgtagaatgtactgaaaaaaatagactgcatttcagagaaactttgttttcatctggctcaatgaaaacctgcataagtggtgtaatattattcgatgaaactttaagacaaacttcaagcggtgggattcctgtgccagaattaataaaaaaaaatggttcaataccaggtattaaagttgataaaggggcaaaacttttagcaggatcaaaaaatgaaaaagttacagaaggtctagatggtttaagaagcagaatggaagaatattataagttaggagcaaggttcgctaagtggcgtgcggtctattcaatttcttctgagtatccaagtgaacaatgcattaaatccaatgctcatgctttagcaagatatgctgcaatcgttcaagaagcaaaaatggttccaattgtagaaccagaggtattaatggatggagatcatacaatcgataaatgttatgatgttactagcaaagttttgagtgaatgttacagtgagcttgcgattcataaagttaatcttaagggaactgttcttaaaccaaacatgatacttccaggcgcaagttgtaaacaaaaagctagtacagaagaaatagcaaaaaaaactctagattgtcttaaaaagaatatgcctagcgaggttcctggtgttgcttttctatctggtggacaaagtgaagtgggaagcgacaaaa

SEQ ID NO: 278389 - DNA, 1012 bp, Unknown
  Bacterial polypeptide expressing nucleotide sequence isolated from the Sargasso Sea
atgagtaatctagaagatatagcgaaacaaatggtaatgcctggtaaaggcatattagctgcagatgaaagctctggaacaataaaaaagaggtttgactctattaatgttgagtcaacagaggaaaatagaagaaattatagggaaatgctttttcaaagcaaaaatgcaatggaaaactatatttctggagttatattgtttgatgaaacactaagacaagagagtaagagcggacaacctcttgttgaggtaattgcagattcaggttctttgcctggaataaaagtagatacaggtgctaaagatttagcatttaattccaatgaaaaaattactgaaggtttagatggtttaagagagaggcttatagaatattataatttaggggctaaatttgcaaaatggagagctgtaataacaatagaagattcaattccaagtgaattatgtataaattcaaatgctcacgctttagccagatatgcagcgctttgccaagaaaatgatattgttcctattgttgaacctgaagttttaatggacggcgaacacacaattgaaagatgttatgatattacaaaaaagactctcgaagtcgttttcaatgaattaattgctcatggtgtaaatttaaaaggaatttgcctcaaaccaaatatggtaattgatggaactctcacttctgaaaagtcatcttcaaaaacaattgctgaaaaaacaatttcttgtttcaaggaagtagttcctgaggatgttcctggtattgttttcttatctggaggtcaaactgaaattgaagcaactgaaaacttagatcagatgaataaaataggaaatttaccatggaacttaagtttttcatatggtagagccttacaggcttctgctttacaggcttggttaggaaaagttgaaaatgaagaaattgcatctgcgacttttgatcatagagctaaaatgaattccctagcaacattaggtaagtgggagtctgaactagaaaaatagg

SEQ ID NO: 278390 - DNA, 1018 bp, Unknown
  Bacterial polypeptide expressing nucleotide sequence isolated from the Sargasso Sea
tatgaaaatagaagaaatagcaaaaatgatggtggccaaaggtaaaggaatacttgcagcagacgagagcactggaacaatggaaaagaggttgaagagtgtaaatgtcgaaagtacagaaaaaaataggcttaattttagagaaactttattctcatcgaattcaatgaaaacatctataagcggtgtaatattatttgatgaaactttaagacagaaatccagtagcggtatatctattccagaattaattaaaaaaagtggagcaattcctggcataaaggtcgataaaggtgcaaaaagtttagctggctcggataaagaaaaaattactgaaggtttagatggtttgagagatagaatgaaggagtactatgatttaggagcaagatttgcaaaatggcgagctgtatattctatttcatcatcacatccaagtgatcaatgtataaaatctaatgctcatgctttggcaagatatgctgcaatagttcaggaagcaaaaatggttccgattgtagagcctgaggttttaatggatggcgaacacacaatcgataaatgttttgatgtgactagtatagtacttaacgagtgctacaaggaacttaaaatacacaatataaatttaaaaggaactgttcttaaaccaaacatgattcttcctggtgcaaattgcaaacaaaaggtttctacccaagaaatagcaaaaaagactttggattgtttgaaaaaaaatatgcctaaggaagtccctggtgttgcttttctatcaggggggcaaagcgaggttgaagctacaaagaatttgaatgaaattaataaaataaatgatacaaattttaatttcactttctctttcggaagagctttacaacagtctgctttgaaaacttggtcaaaatcaatgaacgatacaaaaaaagttcaaaaagtttttgatcatcgagcaaatatgaatggtgtctcgacacaagcaaaatgggatgaaaagcttgagcaaaattttgcagcttaa

SEQ ID NO: 278391 - DNA, 959 bp, Unknown
  Bacterial polypeptide expressing nucleotide sequence isolated from the Sargasso Sea
tttagctgcagatgaaagcaatcctacctgtggaaaaagatttgattcaattggggttgaatctactgaagaaaatagaagagattatagagagatgttatttagatctaagggtatgaaaggtaatattggcggcgtaatactttttgatgaaactattcgacaatcctcagtagacggttctttattaagagatctgatatctgaacaaggagcactgcctggcatcaaagttgataaaggacttcagccaatagaagattgtcctggagaaacagttaccgtaggtttagatggtttagatgaaagattaaaagaatatacatcaatgggagctaaatttactaaatggagagctgtaattaatatcggtgatggtattcctactgacaaatgtatagacgccaatatggacgctcttgctgattatgcaaagtgtgcacaagataatggaatggtaccaatagtcgaacctgaagttctaatggatggagatcataatattgatgaatgttatcaagctactgagagatcattaaaatctttatttaaacaccttgaaaaaaagggcgtaaatataaaagggactttattaaaaccaaacatggtgacgtctgggaaggataatagcaaccaagcgtcaattgatgaggtagctgaaaaaaccttagattgtttaattaaaaatgttcctgctgaacttccaggagttactttcctttctgggggccaatcagatattttggcaacagcacaccttgatgctatgaataaaattggtgggttttcatggaaactaagtttttcatatggtcgagctctccaagcaccttcattaaaagcttggggaggtaagtcagaaaatgtctttatttctcaagatgaactttctcatagagctgaaatgaataaacttgcctctcttggtcaatgggaagaagaattagaagacagataaa

SEQ ID NO: 278392 - DNA, 1075 bp, Unknown
  Bacterial polypeptide expressing nucleotide sequence isolated from the Sargasso Sea
atggccctcgttccactaagactacttttagatcacgctgctgagaatggttacggtattccagctttcaatgttaataaccttgagcaagttcaagcaatcatggaagcagcatatgaaactgatagtcctgtaattctccaagcttcaagaggggcaagaaattatgcaggagaaattttcctacgtcatctaatccttgccgctacagaaacatatcctaatattccagtggtaatgcaccaagaccacggtaatgaaccatcaacatgctattcagcagcaataaatggtttcacatcagtaatgatggatggttctctggaggcagatgccaaaacaccagccagttacgaatataatgttgcagttacaaaaaaagtagtagattttgcgcattcagttggagttagtgttgaaggagagttgggttgcttaggttcattagaaacagggaaaggcgaggcagaagatggtcatggatttgaaggtgaactttctacagatatgcttttgactgatcctgaagaagcagcagattttgttgctaaaacaaaagttgatgcattagcaattgctataggtacgagtcatggtgcatataaattcacaaggaagcctacaggagaagttcttgcaataagcagaattgctgaaatccataaagcacttccaaatacacatcttgtaatgcatggatctagttcagtgcctcaggaatggttggatatcatcaacaaatatggtggagaaattcctcaaacatatggtgttcctgttgaagagattcaagagggtataagaaatggagttaggaaagtcaacattgataccgataacagactagctttcactgccgcggttagagaggcagcatttgctgataaagcaaactttgacccaagacatttcaacaagcctgctagaaaatacatgaagcaagtttgtcttgatagatacaaacaattctggtgcgaaggtcaagctagcaagattaaacaaaacagtaccaattactttgctgatctttacgcaaaaggtgaattagatccaaaagtaaaagctactgtttaat

SEQ ID NO: 278393 - DNA, 910 bp, Unknown
  Bacterial polypeptide expressing nucleotide sequence isolated from the Sargasso Sea
atgcaggagaaattttccttacgtcatctaatccttgctgctacagaaacatatcctaatattccagttgtaatgcaccaagaccatggtaatgagccatcaacatgttattcagcagcaataaatggtttcacatcagtaatgatggatggctctcttgaggcagatgcaaagacacccgctagttacgaatataatgttgcagttactaaaaaggttgtagattttgctcattcagttggggttagtgttgaaggagaattaggttgcttaggttcattagaaacagggaaaggagaagctgaagatggtcatggttttgaaggtgaactttctacagatatgcttttgactgatcctgaagaagctgcagattttgttgctaaaacaaaagttgatgcattagctattgctataggtacaagtcatggtgcttataaattcacaagaaaacctacaggagaagttcttgcaataagcagaattgctgaaatccataaagcacttccaaatacacaccttgtaatgcatggatctagttcagttcctcaggaatggttggatatcattaacaaatatggtggtgaaatccctcaaacatacggtgttcctgttgaagagattcaagagggaataagaaatggagttaggaaagtcaacattgatacagataacaggcttgctttcactgccgcagtaagagaggcagcatttgctgacaaggcaaactttgacccaagacatttcaacaaacctgctagaaaatacatgaaacaagtttgtcttgacagatacaagcagttctggtgcgaaggtcaagcaagtaagatcaagcaaaacagcaccaattactttgctgatctttacgctaaaggtaatttagatccaaaagtaaaagctactgtttaat

SEQ ID NO: 278394 - DNA, 1012 bp, Unknown
  Bacterial polypeptide expressing nucleotide sequence isolated from the Sargasso Sea
tatgtcattaaatacattagaagaaatagctaaatatattgtttcagatggaaaaggaattttagcagcagacgagagtaatccaacatgtgggaagcgatttgattctattggtgttgagtcaactgagtctaatagacgtgattatagagagatgctatttagatcaagtgggatgaaagacaatatcggaggggtaattttatttgatgaaacgatgagacagaatgctcaagatggaactcctcttgttgatttaattaagaaccaaggggcattgccaggcataaaagttgataagggccttgcacctttagagtcatcgccagaagaaacattaacacaaggacttgatggtttagatgagagatgcaaagaatatttcagacttggagcaaaatttacaaagtggagagctgttattaagatatctgatgatatcccaacagatgcatgtatccaagctaacatggaggctctggctaagtacgcaaaaattgttcaagataataatatggtgcctatggtggagcctgaagttttgatggatggtaatcactcaattgagaagtgttatgaggtaaccagcaaatcattaaaaatgctttttaagtgcttaaaagatgaaggagtaaatataggaggcacaattctcaagcccaacatggtaacttctggatcaattgctgagtctcaagcatcaatccaaaaggtagcagagatgaccgttcaatgccttaaagaaaatgtcccatctgatcttcctggaataacttttctttcgggtgggcagtctgatgtaaatgctacagctcatttagatgcaatgaataaaattggtggattttcttggaaactgagtttttcttatggaagagctcttcaacaaccctctctaaaagcatggcttggtaaagaagaaaatataactaaagctcaagaggcactctctcacagagccttaatgaataagcttgctgcaaatggagcttggaacttagatttagaataa

SEQ ID NO: 278395 - DNA, 1018 bp, Unknown
  Bacterial polypeptide expressing nucleotide sequence isolated from the Sargasso Sea
tatgacgctagaagaaattgcaaaaaaaatgtgtgccaaaggaaaaggaatattggctgcagatgaaagtactggaacgattgcaaaaagatttaaaagcatcaatgttgaaaatactgaaaaaaacagattggcttttagacaaactctttttagctctaaagcaatgaaaaattatataggtggtgtcattctttttgatgaaactattaaacaaaaaactgctttgggactaacaatacctgagctaatttcaaatagtaatgctatcccaggaataaaagttgataaaggtgctaaaactcttgcaggatcctcagacgaaactgttaccgaaggtctagacggtttaagagaaagattagaagaatactatggactaggagcaagatttacaaaatggagagcggtttataaaattggaagtaaatttccttcctctcaatctataaaatctaatgctcacgctcttgctagatatgctgcattggtgcaagaagctaaaatggtccctattattgaacctgaggtattaatggatgggtcccatgatattgataaatgttatcaagtaactacagacgtgttgaatgaagtgtataatgaacttgaaatacacaaagtaaatttaaaagggacagttttaaaaccaaatatggttattcctggatctgaagcatcaaaaaaatcaactacagaggaaattgcaaaaaaaacattggactgtcttaaaaaaaatgtccctagtgaagttacgggaattgcgttcttgtctggaggtcaatcagaaattgagtcaagtaaaaatctaaatgaaataaacaaaatcaatgatacaaattttttaattaccttttcttacggcagaggattgcaagctagcgcattaaaagaatttggtaaaaatcaaaaaaacctcattaatattcaaaaagcttttgatcatagagcaaaaatgaacggactttcttctaagggagaatggtctgaaaatttagaaaaagaagctgcagcttaa

SEQ ID NO: 278396 - DNA, 982 bp, Unknown
  Bacterial polypeptide expressing nucleotide sequence isolated from the Sargasso Sea
atgtctgaattaaatactatagctttaaaaattattggaagcggaaaaggaattctcgcagctgatgagagcacagcaacaatgagtaaaagacttgaaaacgttcaagtagagtctagtcctgaaaatagattattgtttagagaaactcttttttcatcagaaagcatgaataattgtataggtggtgtaatactttacgatgaaacaataaggcaatctagtaattcaggaaaaaaggttccagagttaatttcaaattcaagttctgtgcctggaataaaagttgatactggagcaaaagttttagctaactcaaaagaagaaaagattactgaaggactggatggtttaagagaaagactaaaagaatattataaacttggggctagatttacaaaatggagaggagtttatataatctcagataaataccctagcaaattatcgatcaaatcaaatgcacatgctcttgctagatattctgctcttgctcaagaatgtggaatggtaccaatagttgagcctgaggtactaatggatggaaatcattcagctgaagtgtgttataataaaacatcagaagtaattaaaaattgttttgaagaacttgaattaaataaagtagatttaaaagcagtaatattaaaacccaatatgatactgcccggatccaattcagataaaaaaatttcaaatgaagaaatagcaaaacttactttgaaatgtttaaaagatagtgttccttcagaagttccaggaattgcatttttgtctggaggtcagaccgatattgaagctacagataatttaaatcaaattaacatccataataatacaaattttataatgacattttcttatggaagagcacttcaacaaagcgctttgaagttttggtctaaagatataaagaatattaaaggcacacagaatatatttaatcatagagctaatatgtgtcgtcttgcagctcaaggta

SEQ ID NO: 278397 - DNA, 764 bp, Unknown
  Bacterial polypeptide expressing nucleotide sequence isolated from the Sargasso Sea
agaagtaattatagctcaaggagctttaccaggaattaaggttgataaaggcttaaaccctttcaatgaatcagataatgagacccttacacaaggactagatgatctagatgaaagatgttctgaatatgaaaaattgggagcaaaatttactaaatggcgagctgttataaatataggcgcagatattcccacacaagaatgcattgatgcaaatatggatgctttagcccaatatgcaaaaattgcacaagaaaataatatggttcctattgttgagcctgaggttttgatggatggagagcattcagcagaagattgtttaaacgcaacttcaagatcattaaaatctctatttgattttcttgataactacaatgttgatattacaggaacattattaaaaccaaatatgataactgctggctctgataatccagatcaaatttcagaagatgaagtagcatcattaactcttgaatgtttaaaaaaacatgtgcctgatgatcttccaggcattgcctttctctctggagggcaatcagatattaaagccactcatcatttagatgcaatgaataaaatgggtggcgggccttggaaattaactttttcttatggaagagctttgcagcaattagctttaaaaacatggctaggtaaagcagaaaatgaggaagctgcacaagccgcattttcacatagagctttgatgaatagattagcagcttcaggtaaatggtcacctgatttagagaagtaat

SEQ ID NO: 278398 - DNA, 1027 bp, Unknown
  Bacterial polypeptide expressing nucleotide sequence isolated from the Sargasso Sea
aatgagtctgaatttagataatatgaatgatgtagcagaggcaatgaccgcttctggtaaaggaatacttgcagcggatgaaagcacaggaacgatcggtaagcgtttagatcaaatcaataccgagagcacagagcagacaagaaacgcgtatcgagacttgctatttacagctgatggccttaatcaatatataagcggtgtgattatgtatgatgaaacgtttcatcaatcttctttagatggaggtgttgtttatcctgaatatttagcttcaaaaggaattattcctggaataaaagttgatgcaggcgctcataacctttctggttcagaagatgaaaagattacccttggccttgatggccttgatgagagattaagcaattatagaaaattaggtgctcgatttgcaaaatggagagcagtgatcaatattacagagctaaaccctagcgattattgtatcaaagcaaatgcgcatgccttggcaagatatgcagccctatgccagtcaaatgatgttgtgccaattgtagagcctgagattttaatggatggcggtcatgatattgaagatagctttgttgtaacggaagaagtcctgcatactgtttttgatgagctttatacgcaaggtgttcagtatgaggagatggttttaaagcccaatatggtcttatcagggtatgacgcaaatgatagagctggagttgatgaggttgcatccgcaactgttcaatgctttttaagaagtgtgcctgctgcggttcctggaattgcattcttatcaggaggccaatccgatgaagacgcaactgcgcatttaaatgccatgaatcagattttgggtgataataaaccttggcatctttcattttcttatggtcgtgctcttcaacaacctgccttaaaagcatggcaagggtcaggcgaaaatatttcaaacgcgcaagcagcgctcatgaaaagagccaagcttaatagcctggcaacgcaaggtaaatactcaaccgatttagaataa

SEQ ID NO: 278399 - DNA, 1015 bp, Unknown
  Bacterial polypeptide expressing nucleotide sequence isolated from the Sargasso Sea
aatgataccaaagactttagaagagatagcaaattacattgtcagtgatggcaaaggaattctggcagccgatgaaagttcaggaaccattgagaaacgattcaaatcaattaatgttgagtctaccgaagataatagaagaaagtatagagaaatgttatttagatctccggtcatggcagaggcaattggcggagtgatactttttgacgaaactctcagacaaaagtccagtgatggagactatttaagaaatgttatacttgatcacggctcactgccgggaattaaagttgatcaaggagtaaaagagtttgaaggtggtagtgatgaaaaaattactacaggattagacggacttcatgaacgctgtcaagagtacgagaagcttggagcgaaatttacaaaatggagagccgttataaatgtaagtgatgaaataccatcaaacaattgtataagcgaaaatatgaatgcattagctgaatatgcgctcattgctcaacaaaacaatatggtaccgattgttgagcctgaggttattatggatgggtcccactctgtggaaaggtgtcatgaggttactaatcaaacactattagtattatttgaaatgcttgataaaaaaaatgtcaatattaaaggaactcttcttaaaccaaatatggttgtatcaggaacagaaaataactaccaagcccccattgaagaagttgcagaaaaaacacttcaatgtctcaaatcatctgttccagatgaattacctggaattgtttttttatctggtggtcagtcagacctagatgcaacagctcatctcgatgcaatgaataaaataggtggcttcaaatggaagctaagtttttcttatggaagggctttacaacaagcggctctcaaaacttgggctggcaaagatgacaatcttgaagcggctcaaaaagcttttagccatagagctgtaatgaatatgaaggctgcacaaggtcagtgggataaatctctcgaaggttaa

SEQ ID NO: 278400 - DNA, 1030 bp, Unknown
  Bacterial polypeptide expressing nucleotide sequence isolated from the Sargasso Sea
atgagtttagaattaaaaaatttacaagatattgcagaggcaatgactgtgaaaggtaaaggtatattagcagccgatgaaagtagcccaacctgtaaaaaaagattcgattctatcaatgtagacagtaatgaaaagaatcgaaatatatatagagatatgttatttactacaaaagggatggaagaatttattagtggtgttatactgtttgatgaaactataagacaatctacaataaaagatggtgttagttttccagattatttattgggacttggcgtaataccgggtataaaagttgacgcaggtgctaagcacttatccggcacagatagtgaaaagattaccgaagggctagatggtttaggtgggcgactcaaggattattacaaaatgggagcacgctttgcaaaatggcgggctgttataacaatcggtgagaatgagccatctggtacttgcattgcggctaatgcacatgctttggcaagatacgcgtctttatgccaggagaatggtattgtaccaattgtagaacctgaaattcttatggatggagatcatacaattgaagagagttttgtcgtttctgaagaagttttgcacacagtattttacgagctgtatggacaaaatgtggaactagaggggatggtactaaagcccaatatggttctatcaggatatgactgtaatcaacaagcaggtgttgaaaaagttgctgaacttacagtgcaaatatttaaaagatgtgttcccgcagcagtacctggtattgcattcttatctggagggcagagcgatgagcatgcaacggcacatctaaatgcaatgaatcaattattaggcgatagctctccttggaatttaaccttctcctacggtcgtgccctccaagcacctgctttaaaagcctgggctgggaaagatgaaaatataagtgatgctcaagcagcgttttacaaaagagctaggttaaacagtctcgcaaccaagggtgactattctgaagatatggaatcataga

SEQ ID NO: 278401 - DNA, 1018 bp, Unknown
  Bacterial polypeptide expressing nucleotide sequence isolated from the Sargasso Sea
atggatctaagttcattgaactcaatagcacaatcaatggttgctcccaacaaggggatacttgctgcggacgaaagcacgccaactattggaaaacgatttgccacaattgatacagaatcaactgaaagcaatagacaaatctatcgcaatttacttttcacgagcccgaatgtttcagagtatataagtggtgttattttatttgatgaaaccatcagacaatcgaccaacgatggaacaccatttgcagagcatcttacttcacttggaatagttccaggtatcaaagtagataaaggcgttaaaggcatccctttttgtgatggagaaaccgttacagagggattggatgggctagatgaaagattggatgagtattatgagcttggtgcaagattcgcaaaatggagagccgttattagcatctcagatgatctgccatcaaaaaattgcatcagactgaatgcgcatgctttggcaagatatgccgcactctgtcagcaagcacagatcgttccaattgtagagcctgaagttctgatggatggaactcatgatatcgatagatgctttgatgttacatcagaagttttgcaagaagtttttgccgaattaaataatcaacaagttgctttaaatgggattgtactcaagccaaacatggttatttcagggatggatgctgccaatagagcagatattcccactgtggcaagtgcaaccgtgaaatgcttatctgaaaatgttcctgatgaagttcctggtatcgcattcttatccggaggtcaaacctcggaagaagcgacagcacatttgagctcgatgaatgaaatgggcccacatccttggcagttaacattctcctatggcagagccctacaggctgaaccactgaaggtatggtctggagtggatggaaatattgaggcagctcaagaggctttcattaaacgctcaaggcttaatagtctggccagaacaggaaattaccatcctcaaatggaagaagcataag

SEQ ID NO: 278402 - DNA, 892 bp, Unknown
  Bacterial polypeptide expressing nucleotide sequence isolated from the Sargasso Sea
cttgaataaaaatgaacagctaaaaagaatacggacaaataaaggctttatagctgcgttagaccaaagcggagggtccacacctaaagctctccaattatatggaatttccgaagatcagtaccaaaatgaagaagaaatgttcaatctaatccatgaaatgcgaacgagaataatcacaagcccctctttcagccagagccacataattggagcaatattattcgaacaaactatggagcggtttatctctggcataccaacagctgattatctctggaaaacaaaaaaaattgttccatttttaaaggttgataagggattaaaagatccaaaagatggtgtccgccttatgaaagacataccagatttgcgtgaaactttaaagaaagcttcagaacatggcattttcggaactaaaatgagatccgttatcgacgaagacaacgcctcaggaatagataaaattgtaaaccagcaatttgcatttgggaaaataattttggatgccggtttaacaccaattattgaaccggaagtaaccataaacatttctcaaaaatcaaaagctgaagaaagtcttaaaaaaaatttaataaaatatttaagtaaactagaacccaaacaaaatgttttactaaaattaaccctaccagaaaaagacaacttttataaagatttagttaatcatccaaatgttttgagagttgttgcattatctggaggttattcacttacagaagcaaacaaacgcttagaagaaaattctggggtggtcgcctccttttcgagagcattaacgcaaagcttatttgttcatcaaaataccgatgaatttaatttggcgttggaacaagctatatttgcaatttcggctgcatcagacacttaa

SEQ ID NO: 278403 - DNA, 1012 bp, Unknown
  Bacterial polypeptide expressing nucleotide sequence isolated from the Sargasso Sea
atgagtaacttagaaaatatagcaaaacaaatggtaacacctggtaaaggtatattagctgctgacgagagctccggaacaataaaaaagagatttgataccattaatgttgagtcaactgaagaaaacagaagagattatagagaaatactttttcaaaccaagaatgcaatggaaaattatatttctggagtaattctatttgatgaaacaattaggcaaaaaagtaaaaacggtccaactcttgttgaagttatctctaacgcaggatctttgcctggcatcaaagtagatacaggagcaaaagatttagcttttaattcaaatgaaaaagtaacagaaggattagatggtctaagggaaagacttattgaatattacaatttaggtgctaagttcgcaaaatggagagctgtaataacaattgaaagctcaattccaagcgatttatgtatcaatgcgaatgcacacgctttagcaagatatgcagctctgtgccaagaaaacgaaatagttccaattgttgaacctgaagttttaatggatggtgcgcatactattgataggtgttatgaagttacaaaaagaactcttgaggttgttttcagtgaattagttgctcatggtgtaaatttaaaaggaatttgccttaaaccaaatatggtaattgatggaacattagtaaccgataaatcatctccaaagactatagctgaaaaaacaatttcatgttttaaggaagttgttcccgaggatgttcctggaattgtatttttatctggaggtcaaagtgagatcgaagctactgaaaatttagatcaaatgaataaaataggtaatttaccatggaacttaagtttttcatatggtagagccctacaagcttctgccttacaagcctggtcgggtaaagtggagaatgaagaaaccgcctcaatggcctttaatcatagagctgaaatgaattcactggcaacattaggtaaatgggatgcgggattagaaaagtagg

SEQ ID NO: 278404 - DNA, 914 bp, Unknown
  Bacterial polypeptide expressing nucleotide sequence isolated from the Sargasso Sea
aatgtctgaattaaatactattgcattaaaaattattggaaacggtaaaggaattcttgcagctgacgaaagtacagcaactatgactaaaagacttgaaagtgttaaagtagagtctaatcctgaaaataggttgttgtttagagaaactcttttaacttctgataatatgcaaaattgtattggcggagttatactttacgacgaaactataaaacaatctagcagctctggaaaaaagattccagaattaatttcagatttaaactccgtgccaggaataaaagttgatataggtgttaaaacattagctaattcaaaagaagaaaagatcactgaaggccttgacggtttaagagaaagactaaaagaatattataaacttggagcaagatttacaaaatggagaggagtttacataatctctgataaatatcctagtagattatctatcaaaacaaatgcccatgctcttgctagatactccgctttagctcaggaatctggtatggtgccaatagtagagcccgaagtattaatggaaggaagtcattctgctgatgattgttataaaaaaacatcagaagtaattaaaaattgctttgatgaacttgaattaaataaagttgatttaaaaggagtgatattaaagcctaacatgatactgcctggatctaactcagataaaaagatttcaaaagaagaaatagcaagacttactgtacaatgtttaaaagacagcgttccctctgaagtccccggaattgcatttttatctggaggccaaactgatattgaggctactgaaaatttaaatcaaattaatatttcaaatagtacaaattttattatgacattttcttatggaagggcacttcagcaaagtgctttgaaaatttggtcaaaagatataa

SEQ ID NO: 278405 - DNA, 1015 bp, Unknown
  Bacterial polypeptide expressing nucleotide sequence isolated from the Sargasso Sea
atgaatttttctggtctaagtgacatagcaagatatatagtttctgatggaaaaggcattcttgccgccgatgaaagtaatccaacctgtacaaaaagatttgattctattggtgttgaatctacagaagaaaatagaagaaattatagagagacattatttactgctgagggcatgagagagaatataggtggaacaatactttttgacgaaactttaagacaaaaggctagaaatggaaaacaattaacagaggttattttacaacagggagctttgccgggaattaaggtcgataagggcttaaagccattcaacaactcagatattgaaacactcactcaagggcttgatgatctagatgagagatgttctgaatatgaaagagtgggtgcaaaatttactaagtggagggctgtcataaatattggcaataatcttccctcacaagaatgcattgatgcgaatatggatgctttagctcaatacgcaaaaattgcacaaaaaaataatatggttcctattgttgagccagaagtcttaatggacggagagcattcagctgaagattgtctagatgcaacttcaaggtctttaaaatcactctttgcctttcttgataattacaatgtaaatattgaagggacattattaaaaccgaatatgataactgctggctctaatcatccaaaacaactttcagaagatcaagtagcagaagtaacacttggatgtttgaaagaacatgtgcccgcaaatattcccggcattgcctttctttcaggtggtcaatctgatataaaagcgacccatcatttagatattatgaataagctaggaggaggcccttggaagctaactttttcttatggaagagcattacagcaagcagccttaaaaacttggttaggaaaagaagaaaatgagaaaaaagctcaagatgcattttctcatagggccttaatgaataaattggctgctttaggcaagtggtcatctgagctagaggaataat

SEQ ID NO: 278406 - DNA, 991 bp, Unknown
  Bacterial polypeptide expressing nucleotide sequence isolated from the Sargasso Sea
atgtcattggaagaaatagctaaaaaaatgtgtgcaaaaggaagaggtatacttgcagctgatgaaagcactggaacaatggaaaaaagattaaaaagtgttggaatagagtctacagaaaaaactagattaaattttagagaaacattgtttcaatcaaaagcgatgaaagaatttataggtggtgtaatcttatttgatgaaaccttaagacaaaaaagtagtaacggtatttctattccagatttaatttctaaaaacaactccattccaggcattaaagtagataaaggtgcaaagttgttggcgggatcaaatgaagaaaagataacagaaggtctagatggactaagagaaagattgatggaatataataaattaggagcaaaatttactaaatggagagctgtttattcaataggtaaaaatcatccatcgacacaatgcataaaatctaatgctcatgctttagctagatatgctgcattagttcaagaagctgacatggttccaatcgtagaaccagaggttctaatggacggtgatcatgacattaatacatgctacaaagtaacaaccaatgttttaaatgaatgctataatgaacttgaattacataaagttgacctaaaaggcactgttctaaaaccaaatatgattttacctggatcagagtgtaaaaaaaaatcaaataaagaagagatagcaaaaatgacacttgaatgtttgaaaaaaaatgtacctagtatggtacccggaatagcatttctatctggcggtcaaactgaaatagaggctagtagaaatttaaatcaaattaacttaattaatgatactaattttttaataactttttcttatggaagggccttgcaacaaagtgctttaaaaacttggtctaaagatactaaaaacgtcagcaaggtacaagaagtcttcaatcacagagctaaaatgaatggcttatcctccaaaggcgctttggagtgaa

SEQ ID NO: 278407 - DNA, 1030 bp, Unknown
  Bacterial polypeptide expressing nucleotide sequence isolated from the Sargasso Sea
atgagtttagagtttgaaagtttgaatgatattgctgaggcaatgactgtgaaaggtaaaggtatattagcagccgatgaaagtagtccgacctgtaagaaaagatttgattctattgatatagacagtacggaaaagaatcgaaatatatacagagatatgttatttactacaaaagggatggaagaatttattagcggtgtaatattgtttgatgaaactatcaggcaatctacaattaaagatggtgttagttttccagaatacttatcgggacttggcgtaattccgggcataaaagttgatgcaggtgctaagcacttatccggcacggatagtgaaaagattaccgaaggactagatggtttagatgggaggcttaaggattattataaaatgggagcacgttttgcaaaatggagggccgtcataacaattggtgataatgagccttctggtacttgcattgcggctaatgcacatgctttggcaagatatgcgtctttatgtcaggagaatggtattgtacctattgtagaacctgaaattcttatggatggagagcatacaattgaagagagttttgtcgtttctgaagaagttttgcactcagtgttttacgagttatatggacaaaatgtagaactagagggtatggttttaaagcccaatatggttctatcaggctatgactgtaatgaacaagcaggcgttgagaaagttgctgaacttacagttcaagtatttaaaagatgtgtccccgcagctgtacctggtatagcgttcttaagtgggggacagagtgatgaggctgcaacggcacatttgaatgcaatgaatcaattactaggtgatagctctccttggaatttaaccttctcctacggtcgtgccctgcaagcacctgctttaaaagcctgggctgggaaagatgaaaatataagcgatgctcaagcagctttttataaaagagctcggcttaacagtctagcaacaaagggcaactattctgaagatatggaatcataga

SEQ ID NO: 278408 - DNA, 814 bp, Unknown
  Bacterial polypeptide expressing nucleotide sequence isolated from the Sargasso Sea
atggatctaagttcattgaactcaatagcacaatcaatggttgctcccaacaaggggatacttgctgcggacgaaagcacgccaactattggaaaacgatttgcctcaattgatacagagtcaactgaaagcaatagacaaatctatcgcaatttacttttcactagcccgaatgtttcagagtatataagtggtgttattttatttgatgaaaccatcagacaatcgactaatgatggaacaccatttgcagagcatctcacgtctcttgggattgttccaggcatcaaagtggataaaggcgttaaaggcatccctttttgtgatggagaaaccgttacagagggattggatgggctagatgaaagattggatgagtattacgagcttggtgcaagattcgcaaaatggagagccgttattagcatctcagatgatctgccatcaaagaattgcatcagactgaatgctcatgcattggcaagatatgccgcactctgtcagcaagcacagatcgttccaattgtagagcctgaagttctgatggatggaactcatgatatcgatagatgctttgatgttacatcagaagttttgcaagaagtttttgccgaattaaataatcaacaagttgctttaaatgggattgtactcaagccaaacatggttatttcagggatggatgctgccaatagagcagatattcccactgtggcaagtgcaaccgtgaaatgcttatctgaaaatgttcctgatgaagttcctggtatcgcattcttatccggtggtcaaacctcggaagaagcgacagcac

SEQ ID NO: 278409 - DNA, 619 bp, Unknown
  Bacterial polypeptide expressing nucleotide sequence isolated from the Sargasso Sea
aatgtcattagaagaaattgcgaattatatagtttcagacggtaaaggaattcttgccgcagatgaaagtaatccaacatgcggcaaaagatttgattctattgaagtagaaaattctgagaataatagaagagattatagagagatgctttttagatcaaaaggtatgaaagaaaatattggcggagtaattttatttgatgaaactctgaggcaggatgccaaagatggcactccccttaaagaattaatcagtaattcgggtgcccttcccggcattaaggttgataaaggcttagtacctctggttgatggatcagatgaagtagtgactcaaggattggatgggctcgatgaaagatgttccgaatatgattctttaggagcaaaatttacaaagtggcgcgcagtaataaaaatcggagatagcatgccatctgatgattgtattaatgcaaacgccaaagcactagcagattatgctgcaattgctcaatctaataacatggtgccaatagttgaacctgaagttttaatggatggcgaccattcaattgatctttcttttgatgcttgcgcaagatcttttcaagctctatttgatgctctagaaaataat

SEQ ID NO: 278410 - DNA, 1018 bp, Unknown
  Bacterial polypeptide expressing nucleotide sequence isolated from the Sargasso Sea
atgtcactaaataatattgaagatatagcagcctatattgtcgcagatggcaaaggtatcttagctgctgatgaaagtaatccaacttgtggaaaaagatttgattctattggtgttgagtccaccgaagagaatagaagagattacagagaaatgctttttaggtctaaaggaatgaaaggcaacattggtggagtaatattatttgatgagactataagacaatcagctgctgacggaacattgcttagagatttaataactagtcaagatgcccttcctggaataaaggttgataagggtcttcaacctattgatgattgtcctggagaaaccgtgacagttggattggatggattagatgagagattaaaagaatattcatctatgggagctaaattcactaaatggagggctgttataaatataggtgaaggaattccaactgataaatgtattgacgcgaatatgcaggcattggcggattatgcaaaatgtgctcaagataatggaatggttcctatagtagaaccagaagtattaatggatggagttcactctattgatgattgctatgacgcatctgatcgttctttaaaatcgctgtttgatcatcttgataaaaagggggtaaatataaagggcactatcctaaaacctaatatggttacttctggaaaagactcagacattcaagctagcattggcgaggtcgctaagagaactttagaatgtttaactgagaatgttccgtctgatcttcctggcatagcatttttatctggaggtcagtcagatatcttggctactgctcatttagatgcgatgaacaagattggtggcttttcttggaaattaagtttttcttatggacgggctcttcaagctgcagcattgcaagcatggggtggaaagccagaaaatgttttcatttctcaagatgaattatctcacagggcagaaatgaataaactcgcttcccttggcaaatgggaagaagaactcgaagacagataag

SEQ ID NO: 278411 - DNA, 1021 bp, Unknown
  Bacterial polypeptide expressing nucleotide sequence isolated from the Sargasso Sea
atgaatctgaatagtttaagtgaaattgcaaatgcaatggtagaaaaaggtagaggcatattagcagcggacgagagtacaccaacctgtaaaaaaagatttgattcaattaatgttgagagtaatgaggcgaataggaacgcttacagagatatgctttttaccacgccaggcatggaaaagtttattagtggagtaatactctttgatgagactttacgccaatccacattagccgataatgaaaaatttccagattatctgacaaaattaggtgttattcctggcattaaagttgataagggtgctcatccacttcctggttgtgaaggggagaaggtcactgaaggattagatggacttaattcaagattggaagaatactacgatcttggtgctagatttgcaaagtggagagccgttatcacgattggggattcagccccaagtggatcttgtttggccgcaaatgcacatggtcttgccagatacgctgcaatgtgtcaagaaaatggaattgttccaatcgtagaacctgaaatccttatggatggtgaacatacaattgaagaaagttttattgtaacagaagaagttcttcatacaacattctatgaattatattcccaaaatgttcttctagagggaatggtcctgaaacccaatatggttctatctggttacgcatgttcagagcaggcaagtgtggatgaggttgctgagatgacagttactgtactaaaacggtgcgtgccatcggcagtcccggggatagcgtttctatcaggtgggcaaagtgatgaagatgcaacggcacacttaaataaaatgaaccagatcctcggcgataatagcccttggaatctgacctactcttatggtagagcgctacaagcaccatcgctaaaggcttgggaaggaaagcaggaaaatgtcaaagatgctcaagacgcattctataaaagagcaaaattaaatagtcttgctaccaaaggagaatattcaccagaaatggagtaac

SEQ ID NO: 278412 - DNA, 919 bp, Unknown
  Bacterial polypeptide expressing nucleotide sequence isolated from the Sargasso Sea
atttgccacaattgatacagaatcaactgaaagcaatagacaaatctatcgcaatttacttttcacgagcccgaatgtttcagagtatataagcggtgttattttatttgatgaaaccatcagacaatcgactaatgatggaacaccatttgcagagcatctcacgtctcttgggattgttccaggcatcaaagtggataaaggcgttaaaggcatccctttttgtgatggagaaaccgttacagagggattggatgggctagatgaaagattggatgagtattacgagcttggtgctcgattcgcaaaatggagagccgttattagcatctcagatgatctgccatcaaaaaattgcatcagactgaatgcgcatgcattggcaagatatgccgcactctgtcagcaagcacagatcgttccaattgtagagcctgaagttctgatggatggaactcatgatatcgatagatgctttgatgttacatcagaagttttgcaagaagtttttgccgaattaaataatcaacaagttgctttaaatgggattgtactcaagccaaacatggttatttcagggatggatgctgccaatagagcagatattcccactgtggcaagtgcaaccgtgaaatgcttatctgaaaatgttcctgatgaagttcctggtatcgcattcttatccggtggtcaaacctcggaagaagcgacagcacatttgagctcgatgaatgaaatgggcccacatccttggcagttaacattctcctatggcagagccctacaggccgaaccgctgaaggtatggtctggagtggatggaaatattgaggcagctcaagaggctttcattaaacgttcaaggcttaatagtctggccagaacaggaaattaccatccgcaaatggaagaagcataa

SEQ ID NO: 278413 - DNA, 187 bp, Unknown
  Bacterial polypeptide expressing nucleotide sequence isolated from the Sargasso Sea
catgcaaaacattactacttcctggttcgtccaggggatgatcaaagccacttctgatgcgtggctgaaaggctgggacgagcgtaacggcggtaatctgacgctgcgtcttgatgaagcagatatcgcgccatttagcgccgatttcgacgaaaaaccacgctatatcgcactgagccagccgatg

SEQ ID NO: 278414 - DNA, 412 bp, Unknown
  Bacterial polypeptide expressing nucleotide sequence isolated from the Sargasso Sea
cactgccacgccaccaacctgattgccctgacctatgtactggagaacaacagcgatctgttcacccgtaaactgtgggaaggcagcaccgaatgtctggtggtcttcccggacggggtcggcattctgccgtggatggtgccgggtaccgatgaaattggccaggccaccgcccaggaaatgcgcaaacattcgctggtgctgtggccgttccacggcgtcttcggtagcggcccgacgctggacgaaaccttcggtctcatcgataccgccgagaagtcagccgaagtgctggtgaaagtctattcgatggggggcatgaaacagaccatcacccgcgaagagctcatcgccctgggcaaacgctttgcggtacaacccatgcagtccgcgttagacctgtatcaataac

SEQ ID NO: 278415 - DNA, 829 bp, Unknown
  Bacterial polypeptide expressing nucleotide sequence isolated from the Sargasso Sea
catgcaaaacattactacttcctggttcgtccaggggatgatcaaagccacttctgatgcgtggctgaaaggctgggacgagcgtaacggcggtaacctgacgctgcgtcttgatgaagcagatatcgcgccatttagcgccgatttccacgaaaaaccacgctatatcgcgctgagtcagccgatgccgctgctggcgaatacgccgtttatcgtcaccggttcggggaaatttttccgcaacgtccagctcgatccagcagccaatttgggcgtggtgaaaatcgacagcgacggtgcgggctaccacatcctctggggcctgaatcacgaggctgtaccgacctctgaactgccggctcacttcctctctcactgcgaacgcattaaagcgacgaacggtaaagaccgcgtgatcatgcactgccatgccaccaacctgatcgctctgacctacgtgctggaaaacaacaccgcgctgattacccgcaagctgtgggaaggcagcaccgagtgcctggtggtgttcccggatggcgttggcattctgccgtggatggtgccaggtacagatgaaattggtcaggcgaccgccgaggaaatgcagaaacactcgctggtactgtggccattccacggcgtgttcggcagtggacccaccctcgatgaagcgttcggtttgatcgataccgcagagaaatccgctgaagttttagtcaaaatctattcgatgggcggtatgaagcagaccattacgcgtgaagagctgatcgcacttggcaaacgcttcggcgtgacgccgctggccagcgccatagagctgtactga

SEQ ID NO: 278416 - DNA, 529 bp, Unknown
  Bacterial polypeptide expressing nucleotide sequence isolated from the Sargasso Sea
atgaaagtgtgcaagctgggggccaaagagatagatattgttatttcgcggaggcatgtcctgactcaaaactggcaggaactttttaatgaagttaaagcatttcgttctgcctgtggagatgcacacctcaaaacaatattagcaactggtgagttaggaagcctaagaaatgtcgcgcgtgcatcaatggtttgtatgatggctggggcagatttcattaaaacctcaacaggaaaagaaagtattaatgccacgcttggtacgtccattgtaatggtgcgtgcaatccgagagtactgggaaaaaacagggtttaaagtaggttacaaaccagcgggtggcatatcaaaagcaaaagatgcactagtttatttaagtctcataaaagaagaattaggcaacgattggatggacgcttctttatttcgctttggggcttcaagccttcttggagacattgaacgacagttagaacactacttaactggaaattattctgctaattatcggcatccattggggtaaa

SEQ ID NO: 278417 - DNA, 748 bp, Unknown
  Bacterial polypeptide expressing nucleotide sequence isolated from the Sargasso Sea
agagttaagcgtctatgcgcaaaagcaaaaaatccaatttctagtaaactcttagaagatcttgatttagacaacataacagttggggctgtatgtgtttaccatgacatgattgaggcagcagtatcaaagcttaaaggcacaaggatccctgttgctgcagtatcaacaggttttcctgccgggctgtcaccactacctcttcgcattgctgagatcgaatacagtgtttcggcgggcgcgagtgaaattgatatagttatatctcgtcgtcacgttctaacgcagaactggaaagctttatacgaagaagttaaagattttagaaaggcctgcggttctgctcatataaaaactatcttagcaactggagatcttggaactttgcgtaatgtagctcgcgcatctgccgtatgtatgatggctggagcagactttataaagacctcaactggcaaagagcctataaacgctacactgccagtatctttggtgatggttagagcaattcgtgaatatcatgagaaaacaggatataaaattgggtataagccagctggaggaatatcaaaagccaaagatgctcttacataccttagcctaattaaagaagaactaggtgatcaatggcttaaccctgaattattccgatttggcgcctcaagccttttaggggatattgaaagacagttagaacatcatataactggcgcatattccgcctcttatcgacatgcaatgggataga

SEQ ID NO: 278418 - DNA, 805 bp, Unknown
  Bacterial polypeptide expressing nucleotide sequence isolated from the Sargasso Sea
catgtcaggaaaatcagatcaaagaaatactggaacacccctcgatcttgactgggtggatgcggttcaggtcaaccgcagtgcggtcgagagacggtgttccagtttgacgaaaagaagaagtatcaagaaagagtggcaggccgcatggttgctcaaagccattcgctgtatggatctgaccacgctatccagcgatgacacccctgaccgggttcgccgtttatgttccaaagcgcttagaccgctgaaacaggaattgaccaacgatcttgggatcacctccctcaatctgactgtgggtgcggtatgtgtttaccatgccttggtcgaaaccgctgccaaagtgctcaagggatccaacattcctgtggctgcggtgtctacgggttttccccatggactcagtccgcttccaaggcggattgaggaaatccgggattcggtttctgcaggtgcactggaaatcgatatcgtgatcacccgagcccatgtattttcaggaaactgggaagccctttaccaggaaatcaaaagttttcgggaagcctgtggggattcccatttgaaaaccattctcggaacaggagagctgggttcgctccggaatgtcgccaaggccagtctggtctgtatgatggccggtgcagatttcatcaaaacctcaaccgggaaggagcctcagaatgcgactctgccaatcagtctggtgatgctgcgtatgatccgggattatcatcagaaaacgggacataaggtcggtttcaagcctgccgggggaatccgcgccgcgaaacaggcgctg

SEQ ID NO: 278419 - DNA, 559 bp, Unknown
  Bacterial polypeptide expressing nucleotide sequence isolated from the Sargasso Sea
atgaaaaacctcgctcattttattgaccatacaaatctaagccctgatgcaaagagtatagatattgaggatctttgcagtgaggcgattaaatatgattttgcatcagtatgtttaaaccctgtttatgttccaattgctaaatcaatcttgaaagattcaaaaccaataatttgttctgtcgtcgggtttcctcttggcgctgattcagcagaaatgaaatatgcagaggcacggtttttaatttttaatggtgtagaagaaatagacatggtattaaatataggtgctctaaaagaaagaaacacaaatatcatccaaaaagaaataaaaaaagtcgttgatgccgcagaaggaaaaattgtaaaagtaataatagaaacatgcttattaaataatcatgaaaaagttttggctagtaaaatagtaagagattgtggtgcgaattttgttaaaacatctaccgggttttctgcatttggcgcaacaattgatgatgtaaaactcataaaaaaaaccataggtgacgaaataggtattaaagcaagtgaggaataaa

SEQ ID NO: 278420 - DNA, 766 bp, Unknown
  Bacterial polypeptide expressing nucleotide sequence isolated from the Sargasso Sea
gattgacctcacaacacttgaaggcaaggatacaacgaacaaagtcatccaactttgcaataaagcgatgaatttgcatgatggtctccaactcccaaaggttgctgcggtatgtgtttatcccaacatggtagcaattgcaaagaaggcactaggagattcaggaatacatgtcgcagctgtggccactgcctttccgagcggcatgtccaatcgaaaagttaagctggaagataccaaaatggctgtggagcagggtgctgatgaaatcgacatggtaatcagcagaggcaagtttctagaaggggactatgcatacgtatttgatgaaatcgcagctatcaaagaaaaatgcaacaaggcaagactcaaggttatattagaaactggagaattggggtcacctgatcaggtcagaagagcgagtgatattgccattaaggccggtgcagattttattaaaacatcaacaggcaaaatatctcccgcagccaccatgccaatcacactgttaatgctggaagcgatacgagaccattacttagcaaccggaaaaatggtaggcatgaaacccgctggaggcatatcggatgccaaactctccttgcattatttggttatggtaaaagaaacattgggagatcaatggatgagcaatgaatggtttagatttggagcaagtagattggcgaacgatttaatcatgcaaattcagaagcaaaaaactggtcattaccaatcagcagattatttttcaaaggattaa

SEQ ID NO: 278421 - DNA, 376 bp, Unknown
  Bacterial polypeptide expressing nucleotide sequence isolated from the Sargasso Sea
gatttagaaacaatgcgcaatgtagcgaaagcttctttagtttgtatgatggctggtgcagattttattaaaacatctactggtaaagaaagtactaatgctaatttaaataacagtttagtgatgctgagaatgataagagaattttatgaagtaactaataaaaaagttggatttaaaccagcaggaggcatatcaacatctaaatcagtaatagagtttctaatacttgtcatggaagaattagggtcagaatggattaatcctaaattattaagaatcggagcttctagtttgttaattgatatagagagacaattatatcactttgcggtagggagatatgctaataaagaaaaattggcaattggttaaa

SEQ ID NO: 278422 - DNA, 493 bp, Unknown
  Bacterial polypeptide expressing nucleotide sequence isolated from the Sargasso Sea
cattgtgattacgagagcacacgtatttacaaaaaactggcaggctctttatgatgaaatcaggtctttccgggaagcttccagttcagctcaccttaagactattttaggcacaggagaacttggcactttccgtaacgtggccaaagccagcctagtttgcatgatggcaggagcagatttcatcaaaacatcaaccggtaaagaacgtgttaacgctactctcccggtaagcctagtgatgctgaggatgatcagagaatatctggaaaaaacaggttattccgtgggtttcaagcccgccggaggaataagtactgccagacagtctttggagtggcttgtaatgatgaaggaagagttgggtcgtgaatggatggaacctaacctgttccgttttggtgccagtggtctgcttactgacattgagcgacagcttgagcatcacacaactggacgctattcggcagcacataggcagccagctacatga

SEQ ID NO: 278423 - DNA, 514 bp, Unknown
  Bacterial polypeptide expressing nucleotide sequence isolated from the Sargasso Sea
aatgaatagaatcgcatccttgattgatcacacaaatcttaaacctgatgcatcggagattgatattaaaaacttatgtcttcaagctataaaatacgaatttttctctgtttgtgttaatcctatatatgttccgaaagctgttgagatattaaaatcagagaagccaaaagtatgcacagttattggatttcctttgggagcagatttcccaaaaactaaatctacagaaactcaaacgttaagatatgtaggtgcccaagaatttgatatggtagtcaatattggagcgatcaaaaatgggaattatgagataaccaaaacagagatatccaatgtagtcaatgcagctaaaggtgcttgcgtaaaagttattattgaaacctgtttgctcgcaaaaaatgaaataataaaggtatgtaatattgtcaaggattcaggagcaacctttgttaaaacatcaacggggtattcccacactggtgctactgctgaaaatgttacaattatgaaa

SEQ ID NO: 278424 - DNA, 406 bp, Unknown
  Bacterial polypeptide expressing nucleotide sequence isolated from the Sargasso Sea
ttcccatttgaaaaccattctcggaacaggagagctgggttcgctccggaatgtcgccaaggccagtctggtctgcatgatggccggcgcagatttcatcaaaacctcaaccgggaaggagcctcagaatgcgaccctcccagtcagtctggtgatgctgcgtatgatccgggattatcaccagaaaactggacataaggtcggtttcaagcctgccggaggaatccgcacagcgaaacaggcgctggaatggcaaatcctgatgaaggaagaacttggaagggaatggctcgagcccgagttgttccgctttggtgccagtggtttactgactgatattgaacggcaactcgaacattttttaaccggccgttactcggcggcataccgtcaaccgatggggtga

SEQ ID NO: 278425 - DNA, 340 bp, Unknown
  Bacterial polypeptide expressing nucleotide sequence isolated from the Sargasso Sea
gatcaaaattggaaatcacatatacaatatctagagcaattaagacaagtagttgggcttagatcctacggacaaagagatcccttaatagaatacaaaagagaagcatttgaattattttctaatttattagataaactcaaatttgattacataacaatcttaatgaatttaaaagttatcgttgaaacaaaagagaaaacaaattcaagaaaagaaataagtaaatctggtaatccaaaatgtcttttatttattaagaaagatcaaaaaatatctcgaaatgaaagatgtgaagcaactggaaaaaaatttaaaaattgttgcggatctttataaa

SEQ ID NO: 278426 - DNA, 853 bp, Unknown
  Bacterial polypeptide expressing nucleotide sequence isolated from the Sargasso Sea
aaatctataaacaaaaaattttatgatttagatattgattgggttaataatattaaagtaaatctaagcgctatagaaagaagaactttatcattaactaaaagaagaactgtcaaaaaagaatttcaagttgcttggttgctaaaatctataacccttattgatctaactaccttaagtggagatgatacttatggcaaggtagatagattgtgtcaaaaagcattgaatccaatatcctcaaatattttaaatgcacttgatttgcataaggcaaatataaaagttggtgctgtttgtgtatatcatcatctagtatctcatgcccacaaaatggttaagggagaattgccaattgctgctgtatctgcgggttttccagcaggtttgtcttcctatcaaacaagaaaaagggaaattaaagaatcaataaaagctggggctcaagaaatagatatagtaataaatagaggttatgttttgcaaaataattggaaaaaattatatgatgaagttagatcatttaaagaaattgcaaaaaacgtaaaattaaaaactatactaggagtaggagaattagaaacactcagaaatgtagctaaagcctctttagtttgtatgatggcaggagcagattttattaaaacttctacaggcaaagaaaagactaatgcaaatttaaataacagcttggtaatgttaagaatgataagggaatttaatgaattttcaggaaaaaaagttggttttaagcctgctggaggtatttctactgcaaaaattgtattagattttatgatactaatttatgaagagcttggtatagattggttaaatcaaaaatttatttaga

SEQ ID NO: 278427 - DNA, 758 bp, Unknown
  Bacterial polypeptide expressing nucleotide sequence isolated from the Sargasso Sea
tactttagaaggaagggatacaccagggaaagtacgtcagatgtgttataaagcaaagcatctacatgattctatgtcgggattgcctacagttgctgcagtttgcgtgtatccgacaatggttaaaatcgcgaaaaaagaactttcgggaacttcaataaatgttgcggcagtagctactgcttttccaagcggactggctcccatgagcgtaaaaatagacgacacaaagtatgctgttcaggagggtgctgatgagattgatatggtaatttcaagggggcgttttttggcaggagaatataattttgtttttgatgagattgctgctgtaaaagaggcttgcggtaaagcccatttaaaagtgattttagagactggagagctaaatacattagacaatgtcaggagggcaagcgatatagccatgtacgctggtgcagactttattaaaacttcaacaggaaaaattgctcctgctgctaccatgccagttacccttgtaatgcttgaagcaataagagatttttattttaaaacaggaataatgattggcatgaaacctgcgggagggatatcaaaagcaaagcttgcattgcattatcttgttatggtaaaagaggtgcttggtgcaaattggcttacatctgagtggtttaggtttggggcaagtagtcttgctaacgatgtcctaatgcaattggtaaaactggacactggaaactatcaatctatgaattatttttcaattgattaat

SEQ ID NO: 278428 - DNA, 853 bp, Unknown
  Bacterial polypeptide expressing nucleotide sequence isolated from the Sargasso Sea
atgtctcgtcattcgagaaataaagggatggcactaaatttggactggattgacagtgttcagatgaaccgtagcgctattgagcgtcgatgttcttctatgtccaaacgtagaagcataaagaaagactggcaggcagcatggctattaaagagcttgagctgcattgacttgactaccctatccagtgatgacactcatgaaagagtaagaaggctttgtgccaaagcccgccagccactgcgccctgaacttgctgaaagtctcggccttaaagggattaaaactcaggtagctgcagtatgtgtctatcactcttttgtgaaaactgcagtcaaggcactgcaaaatagcaaaataccagttgctgctgtttccacaggatttcctcatggtcttaattcactgcctcgccgcatagaagaaatcagtgattctatcaatgatggtgcagaagaaatagatatagtgatcacgcgagctcatgtcttttcaaaaaactggcaggctctatatgatgaaataagtgcttttcgggaagcctccggaacagcgcacctaaagacgattttgggaacaggtgaacttggcacatttcgcaatgtagcaaaagccagcctggtgtgcatgatggcaggtgctgacttcatcaaaacttccacaggtaaagaaggaattaacgccacactcccggtaagcctagtgatgctaaggatgatccgtgaatatctggagaatactgggtattcagtgggtttcaagcctgcagggggtatccgtactgccagccaatctctggaatggctgataatgatcaaggaggagttaggccgcgaatggaggaaccgaaaat

SEQ ID NO: 278429 - DNA, 949 bp, Unknown
  Bacterial polypeptide expressing nucleotide sequence isolated from the Sargasso Sea
atgtcaggaaaatcagatcaaaggaatcctggaatacccctcgacattgactgggtggatgcggttcaggtcaatcgcagcgcggtcgagagaaggtgttcgagtttgacgaaaagaagaagtatcaagaaagcgtggcaggccgcatggttgctcaaagccattcgctgtatggatctgaccacactttccagtgatgacacccctgaccgggttcgacgtttgtgttccaaagcgctcaaaccgctgaaacaggaattgtccaacgatcttgggatcacctctctcaatctgactgtgggtgcggtatgtgtttaccatgccttggtcgaaactgctgccaaagcactcaagggatccaacattcccgtggctgcggtatctacgggttttccccatggactcagtccgcttccaaggcggattgaggaaatccgggattcagtttctgcaggtgcactggaaatcgatatcgtgatcacccgagcccatgtattttcaggaaactgggaagcgctttaccaggaaatcaaaagttttcgggaagcctgtgggggttcccatttgaaaaccattctaggaacaggagagcttggttcgctccggaatgtcgccaaggccagtctggtctgtatgatggctggtgcagatttcatcaaaacctcaaccgggaaggagcctcagaatgcgaccctaccagtcagtctggtgatgctgcgtatgatccgggattattaccagaaaaccgggcataaggtgggtttcaagcctgccggagggatccgcaccgcgaaacaggcgctggaatggcaaattctgatgaatgaagaacttggaagggaatggctcgaacccgagttgttccgctttggtgccagtggtttactgaccgatattgaacggcaactcgaacattttgtgaccggccgttactcggcggcataccgtc

SEQ ID NO: 278430 - DNA, 484 bp, Unknown
  Bacterial polypeptide expressing nucleotide sequence isolated from the Sargasso Sea
tacgagagcacacgtattttcaaaaaactggcaggctctttatgatgaaataagtgctttcagggaagcttctggaaaagctcacctgaagacaattttgggcacaggtgaacttggcacgtttcgaaatgtggccaaagccagcctagtgtgcatgatggcaggagctgacttcatcaaaacttccaccggaaaagaaggagttaacgctactctccctgtaagcctagtaatgctgaggatgatccgtgaatatctagaaaatactggatattcagtgggtttcaaacctgcagggggtatcaaaaccgcaaaacagtctctggaatggctaataatgttgaaggaggaactaggtcgcgaatggatggaaccggaaatgtttcgttttggagccagtggcctacttactgacattgaaaggcagcttgagcatcacgtaacaggacgttattctgctgcacacagacagcccactgcctga

SEQ ID NO: 278431 - DNA, 961 bp, Unknown
  Bacterial polypeptide expressing nucleotide sequence isolated from the Sargasso Sea
ctgcttccaaaggccatcattcctcgcaacacagggatcgatttagatttagactgggtttcgtctattcaagccaacacatcagcaattgaaagacgtgccaccactatagcttcaaggagatctattaaaaagcaacaccaagctgcctggttgatacaagcagtaaggtgtatggaccttacaactttaagtggtgatgacacaattggaagagttaagcgtttgtgcgcaaaagctaaaaagcctatttctacgacgcttacagacaaacttggcttaaacaacgtaaaagtcggagctgtttgcgtttatcacgatatgatagaaacagcagtatcaaagctcacaggttccggaattccggttgcggcagtttcaacaggttttcctgctgggctatcaccgctacctctccgcatagcagaaatagaatatagcgtttcagctggcgcaagtgaaatagatatcgtgatatcgcgtcgccatgttctgacacaaaactggaaagctttatacgaagaagttaaagattttagaaaggcctgcggttctgctcatataaaaactatcttagctactggggatcttggaaccttgcgtaatgtagctcgcgcatctgccgtatgtatgatggctggagctgactttataaaaacctcaacgggcaaagagcctgtaaacgctacattgccagtatcgttagttatgatgagagcaattcgtgaatatcatgaaaaaacaggttttaaaattggatacaagccagcaggtgggatctctaaagctaaagatgctctgacatacctgagcctagttaaagaagaattaggtgatcaatggcttagccctgatttgttccgatttggggcatcaagccttttgggtgatatcgaaagacagttggaacattacacaacgggcgtatattccgcctcttatcggcatgctatggggtaaa

SEQ ID NO: 278432 - DNA, 982 bp, Unknown
  Bacterial polypeptide expressing nucleotide sequence isolated from the Sargasso Sea
aatggaccaaattttaaaccaccattcattaaatgaacttagaaatcaagggttaccgtacgatgaaaagcttttccttgatataagtgttaatatgagtgctatagaaaggcgttgcgctacagcagtaaagagaagggcagtaaaaaaggaaagccaggtagcgtggcttttgaaggctatttcctgtattgacctaacaactttatctggagacgatacacctggaagagttaggcgcctgtgcgcaaaagcgaaatcaccaataaagcgagacctcgttgattcactggatgtagaggaattaaatttaaatgtaggtgccgtttgtgtttatcatgatatgattacacacgcaaaagccgctttagcaggatctgaaataccgatagctgctgtttcaacaggctttccagccggattaactccgtttaagcttaaagtattagaaatacatgaatctgtagctgcaggagcagacgagatagatgttgttatatccagaaagcacgtcctaaatggtgattggaaaaagctttacgacgaagtgaaggaatataaagctgcatgtgggtcaagccatttaaaaactattcttgccactggtgagcttggaacattaagaaatgtagcaaaagcttcatgggtttgtatgatggctggagcagattttattaaaacctctactggaaaagagagcattaatgccactttgcctgtcacgctagttatgcttcgcgctataagagatttttatgaacttactggccagagaattggatataagccagcaggaggtatctcaaaagctaaagatagtataaactatctaattttagttaaagaagaacttgggagaaattggctgacccctaatttatttagatttggggcgtcttctcttttagcagacattgagaggcaattagaattttatgctactggaaattattccgcctttaaccgacacggaattgcatga

SEQ ID NO: 278433 - DNA, 721 bp, Unknown
  Bacterial polypeptide expressing nucleotide sequence isolated from the Sargasso Sea
atggaagcgagggggatcctcgaactgatcgacctgaccctgttggacaggagcgcgtccgaggaggatatagcgagtctctgcagagtcgcgaacgagcagggcacggctgccgtctgcgtcttccccgaacacgcacaattagtcaggaggcatctgcaagagggggtctcgctggcagttgtggcggggggttttcccgaggggaccgaatctccggaggacatctccttggccatagcggaggccgtctcatcgggtgctgacgagattgactgcgtgctggagcccagagactcgggggacttccccgggcaggaggagctggccaagctgatagcgatgcgcgaagcctcctccggacttgtcctcaaggtgattgtcgagaccccgatgctgggagggaggcagatcagggcagtcgcgaggatggcactctcgacgggggcggacttcgtcaagacatgcacgggaaagcgcggcccctgctcggaagagcatgccgagatacttgcggacgaggtgagcaggcactgcctctcgttcgagggtgcccctggcatcaaactgtcaggcggcatctcgagaagggaggatgcggagaggctggtagggctggtaatgtcgagggacgagtcgatttctggggcagggaggctccgaataggagcatcgtcgctggtggatgacatcgtcagtggtgggctcggcaggaattgaa

SEQ ID NO: 278434 - DNA, 805 bp, Unknown
  Bacterial polypeptide expressing nucleotide sequence isolated from the Sargasso Sea
catgattccagctactgcttttgcacctgcctgtgctgccaccgaggccgccagccgggccatccgcctgatggacctcaccagcctcaatgacgatgaccacgacgcgcgcatcatcgccctctgccatcaggcgcagacccccgtcggcaacaccgccgccgtctgcatctattcgcgcttcgtggggctggccaggctcaccctggcagcccagggcacccccgagatcaaggtcgccaccgtggtcaacttcccccatggagacgatgagttggatgtcgtgctggccgagacccgtgcagcccttctcgatggcgccgacgagatcgatctggtgatcccctggcgtgcgctcaaggtgggggacgaggcgcccgctcgggtgctggtgcgcggctgcaaggcattgtgcgggccgcggttgctcaaggtgatcatcgaatccggcgagctgcaggagcccgcgcttatccgcgccgcctccctgcttgccatcgaggagggggccgatttcatcaagacctccaccggcaaggtgccggtcaatgccacccccgaggcgtgccgcaccatgctggcggccatcgccgagtgcggcgcgcagcaccgggtgggattcaaggcggcaggcggggtgaaaagcgcgcaggaggcggcggagtatctggccatggcggccgcactctttggcgatgagtggctggttgccgagcgctttcgcttcggcgcctccagcctgctcggtcagttgctggccactatcgagggcaagaagccggttgctgccgacggcagttattga

SEQ ID NO: 278435 - DNA, 199 bp, Unknown
  Bacterial polypeptide expressing nucleotide sequence isolated from the Sargasso Sea
agcttttataaaaacatcaactggattttcatttaatggtgctacaattgaggatgttaggcttattagaaaaactgttggaaatgaggttggtgtaaaagcaagcggaggtcttaatacactaaaaaaggttcaatctatgattgatgctggagcaaatagaatcggaacaagtagtggagcttcattaatgatatga

SEQ ID NO: 278436 - DNA, 229 bp, Unknown
  Bacterial polypeptide expressing nucleotide sequence isolated from the Sargasso Sea
agctagcagcttagttaaagaatgtggagctaattttataaagacctcaaccggattttcctctgctggggcgacaatcaaagatgtaaggcttattaaaaaagtagttggcgatagagtcggtgttaaagcgagcgggggaattaagacaaaaaaagaagccctattatttattaaagccggtgccgaccgtattgggacgagtagagggatcgagatagtttcatga

SEQ ID NO: 278437 - DNA, 646 bp, Unknown
  Bacterial polypeptide expressing nucleotide sequence isolated from the Sargasso Sea
gatgcaatcagtttcaaactatatagatcacacaaatctcaatcaaactgccaataattttgatatagaaaaattatgtaatgaagcgatagataataattttgctgctgtttgtgttaacccggtgtatgttccactagcatcagatatgctcaatggtcaagactctaaggtttgtacggttgttggatttccaatgggtgcagattcaacagaaatgaaatttgcagagtctaggtatttaactcatcaaggtgcagaagagttagatatggtaattaacatagcagctattaaagaaaaaaatatttcccttgttaaaaatgagattgtaaaaatagtagatgcggcagatgggaactatgtaaaagttattatagaaacatgtttactaacagatgatgaaaaaaagttagcatcagagattgccatggatgcaggggctcattttatcaaaacatctacgggtttttcattatctggcgctacagaaaaagatgttaagctaattcgaaaaattattggttctgatatgaaaatcaaagcaagcggcggaatcaaaacattgtcagatttaaaaaaattagtaaaagctggggcagatcgtattggaacaagtaatgcaatctcaatgataaatgagtga

SEQ ID NO: 278438 - DNA, 646 bp, Unknown
  Bacterial polypeptide expressing nucleotide sequence isolated from the Sargasso Sea
atgcaatcagtttcaaactatatagatcacacaaacctcaatcaaactgccaataattttgatatagaaaaattatgtaatgaagcgatagataataattttgctgctgtttgtgttaacccggtatatgttccactagcatcagatatgctcaatggtcaagactctaaggtttgtacggttgttggatttccaatgggtgcagattcaacagaaatgaaatttgcagagtctaggtatttaactcatcaaggtgcagaagagttagatatggtaattaacatagcagctattaaagaaaaaaatatttcccttgttaaaaatgagattgtaaaaatagtagatgcggcagatgggaactatgtaaaagttattatagaaacatgtttactaacagacgatgaaaaaaagttagcatcagagattgccatggatgcaggggctcattttatcaaaacatctacgggtttttcattatctggcgctacagaaaaagatgttaagctaattcgaaaaattattggttctgatatgaaaatcaaagcaagcggcggaatcaaaacattgtcagatttaaaaaaattagtaaaagctggggcagatcgtattggaacaagtaatgcaatctcaatgataaatgagtgaa

SEQ ID NO: 278439 - DNA, 646 bp, Unknown
  Bacterial polypeptide expressing nucleotide sequence isolated from the Sargasso Sea
gatgcaatcaatttcaaactatatcgatcacacaaacctcaatcaaattgccaaagattttgatataggaaaattatgtaaagaagcaatagataataatttcgctgctgtttgtattaacccggtatatgttccgctagcatcagatattctcaatggtgaagctcctagggtttgtacggttgttggatttccaattggggcagattcaacagaaatgaaatttgcggagtctaggtatttaactcatcaaggtgcagaagagttagatatggtaattaatatagcggctattaaagaaaaaaatatttcgcttgttaaaaatgagattgtaaaaatagtagatgcagcagatgggaactgtgtaaaagtcattatagaaacatgtttactaacagacgatgagataaagtcagcatcagagattgccatggatgcaggggctcattttatcaaaacatctacggggttttcattatctggtgccacagaaaaagatgttacgctaattcggaaaattgttggttctgatatggggataaaagcaagtggtggaatcaaaactttatcagatttaaaaaaattagtaaaagctggggcagatcgcattggaacaagtaatgcaatctcaatcataaatgagtga

SEQ ID NO: 278440 - DNA, 646 bp, Unknown
  Bacterial polypeptide expressing nucleotide sequence isolated from the Sargasso Sea
atgagggatatagcaaaatacattgaccatactaatttgcgacccgatttaacaaagaaagatattcaaaagatttgcaaggaagcaagtcaatataattttgcatcggtttgtattaatccaattcatgttttttcagcagcaaaatatttaaaagattctttttcaaaagtaggtacggttatcgcgtttccattaggtgcaatttcaactgaaataaaatatgcggaagccatggatgcgattgatcagggagcagaagaattagatatgatgataaatattggatacttaaaggagggaaagaacgatcaactagcagatgaaatcacaaaaatagttaaagaatcagaggacatatgcttaaaagtaattattgaagccagtttgctgaatacagaaggaaaaattcgtatttcgaaaattgtaaaggaatcaggagctgattatataaaaacctctacaggtttttcagcaaaaggagccgatgctaaggatgttaaaatcattagaaaaacagttggtgatagtataggaattaaagcaagtggaggcataaagtctttatcagatttaaataaaatgctaaatgctggcgcaaacagaataggcaccagttcaggaataagtatattaaatgaatgaa

SEQ ID NO: 278441 - DNA, 643 bp, Unknown
  Bacterial polypeptide expressing nucleotide sequence isolated from the Sargasso Sea
aatgaatgaatttgctcatctcattgaccacacaaacctaaagcctaatgcaaccaggtctgagatcatacagctttgcgaagaatcaatagagtatgggttctcagctgcttgcgtaaatcctgccaacgttcctttagcgaggtcagtgttaaatgaaaataaacctaagttgtgtacagtaattggatttccacttggatctatttcggtagaaatgaagtttgcggaagctcgattcttaattcatcaaggtgcagaagaattagatatggtattaaatattggtgcattgaaggaaggtgaaacaaatatcgttgagcgtgagatacaacaggtcgtcaatgctgctgatgggaattgtgtaaaagtgattattgaaacatgtctgttaaatgataaggagaagatatcggcctgtattttagctaaggagaatggtgcggattttgtaaaaacatccacaggtttttcatctggaggtgcaaatgttgatgatatcaaactaatgcggagaacagttggcgatgacatgggagtaaaggcaagtggagggataaagacattagagcatgcacgtgctatggtcaatgcaggagcagataggattggaacaagcagtggtgttgagatagtttcatga

SEQ ID NO: 278442 - DNA, 646 bp, Unknown
  Bacterial polypeptide expressing nucleotide sequence isolated from the Sargasso Sea
atgcaatcagtttcaaactatatcgatcacacaaacctcaatcaaactgccaataattttaatatagaaaaattatgtaatgaagcgatagataataattttgctgctgtttgtattaacccggtatatgttccactagcatcagatatactcaatggtcaagaccctaaggtttgtacggttgttggatttccgatgggggcagattcaacagaaatgaaatttgcagagtctaggtatttaactcatcaaggtgcagaagagttagacatggtaattaatatagcggctattaaagaaaaaaatattccctttgttaaaaatgagattgtaaaaatagtagatgctgctgatgggaactgtgtaaaagtgattattgaagcatgtttactaacagacgatgaaaaaaagttagcatctgagattgccatggatgctggggctcattttatcaaaacatctacgggtttctcattatctggcgctacagagaaagatgttaagctaattcgagaaattattggttctgatatgaaaatcaaagcaagcggcggaatcaaaactttatcaggtttaaaaaaattagtaaaagctggggcagatcgtattggaacaagtaatgcaatctcaatcataaatgagtgaa

SEQ ID NO: 278443 - DNA, 646 bp, Unknown
  Bacterial polypeptide expressing nucleotide sequence isolated from the Sargasso Sea
atgcaatcagtttcaaactatatagatcacacaaacctcaatcaaactgccaataattttgatatagaaaaattatgtaatgaagcgatagataataattttgctgctgtttgtgttaacccggtgtatgtcccactagcatcagatatgctcaatggtcaagactctaaggtttgtacggttgttggatttccaatgggtgcagattcaacagaaatgaaatttgcagagtctaggtatctaactcatcaaggtgcagaagagttagatatggtaattaacatagcggctattaaagaaaaaaatatttcccttgttaaaaatgagattgtaaaaatagtagatgcggcagatgggaactatgttaaagtgattatagaaacatgtttactaacagacgatgaaaaaaagttagcatcagagattgcaatggatgcaggggctcattttatcaaaacatctacgggtttttcattatctggcgctacagaaaaagatgttaagctaattcgaaaaattattggttctgatatgaaaatcaaagcaagtggcggaatcaaaactttgtcagatttaaaaaaattagtaaaagctggggcagatcgtattggaacaagtaatgcaatctcaatgataaatgagtgaa

SEQ ID NO: 278444 - DNA, 532 bp, Unknown
  Bacterial polypeptide expressing nucleotide sequence isolated from the Sargasso Sea
tgtgtaaatcctactaatcttcctttggctgcctcagtattaaatggaaataagcctaaaccctgcactgtaataggatttccacttggctcaatttcaatagaaatgaagtttgccgaggctcgatttcttacccatcaaggtgcagaagaattagatatggtcctaaatatcggcgccttaaaagaaggcgaaataaatataattgaaaatgagattagacaggttgtaaatgccgcagacggtaactgtgtaaaagtgatccttgaaacatgtcttttaactgataaagaaaaagttttagcctgtaacttggctaaggataatggtgcagattttgttaaaacatccacagggttttcattgtcaggagcgacaacagaagacatagccattatgagaaaggtagttggcgaagacatggggatcaaggctagtggtgggattaaaacattagaagatgcaaggtcaatgatcaatgccggggcgaatcgaattggaacaagtaatggtgttaacatagtctcatgaa

SEQ ID NO: 278445 - DNA, 577 bp, Unknown
  Bacterial polypeptide expressing nucleotide sequence isolated from the Sargasso Sea
tactaccctatgtaaagaagcaattcaacacggttttttttcagtatgtgtaaatcctttttacgtgccgctagctgcaattaatctaaaagaacataaacctaaagtaggaactgtgattggattccctctaggtgcagattcaggagaaatgaaatatgctgaaacaaggtttatgatacatcagggggcagaagaaattgatatggtattaaatattggtgctttgaaagagcgtagctttgaagttataaggaaggaaataaataaagttgttgaagcgtctgacggtaattgtgttaaagtaatcattgaaacttgttttttaaataatgaagaaataaaaatagcctgcaacattgcaaaagatgctggagcaacatttgtaaaaacttctaccggtttttcgagtggaggtgctactatcgaagatgttaagctcatgcgaaaaacagttggagctgatatgggtgtcaaagcaagtggtggtataagattattagaacatattgaattattgattgatgctggagcaaatcgcattggaacaagtaatgcagttgagattttaaaatga

SEQ ID NO: 278446 - DNA, 772 bp, Unknown
  Bacterial polypeptide expressing nucleotide sequence isolated from the Sargasso Sea
atgactgatttaaaaaaagcagcacaacgcgccatcgaacttatggatttaaccaccttaaacgatgacgataccgatcagaaggtgatcgacctgtgtcacaaagccgtgacgccagcgggtaatactgctgccatctgtatctatcctcgcttcattcctatcgcacgtaagaccctcgatgagctgggcgctgaagacattcaaatcgcgacagtaactaacttcccacacggtaacgatgatattgcgattgcggtattagaaacccgtgccgcggttgcctatggcgccgatgaagtcgacgtggtatttccttaccgcgcgctgatggaaggtaacgaaagtgtcggttacgagttagtcaaagcctgtaaagaagcctgtggcgatgtattactgaaagtgatcatcgaatcgggtgtattagccgatcctgcgcttatccgccgcgcctctgaactgtctatcgatgcgggtgctgatttcatcaagacttctaccggtaaagtgccagttaacgcgacccttgaagcggctgaaatcatgctgactgtgatcagtgaaaagaacaccaaagtgggctttaagcctgctggcggcgtacgtgatgctgctcaagctgctgagtttttaggtgtggctgagcgtattcttggtgctgattgggtctctccacgtacctttagatttggtgcttcaagcttactcaacagcttgttacacacattagaattagccgatgcgcctaagccgactcaaggctattaat

SEQ ID NO: 278447 - DNA, 682 bp, Unknown
  Bacterial polypeptide expressing nucleotide sequence isolated from the Sargasso Sea
atgccgctttccaacgcccaactcgctcaaaccatcgatcacacgctgctcgcgcccgacgcgagcgacgcgcagatccgcgaactctgccgccaggcggccgagcatcgcttttactcggtctgcgtgaattcggcgaacgtgccgctcgccgcgcgcgagctggccgataccggcgtgctcgtctgtgcggtagtcggctttccgctcggtgccgggctgtcggccgccaaggcatttgaagccaccgccgcgatcgccgcgggcgccggcgagatcgacatggtgatcaacatcggcgcgctgaagagcggccgcgccgacgacgtgaaggccgacatcgacgccgtgcaccgcgcatgcggcacggtgccgctcaaggtgatcctcgaaacggggctgctgaccgacgacgagaaggtgcgcgtgtgcgagatgtgccgcgatctcggcgtcgcgttcgtgaagacgtcgaccgggttcggccacggcggcgcgacgctcgcggatgtcgcgctgatgcgccgtacggtcggccccgtgctcggcgtgaaggcatcgggcggcgtgcgcgaccgcgcggccgcgctggcgatgatcgaggccggcgcgacgcggctcggcacgagctcgggggtggcgatcgtgacggatcaggggggtggcgcggcggggtactgac

SEQ ID NO: 278448 - DNA, 772 bp, Unknown
  Bacterial polypeptide expressing nucleotide sequence isolated from the Sargasso Sea
atgactgatttaaaaaaagcagcacaacgcgccatcgaacttatggatttaaccaccttaaatgatgacgataccgatcagaaggtgatcgacctgtgtcacaaagcggtaacgccagcgggtaatactgctgccatctgtatttatcctcgcttcattcccatcgcacgtaagaccctcgatgaattgggcgccgaagacattcaaatcgcgacagtaaccaacttcccacacggtaacgacgatatcgctatcgcggtattagaaacccgtgcagcggttgcctatggcgccgatgaagtggacgtggtatttccataccgcgcgctgatggaaggcaatgaaacagtcggctatgagttagtcaaagcctgtaaagaagcctgtggcgaagtattgctgaaagtcatcattgaatcgggtgtattagccgatcctgcgcttattcgccgcgcctctgaactgtctatcgatgccggagctgattttatcaagacgtctaccggtaaagtgcctgtcaacgcgacccttgaagcggctgaaatcatgctgactgtgatcagtgagaagaacaccaaagtaggctttaagcctgctggcggcgtacgtgatgctgctcaagctgcagagtttttaggtgtggctgagcgtattcttggtgcggattgggtctctccacgtacctttagatttggtgcttcaagcttactcaatagcttgttacacacgttagaattagccgatgcgcctaagccgactcaaggctattaat

SEQ ID NO: 278449 - DNA, 775 bp, Unknown
  Bacterial polypeptide expressing nucleotide sequence isolated from the Sargasso Sea
aatgactgatctgaaactggccgcccagcgcgccctgaacctgatggacctgaccactctgaacgatgacgacaccgatcagaaggtgatcgacctgtgccgcaaggccaagtcaccggccggcctgaccgccgccgtctgcatctatccccgcttcatccccatcgctcgcaagaccctgcgtgaaatcggcgccgccgacgtgcgcattgcgaccgtgaccaacttcccgcacggcaacgacgacatcgagattgccgtggccgaaacccgtgccgccgtggcctacggtgccgacgaagtggacgtggtgttcccgtaccgcgccttcatggccggcaatgaacaggtcggcttcgatctggtcaaagcttgtaaggaagcctgtggtagccaagccctgctgaaagtgatcatcgaaaccggcgagctgaaagaagaggcgctgatccgccgcgcgtctgaaatctccatcgacgccggtgctgacttcatcaagacctccaccggcaaggtgccggtcaatgcgaccccggaagcggcgcgcatcatgatggaagtgatcaaggccaagaacccgaaagtcggcttcaagccggccggtggcgtgaaagatgccgccgtggcgggtcagtacctagccatggccgaagagatcctgggcaaggactgggtatccgcccgcaccttccgctttggtgcatccagcctgctggccagcttgctggccacactggggcatggcgacaagccggccaacaccagcggttactaa

SEQ ID NO: 278450 - DNA, 592 bp, Unknown
  Bacterial polypeptide expressing nucleotide sequence isolated from the Sargasso Sea
gcagatgtgcctctcattattttagcaagaactgacgctaacgcagcaaaattaattacgaatgatcatgatgaaaacgataaatcatttttaactggagaaagatctcctgaaggtttttattatgtaaaacatggaatagaacaagctatttctagaggtttagcatacgccccgtatagcgatcttatttggtgcgaaacagcacagcctaatctagaagaagcaaaaaaatttgctgatgcaattcataaaaaatttccaggaaaaattttagcatataattgttctccatcatttaattggaaaaaacacttatcagatgatgaaattgcttcattccagataaaaattagtgaaatgggttataagttccaatttataacattagcaggatttcatactcaaaatcttgctgttttcgaactggcagagcagtacaaatcaaaaggcatgacagcttattcaaaaattcagcaacaagaatttgcaagagaaaaagatggttacactagtgttaaacatcaaagggaagtaggcacgtcatattttgatgccgtatcaaatactattagttctggaaaaagctcta

SEQ ID NO: 278451 - DNA, 373 bp, Unknown
  Bacterial polypeptide expressing nucleotide sequence isolated from the Sargasso Sea
tcctggtaaaatgttagcttataattgttcaccatcattcaattggaagaaacatttatctgatgaagaaattggatcatttcaaagaaagattggagaaatgggatataaatttcaatttattacattagcaggtttccacactcaaaacatcgcaatatttgaattagctgaaaaatataaatcagaaggtatgactgcttactcaaaaattcaacagcatgaatttgctagagaaaaagatggatacacaagtgtgaaacatcaaagagaagtaggcacgtcttattttgatgcggtttcaaatacaataagttcaggtaaaagttctactactgcaatggaaggctcaaccgagtcagaacagttttag

SEQ ID NO: 278452 - DNA, 439 bp, Unknown
  Bacterial polypeptide expressing nucleotide sequence isolated from the Sargasso Sea
atgggtgacaaaagaaactatactgatgaacatgttaagtcgttgcagggctctgtaaagattgagcatacattggcaaaaatgggttcaaagcaattgagaaatctttttgagagcgagccttatgtgaatacttttggtgcatacaatgggcaacaagccgttcagcatgttaaagcaggtctcaaagccatctatgtttcaggttggcaagttgcagcatctgcgaacagcaataatgaagtttatcctgatcaaagcttgtattctgttgattccgttcccaatgctgtgaagggcattaataacgcatttcgaagacaggatcagattcaagtgcaagaaggaagagagggcttctattatgctccgatcattgcagatgctgaggccggtttcggaggcgcattggatgcctacgaattgtctcgccattaat

SEQ ID NO: 278453 - DNA, 290 bp, Unknown
  Bacterial polypeptide expressing nucleotide sequence isolated from the Sargasso Sea
gcttggttcaatggggtataagtttcagttcatcacactagctgggtttcatgcattaaactacagtatgtttgaactatcaaaaggatacaacgctgagcaaatgactgcatatgttaaactacaagaagctgaatttgctgcagagaaagatggttatacagctaccaagcatcaaagagaagttggaacaggttattttgattctgttactcaagttataacaggcggcgcatcttctgtaactgctcttacaggaagcacagaagaagagcaatttgacaagtaag

SEQ ID NO: 278454 - DNA, 451 bp, Unknown
  Bacterial polypeptide expressing nucleotide sequence isolated from the Sargasso Sea
gacttgatttggtgcgaaactgctacacctaacttagaagaagcaaaaaagtttgctgacgcaattcataaaaaatttccaggaaaaatattagcatataattgttctccttcttttaactggaaaaaacatttatcagataaagaaatttctacttttcaacaaaaaatttcagagatgggttataaatttcaatttataacacttgcaggctttcatactcaaaatattgctgtttttgaactagcagaaaattatagaaaagaaggaatgtctgcttactctaaaattcaagaacaagaatttaaaaaagaaaaagatggttatacaagtgtaaaacatcaaagagaagttggaacttcgtattttgatgctgtttcgaataccattagttcaggaaaaagctcaacaactgctatggatggttctactgagtctgagcagttttaat

SEQ ID NO: 278455 - DNA, 521 bp, Unknown
  Bacterial polypeptide expressing nucleotide sequence isolated from the Sargasso Sea
aatgagttcagattctaatgtttcatatgaattaaaaaggtttgcaggaataaaaagagattactctaaagaagaagttgagagactaagaggttctattaaaattgagtattcgatgtgcaaacatcaatcggaaaaactttggaaactattaaatacagagccctatataaatacactaggctcactttctggaaaccacgcagttcagcatgcaaaggctgggctaaaggcgatttatttaagtggatggcaagtagctgcggatgcaaatagcgcaggggaaatgtatccagaccaatctttatatccttatgacagtgcgccaaaattagttgagtcgatgaataatgctttaattagagctgatcaaattcaacatatggaaattaaagatggtgaaatgaattcaaaagacagagttgactatatgttgcccatcattgcagatggagaagcaggttttggtggtcccttaaatgttttcgaattggctaaaaaatttattaaagcaggagcag

SEQ ID NO: 278456 - DNA, 383 bp, Unknown
  Bacterial polypeptide expressing nucleotide sequence isolated from the Sargasso Sea
tatgtgtaaaatgcagtcccaaaagctttggaaactgcttaatacagaagcttatgtaaacacccttgggtcactttcaggaaatcatgcagtacaacatgcaaaagctggtttaaaggcaatttatttaagtggttggcaagttgcagctgatgcgaacagtgctggtgaaatgtatcctgatcaatctttatatccatatgatagtgcaccaaaattagttgagacaatgaataattccttaataagagctgatcaaattcaacatatggaaatgatagatggtgatatggataaaagtaagagaactgattacatgttgccaattatagctgatggtgaagcaggatttggtggaccactaaatgtatttgaattaacta

SEQ ID NO: 278457 - DNA, 467 bp, Unknown
  Bacterial polypeptide expressing nucleotide sequence isolated from the Sargasso Sea
tggaacttctacaccaaacttagatcaagcaaagaaattttctgaagctatacgaaaagaatatccagaccagttactagcttacaattgcagtccaagttttaactggacagcaaacttaagtaaggatgacatagctcgttttcaaaaggaactcggagctatgggatataaatttcaatttattactctcgctggttttcatacactaaactacagcatgtttgaattagcccatggctataaaaagaaaggaatgacagcctatagcgaacttcaggatgcagagttcttagctgaaaatattggttatacagctcataggcatcaaagagaagttggcgctggatggtttgatgctatatctgtagctgttaaggggggcgcatgttctacaacagctttatcaggttcaactgaggaagatcaattccatgaaggaactattgcagatgtcgctgaatagc

SEQ ID NO: 278458 - DNA, 442 bp, Unknown
  Bacterial polypeptide expressing nucleotide sequence isolated from the Sargasso Sea
aatgggcgataaaagaaactataccgatgaacacgttaaatcactccagggatctgtaaggattgaacatacattggcaaaaatgggcgctaaacagttgagagatctattcgagagtgagccctatgtaaatacttttggtgcatacaatggtcagcaggctgttcagcatgtaaaagcaggactcaaagccatctatgtttcaggatggcaagttgcagcatccgccaatagtaataatgaggtctacccagatcagagcttatattcagttgattctgtacccaatgcagtgaagaacatcaacaatgcatttcgcagacaggaccaaattcaagttcaagagggtagagagggtttttattatgctccaataattgccgatgcagaagccggtttcggtggtgcgttaaatgcttatgaattatctcgtaatcttatc

SEQ ID NO: 278459 - DNA, 562 bp, Unknown
  Bacterial polypeptide expressing nucleotide sequence isolated from the Sargasso Sea
atgacaaccgatttttctgcgctgattccctctgcacctgaaggtcgttttgaaggaatcacacgcaactatactcctgcagatgttctacgcctgcgtggatccgtaatgccggctagtacgcttgcagaacgcggtgcaaataagctttgggcaatgttgcatgaagagccatacatcagctcactaggagcaatcacgggtaaccaagccatgcagatggtacgtgcaggtttgaaggcgatttatttatctggctggcaagtagccgccgacaataatactgccggggctatgtttcctgaccagagcctgtaccccgccaactctgcaccagagttatgccgcaaaataaatcgatcgttgcaacgcgcagatcaaattgaagttgctgaaggtaaagttacgcgcgattggttcgcgccgataatggctgatgccgaagccggttttggtggaccactcaatgttttcgaaataatgaagaactttattgaagcaggggctgcgggtgttcattttgaagaccaagctatcttccgagaaaaaatgcggtcattta

SEQ ID NO: 278460 - DNA, 471 bp, Unknown
  Bacterial polypeptide expressing nucleotide sequence isolated from the Sargasso Sea
catgtcagcagaaaatgtatcatatgatttaaagagatttgcgggaattaaaagagattatactccagaggaagtggaaagattaaggggttcaattagaattgagtattcaatgtgtaaacagcaatcccaaaaattatggaaactattaaacactgaaccttatataaatacacttggttctctttcaggaaatcatgcagttcaacatgctaaggcaggtttaaaagcaatatatcttagtggttggcaagtagcagcagatgcaaatagtgcaggagaaatgtacccagatcaatctttatatccttacgatagtgctccaaaattagttgaaacaatgaataatagtttaaccagagctgatcaaattcaacatatggaaataattgacggtgatatggaagaaggaaaaagagtagattatatgttgccaataatagccgatggagaagctggctttgggggacc

SEQ ID NO: 278461 - DNA, 441 bp, Unknown
  Bacterial polypeptide expressing nucleotide sequence isolated from the Sargasso Sea
ttgaaacctcacatccaagtctagaagaagccaaagaatttgcagatgccattcatgctgaatttccaggtaaaatgatggcttataattgttcaccttcatttaactggagagcaaatattgatgaaaaaactactgctgaatttagagaccaactagctgagatgggttataaataccaatttatcactttagctggttggcacatgttaaacttaaatgctttcgaactggctcaagaatttaaagaagaaggaatgcctgcatacgtacgcttacaagatagagaattttctcaagaagaaaatggttatacagcaactaaacatcagcaagaagttggagcaggattttttgataaggttattatgtccataactggaggagattcagctaccacagcactagcaggatctactgaaagtggacaatttaattaaa

SEQ ID NO: 278462 - DNA, 419 bp, Unknown
  Bacterial polypeptide expressing nucleotide sequence isolated from the Sargasso Sea
tttagaagaagccaaaaaatttgctgatgcaattcatgagaaatttcctggtaagtttttagcttataactgttcaccttcttttaattggaaaaaacatttatctgataaagaaatagcttcttttcaaaaagaaattagtgcaatgggttacaaattccaatttattactcttgctggatttcatacacaaaatatcgcaatttttgaacttgcggaaaaatacaagaaagaaggtatgtctgcctattcaaaaattcaagaacaggaatttgctcgtgagaaagatggttacacaagtgtaaaacatcaaagagaagttggtacttcttatttcgatgctgtttccaatacaattagtagcggtaaaagctcaacaacagcaatggatggctctactgagtctgaacaattttaaa

SEQ ID NO: 278463 - DNA, 499 bp, Unknown
  Bacterial polypeptide expressing nucleotide sequence isolated from the Sargasso Sea
atgagttcagaagcaaaagtttcatatgatctaaaaagatttgcgggcattaaaagagattatacacctgaagaggtagagcgtttaagaggttcaattaaaatacagtattcaatgtgtgatcaacaatctaaaaaattgtggaacttacttaatactgaaccctacgtaaatacattgggctcactgtctggaaatcattcggttcaacacgcaaaagctggattaaaagctatttatgtcagtggatggcaagttgctgctgacgcaaacactgctggagagatgtatcctgatcaatcattatacccttttgatagtgcccctaagttagttgatagtattaacaatgcacttattagagcagatcaaattcaacatatggaaattcaagatggtgaaatgaattctaaagatagaacagattatatgttacctatcatagctgatggtgaggctggttttggtggtccattaaacgtttttgaattaactaaaa

SEQ ID NO: 278464 - DNA, 616 bp, Unknown
  Bacterial polypeptide expressing nucleotide sequence isolated from the Sargasso Sea
ctggataggtggtctgatattaaaagagattattctccagaaaatataagttctttaaggccttcaattaaagtagagcataccttgtctgagattggatcaaattcgctttttaacttactgagcagagaagacacttgggtttctggacttggcgcagcaacagctcaacaagcactccaaatgtttcaccttgattatgaaattatatatgtaagtggatggcaagtagcagcagaaagtaatttaggtgtaaatacttatccagatttatctttgtatccatcgaacagtactccaaattttgtcaaaaaaataaataacactctggttagaagaatgtctgaacttaataaaaaacaaatacctccaattgttgcagatggcgaatctggatttggtggggtttataatgtttttgaactcactaatcaattcatcgatgccggagtctcaggagtacattttgaagatcaacttgcatcagaaaaaaaatgtggacacgttggtggcaaggttgtaatcccaacgcatgaatatattaaaaaattaaattctgcaaggttagctagtgatgttgcaggagtaccaataattttaatcgcaagaacagatg

SEQ ID NO: 278465 - DNA, 517 bp, Unknown
  Bacterial polypeptide expressing nucleotide sequence isolated from the Sargasso Sea
aatgagcgcagaaaatatctcatacgacttaaaaagatttgctggaattaaacgtgattatactgaagaagaagttgaaagattaagaggttcaatcaaaattgaatattcaatgtgtaaaatgcaatcacaaaagctttggaaattattaaatacagaatcatatattaatacacttggctctttatctggtaatcacgctgtgcaacatgctaaagctgggttaaaagcaatttatttaagtggatggcaagtagcagcagatgcaaatagtgctggagaaatgtatcctgatcaatctttgtatccttatgatagtgcaccaaaattagttgaatcgatgaataatgcattagttagagcagatcaaattcaacacatggaacttaaagatggtgatatgaaagaagaaaataaagttgattatatgttgccaattattgctgacggcgaagcaggttttggtgggcctttaaatgtatttgaacttgcaaaaaaattcatcaaagcaggtgct

SEQ ID NO: 278466 - DNA, 820 bp, Unknown
  Bacterial polypeptide expressing nucleotide sequence isolated from the Sargasso Sea
gcaactattcaacaaggagtccagatgctaaaagcaggacttgaaattatctatgttagtggatggcaaatagcatcggaaagtaatattggagataatacttatccagatttatcactttatccatcaaatagtggtccgaactttataaaaaaaatgaacaatacactgctaagagtaatttctgaaaaagaaatgagttctctcccaccaattgttgctgacgctgaatctggctttgggggtatttatagtgtatttaacttaacttctcaattcattaactcgggaatttctggtttacactttgaggaccaattggcatcagaaaaaaagtgtggacatatgggaggtaaggtagttattcctacccgtgaatttattaataaactaaatgcatcaagattggcttctgacgtactagagactccaataatacttatagcaagaactgatgcattgcatgcaaaacttataacttctgattttgatgatgttgataaaccatatttaactggaaaaagaacacaagatgggtactttgaactaaaaaataataaagaattggcgattacaaaatccctctcttatgcagaatttgcagatgtaatttggtgtgaaacaaatgaaccagacttaggatttgcaaaagaatttgcagatgaaattaaatctaaatttccaaaaaaacttttagcatataattgttctccatcatttaattggactgagaaattttctgatgatgaacttactaattttcaaagccaactttcagattacggatataaattacaatttgtatctcttgcaggctttc

SEQ ID NO: 278467 - DNA, 397 bp, Unknown
  Bacterial polypeptide expressing nucleotide sequence isolated from the Sargasso Sea
tgctgatgctatacatgaaaaatttcctggtaaaatgttagcttataattgttctccatcatttaattggaagaaacatttatctgatgaagaaattggatcatttcaaagaaagattggagaaatgggatataaatttcaattcattacattagcaggttttcatactcaaaatatcgcaatatttgaattagctgaaaaatataaatcagaaggtatgactgcttactcaaaaattcaacagcatgaatttgctagagaaaaagatggatacacaagcgttaaacatcaaagagaagtaggtacatcatattttgatgctgtttcaaatacaataagctcaggcaaaagttcaactacagcaatggaaggctcaaccgagtcagaacagttttag

SEQ ID NO: 278468 - DNA, 366 bp, Unknown
  Bacterial polypeptide expressing nucleotide sequence isolated from the Sargasso Sea
aaatcttagcatataatggctcaccatcttttaattggaaaaaacatttatccgaacaagaaatctcaacatttcaagaaaagattgcagaaatgggttataagtttcaatttataactcttgcaggatttcatacacaaaatattgcgatatttgagttagctgaaagttataagaaagatggcatgacagcttattctaaaatacaacaacaagaatttgataaagaaaaagatggatacacaagtgtaaaacatcaaagagaagttggaacgtcatactttgatgcagtttcaaatacaataagcggtggatcaagctctacaactgcaatggaaggttctacagaaactgaacaattttaga

SEQ ID NO: 278469 - DNA, 535 bp, Unknown
  Bacterial polypeptide expressing nucleotide sequence isolated from the Sargasso Sea
atgacgcagaatagttttttagataaagaattattaaattctgagtgggaaaataatcccaggtgggaaggaattacacgtaattacagtgccgaagacgtagtaagtattcgtaattcaattgagatcaaatatactttggccgaaaacggagcaaataatctctttaatcacttaatgaaaaaagacgaatggatatctgcattaggtgcgttatcaggtaaccaagctgtccagatggtaaaagcaggtttaaaggcaatttatttaagtggctggcaagtagctgcagactctaatcttggtgaaactacctatccagaccaatcactatacccaagtaatagtgcgccaaacctagcaaaaagaataaataatgcccttctcagagctgaacaggtagacagagtagaagagaattttgacattgattatgtagtaccaattgttgctgatggagaagctggttttggcggcgtattaaatgtttttgaattaacaaagaaatttattgaagctggtgctgcaggtatac

SEQ ID NO: 278470 - DNA, 562 bp, Unknown
  Bacterial polypeptide expressing nucleotide sequence isolated from the Sargasso Sea
actgagtgaagaatgggaaacaaaccctaggtggaaagatacaaagcgtaacttttctgctgaagatgttgtttcgttaagaaattccattcaaattgagtattccctgtctcaaaatggttcgacaaatttatggaacttaatcaaccgtaaagatgattgggtttcagctctaggggcattatcaggcaatcaggcagtgcagatggcaaaggctgggcttgaagcaatctatttaagtggttggcaagttgcagctgactctaaccttggagatacaacttaccctgatcaatcattatatccaagcaatagtgcacccaatcttgccaaaaaaataaataatgctttattaagagctgagcaagttgataaaactgacggtatcgattctacaaattatattgttccaattgttgcagatggagaagcaggttttggtggagcattaaatgtatttgaacttactaaaaaattcattgaagctggtgttgctgcggttcattttgaagatcagcttgccgcagaaaaaaatgtggacatatgggtggaaaagttttag

SEQ ID NO: 278471 - DNA, 436 bp, Unknown
  Bacterial polypeptide expressing nucleotide sequence isolated from the Sargasso Sea
ccagatcttgagcaagcacaaatattcgctgacgctattcatgctgaatatcctgatcagcttctatcatataactgctcgccttcatttaattggaagtctaatttagatgaagaaacaatgaagcattttcgcgagaagctcggtgagatgggttataaattccaattcattactcttgcaggatggcatgctctcaatacaagcatgtttgaattaagtaaagcatataagaaaaacggaatgtacgcctattctcaattacaagaacgtgaatttaaatatgaaagtgatgggtttcgtgcagcgaaacaccagtcgtttgtgggtgctggttattttgatgctgtccaaaatacaatcatggctggtcattcttcaacaacagcaatggatggcagtacagaagaagaacaatttgatgacaaggagtaaa

SEQ ID NO: 278472 - DNA, 1261 bp, Unknown
  Bacterial polypeptide expressing nucleotide sequence isolated from the Sargasso Sea
tatgaatcaaacttttaaccaaattgaaactgtagatgagtacttatcatctaagagatggtctgatataaaaagagattactctgtggatgatatttgttctttgagaccttcttttaaaatagagcactctttatctgaaattgggtctgaactacttttggatcttctttctagaaaagactcctgggtttctggattgggagcagcaacagcacaacaagctcttcaaatgtttcatcttgattatgaaataatttacgtaagtggttggcaagtagcagcagagagcaacattggagttaatacttacccagacctatcactttatccatcaaacagtactccaaattttgtgaaaaaaattaataacactcttctgagaaggatggcagaactggataagaaaaagttacctccaattattgctgatggggagtctggttttggtggaatttataatgtatacgaacttacaaatcaatttatagattctggagtatctggaattcattttgaagaccaacttgcttctgaaaaaaaatgtggacatgttggtgggaaagttgtaatccctacacatgaatatattaaaaaacttaattctgcaaggttatcatctgatgtttcaggagttccaataatcattattgctagaacagatgcaatgaacgcaaagctaatgacatcagattttgatgatagagacagtaaatatctcagtaaaaatagaacttctgatgggtacttcttaattgaaaacaaccatgagatggcgataacaaaatcacttaactacgctgattacgcagatgtagtatggtgcgaaactaacactccagatttaggctttgcaaaagaattcgctgatgaaataagaaaatcacatccaaataaaattcttgcatataattgctctccatcatttaattggttagataaatttactaaaaaagaaattgaaaacttccaaagtgaacttagttcatgtggatataaattacaatttgtctctcttgctggttttcattcattagcaagttcaatgtatgacttagcatcaaaatacaaaggtggaaatatgagtgcaatcttagaacttcagcagtttgaaaaagatttgtcaaaagatggttacacagggatcaagcatcaacaagaagttggtgggaattactatgaaagaattggtgaagccttacttggagatgaatcagaactactttcaaaaaaagactctacagagaatacacaattttaa

SEQ ID NO: 278473 - DNA, 533 bp, Unknown
  Bacterial polypeptide expressing nucleotide sequence isolated from the Sargasso Sea
actgagtgaagaatgggaaacaaaccccaggtggaaagatacaaagcgtaacttttctgctgaagatgttgtttcgttaagaaattccattcaaattgagtattccctgtctcaaaatggttcaacaaatttatggaacttactcaatcgtaaagatgagtgggtttcagctttaggcgcattatcaggcaatcaagcagtgcagatggcaaaggctgggcttgaagcaatttatttaagtggttggcaggttgcagctgactcaaaccttggagatacaacttatcctgatcaatcattatatccaagcaatagtgcacccaaccttgccaaaaaaataaataatgctttattaagagctgagcaagttgataaaactgacggtatcgattctacaaattatattgttccaattgttgcagatggagaagcaggttttggtggagcattaaatgtgtttgaacttactaaaaaattcattgaagctggtgttgccgcggttcatttgaagatcagctgccgcagaaaaaaaa

SEQ ID NO: 278474 - DNA, 297 bp, Unknown
  Bacterial polypeptide expressing nucleotide sequence isolated from the Sargasso Sea
attccaaaagaacttgggtgctatggggttataaatttcagttcatcactttagctggcattcactcaatgtggcatggcatgtttaacctagcaaacgaatacgttgcagacggcatgacagcttacgtcaagctacaagaaaaagagtttgaagatgctaaaaaaggctacacttttgtatcacatcaacaggaagttggaacaggttattttgatgcagtaaacaactgcatacaaggtgaagagagctcaacttctgcactcaaaggatctacagaagaagaccagttttagc

SEQ ID NO: 278475 - DNA, 423 bp, Unknown
  Bacterial polypeptide expressing nucleotide sequence isolated from the Sargasso Sea
cgaatttagatgaagcaaagaaatttgctgatgctatccacgaaaaatatcctggtaagatgttagcttataattgttcaccatcatttaattggaagaaacacttgtcagatgaggaaattggatcgtttcaaagaaaaattggagaaatgggttacaaattccaattcattacacttgctggttttcatacacaaaatattgcgatatttgagttagcagaaaaatacaaaaaagagggaatgactgcatattctaaaattcaacagcatgaatttgcaagagaaaaagatggatatacaagtgtgaagcaccaaagagaggtaggtacatcttactttgatgcagtttcaaatacaattagctcaggaaagagttcaaccacagcaatggaagggtcaactgagtcagaacaattttaga

SEQ ID NO: 278476 - DNA, 523 bp, Unknown
  Bacterial polypeptide expressing nucleotide sequence isolated from the Sargasso Sea
cgagggtttttattatgtaaaaaatggaatagaccaagcaatttctagaggtttagcatactcaccctatgcagatttgatttggtgtgaaactgctacacctaatttagaagaagcaaaaaagtttgcagacgctattcataaaaaatttccaggaaaaatattggcgtataattgttctccctcttttaactggaaaaaacatttatcagataaagaaatttctaccttccaacaaaaaatttctgaaatgggttataaatttcaatttataacacttgcaggatttcatactcaaaatattgctgtttttgaattagcagaaaattatagaaaagaaggtatgtctgcttactctaaaattcaggaacaagaatttaaaaaagaaaaagatggctatacaagtgtgaaacatcaaagagaggttggaacttcatattttgacgctgtttcgaatacaattagctcaggaaaaagctcaacaactgccatggatggctcaactgaatctgaacagttttaa

SEQ ID NO: 278477 - DNA, 466 bp, Unknown
  Bacterial polypeptide expressing nucleotide sequence isolated from the Sargasso Sea
tatgcaccctatgcagatctaatatggtgtgagacagccactccaaatttagaagaagctaaaaagtttgctgatgcaattcattcaaaatttcctggaaaacttctagcatataattgttctccatcatttaattggaaaaaacatttgtcagatgaagagatagcttcttttcaaattaaaattggagaaatgggttataagtttcaatttattactcttgctggttttcatactcaaaatatcgcaatttttgaattagctgaaaaatataaaaaagaaggaatggctgcatattctaaaattcaacaaaatgagtttgcaagagaaaaagatggatatacaagcgttaaacatcaaagagaagttggaacatcttatttcgatgcggtatcaaatactattagttctggaaaaagttctacaacagctatggaaggctcaactgagtctgaacagttttaat

SEQ ID NO: 278478 - DNA, 691 bp, Unknown
  Bacterial polypeptide expressing nucleotide sequence isolated from the Sargasso Sea
atgagtgcagaaaatatctcatacgaactaaaaagatttgcaggcattaaaagagattataaccccgatgaagttgaaagattaagaggctcaataaaaattgaatattccttatgtaaacaacaatcagttaaactttggaaacttcttaatacagaaaattatataagtactttaggatctttatcaggaaatcaagcagttcagcatgctaaagctggtctaaaatcaatttatctaagtggttggcaagtagctgcagatgctaatagtgctcgcgaaatgtacccagatcaatctttatatccatatgacagtgccccaaaacttgttgaatctatgaataacgctttgcttagagcagaccaaattcaacatatggaactaaaagatggtgatatgaaaaaagaaaaaagaattgattacatgcttccaatcattgctgatggtgaagcaggttttggaggtccattaaatgtttttgaacttacaaaaaagtttattaaagctggtgcagcaggtgttcattttgaagatcaattagctagtgaaaaaaaatgtggtcatatgggtggtaaagtacttgtgccgacagggactatgattaaaaatttaaaggctgcaagattggcagctgatattgctgatgtaccattaataattttggctagaacagatgcaaatgctgcaa

SEQ ID NO: 278479 - DNA, 651 bp, Unknown
  Bacterial polypeptide expressing nucleotide sequence isolated from the Sargasso Sea
gacttgctgctgacatagcagatgtaccattaataattttagcaagaacagatgcaaatgctgcaaagttaatcacaaatgattttgatgataatgataaaccatttttaacaggtgaaagatcacctgaaggtttcttttatgttaaagatgggatagagcaggcaatttctagaggtcttgcttatgcaccatacgcagatttaatctggtgtgaaactgccactccaaatttagaagaagcaaagaaatttgccgatgctatacatgaaaaatttcctggtaaaatgttagcttataactgttctccatcatttaattggaagaaacatttatctgatgaggaaattggatcatttcaaagaaagattggagaaatgggatataaatttcaattcattacattagcaggtttccacactcaaaacatcgcaatatttgaattagcagaaaaatataaatcagagggtatgaccgcttactcaaaaattcaacagcatgaatttgctagagaaaaagatggatacacaagtgtgaaacatcaaagagaagtaggtacatcttattttgatgcagtttcaaatacaataagctcaggcaaaagctcaactacagcaatggaaggctcaactgagtcagaacagttttaga

SEQ ID NO: 278480 - DNA, 787 bp, Unknown
  Bacterial polypeptide expressing nucleotide sequence isolated from the Sargasso Sea
atgagtgcagaaaacatctcatacgacttaaaaagatttgcaggtattaagagagattatacatcagaagaagtggagagattaagaggttctttaaaaattgaatactcattatgtaaacatcaatcaactaaattatggaatttgttaaattctgaaacatatgtaaatactctcggttcactatcagggaatcatgctgtccaacatgcaaaagctggtcttaaagcaatttacttaagtggttggcaagttgcagcagatgcaaatagtgctggtgaaatgtatcctgatcaatctttatatccatacgatagtgctccaaaattagtagagtcaatgaataatgctttaataagagctgatcaaattcaacacatggaaataattgatggtgatatgaaaaaagaaaataaagttgattatatgttgccaatcattgcggatggtgaagctggatttggtggtccattaaacgtttttgagctggcaaaaaaatttataaaggctggtgcagcaggtgttcactttgaggaccaattagctagtgaaaaaaaatgtggtcatatgggtggaaaagttcttgtaccaactggaacaatgattaaaaatttaaaagcagctagattagctgctgatattgctaatgttccattaattatattagcgagaacagatgcaaatgctgcaaaactaattacaaacgatcatgatgataatgataaaccatttttaactggtgaaagatctccagaaggattttattatgttaaagccaggtattgat

SEQ ID NO: 278481 - DNA, 671 bp, Unknown
  Bacterial polypeptide expressing nucleotide sequence isolated from the Sargasso Sea
tatgagctcggaaactaaagtttcttatgaattaaaaagatttgctggaattaaaagagattacacaccagaggaagtggagagattaaggggctcaataaaaattgaatattcgatgtgcaaacatcaatctcaaaagctttggagattattaaacacagaaccatatgttaatacattaggttctttatcaggaaatcatgcagtacaacatgcaaaagcaggtttaaaagcaatctatttaagtggatggcaggtagctgctgacgcaaacagtgcaggagaaatgtatcctgatcaatcgttatacccgtatgacagtgctcctaaattagttgagtctatgaataatgctttaacaagagcagatcagattcaacacatggaaataaaagatggagaaatgaaatcaaaagatagagtagattacatgctaccaattattgctgatggcgaggcaggctttggtggacctttaaacgtttttgaactagctaaaaaatttattagggctggagctgcaggagtacattttgaagaccagttagcaagtgaaaaaaaatgtggtcacatgggtggtaaagttttagtgcctacaggcacaatgattaaaaatttaaaggctgcaagactagctgcagacattgctgatgttcctttaataattttag

SEQ ID NO: 278482 - DNA, 773 bp, Unknown
  Bacterial polypeptide expressing nucleotide sequence isolated from the Sargasso Sea
aatgagtgcagaaaatatctcatacgatttaaaaagatttgctggaattaaacgagattattcccctgaagaagtagaaagacttagaggttcaattaaaattgagtattctttgtgtaaacaacaatctgaaaaattatggaaattattaaattcagaaccttatattaacacattaggttccctttctggaaatcatgctgttcaacatgcaaaagcaggcttaaaagcaatttatttaagtggatggcaagttgctgcagatgcaaatactgctggagaaatgtatcctgatcaatctttatatccttatgatagtgcgccaaaattagttgagtctatgaataatgctttaattagagctgatcaaattcaacatatggaaattcaagatggtgatatgaagaaagaaaaaaaggttgattatatgttgccaattattgctgatggtgaagcaggttttggtggaccattaaatgtttttgaacttgcaaaaaaatttataaaagctggtgctgctggagtacattttgaagatcaattagctagtgaaaaaaaatgtggtcatatgggtggtaaagttttagttccaacaggaacaatggttaaaaatttaaaagcggcaagacttgcagctgacattgcagatgtgccattaataatattagcacgcacagatgcaaatgctgctaaactaattacaaacgatcatgatgaaaatgataaacagttttttaactgggcgaaagatcaccctgaaagtttctttttat

SEQ ID NO: 278483 - DNA, 689 bp, Unknown
  Bacterial polypeptide expressing nucleotide sequence isolated from the Sargasso Sea
accaacacaaacggctataagaaatctaacctctgcaagattggcagcagatgtaatgaatgtaccacttattattattgcaagaacagacgcaaacgctgcaaaactaattacgagtgattttgatgaaaacgataaaccttttataactggagaaagatcgcctgagggtttccactatgttaaggatggaatagaacaagcaatatctcgtggattagcttatgctccttatgcagatttagtttggtgcgaaacgggtaaacctaatatcaaagaagcagaaaaatttgctagtgaaattcacaaaaaatatcctgacaaaatgcttgcttataattgttcaccatcctttaattggaaaaaacatttatcagacaaagagatagaaagttttcaaaaatcaatgggtgacatgggatataaatttcagtttgttaccctagcaggtttccatgctcaaaaccatgcaatttttgatttagcaaaaaattataaaaaatctggaatggcggcatattcaaaattacaacaacaagaatttgaaagtgaaaaggatggatatactgctactaaacatcaaagggaagtaggaacatcgtattttgatgcagtatcaaatacgattacatctggaaaaagtgcaactactgctatgaaagattctactgaggaagagcagttctaaa

SEQ ID NO: 278484 - DNA, 395 bp, Unknown
  Bacterial polypeptide expressing nucleotide sequence isolated from the Sargasso Sea
tgatgaaatccataaaaaatttcctgggaaacttcttgcttataattgttcaccttcatttaattggaaaaaacatttatctgatgcagagatagctatattccaagaagaaataagtaaaatgggttataaatttcaatttattactcttgctggatttcatacacaaaatattgcaatttttgaacttgcagaaaaatataaaaaagaaggcatgactgcctactcaagaattcaacaacaggaattcgcacgtgaaaaagacggctacacaagtgttaaacatcaaagagaagttgggacttcgtactttgatgcagtatcaaatactattagttctggaaaaagctcaactacagccatggatggctcaacagaatcagaacaattttaat

SEQ ID NO: 278485 - DNA, 461 bp, Unknown
  Bacterial polypeptide expressing nucleotide sequence isolated from the Sargasso Sea
atattctgatttaatttggtgtgaaacagcaacaccaaatcttgaagaagcaaaaaagtttgcaaatgcaattcatgaaaaatttcctggaaaacttttagcttataattgttctccatcattcaattggaaaaaacatttatccgactctgaaatagcttcgtttcaacaaaaaattagtgagatgggttataaatttcaatttataactttagcaggttttcatactcaaaatattgctatttttgagttagcagaaaagtataaaaaagaaggtatgactgcatactcaaaaatccaacagcaagaatttgctcgtgaaaaagatggctatactagcgtaaaacatcaaagagaagttggtacatcttattttgatgcagtatcgaatacaataagtagcggcaaaagttcaactacagcaatggaaggctcaacagagtctgaacaattccaataaa

SEQ ID NO: 278486 - DNA, 676 bp, Unknown
  Bacterial polypeptide expressing nucleotide sequence isolated from the Sargasso Sea
attaaaaatttaaaagctgcaagattggcagctgatattgctgatgttccattaataattttagctaggacagatgcaaacgccgcgaaattaattacaaatgattttgatgaaaacgataagccttttttaactggtgaaagatctccagaaggattttattatgtaaaatcaggaattgaacaagcaatttcaagaggactagcatatgcgccttactcagatttaatttggtgtgaaacagctacaccaaatcttgaagaagctaaaaaatttgcagatgcaattcatgaaaaatttcctggaaaacttttagcgtacaattgttctccatcatttaattggaagaagcatttgtccgatgaagaaattgcttcatttcaaaaagaaataagtaaaataggctataaatttcaatttattacgcttgctggttttcatacacaaaatattgcaatttttgaattagcagaaaaatataaaaaagaaggtatggctgcttattcaaagattcaacaacaagaatttgctcgtgaaaaagatggttacactagtgtaaaacaccaaagagaagtaggaacatcttattttgatgctgtttctaatacaataagtagtggaaagagctcaactacagcaatggatggctcaaccgagtcagaacaattccaataaa

SEQ ID NO: 278487 - DNA, 628 bp, Unknown
  Bacterial polypeptide expressing nucleotide sequence isolated from the Sargasso Sea
tgttccattaataatttagcgagaacggacgctaatgcagcaaaattaattacaaatgatcacgatgaaaatgacaaaccttttttgacaggagaaaggtcacctgaaggtttttattatgttaaacatggaatagatcaagcaatttcaagaggattagcttatgctccttattcagatttaatatggtgtgaaacagcaactccaaacttagaagaagctaaaaaatttgctgacgcaattcatgctaagtatcctggaaaattgttagcttataattgttctccatcctttaattggaaaaaacatttatctgatgcagaaattgcaactttccaacaaaaaattagtgatatgggatataagtttcaatttattactttagctggctttcatactcaaaatattgctatctttgaattagcacaaaagtataaaaaagaaggcatgacagcttattcaaaaattcaagaacaagagtttgctagagagaaagatggttatacgagtgttaaacatcaaagagaagtaggaacttcatactttgatgctgtatctaacactataagtggtggaaaaagttcaactactgcaatggaaggctcaacagaatctgagcagttttaaa

SEQ ID NO: 278488 - DNA, 703 bp, Unknown
  Bacterial polypeptide expressing nucleotide sequence isolated from the Sargasso Sea
aagttcttttgtaccaactgggaacaatgggttagaaatttaaaggctgcaagacttgccccttatattgcagatgtaccattaataattctagcaagaacagatgcaaatgcagcgaagctaatcactaatgattttgatgaaaatgataaaccatttttaactggcgaaagatcacctgaaggtttcttttatgttaaagatggaatagagcaagcaatttccagaggtcttgcttatgcaccatacgcagatttaatttggtgtgaaaccgctactccaaacttagaagaagcaaagaaatttgctgatgctatacatgaaaaatttcctggtaaaatgttagcttataattgttctccatcatttaattggaagaaacatttatctgatgatgaaattggatcatttcaaagaaagattggagaaatgggatataaatttcaattcattacattagcaggtttccatactcaaaacatcgcaatatttgaattagcagaaaaatataaatcagagggtatgaccgcttactcaaaaattcaacagcacgaatttgctagagaaaaagatggatacacaagcgtgaaacatcaaagagaagtaggtacatcatattttgatgctgtttcaaatacaataagctcaggtaaaagctcaactacagcaatggaaggctcaactgagtcagaacagttttaga

SEQ ID NO: 278489 - DNA, 742 bp, Unknown
  Bacterial polypeptide expressing nucleotide sequence isolated from the Sargasso Sea
tgagccttatgttaatacactcggctctttatcaggtaatcacgcagttcaacatgcaaaagcaggtttaaaggcaatttacttaagtggatggcaagttgcagcagatgctaacagtgccggagaaatgtatcctgatcaatctctttatccatatgacagtgcaccaaaattagttgaagcaatgaataatgctttgctaagagctgaccaaattcagcatatggaaattaaagatggtgatcagaaaaaagaaaaaagaatagactatatgcttccaataattgctgatggcgaagctggatttggagggccactaaatgttttcgaattaactaaaaaattcattaaagcaggtgcagccggggttcacttcgaagatcagttagcaagtgaaaaaaaatgcggtcacatgggcggtaaagttttgataccaacaagccaagcagtaaaaaatttgaaagccgcaaggttagcagccgatatagctgacgttccattgattattcttgctagaactgacgcaaacgcagcaaaactaattacaaatgatcacgatgaaaacgataagcctttcctgacgggggatagatctccagaaggattttattatgtaaaatctggaattgatcaagcaatttcaaggggtcttgcttatgcaccatattcagatcttatatggtgtgaaaccgcaacaccaaatttagatgaagcgaaaaaatttgctgatgctattcacaaa

SEQ ID NO: 278490 - DNA, 741 bp, Unknown
  Bacterial polypeptide expressing nucleotide sequence isolated from the Sargasso Sea
aattaaacatactcttgcagaaaacggagctcaaaaattatttgaagatttaaacaaaaaagatgaatggatttcagcacttggtgctttatctggtaatcaagctgttcaaatggtaaaagccggtcttaaggcaatttatttaagtggatggcaagttgctgccgattcaaaccttggcgagacaacttatccagatcaatctctgtatccaagtaatagtgccccaacacttgcaaaacgaatcaataatgctcttttgagagcagaacaagttgatcgtgtagagggagataacagtattgattatcttgtaccaattgtggcagatggtgaagcaggttttggtggaactcttaatgtatttgaattaaccaaaaaatttattgaagctggagctgcaggagtacattttgaagatcaattggctgcagagaaaaaatgtggacatatgggtggtaaagtattagtgccaactagtcaacacattaggacccttacctcagcaaggcttgcatctgacactatgggtgttccaactgtaataattgcaagaacagatgcattggctgcaaaccttgtcacgagtgatattgacgagatagacagtgactttgttttaggagaaagaacttcagaagggttctttaaagtaaaaaatggtccagagtctgcaattagtagaggtctttcttatgccccttactctgatcttgtatggtgtgaaacaggaaaacctga

SEQ ID NO: 278491 - DNA, 940 bp, Unknown
  Bacterial polypeptide expressing nucleotide sequence isolated from the Sargasso Sea
tatgtgtgaagattttgaaaagctttataatgctataccaggtagattcaaaaacaaaaaaagggattacactgttgcagatgttaaaaagctctcagggtctgtcaaaattgaacatactcttgcacacagaggtgcgcaaaaattatggtcactacttcataatgaagattacgtaaatacacttggagctttaactggtaaccaggcgatgcaacaagtgcgtgcaggacttaaagcaatttatctttctggatggcaaattgctgcagataataatttggctggcggaatgtatcctgatcaatctatctaccctgcgaattctggccctgaacttgtaaaaaaaattaatcgaacgctttctagagctgatgaaattgaagttatggaaaatggctctccacagagagactggtttgctccaattatagctgatgctgaagcaggatttggtggtgttttaaacgcattcgaaattacaagaaattatattgaagctggagcatcaggagtgcattttgaagatcaattagcctctgaaaaaaaatgtggtcatatgggtgggaaagtactgataccagtcaaacaacatgtatcaaatttaaatgctgcaagacttgcagctgatatttctggaacaccaactttgataattgcaagaacagacgcagaatcagcaaaattaattacttcagatgtagatgagaaagacaaaccctatttaacaggagaaagaactgctgaaggtttttatactttaactcctgaaagttcttttgaacgatgcgtaactagaggaagggcttatgcagaatacgcagatttgatttggatggaaacttctacaccgaacttagatcaagcaaagaaattttcagaagctatacgaaaagaatatccagatcagttactagcttataattgcagtcccaagttc

SEQ ID NO: 278492 - DNA, 541 bp, Unknown
  Bacterial polypeptide expressing nucleotide sequence isolated from the Sargasso Sea
actggtgaaagatcaccagaaggtttcttttatgttaaagatggaattgagcaagcaatctctagaggtctagcttatgcaccatacgcagatttaatatggtgtgaaacagcaactccaaatttagaggaagcaaagaaatttgctgatgctattcatgaaaaatatcctggtaagatgttagcttataattgttcaccatcatttaattggaagaaacatttgtcagatgaggaaattggatctttccaaagaaaaattggagaaatgggttacaaatttcaatttattacacttgctggttttcatacacaaaatattgcgatttttgagttagcggaaaaatataagaaagaaggaatgactgcatattctaaaattcaacagcatgaatttgcaagggaaaaagatggatatactagtgttaaacatcaaagagaagtaggtacatcttattttgatgctgtttcaaatactattagctcaggtaaaagttcaaccacagcaatggaaggatcaaccgagtcagaacaattttaga

SEQ ID NO: 278493 - DNA, 729 bp, Unknown
  Bacterial polypeptide expressing nucleotide sequence isolated from the Sargasso Sea
gtgagaaaaaatgtggtcacatgggtggtaaagttcttgtacctactagtacaatgatcaaaaatttaaaagctgcaagactcgcagcagatattgctgatgtacctttaataattttagcaagaacagatgctaatgcagcaaaactaattacaaatgatcacgatgaaaatgataaaccatttatgacaggcgaaaggtcacctgaaggattttactatgtcaaagctggcattgaacaggcaatttctagaggtcttgcttatgcgccatattcagatttaatttggtgtgaaacagcaactccaaaccttgaggaagcaaaaaaatttgctgatgcaattcatgaaaaatttcctggtaaacttttagcttacaactgttcaccatcttttaattggaaaaaacatttatcagatgctgagatagcttcttttcaaaaaaaaattagtgctatgggttataaatttcagtttatcactcttgctggattccatacacaaaacatcgcaatttttgaacttgcagaaaaatataaaaaagaaggtatgtctgcttattcaaaaattcaagaacaagaatttgctcgtgagaaagatggttacacaagtgttaaacatcaaagagaagttggtacttcttattttgatgctgtttcaaatacgattagtagcggaaaaagctcaaccacagcaatggcaggttctacagagtctgaacaattttaaa

SEQ ID NO: 278494 - DNA, 701 bp, Unknown
  Bacterial polypeptide expressing nucleotide sequence isolated from the Sargasso Sea
aattaaaagagattatactcaagaagatgttgaaagacttagaggttctataaaaattgagtattcattatgtaaacaacaatcaattaaactttggaaacttttaaatacagaaaattatgtaaatacattaggttcactatctggaaatcatgcagttcagcacgctaaagcaggtctaaaggcaatatatttaagtgggtggcaggtagcagcagatgctaatagtgctggggaaatgtatccagatcaatccctttatccttatgatagtgctccaaaattagttgagtcaatgaataatgctttaatcagagctgatcaaattcaacacatggaacttctagacggggatatgaaaaaagaaaaaagagtagattatatgcttccaattattgcagatggagaggcgggtttcggcggtccacttaatgtatttgaattggcaaaaaaatttattaaagcaggtgcagctggcgttcattttgaagaccaactagctagtgaaaaaaaatgtggtcacatgggtggtaaagtgcttgtaccaactggaactatgattaaaaatttaaaagcagctagattagctgccgacatagcagacgttcctctaataatactggcaaggacagatgcaaatgctgctaaattaattactaatgaccatgatgaaaatgataaaccttttttaactggtgaga

SEQ ID NO: 278495 - DNA, 622 bp, Unknown
  Bacterial polypeptide expressing nucleotide sequence isolated from the Sargasso Sea
ctttattatacttgctagaaccgatgcaaatgcagcaaagctcatcacaaatgattttgacgaaaatgataaaccttttctaaaaggtgatagatctccagaaggctttttttatgtaaaagatgggatagatcaagcaatatccagaggtttagcttacgcaccttatgctgatttaatttggtgtgaaacagcaacaccaaacttagaggaagctaaaaaatttgcagatgcaattcattcaaaatttcctggaaaaatgctagcttacaactgctctccatcttttaattggaaaaaacatttatccgatgatgaaattggatcgtttcaaagaaaaattggtgaaatgggttataaatttcaattcattacgttagcaggttttcatactcaaaatattgcaatatttgaattagcagaaaaatataaaaaagaaggtatggcagcatactcaaaaattcaagaacatgagttttcaagagagaaagatggttatacgagcgtgaaacatcaaagagaagtaggaacgtcttactttgatgctgtatcaaacactataagctcaggtcaaagttctacaacagcaatggaaggatctacagagtcagaacaattttag

SEQ ID NO: 278496 - DNA, 460 bp, Unknown
  Bacterial polypeptide expressing nucleotide sequence isolated from the Sargasso Sea
cggaattgagcaggcaatttctagaggtcttgcttatgcaccttacgcagatttaatttggtgtgaaactgccactccaaatttagaagaagcaaagaaatttgctgatgctatacatgaaaaatttcctggtaaaatgttagcttataactgttctccgtcatttaattggaagaaacatttatctgatgaagaaattggatcatttcaaagaaagattggagaaatgggatataagtttcaattcattacattagcaggtttccacactcaaaacatcgcaatatttgaattagcagaaaaatataaatcagagggtatgactgcttactcaaaaattcaacagcatgagtttgctagagaaaaagatggatatactagtgtgaaacatcaaagagaagtaggtacatcatattttgatgcagtttcaaatacaataagctcaggcaaaagctcaact

SEQ ID NO: 278497 - DNA, 481 bp, Unknown
  Bacterial polypeptide expressing nucleotide sequence isolated from the Sargasso Sea
ttcagaggtctagcttatgctccgtattcagatttaatatggtgtgaaacagcaacacctaatcttgaggaagccaaaaaatttgctgatgcaattcataaaaaatttcctggtaaacttttagcatataactgttcaccttcttttaattggaaaaaacacttatctgatagtgaaatagcttcttttcaaaaagaaattagtaaaatgggttataaatttcaatttataactcttgcaggatttcacacgcaaaatattgcaatttttgagcttgcggaaaaatataaaaaagaaggtatgtctgcctactcaaaaattcaagaacaagaatttgctcgtgagaaagatggttacactagcgttaagcatcaacgtgaagttggcacttcatatttcgatgctgtctcaaatacaataagtagtggaaaaagctctactactgcaatggatggctcgacagagtctgaacaattctaat

SEQ ID NO: 278498 - DNA, 658 bp, Unknown
  Bacterial polypeptide expressing nucleotide sequence isolated from the Sargasso Sea
tatgtcagcagaaaatgtatcttacgatctaaaaagatttgcaggaataagaagagactatactccagaggaagtagaaagattaagaggatcaattaaaattgagtattcaatgtgtaaacaacaatctcaaaaattgtggaaattattaaacaccgaaccttacatcaatacacttggatcactttcgggaaatcatgcagtacagcatgcaaaggctggtttgaaggcaatatatcttagtggttggcaagtagcagcagatgcaaatagtgcaggagaaatgtacccagatcaatctttatatccttacgatagtgctccaaaattagttgaaacaatgaataatagtttaaccagagctgatcaaattcaacatatggaaataattgatggtgatatggaagaaggaaaaagagtagattatatgttgccaataatagctgatggagaagctggctttggcggacctttaaatgtattcgaattggcaaaaaaatttataaaagcaggtgctgcaggagttcattttgaagatcagcttgctagtgaaaaaaaatgtggccatatgggcggtaaagttcttgtaccaacaggaacaatggttagaaatcttaaagcagcaagattagctgctgatattgccgatgtccctcta

SEQ ID NO: 278499 - DNA, 737 bp, Unknown
  Bacterial polypeptide expressing nucleotide sequence isolated from the Sargasso Sea
aatgagctcaaaaactaaatctggcaacgtgtcttttgatctaaaaagatttgctggaatcaaaagagattataacaaagaagatgttgaaaagctaaaaggaacatttgatattgaatatactctctgtaaattacaatcagaaaaactctggaatcttcttaatactgaaccttatataaacacacttggctctctctcaggaaatcaggcagttcaacacgctaaagctggtttaagggcaatttatttaagtggatggcaagtagctgccgatgcaaatagtgctggagaaatgtatcctgaccaaagtttatatccctatgatagtgcaccaaaattggtagaagctatgaataatgctttaattcgagcagatcaaattcaacacttggaaaagttagaacaaaaacttgataataaaaatcttgttgattacaaaatgccaattatagctgatggagaagcgggatttggcggccctttaaatgtttttgaattaacaaaaaaatttataaaagcaggggcagctggtgttcattttgaagatcaattagcttctgaaaaaaaatgcggccatatgggcggtaaagtattagtcccaactcaagcaatgattaaaaatcttaagtccgcaagacttgctgcagatgtaatgggtgttccattaattattttagctagaacagacgcaaatgcagcaaagttaattactaatgattttgacgaaaatgata

SEQ ID NO: 278500 - DNA, 584 bp, Unknown
  Bacterial polypeptide expressing nucleotide sequence isolated from the Sargasso Sea
aatgagcgcagaaaacatctcatacgacttaaaaagatttgcaggaattaaacgtgattacactgaagaagaagttgagagattaagaggttcaattaaaattgaatattcattatgtaaacaacaatctcaaaagctttggaaaatattaaacactgagccatatgtaaatacacttggttcattatcaggaaatcatgcagtccaacatgctaaagcaggactaaaagcaatttacttaagtggatggcaagtggcagcagatgcaaatagtgccggggaaatgtatcctgatcaatctttatatccttacgatagtgctccaaaattagttgactcgatgaacaatgcattaatcagagcagaccaaatccaacatatggaacttaaagatggtgacatgaaagaagaaaataaagttgattatatgttgccaattattgctgatggtgaagcaggttttggtggtccattaaatgtatttgaacttgcaaaaaaatttattaaagcaggtgctgctggtgttcactttgaagatcaactagctagtgaaaaaaaatgtggtcatatgggtggtaaagttt

SEQ ID NO: 278501 - DNA, 472 bp, Unknown
  Bacterial polypeptide expressing nucleotide sequence isolated from the Sargasso Sea
ctgcgcggcaccgtgcacgtggagcactcgctggcccggctgggcgctgagaagctgtggaagtacctgcatgaaaaggacttcgtcaacgcgctcggcgcgctgaccggcaaccaggccatgcagcaggtcaaggccgggctcaacgcgatctacctgtccggctggcaggtggccgccgacgccaacctggccggccagatgtacccggaccagtcgctgtacccggccgattcggtgccggcagtggtcaagcgcatcaacaacaccctgctgcgcgccgaccagctgcaccacgccgaaggcaaggacgagatcgacttcctgcagccgatcgtggccgacgccgaggccggcttcggcggtgtgctcaacgccttcgaactgatgaaggcgatgatcgaagccggcgccgccggcgtgcatttcgaggaccagctggcctcggtgaagaagtgcggccacatgggcg

SEQ ID NO: 278502 - DNA, 727 bp, Unknown
  Bacterial polypeptide expressing nucleotide sequence isolated from the Sargasso Sea
atgagtgcagaaaatatatcttacgatttaaaacgatttgccgggattaaaagagactataaacctgaagatgttgaaagacttagaggttcaatcaaaatagaatattcaatttgtaaacaacaatccgttaaactgtggaaacttcttaacactgaaaattatgtaaacactttaggatctttatccggtaatcatgctgttcagcatgctaaagctggattaaaagctatttatttgagtggatggcaagtagcagctgatgcaaatagtgcaggagaaatgtatcctgatcaatctttatatccatatgatagtgcaccaaagttagttgagtcgatgaataatgcattgataagagctgaccaaatacaacatatggaacttgaagacggagacatgaaaaaagaaaaaagaattgattatatgttaccgataattgcagatggtgaagctggatttggtgggcctttaaatgtatttgaacttacaaaaaaatttattaaagctggtgcagctggtgttcattttgaagatcaattagccagtgaaaaaaaatgtggtcatatgggtggaaaggtgcttgttccgactggaacaatgattaaaaatttaaaagcagcaagacttgcggcagatattgctgatgttccattaattattttagcaagaactgatgctaatgcagcaaaattaattacaaatgatcatgatgaaaatgacaaac

SEQ ID NO: 278503 - DNA, 790 bp, Unknown
  Bacterial polypeptide expressing nucleotide sequence isolated from the Sargasso Sea
aatgacttcagaaactaaaatttcttacggtttaaaaagatttgcaggaattaaaagagattatacaacagaagaggttgatagattaagagggtctgtaaaaattgaatattcgatgtgcaaacatcaatcagaaaaactttggagattattaaatacagaaaattatataaataccttaggttctttatcaggaaatcatgctgttcaacatgccaaagcaggattgaaagctatttatttaagcggatggcaagtagctgcagatgcaaatagcgcaagagaaatgtatccagatcaatcattgtatccttttgacagcgctccaaaactagttgagtcaatgaataatgcattgatcagagcagatcagattcagcatatggagataaaagacggagatatgaaatcaaaggataaagttgattatatgttaccaattgttgctgatggagaagctggttttggtggtcccttaaatgtctttgaattaaccaaaaaatttataaaagctggagctgcaggagttcattttgaagatcagttagctagtgaaaagaagtgtggacatatgggaggtaaagtattggtgcccaccaacactatgataaaaaatttaaaagcagctagattggcttcagatatagctgatgttccattaattattttggcgagaactgatgctaatgccgcaaaactaataactaatgatcatgacgaaaacgataaaccatttttaacaggcaaaagatctccagaaggtttttattatgtaaaacatggtattgat

SEQ ID NO: 278504 - DNA, 607 bp, Unknown
  Bacterial polypeptide expressing nucleotide sequence isolated from the Sargasso Sea
tgctagaacggatgctaatgcagctgaactacttacttctgacgttgatgatagagatgctgagtttgtaactggagaaagaacatctgaaggtttttatagagttaaagcaggtattcagcaagcaatatcaaggggactttcatacgctccatattctgatttattatggtgtgaaacaggaaagcctaaccttgaagaagcaaagctatttgcagaatcaattaagaaagatcatcctgaattgatgttagcttataattgttctccatcatttaactggagaaagaatcttgatgacgctacaatagctaagttccaaagagaacttggtgcaatgggttataaattccaatttatcactcttgctggtattcattcaatgtggcatggaatgtttgatttgacaaaaaattatgttaaatcaggcatgactgcttatgttgaactacaagagaaagaatttgcagaccatgataagggatatactttttctgcacatcaacaagaggttgggacaggctactttgatgcagtgaataactgtattgttggagatccttcaacaagcgccatggatggttctacagaagaagaacagttttaa

SEQ ID NO: 278505 - DNA, 412 bp, Unknown
  Bacterial polypeptide expressing nucleotide sequence isolated from the Sargasso Sea
gaagctaaaaaatttgcagatgcaatacatgaaaaatttccaggcaaattattagcttacaattgttcaccttcttttaattggaaaaaacatttatctgatgatgaaatagcttcattccaaaaaaaaattggagaaatgggttataaatttcagttcattactcttgcgggatttcatacacaaaatattgcaatatttgagcttgcagaaaaatataaaactgaaggtatgactgcttattcaaaaattcagcaacacgaattttctagagaaaaggatggttatacgagtgtaaaacaccaaagagaagtaggaacatcctattttgatgcagtttcaaatacaattagttcaggaaaaagttctaccacagcaatggaaggttcaacagagtctgaacaattttaat

SEQ ID NO: 278506 - DNA, 652 bp, Unknown
  Bacterial polypeptide expressing nucleotide sequence isolated from the Sargasso Sea
atgtctgcagaaaatatatcttacgaacttaagagatttgcaggaataaaaagagattatactcctgaagaagttgaaagattaagaggatccataaaaatagaatattcaatttgcaaacaacaatctgaaaaattatggcatttattaaatacagaaccttttgttaatactttaggttctttatccgggaatcaggcagttcagcatgctaaagctggtctaaaagctatttatttaagtggatggcaagtagcagcagatgcaaacagcgcaggagaaatgtatcctgatcaatcattatatccttacgatagcgctccaaaattagttgaagcaatgaataattcattaattagagctgatcaaatccaacatatggaattgaaagatggtgacatgaaagaaaatcaacgtgtagattatatgttgcctataattgctgatggagaagcaggttttggtggaccattaaatgtatttgagctaactaagaaatttattaaagcgggtgcagcaggagttcattttgaagatcagttagcaagtgaaaaaaaatgtggtcatatgggaggcaaagtattagtaccaactggcacaatggtaagaaacttaaaggcagcaagattagcagcagaatattgcagatgtg

SEQ ID NO: 278507 - DNA, 586 bp, Unknown
  Bacterial polypeptide expressing nucleotide sequence isolated from the Sargasso Sea
actgagtgaagaatgggaaacaaaccccaggtggaaagatacaaagcgtaacttttctgctgaagatgttgtttcgttaagaaattccattcaaattgagtattccctgtctcaaaatggttcaacaaatttatggaacttactcaatcgtaaagatgagtgggtttcagctttaggcgcattatcaggcaatcaagcagtacagatggcaaaggctgggcttgaagcaatttatttaagtggttggcaggttgcagctgactcaaaccttggagatacaacttatcctgatcaatcattatatccaagcaatagtgcacccaaccttgccaaaaaaataaataatgctttattaagagctgagcaagttgataaaactgacggtatcgattctacaaattatattgttccaattgttgcagatggagaagcaggttttggtggagcattaaatgtatttgaacttactaaaaaattcattgaagctggtgttgctgcggttcattttgaagatcagcttgccgcagaaaaaaaatgtggacatatgggtggaaaagttttagtccctactagtcagcatattcga

SEQ ID NO: 278508 - DNA, 889 bp, Unknown
  Bacterial polypeptide expressing nucleotide sequence isolated from the Sargasso Sea
tatgacttaaaaagattgctgggaataaaaagagattatacccctgaagaagttgaaaggctaagaggctcaattaagattgagtattcaatttgtaaacaacaatctacaaaactttggaaattattaaatacagaaaattatgttaatactttaggatcattgtcaggaaaccatgcagttcagcatgcaaaagctggtttaaaagcaatatatttaagtggttggcaggtagccgctgatgcgaatagtgctggggaaatgtatcctgatcaatctttatatccttacgatagtgcacctaaattagtagagtctatgaataatgctttaataagagctgaccaaattcagcatatggaattaaaagatggtgacatgaaaaaagaaaaaagaattgattatatgttaccaattattgctgatggcgaagctggttttggtggtcctttaaatgtattcgaacttgcaaaaaaattcattaaagcaggtgcagctggcgtccatttcgaagatcaattagcaagtgaaaaaaaatgtggtcatatgggaggaaaagttttagttccaactggcaccatgattaaaaatttaaaagctgcaagattggcagctgatattgcagacgttcctttaataattttagcaagaactgatgctaatgctgcaaaattaattacaaatgattatgatgaaaatgacaaaccttttttgacaggtgaaagatctcctgaaggtttttattacgtgaaagctggtatcgaacaagcaatatcaagaggtcttgcctatgcaccctactctgatttgatttggtgtgaaactgctacgccaaatcttgatgaagcaaaaaaattcgcagacgcaattcatgaaaaattcccaggaa

SEQ ID NO: 278509 - DNA, 673 bp, Unknown
  Bacterial polypeptide expressing nucleotide sequence isolated from the Sargasso Sea
agttaaaaatttgaaagctgcaaggttagcggctgatatagctgatgttccattgattatccttgctcgtactgatgcaaatgcagctaaactaattacaaacgatcatgatgaaaatgataagcctttcctgactggcgaaagatctccagagggattttactatgttaaatctggaattgatcaagcaatttcaagaggtttagcatatgcgccgtactctgatttgatatggtgtgaaaccgcaacaccaaatttagaagaggcaaaaaaatttgccgatgctattcataaaaaatatcctggaaaattattagcttataattgttcaccatcttttaactggaaaaaacatctatctgataatgaaattgcaacgttccagaataagattagtgaaatgggttataagtttcaatttattaccttggctggtttccatacccaaaatattgcaatatttgaactagcagaaaaatacaaggcagaaggtatgacagcttattcaaaaatccaagagcgtgagtttgctagagaaaaagatggatatactagtgtcaagcaccaaagagaggtaggtacaacttatttcgatgcagttacaaatacaattagttccggaaaaagttcaactacagcaatggatggatcgactgagtctgaacagttttaa

SEQ ID NO: 278510 - DNA, 749 bp, Unknown
  Bacterial polypeptide expressing nucleotide sequence isolated from the Sargasso Sea
ttttgaagatcagttatcttctgaaaaaaagtgcggtcacttaggtggtaaagttttagttcctacctctaactttgaaaaaatactcaatacagctagattagctagtgatgtactaaatgttccaacattaatcatggctagaactgatgcaaatgctgcaaaattattaaccagtgatattgatgaacgtgataaaccatttcttacaggagaacgtacatctgaaggtttctttaggataacgggtggattagattgtgctattgcaagaggcattgcttatgctaaatatgctgatcttatttggtgtgaaactgataggccagatatagaagaagcaaaaaaatttgcagatgcaattaaaaaagtatatcccgataaaatgttagcttataactgttcaccttcatttaattggaaaaaacatttagatgattcgcaaattgctaactttcaaaaagaattaggtgctatggattataaatttcaatttataacattagctggttttcataatcttaatctgtccacttttaatttagctaaaaattatgctgtcacaggaatgtcagcctacgctaacctgcaagaagaggagtttgcaaaagaagcagaagggtatagcgctataaaacatcaaagagaagttggtgttagttattttgataaaatatcagaaattatatcttcaggcgaaagttcaacaacagccatgcaagattctactgaaagtgaacaattttaaa

SEQ ID NO: 278511 - DNA, 556 bp, Unknown
  Bacterial polypeptide expressing nucleotide sequence isolated from the Sargasso Sea
agaccatttttaactggagagcgaacttcggaaggtttttataggtctaaagctggtctagatcaggcaatagcaagaggtttagcttatgcaccctactctgatttagtttggtgcgaaacatcaaaaccggatttagagcaagcaaaggtttttgctgaagcaattaaaaaagatcatcctgaaattttactggcatacaattgctcaccttcgtttaattggaaaaagaatcttgacgaacaaactatagctaagtttcaaaaagaactaggagctatgggctacaaatttcaatttatcacgctggctggaatccattctatgtggcatagcatgttcaaactttcaaaagaatatgtaaatgatggaatgtcggcttatgtacggttacaggaagaagagttcgcagatgctaatcagggctatacttttgtatcccatcaacaggaagttggaactgggtattttgacgcagtaaatgaatgcattcagggtggtgaaagctctacttctgctttaaaaggttcaactgaagaagaacagtttaaataaa

SEQ ID NO: 278512 - DNA, 396 bp, Unknown
  Bacterial polypeptide expressing nucleotide sequence isolated from the Sargasso Sea
attagcagctgatattgcagatgtgcctcttataattcttgcgagaacagacgccaatgctgcaaaattaattacaaatgactttgatgaaaatgacaaaccttttttaactggagaaagatctccagaaggttttttctatgtaaaagatggaattgaacaagcaatctctagaggtttagcttatgcaccttatgctgatttaatttggtgtgaaactgctactccaaatttagaagaggcgaaaaagtttgcagatgcaattcatgaaaaatttccaggtaagctattagcatacaattgctcaccttcttttaattggaaaaagcatttatctgatgatgaaatagcttcatttcaaaaaaaaattggagaaatgggttataagtttcaatt

SEQ ID NO: 278513 - DNA, 809 bp, Unknown
  Bacterial polypeptide expressing nucleotide sequence isolated from the Sargasso Sea
tccactgaacgtatttgaacttgcaaaaaaatttattaaagctggtgcagctggagtacattttgaagatcaattagcaagtgaaaagaaatgtggtcatatgggtggaaaagttcttgttccaactggaacaatgataaaaaacttaaaggctgcaagattagctgccgatattgctgatgtcccattaattattttagcaagaacagatgcaaacgcggcaaaactaattacaaatgatcatgatgataatgataaagaatttttaactggtgaaagatctcctgaaggtttttattatgtaaaagctggaattgatcaggctatttcgagagggttagcttacgctccttattcagatttaatttggtgtgaaactgcaacacctaatcttgaagaagcaaaaaagtttgctgatgctattcgtgaaaaatttccaggtaaatttttagcttataattgttctccttcatttaattggaaaaaacatctatctgatgatgaaatcgcttcttttcaaacagaaataagtaaaatgggttataaatttcaatttattactttagcaggattccatactcaaaatattgcaatttttgaattagcagaaaaatacaaaaaagagggaatgactgcttactcaaagatacaacaacaagaatttgcgcgtgaaaaagatggctatactagcgtcaaacatcaaagagaagttggtacctcttattttgatgctgtttctaacactataaataatggaaaaagctcaactacagcaatggatggctcaactgagtccgaacagttctaat

SEQ ID NO: 278514 - DNA, 700 bp, Unknown
  Bacterial polypeptide expressing nucleotide sequence isolated from the Sargasso Sea
taaagtattagttccaactggtacgatgattaacaatttaaaagctgcaagactagctgctgatattgctgatgtaccattaattatcttggcaagaactgatgctaatgcagcaaaactaattacaaatgatcacgatgataatgataagaaatttttaacaggtgagagatcgccagagggattctactatgttaaagcaggaatagatcaagcaatttcaagaggtctagcatatgcaccctattcagatctaatttggtgtgaaacagcaactcctaatcttaaagaagctaaaaaatttgctgatgctattcatgagaaatttccaggtaaacttttagcttataattgttctccatcattcaattggaaaaaacatttatcagatactgaaatagctactttccaaaaagaaattagtgccatgggttataagtttcaattcataactctagctggatttcatactcaaaatattgctatttttgaattggcagaaaaatataaaaaagaaggtatgtctgcttattcaaaaattcaagaacaagaatttgctcgggaaaaagatggttacactagtgtcaaacatcaaagagaggttggtacttcctactttgacgctgtttcaaataccataagtagtggaaaaagttcaactacagctatggatggctcgactgaatctgaacaattctaa

SEQ ID NO: 278515 - DNA, 891 bp, Unknown
  Bacterial polypeptide expressing nucleotide sequence isolated from the Sargasso Sea
gttgaaaaacttaagggtacattcaatatcgaatatactcttttgtaaaacacaatcagaaaaactttggaatttattaaacaccgaaccctatgttaatactttaggttcgctatcaggaaatcaggcagttcaacatgctaaagcaggtttaaaagcaatttatttaagtggctggcaggtagcagcagacgctaatagcgcaggagaaatgtacccagaccaaagtttatatccatatgatagtgcgccaaaattagtagaagccatgaataatgcattaattagagcagatcaaatccagcacatggaagctaaagagggtaaaataaaaattgaagatcaagttgattataagatgccaataatagccgacggtgaagcgggatttggcggtcctttaaatgtatttgaattgactaaaaaatttataaaagctggtgcagcaggagtgcattttgaggatcagctagcttcagaaaaaaagtgcgggcatatgggtggaaaagtattagttcctactcaaacaatgattagaaatctaaaatcagcaagacttgctgcggacgttatggaggttccgctaattatattagccagaaccgatgctaatgcagcaaaactaataacaaatgatgttgatgaaaatgataaaccttttttaaccggaaaaagatcgccagaaggattttattatgttaaagatggattggatcaagccatttcaagaggtttagcctacgctccttatagtgatttaatttggtgtgagacagcaaaaccagatttaaaagaagctaaaaaatttgctgatgcaattcataataaatatccaggaaagcttcttgcttataattgttcaccttcatttaatttgaaaaaaaaatcttt

SEQ ID NO: 278516 - DNA, 367 bp, Unknown
  Bacterial polypeptide expressing nucleotide sequence isolated from the Sargasso Sea
taaattactagcttacaattgttctccttctttcaattggaaaaagtctttatcagataaggaaatagaaacatttcaagaacaattgggttcttttggatataagtttcaatttattacccttgctgggtttcatgcactaaatacatcaatgtttgaactagcttcaaaatacaaaggtggaaatatgtcagcatacgtcgaattacaacaaaaagaattttcaatggaaaaggatggttttacatcagtaaagcatcaaagagaagttggagctggttactttgataccgtatcaacaattattagtgatggagatgcgtcaacattagcgctcgaaggttctacagaggaagagcaattttaa

SEQ ID NO: 278517 - DNA, 629 bp, Unknown
  Bacterial polypeptide expressing nucleotide sequence isolated from the Sargasso Sea
actgagtaaagaatgggaaacaaacccaaggtggaaagatacaaagcgtaacttttctgctgaagatgttgtttcgttaagaaattccattcaaattgagtattccctgtctcaaaatggttcaataaatttatggaacttactcaatcggaaagataagtgggtttcagctttaggcgcattatcaggcaatcaagcagtgcagatggcaaaggctgggcttgaagcaatttatttaagtggttggcaggttgcagctgactcaaaccttggagatacaacttatcctgatcaatcattatatccaagcaatagtgcacccaaccttgccaaaaaaataaataatgctttattaagagctgagcaagttgataaaactgacggtatcgattctacaaattatattgttccaattgttgcagatggagaagcaggttttggtggagcattaaatgtatttgaacttactaaaaaattcattgaagctggtgttgccgcggttcattttgaagatcagcttgccgcagaaaaaaaatgtggacatatgggtggaaaagttttagtccctactagtcagcatattcgaacattaacatctgctagactagcagccgatactcttggtgttc

SEQ ID NO: 278518 - DNA, 700 bp, Unknown
  Bacterial polypeptide expressing nucleotide sequence isolated from the Sargasso Sea
aaaagttttagttccaactagtacaatgataaaaaatttaaaagctgcaagacttgcggcagatattgcagatgttccattaattattttagctaggacagatgcaaatgcggcaaaactaattacaaatgatcatgacgaaaatgataaaccttttttaacaggagaaagatctcctgagggattctattatgttaaatcaggaattgatcaagctatttcaagaggcttagcttatgctccatactccgatttaatttggtgtgaaactgcaactcctaatcttgaagaagctaaaaaatttgccgatgctatccataaacagtttcctggaaaacttcttgcatataattgttctccttcttttaattggaaaaaacatttatccgatgaagaaatagcttcattccaaaaagaaataagtaaaatgggatacaaatttcaatttattactcttgctggatttcatactcaaaatattgcaatttttgaacttgcagaaaaatataaaaaagaaggtatgactgcatattcgagaattcaacaacaggaattttctcgtgaaaaagatggctacactagtgtaaaacatcaaagagaagttggtacttcttattttgatgcagtatcaaacactattagttcaggaaaaagttctacaactgcaatggacggctcaacagaatctgaacagttttaa

SEQ ID NO: 278519 - DNA, 874 bp, Unknown
  Bacterial polypeptide expressing nucleotide sequence isolated from the Sargasso Sea
atgtcagctgaaaatgtttcatacgatttaaaaagatttgcaggaattaaacgtgattataaacctgatgaaatagaaagacttagaggttcaattaaaattgagtattctttatgcaaacaacagtcaatgaagctatggaacttattgaactctgaaccttacgtaaatactttaggctcactatctggaaaccatgccgttcaacatgcaaaggcagggttaaaagcaatttatctaagtggctggcaagttgctgcagatgctaatagcgctggcgaaatgtatccagatcaatctttatatccatatgatagtgctccaaaattagttgattcaatgaataatgctttaataagagcagatcaaattcaacatatggaaatccaagatggcgatatgaaaaaagaaaataaagttgattatatgttgccaattatagcggatggcgaagctggatttgggggacctctaaacgttttcgagcttgcaaaaaaatttattaaagctggagcagcaggcgttcattttgaagatcaattagcaagtgaaaaaaaatgtggtcacatgggtggaaaagttttagttccaactggcacaatgataaaaaatttgaaagccgcgagacttgcagctgatattgctgatgttcctttgattattttagctagaactgatgcgaatgcagcaaagctaattacaaatgatcatgacgaaaatgataagccttttttaacaggcgaaagatctccagaaggtttttattatgtaaaatctggaattgaacaagcaatttcaagaggattagcttatgccccatattctgatttaatttggtgtgaaactgcaacaccaaatctgaagaagcaaaaaa

SEQ ID NO: 278520 - DNA, 434 bp, Unknown
  Bacterial polypeptide expressing nucleotide sequence isolated from the Sargasso Sea
aactgcaacaccaaatttggatgaagctaaaaaatttgctgatgcaattcacgaaaaatttcctggaaaacttcttgcttataattgctcgccctcgtttaattggaaaaaacatttatcagacgcggagattgcttcattccaagtagaaataagtaaaatgggttataaatttcaatttattactcttgctgggtttcatacacaaaatattgcaatttttgaacttgcagaaaaatataaacaagaaggcatgactgcatactcaagaattcaacaacaggaatttgctcgtgaaaaagatggttacacaagtgttaaacatcaaagagaagttggtacctcttattttgatgcagtatcaaatactattagttcaggtaaaagctcaacaactgccatggatggctcaacagagtctgagcaattttaat

SEQ ID NO: 278521 - DNA, 694 bp, Unknown
  Bacterial polypeptide expressing nucleotide sequence isolated from the Sargasso Sea
tatggttccaacaggaactatgattaaaaatttaaaagcagctagacttgctgcagatattgcggatgtacctttaataattctggccagaactgatgctaatgctgcaaaactaattacaaatgaccatgatgaaaatgatatgccatttttaactggcaaaagatcacctgaaggatttttttatgtgaagcacggtatagatcaggcgatatccagaggcttagcatatgcgccttatagtgatcttatctggtgtgaaacagctcaaccaaatcttgaagaagctaaaaaatttgcagatgaaattcattcaaaatttccaggaaagttacttgcctataactgctcaccttcttttaattggaaaaaacatttatctgatgaagaaattgcaacattccaagttaagattagtgaaatgggttataaatttcaatttattacattagcgggctttcatacacaaaatcttgcaatttttgaattggcagaacaatacaaatcaaaaggaatggccgcgtactcgaagatacagcaaaaggaatttgctagagaaaaagatggctacacaagtgttaaacatcaaagagaggttggaacttcttattttgatgcagtatcaaatacaattagttctggaaaaagctctacaacagcaatggaaggctcgactgagtcagagcaattttaa

SEQ ID NO: 278522 - DNA, 454 bp, Unknown
  Bacterial polypeptide expressing nucleotide sequence isolated from the Sargasso Sea
ttcagatttaatttggtgtgaaactgctactcctaatcttgaagaagctaaaaaatttgctaatgcaattcatgaaaaatttccaggaaagcttttagcttataattgttcaccatcatttaattggaaaaaacatttgtctgatagcgagattgcaacttttcaacaagaaataagtaaaatgggatataaatttcaattcattacattagctggatttcatactcaaaatattgctatttttgaattagccgaaaaatataaaagcgagggcatgacagcttattcaaaaattcaagagcaagaatttgctcgtgagaaagatggttacacaagtgtcaaacatcaaagagaagtaggtacttcttattttgacgctgtttctaacactataagcagtggtaaaagttcaacaacagcgatggcaggttcaaccgagtccgagcaattctaa

SEQ ID NO: 278523 - DNA, 760 bp, Unknown
  Bacterial polypeptide expressing nucleotide sequence isolated from the Sargasso Sea
ggttccttatcaggaaatcaagctgttcaacatgctaaagcaggtttaaaagcaatttatttaagtggttggcaagtagctgctgatgcaaatagtgctggagaaatgtatcctgatcagagtttatatccttatgatagtgctccaaaattagttgaagctatgaataatgcattaattagagctgatcaaatacaacatatggaaataatagaaaaaaaaattaataataaagatcgagtagactacaaaatgccaataatagcagatggagaagctggatttggaggacctctaaatgtatttgagttaacaaaaaaatttataaaggctggggctgctggtgttcacttcgaagatcaactagcatcagaaaaaaaatgtggccatatgggtggaaaagttttagttccaacacaaaccatgattaagaatcttaaatcggcaagacttgcggcagatataatggaggttccgttaattattttggcaagaacagatgcaaacgcagcaaaattaattacaaatgatgttgatgagaatgataaaccattcttaactggaaaaagatctccagaaggattttattatgttaaatcaggtttggaccaggctatttctagaggtttggcttatgctccgtacagtgacttaatttggtgcgaaacagcaaaaccatctttgaaagaagcaaaaactttcgcaaaagcaatccacgataagtttcctggtaaacttcttgcttacaactgctcacctt

SEQ ID NO: 278524 - DNA, 572 bp, Unknown
  Bacterial polypeptide expressing nucleotide sequence isolated from the Sargasso Sea
tgattttgatgaaaatgataaaccatttttaactggagaaagatcacatgaaggtttcttttatgttaaagatggaatagagcaggcaatatctagaggtcttgcttatgcaccatacgcagatttaatttggtgtgaaactgctactccaaatttagaagaggcaaagaaatttgctgatgctatacatgaaaaatttcctggtaaaatgttagcttataattgttctccatcatttaattggaagaaacatctatctgatgaagaaattggatcatttcaaagaaagattggagaaatgggatataaatttcaattcattacattagcaggtttccacactcaaaacattgcaatatttgaattagcagaaaaatataaatcagagggaatgaccgcttactcaaaaattcaacagcatgaatttgctagagaaaaagatggatacacaagcgttaaacatcaaagagaagtaggtacatcgtattttgatgctgtttcaaatacaataagctcaggcaaaagctcaactacagcaatggaaggctcaaccgagtcagaacagttttaga

SEQ ID NO: 278525 - DNA, 709 bp, Unknown
  Bacterial polypeptide expressing nucleotide sequence isolated from the Sargasso Sea
ttgggaggaaaagtatttggtccctacccaaactatgattaaaaatcttaaatcagcgagacttgctgcagatgtaatgggggtaccattaattattttagcaagaactgacgcaaatgcagcaaaattaattactagtgatattgataagaatgataaaccattcctaactggaaaaagatctcctgaggggttctactatgttaaagaaggtttagaccaagctatttccagaggtttagcttatgctccatatagtgatttaatttggtgcgaaactgcaaaaccaaatttagaggaagcgaaagcttttgccactgcaattcataataaatttcctggaaaattgcttgcttataactgttcaccatcatttaattggaagaaaaatttgtctgataaagaaattaaagtttttcaaaatgaaataggaaaaatgggttataaatttcaattcataactctagcaggatttcatgctcaaaattatgctatttttgatttagctaaaaaatataagcagtatggaatggcagcttattctagattgcaacaacaagagtttgatagtgaaaaagaaggttacacagcaacaaaacatcaaagagaggttggaacatcatattttgatgctatatcaaatgctatttcatctggtgaaagttctactacagcaatgaaagattccacagaaactgatcaattttaa

SEQ ID NO: 278526 - DNA, 770 bp, Unknown
  Bacterial polypeptide expressing nucleotide sequence isolated from the Sargasso Sea
aatgagtgcagaaaatatctcatacgacctaaaaagatttgtgggaattaaacgagattatactccagaagaagttgagagattaagaggttctattaaaattgaatattctatgtgcaaacatcagtctacaaaattatggaatttattaaattcagaaccttatgtaaacacactaggatctctttctggaaaccacgcagtacaacatgctaaagcaggtcttaaggctatttatttaagtggatggcaggttgcagcagatgctaatagtgcaggtgaaatgtatcctgatcagtctttatatccttatgacagtgcaccaaaattagttgagtcaatgaataatgcattaataagagctgatcaaatacaacatatggaaattaaagatggtgacatgaaagatgaaaaaaaagttgattacatgcttccaattattgcagatggtgaagcaggatttggtgggccattaaatgtatttgaactagcaaaaaaatttataaaagcaggtgctgccggtgttcattttgaagatcagttagctagtgaaaaaaaatgtggtcacatgggtggtaaagttttggttccaactggaacaatgatcaaaaatttgaaagctgctagattagctgcagacatagcaaatgtaccattgattatattggcaagaacagatgccaatgctgcaaaactaattacaaatgatcatgatgacaatgataaaaaatttttaactggtgaaagatctccagagggtttcttttatg

SEQ ID NO: 278527 - DNA, 517 bp, Unknown
  Bacterial polypeptide expressing nucleotide sequence isolated from the Sargasso Sea
tttcttttatgttaaagatggaatagagcaagcaatttccagaggtcttgcttatgcaccatacgcagatttaatttggtgtgaaaccgctactccaaatttagaagaagcaaagaaatttgcggatgctatacatgaaaaatttcctggtaaaatgttagcttataattgttctccatcatttaattggaagaaacatttatctgatgaagaaattggatcatttcaaagaaagattggagaaatgggatataaatttcaattcattacattagcaggtttccacactcaaaacattgcaatatttgaattagcagaaaaatataaatcagagggtatgaccgcttactcaaaaattcaacagcatgaatttgctagagaaaaagatggctacacaagtgtgaaacatcaaagagaagtaggtacatcatattttgatgctgtttcaaatacaataagctcaggcaaaagctcaactacagcaatggaaggctcaactgagtcagaacagttttag

SEQ ID NO: 278528 - DNA, 721 bp, Unknown
  Bacterial polypeptide expressing nucleotide sequence isolated from the Sargasso Sea
atgagtgcagaaaacatctcttacgatctaaaaagatttgcaggaataaaacgagattatactcctgaggaggttgagagattaagaggttcaatcaaaattgaatattctttatgtaagcagcaatctgttaaattatggaatttacttaattcagagccttatgtaaatactttgggatcgttatcaggtaaccatgcagtacaacatgcaaaagctggattaaaggctatctatttaagtgggtggcaagtagcagcagatgctaatagtgctggtgaaatgtatccagatcaatctttgtatccttatgatagtgcaccaaaattagttgattcaatgaacaacgctcttattagagcggatcaaatccaacacatggaattaaaagatggtgacatgaaaactgaaaaaaaaattgattatatgctgccaattattgctgatggggaggcaggatttggtggaccattaaacgtattcgaacttgcaaaaaaattcattaaagcaggtgctgctggcgttcattttgaagaccaattagcaagtgaaaaaaaatgtggtcatatgggtggaaaagtattagttccgaccagtacaatgattaaaaatctaaaagctgcaagattagctgccgatatagctgacgttcctttaataatactagctaagacagatgctaatgcggcaaaactaattaccaatgatcatgacgaaaatg

SEQ ID NO: 278529 - DNA, 661 bp, Unknown
  Bacterial polypeptide expressing nucleotide sequence isolated from the Sargasso Sea
aaagcagcaagattggcagctgatattgccgacgttcctctcattattctgcaagaaacagatgccaacgctgcgaaactaataacaaacgattttgatgaaaatgacaaaccgtttttaacaggagaaagatcacctgaaggcttttattatgtaaaagatggtattgatcaagcaatctcaagaggattagcttatgcaccttacgcggatttaatatggtgtgaaactgcaacacctaatttagaagaagcaaaaaagtttgctgatgcaatacatgcaaaatttcctggcaagatgttagcttataattgttctccatcatttaattggaagaaacatttatctgatgatgagattgcaacatttcaaactaaaattggaatgatggggtataaatttcaatttataactctagcaggtttccatacacaaaatattgctattttcgagctagcagaaaaatataaaaaggaaggtatgactgcttactcaagaatacaacaaaatgaatttgctagagaaaaagatggatataccagtgtaaaacaccaacgagaagttggcacttcttattttgatgcagtttccaatacaataagttctggaaagagctcaacaacagcaatggcaggctcaacagaatctgagcaattttaat

SEQ ID NO: 278530 - DNA, 807 bp, Unknown
  Bacterial polypeptide expressing nucleotide sequence isolated from the Sargasso Sea
aaaaaatccacgttggagtggaataagtaggaactataaagctgaagatgttgtaagtatacgaaactctttagagataaaatatactttagccgaaaatggagcgaacaatcttttcaatagtttaaacgaaaaagacggttggatatctgcactaggagcactttcaggaaaccaggctgtacaaatggtaaaagcgggcttaaaagctatttacttgagtggttggcaagttgctgcagatgctaatcttggtgaaactacatatccagatcaatctctttacccaagcaacagtgccccaaacctcgccaaaagaatcaacaatgcattattgagagcagagcaagtagatagagttgaaggaaaaaatgacatagattatcttgtaccaatcgttgctgatggcgaagcgggttttggcggaacattaaatgtgtttgaactaacgaagaagtttattgaagcaggtgcagcaggtattcattttgaagatcaacttgcagcagaaaagaaatgcggacatatgggcggcaaagttcttgtgccaacgagtcaacatattagaactttaacatctgcaaggcttgcagcagatactttaggtgtgcctactgtaataattgcaagaacagatgcgttagccgcgaacttgataacaagtgatattgatgaaactgacagtagctttgttcttggtgatagaacttccgaaggattttttaaagtaaaaaatggtccagaggctgctataagtcgcgggctttcttatgccccatattctgatttggtttggtgtgaaacggg

SEQ ID NO: 278531 - DNA, 679 bp, Unknown
  Bacterial polypeptide expressing nucleotide sequence isolated from the Sargasso Sea
atgtcagcagaaaatatttcatacgatttaaaaagatttgcaggaattaaacgtgattacaaacccgaggaaattgagagacttagaggctcaattaaaattgaatattctctgtgtaagcaacaatcgatgaagttgtggaatttgttaaatactgagccttatgtaaatacactgggctctttatctggaaaccatgctgttcaacacgcaaaagcaggactaaaggcaatttatttaagcggatggcaagtggctgctgatgctaatagtgctggtgaaatgtatccagatcaatctttatatccatatgatagtgctccaaaattagtagactctatgaataatgctctaattagagccgatcaaattcaacatatggaattacaagatggtgatatgaaaaaagaaaataaagttgattatatgttaccaattatagctgatggcgaagctggatttggtggacctctaaatgtttttgaacttgcaaaaaaatttattaaagctggagcagcaggtgttcactttgaagaccagttagctagtgaaaaaaaatgtggtcatatgggcggaaaagttttggttccaacaggaacaatgattaaaaatttaaaagctgctagactagcggctgatattgctgatgttccattaattattttagcaagaactgatg

SEQ ID NO: 278532 - DNA, 502 bp, Unknown
  Bacterial polypeptide expressing nucleotide sequence isolated from the Sargasso Sea
gacgggatagagcaggcaatttctagaggtcttgcttatgcaccatacgcagatttaatttggtgtgaaactgctactccaaatttagaagaggcaaagaaatttgctgatgctatacatgaaaaatttcctggtaaaatgttagcttataattgttcaccatcattcaattggaagaaacatttatctgatgaagaaattggatcatttcaaagaaagattggagaaatgggatataaatttcaattcattacattagcaggtttccacactcaaaacatcgcaatatttgaattagctgaaaaatataaatcagaaggtatgaccgcttactcaaaaattcaacaacatgaatttgctagagaaaaagatggatacactagtgtgaaacatcaaagagaagtaggtacatcttattttgatgcagtttcaaatacaataagttcaggtaaaagttcaacgacagcaatggaaggctcaactgagtcagaacagttttaga

SEQ ID NO: 278533 - DNA, 658 bp, Unknown
  Bacterial polypeptide expressing nucleotide sequence isolated from the Sargasso Sea
atgggaggaaaggttttagtaccaaccgggacaatgattaaaaacttgaaggccgcgaggttagccgcagatattgcagatgttccattaataattttagcaagaacagacgcaaacgcagcaaaattaattacaaatgatcacgatgaaaatgacaaaaaatttttaacaggagaaagatcacctgaaggtttttattatgttaaacatggaattgaccaagcaatttcaagaggtttagcttatgcgccttactcagatttaatttggtgtgaaacagcaactcctaatttagacgaagcgaaaaaatttgctgatgctattcacacaaaatatcctggtaaattactagcttataattgttcgccatcttttaattggaaaaaacatttatcagattctgaaatttcaactttccagcaaaaaattagtgaaatgggttataaatttcaatttattactttagctggttttcacacacagaatattgctatatttgaattagctgaaaaatataaaaaagaaggaatgacagcttattcaagaattcagcaacaagaattttcaagagaaaaagatggttatacaagtgttaaacatcaaagagaagttggtacttcatactttgatgctgtttcaaacactataagcggtggaa

SEQ ID NO: 278534 - DNA, 814 bp, Unknown
  Bacterial polypeptide expressing nucleotide sequence isolated from the Sargasso Sea
tatattgaagccggtgcttccggtgttcattttgaagatcagctagcttcagaaaaaaaatgtggccatatgggtggaaaagtactaattccggttaagcagcacatagcaaatttgaacgctgcaagattagcagcagatgtatcaggggttcccacgttaataatagcaagaactgatgctgagtccgctaaattgattacttctgacgtagatgaacgcgaccaaccttatttgaccggggaaagaactacagaaggattttacactttaactcaagaaagctcatttgatagatgtgtaactagaggtctagcatattctgagtatgctgatcttatatggatggaaacatccacacccaatttagatcaagctaaaaggtttgctgaggcaataagaggtaaatacccagatcaattattagcatataactgtagtccaagctttaactggacttcaaatttatctaaagacgatatagctaggtttcaaagggagcttggagcaatgggctataaattccagtttattacattagcaggatttcatactttgaattacagcatgtttgagcttgcccatggatacaaaaaaagaggcatgacagcatatagcgaagttcaggacgcagaatttgcagctgaagaaattggctacacggctcacaggcaccaaagagaagttggggctgggtggtttgacgcaatatcagtggctgttaagggcggctcctctgctacaacagcattgtcaggctcaactgaagaggatcaattccatggtgaaaaagtctctgatgctgctgaataag

SEQ ID NO: 278535 - DNA, 676 bp, Unknown
  Bacterial polypeptide expressing nucleotide sequence isolated from the Sargasso Sea
aatgattaaaaacttaaaagctgcaagattagccgctgatattgcaaatgttccacttattattttagctagaacagatgcgaatgctgctaaacttattactaacgatcatgatgaaaatgataaaccatttttaacaggtgaaagatcacctgaaggtttcttttatgtaaaacaaggtatcgagcaagctatatcaagaggtcttgcttatgcaccttattcagatttgatatggtgtgaaactgctactccaaatttagaagaagctaaaaaatttgcagatgcaattcatgaaaaatttcctggaaagttattagcatacaattgttctccttcatttaactggaaaaaacatttaaatgatgatgaaattgcttctttccaacaagaaatttctaaaatgggatataaatttcaatttataacattggctggtttccatactcaaaatattgctatctttgaacttgcagaaaaatacaaaaaagaaggaatggctgcatactctagaattcaagaacaagaatttgctagagaaaaagatggttatacaagtgtcaaacatcaaagagaagttggtacatcatatttcgattcagtttcaaatactattagcagtggacaaagctcaacaactgcgatggaaggttctactgaatctgaacaattttag

SEQ ID NO: 278536 - DNA, 749 bp, Unknown
  Bacterial polypeptide expressing nucleotide sequence isolated from the Sargasso Sea
ttttgaagatcaattagctagtgaaaaaaaatgtggtcatatgggtggtaaagtacttgtgccgacaagtactatgattaaaaatttaaaggctgcaagattggcagctgatattgctgatgtgccattaataattttagctagaacagatgcaaatgctgcaaaactaatcactaatgattttgatgaaaatgataaaccttttctaacaggtgaaagatctccagaaggattttattatgtaaaatcaggaattgaacaagctatttcaagaggattagcatacgctccatattcagatttaatttggtgtgaaacagctacaccaaatcttgaagaggctaaaaaatttgcagatgcaattcatgaaaaatttcctggaaaacttttagcatacaattgttctccatcgtttaattggaagaagcatttatcagataatgaaattgcctcattccaaaaagaaataagtaaaatgggttataaatttcaatttataacattagctggctttcatacacaaaatatcgcaatttttgaattagcggaaaaatacaaaaaagaaggtatggctgcttattctaagattcaagaacaagaatttgctcgtgaaaaagatggttacacaagcgtaaaacatcaaagagaagtaggtacatcttattttgatgctgtttctaatacaataagtagtggaaagagctcaactacagcaatggatggctcaaccgagtctgaacaattctaat

SEQ ID NO: 278537 - DNA, 697 bp, Unknown
  Bacterial polypeptide expressing nucleotide sequence isolated from the Sargasso Sea
aagttttagttccacaggcacgatgataaaaaatttaaaagcagcaagactcgcagcacatattgctgatgttcctttaattattttagctagaacagatgcaaatgcagcaaaattaattacaaatgatcatgatgaaaatgataaaccttttttaacaggcgaaagatctccagaaggtttttattatgtaaaatctggaattgaacaagcgatttcaagaggattagcttatgctccatactctgatttaatttggtgtgaaactgcaacaccaaatctagaagaagctaaaaaatttgctgatgcaattcaccaaaagtttcccggaaaacttcttgcatataattgttcaccttcgtttaactggaaaaaacatttatctgacgcagagattgcttcattccaagtagaaataagtaaaatgggttataaatttcaatttattactcttgctggatttcatacacaaaatattgcaatttttgaacttgcagaaaaatataaaaaagaaggcatgtctgcatactcaagaatccaacaacaggaatttgctcgtgagaaagatggctacacaagtgttaaacaccaaagagaggttggtacttcttattttgatgcagtatcaaatactattagttcaggcaaaagctccacaacagcaatggatggttcaacagagtctgagcaattttaa

SEQ ID NO: 278538 - DNA, 646 bp, Unknown
  Bacterial polypeptide expressing nucleotide sequence isolated from the Sargasso Sea
tatgacaaaaagtttctatgatttagttccttcagcgcctgaaggtcgctatgatggaattgatagaccatactcagttgaagaagttgaaagacttagagggtcatttcctattgaatatacattggctacaagaggatctaatagattatgggatttacttcattctgaagatcaagtctcatctttaggtgcgctctcaggtaaccaagctatgcaaatggttaaagctggcttaaaagctatttatctatctggatggcaagtcgctgctgataataatacagctggttctacatatcctgatcaaagtctttatcctgctaactcaggaccagagcttgcaagaaaaattaatagaactttacaaagagctgatcaaatagaacattctgaaggcggtgcccagagagaatggtttgcgccaattgttgcagatgcggaagcgggttttggtggtccactaaattgttacgaaattatgagagcatatattgaagcaggtgcttcaggtgttcattacgaagaccaacttgcctctgaaaaaaaatgtggtcacatgggtggtaaagttcttatacctaccaaacagcatgttagaaatttaaatgctgctagattagcagctgatgtatgcggtgtgcca

SEQ ID NO: 278539 - DNA, 787 bp, Unknown
  Bacterial polypeptide expressing nucleotide sequence isolated from the Sargasso Sea
aatgagcgcagaaaatatctcatacgatttaaaaagatttgctggaataaaaagagattatactcctgaagaagtagagagactaagaggctcaattaaaattgaatattctttatgcaaacaacaatctactaaattatggaatttattaaatttagaaccttatattaataccctagggtctttgtcaggaaaccatgcagttcaacatgcaaaagcaggtttaaaagcaatttatttaagtggctggcaagttgctgcagatgccaatagtgctggtgagatgtatcctgatcaatctttatatccttatgatagtgctccaaaattagtggaatctatgaacaatgctttaattagagcagatcaaattcaacacatggaaataaaagatggtgagatgaaagaagaaaaaaaaattgattatttgttaccgattattgctgatggtgaagcaggatttggtgggccattaaatgtttttgaacttgcaaaaaaatttattaaagcaggtgcagcgggggttcattttgaagatcaattagctagtgaaaaaaaatgtgggcatatgggtggtaaagtattagtaccaacaggtacaatgattaaaaatttaaaagcagcaagactagcagctgatatagctgatgttccattaattatattagctagaactgatgcaaatgcagcaaagttaattacaaatgatcatgatgataatgataaaccatttttaagtggtgaaagatcacctgaaggtttttattatgttaaagctgggaattga

SEQ ID NO: 278540 - DNA, 619 bp, Unknown
  Bacterial polypeptide expressing nucleotide sequence isolated from the Sargasso Sea
aatgtcagctgaaaatgtttcatacgatttaaaaagatttgcaggaattaaacgtgattataaacctgaggaaatagaaagacttagagggtcaattaaaattgagtactcgttatgtaaacagcaatcaattaagctgtggaaattactaaactctgaaccttacgtaaacactttgggatctttatccggcaaccatgctgttcagcatgcaaaagcaggattaaaggcaatttatttgagtggatggcaagttgctgctgatgccaatagcgcaggtgaaatgtatccagatcaatctttatatccttatgatagcgcaccaaaattagttgactcgatgaataatgctttaataagagcagatcaaattcaacatatggaaattcaagatggagatatgaaaaaagaaaataaaattgattatatgctaccaattattgcggatggtgaagctggatttggtggacctttaaacgtttttgaacttgcgaaaaaatttattaaagctggagcagcaggtgttcattttgaagaccagttagcaagtgagaaaaaatgtggtcatatgggtgggaaagttttagttcctacaggtacgatgataaaaaatttaaaa

SEQ ID NO: 278541 - DNA, 1303 bp, Unknown
  Bacterial polypeptide expressing nucleotide sequence isolated from the Sargasso Sea
atgaaggaagattttgaaaagcttaataatgctaaatcaggtagattcaaaaataaaaaaagagattacactgttgcagatgttaaaaagctctcaggatctgtcaaaattgaacatactctcgcacacagaggtgcgcaaaaattatggtcactacttcataatgaagattatgtaaatacattaggagctttaactggtaaccaagcgatgcaacaagtgcgtgcagggcttaaagcaatttatctttctggatggcaaattgctgcagataataatttggctggcggaatgtatcctgatcaatctatctaccctgcaaattctggtcctgagcttgtaaaaaaaattaatcgaacgctttccagagctgatgaaattgaagttatggaaaatggctcaccagaaagagattggtttgctccaattatagctgatgctgaagcaggatttggtggcgttttaaatgcattcgaaattacaagaaattatattgaagctggagcatcaggagtgcattttgaagatcaattagccgctgaaaaaaaatgtgggcatatgggtggaaaagtacttattccagtcaaacaacatatatcaaatttaaatgctgcaagacttgccgctgatatttctggaacaccaactttgataattgcgagaactgacgcagaatcagccaaattaattacttcagatgttgatgagagagacaaaccctatttaactggagaaagaactgctgaaggtttttatactttgacgcctgaaagttcttttgaacgatgcgtgactagaggaagggcttatgcagaatatgcagatttgatttggatggaaacttctacaccaaacttagatcaagcaaagaaattttcagaagctatacgaaaagaatatccagaccagttactagcttacaattgcagtccaagtttcaactggacagcaaacttaagtaaggatgacatagctcgttttcaaaaagaactcggagctatgggatataaatttcaatttattactctcgctggttttcatacattaaactacagcatgtttgaattagcccatggctataaaaagaaagggatgacagcctatagcgaacttcaggatgcagagttcttagctgaaaatattggttatactgctcataggcatcaaagagaagttggcgctggatggtttgatgctatatctgtagctgttaaggggggggcgtgttctacaactgctttatcaggttcaactgaggaagatcaattccatgaagaaactattgcagatgtcgctgaatagc

SEQ ID NO: 278542 - DNA, 821 bp, Unknown
  Bacterial polypeptide expressing nucleotide sequence isolated from the Sargasso Sea
cggttttggtggtgcgttaaatgcttatgaattatctcgtaatcttatcgaggcaggagcaggagctgtgcattttgaggatcaattatctgcagaaaagaaatgtggtcaccttggaggtaaagtcctgatatcgacaagccaagcaattagaaatttgaatgctgcaaggttggctgcagatgttgcaggtactgataccttgatcattgcaagaacagatgctgaggcagcaaaacttctcatgaccgatgtggatgacattgacaaaaagtacatgacaggtgagaggacctctgaaggtttttatcaaatcacaggtggactagatatgggctgtgacagaggacaggcttttgctgaatatgctgatctggtttggtgtgaaacttctaaaccttgcttgaaagacgcaaagaaatttgcagatgcagttcgtggagctcaccctgatcagttattggcatataactgctcgccaagttttaattggaagcagcatatcccatctgagactgaattagctgagtttcaaaaagagctcgggaaaatgggctttaaatttcaattcattacacttgctggatttcattctacaaactttgctgtctttgattttgctagagagtataagaaattaggcatgttggcttatagtaagcttcaggaaaaggagttcgattatcaacagtatggtttcacgactgttaagcatcaggcagaagttggcgtcggttactttgatgcaatcagccaagcagttggtgcagacagtgttgctgcattagcagattcaaccgagagtgagcaatttgggtaaa

SEQ ID NO: 278543 - DNA, 682 bp, Unknown
  Bacterial polypeptide expressing nucleotide sequence isolated from the Sargasso Sea
aatgagtgcagaaaatatatcttatgatttaaaaagatttgctggaataaaaagagattacacaccagaagaagtagagagattaagagggtcagttaaaattgaatattcattgtgcaaacaacaatcaacaaaattatggaaactactaaatacagaaaattatgttaacactttaggatctttgtcaggcaaccatgctgttcaacatgctaaagcaggtttaaaggcaatctatttaagtggatggcaagttgctgctgatgcaaacagtgctggggaaatgtacccagatcaatcattatatccttatgacagtgctcctaaattagtagagtcaatgaataatgcattaattagagctgatcaaattcaacacatggaacttttagatggagacatgaaaaaggaaaaaagagtagattacatgcttccaattatagctgatggtgaagcaggttttggaggacctttgaatgtatttgaattagcaaaaaaatttattaaagctggagctgcaggtgttcactttgaagatcaattagcaagtgaaaaaaaatgtggtcatatgggtggaaaggtacttgtgccaacaagcactatgattaaaaatttgaaagctgcaagattagctgcagatattgctgatgttccgcttataatattagcgagaacagatgct

SEQ ID NO: 278544 - DNA, 574 bp, Unknown
  Bacterial polypeptide expressing nucleotide sequence isolated from the Sargasso Sea
aatgaagttagctgaacaagtagcttctctcgagaaggattgggctgaaaacccaagatggaaacacgtaaaaagaccttattctgcagaagaagttgtcaaattgagaggttctctgcaacctgaaagcactcttgcaagaaaaggtgctgaaaagctttggaaatatttagagactgaagaatacataaattgcttgggtgctttaactggcggacaggctgtgcaacaagttaaagccggtgtaaaggcaatatatctttcaggatggcaggttgctgctgataataattctgctgaaacaatgtatccagatcaatcactttatcctgtcgattcagtgccaaatgtaattactagaattaataatgctttcagacgtgccgaccaaattgaatggatgaacacaaatggtgaaccaaagtttgatttttttgcacctattattgctgatgcagaagcaggttttggaggtgtattaaatgcctttgaattaatgaagcgaatgattcgtgccggagctgcaggagttcattttgaagatcaacttgctagtgtaaagaaatgtggtcat

SEQ ID NO: 278545 - DNA, 476 bp, Unknown
  Bacterial polypeptide expressing nucleotide sequence isolated from the Sargasso Sea
aatgaatttaaatgaacaggtattagaattaaaaaacgattgggaaatgaacgaaagatggtcttatgtcaaaagaccatattctgctgaagaagttgtaaagttaagaggttcactccagccagaatatactttggcaagaattggtgctgaaaaactttggaatatgcttcataaagaagactatgttcattgcttaggtactttaacaggtggacaggcagtgcagggtgtaaaagctggtgcaaaagcgatatatgtgtctggatggcaagtggcagcagacaataacagtgctgaagcaatgtatcctgatcaatcattatatcctgttgattcagttccatctttagttaaaagaattaatagttcttttaaaagagctgaccaaatagaatggatgagttccaatggtaaaccgaaatttgacttttttacgccaatagtagctgatgcagaagctggttttggtgggg

SEQ ID NO: 278546 - DNA, 472 bp, Unknown
  Bacterial polypeptide expressing nucleotide sequence isolated from the Sargasso Sea
gcttgcttatgcaccttactcagacttaatatggtgtgaaacagcaacacctaatcttgcagaagcaaaaaaatttgctgatgcaattcatgaaaaatttccaggaaaattattagcttataattgttcaccatcttttaattggaaaaaacatttaagtgatgatgaaattgcttcattccaaaaagagataagtaaaatgggttataaattccaatttattactcttgctggatttcatactcaaaacatcgctatttttgaacttgcagaaaaatataaaaaagaaggtatggctgcttactctaaaattcaagaacaagaattttcacgagagaaagatggttatacaagtgttaaacatcaaagagaagttggcacttcatatttcgatgcagtttcaaatacaataagtagtggaaaaagctcgacaacagcaatggctggctctactgaatctgaacaattctaa

SEQ ID NO: 278547 - DNA, 459 bp, Unknown
  Bacterial polypeptide expressing nucleotide sequence isolated from the Sargasso Sea
cttattcagatttaatttggtgtgaaactgcaactcctaatcttgaagaagctaaaaaatttgctgatgcgattcatgaaaaattccctggaaagcttctagcttataattgttcaccttcatttaattggaaaaaacatttgtccgatagtgagatttctacttttcaacaagagataagtaaaatgggatataaatttcaattcattacattagctggatttcatactcaaaatatcgctatttttgaattagctgaaaaatataaaaacgaaggcatgacagcttattcaaaaattcaagaacaagaatttgctcgtgagaaagatggttacacaagtgtcaaacatcaaagagaagttggtacttcttattttgatgctgtttctaacactataagcagtggtaagagttcaacaacagcgatggcaggttcaaccgagtccgagcaattctaaa

SEQ ID NO: 278548 - DNA, 432 bp, Unknown
  Bacterial polypeptide expressing nucleotide sequence isolated from the Sargasso Sea
ctgctcaaccaaatcttgaagaagctaaaaaattggcagatgcaattcattctaagtttccaggtaaattacttgcttacaattgttctccatcatttaattggaaaaaacatttgtcagatgaagagatagcatcattccaagttaagattagtgaaatgggatacaaatttcaatttattactttagctggttttcatacacaaaaccttgccatttttgaattagctgaacaatacaaatcagatggtatgtcagcctattctaagatacaggaaaaagagtttgctagagaaaaagatggttatacaagcgtgaagcatcaaagagaagttggtacttcttattttgatgcggtatcaaatactattagttctggcaaaagttctactactgctatggaaggttcaacagaatcagaacaattttaat

SEQ ID NO: 278549 - DNA, 673 bp, Unknown
  Bacterial polypeptide expressing nucleotide sequence isolated from the Sargasso Sea
aatgccaaaatctaatgtttcttatgatataaaaaggttttctggcattaagagagattacaaagaagaagaagttgagagattaagaggatcaataaaaatccactattcgatgtgtgaacatcaatcaaaaaaattatggaatttactaaatacagaaccatatgtgaatacacttggatctttatcaggcaatcattccgtacagcatgctaaagcaggtttgaaagctatctatgtcagtggatggcaagttgctgctgatgcaaatacagctggagagatgtaccctgaccaatcattatatccttttgatagcgctcctaaattagttgattctataaacaatgcactagtaagagcagaccaaattcaacatatggaaattaaagatggtgacatgaaaattgaggataaagttgattatatgttgccaataatagctgatggtgaggcaggatttggaggaccgttaaatgtttttgaattaacaaaaaaatttattaaagctggtgcagcaggtgttcatttcgaagatcaactagctagtgaaaagaaatgtggacatatgggttgtaaagtattgataccgacatccacagcagtaagaaatttgaaagccgcaagactagcagcagatattgcagatgtacctttaataattttagctaga

SEQ ID NO: 278550 - DNA, 592 bp, Unknown
  Bacterial polypeptide expressing nucleotide sequence isolated from the Sargasso Sea
atgagttcggaagcaaaagtttcttatgatttaaaaagatttgcaggaattaaaagagactacactccagaagaagttgaaagattgagaggatcaattaaaattgagtactctctttgtaagctacaatctgaaaaactatggaaattgcttaacacagaagcatatgtaaatactttgggatctttgtcaggtaaccacgcagttcagcatgctaaagcaggtttaaaagcaatatatttaagtggctggcaagtagcagcagatgctaatagtgcgggagagatgtatcctgatcaatcattatacccgtatgatagtgcaccaaaattagtagagtctatgaacaatgcccttattagagctgaccagattcagcatatggaaattaaggatggcgatatgaaagagaaggataaaacggattatatgcttccaataatagcagatggagaagcaggttttggtggaccattaaatgtttttgaacttgcaaaaaaatttattaaagctggagcagcaggagttcacttcgaggatcaattagctagcgaaaaaaaatgtggtcatatgggaggtaaagttttagttc

SEQ ID NO: 278551 - DNA, 546 bp, Unknown
  Bacterial polypeptide expressing nucleotide sequence isolated from the Sargasso Sea
tcttaactggcgaaagatcaccagaaggtttcttttatgtaaaagatgggattgagcaagcaatttctagaggtctagcttatgcaccatacgcagatttaatatggtgtgaaacagcaactccgaatttagaggaagcaaagaaatttgctgatgcaattcacgaaaaatatcctggtaagatgttagcttataattgttcaccatcatttaattggaagaaacatttgtcagatgaggaaattggatcattccaaagaaaaattggagaaatgggttacaaatttcaatttatcacacttgctggttttcatacacaaaatattgcgatatttgagttagcagaaaaatataaaaaagaaggaatgactgcatactctaaaattcaacagcatgaatttgcaagagaaaaagatggatatactagtgtaaaacatcaaagagaagtaggtacatcttattttgatgctgtttcaaatacaattagttcaggtaagagttctaccacagcaatggaagggtcaactgagtcagagcaattttaaa

SEQ ID NO: 278552 - DNA, 468 bp, Unknown
  Bacterial polypeptide expressing nucleotide sequence isolated from the Sargasso Sea
catatgcaccttattcagatttaatttggtgccatacggcaacaccaaaccttgaagaagcaaaaaaatttgctgatgcaattcacgaaaaatttcctggaaaacttttagcttacaattgttcaccatcttttaattggaaaaaacatttatcggatactgaaataggttcttttcaaaaagagataagtgctatgggttataaatttcaatttattacacttgctggatttcatacacagaatattgcaatttttgagcttgctgaaaaatataaaaaagaaggtatgtctgcttattcaaaaattcaagaacaagaatttgctcgtgaaaaagatggttatactagtgtaaaacatcaacgagaagttggtacatcttattttgatgcggtgtcgaatacaataagtagtggtaaaagttcaaccacggcaatggaaggctcaacagagtctgaacaattctaat

SEQ ID NO: 278553 - DNA, 898 bp, Unknown
  Bacterial polypeptide expressing nucleotide sequence isolated from the Sargasso Sea
tacgacttaaaaagatttgctggaataaaaagggactacactgatgaggaagttgaaagattaagaggctcaattaaaattgaatattctttgtgtaaaaaccaatctcaaaaactttggaaattattaaattctgagccatacgtgaacacacttggctctttgtcaggtaatcaagcagtacaacatgcaaaagccggtttaaaagcaatttatttaagcggatggcaagttgctgctgatgcaaacacagctggcgaaatgtacccagatcaatcattatatccttatgacagtgcaccaaaattagttgagtctatgaacaactctttaatcagagctgatcaaattcaacatatggaaatgcaagacggtgatatgaaaaaagaagatagaacagattacatgttgcctattattgctgatggtgaagctggatttggtggtccattaaatgtgttcgagttaactaaaaaatttataagagcaggtgctgcaggtgtgcactttgaggaccaactagctagtgaaaaaaaatgtggtcatatgggtggtaaagttttggtgccaacaggaacaatgataaaaaatctaaaagctgcaagattagctgctgatattgcagaagttccattaattattttagctagaactgatgcaaatgctgcaaaactaattacaaatgattttgatgaaaatgataaaccatttttaacaggtgaaagatctcctgaaggtttcttttatgtaaaggatggaattgaacaagctatctctagaggtttagcttatgccccttatgctgatttaatttggtgtgagactgcaacacctaatttatctgaagctaaaaagtttgctgatgctatacatgaaaaattttctggaaaacttttag

SEQ ID NO: 278554 - DNA, 727 bp, Unknown
  Bacterial polypeptide expressing nucleotide sequence isolated from the Sargasso Sea
agaaaaaaaatgtggacacttaggaggaaaagtcttagtaccaacagcaacttttgagagaactcttaattctgctagactagctgcagatgtgatgggcgttccaacattaataatggctagaactgatgctgaagctgcaagattaatcactagtgatattgatgagagagatcatccgttcttaactggtgaaagaactactgagggtttctatagaatgactggtggaatagattgtgcaatcgcaagaggcatagcctatgctccttatgctgatttagtatggtgtgagactgctactccagatttagctgaagcaagaaaatttgcagaagctcttaaaaaagagcaccctgatcaaatgcttgcgtataattgttctccatcttttaattggaaaaaacacctagatgaagctcaaatgaaagttttccaaaaagaaatagctgcaatgggatataaattccaatttattacgttagcaggttttcataatttaaactactcaacatttaaattggctgaagcttataaagaaaatggtatggctgcgtattctgaacttcaacagaaagaatttggtgctgaaaaagatggttattcagcaactaaacaccaaagagaagtcggtgtttcttattttgatgcagtatctaatgcagttaccaaaggtcaatcggctactactgcaatggatgattcaactgaaacggatcaattttaa

SEQ ID NO: 278555 - DNA, 917 bp, Unknown
  Bacterial polypeptide expressing nucleotide sequence isolated from the Sargasso Sea
agaagcctatgttaacacccttggatcactttcaggaaatcatgcagtacaacatgcaaaagctggtttaaaggcaatttatttaagtggttggcaagttgcggctgatgctaacagtgctggagaaatgtatcctgatcaatctttatatccatatgatagtgcaccaaaattagtcgagacaatgaataattccctaatcagagctgatcaaattcagcatatggaaataatagatggtgatatggataaagataagagaaccgattacatgttgccaattatagctgatggtgaagcaggatttggtggaccactaaatgtatttgaattaaccaaaaaatttattagagcgggtgctgccggggttcactttgaagaccaattagctagtgagaaaaaatgtggtcatatgggtggaaaagttcttgtaccaactggaacaatggttagaaatttaaaggctgcaagactcgccgctgatattgcagatgtaccattaataattttagcaagaacagatgcaaatgcagcgaagctaatcactaatgattttgatgaaaatgataaaccatttttaactggcgaaagatcacctgaaggtttcttttatgttaaagatggaatagagcaagcaatttccagaggtcttgcttatgcaccatacgcagatttaatttggtgtgaaaccgctactccaaacttagaagaagcaaagaaatttgcagatgcgatacatgaaaaatttcctggtaaaatgttagcttataattgttctccatcatttaattggaagaaacatttatctgatgaagaaattggatcatttcaaagaaagattggagaaatgggatataaatttcaattcattacattagcaggtttccacactcaaaacatcgcaatattgaattagc

SEQ ID NO: 278556 - DNA, 811 bp, Unknown
  Bacterial polypeptide expressing nucleotide sequence isolated from the Sargasso Sea
tagtgcacctaaattagtagaatctatgaataatgctttaataagggctgatcaaatccaacatatggaattaaaagatggtgacatgaaaaaagataaaagaattgattatatgttaccgattattgctgatggtgaagctggctttggtggacctttaaatgtattcgaacttgcaaaaaaatttatcaaagctggtgcagctggtgttcattttgaagatcaattggcaagtgaaaaaaaatgtggtcatatgggtggtaaagttttagttccaactggtaccatgatcaaaaatttaaaagcagctagattagcagctgatattgcagacgtaccattaataattttagcaagaactgatgctaatgctgcaaaattaatcacaaatgattacgatgaaaatgacaaaccttttttaactggtgaaaggtcaccagaaggtttccattatgtaaaagctggtattgaacaagcaatatcaagaggtctagcttatgcaccctattctgatttgatttggtgtgaaacagcaactcctaatttagaagaggctaaaaaatttgctgatgcaattcatgagaaatttccaggtaaacttttagcatataattgttcaccgtcttttaactggaaaaaacatttgtctgatgctgagatagcgtcttttcaaaaagaaattagtgcaatgggctataaatttcaatttataacacttgctggatttcatacacaaaatattgcaatttttgaactagctgaaaagtacaagaaagaaggtatggctgcttactcaagaatacaagaacaa

SEQ ID NO: 278557 - DNA, 841 bp, Unknown
  Bacterial polypeptide expressing nucleotide sequence isolated from the Sargasso Sea
aaagctggtttaaaagcaatttatttaagtggttggcaagttgcagctgatgctaacagtgctggagaaatgtatcctgatcaatctttatatccatatgatagtgcaccaaaattagttgaaacaatgaataattctctagtaagagctgatcaaattcaacatatggaaatgatagatggtgatatggataaaagtaagagaactgattacatgttgccaatcatagctgacggtgaagcaggatttggtggtccactaaatgtatttgaattaaccaaaaaatttatcagagcaggtgctgcaggggttcactttgaagaccaattagctagtgagaaaaaatgtggtcatatgggtggaaaagttcttgtgccaactggaacaatggttagaaatttaaaggctgctagacttgctgctgatattgcagatgtaccattaataattttagcaagaacagatgcaaatgctgcaaaattaatcacaaatgattttgatgaaaatgataaaccatttttaactggcgaaagatcccccgaaggtttcttttatgttaaagatggaatagagcaagcaatttctagaggtcttgcttatgcaccatacgcagatttaatttggtgtgaaaccgctactccaaatttagaagaagctaagaaatttgctgatgctatacatgaaaaatttcctggtaaaatgttagcttataactgttctccctcatttaattggaagaaacatttatccgatgaggaaattggatcatttcaaagaaagattggagaaatgggatataaatttcaattcattacattggcaggtttccatactcaaaaca

SEQ ID NO: 278558 - DNA, 838 bp, Unknown
  Bacterial polypeptide expressing nucleotide sequence isolated from the Sargasso Sea
agaggatccattaaaattgagtattcaatgtgtaaacagcaatctcaaaagctctggagattgttaaatacagagccatatgtaaacacacttgggtctttgtcgggaaatcaagccgttcaacatgcaaaagcaggtttaaaagcgatctatttaagtggttggcaagttgcagcagacgcaaacagtgctggtgaaatgtatcctgatcaatctttatatccttacgacagcgcacctaaattagttgagtctatgaataattctttaattagagctgatcaaattcagcatatggaaatagcagatggagatatgaatagcagcgaaagaactgattacatgttgccaattattgccgatggtgaagcaggatttggtgggccattaaatgtatttgagctaacaaaaaaatttataaaagctggcgctgccggagttcattttgaagaccaactagctagtgaaaaaaaatgtggacatatgggtggtaaggtacttgttcctactggaaccatggtccgaaatctaaaagcagcaagattggcagctgatattgccgacgtacctctcattattcttgcaagaacagatgccaacgctgcgaaactaataacaaatgattttgatgaaaatgacaaaccgtttttaacaggagaaagatcacctgaaggcttttattatgtaaaagatggtattgatcaagcaatctcaagagggttagcttatgcaccttatgcggatttaatatggtgtgaaactgcaacacctaatttagaagaagcaaaaaagtttgctgatgcaatacatgcaaaatttcctggcaagatgttggctt

SEQ ID NO: 278559 - DNA, 634 bp, Unknown
  Bacterial polypeptide expressing nucleotide sequence isolated from the Sargasso Sea
catggaggcgaaaaatagaacagattatatgctgccgattatagcagacggagaggcaggttttggtggaccattaaatgtttttgaactaactaaaaaatttattaaagcaggtgctgctggtgttcattttgaggatcaattagctagtgaaaaaaaatgtggtcatatggggggtaaagttttagtgccaacaggaactatggttaaaaatttaaaggcagcaagacttgctgctgatattgctgacgtgcctttaattattttagcaagaacagatgctaatgcagccaaattaattacaaatgatttcgatgaaaatgataaacctttcctaacaggtaaaagatcccctgagggtttcttttatgtaaaagatggtattgaacaagcaatttctcgaggtctagcatatgcaccgtatgctgacttaatatggtgtgaaacagctactccaaatttggaggaagctaaaaaatttgcagatgctattcatgaaaaatatcctggaaaacttctagcttataattgttctccatcttttaattggaaaaaacatttaaacgatgatgaaatagcttctttcaaaaagaaatttgctaaatgggatacaaatttcagttttatacattag

SEQ ID NO: 278560 - DNA, 845 bp, Unknown
  Bacterial polypeptide expressing nucleotide sequence isolated from the Sargasso Sea
agaggttatggtgcagaggatgtggtcaaattacaggggtcagttgtgcacaaacattcgttagcggaaaacggcgcgaaaaaattgtggaaacttgtcaatgaggagccctttataaatgcactcggtgcattaagtggtaatcaagctatgcagcaagcaaaggcaggtctgaaagcggtgtatctgtccggttggcaggtcgcaggtgatgcaaacaatgcaggagaaatgtaccctgatcagtcactatatcctgttagttcagttcctgatgttgtaaggagaataaataatgcgttaacaaggtgtgatcaaatccaatggatggaaggcaacaatcctgctgactcagattttatagattattttttaccaattgttgctgacgcggaagcagggtttggaggtgttttgaatgcgtttgaactaatgaaagcgatgattaatgcaggagcggcgggtgttcattttgaggaccaattagcttctgttaagaaatgtggtcacatgggtggtaaagttttagttccaacaagagaagccgttgcaaagttgatagctgctagattgtcagcggatgtattgggggtaccgactttgatttttgctaggactgatgctgaagccgcggacttactaacctcggatgttgatgataacgacaaacctttttgcacgggagaaagaacggttgaaggcttctatagaactaagtcaggattcgatcaggcggtctcgaggggattagcttatgctccttacgccgatttaatttggtgtgagacaggcaagcccgatcttgagtttgctaagaactttgctgaggcgatacacaaggaatt

SEQ ID NO: 278561 - DNA, 877 bp, Unknown
  Bacterial polypeptide expressing nucleotide sequence isolated from the Sargasso Sea
tctggaaaccatgctgtgcaacatgcaaaagctgggttaaaagctatttacttaagtggatggcaagttgcagctgatgctaatagtgctggtgaaatgtatccagaccaatcattatatccttatgacagtgcaccaaaattagtagagtcaatgaataacgctttaattagagcagatcaaattcagcatatggaaattaaagatggtgatatgaaaaaagaaaaaaaagttgattatatgttaccaataattgctgatggcgaggcaggatttggtggaccattaaacgtgtttgagctagcaaaaaaatttataaaagcaggtgctgctggtgttcattttgaagaccaattggctagtgaaaaaaaatgtggtcacatgggtggtaaagttttggtaccaacaggcacaatgattaaaaatttaaaagcagcaagacttgctgctgatattgcggatgtgccattaattattttagctagaactgatgctaatgcggcaaaactaattactaatgatcatgatgaaaatgataaaccatttttaactggtgaaagatcaccagaaggtttctactatgtaaaatcaggaatagatcaagcaatctctagaggcttagcatatgctccttattctgatttaatttggtgtgaaactgctacgccaaatttagaagaagctaaaaaatttgccgatgcaattcatgaaaaatttcctggaaaacttttagcttacaattgctcaccatcttttaattggaaaaaacatttatcagatgaggaaatagcttcatttcaacaagaaataagtaaaatgggttataagtttcagtttattactctagcaggatttcatactcaaaatattgcaattt

SEQ ID NO: 278562 - DNA, 898 bp, Unknown
  Bacterial polypeptide expressing nucleotide sequence isolated from the Sargasso Sea
aaaggcaggattaaaagcaatttacttaagtggatggcaggttgcagcagacgcaaatagcgctggagagatgtatccagaccaatcactttatccctatgatagtgcaccaaaacttgtcgaagcaatgaataactcattgatcagagctgatcaaattcagcatatggagttgttagacggagatatgaaaaaagaaaattctattgattatatgttgccaataattgctgatggagaagcaggatttggcggtccattaaacgtatttgaattaacaaaaaaattcattaaggcaggtgcggcaggtgttcattttgaagatcagctcgctagtgaaaaaaaatgtggtcatatgggcggtaaagttttagttccaacaggtacaatggttagaaacctgaaagcagcgaggttggcagctgatattgctgatgttcctctcattatacttgcaagaacagatgccaatgctgctaaattaatcacaaatgattttgatgaaaatgataaaccatttttaacaggcgagagatcacctgaaggtttttattacgtaaaggatggaattgagcaagctatttctagaggtctagcttatgcgccatatgcagatcttatttggtgtgaaacagcaacgccgaatttaaaagaagcaaaaaaatttgctgatgctattcacgaaaaatttccaggtaaattattagcctacaactgttcaccatcatttaattggaaaaaacatttgtcagatgatgaaattgcatctttccaacaagaaattggaaaaatgggttataaatttcaattcataactttagcaggttttcatactcagaatattgcaatatttgagcttgcagaaaaatataaattaaaggggatgagcgcttattcc

SEQ ID NO: 278563 - DNA, 784 bp, Unknown
  Bacterial polypeptide expressing nucleotide sequence isolated from the Sargasso Sea
atggaaataaaagatggagaaatgaaatcaaaagatagagtagattacatgctaccaattattgctgatggcgaggcaggctttggtggacctttaaacgtttttgaactagctaaaaaatttattagggctggagctgcaggagtacattttgaagaccagttagcaagtgaaaaaaaatgtggtcacatgggtggtaaagttttagtgcctacaggcacaatgattaaaaatttaaaggctgcaagactagctgcagacattgctgatgttcctttaataattttagctagaacagatgccaatgctgcaaaactaattacaaacgaccatgatgaaaatgataaaccttttttaacaggagaaagatctcccgaaggtttttactacgtaaaacatggaattgagcaagcaatatctcgaggattagcatatgcgccttactcagatttaatatggtgtgaaacagcaacacctaatttggaggaggctaaaaaatttgctgatgcaatacattcaaaatatcctggaaaactattagcttataattgctccccgtcttttaattggaaaaaacatttatcagatgcggaaatatctacattccaacaaaaaataagtgaaatgggatataagtttcaatttataacgcttgcaggatttcatgcccagaatattgcaatatttgagttagctgaaaaatataaaaaagaaggtatgacagcatattcaagaatacaagatcaagaatttgcaagagaaaaagatggttacactagttaaa

SEQ ID NO: 278564 - DNA, 919 bp, Unknown
  Bacterial polypeptide expressing nucleotide sequence isolated from the Sargasso Sea
tctctttctggaaatcatgctgtgcaacatgcaaaggctggcttaaaagcaatttacttaagtggttggcaagttgcagctgatgctaatagtgctggtgaaatgtatcctgatcaatctttatatccttatgatagtgcaccaaaattagttgaatctatgaacaatgcgttaataagagcagatcaaattcaacatatggaaattaaagatggtgatatgaaaaaagaaaaaaaagtagattacatgttaccaattattgctgatggggaagcaggttttggtgggccattaaatgtatttgaacttgcaaaaaagtttattaaagcgggtgctgctggagttcactttgaagatcaattggcaagtgaaaaaaaatgtggtcatatgggtggtaaggtgttggtaccaacaggaacaatgataaaaaatttaaaagctgcaagattagcagctgatatagcagatgtacctttgataattttagcaagaactgacgccaatgctgcaaaacttattacgaatgaccatgatgataatgacaaaccatttctctcaggtgaaagatctcctgagggattttattatgttaaagcaggtattgatcaagcgatatctagaggattagcatatgcaccttattcagatttaatatggtgtgaaactgcaacacctaatcttgaagaagcaaaaaaatttgcaaatgctattcatgaaaaatttccaggaaaacttttagcatataattgttcaccttcatttaattggaaaaaacatttatctgataaagagattgcttcattccaacaagaaataagtaagatgggatataagtttcaatttataactcttgcgggatttcatactcaaaatattgcaatttttgaattagcagaaaaatataagaaagaaggtatgt

SEQ ID NO: 278565 - DNA, 868 bp, Unknown
  Bacterial polypeptide expressing nucleotide sequence isolated from the Sargasso Sea
ttcaatttgtaaacaacaatcaacaaagctttggaaattattaaacacggaaaattatgttaatactttagggtccttgtcaggtaatcatgcagttcaacatgcaaaagctggtttgaaggcaatttatttaagtggttggcaagtagcagcagatgctaatagtgctggagaaatgtatcctgaccaatctttgtatccttatgatagtgctcctaaattagtagaatcaatgaataacgcgttaattagagctgatcagattcaacatatggaattaaaagatggcgatatgaaaaaagagaagagaattgactatatgctaccgatcattgctgatggagaagcaggttttggtggacctttgaatgtatttgaacttgcaaaaaaatttattaaagcaggtgctgctggtgttcattttgaggatcaattagcaagtgaaaaaaaatgtggtcatatgggaggaaaagttttagttccaactggtaccatgataaaaaatttaaaagctgctagattggcagccgatatcgcagatgtgcctttaattattctagctagaacagacgcaaacgctgcaaaattaattacaaatgattacgatgaaaatgacaaacctttcttaacaggtgaaaggtctccagagggtttctattatgtaaaagccggcattgaacaagctatatcaagaggtcttgcttatgcgccctactcagatttaatttggtgtgaaacagctacgccaaatcttgaggaagcaaaaaaattcgcagatgcaattcatgaaaaatttccaggaaaacttttagcatataattgttctccatcatttaattggaaaaacatttatcagatgacgagatag

SEQ ID NO: 278566 - DNA, 784 bp, Unknown
  Bacterial polypeptide expressing nucleotide sequence isolated from the Sargasso Sea
tatgaaagccatgattaaagcaggagctgcaggagttcactttgaagatcagttagctagtgtcaaaaaatgtggtcatatgggtggtaaagttcttgtgccgactcaagaagcaataaataaacttgtggcagcgaggttggcggcagatgttttaaacgttccaacgcttttagtggcaagaacagatgctaatgcagccgagctacttacttctgatgttgatgaaagagatgctgagtttgttactggagaaagaacatctgaaggtttttacagagtaaaggcaggtattcagcaagcaatttctagaggtctttcatatgctccgtattctgatttattatggtgtgaaacaggaaaacctaacctagaagaagcaaaactatttgctgaatcaataaaaaaagatcatcctgaattaatgttagcttataattgttctccttcatttaattggagaaaaaatcttgatgattctacaatagctaagttccaaaaagagcttggagcaatgggttataagttccaatttattacgcttgccggaattcattcaatgtggcatggtatgtttgatttaacaaaaaattatgtcaaatctggcatgtctgcttatgtagaattacaagaaaaagaatttgctgaccatgataaaggatatactttttccgcacaccaacaagaggttggtacaggctactttgatgcagtaaataattgtatcgttggagatccttcaacaagtgcgatggatggttctacagaagaagaacagttttaa

SEQ ID NO: 278567 - DNA, 841 bp, Unknown
  Bacterial polypeptide expressing nucleotide sequence isolated from the Sargasso Sea
aaaaggggctatgttaatagcttaggtgcattaactggtggtcaagcaatgcaacaagtaaaagctggtattgaggcaatttatttatcgggatggcaagttgcagcagatgcaaatacttcagaaacaatgtaccctgatcagtctttatatgcttatgattctgttcctgcagtggttagaagaattaataataattttaagagggcagatgaaattcaatgggcaaaagatataaatcctggcgataaagaatatgtcgattattttgctcctatagttgctgatgcagaagcggggtttggtggtgtgcttaacgcttatgaattaatgaagaatatgattaccaatggtgctgctggagttcatttcgaagaccaactagcagctgcaaaaaaatgcgggcatatgggtggtaaagttttagtccccactcaagaagcagttcaaaaacttattgctgcaagacttgcatcagatgttatgggtgttccaactcttttattagcgagaacagatgcagaggcagcaaatctaattacttctgatgcagatgattatgacaaaccatttctaactggagaaagaactgacgaaggattttttagaacaaaaaatgggattgatcaagctatatcaaggggtcttgcttatgctccgtacgcagatttaatatggtgtgaaacaggaactccagatttagactttgcaagaacttttgcagaagctataagagcagaataccctgaccaattgttagcttataattgttcgccttcatttaattggaagaaaaatcttgatgacgcaaccatagctaaattccaagacgaattaagcg

SEQ ID NO: 278568 - DNA, 907 bp, Unknown
  Bacterial polypeptide expressing nucleotide sequence isolated from the Sargasso Sea
cctgaaggtcgctatgatggaattgatagaccatactcagttgaagaagttgaaagacttagagggtcatttcctattgaatatacattggctacaagaggatctaatagattatgggatttacttcattctgaagaccaagtctcatctttaggtgcactctcaggtaaccaagctatgcaaatggttaaagctggcttaaaagccatttatctatctggatggcaagtcgctgctgataataatacagctggttctacatatcctgatcaaagtctttatcctgctaactcaggaccagaacttgcaagaaaaattaatagaactttacaaagggctgatcaaattgagcattctgaaggcggagctcaaagagaatggtttgcaccaattgttgccgatgcggaagcgggttttggtggtccactaaattgttatgaaattatgagagcatatattgaagcaggtgcttcaggtgttcattacgaagaccaacttgcctctgaaaaaaaatgtggtcacatgggtggtaaagttcttatacctaccaaacagcatgttagaaatttaaatgctgctagattagcagctgatgtatgcggtgtaccaacattaatagttgctagaactgatgctgaaagcgctaagcttatcacatctgatgcagatgaaagagatcatgaatttattgatgcatccgatagaacacctgaaggattctatagattaaaagatggcacaggggttgataattgtattaaaagagctcttgcttacgctccttatgcagatttaatttggatggagacatcggtgccaagtcttgaaatagcaaaacagttttctgatgcagtaaaaaaggaatttccaaatcaaatgttagcctataactttctccaagctttaa

SEQ ID NO: 278569 - DNA, 837 bp, Unknown
  Bacterial polypeptide expressing nucleotide sequence isolated from the Sargasso Sea
attggttgaggctatgaataatgctttactaagagctgaccaaattcagcatatggaaattaaagatggtgatcaaaagaaagagaaaagaatagattacatgcttccaataattgctgatggagaagctggattcgggggaccattaaatgtttttgaattgactaagaaatttataaaggctggagcagccggggttcactttgaagatcaattagcaagtgaaaaaaagtgtggccatatgggcggcaaagttttaataccaacaagccaagcagtaaaaaatttaaaagccgcaaggttagcagctgatatagctgatgttccattgataattctcgctagaactgatgcaaacgcagcaaaacttatcacaaacgatcacgatgaaaatgacaaacctttcttgacaggtgaaagatcccctgagggattttactatgttaaatctgggattgatcaagcaatttcaagaggtcttgcttatgcaccatattcagatcttatatggtgtgaaactgcaacaccaaatttagaagaagcaaaaaaatttgctaatgctatacacaaaaaatatcctggaaaattattagcgtataattgctcaccatcttttaattggaaaaaacatctttctgataatgaaattgcaactttccaaaaaaaaattagtgaaatgggttataaatttcaatttattactttagcaggatttcatactcaaaacattgcaatatttgagttagcggaaaaatacaaagcagaaggtatgacggcctattcaaaaattcaggaacgtgaatttgcgagagagaaagatggatatactagcgttaa

SEQ ID NO: 278570 - DNA, 796 bp, Unknown
  Bacterial polypeptide expressing nucleotide sequence isolated from the Sargasso Sea
agggcacttggagctgtgactggagcacaagctgtgaatatggtgcgagcagggctttcatctatttatgtgagtgggtggcaggttgcggctgatgctaatcaatcggctcagacgtatccagatcagagcctttacccatcaaatagtgttccccaacttgttaaaaggttgcaaagtgcacttatgcgtgccgatcttgtagaaaaatcagaaaaacaactaagagattggtacgtaccacttgttgctgatgcagaagcgggttttggaggacctttacatgcttttgaattaacaagacagatgattgaagcaggagcttctggtgttcattttgaagatcaacttgcttcagagaaaaagtgcggtcacctaggtggtaaagttctagttcctacatcgcagtttattaaaacacttgttgcagcaaggctagcatcagatgtttgtgaagtaccagtcgttcttattgcaagaacagatgcacttggtgctaagcttatgaccagtgatattgatgattatgatcgttcctttatgactggtaagagaacttcagatggttattgggaaatgaaaggaggtcttgatcaagcaatcgcaagaggaatcgcctatgctccatatgctgacgcgctttggtttgagacatcaaagccctcgatcaaagaagctaaaaaatttgcagaggttattcatgctaactttccagataagctcttagcttataattgttcaccatcaatcaattggaagacaaatttacaacaagaagaaataagaagtttcaaaa

SEQ ID NO: 278571 - DNA, 841 bp, Unknown
  Bacterial polypeptide expressing nucleotide sequence isolated from the Sargasso Sea
attagttgaatcgatgaataacgcattaattagagcagatcagattcaacatatggagataatagataaggacatgaaaaaagaaagtaaagtagattacatgttgccaattattgcagatggtgaagcaggttttggaggtccattaaatgtttttgaacttacgaaaaaatttattaaagctggtgctgctggtgttcattttgaagatcaattagctagtgaaaaaaaatgtggtcatatgggaggaaaagttcttgttccaacaggaactatgattaaaaatttaaaagctgcaagattagctgctgatatagctgatgttccattaattatattagcaaggactgatgctaatgctgcaaaactaattactaatgatcacgatgaaaacgataaacaatttttaactggtgaaagatctcctgagggattttattatgtaaaagcaggtattgaacaagcaatatctagaggactggcttatgcaccatattcagatttaatttggtgtgaaacagcaacacctaatttagaagaagcaaaaaagtttgctgatgctattcatgaaaaatttccaggaaaacttttggcatacaattgctcgccatcttttaattggaaaaaacatttatcagataatcaaattgcttcttttcaaaaagaaataagtaaaatgggttataaatttcaatttataactcttgcaggttttcatactcaaaatattgctatttttgaattagcagacaaatataaaaaagaaggaatgactgcttattcaagaattcaacaacaagaatttgctcgtgaaaaagatggttatactagtgttaaacat

SEQ ID NO: 278572 - DNA, 835 bp, Unknown
  Bacterial polypeptide expressing nucleotide sequence isolated from the Sargasso Sea
caacaatcgatgaaattatggagactgttgcacacagaaaattatgtaaataccttaggttcattatccggtaatcacgctgtccaacatgccaaggctggattaaaagccatctatctaagtggatggcaggttgcagcggatgcaaatagtgctggtgagatgtatccagatcaatcattgtatccatatgatagtgctccaaaattagttgagtcgatgaacaatgctttaattagagcagatcaaattcaacatatggaacttttagatggtgatatgaataaagaaaaaagaattgattatatgttaccaatcatagctgatggagaagcaggttttggtggtccattaaatgtatttgaacttgcaaaaaaatttattaaagctggagctgctggtgttcatttcgaagatcagttagcaagtgaaaaaaaatgtggtcatatgggtggtaaagttctagtacctacaggcacaatgatcaaaaatttaaaagctgctaggcttgcagcagatattgcagatgtacccttgatcatcttagcaagaacagacgctaatgcagcgaaactaattacaaatgatcatgatgaaaatgataagccattcatgacaggtgaaagatctcctgaaggtttttattacgttaaggctggaattgatcaagctatttctaggggtctagcttatgcaccatattcagatttaatttggtgtgaaacagctactccgaatcttaaagaagctaaaaaatttgcagatgcaatacatgaaaaatttccaggtaaacttcttgcaaataattgttctccttcatttaattggaaaaaac

SEQ ID NO: 278573 - DNA, 709 bp, Unknown
  Bacterial polypeptide expressing nucleotide sequence isolated from the Sargasso Sea
atgggtggaaaagttttggttccaacaggtacagctattaaaaatcttaaggcagcaagattggctgcagatatagcagatgtgccattaattatactagccagaactgatgctaatgctgcaaaattaattacaaacgatcacgacgagaatgataaaccttttttaactggagaaagatctccagaaggattcttttatgtgagaagtgggatcgaacaagctatatcaagaggcttagcttatgctccatatgctgatttaatatggtgcgaaactgcaacacctaaccttgaagaagcaaaaaaatttgcagaagcaatacataaaaaattcccaggaaaactacttgcatataattgttctccttcttttaattggaaaaagcatttatcagaccaagaaatttctacattccaaacaaaaattgcagaaatgggttacaaatttcaatttataacacttgctggttttcacacacaaaacattgcaatttttgaattagccgaaaaatataaatctgagggtatgagtgcttattcgaaaattcaagaaaaagaatttgcgaaagaaaaagatggttatacaagcgttaaacatcagagggaagtaggcacttcatatttcgatgcagtatccaacacaattagttcaggaaaaagttctactacagccatgaaagattcaacagaatctgaacaattttaat

SEQ ID NO: 278574 - DNA, 905 bp, Unknown
  Bacterial polypeptide expressing nucleotide sequence isolated from the Sargasso Sea
aattatataaataccttaggttctttatcaggaaaccacgctgttcaacatgctaaagcaggattaaaagctatttatttaagtggatggcaagtagcagcagatgcaaatagtgcaagagaaatgtatccagatcaatcattatatccttttgatagtgctccaaaactagttgaagcaatgaataatgcattgattagagcagaccagattcaacatatggaaataaaagatggagacatgaaatcgaaagataaagttgattatatgttgccaattattgctgatggtgaagctggttttggtggtcctttaaatgtatttgagttagcaaaaaaatttataaaagctggagctgcaggagtacattttgaagatcaattagccagtgaaaagaagtgtggacacatgggaggtaaagtattagtgccgaccagtactatgataaaaaatttaaaggcagctaggttagcctcagatatagctgatgttccattaatcattttggcaagaactgatgccaatgcagcgaaattaattaccaatgatcatgacgaaaacgataaaccgtttttaacaggaaaaagatctccagaaggtttttattatgtaaaacatggtattgatcaagcaatctcaagaggactagcttatgcaccatattctgatttaatttggtgtgaaacagcaactccaaatttggaggaagcaaaaaaatttgctgatgcaatacatgcaaaatatcctggtaaattattagcttacaattgttcaccttcttttaattggaagaaacatttatcagactctgaaatttcgacatttcaacaaaagattagtgagatgggttataagtttcaatttataactttagctggttttcacacgcaaaatattgcagtatt

SEQ ID NO: 278575 - DNA, 961 bp, Unknown
  Bacterial polypeptide expressing nucleotide sequence isolated from the Sargasso Sea
gaagattacgtgaacactttcggtgcctataatgggcaacaagctgttcagcatgtaaaggctggtctcaaagctatttatgtatcaggttggcaagttgcggctgcagcaaattctaataacgaggtctatcctgatcaaagtctctattctgtggattctgtacccaatgctgttaaaaacattaataatgcatttagacgccaagaccaaattcaggtacaagaaggaagagaaggattttattatgctccaattgttgctgatgctgaagctggtttcgggggtgcattgaatgcgtatgagttggctaggaatctgatagaagcaggcgcagcagctgtccattatgaggatcaattgtcgtcagagaagaagtgcggacatcttggtggaaaggttttgatacccacaagtcaggcaattagaaatctaaatgcagcaagactggcttctgatgtcgctgaaacagagactttaatcatagccagaaccgatgcagaagctgcaagacttcttatgactgatgtggatgagatagaccgaaaatttatgactggagaaaggacctctgagggtttttatcgaatttcaggagggcttgaaatgggttgcgagcgaggacaggcatttgctgaatatgctgacctggtttggtgcgagacgtcaaaaccttgcttgaaagatgcaaaacaatttgccgatgcagttcgtggggctcatcctggacaaatgctggcatacaattgctctccaagctttaattggaaacaacatattccatcggacacagaaatagctgagtttcaaaaagaattaggcaaattaggttttaaattccaattcataacacttgctggttttcatacgaccaactttgctgtttttgattttgctaaagaatataaagagaaaggtatgttggcatttagcaacttgcagcaaaaagagttgactatca

SEQ ID NO: 278576 - DNA, 780 bp, Unknown
  Bacterial polypeptide expressing nucleotide sequence isolated from the Sargasso Sea
cacctttgcaaaactcggcgccgagaagctgtggaacctggtcacccaaggtgccaagccttctttccgtcccgacaaagatttcgtcaactgcatgggcgccctcactggcggccaggcagtccagcaggtaaaagccggtatccaggcgatctacctgtccggctggcaagtggcagcggacaacaactccgctgaatccatgtaccccgaccaatcgctgtacccggtggactcggtgccaaccgtggtcaagcgcatcaacaactcgttccgtcgtgccgaccagatccagtggaaagccggcaagaacccaggcgatgaaggctacatcgactacttcgcgccaatcgtggcagacgccgaagccggtttcggtggcgtactcaacgcctacgagctgatgaagagcatgatcgaggctggcgctgccggcgtgcacttcgaagaccagcttgcgtcagtgaagaaatgcggccacatgggcggcaaggtactggtaccgacccaggaagccgtgcagaagctgaccgctgcccgcctggccgctgacgttgccggcacaccgaccatcatcctggcccgtaccgacgccaacgcggcagacttgctgacctcggactgcgacccgtacgaccaaccattcgttaccggcgagcgcacccaggaaggcttctataaagtgcgcgccggcctcgaccaggcaatcgcccgtggcctggcctacgcgccgtacgccgacctgatctggtgcgaaaccgccaagccggacctggacga

SEQ ID NO: 278577 - DNA, 849 bp, Unknown
  Bacterial polypeptide expressing nucleotide sequence isolated from the Sargasso Sea
caggcaaaagcgggcatcgaagcgatttatctgtcgggctggcaggtggcggcagatgcgaacctggcctccagtatgtatccggatcaatcgctctacccggccaactccgttccggctgtggtcgatcggatcaacaacaccttccgccgcgcggatcagatccaatggtcggcgggtattgaaccgaacgatccgcgttataccgattatttcctgccgatcgtggcggatgccgaagccggttttggcggcgtactgaatgcctttgaactgatgaaatcgatgattgaagccggtgcagcggccgttcacttcgaagatcagctggcttcggtgaaaaaatgcggccatatgggcggaaaagtgctggtaccgacgcaagaggcgattcagaaactggtggctgcgcgtctggcggcagatgtcatgggcgtaccgacgctggtgattgcccgtaccgatgcggatgctgcggacctgattacctcggattgcgacccttatgacagcgagttcatcaccggcgagcgcaccagcgaagggttctaccgtacctgcgccgggatcgaacaggctattagccgtggcctggcgtatgcgccgtatgccgacctggtgtggtgtgaaacctcaacacccgacctggcgctggcgaaacgctttgcggatgccattcacgcgaaattccctggcaagctgctggcgtataactgctcgccgtcattcaactggcagaaaaatctggacgacaaaaccattgccagcttccagcagcaactgtcggagatgggctacaaataccagtttattaccctggcgggtattcacagccatgtggttcaacca

SEQ ID NO: 278578 - DNA, 840 bp, Unknown
  Bacterial polypeptide expressing nucleotide sequence isolated from the Sargasso Sea
aaaatctaatgtttcatatgatataaaaaggttttctggcattaagagagattacaaagaagaagaagttgagagattaagaggatcgataaagattcactattcgatgtgcgaacatcaatcaaaaaaattatggaatttactaaatacagaaccatacgtgaatacacttggatctttgtcgggcaatcattcagtgcagcatgctaaagcaggtttgaaagctatatacgtcagtggatggcaagttgctgctgatgcaaatacagctggagaaatgtaccctgaccaatctttatacccttttgatagtgcaccaaaactagttgactctataaacaatgcacttgtaagagcagaccaaattcaacatatggaaattaaagatggtgacatgaaaattgaggataaagtcgattatatgttgccaataatagctgatggtgaggcaggatttggaggaccactaaatgtttttgaattaacaaaaaaatttattaaagctggtgcagcaggtgttcatttcgaagatcaactagctagtgagaagaaatgtggacatatgggcggtaaagtattgataccaacatcaacagcagtaagaaatttgaaggctgcaagacttgctgccgatattgcagatgtacctttaataattttagctagaactgatgcaaacgctgcaaaattaattacaaatgattttgatgaaaatgataagccgtttttaaccggcaaaagatccccagaaggtttttattatgtaaaagaaggtattgagcaagcaatttctcgaggactagcatatgctccttatgcggatttaatttggtgtgaaac

SEQ ID NO: 278579 - DNA, 850 bp, Unknown
  Bacterial polypeptide expressing nucleotide sequence isolated from the Sargasso Sea
tatgttaccaataattgcagatggtgaagctggatttggtggaccattaaatgtttttgaattaacaaaaaagtttataaaagcaggtgctgcaggtgttcactttgaagaccaattagcgagtgaaaaaaaatgcggccacatgggcggaaaagtattggttccaactggtcaagctgtaagaaatttaaaatctgcaagattggctgcagatattgctaatgtaccacttataatcttagcaagaacagatgctaacgctgctaaactcattacaaatgataacgatgaaaatgacaaaccgtttttaactggtgagagatctcctgaaggtttttattacgttaaaccaggaatagagcaagcgatatcaagaggactagcttatgctgaatatgctgatctaatatggtgtgaaacagcaactccaaaccttgaagaagctaaaaagtttgcagacgctataagagcaaagtttccaggaaaattattagcttataactgctcaccatcttttaattggaaaaaacatttgtctgacagcgaaattgcaactttccaacaaaaaataagtgatatgggatataaattccaattcataactcttgctggttttcatgctcagaacattgcaatttttgaattagcggaaaaatataaatcagaaggcatgtcagcatattctaaaattcaagataaagagtttgctagagaaaaagatggttatactagcgttaaacaccagagagaagttggaacttcatattttgactcggtatctaatactataagtggagggaaaagctccacaactgcaatgaaagactcaactgaatcagagcagttttaa

SEQ ID NO: 278580 - DNA, 969 bp, Unknown
  Bacterial polypeptide expressing nucleotide sequence isolated from the Sargasso Sea
aatgtacccagatcaatctctatatcctgtagatagcgttcctgctgtcgtcaaacgtataaataattcattgagaagagctgatcaattaaacatagccgaaggtaacgagcctatcgactacatgctacctatagtcgcagatgcagaagcaggttttggaggcgtgcttaatgctcacgaacttatgaaagcgatgatcgaagcaggtgcagcaggcgttcactttgaggatcaactcgcgtcagcaaaaaaatgcggccacatgggtggtaaggttcttgtaccaacgcaagaggctgtccaaaagcttgcagcggcaagattagctgcagatatatacaacacaccaaccgtcctactcgcaagaactgatgcagaggcagcgaatttgttaactagcgatatcgacgagagagacagggaattcactacaggagaaagaactcctgaaggtttctatcgtgtcgataacggcatcgatcaggctatttctagaggtctagcatatgcgccatacgccgatttagtctggtgtgagacaggagtaccagatttggattttgccagaaaatttgcagaggctcttaaaaaagaacatcctgaacaacttctagcatacaattgctcaccatcatttaattggaaaaaaaatcttgacgatggacagattgcgaaattccaaaaagagcttggttcaatgggttataagtttcagttcatcacacttgctggattccacgcattgaattacagtatgtttgaactttcaaaagggtacaacgccgagcaaatgaccgcatacgttaaacttcaggaagctgaattcgctgcagagaaagacggttacacagccaccaaacatcaaagagaagttggtacaggatattttgattctgtcactcaagttatcacaggaggctcatcttctgtaacggctcttacgggaagcacagaagaagagcaatt

SEQ ID NO: 278581 - DNA, 706 bp, Unknown
  Bacterial polypeptide expressing nucleotide sequence isolated from the Sargasso Sea
atgagtaaaataagatctgcaaatgatatccaagctgactgggacagcaatccaagatggaaaaatgtaaaaagagactacacagcagaggaagttgctaaattaagtggtagcgtacaaatagagtacagcttagctaggcagggttccgagaaactctggaacgaaattaataatagtgattttgtaaatgcacttggcgcattaactggcaaccaagccatgcagcaagcaaaggcaggactacgtgcagtatacctatcaggctggcaagttgccggcgatgcaaacacaggcatgcaaatgtatcctgatcagtctctttatcctgttgatagcgttccagcagtagtaaaacgcatcaataactccctacgaagagcagatcaattaaacatagctgagggcaatgaacctgtagactatatgttacctattgttgcagatgctgaagctggatttggaggtgttctcaatgcgcacgaactcatgaaagctatgattgaagcaggtgctgctggtgtccattttgaggatcaactagcatcagcaaaaaaatgtggacatatgggcggtaaagtacttgtgcctactcaagaagctgttcaaaagcttgctgctgctagactagcggctgatatttacaatactcctacagtattactagcacgaacagatgcagaggctgctaatttattaactagtg

SEQ ID NO: 278582 - DNA, 880 bp, Unknown
  Bacterial polypeptide expressing nucleotide sequence isolated from the Sargasso Sea
atgtcagcagaagaaaacatatcatacgatttaaagagatttgcaggtatcaaaagagattatacccctgaagaagtagaaaggttaaggggttcaataaaaattgaatattctatgtgcaaattgcaatctcagaagttatggagattattaaatagtgaaccatatgttaacaccttaggttccttatctggaaatcatgcagtacaacatgcgaaagcagggttgaaggcaatatatctaagtggttggcaagttgctgcagatgcaaacagcgctggtgaaatgtatcctgaccaatctctatacccttatgatagtgcaccaaagcttgtagaggcaatgaacaactccttaactagagctgatcaaatacaacatatggaaatgattgatggtgacatggacaaaagtaaaagggtcgactacatgctaccaataatagcagatggcgaagctggattcggcggtccactaaatgtttttgaacttacaaagaaatttataagggctggagctgctggagtgcattttgaagatcaattagctagtgaaaaaaaatgtggtcatatgggtggtaaagttttggttcctactagtactatggtacgaaatcttaaagcagcaagattagccgcagatatagcagatgttcctctaattatccttgctagaactgatgcaaacgctgctaagttaattacaaatgattttgatgaaaatgataaaccattcctaaaaggtgaaagatctccagaaggttttttctatgtaaaagatggtattgatcaagcaatatcaagaggtttagcttatgcaccttatgctgacttaatttggtgtgaaacaagcaacaccaaactggaagaagctaaaaaat

SEQ ID NO: 278583 - DNA, 647 bp, Unknown
  Bacterial polypeptide expressing nucleotide sequence isolated from the Sargasso Sea
ttaaatgtttttgaattaactaaaaaatttatcaaagcaggtgcggctggagtacattttgaagaccaattagcgtcagaaaaaaaatgcggtcatatggggggtaaagttttggtaccaacacaaactatgattaaaaatcttaaatccgcaagacttgcagctgatgtaatgggagttcccttgattattttagctagaactgatgcaaatgcagcaaaattaattaccagtgatattgatgagaatgacaaaccatttttaaccggaaaaagatctccggaaggattttattacgttaaagatggtttaaatcaagctatttcaagaggtttggcttatgctccatacagtgatttgatttggtgtgaaactgcaaaaccaaatttagaagaagcaaaaaatttcgccgatgctatacatgataaattccctggaaaactattagcatataattgttcaccatcatttaattggaaaaaaaatttatctgacaaagaaattgaaatttttcaaaaagaaattgctaacatgggatataaatttcaatttataactttagcaggatttcatgcccaaaattatgctatttttgatttagcaaaaaaatataaacaatatggaatgtcagcatattcacgactgca

SEQ ID NO: 278584 - DNA, 751 bp, Unknown
  Bacterial polypeptide expressing nucleotide sequence isolated from the Sargasso Sea
aatgaaatctgcagcagatattcaaaaagagtgggaaagcaaccctagatggaaaaatgttaaacgtgactacacagcggaggaagtcgctaaattaagtggaagtgtaaatattgagtacagtcttgctaaacaaggagctgaaaaactttggaacgaaataaataacagtgatttcgtaaatgcactcggcgcattgacaggaaaccaagctatgcaacaagctaaagctggtctaagagcagtatacttatctggttggcaagttgctggtgatgcaaatactggcatgcaaatgtatccagatcaatcattataccctgtggacagcgtcccatcagtcgtaaaacgtattaacaactcactaagaagagcagatcaacttaacattgccgaaggtaacgatccagtagacttcatgctacctattgtagctgatgcggaagcaggatttggtggagtactaaatgctcatgaacttatgaaggctatgattgaagcaggggctgccggtgtacattttgaagatcaattagcatctgcaaaaaaatgcggccatatgggcgggaaagtacttgtacctactcaagaagccgttcaaaagcttgctgcagctaggttggcagcggatatatacggaacacctactgtcctattagcacgtacagatgctgaagcggccaacttgcttacaagcgatgtagatgagagagatagagaatttactactggcgagaggacagcagagggt

SEQ ID NO: 278585 - DNA, 537 bp, Unknown
  Bacterial polypeptide expressing nucleotide sequence isolated from the Sargasso Sea
gtaaaagatctcctgaaggatttttttatgttaagcatggtattgatcaagctatatcaagaggcttagcatatgcaccatatgcagatttaatttggtgtgaaactgcgacaccaaatttagaggaagcaaaaaaatttgctgatgcaattcataaaaaatatccaggtaaattactagcttacaactgttcaccatcttttaattggaaaaagcacttgtctgatgaccaaattgctagtttccagcaaaaaataggtgagatgggatataaatttcaatttataactcttgctggatttcatgtgcaaaatattgcagtctttgaacttgcagaaaaatataaaaaagaaggtatgtcagcatattcaaaaattcagcaacaagaatttgctagagaaaaagatggttacaccagtgtaaaacatcaaagagaagttggtacttcatattttgatgcagtatcaaatactataagttctggaaaaagttcaacaactgctatggaaggttcgacagagtcagaacaattttaaa

SEQ ID NO: 278586 - DNA, 727 bp, Unknown
  Bacterial polypeptide expressing nucleotide sequence isolated from the Sargasso Sea
catgctaccaattattgctgatggtgaggcaggttttggtggacctttaaacgtttttgaactagctaaaaaatttattcgggctggagctgcaggagtacattttgaagaccagttagcaagtgaaaaaaaatgtggtcacatgggtggtaaagttttagtacctacaggcacaatgattaaaaatttaaaggccgcaagacttgctgcagacattgcagatgttccattaataattttagctagaacagatgccaatgctgcaaaactaattacaaacgaccatgatgaaaatgataaaccttttttaacaggagaaagatctcccgaaggtttttactacgtaaaacatggaattgagcaagcaatatctcgaggattagcatatgcgccttactcagacttaatatggtgtgaaacagcaacacctaatttggaggaggctaaaaaatttgctgatgcaatacattcaaaatatcctggaaaattattagcttataattgctctccgtcttttaattggaaaaaacatttatcagatgcggaaatatctacattccaacaaaaaataagtgaaatgggatataagtttcaatttataactctagcaggatttcatactcagaatattgcaatatttgaattagctgaaaaatataaaaaagaaggtatgacagcatattcaagaattcaacagcaagaattcgcaagagaaaaagatggttat

SEQ ID NO: 278587 - DNA, 813 bp, Unknown
  Bacterial polypeptide expressing nucleotide sequence isolated from the Sargasso Sea
catgccccaatccctcaacgaacaactgagccgcgaacagcaaattgccgccctggaaaaagactgggcgaccaacccccgctggaagggcgtgaagcgtggttactccgcagccgacgtggtgcgcctgcgtggctcgctgcctatcgagcacacgctggccaagcgcggcgctgaaaagctctgggacaagatcaacggcggcgccaagaagggctacgtgaacgctttcggcgccatttctgccggtcaagccatgcagcaagccaaggccggcctcgaagccgtgtacctgtcgggctggcaagtggctgccgacggcaacaccagcgaaaccatgtaccccgaccagtcgctgtacgcgtatgactcggtgcccaccatggttcgccgcatcaacaacaccttcaagcgcgctgacgaaatccagtggggccgtggcatcaaccccggcgacaaggaattcatcgactacttcctgcccatcgtggccgacgctgaagctggctttggcggcgtgctgaacgccttcgagctgatgaagaacatgatcgctgcaggcgcagccggcgtgcactttgaagaccaactggctgccgtgaagaagtgcggccacatgggtggcaaggtgctggtgcccacacaagaagcctgcgaaaagctgatcgctgcacgctttgccgctgacgtgatgggtgtgtccaccatcgtgctggctcgtaccgacgccgaagccgccaacctgatcacttccgaccacgacgccaacgacaagcctttcctgaccggcgagcgcacgcaagaaggcttcta

SEQ ID NO: 278588 - DNA, 888 bp, Unknown
  Bacterial polypeptide expressing nucleotide sequence isolated from the Sargasso Sea
gctctttatcaggaaaaccatgcagttcaacatgcaaaagcaggattaaaagcaatttatttaagtggatggcaagttgctgcagatgcaaatagcgccggtgaaatgtatccggatcaatcattatatccatatgatagtgcaccaaaactagttgattctatgaataatgctctgataagagcagatcaaattcaacatatggaaattcaagacggtgacatgaaaaaagaaaataaagttgattacatgttgccaattattgcagatggagaagctggatttggtggacctctaaacgtttttgaacttgcaaaaaaatttattaaagctggagcagcaggagttcattttgaagatcaattagcaagtgaaaaaaaatgtggtcacatgggtggaaaagttttagttccaacaggcacaatgataaaaaatttaaaagctgcaagacttgcggcagatattgccgatgttcctttaattattttagccagaaccgatgcaaatgcagcaaaactaattacaaacgatcatgacgaaaatgataaaccttttttaacaggcgaaagatccccagaaggattttattatgtaaaatctggaattgaacaagcaatttcaagaggcttagcttatgctccatattctgatttaatctggtgtgaaacagcaacaccaaatctggaagaagctaaaaaatttgctgatgcaattcataaaaaatttccaggaaaacttcttgcttacaattgttcaccttcatttaattggaaaaaacatttatctgactcagagattgcctcatttcaagtagagataagtaaaatgggttataagtttcaatttattactcttgcaggatttcatacacaaaacatcgcaattttg

SEQ ID NO: 278589 - DNA, 550 bp, Unknown
  Bacterial polypeptide expressing nucleotide sequence isolated from the Sargasso Sea
ccttttttaactggtgaaagatcacccgaaggattctattatgttaaaaatggaatagaacaagcaatctcaagaggattagcttatgcaccctacgcagatttaatttggtgtgaaactgcaacaccaaacatagaagaagcaaaaaaatttgcagatgctattcacgaaaaatttccaggtaaattattagcctataattgttctccttcctttaattggaaaaaacatttatcagacaaagaaatttctacttttcaacaaaaaatttcagaaatgggttataaatttcaatttataactcttgcaggctttcatactcaaaatattgctgtgtttgaattagcagaaaattataaaaaagagggcatgtcagcatactctaaaattcaagaacaagaattcaaaaaagaaaaagatggttatacaagcgtaaaacatcaaagagaagttggcacgtcctattttgatgcagtatcaaatactattagttctggaaaaagctctacaacagcaatggacggttcaacagaatcagaacaattttaat

SEQ ID NO: 278590 - DNA, 781 bp, Unknown
  Bacterial polypeptide expressing nucleotide sequence isolated from the Sargasso Sea
ctgagtggtgggcaagtagcagctgatgccaacagtgctggtgaaatgtaccctgaccaatcattgtatccatatgatagtgcaccaaaattagttgagaccatgaataattctttaatcagagctgatcaaattcaacatatggaaatgatagatggagatatggataaaagtaaaagaactgattacatgttaccaataatagctgatggtgaagctggatttggggggccactaaatgtattcgaattgacaaaaaaatttatcagagctggtgcagctggcgttcactttgaagatcaattggcaagtgagaaaaaatgtggtcatatgggtggtaaagttttggttccaactggaactatggttagaaaccttaaagcagcaagattagcagcagatattgcagatgtccctctcatcatacttgcaagaactgatgctaatgctgctaaattaattaccaacgattttgatgaaaatgataaaccttttttaactggtgaaagatctccagagggtttcttttatgtaaaagacggaatagagcaagcaatctcaagaggtcttgcttatgcaccatacgcagatttaatatggtgcgaaacagcaacacctaatttagaggaagcaaagaaatttgccgatgctatccatgaaaaatatcctggtaagatgttagcttataattgttcaccatcatttaattggaagaaacatttgtctgatgaagaaattggatcattccaaagaaaaattggagaaatgggttacaaattca

SEQ ID NO: 278591 - DNA, 796 bp, Unknown
  Bacterial polypeptide expressing nucleotide sequence isolated from the Sargasso Sea
atgaaagaagaaaaaaaaatagattatatgttgcccatcattgctgatggtgaggctggatttggtggtcctctaaacgtttttgagcttacaaaaaaatttataaaagcaggggctgcgggagtacattttgaagatcaattagctagtgaaaaaaaatgtggtcatatgggaggtaaagttcttgttccaactggtacaatgataaaaaatctcaaagctgcaagattagcggctgatatagctaatgttccattgattatattagcaaggactgatgctaatgctgcaaaactaattactaatgattatgatgaaaatgataaatcttttttaactggtgaaagatctccagagggattttattatgttaaagcgggtattgaccaagcaatatctagaggtctagcttatgctccatattcagatttaatttggtgtgaaactgctactcctaatttagaggaagccaaaaaatttgctgatgctattaatgaaaaatttccaggaaaacttttggcatataattgctcaccttcttttaattggaaaaaacatttatcagatgatgaaattgcttcttttcaaaaggagataagtaaaatggggtataaatttcaatttattactttagctggatttcatactcaaaatattgcaatttttgaattagcagaaaaatataagaaagaaggtatgactgcttattcaaaaattcaagaacaagaatttgctcgtgaaaaagatggttacactagtgtaaaacatcaaagagaagttggtacttcttatttga

SEQ ID NO: 278592 - DNA, 844 bp, Unknown
  Bacterial polypeptide expressing nucleotide sequence isolated from the Sargasso Sea
aacggagatccaaaaacagatttttttgcacctattattgcagatgcagaagctggttttgggggaaacctaaatgcttttgaattgatgaaaagaatgatcactgctggagctgctggggttcactttgaagatcaactggcaagtgttaaaaaatgcggtcaccttggagggaaagtcttggtgcctactcaagaagcaattcaaaaacttatttctgctcgattagcttctgatgtttccaataccccaacgatcctaattgcccgtactgatgcagatgctgctgacttagttacttctgatgttgatgaaaatgataaaccatttttaactggcgaaaggacctcagaggggttttacagaagtaaagctggccttgatcaagctattgcaaggggacttgcatatgcaccctactctgatctagtctggtgcgaaacctctaaaccagatctagaacaagcaaaaacttttgctgaggcaattaaaaaggatcatcccgaaatcatgcttgcctataattgttctccttcatttaattggaagaaaaatcttgacgatgctaccatcgcaaaattccaaaaagaacttggcgctatgggctacaaatttcaatttataactcttgcgggcattcactcaatgtggcatggaatgtttaatctttccaaggaatatgttgcagatggcatgacagcatacgtcaagcttcaagagaaagaatttgaagatgcagagaaaggctacactttcgtttctcatcagcaagaagttgggacaggttattttgatgcagtcaacaattgcatacaaggtgaagagagttccacgtcagccctta

SEQ ID NO: 278593 - DNA, 862 bp, Unknown
  Bacterial polypeptide expressing nucleotide sequence isolated from the Sargasso Sea
ctgtggaaacttgttaatgagaaagattatattaattgtttgggcgctgtcacaggcggtcaggcagtacagcaagtcaagggtggaataaaagctatttacttatctggttggcaagttgccgcagacggaaatacgtccgagacaatgtatccagatcaatcattgtatgcagtagattcagtacctactatggtcactcggataaataatgcatttaagcgtgcagatgaaatacaaagttctagaggtagcggtaacgttgatttttttgcaccaattgttgccgatgctgaagctggctttggcggtgttttaaatgcttttgaattaatgaaaaacatgattgaggcgggtgcttccggcgtacattttgaagatcaattagcatcagtaaaaaaatgcggacatatgggcggcaaggtacttgttccgtcacaagaggcagttcaaaaattaactgcggcacgattagccgctgatacaatgggtgttccaacaattgttcttgccagaacagatgcaaacgctgctgcattattaacctctgacgtagatccatacgataaagactttataaccggagaaagaagttctgagggattttatataacaaaagcaggtatagatcaggctatttcacgtggtctggcgtatgctccgtatgctgatttattgtggtgtgaaacagcggtaccagatatggatgaagctaaaaaattcgctgaggcgataaaaaaagaatatcccgatcagttgctagcatacaattgttctccttcatttaattggaagaagaatctaagtgactctgacattgcaaaatttcaaaaagagcttggcgcaatgggatataaatacc

SEQ ID NO: 278594 - DNA, 844 bp, Unknown
  Bacterial polypeptide expressing nucleotide sequence isolated from the Sargasso Sea
ataagagcagatcaaattcaacatatggaaatacaagatggggacatggactcgaaaaataaagttgattatatgctaccaattatagctgatggtgaggcaggctttggaggtcatttaaatgtatttgaattagcaaaaaaatttattaaagccggtgcggcaggagttcattttgaagaccaactagccagtgaaaagaagtgtggacacatggggggcaaagtactggtaccaactggcactatgataaaaaatttaaaagcagctagattagcagctgatattgcggatgttcctttgattattttggctaggacagatgcaaatgctgcaaaattaattacaaatgatcacgatccaaatgataaaaattttttaactggagaaagatcaccagaaggtttcttttatgtaaaaagtggtatcgaacaagcaatttcaagaggattggcttatgctccttattcagatctaatttggtgtgaaactgctacacccaatattgaagaagcaaaaaaatttgctgaagcaattcatgctaaatttcctggaaagtttcttgcttacaactgttcaccgtcatttaattggaaaaaacatttatctgatcaagagattgcttccttccaagttaaaatagccgagatgggttataaatttcaatttatcactcttgctggtttccatacccaaaacatagcagtatttgaattagcagaaaaatataaatctcaaggcatgactgcctattcgaaaattcaagaacaagagtttgcaagagaaaaagatggttacactagcattaaacatcaaagagaagttggaacatcttatttcgatg

SEQ ID NO: 278595 - DNA, 914 bp, Unknown
  Bacterial polypeptide expressing nucleotide sequence isolated from the Sargasso Sea
tggatcattatctggaaatcaagctgtccagcatgctaaggcaggactaaaggctatatatttgagtggttggcaggttgcagctgatgctaatagcgctggtgaaatgtatccagatcaatctttatatccatatgatagtgcaccaaaattagttgaagcaatgaataacgcattaattagagcagaccagatacaacatatggaaattagcgacgatgaattaaaattagaaaataaaactgattacatgcttccaattgtaatggatggagaaggaggttttggtggtccattaaatgtttttgaattaactaaaaaagcaataaaagctggtgcagcagctattcatttagaagatcagttatcaagtgaaaaaaaatgtggtcatatgggtggaaaagttttaattccaacaagcaccatgataaaaaatcttcaatctgctagacttgcagcagatattgctgatgttcctttaattattttagctagaacagatgcaaatgcagctaaattaatttcaaatgaccatgatgaaaatgataaaccctttttaacaggcgaaagatcatcagagggatttttttatgtaaaacccggaatcgaccaagctatttctagaggactagcttatgctccttatgctgatttaatttggtgtgaaacagctacaccaaatttagaagaggcaaaaaaatttgctgatgctattcataatcaatacccaggaaaactactagcatataactgttcaccttcatttaactggaagaaacatttatcagataaagaaatagctgaatttcaagtaagaattagtgaaatgggttataaatttcaatttattactttagcaggatttcacactcaaaatatagcaatatttgaattagctgaaaatataagactga

SEQ ID NO: 278596 - DNA, 860 bp, Unknown
  Bacterial polypeptide expressing nucleotide sequence isolated from the Sargasso Sea
tatcctttcgatagtgctccgaaattagttgaagctttgaataatgctttgataagagcagatcaaattcagcatatggaaatcaaagatggagatatggattcgaaaaataaagttgattatatgttgccaattatagctgacggtgaggcaggttttggaggtcctttaaacgtatttgaattagcaaaaaaatttattaaagctggcgcagcaggggttcattttgaagatcaattagctagtgaaaagaagtgtgggcacatgggaggtaaagtgttggtaccaactagtactatgataaaaaatttaaaagcagctagattggcagctgacattgccgatgtacctttgattattttggctaggacagatgcaaatgctgcaaaattaattacaaatgatcacgatccaaatgataaaaattttttaactggggaaagatcaccagaaggtttcttttatgtaaaaagtggtatcgaacaagcaatttcaagaggattggcttatgctccttattcagatctaatttggtgtgaaactgctacacccaatattgaagaagcaaaaaaatttgctgaagcaattcatgctaaatttcctggaaagtttcttgcttacaactgttcaccgtcatttaattggaaaaaacatttatctgatcaagagattgcttccttccaagttaaaatagccgagatgggttataaatttcaatttatcactcttgctggtttccatacccaaaacatagcagtatttgaattagcagaaaaatataaatctcaaggcatgactgcctattcgaaaattcaagaacaagagttttgcagagaaaaagatggttacactagcattaa

SEQ ID NO: 278597 - DNA, 981 bp, Unknown
  Bacterial polypeptide expressing nucleotide sequence isolated from the Sargasso Sea
gtacccagatcaatcattatatccttacgatagtgccccaaaattagttgaaacaatgaataattcattaattagggctgatcaaattcaacatatggaattaatcgatggtgatatggaaaaaaataaaagcgtagattacatgcttcctattattgcagatggagaagctggttttggaggacctttaaatgtattcgaattagcaaaaaaatttataaaagcaggtgctgcaggtgtacattttgaagatcaacttgctagtgaaaaaaaatgtgggcatatgggcggtaaagttctagtaccaacaggaacaatggttagaaatcttaaagctgcaagattagcagctgatattgcaaatgttcctcttataattcttgcgagaacagatgctaatgctgcaaaattaattacaaatgactttgatgaaaacgacaaaccttttttaactggagaaaggtctccagaaggttttttctatgtaaaagatggaattgaacaagcaatctctagaggactagcttatgcgccttatgctgatttaatatggtgtgagaccgccactcccaatatagaagaagctaaaaagtttgcagatgcaattcatgaaaaatatcctggtaaattgctagcttataattgttctccctcttttaattggaaaaaacatttatctgacaatgagatagcaacttttcaaaaaaaaattggagaaatgggttataagtttcaatttattactttagcaggttttcatacacaaaacattgctatatttgagttggcagaaaaatataaaaccgaagggatgactgcttattctaaaatccagcaacatgaattttctagagaaaaagatggttatacaagtgtcaaacaccaaagagaggttggtacttcttattttgatgcagtttctaaatacattagttcaaggaaaaagttctactactgcaatggaagggtcaacagagtctg

SEQ ID NO: 278598 - DNA, 907 bp, Unknown
  Bacterial polypeptide expressing nucleotide sequence isolated from the Sargasso Sea
aatagtgctggagagatgtatccagatcaatcattatacccttatgatagtgcaccaaaattagttgagacaatgaataattctctaattagagctgaccaaattcaacatatggaaataatagatggcgatatggaaaaaagtaaaagtgtagactacatgttgcctattatagctgacggagaagctggctttggaggaccattaaatgtatttgagctagcaaaaaaatttataaaagctggcgctgctggtgtgcattttgaagatcagctagctagtgaaaaaaaatgtggtcatatgggtggaaaagttttagtaccaaccggcactatgattagaaacctcaaagcagcgagattagcagcagatatagctgatgtccctcttattattctagcaagaactgatgctaacgctgctaaattaattacaaatgattttgacgaaaatgataaaccttttctaactggagaaagatccccagagggttttttctatgtaaaagatggaatcgagcaggctatatctagaggtcttgcttatgcaccatatgctgatttaatatggtgtgaaactgctactccaaatttagaagaagccaaaaaatttgcagatgcaattcacgaaaagtttccaggtaaattattagcatataattgctctccttctttcaactggaaaaagcatttgtctgatgatgaaattgcgtcgttccaaaaaaaaataggtgaaatgggttataaatttcaatttattactttggcaggttttcatactcagaatatagcgatatttgaattagcagaaaaatataaaactgaaggaatgacagcttattcaaaaattcagcaacatgaattctcaagagaaaaaaatggctatactagtgtaaaacaccaaagag

SEQ ID NO: 278599 - DNA, 913 bp, Unknown
  Bacterial polypeptide expressing nucleotide sequence isolated from the Sargasso Sea
tactctaggttcattatcaggcaatcaagctgttcagcatgctaaggctggcctaaaagcaatttatcttagtggatggcaagtcgcagctgacgctaacagtgcaggtgaaatgtatcctgatcaaagtttatatccttatgacagtgctcctaaattagttgaagcgatgaataatgcattaataagagctgatcaaattcagcatatggaaactatggaaggcaaaattaaatctgaagaccaagtagattataaaatgccaatcatagccgatggagaagcaggatttggaggcccattaaatgtattcgaactaacaaaaaaatttataaaagctggagcagctggagtgcactttgaagatcaattagcttctgaaaaaaaatgtggacatatgggtggtaaagtattggtgccaacacaaactatgatcagaaatcttaaagcagcaagactagcagcggacgtgatggaagttcctctaattatcttggcaagaactgatgctaatgcagcaaagttaattactaatgatgtagatgagaatgataaaccttttttaacaggcaagagatcacccgagggtttttattatgttaaggatggtttggatcaagctatctctagaggtttagcgtacgctccgtatagtgatttaatatggtgtgaaactgcaaaaccaaatttggaagaagcaaaaaattttgctaaagcaattcatgagaagtttcctggaaaaattctagcatataattgttccccttcttttaattggaagaaaaatttatctgacaaagaaattgaaatttttcagaaagagattgctaaaatgggatataaatttcaatttataacactagctggatttcatgcacaaaattatgcgatatttgatttagcaaaaaaaaat

SEQ ID NO: 278600 - DNA, 860 bp, Unknown
  Bacterial polypeptide expressing nucleotide sequence isolated from the Sargasso Sea
aggtaaaattaattctgatgcccgagttgattataagatgcctattatagcagatggtgaagctggatttggtggaccattaaatgtatttgaattaacaaaaaaatttattaaagctggagctgctggagttcactttgaagaccaactagcttctgaaaaaaaatgtggccatatgggtggtaaagttttagtgcccacacaaacaatgattagaaatctaaagtctgctagactcgctgccgacataatgggggtaccattaattattttagctagaactgacgcaaatgcagctaaattaattacaaatgatgttgatgaaaacgataaaccttttttaacaggaaaaagatcacccgagggatttcattatgttaaatctggtttagaccaagcgattgcgagaggtttagcatacgctccttacagtgatttaatttggtgtgaaactgccaatcctagcttagaagaagctagaaattttgctaatgctatacatgataaatttccaggaaaactgctagcctataattgctcaccatcgtttaattggaagaaaaatttaacagataaagaaattgaaaattttcaaaaagaaataggtaatataggttacaaatttcaatttataactttagcaggattccatgcccaaaattatgcaatttttgatttggccaaaaagtataaacagtatggaatgtctgcatattcaagattacaacaacaagaatttgatagtgaaaaagagggatacaccgccacaaaacatcaaagagaagttggcacatcatattttgacgcagtatcaaatgcaatttcctcaggtaaaagctctactacagccatgaaaagat

SEQ ID NO: 278601 - DNA, 911 bp, Unknown
  Bacterial polypeptide expressing nucleotide sequence isolated from the Sargasso Sea
tattaagagagattatacagaacaagaagttgaaagattaagagggtcaataaaggttcatcacacgatcagtgaaattcaatcgaaaaaattgtggacattgttaaatacagagccatatataaatacacttgggtctttgtcaggcaatcattctgttcaacatgcaaaagctggtttaaaggcaatttacgtaagtggatggcaaatagctgcagacgctaatacagctggcgaaatgtaccctgatcaatcattgtatccatttgatagcgctccaaaattagttgattcaataaataatgcattaattagagcagaccagatacaacatatggaacttaaagatggtgacattaaatcaaaagatcaagttgattatatgttaccgataatagcagatggtgaagctggttttggaggaccattaaatgtctttgaactgacaaaaaaatttattaaagcaggagcagcaggcgtgcactttgaagatcagttggctagtgaaaaaaaatgtggccatatgggagggaaggttttagttccaacaagtacaatgattagaaaccttaaagctgcaagattagcagcagatattgcagatgttccacttataattttagcaagaaccgacgctaatgccgcaaaacttattacaaatgattttgatgaaaatgataaaccttttttaacaggcaaaagatctcctgaaggatttttttatgtaaaagatggaatagaacaagctatttcaagagggctagcatacgctccttacgccgatttaatttggtgtgaaacagcaaccccaaatcttgaagaagctaaaaaatttgctgattcaatacacaaaaaattccctggtaaattacttgcatacaactgctccccatcatttaatttggaagaaa

SEQ ID NO: 278602 - DNA, 758 bp, Unknown
  Bacterial polypeptide expressing nucleotide sequence isolated from the Sargasso Sea
aggtgtacactttgaagatcaattggctagtgaaaaaaaatgtggtcatatgggtggaaaagttttagttccaactagtacgatggtccgtaacttaaaatcagcaagactagcagcagatattgctaatgttcctttaataattcttgcaagaacagatgctaatgcagcaaaattaattaccaatgattttgatgaaaatgataaatcttttttaacaggagaaagatcccctgagggatttttctatgtgaaagatggaatacaacaagctatttcaagaggtttagcttatgctccttatgccgatttaatttggtgtgaaacagcaaccccaaatcttgaagaggcgaaaaaatttgctgatgcaattcataataagtttccaggaaagatgttagcatataattgttcaccatcttttaattggaaaaaacatctatcggatgaagaaataggaacttttcagaaaaaaattggtgaaatgggatataaatttcaatttataactttagcaggttttcatacgcagaatattgcaatatttgaattagctgaaaaatataaaaaagagggtatggctgcatattctaaaattcaagaaaatgagtttgctagagaaaaagacggatatacaagtgttaaacatcaaagagaagtcggcacatcttattttgatgcagtttcaaacacaataagttcaggaaaaagctccactaacgccatggaaggatctacagaatctgagcaattctagt

SEQ ID NO: 278603 - DNA, 530 bp, Unknown
  Bacterial polypeptide expressing nucleotide sequence isolated from the Sargasso Sea
atctcctgaaggattttattatgttaaagctggaatcgaacaagctatatccagaggtcttgcttacgccccatatgcagacttaatttggtgcgaaacagcaacacctaatttagatgaggcaaaaaaatttgctgatgctatacatgaaaaatttcctgggaaacttttagcttacaactgttcaccttcattcaattggaagaaacatttatcagatgatgatattgctgaatttcaaaaaaaaataggtgaaatgggatacaagtttcaatttataacattagcaggtttccatacacaaaatattgcaatatttgaacttgctgaaaaatataaaaaagacggaatggctgcatattctaaaattcaacaacaagagtttgatagagaaaaagatggttatacaagtgtcaaacatcaaagagaagttggaacatcttactttgatgcagtttcaaatacaataagtggtggcaaaagctcaactacagcaatggaaggatcaacagagtcagagcagttttaat

SEQ ID NO: 278604 - DNA, 809 bp, Unknown
  Bacterial polypeptide expressing nucleotide sequence isolated from the Sargasso Sea
cgcaaatagcgctggagagatgtatccagaccaatcactttatccctatgatagtgcaccaaaacttgtcgaagcaatgaataactcattgatcagagctgatcaaattcagcatatggagttgttagacggagatatgaaaaaagaaaattctattgattatatgttgccaataattgctgatggagaagcaggatttggcggtccattaaacgtatttgaattaacaaaaaaattcattaaggcaggtgcggcaggtgttcattttgaagatcagctcgctagtgaaaaaaaatgtggtcatatgggcggtaaagttttagttccaacaggtacaatggttagaaacctgaaagcagcgaggttggcagctgatattgctgatgttcctctcattatacttgcaagaacagatgccaatgctgctaaattaatcacaaatgattttgatgaaaatgataaaccatttttaacaggcgagagatcacctgaaggtttttattacgtaaaggatggaattgagcaagctatttctagaggtctagcttatgcgccatatgcagatcttatttggtgtgaaacagcaacgccgaatttaaaagaagcaaaaaaatttgctgatgctattcacgaaaaatttccaggtaaattattagcctacaactgttcaccatcatttaattggaaaaaacatttgtcagatgatgaaattgcatctttccaacaagaaattggaaaaatgggttataaatttcaattcataactttagcaggttttcatactcagaatattgcaatatttgagcttg

SEQ ID NO: 278605 - DNA, 676 bp, Unknown
  Bacterial polypeptide expressing nucleotide sequence isolated from the Sargasso Sea
atggttaggaatttaaaagctgctagacttgcatcagatattgcagatgttccccttattattcttgcaagaactgatgcaaatgcagcaaagttaattacaaatgattttgatgagaatgataaaccttttttaacaggagaacgttctcctgaaggtttcttttatgttaaagatggaattgaacaagcaatatcaagaggattagcatatgcaccttatgcagatctaatttggtgtgaaacagctgctccaaatttagaagaggctaaaaagtttgcagatgcaattcataaaaaatatccaggaaaacttttagcttataattgttctccatcatttaattggaaaaaacatttatcggacgaagaaatttcacaatttcaaaaaaaaattggagaaatgggatataagtttcaatttattactttagctggttttcatactcaaaacattgcaatttttgaattagcagaaaaatataaaaaagaaggtatgaccgcttattcaaaaattcaacaaaatgaatttgctagagaaaaagacggatatacaagtgttaaacaccaaagagaagtaggaacatcttattttgatgctgtttcaaacacaattagttcaggaaaaagctcgactacagccatggaaggttcaacagaagaagaacagttttaag

SEQ ID NO: 278606 - DNA, 694 bp, Unknown
  Bacterial polypeptide expressing nucleotide sequence isolated from the Sargasso Sea
aaagctggtgctgcaggagtccactttgaggaccaattagcaagtgaaaaaaaatgtgggcatatgggaggaaaagttttagttccaacatcaacagccgtaagaaacttaaaagcagcgagattagctgctgatattgcagatgtacctttaattatacttgcacgaacagatgccaatgcagcaaaactaataactaacgatcatgatgaaaatgataaacctttcttaactggtgaaagatctccagaaggcttttattatgttaaacatgggatcgatcaagcaatttcaagaggattggcttatgcaccttatgcagatttaatttggtgtgaaacagcaacacctaatttagaagaagctaaaaaatttgctgatgcaattcacagcaaattcccaggcaagattttagcttataattgttcgccatcttttaattggaaaaaacatttatcagatagtgagatagcaacttttcaacaaaaaatatctgaaatgggatataaatttcaatttattactcttgcagggtttcatacacaaaatattgcgatttttgaactggccgaaaaatataaaaaagagggaatgtcagcatattcaaaaattcaagaacaagaatttgaaagagaaaaagatggatatactagcgttaaacacaaaagagaagttggtacttcctcattttgat

SEQ ID NO: 278607 - DNA, 1003 bp, Unknown
  Bacterial polypeptide expressing nucleotide sequence isolated from the Sargasso Sea
tggttgcaagttgcagctgatgctaacagcgcaggtgaaatgtatcctgaccaatctttatatccttatgatagtgcaccaaaattagttgagacaatgaataattccctagttagagcagatcaaattcaacatatggaaatgatagatggtgacatggataaaagtaagagaactgattacatgttgccaattatagctgatggtgaagcaggatttggtggaccactaaacgtatttgaattaaccaaaaaatttattagagcaggtgctgctggagttcattttgaagaccaactagctagtgaaaaaaaatgtggtcatatgggtggaaaagttttagttccaactggaacaatggttagaaatttaaaggctgcaagacttgccgctgatattgcagatgtaccattaataattttagcaagaacagatgcaaatgctgcaaagttaatcacaaatgattttgatgaaaatgacaaaccatttttaaccggcgaaagatctcccgaaggtttcttttatgttagagacggaatagagcaggcaatttctagaggtcttgcttatgcaccatacgcagatttaatttggtgtgaaactgctactccaaatttagaagaagcaaagaaatttgctgaagctatacatgaaaaatttcctggtaaaatgttagcttataactgttcgccatcatttaattggaagaaacatttatctgatgaggaaattggatcatttcaaagaaagattggagaaatgggatataaatttcaatttattacattagcaggtttccacactcaaaatatcgcaatatttgaattagcagaaaaatataaatcagagggtatgaccgcttactcaaaaattcaacaacatgaatttgcgagagaaaaagatggatacacaagtgttaaacatcaaagagaagtaggtacatcttattttgatgcagtttcaaatacaataagctcaggcaaaagctcaactactgcaatga

SEQ ID NO: 278608 - DNA, 882 bp, Unknown
  Bacterial polypeptide expressing nucleotide sequence isolated from the Sargasso Sea
gcaaaagctgggtctaaaatcaatttatctaagtggttggcaagtggctgcagatgctaatagtgctggcgaaatgtacccggatcaatcattatatccatatgatagtgctccaaaacttgttgagtctatgaataacgctttgctaagagcagaccaaattcaacatatggaactaaaagatggtgatatgaaaaaagagaaaagaattgattatatgcttccaatcattgctgatggtgaagcaggttttggaggtccattaaatgtttttgaacttacaaaaaagtttattaaagctggtgcagcaggtgttcattttgaagatcaattagcgagtgaaaaaaaatgtggccatatgggtggcaaagtacttgtaccaacagggactatgattaaaaatttaaaagctgcaagattggcagctgatattgctgatgttccattgataattttagctagaacagatgcaaatgctgcaaaactaattacaaatgattttgatgaaaacgataaaccttttttaactggtgaaagatctccagaaggattttattatgtaaaatcagggattgaacaggcaatttcaagaggattagcatatgcgccttactcagacttaatttggtgtgaaacagctacaccaaatcttgaggaagctaaaaaattcgcagatgcaattcatgaaaaatttcctggaaaacttttagcgtacaattgttctccatcatttaattggaagaagcatttgtccgatgaagaaattgcttcatttcaaaaagaaataagtaaaattggctataaatttcaatttattacgcttgctggttttcatacacaaaatattgcaatttttgaattagcagaaaaatataaaaaaga

SEQ ID NO: 278609 - DNA, 865 bp, Unknown
  Bacterial polypeptide expressing nucleotide sequence isolated from the Sargasso Sea
ctgagtggatggcaagtagctgcagatgctaatagtgctggggaaatgtatcctgatcaatctttgtatccttacgatagtgcaccaaaattagttgagtctatgaacaatgccttactaagagcagatcaaatacagcatatggagcttttagatggtgatatgaaaaaagaaaaaagagttgattacatgttgccaattattgctgatggagaagcaggttttggtggtccattgaatgtatttgaacttgcaaaaaaatttattaaagctggtgcagcgggtgtccatttcgaagatcaattagctagtgagaaaaaatgcggccatatgggtggtaaggttcttgtaccaacaggtacaatgattaaaaatcttaaagctgctagattagctgctgatattgcagatgttcctttaattattttagcaagaacagatgcaaatgctgcaaaactaattacaaatgatcacgatgaaaatgataaaccatttttaactggagaaagatcaccagaaggattttattatgttaaagctggaatagaacaagccatttcaagaggtctagcatacgcaccctattcagatttaatttggtgtgaaactgcaacccctaatcttacagaggctaaaaaatttgcagacgcaatacatgaaaaatttcctggaaaacttttagcttataattgctcaccatcatttaattggaagaaacatttatcagatgaagagattgcctcatttcaacaggaaataagtaaaatgggctacaagttccaatttataactcttgctggatttcatactcagaatattgctatttttgaattagctgaaaaatataaaaaagaaggtatgtctg

SEQ ID NO: 278610 - DNA, 905 bp, Unknown
  Bacterial polypeptide expressing nucleotide sequence isolated from the Sargasso Sea
catgcaaaagctgggtttaaaagcaatttatttaagtggctggcaagttgcagctgatgctaacagcgctggtgaaatgtatcctgatcaatctttatatccatatgatagtgcaccaaaattagttgagacaatgaataattcactagttagagctgatcaaattcaacatatggagatgatagatggtgatatggataaaagtaagagaactgattacatgttgccaattatagctgatggtgaagctggatttggcggaccactaaatgtatttgaattaactaaaaaatttattagagcaggtgctgctggagttcactttgaagaccaattagctagtgagaaaaaatgtggacatatgggtggaaaagttcttgtaccaactggaacaatgattagaaatttaaaggctgcaagacttgccgctgatattgcagatgtaccattaataattttagcaagaactgatgcaaatgctgcaaaattaatcactaatgattttgatgaaaatgataaaccatttttaactggcgaaagatcacccgaaggtttcttttatgttaaagacggaattgagcaggcaatttctagaggtcttgcttatgcaccttacgcagatttaatttggtgtgaaactgccactccaaatttagaagaagcaaagaaatttgctgatgctatacatgaaaaatttcctggtaaaatgttagcttataactgttctccatcatttaattggaagaaacatttatccgatgaagaaatcggatcatttcaaagaaagattggagaaatgggatataaatttcaattcattacattagcaggtttccacactcaaaacatcgcaatatttgaattagcagaaaaatataaatcagaaggcatgactgcttactcaa

SEQ ID NO: 278611 - DNA, 905 bp, Unknown
  Bacterial polypeptide expressing nucleotide sequence isolated from the Sargasso Sea
catgcaaaagctgggtttaaaagcaatttatttaagtggttggcaagttgcagctgatgctaacagtgctggagaaatgtatcctgatcaatctttatatccatatgatagtgcaccaaaattagttgagacaatgaataattccctaattagagctgatcaaattcaacatatggaaatgatagatggtgatatggataaaagtaagagaactgattacatgttgccaattatagctgatggtgaagcaggatttggtggaccactaaatgtgtttgaattaactaaaaaatttattaaggcaggtgctgctggggttcactttgaagaccaattagctagtgagaaaaaatgtggtcatatgggtggaaaagttcttgtaccaactggaacaatggttagaaatttaaaggctgcaagacttgccgctgatattgcagatgtgccattaataattttagcaagaacagatgcaaatgctgcaaaattaattactaatgattttgatgaaaatgataaaccatttttaactggcgaaagatcaccagaaggtttcttttatgtaaaagacggaattgagcaggcaatttctagaggtcttgcttatgcaccttacgcagatctaatttggtgtgaaactgccactccaaatttagaagaagcaaagaaatttgctgatgctatacatgagaaatttcctggtaaaatgttagcttataactgttctccgtcatttaattggaagaaacatttatctgatgaagaaattggatcatttcaaagaaagattggagaaatgggatataaatttcaattcattacattagcaggtttccacactcaaaacatcgcaatatttgaattagcagaaaaatataaatcagagggtatgactgcttactcaa

SEQ ID NO: 278612 - DNA, 745 bp, Unknown
  Bacterial polypeptide expressing nucleotide sequence isolated from the Sargasso Sea
tgaagatcagttagcaagcgaaaagaaatgtggccatatgggcggtaaagttttggttcctaccagtacaatggtaaggaatttaaaagcagcaagattagcatcagatatcgcagatgttcccctaattattttagcgagaactgatgctaatgctgcaaaattaattacgaatgattttgatgaaaacgataaacctttcttaacaggagagcgctccccagaaggtttcttttatgttaaagatggtattgaacaagctatctcaagaggattggcatatgctccctatgcagatttaatttggtgtgaaacagcaacaccaaatttagaagaagctaaaaagtttgcagatgcaattcataaaaaatttccaggaaagttattagcttataattgctcgccatcatttaattggaaaaaacatttatccgatgatgatattgcacaatttcaaaaaaaaattggagagatgggatataaatttcaatttattactttagctggatttcatactcaaaatattgcaattttcgaattagcagaaaaatataaacaagaaggtatgaccgcatattctaaaattcaagaaaatgagtttgcaagagaaaaagatggatatacgagtgttaaacatcaaagagaggtaggaacatcatacttcgatgcagtttctaataccattagctcaggaaaaagctctacaacagcaatggaaggctcaacagagtcagaacaattctaa

SEQ ID NO: 278613 - DNA, 700 bp, Unknown
  Bacterial polypeptide expressing nucleotide sequence isolated from the Sargasso Sea
gatggtgaagcaggatgttggtggaccactaaatgtatttgaattaaccaaaaaatttataagagcaggtgctgctggggttcactttgaagaccaattagctagtgagaaaaaatgtggtcatatgggtgggaaagttcttgtaccaactggaacaatggttagaaatttaaaggctgctagactcgctgctgatatcgcagatgtaccattaataattttagcaagaacagatgcaaatgctgcgaagttaatcaccaacgattttgatgaaaatgataaaccgtttttaactggcgaaagatcacctgaaggtttcttttacgttaaagacggaattgagcaagcaatttctagaggtcttgcttatgcaccatacgcagatttaatttggtgtgaaactgctactccaaatttagaggaagcaaagaaatttgcagatgctatacatgaaaaatttcctggtaaaatgttagcttataactgttcgccatcatttaattggaagaaacatttatctgatgaagaaattggatcatttcaaagaaagattggagaaatgggatataaatttcagttcattacattagcaggtttccacactcaaaatatcgcaatatttgaattagcagaaaaatataaatcagaaggcatgactgcttactcaaaaattcaacagcatgaatttgctagagaaaaa

SEQ ID NO: 278614 - DNA, 1324 bp, Unknown
  Bacterial polypeptide expressing nucleotide sequence isolated from the Sargasso Sea
tatgactaaggcaacacagacttcacgtcaggcgcagattgacgcgatcaaaaaagattgggcagagaatccacgttggaaaaatgttcgtcgcccatacactgcagaagaagtcgtggcacttcgtggttctatcgtacccgaaaacaccattgccaaacgcggtgccgctaaactgtgggatttagtcaacggtgccgcaaaaaaaggttatgtgaactcgttaggtgcactgactggcggccaagcggtacaacaggctaaagccggtatcgaagcgatttacctgtctggttggcaagtggcggccgacgctaacttagcgggcactatgtacccagaccaatcgttatacccagcaaactctgtacctgctgtcgtttcacgtattaacaattcattccgccgtgctgaccaaatccagtggagcaatggggttaatccggaagatgaaaactttgtcgattacttcctacccatcatcgccgatgcggaagcaggttttggtggtgtactgaatgcgttcgagttgatgaagtcgatgatcgatgcgggcgcagcaggtgtgcactttgaagaccaattagcgtcagtgaaaaaatgcggccatatgggcggtaaagtattagtgccaacccaagaagcggtacaaaagttagttgcggcgcgccttgctgctgacgtgagcggagttgaaacgctggttattgcccgtaccgatgcgaacgcagcggatttattaacctctgattgcgacccatacgatcgtgactttgtgactggcgagcgcactagtgaaggtttctaccgcgtgaaagcgggtctggaccaagcgatttctcgcggtctcgcctacgcaccttatgcggatttaatctggtgtgaaaccgctaagcccgatttagaagaagcacgccgctttgctgaggcaatccatgctcagtaccctgatcaattgctggcctacaactgttcaccttcgttcaactggaagaaaaacttggacgatgcaacgattgcccgtttccaacaagcactatcggacatgggctacaagtaccaattcatcaccttagcgggtatccacaacatgtggtacaacatgtttgacctagcttacgactacgctcgtggtgaaggtatgaagcattatgttgagaaagttcaagaagttgagtttgcggcagcgaagaaaggttataccttcgtggcgcatcaacaggaagtgggcacaggttatttcgaccaagtgactacggttatccaaggtggtcattcatcagtgacagcgctgacgggatctaccgaagaagagcagttttaa

SEQ ID NO: 278615 - DNA, 1279 bp, Unknown
  Bacterial polypeptide expressing nucleotide sequence isolated from the Sargasso Sea
atgagctctgagcaaaaaataagttatgatttaaaaagatttgcagggattaaaagagattatactcaagaagaagtagagagacttaagggttcactaaaaatagaatattcaattagtaaacaacaatcagaaaaactttggaatttgcttaatacagagtcatatgtaaatacgctgggttccctttcagggaatcaggctgttcagcatgctaaagcaggtttaaaagcaatttatttaagtggatggcaggtagctgcagatgccaatagtgctggtgaaatgtatcctgaccaatcattatatccttatgatagtgccccaaaactagtggaggcaatgaataattctttaattagagctgatcaaattcaacacatggaattatcagatggggacatgaaaaaagaaaataaaattgattatatgttacccataattgctgacggcgaagctggatttggtggaccattaaatgtattcgaacttacaaaaaaatttattagagcaggagcggcaggagtacattttgaagatcaattagcaagtgaaaagaaatgtggtcatatgggaggtaaagttttagttcccactggcacaatgattaaaaatttgaaatctgctagattagcttcagatatagcagatgttccattaattatattagcaagaacagacgccaatgctgcaaaattaataactaatgattttgacgaaaacgacaaaccttttttaactggtgagagatcacctgagggtttcttttatgtaaaagatgggattgatcaagctatctctagaggtttagcatacgcaccctatgcagacctaatatggtgtgagacagctactccaaatttagaagaagctaaaaagtttgcagatgcaattcatgcaaaatttcctggaaaacttctagcatataattgttctccatcatttaattggaaaaaacatttgtcagatgaagagatagcttcttttcaaattaagattggagaaatgggttataagtttcaatttattactcttgctggttttcatactcaaaatattgcaatttttgaattagctgaaaaatataaaaaagaaggaatggccgcatattctaaaattcaacaaaatgagtttgcaagagaaaaagatggatatacaagcgttaaacatcaaagagaagttggaacatcttatttcgatgcagtatcaaatactattagttctggaaaaagttccacaacggctatggaaggctcaacagagtctgaacagttttaat

SEQ ID NO: 278616 - DNA, 1248 bp, Unknown
  Bacterial polypeptide expressing nucleotide sequence isolated from the Sargasso Sea
aatgtcagctgaaaatatatcttacgacttaaaaagatttgcaggaataaaaagggactatactccagaggaagtggaaagattgagaggatccataaaaatagaatattcaatgtgcaagatgcaatcacaaaaactatggaaattgttaaattcagaaccttatgtaaatactcttggatctctttcaggaaatcatgcagttcagcatgctaaagcaggcttaaaagcaatttatcttagcggatggcaagtagctgcagatgctaatagtgctggagaaatgtatcctgaccagtctttatacccttatgatagcgcacctaaattagttgaaacaatgaataactctttaattagagcagatcaaattcaacatatggaaattatagatggtgatatggataagagtaaaaaagtagattacatgttaccaataattgcagatggtgaagcaggatttggaggtcctttaaatgtgtttgagcttacaaaaaaatttattagagctggagctgccggtgttcattttgaagatcaattagctagtgaaaaaaaatgtggacatatgggcgggaaagttttggttccgactagcacaatggtccgcaacttaaaatcagcaaggcttgccgcggatattgcaaatgttcctttgataattcttgcaaggacagatgccaatgcagcaaaattaattacaaatgattttgacgaaaatgataaatcttttttaacaggagaaagatcgccagaaggatttttctatgtgaaagatggaatagaacaggctatttctagaggtttagcttatgctccatatgctgatttaatttggtgtgaaacagcaacacctaatcttcaagaggcaaaaaaatttgctgatgcaattcatgctaagtttccaggtaaaatgttagcttataattgttcgccatcttttaattggaaaaaacatttgtcagataatgaaatagggtcttttcaaagaaaaattggtgaaatgggatataaatttcaatttataaccttagcaggatttcatacacagaatattgcaatatttgaattagctgaaaaatataaaaaagagggtatggctgcatattctaaaattcaagaaaatgaatttgcgagagaaaaagatggatatacaagtgttaaacatcaaagagaagttggcacatcatattttgatgcagtttcaaatacaataagttctggaaaaagctccacaacagcgatgaa

SEQ ID NO: 278617 - DNA, 1309 bp, Unknown
  Bacterial polypeptide expressing nucleotide sequence isolated from the Sargasso Sea
atgtcgcgtcagcaacaggcacaggaactgcagcagcaatgggaatccgatccgcgctggaagggcgtcgagcgcagctactcggctgaggacgtggtccgcctgcgtggttcgatcccgatcgagcacacgctcgccaagcgcggcgcggaaaagctgtggagcctcgtcaacaacgagccgttcgtcaacgcactcggcgcactgaccggcaaccaggcgatgcagcaggtgaaggccggcctgaaggcgatctacctgtccggctggcaagtggccggcgacgcgaacgtcgcgggcgaaatgtacccggaccagtcgctgtacccggcaaactcggtgccgctcgtcgtgaagcgcatcaacaacacgctgacgcgcgccgaccagatccagtggtcggaaggcaagaacccgggcgacgaaggctatatcgatttcttcgcaccgatcgtcgccgatgcggaagccggtttcggcggcgtactgaacgcattcgagctgatgaaggcgatgatcgaagccggcgcgtcgggcgtccacttcgaggaccagctcgcttcggtgaagaagtgcggccacatgggcggcaaggtgctcgtgccgacgcgcgaggccgtcgcgaagctgtcggcggcgcgtctcgcggccgacgtgatgggcacgtcgaccgtgctggtcgcccgcaccgacgcggaagcggccgacctgatcacgtccgacgtcgacgacaacgacaagccgttcctgacgggcgagcgcacggtggaaggcttcttccgcacgaagccgggcatcgagcaggcgatttcgcgcggtctcgcctacgcgccgtacgccgacctggtctggtgcgaaacgggcaagccggatctcgagtacgcgaagaagttcgcggaagcgatccacaagcagttcccgggcaagctgctgtcgtacaactgctcgccgtcgttcaactggaagaaaaacctcgacgacgcgacgatcgcgaagttccagaaggaactcggcgcgatgggctacaagttccagttcatcacgctggccggcttccatgcgctgaactactcgatgttcaacctcgcacacggctatgcccgcacgcagatgagcgcgttcgtcgaactgcagcaggccgagttcgcggcagcggacaagggcttcacggccgtcaaacaccagcgcgaagtcggcacaggctacttcgacgcggtgacgcagacggtcgagcgcgaagcatcgaccaccgcattgcacggctcgaccgaagacgagcagttcttcgacggcaagaaggtcgcgtaag

SEQ ID NO: 278618 - DNA, 742 bp, Unknown
  Bacterial polypeptide expressing nucleotide sequence isolated from the Sargasso Sea
gaccaattagctagtgagaaaaaatgtggtcatatgggcggaaaagttttagttccaactggaacaatggttagaaatttaaaggctgcaagacttgctgctgatattgcagatgtaccattaataattttagcaagaacagatgcaaatgcagcgaagctaatcactaatgattttgatgaaaatgataaggaatttttgactggcgaaagatcacctgaaggtttcttttatgttaaagatggaatagagcaagcaatttctagaggtcttgcttatgcaccatacgcagatttaatttggtgtgaaaccgctactccaaatttagaagaagcaaagaaatttgctgatgctatacatgaaaaatttcctggtaaaatgttagcttataactgttctccatcatttaattggaagaaacatttatccgatgaggaaattggatcatttcaaagaaagattggagaaatgggatataaatttcagtttataacattagctggttttcatactcaaaacatcgcaatatttgaattagcagaaaaatataaatcagaaggcatgactgcttactcaaaaattcaacagcatgaatttgctagagaaaaagatggatacacaagtgtgaaacatcaaagagaggtaggcacatcttattttgatgcagtttcaaatacaataagctcaggtaaaagctcaactacggcaatggaaggctcaaccgagtcagaacagttttaga

SEQ ID NO: 278619 - DNA, 1198 bp, Unknown
  Bacterial polypeptide expressing nucleotide sequence isolated from the Sargasso Sea
atgaataaacttagatctgcaaatgatatccagaaagactgggatactaatccaagatggaaaaatgtaaaacgagactatactgctgaagaagtagcaaaatgtagtggtagcgtgagaatcgagcatactttagctagaaatggtgccgaaaaactatggaatcttataaatacagaggattttgttaacgctcttggagcattaactggaaatcaagctatgcaacaggcgaaagcaggattaaaagctatttacttatcaggttggcaggtagcaggtgatgcaaatactgggatgcaaatgtacccagatcaatctctttaccctgttgacagcgtcccaagtgttgttaaaagaattaataattcattaagaagagcagatcaacttaatattgctgaaggaaatgacgtaattgattatatgcttcctattgttgctgacgctgaagctggctttggtggggtgttaaacgcatttgaattaatgaaggcaatgatcgaagctggcgcagctggtgttcattttgaagatcaattagcatctgcaaaaaaatgtggacatatgggagggaaagtacttgtgcctactcaagaagcagttcaaaaacttgctgcagcaagattagcgtcagatgtttcagaagtcccaactgttcttcttgcaagaactgatgcagaggcggcaaatcttataacgagtgatattgatccaagagaccaggagttctgtacaggcgaaagaactgcagaaggattctacagagttaaaaatggtattgatcaagctatatctcgtggtctggcatatgcaccatatgcagatttagtttggtgtgaaaccggagtcccagatctagagtttgctaagcaatttgcagaagctctaaaaaaagaacatccagaacaattattagcatataactgttcaccatcatttaattggaagaaaaaattggatgattctcaaattgcaaaatttcaaaaagagttaggtgcgatgggatataaattccagttcataactctagctggatttcatgctttaaatcatagtatgtttgagttagcaaaaggttataatgaaagtcaaatgacggcttatgtgaaattacaagaagctgaatttgcatctgaaaaaaatggttatacagctactaaacatcagagagaagtagggactggttattttgata

SEQ ID NO: 278620 - DNA, 953 bp, Unknown
  Bacterial polypeptide expressing nucleotide sequence isolated from the Sargasso Sea
taaattagtagaatctatgaataatgctttaataagggctgatcaaatccaacatatggaattaaaagatggtgacatgaaaaaagataaaagaattgattatatgttaccaattattgctgatggtgaagctggctttggtggacctttaaatgtatttgaacttgcaaaaaaatttatcaaagctggtgcagctggtgttcattttgaagatcaattggcaagtgaaaaaaaatgtggtcatatgggtggtaaagttttagttccaactggtaccatgatcaaaaatttaaaagcagctaggttagcagctgatattgcagatgtacctttaataattttagcaagaactgacgctaatgctgcaaaattaattacaaatgattatgatgaaaacgataaaccttttttaacaggtgaaagatcactggagggtttctattatgttaaagctgggattgaacaagcaatatccagaggtcttgcgtatgcaccctactctgatttaatttggtgcgaaactgctacaccaaatttagaggaagcaaagaaatttgcagatgcaattcacgaaaaatttcctggaaaacttttagcatataattgttctccatcatttaattggaaaaaacatctatcagatgatgagatagcatcgtttcaacaaaaaattagtcaaatgggttataaatttcaatttattactttagcaggatttcatacacaaaatattgcaatttttgagctagctgaaaaatataagaaagaaggtatgacagcatactcaagaattcaacaacaagaatttgctcgtgaaaaagatggatatactagtgttaaacatcaacgtgaagttggtacatcttattttgatgccgtatccaatacaataagtagtggacaaagttccaccacggcaatggcaggctcaactgagtccgaacaattctaat

SEQ ID NO: 278621 - DNA, 1276 bp, Unknown
  Bacterial polypeptide expressing nucleotide sequence isolated from the Sargasso Sea
tatgtcagctgagaacgtttcatacgacttaaaaagatttgcaggaattaaacgtgattataaacctgaggaaatagagagacttagaggctcaattaaaattgaatattccttatgtaaacagcaatcaatgaagttgtggaacttattaaactccgaaccttatgtaaataccttaggatctttatcgggaaatcatgcggttcaacatgcaaaagcaggattaaaggcaatttatttaagtggatggcaagttgctgcagatgctaatagcgctggtgaaatgtatccagatcaatcattatatccatatgatagtgcgccaaaattagttgattctatgaataacgctctaataagagcagatcaaattcaacatatggaaattcaagacggtgacatgaaaaaagaaaataaagttgattacatgttgccaattattgcagatggtgaagcaggatttggaggacctctaaacgtttttgaacttgcaaaaaaatttattaaagctggagcagctggagttcattttgaagatcaattagcaagtgaaaaaaaatgtggtcacatgggtggaaaagttttagttccaactggtacaatgataaaaaatttaaaggctgcgagacttgcagctgatattgcagatgttccattaattattctagctagaacagatgctaatgcagcaaaattaattacaaatgatcatgatgaaaatgataaaccttttttaacaggtgaaagatcaccagagggtttttattatgtaaaatcgggaatagaacaggcaatttcaagaggcttagcttatgctccatattctgacttaatttggtgtgaaacagcaacaccaaaccttgaagaagctaaaaaatttgccgacgcaattcataaaaaatttccaggaaaacttcttgcttataattgttcaccttcatttaattggaaaaaacatttatccgatgcagagattgcttcattccaagaagaaataagtaaaatgggatataaatttcaatttattactcttgctggatttcatacacaaaatattgcaatttttgaacttgcagaaaaatataaaaaagaaggtatgactgcctactcaagaattcaacaacaagaattcgcacgtgagaaagacggctacacaagtgttaaacatcaaagagaagttggaacttcgtactttgatgcagtatcaaatactattagttccggaaaaagctcaaccacagccatggatggttcaacagaatctgaacaattttaa

SEQ ID NO: 278622 - DNA, 991 bp, Unknown
  Bacterial polypeptide expressing nucleotide sequence isolated from the Sargasso Sea
tatgacaaaaagtttctatgatttagttccttcagcgcctgaaggtcgctatgatggaattgatagaccatactcagttgaagaagttgaaagacttagagggtcatttcctattgaatatacactggctacaagaggatctaatagattatgggatttacttcattcagaagaccaagtctcatctttaggtgcgctctcaggtaaccaagctatgcaaatggttaaagctggtttaaaagctatttatttatctggatggcaagtcgctgccgataataatacagctggttctacatatcctgatcaaagtctttatcctgctaactcaggaccagaacttgcaagaaaaattaacagaactttgcaaagagctgatcaaattgagcattctgaaggcggcgcccaaagagaatggtttgcaccaattgttgctgatgctgaagcgggttttggcggtccactaaattgctatgaaattatgagagcatatattgaagcaggtgcttccggtgttcattacgaagaccaacttgcttctgaaaaaaaatgcggtcacatgggtggtaaagttcttatacctaccaaacagcatgttagaaatttgaatgctgctagattagcagctgatgtgtgtggtgttccaacattaatagttgctagaactgatgctgaaagtgctaagcttatcacatctgatgcagatgaaagagatcatgaatttattgatgaatccgatagaacacctgaaggattctacagattaaaagatggcacaggggttgataattgtattaaaagagctcttgcttacgctccatatgcagatttaatttggatggagacatcagtgccgagtcttgaagtagcaaaacagttttctgatgcagtaaaaaaagaatttccaaatcaaatgttagcctataactgttctccaagctttaattggaaagctaaccttgatcttgatactatgaaacatcagagaaga

SEQ ID NO: 278623 - DNA, 1282 bp, Unknown
  Bacterial polypeptide expressing nucleotide sequence isolated from the Sargasso Sea
aatgactaaactcaaatcagcaaaagatatacaaagcgattgggattctaatcctagatggaaaaatgttaaaagaggatactcagcagatgatgttgtacgtttaagcggaagtattgctatcgaacatagtctcgcacatcaaggagctacaaaactctgggatttaatcaatacagaggatttcgtaaacgcacttggcgcattgacgggtaatcaggcactccaacaggcaaaagcaggacttaaagcagtctatttatctggatggcaggtcgcaggtgatgctaatactggaatgcaaatgtatcccgatcagtcattataccctgttgatagcgttccagccgtggtgaaaagaattaataatgctttgagaagagctgatcaacttaatattgcagaggggaatgagccagttgactatatgttaccaatagttgcagatgcagaagctggctttggaggtgtgttaaacgcatttgaacttatgaaagcaatgatagaatctggagctgcaggtgtacattttgaagatcaactagcatcggcaaagaagtgtggtcatatgggaggaaaagtccttgtgccaactcaagaagctgtacagaagcttattgctgccagactagcggccgatgtttccggtacaccaactgttcttttggctaggactgatgccgaggctgcaaatcttttaacaagtgatattgacgaacgcgatcaagaattctgcactggtgaaagaactgcagaaggtttttatcgtgtaaaaaatggaattgatcaagctatttcaagaggtcttgcatatgctccatatgctgatttagtttggtgtgagactggtgttcctgatctggattttgcaaaaaaatttgctgaggcattaaaaaaagagtacccagagcaaatgctagcgtacaattgttcaccatcatttaattggagaaaaaatttagacgattcaacaattgcgaagttccaaaaagagcttggcgcaatgggttataaatttcaattcataactcttgctggttttcatgctctgaattatagtatgtttgagttagcacgaggctataaagaagaacagatgtctgcttatgtgaaacttcaagaagcagagtttggcgctgagagtataggttatacagctacaaagcatcaaagagaagttggtacaggttattttgacgaagtaacgcaagtgataactggtggtcagtcctctgttacggcattaaccggatctacagaagaagatcagtttgataagtaa

SEQ ID NO: 278624 - DNA, 1279 bp, Unknown
  Bacterial polypeptide expressing nucleotide sequence isolated from the Sargasso Sea
aatgaatttaaatgaacaagtattagaattaaaaaatgactgggagatgaatgaaaggtgggcttatgtaaaaaggccatattcagcagaggaggttgttaagctaagaggttctcttcaacctgaatatactttagcaagagttggagcggagaagctttggaatatgctccataaagaagattatgttaattgcctaggtactttaactggggggcaggcagtgcagggagtgaaggctggtgcaaaagcaatttatgtatctggatggcaagtagcagcagataataatagcgctgaagcaatgtatcctgatcaatctttgtatccagttgattcagttccttctttagtaaaaagaataaacagttcttttaaaagagcagaccaaattgaatggatgagctctaatggtagtccaaaatttgacttttttacaccaatagtagctgatgcagaagctggttttggtggagttttaaacgcttttgagcttatgaaagctatgataaaagcaggagctgctggagtacattttgaagatcagctagcaagcgtaaaaaaatgtggtcatatgggcggtaaagtccttgtaccaacacaagaggcaataaataagcttgttgcagcaaggttagctgcagatgtttcaaatgttccaactttattagttgctagaacggatgctaatgcagcagaattacttacttctgacattgatgagagagatgctgagtttgttactggagaaagaacaactgaaggtttttatagagtaaaaccaggcattcaacaagcaatttcaagaggtctttcatacgctccatactctgatttattatggtgtgaaacaggaaagcctaatcttgaagaagcaaaactattcgctgaatcaattaagaaagatcatcctgaattaatgttagcttataattgttctccatcatttaattggaaaaagaatcttgatgatgctacaatagctaagttccaaagagagcttggtgcaatgggttataaattccaatttataactcttgccggaattcactcaatgtggcatggtaagtttgatttgacaaaaaactatgttaaatctggcatgactgcttatgtagaattacaagagaaagaatttgcagatcatgataagggatatactttttctgcacatcaacaagaagtaggtacaggctactttgatgcagttaataattgtattgttggagatccttcaacgagcgccatggatggctcaacagaagaagaacagttttaa

SEQ ID NO: 278625 - DNA, 1084 bp, Unknown
  Bacterial polypeptide expressing nucleotide sequence isolated from the Sargasso Sea
aatcatgcagttcaacatgcaaaagctggactaaaagctatttatttaagtggatggcaagtagctgcggatgctaacagtgctggtgaaatgtatccagatcaatctttgtatccttatgacagtgctcctaaattggttgagtcaatgaataatgctttaataagagcagatcaaattcaacatatggaattactagatggtgacatgaaaaaagaaagtaaagtagattatatgttgccaattattgctgatggtgaagctggatttggtggtccattaaatgtttttgaacttgcaaaaaaatttattaaagctggtgcagctggtgttcattttgaagatcaattagctagtgaaaaaaaatgtggtcatatgggaggaaaagttcttgttccaacaggaactatgattaaaaatttaaaggctgcaagattggccgctgatatagctgatgtaccattaattatacttgctagaaccgatgctaatgcagcaaaactaattacaaacgatcatgatgaaaatgacaaatcatttttaactggtgaaagatctccagaaggattctattatgttaaagcaggtatcgatcaagctatttctagaggtttagcttatgcaccatattcagatttaatttggtgtgaaacggcaacaccaaatttagaagaagcaaaaaaatttgctaatgcaatacatgaaaaatttccagaaaaacttttagcttataattgttctccatcatttaattggaaaaaacatttgtcagatgatgaaattgcttcttttcaaaaagaaataagtaaaatgggttataagtttcagtttataactttagcaggatttcatactcaaaatattgcaatttttgaattagcagaaaaatataaaaaagaaggtatgactgcttattcaaaaattcaacaacaagaatttgctcgtgaaaaagatggttatactagtgtaaaacatcaaagagaagtagggacctcttattttgatgctgtctctaacactatcagtagtgggaaaagctcaactacagcaatggaaggttctacagaatctgaacaattctaat

SEQ ID NO: 278626 - DNA, 1282 bp, Unknown
  Bacterial polypeptide expressing nucleotide sequence isolated from the Sargasso Sea
aatgaatttaaacgatcaagtggctgctttagaaaaagattgggctgaaaattctcgatggaagcacgttaaaagaccatattctgcgaaggaagttgtcaaattaagaggttctttacagcctgaatgtacattggctagaaaaggagcagaaaaactctggaattacctatttacagaggattacatcaattgtttaggcgctttaactggtggacaggctgttcagcaggtaaaagctggcgttaaagccatttatctatcaggttggcaggttgcagcagacaataattcagctggcacgatgtatcccgatcaatcgctctatcctgtcgattctgtacctaaagttataacaagaattaacaatgctttcagaagagcagatcagattgagtggatgaactccaatggcgagccaaaagtcgatttctttgctccaattattgccgatgcagaagcgggttttggcggcaatttaaatgcttttgagctaatgaaaagaatgattgcagcaggtgctgctggagtgcacttcgaagatcaattagcaagcgttaaaaaatgcggtcatttaggcggaaaagttctagttccaactcaagaagcggtgcaaaaattaatcgctgctcgactagctgctgatgtatcaaatacacctacaattttaattgccagaacagacgctgatgcagcggatttagtgacatcagacgtagatgaaaacgacaaaccattcttgactggtgagagaacttcagagggcttttttagaaccaatgcaggacttgatcaagctattgcaagaggcttggcttatgcaccctattctgatcttgtatggtgtgaaacatctaaaccagatctagagcaagctaaaacctttgctgaagctatcaagaaagatcatccagaaattatgttggcatataactgttcaccatctttcaattggaaaaagaaccttgatgatgcaactatagccaaattccaaaaagaacttggtgctatgggttataaatttcagttcatcactttagctggcattcactcaatgtggcatggcatgtttaacctagcaaacgaatacgttgcagatggcatgacagcttacgtcaagctacaagaaaaagagtttgaagatgctaaaaaaggctacacttttgtatcacatcaacaggaagttggaacaggttattttgatgcagtaaacaactgcatacaaggtgaagagagctcaacttctgcactcaaaggatctacagaagaagaccagttttag

SEQ ID NO: 278627 - DNA, 1276 bp, Unknown
  Bacterial polypeptide expressing nucleotide sequence isolated from the Sargasso Sea
tatgagcgctgagaaaattatagatcaagtaaataacataacttcatttgatagtgaattcacaaaacaagacgttgagcgattaagaggttcaattaagattgaatattctttatgtaaacaattatctctaaaattaagaaaactactaaatgatgaaaactatgttaatactcttggttgcatgtcgggtaaccacgcggttcaacatgctaaagcaggattaaaagctatatacctcagtggttggcaagtagctgctgatgcaaacacagctggtgagatgtatccagatcaatcactttatccttatgatagtgcccctaaattagttgagtcaataaataacgctttgttaagagcagatcaaattcagcatatggaaattgctgatggagatatgactaaagaaaacaagatagactatatgctgccaatcattgcagatggagaagccggttttggaggtccattaaatgtttttgaacttactaaaaaatttattaaagctggtgtagcaggtgttcattttgaagatcaattagcgagtgaaaaaaaatgtggacatatgggtggtaaagttcttattccaacaggatcagcagtaaaaaatttaaaggctgcaagacttgcagcagatatcgctgatgttccattagtaatttgtgcaagaactgatgccaatgctgcaaaacttattactaatgattatgatgaaaatgataaaccatttttgactggtgaaagatcaccagaaggttttcattatgtaaaacatggaattgatcaagccatttcaagaggtttagcttatgctccatattgtgatttaatttggtgcgaaacagctactcctaacttagaagaagctaaaaaatttgctgatgcaattcatgcaaaatatccaggacaaatgttagcttacaattgctctccttcttttaattggaaaaaacatttaagtgacgatgaaatagcatcatttcaaaaagagatttctaaaatgggttataaatttcagttcattactttagcgggatttcatacacaaaatattgcaatttttgaacttgctgaaaaatatagaaaagaaggtatgtctgcttactcaagaatccaggagcaagaattcgcaagagaaaaagatggttataccagtgtgaaacaccaaagagaagttggtacatcttatttcgatgcagtatcaaatactattagcagtggtcaaagctcaacaaacgcaatgactggctctacagagtcggaacaattttaa

SEQ ID NO: 278628 - DNA, 1279 bp, Unknown
  Bacterial polypeptide expressing nucleotide sequence isolated from the Sargasso Sea
atgtcatcagagggtaaagtatcatttaaattaaaaagatttgcaggaataaagagagattataccccggaggaagttgaaagattaaaaggatcaatcaagattgaacattcaatttgtaaacagcagtccgaaaaactttggaaattattaaatacagaatctcatgttaatacacttggatctctatcaggaaatcaagctgtgcaacatgcaaaagcaggtctaaaggcaatttatttaagcggttggcaagttgcagcagatgcaaatagtgcaggagaaatgtatccagatcaatctctttatccttatgatagtgcgccaaaattagtagaggcaatgaataatgctttaataagagcggatcaaattcagcatatggaaattttagatggtgatatgaaagaaaaagatagaaccgattatttattaccaattgttgcagatggagaggcgggatttggtggtcctttaaatgtatttgaattaacaaaaaaatttataaaagcaggtgccgcgggtgttcactttgaagatcaattagcaagtgaaaaaaaatgtggtcatatgggtggtaaagttttagttccaactagcacaatggttaggaatttaaaggcagcaagattagcatcagatatcgctgatgttccccttattcttttagcgagaactgatgctaatgctgcaaaacttatcacaaatgattttgatgaaaatgataaaccctttttgacaggtgaaagatcacctgaaggattcttttacgttaaggacggtattgaccaagctatctcaagaggattagcatatgctccatatgctgatttaatttggtgtgaaactgctactcctaatttagaagaagcaaaaaaatttgctgatgcaattcatgaaaaatttccagggaaattacttgcctataattgttctccgtcatttaattggaaaaaacatttatctgatgatgaaattggatcattccaaaataaaattgctgaaatgggttataaatttcaatttataactctagcgggtttccatacacagaatattgctatttttgatttagctgagaaatataaagaagaaggaatgactgcctattctaaaattcagcaacatgaatttgctagagaaaaagatggatacacaagcgttaaacatcaaagagaagttggaacatcttattttgatgcagtatccaacacaataagttcaggaaaaagttctactaccgcaatggacggatctacagagtctgagcagttctaaa

SEQ ID NO: 278629 - DNA, 796 bp, Unknown
  Bacterial polypeptide expressing nucleotide sequence isolated from the Sargasso Sea
atttgagctaacaaaaaagtttattaaagctggtgcagcaggtgtccattttgaagatcagcttgcgagtgaaaaaaaatgtggtcatatggggggtaaagtattagttccaactggaacaatgataaaaaatttaaaagctgcaaggctagctgcagatatagctgatgtgcctttaataattcttgccagaacagatgcaaacgccgcaaaacttattacaaatgatcatgatgaaaatgataaaccttttttaacaggagaaagatctcctgaaggtttttactatgttaaggacggtattgatcaagcaatttccagaggccttgcatatgcaccttatgctgatttaatatggtgtgaaactgctacacccaatattgaggaagcaaaaaaatttgcagatgcaatacacgaaaaatttccaggaaaaattttagcatataattgttctccatcttttaactggaaaaaacatttgtcagataaggaaatatcttcttttcaacaaaaaattggttcaatgggatataaatttcaatttataacattagcagggtttcatacacaaaatattgcaatttttgaacttgcagaaaaatataaaagtcaaggaatggctgcttactcaaaaattcaagaacaagaatttgcaaaagaaaaagatggatatactagtgttaagcaccaaagagaagtaggtacttcatattttgatgcagtatcaaatactattagttcaggaaaaagttctacaacagcaatgaagggatcaactgaggaagaacaattttaa

SEQ ID NO: 278630 - DNA, 597 bp, Unknown
  Bacterial polypeptide expressing nucleotide sequence isolated from the Sargasso Sea
ctaatgctgctaaattaattacaaacgattttgatgaaaatgataaaccttttttaacaggagaaagatcacctgagggtttcttttatgtaaaagatggaatagatcaagcaatttctagaggtctagcttatgcaccctatgctgacttgatttggtgcgaaacagcaactccaaatttagaggaagctaaaaaattcgcagatgctatacatgctaaatttccaggaaaacttttagcatacaattgctctccatcatttaattggaaaaaacatttatcagataatgaaatagcaacttttcaaaaaaaaataggtgaaatgggatataaatttcaatttataactcttgcaggatttcatacacaaaacattgctatatttgatttggctgaaaaatataaaaaagaaggtatggctgcctattcaaaaatacaagaacatgagttcgcacgtgagaaagatgggtatactagcgttaaacatcaaagagaagttggaacttcatattttgatgctgtatcgaatactattagttctggtaaaagttcaaccacagcaatggaaggctcaacagagtctgaacaattttaat

SEQ ID NO: 278631 - DNA, 1282 bp, Unknown
  Bacterial polypeptide expressing nucleotide sequence isolated from the Sargasso Sea
atgaatttaaacgatcaagtggctgccctaaagaaagattgggccgaaaattctcgatggaagcatgttaaaagaccatattctgccgaagaagttgtcaagttaagaggttctttacagcctgaatgtacattagctagaaaaggagcagaaaaactctggaattacctatttacagaggattacatcaattgtttaggtgccttaactggtggacaagctgttcaacaggtaaaagctggtgttaaagccatttatttatcgggttggcaggttgcagcagacaataattcagctggcacaatgtaccccgatcaatcactctatccagttgattctgtaccaaaagtaataactagaattaataatgctttcagaagagcagaccaaattgagtggatgacctctaatggagaaccaaaagtcgatttctttgcaccaattattgccgatgctgaagcgggttttggcggcaatttaaatgcttttgagctaatgaaaagaatgattgcagcaggtgctgctggagtgcacttcgaagatcaattagctagcgtaaaaaaatgcggtcatttaggtggcaaagtcctggtgccaacgcaagaagcggtgcaaaaattaatcgctgctcgactagctgccgatgtatcaaatacacctacaattttaattgctagaacagacgctgatgcagcggatttagtgacatcagacgtagatgaaaacgataaaccattcttgactggtgagagaacttcagagggcttctttagaaccaatgcaggacttgaccaagctattgcaagaggcttggcttatgcgccctactctgaccttgtgtggtgtgaaacatctaaaccagatctagaacaagctaaaacctttgctgaagctatcaagaaagatcatccagagattatgttggcatataactgctcaccatctttcaattggaaaaagaatcttgatgatgcaactatagctaaattccaaaaagaacttggtgctatgggttataagtttcagttcatcactttagctggtattcactcaatgtggcatggcatgtttaacctagcaaacgaatacgttgcagacggcatgacagcttacgttaagctacaggaaaaagagtttgaagacgctaaaaaaggctatacttttgtatcacatcaacaggaagttggaacaggctattttgatgcagtaaacaactgcatacagggtgaagaaagttcaacttcagcattgaaaggatctactgaagaagatcagttttaat

SEQ ID NO: 278632 - DNA, 1078 bp, Unknown
  Bacterial polypeptide expressing nucleotide sequence isolated from the Sargasso Sea
atgagtgcagaaaaaatctcatacaacttaaaaagatttgctggaataaaaagagactatacagaagaagaagttgaaagattaagaggctcaattaaaattgaatattctttgtgtaaaaaccaatctcaaaaactttggaaattattaaattctgagccatacgtgaacacacttggctctttgtcaggtaatcaggcggtacaacatgcaaaagctggtttaaaagcaatttatttaagtggatggcaagttgctgctgatgcaaatacagctggtgaaatgtatccagatcaatctttatatccttatgacagtgcaccaaaattagttgagtctatgaataattctttaatcagagctgatcaaattcaacatatggaaatgcaagacggtgatatgaaaaaagaagatagaacagattacatgttgcctattattgctgatggtgaagctggatttggtggtccattaaatgtatttgaattaactaaaaaatttataagagcaggtgctgcaggtgtacactttgaagaccaactagctagtgaaaaaaaatgtggtcacatgggtggtaaagttttagtaccaacaggaacaatggtaaaaaatcttaaagctgcaagattagctgctgatattgcagaggttccattaattattttagctagaactgatgcgaatgctgcaaaactaattacgaatgattttgatgaaaatgataaaccatttttaacaggtgaaagatctcctgaaggttttcattatgtaaaagatggaattgaacaagctatctctagaggattagcttatgcaccttatgctgatttaatttggtgtgaaacagcaacacctaatttagctgaagctaaaaagtttgctgatgcaatacatgaaaaatttcctggaaaacttttggcttataattgttcaccttcttttaattggaaaaaacatttaagcgatgatgaaattgcttcattccaacaagaaattgcaaaaatgggttataaatttcaatttattactcttgctggttttcatactcaaaatattgcaatctttgaacttgctgaaa

SEQ ID NO: 278633 - DNA, 1238 bp, Unknown
  Bacterial polypeptide expressing nucleotide sequence isolated from the Sargasso Sea
tgcaggaataaaaagagattatactccagaggaagtagaaagattgagaggatcggttaaaattgagtattcaatgtgcaaacatcaatcacaaaaattgtggaaattattaaatacagaaccctatataaatactcttggatcgctttctggaaaccacgcagttcaacatgcaaaagcaggattaaaagcaatatatcttagtggttggcaagtagcggcagatgcgaatagtgctggcgaaatgtatccagatcaatcattatatccttatgacagtgcaccaaaattagttgaagcaatgaataattctttaataagagcagatcaaatacaacatatggaattaatcgatggtgatatgaaagagaataaaagagtagactatatgttgccaattatagctgatggagaagctggttttggaggacctttaaatgtatttgaattagcaaagaaatttattaaagctggagcagccggagttcattttgaagatcaacttgctagtgaaaaaaaatgtggtcatatgggaggtaaagtattggtaccgactggtactatgataagaaatcttaaagctgcaagattagcagcagatattgcggatgttcctcttataattctcgcaagaacggatgctaatgcagctaagttaatcacaaatgattttgatgaaaatgataaacctttcttaactggcaaaagatcacccgagggtttcttttatgtaaaagatggaattgaacaagcaatctcaagaggacttgcttatgcaccttacgcagacttaatatggtgtgaaactgctactccaaatttagaagaagcaaaaaagtttgcagatgcaattcatgaaaaatttccaggaaaattattagcttataattgttcaccttcttttaattggaaaaaacatttatctgatgacgaaatagcatcattccagaaaaaaattggagaaatgggttataagtttcagtttattacacttgcaggatttcatacacaaaacattgcaatatttgaattagcagaaaaatataaaactgaaggtatgactgcttattcaaaaattcaacaacatgaattttctagagaaaaagatggatacactagtgtaaaacaccaaagagaagttgggacatcttattttgatgcagtttcaaatacaataagctcaggaaaaagttcaactactgcaatggaaggatcaacggaatcagaacaattttaat

SEQ ID NO: 278634 - DNA, 1279 bp, Unknown
  Bacterial polypeptide expressing nucleotide sequence isolated from the Sargasso Sea
atgtcatcagagggtaaggtatcttataaactaaaaagatttgcaggaattaaaagagattatacgcctgaagaagttgaaagattaagaggatctattaaaattgaacattctatttgtaaacaacaatctgaaaaactctggaaattattaaatacagaaccttatgtaaatacgcttggttctctatcgggaaatcaagcagtgcaacatgcaaaagcaggacttaaagcaatttatttaagtggatggcaagttgcagcagatgcaaatagtgcaggagagatgtatccagatcaatctttgtatccatatgacagcgcacccaaattagtagaggcaatgaataacgctttgataagagcagatcaaattcaacatatggaaattttagatggtgatatgaaagaaaaagatagaaccgattatttattaccaattattgcagatggagaagcaggatttggcggaccgttaaatgtatttgaattaacaaaaaaatttataaaagcaggtgctgctggtgttcactttgaagatcaattagctagcgaaaaaaaatgcggacatatgggtggtaaagttttagtaccaacaggtacaatggttaggaatttaaaggcagcaagattagcatcagatatcgctgatgttccccttattattttagcaagaactgatgctaatgctgcaaaacttattacaaatgattttgatgaaaacgataaaccttttttaactggcgaacgttctccggaaggtttcttttatgtgaaggatggtattgaccaggctatctcaagaggattagcatatgctccatacgctgatttaatttggtgtgaaactgctactcccaatttagaagaagcaaaaaaatttgctgatgcaattcatgcaaaatttccaggaaaattacttgcctataattgttctccatcatttaattggaaaaaacatttatcagatgatgaaattggatcattccaaaaaaaaattgctgaaatgggttataaattccaatttataactctagctggtttccatacacagaatattgctatttttgatttagcagagaaatataaagaagagggaatggctgcttattctaaaattcagcaacatgaattcgcaagagagaaagatggatacacaagcgttaaacatcaaagagaagttggaacatcttattttgatgcagtatctaacacaataagttcaggaaaaagttctactaccgcaatggacggctctacggagtctgagcagttttaat

SEQ ID NO: 278635 - DNA, 831 bp, Unknown
  Bacterial polypeptide expressing nucleotide sequence isolated from the Sargasso Sea
aatgactaaactcaaatcagcaaaagatatacaaagcgattgggattctaatcctagatggaagaatgttaaaagaggatactcagcagatgatgttgtacgtttaagtggaagtattgctatcgaacatagtcttgcacatcaaggagccaaaaaactctgggatttaatcaatacagaagatttcgtaaacgcacttggcgcattgacgggtaatcaggcactccaacaggcaaaagcagggctaaaagcagtctatttatctggatggcaggtcgcaggtgatgctaatactggaatgcaaatgtatcccgatcaatcattataccctgttgatagcgttccagccgtagtgaaaagaattaataatgctttaagaagagctgatcaacttaatattgcagaggggaatgagccggttgactatatgttaccaatagttgcagatgcagaagctggatttggaggtgtgttaaacgcatttgaacttatgaaagcaatgatagaatctggagctgcaggtgtacattttgaagatcaactagcatctgcaaagaagtgtggtcatatgggaggaaaagtccttgtgccaactcaagaagctgtacagaagcttattgctgccagactagcggccgatgtttccggtacaccaactgttcttttggctaggactgatgccgaggctgcaaatcttttaacaagtgatattgacgaacgcgatcaagaattctgcactggtgaaagaactgcagaaggtttttatcgtgtaaaaaatggaattgatcaagctatttcaagaggtcttgcatatgctccatatgctgattt

SEQ ID NO: 278636 - DNA, 1315 bp, Unknown
  Bacterial polypeptide expressing nucleotide sequence isolated from the Sargasso Sea
tatggcactgacccgtgagcaacagatccaggctatcgagaaagactgggcggaaaacccccgctggaaagggatcaagcgcggctacagcgccgaagacgtggtaaacctgcgtggcagcctgcaaccggtgcacaccctggcccaacgcggtgccgacaagctgtgggaattgatccacggcggcgccaagaaaggctatgtaaactgcctcggcgcgctgaccggtggtcaggcggtgcaacaggccaaggcaggcatcgaggcaatttacctctccggctggcaggtggcggcggacaacaacctctcctccaccatgtacccggatcagtccctctacccggccaactcggtgccgtcggtggtggagcgcatcaacaactccttcgcccgtgccgaccagatccagtgggccaacaaggtgggcccgcaggacaaaggcttcatcgactacttcctgcctatcgtggcggatgccgaagccggtttcggcggcgtgctgaacgccttcgagctgatgaaggggatgattgaagcgggcgccgccggcgtgcacttcgaagatcagctcgcttccgtcaagaagtgcggccacatgggcggcaaggtgctggtgccgagccaggaagcggtgcagaagttgatcgcggcccgtctggcagccgacgtctgcggcaccaccaccctggtgatcgcccgtaccgacgccaacgccgccgacctgctgaccacggacgccgatccgtacgatgccggcttcctgaccggtgagcgcacctcagaaggtttctacaaggtgcaggccggtatcgagcaagccatctcccgtggtctagcatatgccccttacgccgacatggtgtggtgcgaaactgccaagccggatctggacgaggcgcgcaagtttgccgaagccatcaaggcccagtacccggacaagatcctggcctacaactgctcgccgagtttcaactggaagaagaacctggacgatgccaccatcgcccgcttccagcaggagctgtccgacatgggctacaagtaccagttcatcaccctggcgggcatccacaacatgtggttccacatgtacgagctggcctaccagtacgcccgtggcgaaggaatgaaacactatgtcgaaatggtgcagcagcctgagttcgccgctgccgagcggggttacaccttcgtggcacaccagcaggaagtggggaccggttacttcgacaaggtgaccaccgtcattcagggtggccaatcctcggtgactgcgctgaccggctcgaccgaagaagatcagttccactga

SEQ ID NO: 278637 - DNA, 1249 bp, Unknown
  Bacterial polypeptide expressing nucleotide sequence isolated from the Sargasso Sea
atgagtgcagaaaaaatctcatacgacttaaaaagatttgctggaataaaaagagactatactgaggaagaagttgaaagattaagaggctcaattaaaattgagtattctttgtgtaaaaaccaatctcaaaaactttggaaattattaaattctgagccatacgtgaacacgctcggctctttgtcaggtaatcaagcagttcaacatgcaaaagctggtttaaaagcaatttatttaagcggatggcaagttgctgctgatgctaatacagctggtgaaatgtacccggatcaatctctatatccatatgacagtgcaccaaaattagttgaatctatgaataattctttaattagagctgatcaaattcaacatatggaaatgcaagatggtgatatgaaaaaagaggatagaacagattatatgttgcctattattgctgatggtgaagcaggatttggtggtccattaaatgtatttgaattaactaaaaaatttataagagcaggtgctgcaggtgtacactttgaagatcagctagctagtgaaaaaaaatgtggtcatatgggtggtaaggttttggtgccaacaggaacaatggtaaaaaatcttaaagctgcaaggttagctgctgatattgcagaagttccattaattattttggctagaacagatgcaaatgctgcaaaactaattacaaatgattttgatgaaaatgataaaccatttttaacaggtgaaagatctcctgaaggttttcattatgtaaaagatggaattgaacaggctatctctagaggtttagcttatgcaccttatgctgatttaatttggtgtgaaacagcaacacctaatttagcagaagctaaaaagtttgctgatgcaatacatgaaaaatttcctggaaaacttttagcttataattgttcaccttcttttaattggaaaaaacatttaagcgatgatgaaattgcttcattccaacaagaaattgcaaaaatgggttataaatttcaatttattactcttgctggttttcatactcaaaatattgcaatctttgaacttgctgaaaaatatagaaaagaaggtatgactgcatactctagaattcaacaacaagaatttgctcgagaaaaagatggttatactagcgttaaacaccaaagagaagttggtacatcttattttgatgcagtatcaaatactatcagtagcggtcaaagctcaactacagcaatggctg

SEQ ID NO: 278638 - DNA, 1279 bp, Unknown
  Bacterial polypeptide expressing nucleotide sequence isolated from the Sargasso Sea
atgatagctaaagcaaaggttaactacgatataaaaagattttctggaatacaaagagattacaaatcttctgaagtagaaagattgagaggctcaataaaaattgaatattcaatgtgtaaaaatcagtccaaaaaactttgggagcttttaaatacacagccttatatcaatacactaggttctttatctggaaatcatgccgttcaacatgcgaaagcaggattaaaagcaatttatctaagcggttggcaagtggctgcggatgcaaatagtgcaggagaaatgtatccagatcaatcattatatccttttgatagtgcaccgaaattagttgaagcaatgaacaatgctttaattagagctgatcaaattcagcatatggaaatcttagacggtgatatgaaggaaaaagatagagttgattatatgctgcctattattgcagatggtgaagcaggatttggtggaccattaaatgtttttgaattagcaaaaaaatttattaaagcaggtgctgcaggtgtccattttgaagatcagcttgctagtgaaaaaaaatgtggtcacatgggaggaaaagtattagttcctactagcacaatgataaaaaatttaaaagctgctagacttgcagcagatatagcagatgtgccattaattattttagcaagaacagacgctaatgcagcaaaactaatcacaaatgatcatgatgaaaatgataagccatttttaactggagaaagatcaccagaaggttttttctatgttaagcatggcattgatcaagcaatttcaagagggttggcgtatgcaccttattcagacttaatatggtgtgaaactgcaacacctaatattgaagaagcaaaaaaatttgctgatgctatccatgctaaatttccagggaaacttcttgcatacaattgttcaccatcatttaattggaaaaaacatttatctgatgatgagatttcttcattccaggtaaagattgcagaaatgggttataagtttcaatttattactcttgctggatttcatacacaaaacattgcgatatttgaattggctgaaaaatataagtccgaaggtatgactgcttattcaaaaattcaacaacaagaatttgcgagagaaaaagatggatatacaagtgttaaacatcaaagagaagtaggcacttcttatttcgatgctgtttcaaacacaattagctctggaaaaagctctactacagcaatgaaaggctcaacagagtccgaacaattttaat

SEQ ID NO: 278639 - DNA, 1021 bp, Unknown
  Bacterial polypeptide expressing nucleotide sequence isolated from the Sargasso Sea
atgagctcagaaaagaaggtatcatacgatctaaaaagattttcaggaataaaaagagattatacaccagaagaagttgagagactaagaggctcaataaaaattaactattcaatgtgcgaacatcagtcaaagaaactttggaggcttttaaatactgaaccttatgtaaatactttaggttcattatcaggcaaccattcagttcaacatgcaaaagctggattgaaagccatttatgttagtggctggcaagttgcagcagatgcaaatacagctggtgagatgtatccagatcaatctttatatccatttgatagtgctccaagattagtagagtcaatcaataatgctcttattagagctgaccaaattcagcatatggaattaaaagatggtgatatgaaaccaaatgaaagagttgattatatgcttccaattattgcagatggtgaagccggctttggtggaccattaaatgtatttgaattgacaaaaaaatttataaaagctggtgctgcaggagttcactttgaagaccaattagctagtgaaaaaaaatgtggtcatatgggaggaaaagttttagttccaacatcaacagccgtaagaaacttaaaagctgcgagattggctgctgatatttctgatgtacctttaattatacttgcacgaaccgatgcaaacgcagcaaaattaattactaatgaccatgatgaaaatgataaaccttttttaactggcgaaagatctccagaaggcttttattatgttaaacatgggatcgatcaagctatctcaagaggattggcttatgcaccttacgcagacttaatctggtgcgaaactgcaacacctaatttagaagaagctaaaaaattcgctgatgcaattcatagcaaattcccgggaaagattttagcctacaactgttcgccatcttttaattggaaaaaacatttatcagatagtgaaatagcaacttttcgacaaaaaattgcggaaatgggatataagtttc

SEQ ID NO: 278640 - DNA, 1213 bp, Unknown
  Bacterial polypeptide expressing nucleotide sequence isolated from the Sargasso Sea
gatgggtgacaaaagaaactatactgatgaacatgttaagtcgttgcagggctctgtaaagattgagcatacattggcaaaaatgggttcaaagcaattgagaaatctttttgagagcgagccttatgtgaatacttttggtgcatacaatgggcaacaagccgttcagcatgttaaagcaggtctcaaagccatctatgtttcaggttggcaagttgcagcatctgcgaacagcaataatgaagtttatcctgatcaaagcttgtattctgttgattccgttcccaatgctgtgaagggcattaataacgcatttcgaagacaggatcagattcaagtgcaagaaggaagagagggcttctattatgctccgatcattgcagatgctgaggccggtttcggaggcgcattgaatgcctacgaattgtctcgcaatttaatcgaggcaggtgcagctgctgttcactatgaggatcagttgtctgcagaaaagaaatgtggccatttgggcggtaaggtcttgatctcaacaagccaagcaatcaggaacttgaatgcagcgaggttggcttctgatgttgcagaaacagatactttgatcattgcaaggaccgatgcagaagcagcaaagcttctaatgaccgacgtggatgatattgacagaaagtttatgactggagagaggacttctgaaggtttctatcaaatcacaggcggactagaaatgggttgtgatcgtgggcaagcttttgctgagtatgctgatttagtatggtgcgagacttctaagccatgcctaaaggatgctaagaaatttgcagatgcggttcgtggagcacatccagatcagatgctcgcatataactgttcaccaagtttcaactggaagcagcatattccctcagaatctgaattagcggagtttcaaaaagaactgggaaatatgggttttaaatttcagttcattacactggctgggttccattcaacaaactttgcagtctttgattttgcaagagaatataagagagaagggatgttggcctacagtaaactccaagagaaggaatttgattttcagaaacatggattcacaactgtcaagcatcaagcagaagttggtgttggttattttgatgcaatcagtcaggcagttggagcagacagtgtagctgcattggcagactctaccgaaaacgagcaatttgggtaa

SEQ ID NO: 278641 - DNA, 667 bp, Unknown
  Bacterial polypeptide expressing nucleotide sequence isolated from the Sargasso Sea
atgaacaagataagatccgcacaagatattcaaaaagattgggatagtaacccgaggtggaaaaatgtaaaacgagactattctgctgatgaggtagctaagttaagtggtagcgtcaatatcgagtatagtttagccaaacagggtgcggaaaaactttggagtgagattaataatagcgattttgtaaatgctctgggagcattaactggtaatcaagctatgcagcaagcaaaagcaggtcttagggctgtttacttatctggttggcaggttgcaggtgatgcaaatactggaatgcaaatgtatccagatcaatctttgtacccagtagatagtgtccctgctgttgtaaaacgcataaataactcattgagaagagctgatcaattaaatatagctgaaggtaacgaacctgtagactacatgctaccaatagtcgcagatgcagaagcaggtttcggaggcgtactaaatgctcatgaacttatgaaagcgatgattgaagcaggtgcggctggtgttcactttgaggatcaactcgcatcagcaaaaaaatgcggccacatgggcggcaaggttcttgttcccacgcaagaggctgtccaaaagcttgcagcggcaagattagctgcagatatctataatacgtcaaccgtcctacttg

SEQ ID NO: 278642 - DNA, 850 bp, Unknown
  Bacterial polypeptide expressing nucleotide sequence isolated from the Sargasso Sea
catgttgccaattattgcagatggcgaagcaggatttggtgggccgttaaatgtatttgagctaacaaaaaaatttataaaagctggcgcagctggagttcattttgaagaccaactagctagtgaaaaaaaatgtggacatatgggtggtaaggtacttgttcctactggaaccatggtccgaaatctaaaagcagcaagattggcagctgatattgccgacgttcctctcattattcttgcaagaacagatgccaacgctgcgaaactaataacaaacgattttgatgaaaatgacaaaccgtttttaacaggagaaagatcacctgaaggcttttattatgtaaaagatggtattgatcaagcaatctcaagagggttagcctatgcaccttacgcagatttaatatggtgtgaaactgcaacacctaatttagaagaagcaaaaaagtttgctgatgcaatacatgcaaaatttcctggcaagatgttagcttataattgttctccatcatttaattggaagaaacatttatctgatgatgagattgcaacatttcaaactaaaattggaatgatggggtataaatttcaatttataactttagcaggtttccatacgcaaaatattgctattttcgagcttgcagaaaaatataaaaaggaaggtatgactgcttactctagaatacaacaaaatgaatttgctagagaaaaagatggatataccagtgttaaacatcaacgagaagttggaacttcttattttgatgcagtttccaatacaattagttccggaaagagctccacaacagcaatggaaggctcaaccgaatctgagcaattttaa

SEQ ID NO: 278643 - DNA, 436 bp, Unknown
  Bacterial polypeptide expressing nucleotide sequence isolated from the Sargasso Sea
ctccacgccggatctcgaactggcgaagcgctttgccgatgcgattcacgcgaaattccccggcaaactgctggcctacaactgttcgccgtcatttaactggcagaaaaacctggatgacaaaaccattgctagcttccagcagcaactgtcggatatgggttacaaataccagttcattaccctggcgggcatccacagcatgtggttcaacatgttcgacctcgcacactcctatgcgcagggtgaaggcatgcgccactatgttgagaaggttcagcagccagaatttgcggcggctaaagacggttacaccttcgtgtcccatcagcaggaagtgggtacaggctacttcgacaaagtcactactatcattcagggcggcgcttcctcggtgaccgcgctgaccggctcgaccgaagaatcgcagttttga

SEQ ID NO: 278644 - DNA, 1276 bp, Unknown
  Bacterial polypeptide expressing nucleotide sequence isolated from the Sargasso Sea
atgagtgcagagaaaatctcatacgacttaaagagattcgccggaattaaacgtgactatacggaggaagaagtcgaaagattaagaggctcaattaaaatagaatattctttatgtaaaaatcaatcacaaaagctttggaaattattaaattcagaaccatatgtaaatactttgggttcactttctggaaatcaagcagtacagcatgctaaagcaggtttaaaagcaatttacttaagtggatggcaagttgcagcagacgcaaatacagctggagaaatgtaccctgatcaatccctttatccatatgatagtgctcctaaattagttgaatctatgaataattctttaataagagcagaccaaattcaacacatggaaatgcaagatggtgatgttcaggcaaaagatagaacggattacatgctgccaattatagctgacggtgaagctggttttggtggaccattaaatgttttcgaattaacaaaaaaatttattaaagcgggtgcagctggggttcattttgaagatcagttagctagtgaaaaaaaatgtggtcatatgggtggtaaagttttagtgccaactggaaccatggtcaaaaatttaaaagcagcaagacttgcttctgatatagcagaagttcctttgattatattagcaagaactgatgcaaatgctgctaaattaattacaaatgattttgatgaaaatgataaaccttttttaacaggtgaaagatctcctgagggtttctactatgttaaagatggtattgagcaagcaatttcaagaggacttgcatatgctccttatgcagatttaatatggtgtgaaacagctactccaaatttagaagaggctaagaaatttgcagatgctattcatgaaaaatatcctggaaaacttctagcttataattgttcaccttcgtttaattggaagaaacatcttagtgatgatgagattgcttcatttcaaaaagaaattgctaaaatgggatataaatttcaattcattacattagctggatttcatactcaaaatattgcaatttttgaacttgcagaaaaatataaaaaagaaggtatgactgcatattcaaaaatacaacaacaagaattcgctagagaaaaagacggttacactagcgttaagcatcaacgtgaagtaggtacttcatattttgatgcagtttcaaataccattagcagtggacaaagttcaactactgcaatggctggctctacagagtcggaacaattttaaa

SEQ ID NO: 278645 - DNA, 1276 bp, Unknown
  Bacterial polypeptide expressing nucleotide sequence isolated from the Sargasso Sea
atgtcagcagaaaatgtgtcttatgacctaaagagatttgcaggaataaaaagagattatacttcagaggaagtagaaagattaaaaggatctataaaaattgagtattcaatgtgcaaacaacaatctcaaaaattgtggaaattattaaattcggaaccttatataaatacacttggttcactttcaggaaatcatgcagttcaacatgctaaagctggtttaaaagcaatttatctaagtggctggcaagttgcggcagatgcaaatagtgctggagagatgtatccagaccaatcattatatccatatgatagtgctcctaaattagttgagacaatgaataattctttaacaagagcagatcaaattcaacatatggaaataatcgatggtgatatggataaaaacaaaagggtagattatatgcttcctattattgctgatggagaagctggatttggtggaccattaaatgtgtttgagctaacaaagaaattcataaaagcaggcgctgcaggtgttcatttcgaagatcaattagcaagtgaaaaaaaatgcggacacatgggtggaaaagttttagtaccaactggtactatggtaagaaatcttaaagctgcaagattagctgcagatatagctgatgtacctcttataattctagccagaacagatgcaaatgctgcaaaattaattactaatgactttgatgataatgataaaccatttttaactgggaaaagatctccggaaggatttttttatgtaaaagaaggaattgaacaagctatttcaagaggtcttgcatacgctccttatgcagatttaatttggtgtgaaacagccacaccaaatctagaagaagctaaaaagtttgcagatgctatacacgataaatatccaggaaaacttttagcatataattgttcgccatcttttaattggaaaaaacatttgtcagatgaagaaatagcatcattccaaaaaaaaataggtcaaatgggatataaatttcagttcataactttagctggtttccatacgcagaatattgctatattcgagttagcagaaaaatataaaaaagaaggtatgactgcttattcaaaaattcaagaacatgaattttcaagagaaaaagatggttatactagcgtaaaacatcaaagagaagtaggaacttcttactttgatgcagtatcaaatacaataagttctggtaagagctctactacagccatggaaggttcaacagagtcagaacaattttaat

SEQ ID NO: 278646 - DNA, 1279 bp, Unknown
  Bacterial polypeptide expressing nucleotide sequence isolated from the Sargasso Sea
atgagttcagaagcaaaagtttcatatgatttaaaaagatttgcgggtattaaaagagattatacacctgaagaggtagagcgtttaagaggttcaataaaaatacagtattcgatgtgtgaacaacaatctaaaaaattgtggaacttacttaacactgagccgtacgtaaatacattgggttcactgtctggaaatcattcggttcaacatgcaaaagccgggttaaaagctatttatgttagtggatggcaagtagctgctgatgcaaacactgctggagagatgtatcctgatcaatcattatacccttttgatagcgctccaaaacttgtggatagtattaataatgctttagtaagggcagatcaaattcaacatatggaaattcaagatggtgaaatgaactctaaagatagaacagattatatgttacctattatagctgatggagaggctggttttggtggtccattaaacgtttttgaattaactaaaaaatttattaaagcgggtgcagctggtgtgcactttgaagaccagttggcaagtgaaaaaaaatgtgggcatatgggtggaaaagttttagtaccaactggaaccgcagtaagaaatttgaaagccgcaaggttagctgcagatattgcagatgtcccattaataattcttgcaagaacagatgctaacgctgcaaaattaataactaacgatcatgatgataacgataaaccttttttaacaggcgaaagatcacctgaaggattttattatgttaaagctggaatagaacaagcaatttctagaggacttgcttacgctccttatgcagacttaatttggtgtgaaactgcaacccctaatttagaggaagctaaaaaatttgcagatgcaattcactcaaaatttcctgggaaattgttagcttataactgctctccatcttttaattggaagaaacatttatctgatgatgaaattggaacttttcaaagaaaaattggtgaaatgggttacaagtttcaatttataactttagcaggatttcatactcaaaatattgcaatctttgaacttgctgaaaaatataaaaaagatggaatggccgcatactctaaaattcaacagcaagaatttgacagagaaaaagatggctatactagtgtcaaacaccaaagagaagttggtacttcttattttgatgcagtatctaatactataagtggcggtaaaagttctacgacggcaatggaaggctcaacagagtctgaacaattctaat

SEQ ID NO: 278647 - DNA, 1213 bp, Unknown
  Bacterial polypeptide expressing nucleotide sequence isolated from the Sargasso Sea
aatgggcaataaaagaaactataccgatgaacatgtcaaatcactccagggatctgtaaggattgaacatacattggcaaaaatgggcgctaaacagttgagagatctattcgagagtgagccctatgtaaatacttttggtgcatacaatggccagcaggctgttcagcatgtaaaagcaggactcaaagccatctatgtttcaggatggcaagttgcagcatctgccaatagtaataatgaagtctacccagatcagagcttatattcagttgattctgtacccaatgcagtgaagaacatcaacaatgcatttcgcagacaggatcaaattcaagttcaagagggtagagaaggtttttattatgctccaatcattgccgatgcagaagccggtttcggtggcgcgttaaatgcttatgaattatctcgtaatcttatcgaggcaggagcagctgccgttcattttgaggatcaactatctgcggaaaagaaatgtggtcatctaggaggaaaagtccttatatccacaagccaagcaattagaaatttaaatgctgcaaggttggctgcagatgttgcaggcactgatacattgattatcgcgagaacagatgctgaggcagcaaaattactgatgaccgatgtagatgatattgacaaaaagtacatgacaggtgagaggacctctgaaggtttttatcaaatcacaggcggactagatatgggctgtgatagaggacaggcttttgctgaatatgctgatctagtttggtgtgaaacttctaaaccttgcttgaaagatgcaaagaaatttgcagatgcagttcgcggagcacaccctgatcaattattggcatataactgctcgccaagttttaattggaagcagcatatcccctctgagactgaattagctgagtttcaaaaagagctcgggaaaatgggctttaaatttcaattcattacacttgctggatttcattctacaaactttgctgtctttgattttgctagagagtataagaaattaggcatgttggcttatagtaagcttcaggaaaaggagtttgattatcaacagtatggtttcacgactgttaagcatcaggcagaagttggagtcggttactttgatgcaatcagccaagcagttggtgcagacagtgttgctgcattagcagattcaactgagagtgagcaatttgggtaa

SEQ ID NO: 278648 - DNA, 1255 bp, Unknown
  Bacterial polypeptide expressing nucleotide sequence isolated from the Sargasso Sea
aatgcttaatgaagattggcaatcaaatccaagatggaaagataccaaaagaaatttttcagcagaagatgttgtgtcactcagaaactccctaaacattgaatactctctttcccaaaatggttcaaaaaatctttggaacttagtaaacagaaaagaagaatgggtttcagctttgggggcattatctggaaatcaagcagttcaaatggcaaaagccggactagaggccatatatttaagtggttggcaagttgcagcagactcaaatttaggtgatacaacttacccagaccagtcactatatccaagcaatagcgcccctaatcttgcaaataagattaataatgccttattaagagcagaacaagttgataaaactgacggaattgaaacaacagattatattgttccaattgttgctgatggagaagcaggatttggaggagccttaaatgtttttgaacttaccaaaaagtttattgaagctggagttgcagctgtacactttgaagatcagcttgctgctgaaaaaaaatgtggacatatgggtggaaaggtactcgttccaacaagtcaacatatcagaacattgacttcagctaggttagctgccgacacactgggggttcctctagtaattattgcgaggacagatgcattaggagcaaacttaattacaagtgatatagatgaaattgatgcagaatttgtaactggcgaaagaactgcggaaggattttatagagttaataatggtcctgaagcagctatttcaagagccctttcatacgctccttatgcagatcttgtctggtgtgaaacatcaaaacctgatcttggttttgctaaggattttgcagaggcagtacatgaaaagtttccaaacaaacttatggcttataattgctctccatcatttaattggaaagcatctttagatgaacaagaaatatctacatttcaggaacaattaaattcctttggctataagttccaatttattactttggcaggatttcattcattgaatacctcaatgtttgaattggccacaaattataaaggtggaaatatgtcgtcttatgttgagcttcaagaaaaagagttttctcttgaggaaaaaggctttacatcagtaaagcatcagagagaagttggagcaggctatttcgataaagtatcgacaataatttcaggaggggatgcctcaacattagctttggaaggttctactgaagaagaacaattttaa

SEQ ID NO: 278649 - DNA, 1279 bp, Unknown
  Bacterial polypeptide expressing nucleotide sequence isolated from the Sargasso Sea
aatgaatttaaatgaacaggtattagaattaaaaaacgattgggaaatgaacgaaagatggtcttatgtcaaaagaccatattctgctgaagaagttgtaaagttaagaggttcacttcagccagaatatactttggcaagaattggtgctgaaaaactttggaatatgcttcataaagaagactatgttcattgcttaggaactttaacaggcggacaagcagtacagggtgttaaagctggtgcaaaagcgatatatgtttctggatggcaagtagcagcagataataatagcgctgaagcaatgtatccagatcaatcattatatccagtagattctgtaccttcgttggtaaaaagaattaatagttcttttaaaagagctgatcaaattgagtggatgagttccaatggtaaaccaaaatttgacttttttacgccaatagtagctgatgcagaagctggttttggaggagttcttaatgcttttgaactcatgaaggccatgattaaagccggagctgcaggtgttcattttgaagatcagttagcaagtgttaaaaaatgtggtcacatgggtggtaaagttcttgtgccaacgcaagaagcaattaataagcttgtggcagcaagattagctgcagacgtttctaacgttccaacgcttttagtggctagaacagatgctaatgcagcagaattacttacttcagatattgatgaaagagatgctgaatttgttactggagaaagaacatctgaaggtttttatagagtaaaagcaggtattcagcaagcaatttctagaggtctttcatatgctccgtattctgatttattatggtgtgaaacaggtaagcctaaccttgaagaagcaaaattatttgcagaatcaattaaaaaagatcatcctgaactaatgttagcttacaattgttctccatcatttaattggagaaaaaatcttgacgatactacgatagctaagtttcaaagagagctgggtgcaatgggatataaatttcaatttattacacttgctggaattcattctatgtggcatggcatgtttgatctgacaaaaaaatatgtcaaatctggcatgacggcatacgttgaacttcaagaaaaagaatttgcagaccacgataaaggatatactttttctgctcatcaacaagaggttggtacaggctactttgatgcagtgaataattgtatcgttggagatccttcaacaagtgctatggatggttctacagaagaagaacagttttaa

SEQ ID NO: 278650 - DNA, 1276 bp, Unknown
  Bacterial polypeptide expressing nucleotide sequence isolated from the Sargasso Sea
atgtcagccgagaaaatctcgtacgagttgaaaagatttgcaggaatacaaagggattataagccagaagaagtagaaaggttaagaggatccattaaaattgagtattcaatgtgtaaacagcaatctcaaaagctctggagattgttaaatacagagccatatgtaaacacacttgggtctttgtcgggaaaccaagccgttcaacatgcaaaagcaggtttaaaagcgatctatttaagtggttggcaagttgcagcagacgcaaacagtgctggtgaaatgtatcctgatcaatctttatatccttacgacagtgcacctaaattagttgagtctatgaataattctttaattagagctgatcaaattcagcatatggaaatagcagatggagatatgaatagcagtgaaagaactgattacatgttgccaattattgcagatggtgaagcaggatttggtgggccgttaaatgtatttgagctaacaaaaaaatttataaaagctggcgcagccggagttcattttgaagaccaattagctagtgaaaaaaaatgtggacatatgggtggtaaggtacttgttcctactggaaccatggtccgaaatctaaaagcagcaagattggcagctgatattgccgacgttcctctcattattcttgcaagaacagatgccaacgctgcgaaactaataacaaacgattttgatgaaaatgacaaaccgtttttaacaggagaaagatcacctgaaggcttttattatgtaaaagatggtattgatcaagcaatctcaagagggttagcttatgcaccttacgcggatttaatatggtgtgaaactgcaacacctaatttagaagaagcaaaaaagtttgctgatgcaatacatgcaaaatttcctggcaagatgttagcttataattgctctccatcatttaattggaagaaacatttatctgatgatgagattgcaacatttcaaactaaaattggaatgatgggttataaatttcaatttataactttagcaggtttccatacgcaaaatattgctattttcgagcttgcagaaaaatataaaaaggaaggcatgactgcttactctagaatacaacaaaatgaatttgctagagaaaaagatggatataccagtgttaaacatcaacgagaagttggtacttcttattttgatgcagtttcaaatacaataagttctggaaatagctctacaacagcaatggaaggctcaacagaatctgagcaattttaat

SEQ ID NO: 278651 - DNA, 1012 bp, Unknown
  Bacterial polypeptide expressing nucleotide sequence isolated from the Sargasso Sea
tttgaaaagatttgcaggaattaaaagagactatactcctgaagaggtagaaaggttaagagggtcaattaaaatagagcattctctttgcaaacatcaatctgaaaagttgtggaaattattaaactcagagtcgtatgttaatactttaggatcactctcaggtaatcatgcagttcagcatgcgaaagcaggactaaaagcaatatacctaagtggttggcaggttgctgcagatgctaacagtgctggagaaatgtatccagatcaatcattatatccatatgatagcgctccaaaattagttgagtcaatgaataatgctcttgtaagagcagatcaaattcaacatatggaaattaaagatggagaaatgaaagaggaaaataaagtggattatatgcttccaattattgctgatggtgaagcgggatttggaggacctttgaatgttttcgagttagcaaagaaattcataaaagctggtgctgctggagttcattttgaagatcaattagctagtgagaaaaaatgtggtcatatgggtggcaaagttttggtacctactggaactatgattaaaaatcttaaagcagctagactagctgctgatatagcaaacgtgcctttaataattttagcaagaacagatgcaaatgctgcaaaattaattaccaacgatcacgatgaaaatgacaaaccttttttgactggagaaagatcccctgaaggtttttattatgttaagcacgggatagaacaggctatttcaaggggcttagcatacgctccgtatgcggatttaatatggtgcgaaactgctactccaaatttagaagaagcaaaaaaatttgcagatgcaattcataaaaaatatcctggtaaaattttagcttataactgttcaccatcatttaattggaagaaacatttatcagatgaccaaatagcgacttttcaacaaaaaattggtgagatgggatataaatttcagtttataacacttgcaggg

SEQ ID NO: 278652 - DNA, 860 bp, Unknown
  Bacterial polypeptide expressing nucleotide sequence isolated from the Sargasso Sea
aactgattacatgttgccaataatagctgatggtgaagcaggatttggtggaccactaaatgtatttgaattaactaaaaaatttattagagcaggtgctgctggggttcacttcgaagaccaattggctagtgagaaaaaatgtggtcacatgggtggaaaagttcttgtgccaactggaacaatggttagaaatttaaaggctgctagacttgctgctgatattgcagatgtaccattaataattttagcaagaacagatgcaaacgctgcaaaattaatcacaaatgattttgatgataatgataaaccatttttaactggcgaaagatcacctgaaggttttttttatgttaaagacggaattgagcaggcaatttctagaggccttgcttatgcaccatacgcagatttaatttggtgtgaaactgctactccaaatttagaagaggcaaagaaatttgctgatgctatacatgaaaaatttcctggtaaaatgttagcttataattgttcaccatcattcaattggaaaaaacatttatctgatgaagaaattggatcatttcaaagaaagattggagaaatgggatataaatttcagtttataacattagctggttttcacactcaaaacattgcaatatttgaattggcagaaaaatataaatcagaaggcatgactgcttactcaaaaattcaacagcatgaatttgctagagaaaaagatggatacacaagtgtgaaacatcaaagagaagtaggcacatcttattttgatgcagtttcaaatacaataagctcaggtaaaagctcaactacagcaatggaaggctcaactgagtcagaacagttttaaa

SEQ ID NO: 278653 - DNA, 1288 bp, Unknown
  Bacterial polypeptide expressing nucleotide sequence isolated from the Sargasso Sea
atgacaaaaagtttctatgatttagtcccatcagcaccaaaaggtcgttatgatggtattgaaagaccttattcaatagatgatgttaaacaattaaggggttcctttcctatcgaatatactctagctacaagaggtgcaaacagattatgggatttacttcattcagaggaccaggtttcttctttaggtgcactttcaggtaaccaagcaatgcagatggttaaagcaggtcttaaggctatatatctgtctggatggcaggtagctgcagataataatacagctggttctacttatcctgaccaaagtttatatcctgctaactctggtccagaattagcaagaaaaattaatagaactttacaaagagctgatcaaattgaacattctgaaggcggtgcccaaagagaatggtttgctccaattgtggcagacgctgaagctggttttggaggtccattaaactgtttcgaaattatgagagcatatattgaagctggcgcatcaggtgttcactatgaagaccagctcgcatctgagaaaaaatgtggtcacatgggaggtaaagttttaattccaacaaaacaacatgtgagaaatttaaatgcagcaagattagctgctgatgtatgtggagttccaacattaattgttgcaagaacagatgcagagagcgctaaacttattacttcagacgctgatgaaagagatcatgaatttatagattatgatgacagaactcctgaaggtttttatagattaaaagatgacagtggatttgataactgtgttaagagggctattgcttacgcaccttatgcagatttaatatggatggaaacatcaatacctagcctcgaagtagcaaaagcattttctgatgcagtaaaaaaagaattccctgatcaaatgttagcttataattgttcacctagtttcaattggaatgcgaatttagatcttggaacgatagctaaatttagagaagaaattggtaaaatgggtttcaaatatcaatttgtgacattagctggttttcatcaacttaactatggaatgttccaattggcctctgactttagagatagaggtatgggtgcttatagtgaacttcaacaagctgaatttgctgcagaaaaagatggttacacagctacaaggcatcaaagagaagttggtacaggttattttgacctagtttcggaagcttcagcaggtggtgagtcttcaacaactgcactaggtgactcaacagaagcagatcagtttgatgcagctgaataat

SEQ ID NO: 278654 - DNA, 1276 bp, Unknown
  Bacterial polypeptide expressing nucleotide sequence isolated from the Sargasso Sea
tatgtcagcagaaaatgtatcttatgatctaaaaagatttgcaggaataaaaagagattataccccagaagaagtagaaaggttgagaggatcaattaaaattgagtattcaatctgtaaacaacaatctcaaaaattatggaaattgttaaataccgaaccatatattaatactcttggatcactttctggaaatcatgctgtacaacatgcaaaggctggtttaaaggcgatttatcttagtggttggcaagttgctgcagatgcaaatagtgcaggggaaatgtacccagatcaatcattatatccttacgatagtgcaccaaaattggttgaaacaatgaataattctttaataagggccgatcaaattcaacatatggaattaattgatggtgatatggagaaaagtaaaagtgtagattatatgcttcctattattgcagatggagaagctggttttggaggacctttaaatgtatttgaattagcaaaaaaatttataaaggcaggtgccgcaggtgtccattttgaagatcagcttgcaagtgaaaaaaaatgtggccatatgggtggtaaagttcttgtaccaacaggaacaatggtaagaaatcttaaagctgctagactagcagctgatattgctgatgtgcctcttataattcttgcaagaacagatgctaatgcagcaaaattaattacaaatgactttgatgaaaatgataaaccttttttaactggagaaagatctccagaaggttttttctatgtaaaagatggaattgaacaggctatctccagaggtttagcttatgcaccttacgccgatttaatttggtgtgaaactgctactccaaatttagaagaagctaaaaattttgcagatgcaattcatgaaaaatttccaggtaaattactagcatataactgttcaccatcttttaattggaaaaaacatttgtctgatgatgagatagcatcttttcaaaaaaaaattgcagaaatgggttataagtttcaatttattactttggcaggctttcatacccaaaacattgctatatttgaattagcagaaaaatataaaacggaaggtatgactgcttattctaaaatccaacaacatgaattttctagagaaaaagatggttatactagcgttaaacaccaaagagaagtaggaacttcctattttgatgctgtttctaatacaattagttcaggaaaaagttctactacagcaatggaaggctcaacggagtctgaacaattttaa

SEQ ID NO: 278655 - DNA, 1276 bp, Unknown
  Bacterial polypeptide expressing nucleotide sequence isolated from the Sargasso Sea
aatgagtgcagaaaaaatttcttatgatttaaaaagatttgcgggaattaaaagagactatactcctgaagaagttgaaagactaagaggctcaattaaaatcgaatattcaatttgtaaacaacaatcaacaaagctttggaaattattaaacacagaaaaatatgttaatactttaggatccttgtcaggtaatcatgcagttcaacatgcaaaagctggtttaaaagcaatttatttaagtggttggcaagtagcagctgatgctaatagtgcaggagaaatgtatcctgaccaatctttgtatccttatgatagtgctcccaaattagtagaatcaatgaataacgctttaattagagctgatcagattcagcatatggaattaaaagatggtgatatgaaaaaggaaaaaagagttgattacatgctgccaattattgctgacggagaggctggttttggtggacctctaaatgtttttgaacttgcaaaaaaatttattaaagcaggtgctgctggtgttcattttgaagatcaattagcaagtgaaaaaaaatgtggtcatatgggaggaaaagttttagttccaactggcaccatgataaaaaatttaaaagccgctagattggcagctgatatcgcggatgtacctttaattattttagcaagaactgacgctaatgctgctaaattaattacaaatgattacgatgaaaatgataaacctttcctgacaggtgagaggtctccagagggtttttactatgtaaaagctggcatcgaacaagcaatatcaagaggtcttgcttatgcaccctactcagatttaatttggtgtgaaactgctacaccgaatcttgaagaagcaaaaaaattcgcagatgcaattcatgaaaaatttccaggaaaacttttagcatataattgttctccatcatttaactggaaaaaacatttatcagacgatgagatagcatcatttcaacaaaaaattagtcaaatgggttataaatttcaattcattactttagcaggatttcatacacaaaatattgcaatttttgagttagcggaaaaatacaaaaaagaaggtatgacagcttactcaaaaattcaacagcaagaatttgctcgtgagaaagatggatatactagtgttaaacatcaacgtgaagttggtacatcttattttgatgctgtttccaatacaataagtaatggagaaagttctaccacggcaatggcaggttcaacagagtctgaacaattctaa

SEQ ID NO: 278656 - DNA, 1024 bp, Unknown
  Bacterial polypeptide expressing nucleotide sequence isolated from the Sargasso Sea
catttatttaagtggttggcaggttgcagctgactcaaaccttggagatacaacttatcctgatcaatcattatatccaagcaatagtgcacccaaccttgccaaaaaaataaataatgctttattaagagctgagcaagttgataaaactgacggtatcgattctacaaattatattgttccaattgttgcagatggagaagcaggttttggtggagcattaaatgtatttgaacttactaaaaaattcattgaagctggtgttgctgcggttcattttgaagatcagcttgccgcagaaaaaaaatgtggacatatgggtggaaaagttttagtccctactagtcagcatattcgaacattaacatctgctagactagcagccgatactcttggtgttccacttgtaatcatcgcaagaactgatgctttaggtgcaaatttactaacaagtgacatcgatgaaattgatgcagagtttgttactggagaaagaacagcagaaggattttatagagtagacaatggtccagatgcagctatctcaagagcactttcttatgctccttattctgatttggtttggtgtgaaactggaaaacctgacctcggttttgcaaaggattttgcagatgcaattcatgagaagtatccaaacaagctgatggcttataattgttctccatcttttaattggaaagcctctttaaatgaaaaagaaatagaaacatttcaagagcaattaaattcatttggttacaaatttcagttcatcacattggcagggtttcatgccttaaacacatcaatgtttgaactagcttcaaattacaaaggtggaaatatgtcatcttatgtagagcttcaggagaaagaattctcacttgaagaaaaagggtttacgtcagtaaaacaccagagagaagttggagctggttattttgataaagtatcaacaattatttctggaggagatgcctcaacattagcactagaggggtctactgaagaagaacagttttaa

SEQ ID NO: 278657 - DNA, 1120 bp, Unknown
  Bacterial polypeptide expressing nucleotide sequence isolated from the Sargasso Sea
aatgagtttaaatgaacaggtattagaattaaaaaatgattgggaaatgaatgagagatgggcatatgtaaaaagaccgtattctgcggaggaagttgtaaaattaagaggatctttacagcctgaatatacgcttgcaagaattggtgcagaaaaattatggaacatgttacacaacgaggattatgttaattgtttaggaactttaacaggtggacaagctgttcaaggggttaaagctggagcaaaggcaatttatgtttcaggttggcaagttgcagctgataataatagcgctgaagcaatgtatcccgatcagtcattgtatcctgttgactcagttccatctttagttaaaagaataaatagttcatttaaaagagctgatcaaattgaatggatgacttcaaatggtaatccaaaatttgatttttttacacctatagttgccgatgctgaagcaggttttggaggtgttctaaacgcttttgaattgatgaaagcaatgataaaagctggtgcagctggagtacattttgaagatcaattagcaagtgttaaaaaatgtggacatatgggtggaaaagttttagttccaacacaagaagcaataaataagttagtggcggcaagacttgcagctgatgtatcaaatgttccaactttattagttgcaagaacagatgcaaatgctgctgaccttttaacatcagatatcgatgaaagagatgctgaatttgttactggagaaagaacttcagaaggtttttatagagttaaggcaggaattaaccaggcaatttcaagaggtctttcctatgctccatattcagacttattatggtgcgaaaccggaaaaccaaacttagaagaagcaaaattatttgctgaatcaattaaaaaagatcatccagagctaatgcttgcatataattgctccccatcatttaattggagaaagaacttagatgatgcaactattgcaaagtttcaaagagagctcggagcaatgggatataaattccaatttattactcttgcaggaatccattccatgtggcacggaatgtttgatttaacaaaaaaatatgttaaatcaaggtatgactgcatatgttga

SEQ ID NO: 278658 - DNA, 1276 bp, Unknown
  Bacterial polypeptide expressing nucleotide sequence isolated from the Sargasso Sea
atgtcagctgaaaatgtttcatacgacttaaaaagatttgcaggaattaaacgagattataaacctgaggaaatagagaggcttagaggttcaattaaaattgagtactccttatgtaaacagcaatcaatgaagctatggaacttgttaaactctgaaccttatgtaaatactttaggctccttatcgggaaaccatgctgtgcaacatgcaaaagcaggattaaaagcaatttatttaagtggatggcaagttgctgcagatgctaatagtgctggtgaaatgtatccagatcaatcattgtatccatatgatagtgcaccaaaattagttgattctatgaataatgctttaataagagcagatcaaattcagcatatggaaattcaagacggtgatatgaaaaaagaaaataaagttgattacatgttgccaattattgcagatggagaagctggatttggaggacctttaaacgtttttgaacttgcaaaaaaatttattaaagctggggcagcaggagttcattttgaagatcaattagcaagtgaaaaaaaatgtggccatatgggtggaaaagttttagttccaacaggcactatgataaaaaatttaaaagctgcaagacttgcagcagatattgctgatgttcctttaattattttagccagaacagatgcaaatgcagcaaaactaattacaaatgatcatgacgaaaatgataaaccttttttaacaggggaaagatccccagaaggattttattatgtaaaatctggaattgaacaagcaatttcaagaggcttagcttatgctccatattctgatttaatctggtgtgaaactgcaacaccaaatctagaagaagctaaaaaatttgctgacgcaatacatgaaaagtttccaggaaaacttcttgcttataattgttcaccttcatttaattggaaaaaacatttatctgatgcggagattgcttcattccaagaagaaataagcaaaatgggttataagtttcaatttattactcttgcaggatttcatacacaaaatatagcaatttttgaacttgcagaaaaatataaaaaagaaggtatgactgcctactcaagaattcaacaacaggaattcgcacgtgaaaaagatggctacacaagtgttaaacatcaaagagaagttgggacttcgtactttgatgcagtatcaaatactattagttctggaaaaagctcaactacagccatggatggttcaacagagtctgaacaattttaat

SEQ ID NO: 278659 - DNA, 1288 bp, Unknown
  Bacterial polypeptide expressing nucleotide sequence isolated from the Sargasso Sea
atgacaaaaagtttctatgatttagttccttcggcgcctgaaggtcgctatgatggtattgatagaccatactcagttgaagaagttgaaagacttagagggtcatttcctattgaatatacattggctacaagaggatctaatagattatgggatttacttcattctgaagatcaagtctcatctttaggtgcactctcaggtaaccaagctatgcaaatggttaaagctggtttaaaagctatttatctatctggatggcaagtcgctgctgataataatacagctggttctacatatcctgatcaaagtctttatcctgctaactcaggaccagaacttgcaagaaaaattaatagaactttacaaagagctgatcaaattgagcattctgaaggcggtgcccaaagagaatggtttgcaccaattgttgccgatgcggaagccggttttggtggtccactaaattgctatgaaattatgagagcatatattgaagcaggtgcttcaggtgttcattacgaagaccaacttgcctctgaaaaaaaatgtggtcacatgggtggtaaagttcttatacctaccaaacagcatgttagaaatttaaatgctgctagattagcggctgatgtatgcggtgtaccaacattaatagttgctagaactgatgctgaaagcgctaagcttatcacatctgatgcagatgaaagagatcatgaatttattgatgcatccgatagaacacctgaaggattctatagattaaaagatggcacaggggttgataattgtattaaaagagctcttgcttacgctccttatgcagatttaatttggatggagacatcggtgccaagtcttgaagtagcaaaacagttttctgatgcagtaaaaaaagaatttccaaatcaaatgttagcctataactgttctccaagctttaattggaaagctaaccttgatcttgatactattgaaacattcagagaagaaattgggaaaatgggctttaagtatcagtttgttactttagctgggttccatcaactcaattatggaatgttccaattggcttctaactttagagatagaggaatgggtgcatacagtgagcttcaacaagctgaatttgctgcagaaaaagatggctacacagctacaaggcatcaaagagaggttggaacaggttatttcgatcttatttctgaagcttcagcaggtggtgagtcttcaacaaccgcactaggtgactcaacagaagcagatcagtttgatgcagctgaataat

SEQ ID NO: 278660 - DNA, 1279 bp, Unknown
  Bacterial polypeptide expressing nucleotide sequence isolated from the Sargasso Sea
aatgagtttaaatgaacaggtattacaattaaaaaatgattgggaaatgaatgaaagatgggcatatgtagaaagaccatataccgctgaagaagtagtaaaattaagaggatctttacagcctgagtatacactggcaagaattggtgcagaaaaattatggagcatgctacacaaagaggattatgttaattgtttaggaactttaactggaggacaagctgttcaaggtgttaaagctggagcaaaggcaatttatgtttcaggttggcaagttgcagctgataataatagtgctgaagcaatgtatcccgatcagtcattgtatcctgttgactcagttccatctttagttaaaagaataaatagctcatttaaaagagcagatcaaattgaatggatgacatcaaatggtaatccaaaatttgatttttttactcctatagttgccgatgctgaagcaggttttggaggtgttctaaacgcttttgaattgatgaaagcaatgataaaagccggtgcagctggagtacactttgaagatcaattagcaagtgttaaaaagtgtggacatatgggtggaaaagttttagttccaacccaagaagcaataaataagttagtagcagcaagacttgcagctgatgtatcaaatgttccaactttattagttgctagaacagatgcaaatgcagctgaccttttaacatcagatattgatgaaagagattctgaatttgttactggagaaagaacttcagaaggtttttatagggttaaggcaggaattaaacaggcgatttcaagaggcctttcttatgctccatattcggacttattatggtgcgaaaccggtaaaccaaacttagaagaagcaaaattatttgctgaatcaattaaaaaagatcatccggagctaatgcttgcatacaattgctctccgtcatttaattggagaaaaaacttagatgatgcaactattgcaaagttccaaagagaacttggagcaatgggatataaattccaatttattacacttgcaggaatccattctatgtggcacggaatgtttgatttaacaaaaaaatatgttaaatcaggtatgactgcatacgttgaattacaagaaaaagaatttgcagatcatgataaaggatatacattttctgctcatcaacaagaggtaggaactggttatttcgatgctgtaaataattgtattgttggagatccttcaactagtgcaatggatggttcaacagaagaagaacagttttaa

SEQ ID NO: 278661 - DNA, 1276 bp, Unknown
  Bacterial polypeptide expressing nucleotide sequence isolated from the Sargasso Sea
aatgtcaaattctaatgtttcttatgagttaaaaaggttctcaggaattaaaagagattacactgaaaaagaagttgaaagattaagaggatcagtaaaaatcagttattcaatttgtgaacaacaatcaaaaaaattatggcgtttattaaatacggaaaactatgtaaataccttgggttctttatcaggcaatcattctgtacaacatgcaaaggctggattaaaagcaatttatgtaagtgggtggcaagtggcagcggatgctaatactgctggtgaaatgtatccagaccaatctttatatccatttgatagtgcgccaaaattagttgagtcaataaataatgcattaataagagcagatcaaatacagcatatggaacttaatgatggcgacatgaaatctgaaaataaaattgactacatgttgcccataattgcagatggagaagcaggattcggagggccattaaatgtattcgaattaacaaaaaaatttataaaggctggagctgcaggagttcatttcgaggatcagcttgccagtgaaaagaaatgcggccatatgggtggaaaagtattagttcccacgggcacagcaattaaaaacctgaaagcagcaagattagctgcagatatagctgatgtaccattaattatactagccagaacggatgcgaatgcagcaaaattaattacgaacgatcatgatgaaaacgataaaccttttttaactggagaaagatctccagaaggttttttttatgttaaaaacggaatcgaacaagcaatatccagaggtttagcttatgcaccatatgctgatttaatatggtgcgaaactgcaactccgaatcttgaagaggcaaaaaaatttgcagatgctatacataaaaaacttcctggaaaaatacttgcatataattgctctccttcatttaattggaaaaaacatttaacagatgatgaaatttcttcttttcaaaaaaaaatcgctgagatgggttataaatttcaattcataacacttgcaggttttcatacacaaaatattgcaatttttgaattagcagaaaaatataaatctcaaggaatgagtgcgtattcaaaaattcaagaaaaagaatttgccaaagaaaaggatggatatacaagtgttaaacatcaaagagaagtcggaacttcatattttgatgctgtatcaaataccattagttcaggaaaaagttctacaacagcaatgaaagattcaactgagactgaacaattttag

SEQ ID NO: 278662 - DNA, 967 bp, Unknown
  Bacterial polypeptide expressing nucleotide sequence isolated from the Sargasso Sea
atgtcagccgagaaaatctcgtacgagttgaaaagatttgcaggaatacaaagggattataagccagatgaagtagaaaggctaagaggatctattagaattgagtattcaatgtgtaaacagcaatctcaaaaactctggagattgttgaatacagagccatatgtaaacacacttggttctttatcaggaaatcaagctgttcaacatgcaaaagcaggtttaaaagcgatctatttaagtggttggcaagttgcagcagacgcaaacagtgctggtgaaatgtatcctgatcaatctttatatccttacgacagcgcacctaaattagttgagtctatgaataattctttaattagagctgatcaaattcagcatatggaaatagcagatggagatatgaatagcagcgaaagaactgattacatgttgccaattattgcagatggtgaagcaggatttggtgggccgttaaatgtatttgagctaacaaaaaaatttataaaagctggcgcagccggagttcattttgaagaccaactagctagtgaaaaaaaatgtggacatatgggtggtaaggtacttgttcctactggaaccatggtccgaaatctaaaagcagcaagattggcagctgatattgccgacgttcctctcattatccttgcaagaacagatgccaacgctgcgaaactaataacaaacgattttgatgaaaatgacaaaccgtttttaactggagaaagatcacctgaaggcttttattatgtaaaagatggtattgatcaagcaatctcaagagggttagcttatgcaccttacgcagatttaatatggtgtgaaactgcaacacctaatttagaagaagcaaaaaagtttgctgatgcaatacatgcaaaatttcctggaaagatgttgggctataattgctctccatcatttaaattggaagaaacatttatctgat

SEQ ID NO: 278663 - DNA, 1017 bp, Unknown
  Bacterial polypeptide expressing nucleotide sequence isolated from the Sargasso Sea
catgtcagcagaaaatgtatcttatgatttaaaaagatttgcaggaataaaaagggattatacccctgaagaagtagaaagattgagaggatctattaaaattgaatattcaatgtgcaaacaacaatctcaaaaattatggaatttactaaacactgaaccttacataaatactctcggttcactttcgggtaatcatgccgttcaacatgctaaagcaggcttaaaagcaatatatcttagtggttggcaagtggcagcagatgcaaatagtgcaggtgaaatgtacccagatcaatcattgtatccttatgatagcgctccaaaattagttgaaacaatgaataatagcttaactagagccgatcaaattcaacacatggaaataattgatggtgatatggaagaaactaaaaaagtagattatatgctccctattattgctgatggagaggctggttttggtggacctttaaatgtattcgaactagcaaaaaaatttataaaagcaggtgcagcaggagttcattttgaagatcagcttgcaagcgaaaaaaaatgtggtcatatgggtggtaaagttctagtgccaacaggaacaatgattagaaatcttaaagcagcaagattagcagcagatattgcggatgtacctttaataattcttgcaagaacagatgctaacgctgcaaaattaattaccaatgactttgatgaaaatgataaaccctttctaactggagaaagatccccagaaggttttttctatgtaaaagatggaattgaacaagccatatctagaggtctagcttatgcaccttatgctgatttaatttggtgtgaaactgccactccaaatttagaagaagccaagaagtttgcagatgcaatacatgcaaaatttcctggcaaattgttagcttataattgctctccttcttttaattggaaaaaacatttatctgatgatgaaatagcatcttttcaaaaagaaattggaaaaatgggttataaatt

SEQ ID NO: 278664 - DNA, 1192 bp, Unknown
  Bacterial polypeptide expressing nucleotide sequence isolated from the Sargasso Sea
aaggttcgattaagattgaatactcaatggtgtaagcaacaatctcaaaaattatggaaattattaaatacagaaccttatattaatacacttggttcactttctggaaaccacgctgttcaacatgcaaaggctggattaaaagctatatatttaagtggttggcaagtggctgcagacgcaaatagtgcaggagaaatgtacccagatcaatcattgtatccttatgatagtgcaccaaaattagtagaaacaatgaataactctttaattagagctgatcaaatccaacatatggaattaattgatggtgatatggaaaaaagtacaagtgtagattatatgctgcctattattgcagatggagaggctggttttggaggacctttaaatgtatttgaattagcaaaaaaatttataagagcaggagcagcgggtgttcattttgaagatcagctcgctagtgaaaagaaatgtggtcatatgggtggaaaagtattggtaccaacaagtacaatgatcagaaatcttaaggcagcaagattagcagctgatattgctgatgtacctcttataattcttgcaagaacagatgctaatgcagcaaaattaattacaaatgactttgatgaaaatgataaaccctttttaaccggaaaaagatctcccgaaggttttttctatgtaaaagatggaattgaacaagccatttcaagaggtttagcgtatgcaccttatgctgatttaatttggtgtgagactgctactccaaatttagaagaagctaaaaagtttgcagatgcaatacatgaaaaatttccaggtaaattgctagcatacaattgctcgccctcatttaattggaaaaaacatttatctgatgaagagatagcatcttttcaaaaaaaaattggagaaatgggttacaagtttcaatttataactttggcaggttttcatactcagaacattgcaatatttgaattagcagaaaaatataaaacagaaggaatgactgcttactcaaaaattcaacagcatgaattttcaagagaaaaagatggttacactagtgtaaaacatcaaagggaagtaggaacttcatattttgatgcagtttcaaatacaattagttcaggcaaaagctctactactgcaatggaaggatcaactgagtcagaacaattctaat

SEQ ID NO: 278665 - DNA, 1324 bp, Unknown
  Bacterial polypeptide expressing nucleotide sequence isolated from the Sargasso Sea
atgactaaggcaacacagacttcacgtcaggcacagattgacgcgatcaaaaaagattgggctgaaaatccacgttggaaaaacgtgcgtcgcccatacactgcagaggaagttgtggcacttcgaggttctatcgtacccgaaaacaccattgccaaacgcggtgccgctaaactgtgggatttagtcaacggtggcgcaaaaaaaggttatgtgaactcgttaggtgcactgactggcggccaagcggtacaacaggcgaaagccggtatcgaagcgatttacttgtctggttggcaagtggcggccgacgctaacttagcgggcactatgtacccagaccaatcgttataccctgcaaactcagtacctgctgtcgttgcacgtattaacaactctttccgccgtgctgaccaaattcagtggagcaatggtgttaatccggaagaagaaaactttgtcgattacttcctgccgattattgccgatgctgaagcgggttttggtggtgtactgaatgcgttcgagttgatgaagtcgatgatcgacgcaggcgccgccggtgtgcactttgaagaccaattggcctctgtgaaaaagtgcggccatatgggcggtaaagtattagtgccgacccaagaagcggtacaaaagttagttgcagcgcgccttgcagccgacgtgagcggtgttgaaaccttagttatcgctcgtaccgatgcgaacgcggcggatttattgacctctgattgcgacccatacgatcgtgacttcgtgactggcgagcgcaccagtgaaggtttctaccgcgtgaaagcgggtctggaccaagcgatttctcgcggtcttgcctacgcaccttatgcggatttaatttggtgtgaaaccgctaagcctgacttagaagaagcacgccgctttgctgaggcaatccatgcccagtacccagaccaattgctggcctacaactgttcaccttcgttcaactggaagaaaaacttggacgacgcgacgattgcgcgcttccaacaagagctgtcggacatgggctacaagtaccagttcatcactttagcgggtatccataacatgtggtacaacatgtttgacctagcttacgactacgctcgtggtgaaggtatgaagcattatgttgagaaagttcaagaagttgagtttgcagcagcgaagaaaggctacaccttcgtcgcgcatcaacaggaagtgggtactggttacttcgaccaagtcaccacagtgatccaaggcggtcattcatcggtcactgcgctgactggctcgaccgaagaagagcagttttaag

SEQ ID NO: 278666 - DNA, 1228 bp, Unknown
  Bacterial polypeptide expressing nucleotide sequence isolated from the Sargasso Sea
tctcgatggagccgttaaaagaccatattctgcgaaggaagttgtcaaattaagaggttctttacagcctgaatgtacattagctagaaaaggagcagaaaaactctggaattacctatttacagaggattacatcaattgtttaggcgctttaactggtggacaggctgttcaacaggtaaaagctggtgttaaagccatttatctatcaggttggcaggttgcagcagacaataattcagctggcacgatgtatccggatcaatcgctctatcctgtcgattctgtacctaaagttataacaagaattaacaatgctttcagaagagcagatcagattgagtggatgaactccaatggcgagccaaaagttgatttctttgctccaattattgccgatgcagaagcgggttttggcggtaatttaaatgcttttgagctaatgaaaagaatgattgcagcaggtgctgctggagtgcacttcgaagatcaactagcaagcgttaaaaaatgtggtcatttaggcggaaaagttctagttccaactcaagaagcggtgcaaaaattgatcgctgctcgactagctgccgatgtatcaaatacacctacaattttaattgccagaacagacgctgatgcagcggatttagtgacatcagacgtagatgaaaacgataaaccattcttgactggtgagagaacttcagagggattttttagaaccaatgcaggacttgatcaagctattgcaagaggcttggcttatgcaccctattctgatcttgtatggtgtgaaacatctaaaccagatctagaacaagctaaaacttttgctgaagctatcaagaaagatcatccagaaattatgttggcatataactgttcgccatctttcaattggaaaaagaatcttgatgatgcaactatagccaaattccaaaaagagcttggtgctatgggctataagtttcagttcatcactttagctggcattcactcaatgtggcatggcatgtttaacctagcaaacgaatacgttgcagatggtatgacagcttacgttaagctacaagaaaaagaatttgaagatgctaaaaaaggctacacttttgtatcacatcaacaggaagttggaacaggttattttgatgcagtaaacaactgcatacaaggtgaagagagctcaacttctgcactcaaaggatctacagaagaagaccagttttag

SEQ ID NO: 278667 - DNA, 925 bp, Unknown
  Bacterial polypeptide expressing nucleotide sequence isolated from the Sargasso Sea
ccttttagaaagtgcggaaggaggtgagcggcttgcgcgctatagcttcatggggacaaacccttacaagattctcaagacggatatggattctcaaaacgttgatcctctttgcgaaatagaaacagaattaagccgctataaaattgcagagatagagggtttacctccatttgtaggcggagcagtgggatttttatcgtatgaggcaattcgtcattttgagcccacagtagatacatttagctccggagcatattctatccctgaatcagtattcttttttacggattctttgctaatttttgatcatgtcacgcataaaataaaagttattgccatcgcaagaattcaagataatcctagtaaagcctatgaatccgcaatagatcgaatcgacgaactaattgagaggttgaatagtcctttgcctccggatgagaatcatattttcccaggccaaatgtctaatccggatgcaatggattttcatcttcagtccaataagacaaaagccgagtaccatgagatggttgatcgcgctaaagagtacatagttgcgggcgatataatacaagtagtgccttcccaaaggcttgcaataaaagttaagtcagccccttttaatttctatcgttccttgcgagcaataaatccttccccctatatgtattttttacaaatagaggattattcaatagtaggagcctctcctgaaatgcttgtacgctctgagaatgggatggtagagacgcatccaattgcggggaccagacgtcgcgggaaggataatgaagaggataatgcgttagagcaagagcttcttcaggacggaaaagaaatagctgaacatgtaatgcttttagatctgggccgaaatgatatcggtcgcgtcagtaagccagggaccgttcaggtaacgcag

SEQ ID NO: 278668 - DNA, 973 bp, Unknown
  Bacterial polypeptide expressing nucleotide sequence isolated from the Sargasso Sea
tttcttgaatctgtagaaggtggggagaatttgggtaggtggagtattgttgctactaaacctctttgggaagctgtttgttatggagaagaaatagttaaaacttggaataatggcaaaactgaaacacataaaggtgatccttttgatattttaaaaagttggacaaaggaatacaagtcaactatggttgaagatttaccatcaattggacagttatatggctcttggggttatgagttaataaatcgaatagaaccaagcgttccaataaatgaaatatcagaaaacaatatcccctatggttcttggatgttttttgatcagttagttgtttttgatcaaataaaaagatgtattactgcagtggtttatgcagatacaacttcaaaagagtgctcaattgaagagttatatctaaactcaatttctaaaattcagaaaactagaaatttaatgagagttcctctaaaagaaaatgagtttttagattggagtgaaaatgataatttgaatttagatctagaaagtaattgggagaaaaaagattttgaggatgcagttctctctgcaaaggaatacataagaaagggcgatatcttccaattagttataagtcagagattccaaactcaagtcaataatgatccctttaatttatatagaagtttgaggatggttaatccatctccatacatgtcattttttgatttcggctcatggtatctgataggttcaagtcctgaagtaatggttaaagcagaaaaaaataaaaatagtcagattgttgcaagtttaagaccaatagctggcacaagacctcgaggtattgataatcaacaagacttggaattagaaaaggaattattaaatgatccaaaagagatagctgagcatgtaatgctaattgatcttgggagaaatgatcttggaagagtttgtgaaattggtactgtcaaggttaaggatttaa

SEQ ID NO: 278669 - DNA, 847 bp, Unknown
  Bacterial polypeptide expressing nucleotide sequence isolated from the Sargasso Sea
tcaagaattgatattccagacaatttgcctcctttgtcagctggtttatttggttacataggctatgatatggtctcatactttgaagatataaaaattaaaaataatgatcctttaaatctacctgaaacaatattaatgagaccttctttaatttgtatctttgatagattaaaagatgaatttattttaataacaccagttagagccaaaaaagatatttctgcactagatgcttgggagagtggaaaaaatattctatcaaatgctgttaatgagctgaatgttggccttgaacatagaaatcttccagttcaaaaagacacaatgcttgataataatgcgccaagcaatttggaaaaattagatttttataattctgttgagagggctaaagaatatattaaatctggtgatatataccaggttgttttgtcacaaagatttgaaatacctttcaaaaaatcatcaatttcattttataggtctttgcgaagattaaacccctcgccttttctatttcattttaatttcaaagatttttttgttgttggctcctctccagaaattcttgttcgcttgcgaaacaatgaatgcacaataaggccaatagctggaacaagaccaagggggtcaaataaagctgaagacttatctcttaaagaagaattacttaatgacccaaaagaaagagcggagcatttgatgctactggacttaggaagaaatgatgtcgggcgcgtttcaaagccagggagtgtggaggttacagaaagctttagtgttgaaatgtattcacatgtcatgcacatagaatctgaagtaaaaggtgaattaagagatggga

SEQ ID NO: 278670 - DNA, 723 bp, Unknown
  Bacterial polypeptide expressing nucleotide sequence isolated from the Sargasso Sea
agaattgataattcatgataatttaaaaagaaaaatttattatatttataattgttattcagatgaaaaaataaaaaattataatataatgtatagagaaattttgagtactttagagtacaatatttttctttcaaactataacttaactctaagcaagcaatataaaaaatcaaagattttaattaaatcaaacgttacaaaaaaaaaatttatagataatgttagaaaagcaaaaaaatacattaaaattggagatatatttcaagtagtcttaagtcaacgtttcgagactaaattaacaaaagagcctattgatatttataaaaaattaagaataacaaacccttctccgtttatgtatttttttaattttaaagattttcagattataggagctagtccagaaattttagttagacttagagatgataaaatcactataaggcccatagctggtacaagacctaggggaaaaaacaaaaaacaagatttattttataagaaagacctattgaaagataaaaaggaaatatcagaacatttaatgcttttagatttaggtagaaacgatactggtaaagtctcaaaggtaggtactgtcaaagtaacagagaaatttatcattgaaaagtattcgcatgtaatgcacattgtctctaacgttacaggacattttaatgacaaatttacaagatttgaaacgctaatgtcaggattccc

SEQ ID NO: 278671 - DNA, 949 bp, Unknown
  Bacterial polypeptide expressing nucleotide sequence isolated from the Sargasso Sea
cctgaatcaattttcataagaccatcattaacattagtttttgataatgtaaatgataagctttatataagtaagattatctctcccagcaaaaaaaatgcgttagaaacttttaaattagccaaatcagaaatcaataacttaattcaaaaaatagctaggcctctagagaaaaacaacttaagtcttcacaacttaagtggtaaggtaaatatttttaaaaatgtaaaatctaatacaacttattcagaattcaaaaaaatggttgagaaagctaaaaaatacatttttgaaggtgaaatttttcaagttgttttatcgaggctttttaaagcaaaaataaaatctagtccagtttcagtttacagagctttaagacacttgaatccctcgccatatttgtttttcatgaactttaaaaattttgatattgttggttcaagcccagaaattttaattaaacttgaagatgataaagttacaattaggccaatagctggaacaagaaaaagaggaaaaacaaaacaagaggataaaaaacttgaaaaagacttactaagtgatcctaaagaaatagctgaacatttaatgttactagatttgggaagaaacgatatcagtagagtcaccaagtctggaacagttgaggttactagtaaaatgtatattgaatatttctctcatgtaatgcatattgtttcaaatatcgaaggaaaaattaacaaaaaaaaaaatagcaccgatgttttattcagtggctttcctgctggaacagtaacaggtgctcctaaaataagagcaattgaaattatcgaggaattagaaaaaaatagaagaaacatttatgctggttcagttggatatatttcaaacaatggaaatattaacacttgcatcgccttaagaactgcacttataaaagaaaatcaaatatatgtacaagcaggtg

SEQ ID NO: 278672 - DNA, 691 bp, Unknown
  Bacterial polypeptide expressing nucleotide sequence isolated from the Sargasso Sea
catgtctctttataaggcgctgagaaaattaaacccttctccttatatgtattttcttaagatagatgaccttcacattgtaggagcttctccagaaattttagttagattacaaaacaatcaagtcactgtaagaccaattgcaggaacggttaaaagagggaaggatgaaatagaagaccaagaattggcgaaaatattacttaatgatgaaaaagaaattgctgaacatttaatgctgatagatcttggaagaaatgatgtaggaaggattgcaaatattggtagcgttgaaaccacagatcaaatggttatcgaaaagtactctcacgtaatgcatttggtttctaatgtcatcggcgatttaaaacatggacaatcagcaattgacgttctaaaagcaaccttaccagcaggtacactttctggagctcctaaagtaagagcaatggaaattattgaagagcttgaacccgataggaggggagtttacggtggagcaataggttacctatcctggacgggaaatatggatacagccatagctatacgaacagcgattattcaaaaaaatgtattgaaagttagagctggaggaggaatcgtgcatgattcagatcctgaagcagagtatcaagaatctttaaacaaagctcaatctatctttaatgctctggaggagatggattaa

SEQ ID NO: 278673 - DNA, 535 bp, Unknown
  Bacterial polypeptide expressing nucleotide sequence isolated from the Sargasso Sea
atgccgcctatggcaggtgctttttttggttatatatcatatgaaaatatttataatatcgaggacatatctaagttcaaaaaaaagaacactttaatgactcctgaacttatactttttattcctgagatattaattgtatatgataatgtttctaattctttatatatattaaagcatttcttatctggtataaaaaaagctcaagaatatgaacaagttcttaacgaattaaatgatatagaaaataacctttataaaaaattaaaaaatcatacaattaatctcaataaaaagaaaaggcttaaaattaaatcaaatataactaagtcaaaattcattaataatatcaaaaaagcaaaaaaatatattaaagctggtgacatatttcaggtagttccaagtcaaagatttgaaactaattttaaaagtaaaggcagctcgctctacaaagtactgagattgactaacccctcaccttttatgtactactttaatttgcctaattttcaaattgttggctcgagtccagaga

SEQ ID NO: 278674 - DNA, 718 bp, Unknown
  Bacterial polypeptide expressing nucleotide sequence isolated from the Sargasso Sea
agaagtaaccttcgaaggaaattatgaccctttgactctttacagagcattgagacttataaatccatcaccttacatgttttatatgagctttgataaatttaacgtaattggagcgtcgcctgaaatattggtccaacaccagaaagataaagtaacgataagaccaatagctggaactcgtaagaggggtctgactgaatctgaagatttgtcaaataaaattgatttgttggaagacgagaaagagaaagcagaacacatgatgctagtagatttagctagaaatgatctatcaaaagtttctgaagttggaacagttcaagtagatgaaatgatggttatagaaaaatactctcacgttatgcatatgacttctaatgtaataggtcaaaaaaagaatggtgcaacaccaatagattgtttaaaagcggcattacccgctggcacattaagtggaacaccaaaaataagagctatggaaatcctttctgagcatgaaaatagggtaaggggcatttacggaggatctgttggatatattggttttaatggcaatttagacactgcgattgttatacgtacagcaatacatacagatgaatcagtaaaagtaggtgttggtggaggtatagtatttgattcaacacctaagaatgaatggcaagaaactgaatcaaagttagctgtttttagggaggcattaaagtataaatga

SEQ ID NO: 278675 - DNA, 268 bp, Unknown
  Bacterial polypeptide expressing nucleotide sequence isolated from the Sargasso Sea
cttggagcaccaaaaataagagccatggaaattattaatgaattagaaccaagctcaagaggtatatatggaggagcaattggtcatatatcttgggatggagacattgatacagcaatagctatcagaactgctgtcattaaaaataataaaattcatgttggagctggagcaggggttgtggctgactcaatacccgagaatgaatggaatgagtgccttcaaaaagctcatgttttcttagatgccattgagatgattaaatgat

SEQ ID NO: 278676 - DNA, 511 bp, Unknown
  Bacterial polypeptide expressing nucleotide sequence isolated from the Sargasso Sea
atgaatcaagaacaatatgatcaactggtagcgcagggatataatcgaattcctatcataagggaagtgctagcagacaccgaaactccgttaagtgtctacctcaaacttgcaaaaggaaaaaacagttatttctttgagtctgtgcagggaggtgaaaagtggggacgctactccataataggtcttccgtgcagaactattcttacggtaagagataaaaagattaccatcgaaactgacggtagtgttcaagacgaatttgtgaccgatgacccatttgcttttttagcggaatttaagtctcgttttaaagttgcggagataactgatgaacagaggttctcgggaggtttggttggttatttttcatacgatactgttcgcttcgtagaaacaaaacttggccccgctgacaataaagacgagatagatacaccagatatattgttgatgctttctgaagagttagtagtttttgataatcttagaggcacgattcttttataat

SEQ ID NO: 278677 - DNA, 913 bp, Unknown
  Bacterial polypeptide expressing nucleotide sequence isolated from the Sargasso Sea
atgaaaaaatattcttttcttctagagtctgttgaaggtggtagtaaaagaggtaggtattcattacttggttgtgatccagatttaatttggaaagttgagaaaggaaaagctagaattaaatatttagattacaattatgattataaattagatatcaacccaataaatagccttaaagaactggtaaaaatttctaaatttacaaacaatgaagttgatgtaccttttccaacacttgttgggtatttaggatatccaatgatacaatatattgagaatataaaacttagaaataaagatgatattaatatccctgatgcaatattaattagacccaaaatagtagcagtttttgataatattaaagatattatttcgcttatggtggtaacttatccaactaaaaaaatatcagctcaaaaggcttataaaaataataaattactaattgaaaaaactattaataaacttcaagaaagtattttaaaacctgcacaaaacaaaaataagaaatctaagttaaattttaaatctaatatcaaaaaagaacaattttataaaattgtaaataaagcaaaagaatatattcaaaatggagacatctttcaagttgtaccttcacaaagatttgaaacaaaatatagtttgaaagcaataaatctttatagatcattaagacgtctcaatccttctccataccttgttaatcttaattttgataaaattggacttgttgcatcgagtccagaattaatggttcaactaagagataaaaaagttacaatcagaccaattgctggaacgagaaaaagaggtaaaaatgcaacagaagatatgtttttatctaacgatttacttaatgacaaaaaagagcttgcagaacatttaatgcttttagatttaggaagaa

SEQ ID NO: 278678 - DNA, 772 bp, Unknown
  Bacterial polypeptide expressing nucleotide sequence isolated from the Sargasso Sea
ttgggatatcctatggtttcgtatatggaaaaaataaatttaaaaaataatgatactttaaatatacctgattcaattatgataagaccaaaattagttgcagtttttgataatataaaagatacaataaatataatgacagcagtttaccctaataaaaaaattgatcctgaaactgcttatttaaaagcattccaaaaaatagataaagttaattatcaattaaaaaattattttgaaaatgaaaaaacaaaattaaaaaatgaatctgataaagatattaactttatttcaaattatactaaaaaagaatattttaatatggttaataaagcaaagaaatatattcgtgaaggagatatatttcaagtagttctatctcaaagatttgaatgtgactataaattagatgctaaaactttatatagatctttaagacgtcttaatccttctccttttttagtaaatttaaattttgatgatttaggtttagttgcatcaagtccagaaattttagttagattaagagataaaaaagtaactatcagacctattgcaggaactaggaaaagaggtcaaaataacaatgaagatgaaatattatctaatgatcttttaaatgataaaaaagaactcgcagaacacttgatgctactagatttgggtagaaatgacgtaggtagagtctccaaaataggctcagtgaatgttactgaaaaaatgcaaatagaatattattctcatgtaatgcacatagtttcaaatgtagaag

SEQ ID NO: 278679 - DNA, 916 bp, Unknown
  Bacterial polypeptide expressing nucleotide sequence isolated from the Sargasso Sea
agtttgggtaggtggagtattgttgctactggacctctgtgggaggccgtttgttatggagaagaaatagttaaaacttttaataatggtaaaactgaaacacataaaggtgatccttttgacatcttgagaagttggacaaaggaatataagtcaaccattcttgatgacttgccatcaattggtcagttatatggctcttggggttatgaattaataaatcgaatagaaccaagcgttccaataaattcaatattagaaaacaatattccttatggatcatggatgttttttgatcaattagttgtttttgatcaaataaaaagatgtattactgcagtagtttatgtagatactacttcttcaaaagagtcctcgattgaagagttgtatctaaacgcaatttctaaaattcagaaaactagaaatttaatgaaagttcctttaaaagaaaatgagttcttagattggaatgaaaatgagaatctgaatttagatctagaaagtaattggaagaaaaaagattttgaggatgccgtgctctctgcaaaagaatacataaaaaagggagatattttccaaatagttataagtcagagattccaaactcaagtcaataatgatccctttaatttatatagaagtttgaggatggttaatccatctccatacatgtcattttttgattttggctcatggtatctgataggttcaagtcctgaagtaatggttaaagccgaaaaaaataaaaatagtcagattgttgcaagcttaagaccaattgctggcacaagacctagaggtattgataatcaacaagacttggaattagaaaaggatttattaaaagatccaaaagagatagctgagcatgtaatgctaattgatcttgggagaaatgatcttggaagagttt

SEQ ID NO: 278680 - DNA, 258 bp, Unknown
  Bacterial polypeptide expressing nucleotide sequence isolated from the Sargasso Sea
ctggtgcaccaaaaataagagcaatggagattattgatgaattggagacaacaagaaggaaggtttacgcagggggtattggctatttttcatcaaatggtgattttgatacttgtattgcccttaggacagcaatttcaaaaaataaaaaattttatgtacagtctggagcaggaattgtagctgacagtaaaccaattaatgaatttaatgaaactgtaaacaaggcaaaagctttaattaaagctttggaataat

SEQ ID NO: 278681 - DNA, 922 bp, Unknown
  Bacterial polypeptide expressing nucleotide sequence isolated from the Sargasso Sea
aaatcaaaaaaatataatcttattccggtttatcaagaaattagagctgatcttgaaactcctttatctatttatataaaactatcagataacaagtactcatttttactagaatctatcaccggtggagaaaatctagctagatattcaattattggaactaacccaagaaaagttataaaaactggcaagaatgaaaaatatggagaaattgatcccttagaaatagttaaagaagaaattaagtcatttaaggtacctgaaattgaagagttgcctgtctttactggtggagcagtaggctatttatcttacgaaactgtttcatattttgaggatactgttacaaagaaaaaaaattctaatttagaagtaccagaatccatttttcttattactgattctttagttgtttttgatcatgttaagcagactatttttatagtaaattacgcaaaaatagaagaaaattctgatctagaaaaagtttttttagaatctcaaaaaaaaattgatgatatctacgtaaaaattagaaagcccattacagataaatttaataacatttcaaatatcaataattcatccgataaatctaataatgaattagttgatgaatatcaaaaaaatatgactaaagaagaatataaaagtgctatcgaaaaatgtatagaaaatatttactcaggcgaaattatacaagttgtgttttctcaaagattatcaaagaaaactaaagcgtctgcaatagaaatatacagatgtttaagaacaataaacccttcaccatacatgtttctactaaatcttgatgattttcatatcttaggagcgtctccagaattgctggttaagtcttccaataaacaaattagtgttcaccctatagcaggtacaagaccaagaggatcagattcaatag

SEQ ID NO: 278682 - DNA, 770 bp, Unknown
  Bacterial polypeptide expressing nucleotide sequence isolated from the Sargasso Sea
attggtaggatatttaggatatccaatgattaaatatatggaaaaaatatatttaaaaaatgatgataatataaatattcctgattcagtactaattagaccaaaaattgttgctgtttttgataacatcaaagatacaatttcagtcatgactgttgtctatccaagcgaaaataaacattatgaaagtctctatacaaaagcacaagaactattagaagtgaaagtaaatcaactgaaagaaaaccttgttcaaaattcagctatttcaattaaatcaaatttagattttaaatctaattattctaaagacgaatatttttctataatttcaaaagcaaaggaatacattaaagaaggagatatttttcaagttgtaacatcacaaagatttgaaacagaatatgatcttgaagcaattagtctttacagatctcttcgaaggttaaatccctctccatacttagttaatttaaattttaatgatattggtttagtggcttctagtcctgaattgcttgttcaattaagaaataaaaaaattactattcgcccaatagcaggaactaggaaaagaggaaaaaatgctaatgaagatttagaactttctagaaatttgcttcaagataaaaaagaacttgcagaacatttaatgttattagatttgggaagaaatgatgttggtagagtttctagaaatcaatcagtaaaagtaacagaacaaatgattattgaatattattcacatgttatgcatatagtttctaatg

SEQ ID NO: 278683 - DNA, 901 bp, Unknown
  Bacterial polypeptide expressing nucleotide sequence isolated from the Sargasso Sea
gagtctgttgaaaaaagaagaattagaggccgttacacaataataggagcagatcctgataaaatctgggaatttaataataagaaaatacatgtcatagaaaatgaaaaaagaaaattgataaaggatgagccctacccctttttaaaaaatcttatagagagtttcaattttcctatgccaaaaaatttacctccgcttagttctcttttggttggttacttttcgtatgatataattagatacatagagaatgttcctaacaaatgtttagatgatctgaaaataccagatattagacttataaggccaaaaacgataataattcacgacaatttatcgaaaaagatttattttttagtaaattgttttgctgatgaaaaaatttacaattactcagaatattatcataagcaggttcgtaatttaaaatttttaaaaaatctaatttttagaagttctaatttaattaaaattaaaaaatcaaaaaaaaatatcaaattaaaaattaaagttaaatcaaacatatctaagaaaaagttcaaaaaaatagttttaaaggctaaaaaatacataaaaaaaggtgacatttttcaagttgtattaagtcaaagattcgaatctaagcttacaaaaacccctttggaaatttataaaaagctaagacttgaaaatccttctccttttatgtttttttttaattttaaagatttccaaataataggaagtagtccagaaatattagtaagattaagaaataataaaattactattcgtccaattgctggaactagacctcgtggcttaaatgctaaaaaagataatttttataaacgacaacttctcaatgacaaaaaagaactagctgagcatttgatgcttttggatctaggaagaaacg

SEQ ID NO: 278684 - DNA, 832 bp, Unknown
  Bacterial polypeptide expressing nucleotide sequence isolated from the Sargasso Sea
gagggagataaaaaatggagccgatatacaatagtagggttaccatcgcaaaatttcatagatatctacgataaaaacattaaagtatataaagaaaataaattagatgaagattttacagtaaataaccctatttcttggattgaagaatatcaaaaaaaatttgttgtgttacaagatagaaaattacctgaatttcaaggaggtttagttggtttttttgggtttgatgcagttagtcattttgaaaaatctattaaaccatctaaccaagatgattcaatgaaaacacctgatataagtttacttatttcgagagagcttttgatttttgataaacttaaacgaaaagtacatttagtagtatatgctgaagatagtattgaaagctttaatcttgctaaaagtaaacttagtacacttaagcaagcaatatgcgagcctattgtaattaaaaaaaataagaatatttcaaataatgattcacctttgaaaattaattatcattttccgaaggaaaaattcatctcagcagtggaaaaaattaaaaattacatttttaaaggcgatgttatgcaagtggtactatcgcagagaatgtccattgaatttaaagaagacccctttgatttctataaggaacttagagagttaaatccatctccatatatgtattatttaaatatgggagattatcatattgtaggatcctctcctgagattctcgtacgtttagaaaataatattataactgttaggccaatagcagggactagaccaagaggcaaagacgctgaatctgataaactcttagagatagaattattaaatg

SEQ ID NO: 278685 - DNA, 859 bp, Unknown
  Bacterial polypeptide expressing nucleotide sequence isolated from the Sargasso Sea
gatggatcgtattcttttctcttagaatctgttgaaggtggcgaaaatgtagctagatatagctttattggaacaaatcctttagaagtaattcagactggaaaaaatacaactaacggaaaaaaaaaccccttagatcaattaagaaacaaaatgaaaaagataagttatgctcccgtagaaggattgcctaaatttcatggtggtgctgtcggatatctttcatatgacagtattaaatattttgaaccaagtgtccctgaaataaatagtcaagattcaggattaaatgttcccgaatcggtgtttatgttaactaactcattactaatctttgatcatgtcaagcatacaataatagttgtagctcacgcagaaattggctcagatgtttcaggtgcttacaatgatgcgataaatacaattacctcactaattaataaactcagtaaagaattgcctagagaagaaaaaattaaaaattttataccaatatcccaaatacaaaatcttcataatcaaatatcttataaagattcaataaaagacaaaagtaaatcttttatcccaaatatgagtaaagaatattacaaagattctgtatctagatgcaaaaaagcaataaatgacggagagcttattcaggtagttttttctcaaagactatcaaggtatactgaaattaaaccatttaatttatatcgttctcttagagccattaacccttcaccatacatgttctttcttcacttagatgattttaatatcgtaggtgcgtcacctgaattgttgactcaagtaatagataaaaagatggcagtgcaccctatagctggtactagaccaagaggaaaaaaga

SEQ ID NO: 278686 - DNA, 366 bp, Unknown
  Bacterial polypeptide expressing nucleotide sequence isolated from the Sargasso Sea
aaaaatattcgcatgttatgcacatagtttctaatgttgagggtcaatttaataaaaaactttctttacttgataccatgttagcgggatttcctgcgggcactgtgactggagctcctaaaataagagctatggaaattattgatgaattagaaaaatcaaaaagaaaaatgtatgctggttcaataggctatttctctgctaatagaaattttgatacatgtatagccttgagaaccgctttaataaaaaacaataaattttatattcaatctggagcaggtattgttgctgatagtgtgccagaaaaggagtattatgaaacggttaataaagcaaaagctttgataagctcattaaattaaa

SEQ ID NO: 278687 - DNA, 472 bp, Unknown
  Bacterial polypeptide expressing nucleotide sequence isolated from the Sargasso Sea
aagaacataaataatagaactgaacttaaatcaagaaatattaaagttaaatcaaacacttctaaaaatagatttttgcaaatggtcaataaagcaaaagaatatattaaattaggagatatatttcaggtagttttaagtcaaagatttgaagctaagctaacaaaaaaaccaattgatatttataaaaaacttagagtgactaacccttcaccttttatgttttttttcaatttcaatgattttcaaattattggtgctagtccagaaatactggtaagactaagggataacaaaatcactgtaagaccaatcgctggaacaagacctagaggtaaaacattgagcgaggatcgtttttatgaaaaagatcttcttcaagataaaaaggagctttcagagcatttaatgttattggatttaggcagaaatgatgctggtaaagtttcaaaaattaatactgtaaaagtaa

SEQ ID NO: 278688 - DNA, 262 bp, Unknown
  Bacterial polypeptide expressing nucleotide sequence isolated from the Sargasso Sea
accaaaagtaagagcaatggaaataattcaagaattagaaccaactcaaagagaaacatatgcaggagccgtaggttatttttcatttaacggatgctgtgattttgcaattgcaattaggagtatttttgccaataaagaaagaggatttgtacaggcaggtgcaggcattgtatttgattcaattgcagaaaatgaattgaaagaaaccgaacataaagcaaacgcaatgattactgccttaaaggaggcatcaaaatga

SEQ ID NO: 278689 - DNA, 869 bp, Unknown
  Bacterial polypeptide expressing nucleotide sequence isolated from the Sargasso Sea
aaaaataatgaagaccctattaaatctctaaaaaagttaattaagcaatcaagaattgatattccagagcatttgcctcctttgtcagctggcttatttggttacataggctatgatatggtctcatactttgaaaatataaaaattaaaaataatgatcctttaaatcttcctgaaacaatattaatgaggccttctttaatttgtatttttgatagattaaaagatgaatttattttaataacaccagttagagctaaaaaagatatttctgcactagatgcttgggagaatggaaaaaacattttatcaaatgctgttaatgagcttaatgttggtcttgaacataggaatcttccagttcaaaaagacacaatgcttgataataatgcgcctagcaatttagaaagattagatttttataattctgtaaagagggctaaagaatacattaaatcaggtgatatataccaggttgttttatcacaaagatttgaaattcctttcaaaaaatcatcaatttcattttataggtctttacgaagattaaacccctcgccttttctatttcattttaatttcaaagatttttttgttgttggctcctctccagaaattcttgttcgcttgcgaaacaaagaatgtacaattaggccaatagctggcacaaggccaagaggggcaaataaagctgaagacttatctcttaaagaagaattacttaatgacccaaaagaaagagcagagcatttaatgctactggacttaggaagaaatgatgtcgggcgtgtttcaaagccaggaagtgtggaagttacagaaagctttagtgttgaaatgtattcacatgtcatgcacatagaatctga

SEQ ID NO: 278690 - DNA, 730 bp, Unknown
  Bacterial polypeptide expressing nucleotide sequence isolated from the Sargasso Sea
ttgatatcaggatatttttcatacgatataattagatatattgaaaaaattccaaatagtaccaaaaatgatttacgtattcctgatacaagaataatgagacccagaaatctcattgttcacgataatattaaaaaaaaaattttctttatagttaatgtcttcaaggatgaaaaaattaaaaacattaaagaaaaatatatttcagtcgaaaatgagatagagaatatgatttttctatcaaattatgattttgaaaaaaaatctcatccaaaagaaaatataaaaattaaagtaaaatctaacatttcaaaaaataaatttataaaaaatgtcattaaagcaaaaaaatatattaaattaggtgatatttttcaggttgttttaagtcaaagatttgaggcaaaacttacaaagaagccaatagaaatttataaaaaacttcgaataactaatccttctccttttatgtatttctttaattttagagattttcaaataattggtgctagcccagaaatattagtgagattacgaaataataaaataacaattagaccgatagcaggaacgagacctagggggaagaacaaaaaagaggacctattttatgaaaaagatttattaaaagataaaaaagaactatctgagcacctaatgttgctggatcttggtagaaacgatacaggaaaagtttcaaaaatcaattcagttaaagtaaccgagagtt

SEQ ID NO: 278691 - DNA, 696 bp, Unknown
  Bacterial polypeptide expressing nucleotide sequence isolated from the Sargasso Sea
aatgaaggcccaaacgggtaatagtctcgatgttttgaggacaattctagctgagaataccatggatatacccgacgatttgccgcctatggcagccggttggattggcaacttggggtatgatttcattcgtgaaattgagcgtcttgggccgactagagttgaccctgtcggtttgtcaacatcgctgttaatacggccaactataatggccgtttttgacatggtgaaaaatacgatcacactcgtcaccccggtcaggccggccacaaaggccaaacccatggcgaaatctgatattatcatgacaattagtgacgcccgacaccgccttgatgatgccatggaccgactttatcggccccttccccgccccgaaggaaaggaaattgtggccaacgaccatcctgtaaaatctaatacacaaccttctgcttatctggaaatggtgtccaaagcgaaagactatatatatgctggcgatatctttcaggtcgtcctgtcgcaacggtttagtcagccctttgacctttcgccgtttgcgctttatcgagccttgcggcgcactaatccatcaccgttcctgtattttttaaagtatgacgatgttgcaatagtgggttccagccccgagatcttggtcaggctacgcaaaaatacaatcaccattaggcctatagcaggaacacgaccgcg

SEQ ID NO: 278692 - DNA, 822 bp, Unknown
  Bacterial polypeptide expressing nucleotide sequence isolated from the Sargasso Sea
agtcaaccatggcttgatgatttaccatcaattggccagttgtacggctcttggggttatgaattaataaatcgaattgaaccaagcgttccaataaatgaaataccagaaaacaatatcccctatggttcctggatgttttttgatcagttagttgtttttgatcaaataaaaagatgcattactgcggtggtttatgcagatacaacttcttcagaagagtgctcaattgaagagttgtatctaaactcaatttctaaaattcagaaaaccagaaatttaatgagagttcctctaaaagaaaatgagtttttagattggaatgaaaatgagaatttgaatttagatctagaaagtaattgggagaaaaaagattttgaggatgtagttctctctgcaaaagaatacataagaaagggagatatcttccaaatagttataagtcagagattccatactcaagtcaataatgatccctttaatttatatagaagtttgaggatggttaatccatctccatacatgtcattttttgatttcggctcatggtatctgataggttcaagtcctgaagtaatggttaaagcagaaaaaaataaaaatagtcagattgttgcaagcttaagaccaatagctggaacaagaccaagaggtatcgataatcaacaagacttggaattagaaaaggaattattaaaagatccaaaagagatagctgagcatgtaatgctaattgatcttgggagaaatgatcttggaagagtttgtgaaattggtactgtcaaggttaaggatttaatggttattgagaaatattcacat

SEQ ID NO: 278693 - DNA, 896 bp, Unknown
  Bacterial polypeptide expressing nucleotide sequence isolated from the Sargasso Sea
tatcatatccattaatcattttaaaaacgaactttatttatttgaacatagaactgaaattggtacaggaagtggtccggaatctcttgaaaaattagaagaacttgtcaagtctcccaatgtatcaaaaaatacctttcaaagagagggtgaggaactcagcaattgtacaaacgaggagtttctaaaaatggttcaaagcgctaaaaagcattgtaaaagaggtgatgttttccagcttgttttatcgagagagttttcacagaaatttcaaggcgatgagtttaccctctacagagcattacgatcaattaacccctcaccatacctgttttattttgattttgaaaagtttagaatttttggttcttctccagaagctcaaatcgttataaagaatagaaaagccactatttatccaattgctggtacattcagacgaacaggtgacgatgttaaagacgcggaacttgctaaaaaattactggatgatccaaaggaaaacgcagaacatgtaatgctggttgacttagcaaggaatgatttaagtagagattccaaaggggtttctgttgaagcttaccgagaaattcagttttattctcacgtaattcatttggtatcaaaagttactggagatttacttcccgacaaaaattcaattcgcctggtagccgacacatttccagcgggaacattatctggagccccgaagcatatggctcttcaattaattaataaatatgaaaaaaatcaaagaggtatttatggtggatgtatcggttttttagggtttaacggagacttcaatcatgctataataattcgttcatttctaagtaaaaataataatttgtattaccaagccaggtgcaggtatagttatgaaatctgat

SEQ ID NO: 278694 - DNA, 826 bp, Unknown
  Bacterial polypeptide expressing nucleotide sequence isolated from the Sargasso Sea
agcgttccgataaatgaaatagcagaaaacaatatcccttatggttcctggatgttttttgatcagttagttgtttttgatcaaataaaaagatgtattactgctgtggtttatgcagatacaacttcatcaaaagagtcttcgattgaagagttgtatctacaatcaatttctaaaattcagaaaactagaaatctaatgagagttcctctaagagaaaatgagtttttagattggaatgaaaatgaaaatgaaaatgaaaatgagaatttgaatttagatttagaaagtaattggaagaaaaaagattttgaggaggcagttatctctgcaaaagaatatataagaaagggagatattttccaaatagttttaagtcagagattccaagctcaagtcaataatgatccctttaatttatatagaagtttgaggatggttaatccatcaccatacatgtcattttttgattttggctcttggtatctgataggttcaagtcctgaagtaatggttaaagctgaaaaaaatcaaaaaagtcagattgttgcaagcttaagaccaatagcaggtacaagacctagaggcattgataataaacaagacttagaattagaaaaggatttattaaaagatccaaaagaaatagctgagcatgtaatgcttattgatcttgggagaaatgatcttggaagagtgtgtgagattggtactgtgaaagtcaaggatttaatggtcatcgaaaaatattcacatgttatgcatatagttagtgaagttgaggggatcttgaagaaaaatgctgatgtatgggatttattaaaag

SEQ ID NO: 278695 - DNA, 372 bp, Unknown
  Bacterial polypeptide expressing nucleotide sequence isolated from the Sargasso Sea
gtgatgcatatcgtatcgaatgtggagggatcaattcaagaaaatttatcacccatggatgtgtgaaagccactttcccagccggaacagttagcggggccccaaaagttcgcgctatggaaataatcaatgaactcgaatcaaccaaacgtggagtttatgcaggcgctgttggctacattggatatgacagtacgttagatgttgcgattgctataagaactggtgtaatcaaatcaggaaagctatttgtacaagctggggctggtgtagttgctgattcaatagcaaaaaatgagtgggatgaaactaataataaggcaaaagccgttttgcgagctgctgaaatagcagagagggatttcggataat

SEQ ID NO: 278696 - DNA, 922 bp, Unknown
  Bacterial polypeptide expressing nucleotide sequence isolated from the Sargasso Sea
tgatccttttgatattttaagaagttggacaaaggaatataagtcaaccatgattgacgacttgccatcaattggtcagttatatggctcttggggttatgaattaataaatcgaatagaaccaagcgttccaataaatgaaatacaagaaaacaatattcctgatggttcctggatgttttttgatcagttagttgtttttgatcaaataaaaagatgtattactgccgtggtttatgcagatacaacttcttcaaaagagtcctcgattgaagagttgtatctaaactcaatttctaaaattcagaaaactagaaatttaatgagagttcctctaaaagaaaatgagtttttagattggaatgaaaatgataatttgaatttagatctagaaagtaattggaagaaaaaagattttgaggatgcagttctctctgcaaaagaatacataagaaagggagatatcttccaaatagttataagtcagagattccaaactaaagttaataatgatccctttaatttatatagaagtttgaggatggttaatccatctccatacatgtcattttttgattttggctcatggtatttgataggttcaagtcctgaagtaatggttaaagctgaaaaaaataaaaatagtcagattgttgcaagtttaagaccaatagctggcacaagacctagaggtattaataaccaacaagacttggaattagaaaaggatttattaaaagatccaaaagagatagctgagcatgtaatgctaattgatcttgggagaaatgatcttggaagagtttgcgaaattggtactgtgaaggtcaaggatttaatggttattgagaaatattcacatgttatgcatatagttagtgaagttgagggaatcttaaaaaacaatgctgatgtatgggat

SEQ ID NO: 278697 - DNA, 853 bp, Unknown
  Bacterial polypeptide expressing nucleotide sequence isolated from the Sargasso Sea
aatgtcatcgatgttggttggatatttttcatatgatattattcgtttaattgaaaaaattcctaacagctgcagtgacgatataaacatccccgatataagattaatgagacccaaaaatttaattatttacgataattttaagagtaaaatttttttcatagaaaatatatttgaagatcaaaaaattggggattatcaaacagaatataataaaattggaaataacctaaaagaattaagccattacggaaacattcccctacctacaaacttttacagaccagcaagaaaaattaatattaaatcgaacataacaaaatcaagattcaaaaaaattgttagaaaagcaaaaacttacattagtaaaggtgatattttccaagttgttttaagtcagagatttaaggcaaatataaaaaaaccaccacttgaaatttataatagtttaagaaagttaaatccatctccatttatgttttattttaattatgatgattttcaaattttaggtagtagcccagaaattttagtgagattggtagatggtgaggtcacaataaggccaattgcaggtacaagacctaggggaaaaaatagtaaagatgataaaagattaacaaatgagttattaaatgacccaaaagaattatctgaacatttaatgcttcttgatcttggtagaaatgatgttggaaaagtctccaaagcaaattctgtaaaagttacagaaaaatttaaagtggaaaaatattctcatgttatgcatattgtttcgaatgttattggtaaacaaaaaataaattgtccctttttgaaacatttttatctggatttcctgctgggactgtaa

SEQ ID NO: 278698 - DNA, 892 bp, Unknown
  Bacterial polypeptide expressing nucleotide sequence isolated from the Sargasso Sea
ggtggtctatctcgtgcagctcgcgctggttggtccgaaggacgacgccgcggccgtctacgccgagacgctggccgagctcgagcggcgggccgaggagatccagacgcacagcaagccgctgcgtgcggggcggatgacgccgcgaggcgaggcctcgccgatgccgagcaacatcacacgcgagcagcacgcggagatggtcgaccgtgcgctcgaatacatccgggcgggcgatatctttcaggtcgtgctcgggcagcggttcgagcgcacagcctcggcggatccgttcgatgtgtaccgctcgctgcgggcggtgaacccgagcccgtacatggtctacatgcaggccggcccctgcatcctggtcgccagcagccccgagatcctgtgccgtgtcgagcgggtgtcaactggttcgaagcgcggcagtgacttcaaggtgaccaaccggccgctcgcgggcacgcgcaagcgaggcgccacgccggacgaggacgcggcgctcgaggcggacctgctcgccgatcagaaagaactcgccgagcacacgatgctcgtggatctcggccgcaacgacgtcggccgcgtcgcgaagccgggcagcgtctcgctcgacgcggtcatggaggtcgagcggtacagccacgtgatgcatatcagctcgaccgtgaccggcctgctccgggacggcatggactgctgggacgcgctgcgggcggccttgccggtcggcacgatctcgggcgccccgaaggtgcgggcgatgcagatcatcgacgagctcgagccggtccgccgcggcccttacggcggcgggatgggctacgtcgggctcgacgggcagatggatatcgccctcgccctgcgcacgatcgggcgcccgtga

SEQ ID NO: 278699 - DNA, 463 bp, Unknown
  Bacterial polypeptide expressing nucleotide sequence isolated from the Sargasso Sea
gcagatagtcattaataataaaaaagctgagattcatccaattgctgggactttcaaaagaactggagatgatgtaaaagatcaaatcacagcaaaagagctagcaaaagatccaaaagaaaattctgagcatataatgcttgttgacctagctagaaatgatttaagtagaagtgggaataatgttaaagttgaaaaaaacagagaaattcaattctattcccatgttattcatttagtttcaaaagtaactgcagaattaaacaaggatataaaatcctatcaagttgttgaagatacttttcctgctggcacactatctggtgctccaaaacataaagccctagaactaattgaaaagtatgaaaaagttaatagaaatttctatggtggagctattggttttattgattttgatggaaactttaatcatgcaataataattaagatcattcttcagtaa

SEQ ID NO: 278700 - DNA, 727 bp, Unknown
  Bacterial polypeptide expressing nucleotide sequence isolated from the Sargasso Sea
tataagatatatagaaaaaattccaaattcatgctctgatgacttaaatattcctgatgctagaattttaaaaccaagaactctcgtaatacatgacaattataaacaaaaaatttattatatagaaaattgtttttcagacgaaaaaataaaaaattataaaaaaaaatttaattctattaaaaaacaaataaataatttaatttttacatctaattacaattctaatttaacaatcaatagttcaaataaatcaataaaagttagatctaacataactaaaaaaaaatttttagagaatgtattaaaagcaaaaaaatacatcaaaattggcgatatatttcaggttgttttaagtcaaagatttgaatcaaaactgactaaaaatccaattgaaatttataaaaaacttagaattaacaatccttcgccatttatgtatttttttaactttcatgattttcaaataattggagcaagcccagaaatactcgttagactaagaaataataatataacaattagacctatagcaggtacaagaccaagaggaaaaagtaaaaaagaagataaattttttgaaaaagacttgttaaaagataaaaaagaactttctgaacatttaatgttattagacctgggtagaaatgatgctggtaaagtgtccaaaataaatagtatcaaagttacggaaaagtttgagatagaaaaatattcacatgtaatg

SEQ ID NO: 278701 - DNA, 385 bp, Unknown
  Bacterial polypeptide expressing nucleotide sequence isolated from the Sargasso Sea
cacgttatgcacattgccagtcatgtcgaaggctcaatccaagacgatctagatgcccttgatgctttggcatcaggattccctgcaggaaccgtttccggtgcgcccaaagtccgggcaatggaaattattgacgaattagagaaatcacgcagaggcgtttacgctggagcggtaggatatttttcagctaatgggacaatggatacatgcattgctctaagaacagctttagtgaaggatggcactatgtatgttcaggctgggggcggggttgtggcagatagtgatcctgaggcagaatatcaagaatcgattaacaaagcccgtgctctctttagggcagcgcagcaggcggtagaatttgctgcgcaagaaagataat

SEQ ID NO: 278702 - DNA, 388 bp, Unknown
  Bacterial polypeptide expressing nucleotide sequence isolated from the Sargasso Sea
catggtgatcgagcgctattcccatgtgatgcacattgtttccaacgtcacgggccgcgcgcgtgagggcatgtctgcggtggatgcgctgcgcgccgcattacccgcaggcaccctgagcggggcgcccaaggtgcgtgccatggaaattatcgatgagctcgagccggtgaagcgcggcatttatggcggcgcggtgggctatttatcctggtcggggaacatggataccgccatcgcgatccgcactgtagtcgtgaagaacggcgaggctatcttgcaggcgggcgtgggtatcgttgcggattcggtgcccacctcagaatgggaagaaacccttagtaaagcgagagcattgatgcatgccatcgcaatgtgctcggagtaa

SEQ ID NO: 278703 - DNA, 909 bp, Unknown
  Bacterial polypeptide expressing nucleotide sequence isolated from the Sargasso Sea
aaaatagtttcattttcgagtctgttgaaaaaggatcgatcagaggaagatatactattataggtttaaatcctgataaaatttgggatatctataacaaaacggttaaattaaataataacggaaaaaaaactataattaaaaccaatccactcaaatatcttaacaagcttattaaagaatttaagatagaaatgcctggccaactaccttccatggcgtcaatgttagttgggtatttttcttatgatataattcgttatatcgagaaaattccaaatagatgtaaagatgatctaaaaattcctgacgtaagactttctaggcctaaaaatttggtgatttatgacaatttaaaaaaaaagattcattacgtagaaaatgtttatgcagatacgaaaattaaaaattaccaggaaacatatgaagcaatacaaaaaaaatttgagctttatgaaagctttgaaaatataaaacttcctgagcaatttacgtttaaatctaataaaaatttgatcaaatctaatacttcaaaaaataaatttaaatcaatcattaaaaaagctaaatcttacattaaaaaaggagatatctttcaagtagtacttagccaaagattcgaaagaaaaataaaaaaaacgccaattgaaatttataatcacctaagaaaatcgaatccttcaccttttatgttttatttcaattataaagattttaatatgttaggaagtagtccagaaatccttgtaaggctaagaaaaggacaagttactataagaccaatagcaggaacgaggccgagaggtagaaatgataaagaagataaaaaatatacattagatttgctcaaagataaaaaagaattagctgagcatctcatgcttctagatctggtagaaacgatgtagg

SEQ ID NO: 278704 - DNA, 1180 bp, Unknown
  Bacterial polypeptide expressing nucleotide sequence isolated from the Sargasso Sea
aatgataataaatcgaagcttcaaagaatttaagcttcaacatagaagcaaaaaaaatcaaattatatatagttcaaaaaaagttcagagcgataaagaagtattaaatctaatagataattttttgatagaaaaaaatagttttatatttgagtctgttgaaaaaggtaaaattaaaggcagatatactatatttgggaaaaatcctgataaaatttgggaatttaataataacagttcatttcttattaaaaataataaaaaagttaaattaaaagaaaaacctcaaatattgattgaaaatattatagaagattttaaatttaaaataccttcaggtttaccttcaatttcttcacttatatcaggatatttttcttatgatactattaggtatatagaaaatattccaaacaaatgtaaggatgatttaaaagtaccagatgttagacttctaagaccaagaactcttgtaatacatgacaatctaaaaaaaaaaattttttatatagtaaacatcttcaaagatgaaaaaatatctaattattctaaaaaatacttaggaataaaatctgagctttcaaagcttttcactcaatcgtcaaaaacaaaagacaagacaattaatgaaaaaaaattagctaaaattaatgtaaagtcaaatacatcaaagaataaattcctaagtatggttaataaagctaaaaaatacattaaaattggtgatatttttcaggtggttttaagtcaaagatttgaaacaaaacttacaaagaaaccattagatatttataaaaaacttcgaataattaatccttcaccttttatgtttttttttaattttaatgactttcaaataataggtgccagtcctgaaatcttggtaagattaagagataataaaattacagtaagacctattgcggggacaagacctagaggaaaaactatgactcaagataagttttatgaaaaagatcttcttaaagataaaaaagaactttcagaacatttaatgttacttgatttagggagaaatgatgctggaaaggtatcaaaagtaaatacagttaaagttactgagagttttgttattgaaaaatattcacatgttatgcatatagtttctaatgtaattggagtttataataaaaaattttctaaatttaaatcattgctt

SEQ ID NO: 278705 - DNA, 1201 bp, Unknown
  Bacterial polypeptide expressing nucleotide sequence isolated from the Sargasso Sea
atgattattaatacaagtttgaatgatttcaaaaagaaacatcaaaataaaaaaaatcaaatagtattttgtgaaactaaatgtaaaaataataaaattattgaaaatataataaataattttttaacaaaaaaaaacagctttatatttgagtctgtagaaaaaagaagaattagaggtcgatacacaataataggtgctgatccagataaaatatgggaatttagtagcaaaaaaattcatataatagaaaacaataggaaaaaaatcataaaaggatcaccttacgcttttatgaaaaaacttattgaaaattttcattttccattaccaaagaatcttcctcctctttgctcgcttcttgttggctatttttcgtatgatataattagatatatcgaaagtatacctgacaactgcttagatgatcttaaaatccctgatgtgagattgctaagacccaaaacaatcatcattcatgataatgtacttaaaaaaatttattttattaaaaattgttttgcagatgaaaaaattaataattatcaagaatattttctggaacttaaacaaaatataaattttctaagaaatttaacttttgacttcagttataaaaaactagctaaaaagatcaagaatagaaaaattagcgttaagtccaatatttcaaagaaaaaatttaaaaatatggttttgaaagctaaaaaatatattaaaaaaggagatatttttcaggtggtattaagtcaaagatttgaatcaaagctaacaaaagctcctttggaaatatataaaaaactaagaattaaaaatccctcacctttcatgttcttttttaattttgatgattttcagattattgggagtagtcctgaaatattagtaaggctaagaaaaaataaaattactattcgtccaattgcgggaactaggcctcgtggatcgaacgcaaaaaaagataaattctttaaaaaacagctcttgaacgataaaaaagaattatcagaacaccttatgctcctagatttaggcagaaatgatgtgggaaaagtttctaaaattaatactgtaagagtcactgaaaattttaaaattgaaaaatactcacatgtaatgcacattgtttctaatgttgaaggcagttttgataataagcaatctatgctagatacaatgttagctggttttcctgctggaa

SEQ ID NO: 278706 - DNA, 575 bp, Unknown
  Bacterial polypeptide expressing nucleotide sequence isolated from the Sargasso Sea
aatgattagtgaaagtaattttaataaattggctaaacaaggatacaatcgtatacccttgatgtgtgaaatattagcagatttagatacgccacttagtacctatacaaaaatttgtaacttaaaatactcgtatttatttgaatcagtagaaggtggtgataaatggggacgctattcaatcattgggctacccgcaaaaaaaattatttctgtatgtggtaacaaaataactattaaagaaaataataaatgtattgaagaatataatacaaatgacccactagctgagattgaaaagatacaacaatcttataaagttccgcaaattgaaaacatgcctcgttttaatggaggattagttggttattttggttatgaaacgatcaaatatattgagcctaaattgaaaaaaaatgaaaaagaagatccaatcggttctcccgatatattattgatggtttcagatgaagttattatatttgataatctcagtgggaaactatttataattgttcacgcagaaccagaaaaaaataatgcttatataaatgccaaaaaaagacttaacacaa

SEQ ID NO: 278707 - DNA, 728 bp, Unknown
  Bacterial polypeptide expressing nucleotide sequence isolated from the Sargasso Sea
ttatgaagttaaaggagatcaaacagcaatttacgaaaaattaagaaacttgaacccttccccacatatgtactttatgaaattttgtgatcaagtaataattggcgcatctccagaactactttttagattaagaaacggtgaaatggaaacatttcctctagcaggaacaacaaaaagaggaaaagacaaacttgaagatcttaaactagcaagagagttattaaacgataaaaaagaaatcgcagaacacaatatgctagtcgatttgcacagaaatgatttaggaagagtagctaaatttggtactgttaaagttagaaacttaatggatattaaaaaatattcacacgtccaacatatctcatcagaaattgctggcataataagtgaagaagaagatatgttttctgcactagcatcaaatttccccgcaggcaccttgtctggagctccaaagattgaagcaatgaaaataattaatgaaatagaagaagaaggaagaggaccttacggaggtgcaataggacaatttggatttaatggtgattgtacatttgcaataccaattagatcaatctttataacaggcgatcaagcttatgcccaaacatgcggtggtaatgtatatgactctgatcctgataaagaatatttggaaatagaaagaaaactagctgcaatgaagacagtactagcttcatttgaagaaaaggaaattaaatgaa

SEQ ID NO: 278708 - DNA, 946 bp, Unknown
  Bacterial polypeptide expressing nucleotide sequence isolated from the Sargasso Sea
atgaaacaacccaactacaaatacaaacgcgttccagttgttttagaaaccttctccgatcttgagacccccctatcggtttatcttaagctcgccgacggtccttattcttatctcctcgaatcatctcagggtggcgaaaagtgggggcgatactcaattattggattaccgtctaaaacgattcttactgttcggggagaacaaattgaagtcctacataatggcttagtcatggaatcaatcaaaacagaagaccctttccaatttattgagtcttttcagaatcgttatgaaatcgaacatcttgccgaactaccgaggttctatggtggactggttggctattttggctacgatgctgtccgatatgtcgaaaaaaggatcaaagaatccactccccccgatccgatcggcacaccagatattctcttaatggtcagcgaagacatcgtggtcttcgacaacgtggataataaaattcaatatattaagttggtagatcccgatattgagaattccattgttgatacgaagaaagaactgacagaaagagcgaactcgcttagcaacaagaaaatcaggcaaacctctaaaccttcgtcaggcacgatccttgaatctgattttacgtcggaaacaggagaacaaccctttaaagatgccgtcgagaaaatcaaagaatatacggttgaaggcgacgtcatgcaggtagttctggcacaacggatgtcgatcccctttagtttacctagcatcgatctatatagagctctgagaactctaaacccttcgccatatatgtattttatgaatctcaatgaattcgatatcgtcagctcatcgccagagattctcgccaggctagaggatggcaaaatcacaaatcgtcctttggctggtacccgaagacgcggaaaaacagaaaaagaagatcaacattaga

SEQ ID NO: 278709 - DNA, 1060 bp, Unknown
  Bacterial polypeptide expressing nucleotide sequence isolated from the Sargasso Sea
aatgataagtaaagaagaatacaacaggcttgctaatgatggatttaatattattccattgattaaagatctaaacattgagttagattctccaataagtttgtattcatcaatcaaagataagaaaaatacttttttattggagtcaattgaaggtggtcaagaatgggcacaatattcgatcataggattaaattgtaaagatagtataaagatttctggtaatgagattttaattgaagaaaatggcttcaataaaagctatatatctgaaagtcctctcgaagaaattgataaaattataaaagcatgtaaacccttcgagcttgaagggctcccaagattttatggtggctatgtaggtttttttgcatatgaaagctctcagtatgccgaagaaaaaataaaagcactttcaaaaaaggagtctaaatttaaagagcatatgccagatgtttatttagtaaaagcagaacaattaattgtttatgacaattttaataattcggtatctgtcatattcaatgctaatcctaataatatttcatatgaagatgctcttaaagagttatttatgatcgaaacaagtttaggtgagattaatatttctggagaattagattttaaagaagttaaagaaataattcagtttgaatcaaattttaaaaaagaagattttattagcagtgttgaaaaaatcaaaacttatattaaagaaggggatgtgatgcaagtggtattggcacaagatttctttaaaaattttgatggcgattcttttgaattatatgcagcattaagaaagttaaatccgtcaccttatatgtattatcttaatcttgatgagtgtcatgtggtcggagcttctccagaaattttagtaaggttagagaaagacgaaattacattacgaccaattgcaggtaccaggaaaagaggcaaaaacgaacagcaagataaaataaatgaacaagatttgttaaatgatccaaaagaacttgctgaacatttaatgcttattgatttaggaagaaatgatgttggtagagtggctgatata

SEQ ID NO: 278710 - DNA, 453 bp, Unknown
  Bacterial polypeptide expressing nucleotide sequence isolated from the Sargasso Sea
tgttagttgatctagcaagaaatgacgtttctaaagtttctaatccttctactgtatctgttgatgagatgatgactgttgaaaaatattcgcacgtgatgcatatgacatcaaacgtaatagggcaaattaaagaaagtgccactccaatcgactgtttaaaagcagctcttcctgcagggacactgagtggtgcaccaaaaattagggctatggaaatactctctgaactagaaaatagagctagaggaatctatggcggttgtgtaggctacatcggatataataaatctcttgatactgcaataatcataagaacagcactacataagaaagatgaagttaaagtgggggtaggggctggtattgtttttgactcagaaccacaaaatgagtggaatgaaacagttgctaaattaaatgttttcttggaggcattaaaatacgaatgaa

SEQ ID NO: 278711 - DNA, 448 bp, Unknown
  Bacterial polypeptide expressing nucleotide sequence isolated from the Sargasso Sea
aatgatgtaggcagagtttctcaaaataaatcagtaaaagtaaccgaacaaatgatcattgaatattattcgcacgtaatgcatattgtctccaatgtggaaggattgatagatgaaaaatatgatgcagtagatgctcttaaagctggttttcctgctggaacagtttcaggtgcaccaaaaattcgagctatgcagataattgaagagcttgaaaatcttaatcgaagtttttatgcaggatgtatgggttattttgattctaatggagatatggatacatgtattagcttaagaagtggattagttaaaaatggtaaattattcattcaagctggaggcggagttgtgtatgactcaaatcctgagaatgagtatcaagaaactatcaataaagctagcgctctaatggcagctgcggaagactcgtataaatataattcatgat

SEQ ID NO: 278712 - DNA, 433 bp, Unknown
  Bacterial polypeptide expressing nucleotide sequence isolated from the Sargasso Sea
aatggctgacattctgctgctcgataatatcgactcttttacctataacctggcggatcagctgcgtactaatggtcacaacgtggtgatttaccgcaaccatattccggcccagacgttgattgaccgcttagcaacgatgaaaaatcctgtgctgatgctctctccaggcccaggtgcgccaagcgaagcaggttgcatgccggagctgttaacccgtctgcgcggcaagctgccaatcatcggcatttgtctgggacatcaggccattgttgaggcctatggtggatatgtgggccaggctggagaaatcctgcacggcaaagcgtccagcattgaacacgacggtcaggcaatgtttgctggtctggctaatccgctgccggtggcacgctatcattcgctggttggcagcacgttccggcaggattaa

SEQ ID NO: 278713 - DNA, 1201 bp, Unknown
  Bacterial polypeptide expressing nucleotide sequence isolated from the Sargasso Sea
aatgaagataaatataagttttaaaacatttaaaaataaccatattaaaaaaaagcaccaggttttatttaagtcgagaaattgcaaaaaatattttaaagttgaaaacttgtttaagttcttattagctgaaaaaaacagttttatttttgaatcagtagaaaaaggtaagattaaaggtcgatatactattattggttcaaaccctgataaaatatgggatgtaaataaggatataataacaattaataaacttggaaagaaatctaaaattaaaacaaatccattaaattttattaacaaattaattaaagatttcgatattaagatacctaaaaacttaccttctatgtcttcgatgttagttggatatttttcttatgatataatccgttatattgagcaaattccagataaatgtatagatgatttaaaaattccagatgtaagactttctagaccaaaaaacttagtaatttacgataacttaaaaaaaaagattttctatattgaaaacgtttatgcagatactaaaattagtgattataatgaagcatatgactctgttctaaaaaaatttgaacaatacgaaaattacgaaaatataaaacttccagatcaatttacatttgtgccaaacaaaaatttgataaaatcaaacacttctgaaaaaagatttaaggcgttggttaaaaaggcaaagaattatattaaaaagggggatatttttcaggtagtattaagtcaaaggtttgagagaaaaatatttaaaaaacctatagaaatttataaccacttaagaagatcaaacccttcaccttttatgttttattttaattatgaagattttaatgtacttggaagtagtccagagatattagtaaggcttcgaaagggtgaagttactataagacctattgcaggaactagaccaagaggaagaaatattaaagaggataaaaaatttgaatctgatttattaaatgacaaaaaagaattatcagaacatctcatgttattagatctaggcagaaatgacgttggtaaagtagctagagtgaattctgtaaaagtaactgaaaagtttaaagtagaaaagtactcacatgttatgcatatcgtttctaatgttgtcggtaaatttaataatcaattttctatatttgaaacccttttatcgggctttcctgctggcactgtg

SEQ ID NO: 278714 - DNA, 1060 bp, Unknown
  Bacterial polypeptide expressing nucleotide sequence isolated from the Sargasso Sea
ttatcgacttggttaaaattatcttcaacaaattcccatggtgtttttcttgaatctgttgaaggtggggagaatttgggtaggtggagtattgttgcaactaaacctctttgggaagccgtttgttatggagaagaaatagttaaaacttggaataatggcaaaactgaaattcataaaggtgatccttttgatattttaaaaagttggacaaaggaatataagtcaaccatgcttgaagaaataccatcaattggacagttatatggttcttggggttatgaattaataaatcgaattgagccaagcgttccaataaatgaaataccagaaaacagtatcccgcatggttcctggatgttttttgatcaattagttgtttttgatcaaataaaaagatgtattactgcagtggtttatgcagatacaacttcttctaaagagtcttcgattgaagatttgtatctaaactcaatttctaaaattcaggaaactagaaatttaatgagaattccactaaaagaaaatgagtttttagattggaatgaaaatgagaatttgaatttagatctagaaagtaattggaagaaaaaagattttgaggatgcagttatctctgcaaaagaatacataagaaagggagatatcttccaaatagttataagtcagagatttcaaactcaagtcaataatgatccctttagtttatatagaagtttgaggatggttaatccatctccatatatgtcattttttgattttggctcatggtatctgataggttcgagtcctgaagtaatggttaaagctaaaataaataaaaatagcgagattgtcgcaagcttaagaccaatagctggcacaagaccaagaggtattgataatcaacaagacttagaactagaaaaggatttattaaaagatccaaaagagatagctgagcatgtaatgctaattgatcttgggcgaaatgatcttggaagagtttgtgaaattggtactgtgaaggtaaaggatttaatggttattgagaaatattcacatgttatgcatatagtta

SEQ ID NO: 278715 - DNA, 954 bp, Unknown
  Bacterial polypeptide expressing nucleotide sequence isolated from the Sargasso Sea
tcttttcaaacttttaaagttaaatcatctaaagaattacctcgaatgtcatctatgttagtaggatatttctcttatgacatcataagattaatagaaaatattcctaacaagtgtaaagacgatttaaacatacctgatataagactgatgagaccaaaaaatttaattatttatgataatgtaaaaaaaaagatcttttatattgaaaatgtttatagtgaacaaaaaatacacgattatgaatatgagtatgaaaagattaaaaaaactttaaatgaacttaatttttacggaaatataccactacctgaaaatttccatattaataaaaaagaaatagatataaaatctaatatatctaaatcaaaatttaaaaatattattaataaggcaaagacttacattaaaaaaggagatatttttcaagttgttttgagtcaaaggtttagtgccaaagtaaaaaaacctccgctagaaatttataatacactaaggaagtcaaacccctcaccctttatgttttattttaattatgatgattttcaggttctaggaagtagtccagaaatcttagtaaggttagtgaataaagaagtaacaatcagaccgatagctggcacaagacctaggggaaaaaatgctaaagaagataaaaaatttattaatgacctattaaatgatcctaaagaattgtctgagcatctcatgctattggatcttggtaggaatgatgttgggaaagtatctaaagcaaattctgtaaaagttacagaaaagtttaaggtagaaaaatattcacatgttatgcatatcgtatcaaatgttattggaaaattgagaaaaaatttgtccctttttgaaacttttttatctggttttcccgcaggaacagttagtggtgctcccaaaataagagccatggaaataattgatgaattagaaatttctaaa

SEQ ID NO: 278716 - DNA, 265 bp, Unknown
  Bacterial polypeptide expressing nucleotide sequence isolated from the Sargasso Sea
gacagtgtcaggagcacctaaaatcagagcaatggaaattatcgataacttagaaagttctaaaaggaaagtttatgccggtggcattggatacttttctgctaatggtgaatttgatacttgtatagcgctaagaactgctgttgctaaaaaaaataaattttatgttcaagctggtgctggaatagtcgctgatagtaaaccaatcaaggaatatgaagaaaccgttaataaagctaaagctctaataaatgcactgaaatga

SEQ ID NO: 278717 - DNA, 871 bp, Unknown
  Bacterial polypeptide expressing nucleotide sequence isolated from the Sargasso Sea
atcgatgacatcccattttcaggaggaatggttggtttcagttcatttgatatgattcgccacattgaaaaattaccagtacccgaagggaaggagggtattttaagtgcctcagattgctcatatattgcgccgacatcattgctaatctttgatcatttagaaaataagatggcactgcttcattccggcaatgaggaggagagactaaatttgagggatgaaatcctatccctgctcagcaaggagatctctcaaagtcaaaaaaagaaaacatactcagaaccaatagcaaacatcaaaaaagaaatcttttacgatgctgttgaaaaagcaaaacaccatatctttgagggagacatttttcaaatcgttttatccattgcattttctggcagttatgatcttgacccatttgatgtttatcgagcaatgcgtttaattaacccatccccttatatgttctattgtgaatcagatggactgaagattgcaggctcttctcctgaggctctggttagactgggtggcaataaagcatctcttagaccgattgcaggaaccaggccaagaggaaaggattcagaagaagaccagtcacatagagaatcactgctcgcggacgaaaaagagattgcagagcacattatgttggttgatcttgcacgcaatgatcttggacgagttgcaaagcatggatcaattgaagtgaaaccataccaatcgatcgaatactatagccacgtcatgcatatagtcagcggtgttcaaggccatttagaagaagaaaaagatgcctttgatttatttgccgccgcctttcctgcaggaacattggttggcgctccaaggtcagagccatggaattgat

SEQ ID NO: 278718 - DNA, 670 bp, Unknown
  Bacterial polypeptide expressing nucleotide sequence isolated from the Sargasso Sea
aaacccctctccttatatgtattatctaaatatgggtgactaccatatagttggctcatcacctgaaatattagttagacttgaggataatttaattacagttagaccaatagctggcacaagaccaagaggtagcaatgatgatcaagatagtatactagaggatgaattgttaaatgatcctaaagagaaagccgaacatctaatgttaatagatttaggcaggaatgatgctggaaaagtctcaaaaataggatcaattaaattaacagataaaatgattatagaaaaatattctcatgtgatgcatatggtatcaaatgtaactggtgaaattaatgatgggctcggtatgattgatgttttaaaatcaacattcccagctggtacagtttcgggtgctcctaaaatacgagcaatagaaataatatatgagcaagagactattaaaagaggtatttatgcaggggcaattgggtatcttggctggaatggaaacatggatacagctatagcaatacgaacctctgtcattaagaatgataagttatatattcaatgtggagctggtatagttaatgattctattgcagaattggaatgggaagaaaccatgaataagggtaaagcaattatacaagcttatagtaatctcaggaataaaatctaa

SEQ ID NO: 278719 - DNA, 859 bp, Unknown
  Bacterial polypeptide expressing nucleotide sequence isolated from the Sargasso Sea
ttgttttttgatcaaataaaaagatgcattactgcagtggtttatgcagatactacttctttaaaagattcttcgattgaggagttatatctaaactcaatttctaaaattcaggaaactagaaatttaatgagagttcctcttaaagaaaatgagtttttagattggaatgaaaatgaaaatttgaatttagatcttaaaagtaattggaataaaaaagattttgaggatgcagttctatcggcaaaagaatacataagaaagggagatatcttccaaatagttattagtcagagatttcaaactcaagtcaataatgatccctttagtttatatagaagtttgaggatggttaatccatctccatatatgtcattttttgattttggctcatggtacctgataggttcgagtcctgaagtaatggttaaagctgaaaaaaataaaaatggtaatattgttgcaagcttaagaccaatagctggtacaagacctagaggtattgataatcaacaagacttggaattagaaaaggatttattaaaagatccaaaagagatagcagagcatgtaatgctaattgatcttgggagaaatgatcttggaagagtttgtgaaattggtactgtgaaggtcaaggaattaatggttattgagaaatattcacatgtcatgcatatagtgagtgaggttgagggaatcttaaaaagcaatgctgatgtatgggatttgctgaaagcatcttttcccgctgggacagtaactggtgcgccaaaaataagagctatgcaattgattaagcatttagaaaaagatcctagaggaccttatgcgggggtttatgggtctattgatatta

SEQ ID NO: 278720 - DNA, 925 bp, Unknown
  Bacterial polypeptide expressing nucleotide sequence isolated from the Sargasso Sea
gatatgctcattaatttctggatatttttcttacgattccatcaggtatatagaaaaaataccaaacaattgcaaaaatgatttaaatataccagacgttagacttcttcgtcccagaacattagttattcatgataatttaaaaaaagaaatattttatataagtaatattttcaaagacgaaaaaattaagaactatcaaagtaaatttaatgagattaaatctgatctttttaaattattaattcaatcctctattaaaaatttaaataaaccactcaaagaaaagataaaaaacataaaagttaaatccaacacttctaaaagtaaatttttaagaatggtcaataaggccaaaaaatacattaaacatggcgatatttttcaagtggtgttaagtcaaagatttgaggctaaattatcgaaaaagccaatagatatttataaaaagttaagagcaactaatccctctcctttcatgttcttctttaattttaatgattttcaaataataggtgctagtcctgaaatcttagtaaggttaagagataataaaattactgtaagaccaattgcaggaacaagaccgagaggtaaaacattaaaagaagatctttgttatgaaaaagatttattaaaagataaaaaagaactctctgaacatttaatgcttttagatttaggtagaaatgatgctggtaaggtgtctaagataaattctgttaaagtgacagaaagctttattatagaaaagtattcacatgttatgcatattgtatcaaatgtaattggtgattataataaaaagttctcgaagtttaaatctttgctagctggttttcctgcaggaacggtctctggtgccccaaaaataagagccatggaaatcattgatgagctagaaacaacaagaagaaaagtttat

SEQ ID NO: 278721 - DNA, 511 bp, Unknown
  Bacterial polypeptide expressing nucleotide sequence isolated from the Sargasso Sea
aaagaactaatctcagatgaaaaagagctagctgaacatctaatgttgttagatttaggaagaaatgatgttggtagagtttctaaaccaggtacagtcaatgttaatcaaaaaatggaaattgaaaaatactcacacataatgcatatagtgtctaatgttacaggtactttagatgataaatatgatgagtttgatgctttgagagcagcttttccagcaggaacagtatcgggtgctcctaaggttagagcaatgcaattaatctcagaattagaacctgataaaagaggtccttattcaggaggtgttggttatttttcattcaatggaaatatggatacatgtatagcaattaggacaatggtactgaaggataaaactgtttatttacaagctggaggaggaatagttgctgactcaaaagttgattacgaatatgaagaaactctaaataaaatgatggcccttataaaatctgttgatgatgctgaaagaaacttaaaatgat

SEQ ID NO: 278722 - DNA, 737 bp, Unknown
  Bacterial polypeptide expressing nucleotide sequence isolated from the Sargasso Sea
gcaagctgttttatcaagagaagtatcatttaaaggaaattttaacccatttactttatatagagctttgagattaattaatccttcaccttatatgttttatatgaactttggcgatttaaatttaattggatcatctcctgaaatacttgttcaaaactttcaagataaggtcactataagacctatagctggtacgcgcaaaagaggaattgatgaatcagaagatttgcaaaataaaattgatttaattggtgatgataaagaaaaagctgagcatatgatgttagttgatctagcaagaaatgacgtttctaaagtttctaatccttctactgtatctgttgatgagatgatgattgttgaaaagtattcgcacgttatgcatatgacatcaaacgtaatagggcaaattaaagaaagtgccactccaatcgactgtttaaaagcagctcttcctgcagggacactgagtggtgcaccaaaaataagggccatggaaatactctctgaactagaaaatagagctagaggaatttatggcggttgtgtaggttacatcggatataacaaatctctagatactgcaataatcataagaacagcgctacataagaaagatgaagttaaagtaggggtaggggctggaattgtttttgactcagaaccacaaaatgagtggaatgaaacagttgctaaattaaatgttttcttggaggcattaaaatacgaatgaa

SEQ ID NO: 278723 - DNA, 364 bp, Unknown
  Bacterial polypeptide expressing nucleotide sequence isolated from the Sargasso Sea
tattgtttcaaacgttgagggaaaaatagataataatttagatgctctagatgctttaatggctggatttccagcaggtacagtttctggtgcaccaaaaataagagcgatggaaatcatagaagaacttgaaaatttaaatagaagtttttatgctggttgtatgggttattttgattctaatggagacatggatacttgtattagtttgaggactgggcttgtaaaagataataaattatacattcaggctggtgctggaatagtttatgactcagtcccaaaaaatgaacatcaagaaattttgaataaagctagtgctttaatggcagccgcagaggattcatacaaattcgatatatga

SEQ ID NO: 278724 - DNA, 286 bp, Unknown
  Bacterial polypeptide expressing nucleotide sequence isolated from the Sargasso Sea
ttgccggctgggactctctcaggtgcaccaaaaataagagccatggaaataattaatgagctagagccaagttcaagaggtatttatggaggtgcaataggttatatatcttggaatggtaatattgatactgcgatcgcgataagaacagctgtaataagggataacaaaattcacgttggagccggagcaggcatagttgctgattcagatccagagaaggaatgggaggaatgtgtccaaaaatcaaaagtatttttagacgcgatggagatgatttcatgat

SEQ ID NO: 278725 - DNA, 262 bp, Unknown
  Bacterial polypeptide expressing nucleotide sequence isolated from the Sargasso Sea
tgtaagcggtgctccaaaaatcagagctatggaaataattgatgagttagaaaaaagcaaaagaaaactatatgctggcggaattggttatttcacttcaaatagtgagtttgatacatgtatagctttaagaacagctctcataaaaaacaacaagttttatgttcaagctggtgctggaatagttgccgatagtaagcccgagaaagaatatgcagaaactattaataaagcaaaagctttaatgagagcggtagattaa

SEQ ID NO: 278726 - DNA, 479 bp, Unknown
  Bacterial polypeptide expressing nucleotide sequence isolated from the Sargasso Sea
agaaaactctgagcatattatgttagtagatctcgcaagaaatgatttaagtagaaatggaagcaatgtaaaagttgaaaaaaacagagagattcaatttttctctcatgtaattcatttagtttctaaggttactgccaatttaaaggatacatccaaaatttttcaagttgtaatggatacatttccggctggaacactttcaggagctccaaagcataaagccctcacgttaattgaaaagtatgaaaaagtaaatagaaatttttatggtggagccattggatatatggacttcaatgggaattttaaccatgcaattatcattagatctttttttagtaaaaataatgaactaagttatcaagcaggagccggtatagttatcaaatccaaacctcaagatgaacttcaagaagtgtataataaattaggagcattagattatgctctaaaaaatgctgaagacataaaatgaa

SEQ ID NO: 278727 - DNA, 916 bp, Unknown
  Bacterial polypeptide expressing nucleotide sequence isolated from the Sargasso Sea
ggagtttaagtttgaaacaccaaagaatttgcctaagatatgctcattaatttctggatatttttcttacgactctattagatatatagaaaaaattccaaacaattgcaaaaatgatttaaatataccagacgttagacttcttcgtcctagaacattaattattcatgataatttaaaaaaagaaatattttatataagtaatattttcaaagacgaaaaaattaaaaactatcaaagtaaatttaatgagattaaatctgacctttttaaattattaattcaatcttctattaaaaatttaaataaaccactcaaagaaaagataaaaaatattaaagttaaatccaacacttctaaaagtaaatttttaaaaatggtcaataaggcaaaaaaatacattaaacttggtgatatttttcaagtggtattaagtcaaagatttgaggctaaattatcaaaaaagccaatagatatttataaaaagttaagagtaactaatccctctcctttcatgttcttctttaattttaatgattttcaaataataggtgctagtcctgaaatcttagtaaggttaagagataataaaattactgtaagaccaattgcaggaacaagaccgagaggtaaaacattaaaagaagatctttattatgaaaaagatttattaaaagataaaaaagaactctctgaacatttaatgcttttagatttaggtagaaatgatgctggcaaggtatccaagataaattctgttaaagtgacagaaagcttcattattgagaggtattcacatgttatgcatatagtatctaacgtgattggtgattataataaaaagttctcaaagtttaaatctttgctagctggttttcctgcaggaacggtctctggtgccccaaaaataagagct

SEQ ID NO: 278728 - DNA, 907 bp, Unknown
  Bacterial polypeptide expressing nucleotide sequence isolated from the Sargasso Sea
cttttagttaaagcagatcaattaatcatttttgataacttaacaaactcaataagaataatttttaatgcaaatttaagaaacatgtcctattcatttgcacaagcaaggttagatgaaattgaaaacttaattttaaactcaacagtaaaccaggttgagaaatttagcgaaataacaaatacatctgagtttgagtcaaatttttcaaaagaagaatatcttcaggctgtcaaaaaggttaagcactatattgaagagggtgacgtaatgcaggttgtattagcgcaggatttttcagcaaattttgataaagatccatttgaattatataaagcaattagaaaactgaatccctcaccatacatgtactttttaaattttggagagtttcaaatagttggtgcttcacctgaaattttagttagattagaaaatgaagaagtaaccttgagaccaatagcaggaacaagagttcgtggaaacaatcttgaggaagataaatcaaatgaagaggaattattaaatgatcccaaagaaattgcggagcacttaatgttaatcgatcttggcaggaatgatgttggaagggtttcagagattggtacagtgaatgttacagaaaaaatgattattgaaaaatattctcatgtaatgcatatagtctctaatattgttggaagacttcaaacaggacttacctcttttgatgttctcaaggcagcattacctgcaggtacattatctggtgctccaaaaataagagctatggaagtcattaatgaattagaaccaagctcaagaggtatatatggcggcgcaataggatacgttggttggaatggcaacatggatacagcaattgccattagaactgcagttatcaaagataacaaaatacatgtgg

SEQ ID NO: 278729 - DNA, 862 bp, Unknown
  Bacterial polypeptide expressing nucleotide sequence isolated from the Sargasso Sea
tatgcttgttggttacttttcttacgacataatacgtttaattgaggaaattcctgacaaatgtaaagatgatattaaaattcctgatatgagattgatgagaccaaaaaatgttattatttacgataatttaaaaaaaaaaattttctttgttcgaaatatatttaaagaggaaaatatcagtgattacgagctcaaatatcattcaataaaacaaacttttgctgaatttcagcattttggaaaaataaaactacctgaaaattttcatagaagaataaataataacaaagttcgatcaaacatatctaaggctgaattcaaaaaaattgttcttaaagcaaaaaaatacataaaaaaaggagatatttttcaagttgttttaagtcagagatttgaatcattaatagataagccacctatagaaatttataattctttaagaattttaaatccttctccttttatgttttattttaattacaatgattttcagattttagggagtagtccagaaattttagttagattgtttaataagaaagtcacgatcagaccaatagcgggtacgagacctaggggtaaaaataaaaaagaagataaaaaattaacctctgaactattacgtgatcctaaagaacttgccgaacatctaatgcttcttgatctaggtagaaatgacgttggaaaagtatctaaaacaaatagcgttaaagtcactgaaaaatttaaagtagaaaaatattctcatgttatgcatatagtttcgaatgttgtgggaaaacttaaaaataatctttctctttttgaaacttttttatcaggttttccggcgggtacggttagcggtgcaccgaaataa

SEQ ID NO: 278730 - DNA, 938 bp, Unknown
  Bacterial polypeptide expressing nucleotide sequence isolated from the Sargasso Sea
agtacgagactacataagtagcccacttgcattgtatgccgcacttgataaatttaactcactattacttgagtctgcagagatagattctaaagatagcgtaaaaagcttaatactcgttgattgtgcactgcgtattgtctgccaaggcaaccaagtgagcgtaacagcactatcaaataacggtcagcagttactcaactatttacaagctaatgtaaaaaactgcgcatcccagttaaccgataccacattaacactggagtatcacccagcagatgacacaattgaccaagccagtaagctgattgcagataacgcttttagcgcattacgcacctgtttaaatagcatcaaaagtaccactaacaatccattctcggtgtttttaggcggtgtatttgcctacgacatggtggctaattttgaacagctaagcgatgtacccgacggagaaaacacctgtccagactatgttttttatttagcagaaacactggttgttattgatcatcaaaaacaaacaacggaattaattggtaacgtatttaatggccctgatgtacatgcaaactgctttgaagtaggcaaacaattagagcgcttgaatacattatgcgaccacgctgctgactttagcgcaccgagccaaactggcgactgcccagtgagtgttgatattagtgatgagcaatactgccagcaagtaattaagctcaagcaacacatagtcgatggcgatatttttcaagtggtgccttctcgtaccttctcactaccctgtcctgactctttacatgcctacagccagctaaaaaaacaaaaccctagtccgtacatgttttatatgcgcgatgaagatttctcattatttggcgcatctcctgagtccgcgcttaaatacgaagttcaatctcaacaggtcgaggtttatccga

SEQ ID NO: 278731 - DNA, 667 bp, Unknown
  Bacterial polypeptide expressing nucleotide sequence isolated from the Sargasso Sea
aaaattaagagttaacaacccctctcctttcatgtttttttttaattttaaagattttcaaataataggtagcagtcctgaaattttagtcagattgagaggagataaaattactatcagacccatagctggaactagaccaagaggcatcaatgctgcaaaggataaattttataaaaagcagcttctaagtgataaaaaagaactttctgaacatcttatgcttctagatcttggcagaaatgatgttggaaaagtaagtaagataaattctgtaaaagttactgagcaatttaaaatagaaaaatattcacatgtaatgcatatcgtatcaaatgtagagggtaaatttgataaaaagcagtccttgcttgacacaatgctgggtggttttcccgctggcacggttacaggtgcacctaaaattagagctatggaaattatagatgagcttgaaaaatctaaaagaaaaatgtacgcaggagcaataggttatttttctgctaataaaaattttgatacttgtatagctttaagaactgctcttattaaaaataataaattttatatacagtctggcgctggaatagtagctgatagtgttcctgaaaaagaatatttagaaacagttaataaagctaaggctttaattaattcattaagctaa

SEQ ID NO: 278732 - DNA, 899 bp, Unknown
  Bacterial polypeptide expressing nucleotide sequence isolated from the Sargasso Sea
agggaaaattgaatttacctatttagataataatttagatatagaaaaaaattctgaaactgatccaatcaaatctttaagaaaacttttaaaaaactcagaaataaatagagaaaaatctcaaccaccttatccaatattagttggttatttaggctatccaatgattcaatatattgaaaaaatcaaattagataatcctgacaatcttaatttgcctgaagctatgatgattagaccaaaaattgcggctgtttttgataatattaaagacagcattacaataatgacaacggtttacacaaataataatattgatgctgaaaaagcatatgcaaatgcaaacaataaaatcaattcagttgtagatttaattgaacaaaatataataaatgaaaaaaaaaataataacattatttcaaaaaatgaaataaaatttgagtctaactatacaaaagatgaatattatgaaataataaaaaaagcaaaaaaatatattaaagaaggtgatatatttcaagttgttccatctcaaagatttgtttgtgactataagttagatgcaaaagatttttatagatcattaagaagattaaatccctcaccttttttagttaatttaaattttgataactttagtctagttgcttctagtcctgaaattttggttagacagagaaatggaaaagtaacaattcgtccaatagcaggaacaagaaaaagaggtaaaaatcctgaagaagataaatttttatcagaagatttattaaatgataaaaaagaacttgcagaacatttaatgcttcttgatttaggtagaaacgatataggaaaagtttctaaaattggctcagttaaagtaacagaaaagatgataatagagtattactctcatgtta

SEQ ID NO: 278733 - DNA, 151 bp, Unknown
  Bacterial polypeptide expressing nucleotide sequence isolated from the Sargasso Sea
gatacttgtatcgctttaaggacagcaatagctaaaaataataaattttatgttcaagctggagctggaattgtagctgatagtaaacctcttaaagaatatgatgaaactgttaataaagcaaaagcactacttaatgcattgaaataat

SEQ ID NO: 278734 - DNA, 160 bp, Unknown
  Bacterial polypeptide expressing nucleotide sequence isolated from the Sargasso Sea
aggtgaatttgatacatgtattgctttaagaacttctgttgcaaaagatggctatttatatgctcaagcaggagcaggtatagttgctgatagcaaacctataaatgaatatattgaaactgaaaataaagctaaagccttaataaaagcaatggagtaa

SEQ ID NO: 278735 - DNA, 880 bp, Unknown
  Bacterial polypeptide expressing nucleotide sequence isolated from the Sargasso Sea
aaaaatatagaatatataattgagaattttaaatttaaagttccaagagagctcccacccataagttcaatattatctggatatttttcatatgatattattaggtatatagaaaatatacccaatagttgtaaagatgatcttaaaattccagactctagaattcttagaccaaaaactttaataattcatgataattataaacaaaggatttatttcattgtaaattgttttttagatgaaaaaatagtcaactatcaaaaaagatttaatcagatcaaaaaagaaataaataacctaatatttcttgcaaactataattcaaaaatatcgttaaataataaaagcgaaaaaattaatgtaaaatcaaatatcacaaagaaaaaatttttaaataatgtaaaaaaagccaagaaatatattaaaataggtgatatttttcaggttgttttaagtcaaagatttgagacaaaattaactcaaaatccgatcgaaatttataaaaaacttagagtaaaaaatccttcgccatttatgtatttttttaacttcaaagattttcaaataattggtgctagccctgaaattcttgttagattgagaaataacaaaattactataaggccaattgctgggacaagacctaggggtaaaaatgcaaaagaagataaattttatgaaaaagatttattacaagataaaaaagaactttctgaacatttaatgcttcttgacttggggagaaatgatactggtaaagtttcaaagattaatactgttaaagtaactgaagaatttgtcatagaaagatactcacatgttatgcatatagtttcaaatgttacaggcgtgtttaataaaaaatattcaaaatttgata

SEQ ID NO: 278736 - DNA, 499 bp, Unknown
  Bacterial polypeptide expressing nucleotide sequence isolated from the Sargasso Sea
ttttataaaaaagatcttttgcaagataaaaaggagctttccgagcatttgatgcttttagaccttggaaggaatgatacgggtaaagtatcaaaaataaacaccgtgaaggttacagaaagttttaatgttgaaaaatattctcatgtcatgcacatagtttcaaatgttgaaggggaatttaataataagttttctcaattcgatactttgttgtctggttttcctgctggtactgtatctggagcaccgaaaattagagcaatggaaataattgatgaacttgaaaatacaaaaaggaaagtatacgcaggtggtattggatatttttctgcaaatggcgattttgatacatgtattgccttaagaacagcattaactaaagataaaacattttatgttcaatcaggggcaggtattgttgctgatagcaaaccaataaatgaatttaaagaaacagtaaataaagcaaaagctttattaaaagcattagaataat

SEQ ID NO: 278737 - DNA, 117 bp, Unknown
  Bacterial polypeptide expressing nucleotide sequence isolated from the Sargasso Sea
aaaataaaaaaatttatgttcaagctggagccggaattgttgctgatagtaacccgaacaatgaatataatgaaactttaaataaagcaaaagctttactaagggctttagattaaa

SEQ ID NO: 278738 - DNA, 515 bp, Unknown
  Bacterial polypeptide expressing nucleotide sequence isolated from the Sargasso Sea
cgaattggatttactttcagatgaaaaagaaacatccgaacacttaatgttgttagatcttggtcgaaatgatgtcggcaaagtagcaaaaaaatcaactgtaagcgtaactgccaaatttataattgaaaaatattctcatgtaatgcacttggtttctaatgtaactggaaaacttaaaaaaaatattagtacaattgaagcactaatggcaggatttccagctggaacagtatcgggtgcaccaaaaataagggcaatgcaaattatagatgaattagagagtgatgtccgaggtatttatgcaggtggaattggctacatctcccctgatggagatatggatacttgcatcgttttaagaacagggataattactaaaaataaattatatgttcaggctggaggcggtgtagtttatgatagtgatccagaactcgagtatatggagactgtaaataaagctaaagcagtattaaatgctgctgaaatcgtacttggaaataacctatgat

SEQ ID NO: 278739 - DNA, 116 bp, Unknown
  Bacterial polypeptide expressing nucleotide sequence isolated from the Sargasso Sea
aaaggataaattttatgttcaagctggtgcaggcattgttgcagacagcaggcctgaaaaagaatacgcagaaacagtaaataaagctaaagctctaatgaaagcagtagattaaa

SEQ ID NO: 278740 - DNA, 544 bp, Unknown
  Bacterial polypeptide expressing nucleotide sequence isolated from the Sargasso Sea
cgcaatgaaaaagaagatttggagctcgagtccgatttactcgcagacaagaaggagtgtgctgaacatttgatgcttgttgaccttgctcgtaatgacatcggccgtgtttctgaatatggttccattaaggtctctgattacatgtcaattgaacgttattcacatgttatgcacattgtttcccaagttcaaggaaccctagccaaagacaaaacggcctatgacttaatgaaagccacttttcctgcgggtactctcagtggagcgccaaaagttcgtgctttacagattatttcagagctagaaaacagtcaaagaggcttatatgggggtgctttaggctatttcagcttcaatggaaaccatgattcttgtattggcatccgcacggccgtcatcaaagaccaaacgatttatattcagtctggagcaggtgttgtggccgattccattccaaaggaagagtacattgaaaccatcaataaagccaaagctatgtttaaggcagtttcgatagcagagaccttattttccaagtaag

SEQ ID NO: 278741 - DNA, 308 bp, Unknown
  Bacterial polypeptide expressing nucleotide sequence isolated from the Sargasso Sea
gcgcgccattctgccggcgggcaccctgtccggcgcgccgaagattcgcgcgatggaaatcatcgacgagctggagccggtcaaacgcggcgtctacggcggcgcggtcggctactgggcgtggaacggcaatatggacacggccatcgcgattcgtaccgcggtgatcaaggatggcgaactgcacgtacaggctggtggcggcattgtggccgactcggtgcccgcgctggagtgggaagagaccatcaacaagcgtcgcgccatgttccgtgcgattgccctcgctgaacaatcggcccggtaaa

SEQ ID NO: 278742 - DNA, 825 bp, Unknown
  Bacterial polypeptide expressing nucleotide sequence isolated from the Sargasso Sea
atttaatataccagacgttagacttcttcgtcctagaacattagttattcatgttaatttaaaaaaagaaatattttatataagtaatatttttaaagacgaaaaaattaagaactatcaaagtaaatttaatgaaattaaatctgatctttttaaattattcattcaatcctctattaaaaatttaaataaaccactcaaagaaaagataaaaaacattaaagttaaatccaacacttctaaaagtaaatttttaaaaatggtcaataaggcaaaaaaatacattaaacttggtgatatttttcaagtggtattaagtcaaagatttgaggctaaattatcgaaaaatccaatagatatttataaaaagttaagagtaactaatccctctcctttcatgttcttctttaattttaatgattttcaaataataggtgctagtcctgaaatcttagtaaggttaagagataataaaattactgtaagaccaattgcaggaacaagaccgagaggtaaaacattaaaagaagatctttattatgaaaaagatttattaaaagataaaaaagaactctctgaacatttaatgcttttagatttaggtagaaatgatgctggcaaggtatctaagataaattctgttaaagtgacagaaagctttattatagaaaagtattcacatgttatgcatattgtatcaaatgtaattggtgattataataaaaagttctcaaagtttaaatctttgctagctggttttcctgcaggaacggtctctggtgccccaaaaataagagcaatggaaattattgatgaactagaaac

SEQ ID NO: 278743 - DNA, 904 bp, Unknown
  Bacterial polypeptide expressing nucleotide sequence isolated from the Sargasso Sea
atgagacctaaaactcttattatccacgataacttacttaaaaaaatatatttcattgttaattgttttgccgatgaaaaaattactaattactcaagatattataaagatcaacttatgaaaataaaatacttaaaaaatacaataataaaaaataataaaactgaaaaaataaaaattaataaaaatattaagccaaaagtaaaatcaaatatttcaaaaaaaagatttaaaaaaatggttttagaagcaaaaaaatatattaaaaagggcgacatttttcaggtcgttctaagtcaaagatttgaaactaagcttactaagtctcctctagaaatttataaaaaattgaggatagttaacccatcgccttttatgtatttttttaattttgatgattttcaaattattggtagtagtcctgaaattttagtaagattaagaaaaagcaatattactattagaccaattgctggcacacgacctcgaggtaaaactccacgaaaggatactttatacaaaaaacaacttttaaatgacaaaaaagaactttctgaacatttaatgctcctagatcttggtagaaatgatgtaggaaaggtctcggaggttaatacagtaaaagttaccgaaaaatttaaggtagaaaagtattcacacgtaatgcatatcgtgtcgaatgttgaaggtaaatttaataaaaaatacagcttgcttgatactatgcttgctggttttcctgccggaactgtatcgggtgctccaaaaataagagcaatggaaattattgataaattagaaaaatcaaaaagaaaaatgtatgctggcgcaatcgggtatttttctgctaatcaaaattttgacacctgcattgctttacgaacagctttaattaaaaataaaa

SEQ ID NO: 278744 - DNA, 852 bp, Unknown
  Bacterial polypeptide expressing nucleotide sequence isolated from the Sargasso Sea
ggaactataaacggtgaagttgatcctttaaacctgatcgaaacagaattaggtaaatataaggcgtatccttcagaggacttaccgcgctttttaggtggtgcagttgggtatttatcttatgatactatacgttattttgaaccaagaattcatttgccggattatgacccaatcggcatacctgagtcaattttattattaacagatactgttattgtatttgatcatattagacatgttattaaagttgtttcacatgttagaacagatggaaatattcaagaaaaatacaatgaggcagtaaataagattgaaattattttgaaggatttatcaaaatcactgtcagttcaaaagaatgattatgataacaattcaaaatttgtatcagaaacaaaggttaattttgaattacctcagtattctgaaatcattgaaaaatgtagggattatattattgctggagatgttattcaagttgtcgtttctaaaagaacttctaaaacaacccaagctcatccgtttaatatttatagatcattaagaaaattaaatccttctccatatatgtattatcttaattttggtgaatttaatataattggtgcttcgcctgaagctttagttagagttgaggatggatatatatatagctatccattagccggaacaagccctcgaggtgatacgaatgatcaagacaaagagtttgaagataaattgttagcagatgaaaaagaacgtgccgaacatattatgttagtagatctggctcgtaatgatgttggacgtgtagcaaaaaccggttcggttgaagtagtagatttaatgcgaatagttaaatattca

SEQ ID NO: 278745 - DNA, 246 bp, Unknown
  Bacterial polypeptide expressing nucleotide sequence isolated from the Sargasso Sea
aaataagagcaatggaaataattgacgaattagaaccaactaaaagaaaagtatatgctggtggaataggttatttttcagctaatggagattttgatacttgtatagctttaagaactgctatttctaaaaataagaaattttatgttcaagctggagctggaatagtagcagatagcaaacctatgaatgaatataatgaaacagttaacaaagctaaagcactattaaaatctttggaataaa

SEQ ID NO: 278746 - DNA, 744 bp, Unknown
  Bacterial polypeptide expressing nucleotide sequence isolated from the Sargasso Sea
atattgagaaaattcctaatacgacaaaaaatgatcttaaaattcctgatgcaagaattttgagaccaaaaaatctagttgtttttgataatgttaaaaaaaaattattttttatagttaattgtttttttgatgaaaaaatcaaaaattatcaaactaaatatgaccaaatacaaaaagaaatagaagaaatgatatttttggctaattataattacaaaataaatcagtcagaaactaagatttcaaaaataaaaattaaatcaaatatctcaaaaaagaaattccttagtagtgtttctaaagctaaaaaatacattaaaataggagatatttttcaagttgttctaagtcaaaggttcgaaactgatcttaataaagaaccattagatatttataaaaaattgagaattactaacccttccccattcatgtatttttttaactttgaggattttcaaattataggtgcaagtcctgagatacttgtgagactcagagataataaaataactattagacctattgctggcacaagacctagaggtaaaaataaaaaagaagataaattttatgaaaaagatcttttaaaagataaaaaagagctctctgaacacttaatgcttcttgaccttggaagaaatgatactggaaaagtttctaaaattaactctgttaaagtaaccgaaagttttaagatagagcgatattcgcatgtaatgcacatagtctcccaatgttgaa

SEQ ID NO: 278747 - DNA, 166 bp, Unknown
  Bacterial polypeptide expressing nucleotide sequence isolated from the Sargasso Sea
cccaaataacagcatggatacttgtattgctttaagaaccgcgttaataaaaaataataaactttatattcaagctggtgccggtattgttgcggatagtaatccagaaaaagagtatcaagaaactgtaaataaagctaaagcaataattgaggctgcaaagtga

SEQ ID NO: 278748 - DNA, 531 bp, Unknown
  Bacterial polypeptide expressing nucleotide sequence isolated from the Sargasso Sea
ctaggagatatattccaagtcgttttaagccaaagatttgaggctaaacttacaaaaaaaccaattgaaatttataaaaaacttcgaattactaatccctccccttttatgttttacttcaatttcagtgattttcaaatcattggtgccagtccagaaatcttagtaagacttagaaataatgaaattacaataagaccaattgcaggaacaagaccaagaggtaaaaccaaaaaagaggatcttttttatgaaaaagatcttatcaaagataaaaaagaactttctgagcatttaatgctcttagatttaggaaggaatgatacgggaaaagtctctaagataaacactgtaaaagtaacagaaagttttataattgaaaaatattcacatgttatgcatatagtttctaatgtaataggaaaatataataagaaattttctaagtttaaatcacttcttgctggttttcctgcaggtactgtatcaggagcacctaaaattagagccatggaaataattgatgagcta

SEQ ID NO: 278749 - DNA, 934 bp, Unknown
  Bacterial polypeptide expressing nucleotide sequence isolated from the Sargasso Sea
ctccaaaagaacttccccagaatgtcatcgatgttggttggatatttttcatatgatattattcgtttaattgaaaaaattcctaacagttgcagtaacgatataaacatacccgatataagattaatgagaccaaaaaatttaattatttatgataatttaaagagtaaaatttttttcatagaaaatatatttgaagatcaaaaaattgaggattatcaaacagaatacaataaaattggaaataatcttaaagaattgagtcattatggaaatattcccctgcctacaaatttttacagaccatcaaaaaaaattaatattaaatcgaacataacaaaatcaagattcaaaaaaattgttagaaaagcgaaaacttacattagtaaaggtgatattttccaagtagttttaagtcagagatttaaggcaaatataaataaaccaccacttgaaatttacaatagtttaagaaagttaaatccatctccatttatgttttattttaattatgacgattttcaaatattaggtagtagcccagaaattttagtgagattagtagacggcgaggtcacaataaggccaattgcaggtactagacctaggggaaaaaatagtaaagatgataaaagattaacaaatgagttgttaaatgacccaaaagaattatctgaacatttaatgcttcttgatcttggtagaaatgatgttgggaaagtctccaaagcaaattctgtaaaagttacagaaaagtttaaagtggaaaaatattctcatgttatgcatattgtttcaaatgttgttggtaaacaaaaaaataaattgtctctttttgaaacttttttatctggatttcctgctggaaccgtaagtggggctccaaaaataagagcaatggagattattgacgaattagaaatgtctaaaagaa

SEQ ID NO: 278750 - DNA, 548 bp, Unknown
  Bacterial polypeptide expressing nucleotide sequence isolated from the Sargasso Sea
aagaggaaaaaatgcgaatgaagatttagaactttcaaaagatttacttcaagataaaaaagaacttgcagaacatttaatgttattagatttaggaagaaatgatgtaggtagagtttctcaaaataaatcagtaaaagtaaccgaacaaatgatcattgaatattattcgcacgtaatgcatatcgtctccaatgtggaaggattgatagatgaaaaatatgatgcagtagatgctctgaaagctggttttcctgcagggacagtttcaggcgcaccaaaaattcgagctatgcagataattgaagagcttgaaaatcttaatcgaagtttttatgcaggatgtatgggttattttgattctaatggagatatggatacatgcattagcttaagaagtggattggttaaaaatggtaaattattcattcaagctggaggtggagttgttaacgactcaaatcctgaagatgagtatcaagaaactatcaataaagctggcgctctaatggcagctgcggaagactcatataaatataattcatgat

SEQ ID NO: 278751 - DNA, 811 bp, Unknown
  Bacterial polypeptide expressing nucleotide sequence isolated from the Sargasso Sea
tatgttggttggttatttttcatatgatattattcgttacattgaaaaaattccagatcgatgcatagatgatcttaaaattcctgaaattagactatctagaccaaaaaatttgataatttatgataatctgaaaaagaaaatttattatatagaaaatgtatattctgatactaaaataaaaaactatagagaaacttacaatgcaattttagataaatttaatttatttcgagattatgaaaatattaaactacctgatgaatttacacacaaaaaaaataaatacttgattaagtcaaatacatccaaagaaaaatttatttcactagtcaaaaaagcaaaaaagtacattgaaaagggagatatttttcaagttgttttaagtcaacgttttgaaagaaaaatagaaaaaaaacctattgaaatttataaccacttaagaaagtctaatccatctccatttatgttttattttaattataaagattttaatattcttggcagcagtcctgagattttagttagattaagaaaaaatcaagtaactattagacctatcgcaggaactcgaccaagaggaaaaaataataaggaagacaagaaatacaaattagatttacttaaagataagaaagaattagcagagcacttaatgcttttagacttagggagaaatgatgtgggcaaggtagtaaaaaataattcaataaaagtaactgaaaagttcaaagtagaaaaatactcgcacgtgatgcatattgtttctaacgtagtaggtaaatttgataataaatttcactattcgagg

SEQ ID NO: 278752 - DNA, 753 bp, Unknown
  Bacterial polypeptide expressing nucleotide sequence isolated from the Sargasso Sea
aaagtgatccactaaatttttatagagcattgcgctcactaaatccatcaccttatatgtatttccttgacttagaagacctgcaaatagttagttcatcgcctgagattttagctaagcttgaaaattctttggtgaccgtaaggccccttgctggaacgcggagaagagggcttactgaagccgaagatttagagttggaggaagagctattaaatgacgaaaaagaggtttctgagcacttgatgttaattgatttgggcagaaatgatatagggaaagtctgcagcccaggaagtgtagttgtaagcgagacgatggtcgtagagagatatgctcacgtaatgcatatagcctcaaatgtgcaaggacacctaaaagaaaatttgagagcgattgatttattgagagctactctccctgtaggaactttgagcggggcgccaaaagttagagcgatgcagattatagatgagttagagcctgagaaaagaggggttttcggaggtgcagtgggttacctttcttggaatgggaatatggacacagctatcgcgataagaaccggaataattaaaaatcaagttttatatgttcaagctggcgctggggtagtagctgattcgaatgccgaaaatgagtggcaagaaactataaataaggctcggtcaatatttcatgcagcttcattcgctgagactggcttagatattatcgataagtcatctttacgctctggacgaaatagatagt

SEQ ID NO: 278753 - DNA, 241 bp, Unknown
  Bacterial polypeptide expressing nucleotide sequence isolated from the Sargasso Sea
caatcaggtagagatttacccgattgcaggcacgcgtcctcgtggaaagcgtccagatggtagtattgatatggatttggacagccgtattgagcttaaccttcgcgaagacacaaaagaaaagtctgagcacatcatgctggttgatctggctcgtaatgatgttgcaaaggtaagtcgtccaggtacgcgctatgtgaaagacttgctaaaagttgaccgttttactctcatggtgatg

SEQ ID NO: 278754 - DNA, 775 bp, Unknown
  Bacterial polypeptide expressing nucleotide sequence isolated from the Sargasso Sea
aatgcaaacatcaaaaccggcactcgagcttctcaccagcgacgccatctatcgcgaaaaccccacggcgctgtttcaccagctgtgcggcgctcgcccggccacgctgctgctggaatcggcggatatcgacagcaaagacgatttaaaaagcctgctgctggtagacagcgcgctgcgcatcaccgcgctaggtgacactgtcactctgcaggcgctttctgctaacggcgcggccctgctggatttactggataatactctgccttcgggcatcgacaatcagcgccagcccaatagccggatcctgaccttcccgcctgtcagcgcgctgctggatgaagatgcccgcctgtgctctttatccgtctttgacgccttccgtctgctgcaggaactggtcaccgttccgccggacgagcgcgaagcgatgttctttggcggcctgtttgcctatgacctggtagccggttttgaaaatctgccgccgctggaaagcgacaccgcctgcccggactactgtttctacctggccgaaaccctgctggttatcgaccaccagaccaaaaatacccgtatccagtcgagcctgttcaccccgctggagagtgaaaaacagcgtctgacccagcgtatcgcccagcttcgccagcagcttaacgagccgcctgctccgctgccggtgactaaagttgaatcgatgacctgcgactgcgatcagagcgatgaagagtacggtgcggtggtacgcaaaatgcagcgcgccattcgcgcc

SEQ ID NO: 278755 - DNA, 534 bp, Unknown
  Bacterial polypeptide expressing nucleotide sequence isolated from the Sargasso Sea
tatcgagcaatgcgtttaattaatccatccccttatatgttctattgtgagtcagatggactgaagattgcaggttcttctcctgaggctctggttagactgggtggcaataaagcatctcttagaccgattgcaggaaccaggccaagaggaaaggattctgaagaagaccagtcacatagagaatcactcctcgcggacgaaaaagagattgcagagcatattatgttggttgatcttgcacgcaatgatcttggacgagttgcaaaacatggatcaattgaagtgaaaccataccaatcgatcgaatactatagccacgtcatgcatatagtcagcggtgttcaaggccatttagaagaagaaaaagatgcctttgatttatttgccgctgcctttcctgcaggaacattggttggcgccccaaaggtcagagcaatggaattgatcgatgaaattgaacctcagctgagaggcatttacggaggcacggtgggttatttttccaagaacggagacatggatcaggcaatc

SEQ ID NO: 278756 - DNA, 223 bp, Unknown
  Bacterial polypeptide expressing nucleotide sequence isolated from the Sargasso Sea
gatgaattagaaaagaataaaagaaaattgtatgctggtggtattggatattttactccaaataatgagtttgacacttgtatagccttaagaacagctttaatcaaaaataacaagttttatgttcaagccggggctgggatcgtagctgacagcaaaccagagaaagaatatatggaaacagtaaataaagctaaaggtcttatgaaggcagtagattgaa

SEQ ID NO: 278757 - DNA, 772 bp, Unknown
  Bacterial polypeptide expressing nucleotide sequence isolated from the Sargasso Sea
ggcaaaaaacattgttatcgaggagatgtctttcaaatagttttgtcaagaagattttctcaaggttttacaggagatgaatttaatgtttacagggctttgagatccataaatccctctccttatttgttcttttttgattacggaaattttaaaatttttggaagttctccagaagctcaattaataatagaaaacaaaaaagctgagattcatcccattgctggtacatttaaaagaactggagatgacaaaaaagataaagaaactgccattaaactttcaaaagatccaaaagagaatagtgaacatgttatgttggttgatttagcaagaaatgatttaagtagaaatggaaccaatgttattgtagaaaaaaacagagagatacaatttttctcccatgtaattcacttagtttctaaagtaacaggaaaaattaataaaaattcaaaaacatttcaagtcgttgcagatacatttcctgctggaacactaagtggtgctccaaaacataaggctttagaattaattgatttatatgaaaaaacagccagaaacttctatggtggagctgttggttatatggacttttatggaaattttaatcatgcaattataattagatcttttttaagtaaagacaaaattttatactaccaggctggagctgggattgtatcagattcaattcctgaaaaagaattacaagaggtttataataaactaggtgccttaaataaggctttaacttttgcagaaaaattataaa

SEQ ID NO: 278758 - DNA, 266 bp, Unknown
  Bacterial polypeptide expressing nucleotide sequence isolated from the Sargasso Sea
aacagtatcaggagcgcccaaaattagagctatggaaattatagatgagctagaaacaactaaaagaaaagtttacgctggtggtattggatatttttctgcaaatggtgagtttgatacttgtatcgctttaagaacagccgttgctaaaaataaaaaattttatgttcaagcaggtgcaggaattgttgcagatagtaaaccaattaatgaatacgaggaaactgttaataaagctaaagctttaatcaacgctttaagataat

SEQ ID NO: 278759 - DNA, 829 bp, Unknown
  Bacterial polypeptide expressing nucleotide sequence isolated from the Sargasso Sea
aattaataaaaaaatcaaagttaaatcaaatatttcaaaaaataaatttaagacaatggtgttaaatgcaaaaaaatatattaaaaaaggtgatatattccaagtagtattaagtcaaagatttgaatctaaattaacaaaaactcccttggagatatataaaaaattaagattgtctaacccatctccttttatgttttttttaaactttaatgattttcaaataataggaagtagtccagaaatattagtaaggcttagaaataacaaagtaacaattcgaccaatagctggaactagacctagaggtcataacaagaagaaagatagtctttataaaaaagaacttttaaatgataaaaaagaattatcagagcatttaatgcttttggatcttggtagaaatgacgttggtaaaatatcaaaaattaactctgtaaaggttactgaaaaatttaaagtagaaaaatactcacatgtaatgcatatagtttctaatgttgagggtaaatttaataataaattttcattattagatacaatgttagctggattccctgccggtacagttactggagctcccaaaattagggcgatggaaattatagatgaacttgaaaaatctaaaagaaaaatgtacgcaggagcaattggttatttttctgccaataaaatgtttgatacttgtatcgctttaagaactgctcttataaaaaataataaattctatatccaatcaggtgcaggaattgttgcggatagtgttcccgaaaaagaatatttagaaacagttaacaaagcaaaagctttaatcaagtctttagggtaa

SEQ ID NO: 278760 - DNA, 793 bp, Unknown
  Bacterial polypeptide expressing nucleotide sequence isolated from the Sargasso Sea
aaatttattaataatttattaaaaaactttaaattggacataccaaaacaattgccctcaatgtcatcgatgttggtaggttatttttcttatgatgttataagattaatagaaaaaataccaaataaatgtaaggatgatttgaaaattcctgatataagaatttcaagaccgagaaatttaataatctatgataatgtcttaaaaaaaatttattatattgaaaatatttttagtgatactaaaataacaaattataattctgtttatagtgaaattataaataaatttttactgcttgaaaaatacgaaaatatcaatttaccagagcaaattacttataaaagaaataataatttaataaaatcaaacataagtaaaaaaggatttaaatcacttgtaataaaagcgaaaagatatattaaacaaggtgatatatttcaagtagttctaagtcaaagatttgagagaaaaatttataaacgaccattagaaatttataactatttaagaaaatcaaatccttcgccatttatgtttttttttaattatgaagattttaaagtattgggtagtagtccggaaatattagttagattaagaaaaaatgagattacgattagacctatagcaggaactagaccaagaggaaaagatttaaaatccgataaaaaatatgagaaagatcttttaaaagataaaaaagagttggccgaacatctcatgttattagatttaggaaggaacgatgtcggtaaagtatcgaaaattaactcagtgagagttacggaga

SEQ ID NO: 278761 - DNA, 322 bp, Unknown
  Bacterial polypeptide expressing nucleotide sequence isolated from the Sargasso Sea
aatgcgatagatgctctgatttcgggatttcctgctggcactgtatctggagcaccaaaaattagagctatggaaataattgaagagcttgaaaatcttaatagaagtttttatggtggtgccatgggatattttgactcaaatggcgatatggacacatgtattagtctaagaacaggtttaattaaaaataagaaattgtatattcaggcaggtggaggaattgtgcatgattctaatccacaaaaagagtttcaagaaacaataaacaaagccaaggctctaattaaagctgctgaagattcttataatattgcataaa

SEQ ID NO: 278762 - DNA, 154 bp, Unknown
  Bacterial polypeptide expressing nucleotide sequence isolated from the Sargasso Sea
tatgatagttaaaccctcaagagatgggaaatatgatgtttcagtgcaagcaggagcaggaatagtcgctgattcttttcctgaaaatgaatatcaagagacaattaataaagcgaaggggatactaaaagcattagcctgtttgaataaataa

SEQ ID NO: 278763 - DNA, 837 bp, Unknown
  Bacterial polypeptide expressing nucleotide sequence isolated from the Sargasso Sea
aatgttagtaggttatttctcttacgatattataagatatatcgagaaaatccccgatcgttgtaaagatgatcttaaaatacctgatgtaagaatactaaggccaaaaaatttaataatttacgataatttaaaaaagaaaattttttatttatgtaacgttttttctgatagtaaaattttaaattattttgaagaatacgacactataaaaaaagaatttaaaatacttaatttttacggtgaaattaatttacctaagaaactgacttttaaaattaacaaaaataaagtcaaatcgaatatgacgaaaaaacaatttaaaaataaagttcttaaggcaaaagcttatattaaaaaaggagatatttttcaggtagtattaagtcaaagatttgaacgaaaatttgaaaagaaacctatcgaaatttataattacttaagggagtccaacccgtctccttttatgttttattttaactttgacgactttaaaattttaggtagtagtcctgaaattttagtaagattaagaaatgacttcattacagttagaccaatagcaggtacaaggcctagaggaaaaaatataaatcaagacaaaaaattcaaaaacgatttaattaaagacaagaaggagttagcagaacacttaatgttattagatttaggtaggaatgatgttggtaaagtttcaaaaataaatagtgttagggttacagagagttttaaagtagaaaagtattctcatgtaatgcacattgtttcaaacgttgtcggcaagtttaataaaaaagtttcttcatttgaggcattattagccggttttcctgctgg

SEQ ID NO: 278764 - DNA, 873 bp, Unknown
  Bacterial polypeptide expressing nucleotide sequence isolated from the Sargasso Sea
attgctgaatacaagaccccagttttagatggtatgccaagattttatggaggatatgtcggtttttttgcatatgaaagtgctaagtatgctgaaaacaaaattaatgctcttcaaagaaaagactcaaaatttgatgttcatatgcctgatatctatttggtaaagtctgaaaaaataattgtttacgacaattttaataatagtattcaagccatttataatgcaaaccctcaaaagacatcatatgaagatgctttggaaatcattgatgagattcaaaatagcattgatcattctggagaacttgaagaaacttcatattcaaatactactggggaattagaatttaaatcaaattttacaaaaaatgagtacatgtcgtccgtgaataaaattaaagaatatataaaagaaggtgatgtgatgcaggttgtactagcacaagatttttatcaatcctttgaaggtgattcatttgaattatattcagccctaagacagataaacccatcaccatatatgtattacctcaaccttgatgagtgtgaggtggtcggatcttcacctgaaatattggttagattagaagatagcaatattactctcagaccaattgcaggcacgagaaagagaggtgcaaacgaagaagaggataaaaataatgagaaagatttattaaatgatccaaaagagttagctgagcatcttatgcttatagatcttggaagaaatgatgttggaagagtttctgaaattggtagcgtgaaactgactgaaaaaatggtgatcgaaagatattcccatgtcatgcatatagtatcaaacgtagtaggtaaattatctaagggattaaattttactgatgctctt

SEQ ID NO: 278765 - DNA, 235 bp, Unknown
  Bacterial polypeptide expressing nucleotide sequence isolated from the Sargasso Sea
tatggaaataattgatgaattagaaacaactaagagaaaagtttacgctggtggtattggttatttttcagctaacggagaatttgatacatgcatagctttaagaactgctgtggctaaaaaagataaattttatgttcaagctggtgctggaattgttgctgacagcaaacctttaaaagaatatgaagaaacagttaacaaagcaaaagctttaattaatgctttaaaatga

SEQ ID NO: 278766 - DNA, 911 bp, Unknown
  Bacterial polypeptide expressing nucleotide sequence isolated from the Sargasso Sea
aaaaaataatgataatattaaaattcctgactctgttttgatagggccaaaaattgttgcggtttttgataatattaaagacaaaattacagttatgacagtggtctacccaaacgaaaaaaaagattacgaaagtgcctatgttaaagcacaagaattattaaatttgaaagtaaatgagcttaaacaaaaccttgttcaaaaaccagctaatgaaattaaatcaaatttaaattttatatcaaattactctaaagaagaatatttttctattatatcaaaagcaaaagagtacattaagaatggagatatttttcaggtagtcacttctcaaagatttgaaacaaactatgaccttgaggcagttagcctttatagatcattaagaaggttaaatccttctccttatttagttaatttaaacttcgatgaagcaggtctagtggcttctagtcctgaattacttgttcaattaagaaataaaaaaataactatcagaccaatagctggaacaagaaaaagaggaaaaaatgccaatgaagatctggaactttctagagatttgcttcaagacaaaaaagaacttgcagaacatttgatgctgttagatttaggtagaaatgatgtcggtcgtgttgctaaaaataaatctgtaaaagtaacagaaaaaatgattattgaatattattctcatgttatgcatattgtttcaaatgttgaaggcttgatagatgatagttacgatgctgtagatgctctcaaagctggttttccagctggtacagtatcaggtgctccaaaaattcgtgctatggagataatcgaagaactcgaaaaccttaatcgaagtttttatgcaggatgtatgggttattttgactcccaatggagaccatggatacttgtataag

SEQ ID NO: 278767 - DNA, 904 bp, Unknown
  Bacterial polypeptide expressing nucleotide sequence isolated from the Sargasso Sea
gcgtcagatgtccatcagggcaatccctttgacggcttgcgtcactgcctgtctccgtaccggtgcgcgaatctgcctgggctgcctccactgggacagctttacggcatgtggggctacgagctgatccactggattgagtccaccgttccgattcatccgcaggacgacaccgcaccagcggatggcatctggatgctgatggacggcatcttgatcttcgatcaggtcaaacgtctgatcacggcggtggcctacggcgacctcagcggcggctgcgacgtggaggacgcctggcagttagctctggcgcgcatcgccgacctgcgacgccgcatggatgcccccctgccggcggtcgcacctctccagtggagcccgaacgcggatgtgctgccggacgtgcgcagcaatcgcaatcggaacgacttcgaagcggcggtggaatccgcacgggagcacatcgccgcgggggacgtgttccaactggttctcagtcagaggctggaggcatcggtcccccagtcacccctggagctgtaccggagcctgcggatggtgaatccctctccctacatggcttttttcgatttcggagactggcagctgatcgggtccagcccggaggtgatggtgcaggcggaaccagcggcggatgggatccacgccagcctgaggccgatcgccggcacgcgtcccagaggacggaacccgctggaggacagggaactggaggtggaactgctggcagaccccaaggaacgtgccgaacacgtgatgctggtggatctcggccgcaatgacctgggacgggtctgtcaaccgggaagcgtcacggtcaaggatctgatggtgatcgagcgctactcccacgtgatgcacatcgtcagtcaggtggaggggc

SEQ ID NO: 278768 - DNA, 128 bp, Unknown
  Bacterial polypeptide expressing nucleotide sequence isolated from the Sargasso Sea
tgcaatagtaaaaaataataaattctatgttcaagctggtgctggtatagttgccgatagtatccctgagaaagaatatgaagagactgttaataaagcaaaagctttaattaatgctttaagataat

SEQ ID NO: 278769 - DNA, 235 bp, Unknown
  Bacterial polypeptide expressing nucleotide sequence isolated from the Sargasso Sea
tggaaataattttgatgaattggaaaaaacaaaaagaaaagtttacgcaggtggtattggttatttttctgccaacggagaatttgatacatgtattgcattaagaacagctgttgccaaaaaaaataaattttatgttcaggctggagctggaatagttgcagacagcaaaccaattaacgaatatagagagactgttaataaagctaaagcattaataaatgcattaaaataa

SEQ ID NO: 278770 - DNA, 850 bp, Unknown
  Bacterial polypeptide expressing nucleotide sequence isolated from the Sargasso Sea
cctggatttaaaaccatcaatcgatgacatcccattttcaggaggaatggttggtttcagttcatttgatatgattcgccactttgaaaaattaccagtacccaaagggaaggatggtattttaagtccctcagattgctcatatattgcgccgacatcattgctaatctttgatcatttggaaaacaagatggctctgcttcattgcggcaatgaggaggaaagaataaatttaagggatgaaatcctatccctgctcagcaaggagatcactcaaagtcaaaaaaagaaaacatactcagaaccaatagcaaacatcaaaaaagaaatcttttacgatgctgttgaaaaagcaaaacaccatatcttcgagggagacatttttcaaatcgttttatccattgcattttctggcagttatgatcttgatccatttgatgtttatcgagcaatgcgtttaattaatccatccccttatatgttctattgtgagtcagatggactgaagattgcaggttcttctcctgaggctttggttagactgggtggcaataaagcatctcttagaccgattgcaggaaccaggccaagaggaaaagattcagaagaagaccagtcacatagagaatcactgctcgaggacgaaaaagagattgcagagcatattatgttggttgatcttgcacgcaatgatcttggacgagttgcaaagcatggatcaattgaagtgaaaccataccaatcgatcgaatactatagccacgtcatgcatatagtcagcggtgttcaaggccatttagaagaagaaaaagatgcctttgatttatttgccgctgcctttcctgcaaga

SEQ ID NO: 278771 - DNA, 118 bp, Unknown
  Bacterial polypeptide expressing nucleotide sequence isolated from the Sargasso Sea
taaaaaaaataaattctatgttcaggcgggcgcaggaattgtagctgatagtaaacctttgaatgaatataaagaaacgataaataaagctaaggctctattaaaatctttagaataa

SEQ ID NO: 278772 - DNA, 652 bp, Unknown
  Bacterial polypeptide expressing nucleotide sequence isolated from the Sargasso Sea
tccttcaccgtatttattctattttgattatggaagttttaaaatttttggtagttctccggaagcccagcttgtaatcaaggataaaaaagctgaaatacatccaattgctggaacatttaaaagaactggtgatgatacattagacaaagaaaaagcgacaaaactatttgaggatgacaaggaaaatagtgaacatatgatgttagtcgatttagcaagaaatgatttaagcaggtcatgttcaaatgtaaaagttgaaaaagatcgtgaaattcaattttattctcatgttattcatttagtatcaaaagtaacaggtgaattaaaatcatcatctaatgatataattgggaacacttttccagctggaacgcttacaggagcacccaaacatatggcaatgaaactcattgaaaagtatgaacaacacaatagatcattttatggtggtgcaataggttttattgattttgataataattttaatcatgctataatgattagatccttcttgagcaaaaatcaaaatttattattacaagcaggtgctggaattgtttcaaagtctaatagaaataatgagctaaatgaagtttataataaaattggtgccttactaaaagcacttgaaaaagcagaagaattatga

SEQ ID NO: 278773 - DNA, 241 bp, Unknown
  Bacterial polypeptide expressing nucleotide sequence isolated from the Sargasso Sea
gaaaaagatgctagaggaccttatgctggtgtttacggatcaattgatattaatggtgcattaaatacggcaattacgataagaactatgatagttaaaccctcaagagatgggaaatatgatgtttcagtgcaagcaggagctggaatagttgctgattcttttcctgaaaatgaatatcaagagacgataaataaagcaaaggggatattaaaagcattagcatgtttggataaataaa

SEQ ID NO: 278774 - DNA, 502 bp, Unknown
  Bacterial polypeptide expressing nucleotide sequence isolated from the Sargasso Sea
caatttttttaaaaaagatcttttgcaagataaaaaagagctttctgagcatttgatgcttttagaccttggtaggaatgatacgggcaaagtatcaaaaataaacactgtaaaagttacagaaagttttaatgttgaaaaatattctcatgtcatgcacatagtttcgaatgttcaaggggaatttaataataagttttctaaatttgacactttgttgtctggttttcctgctggtactgtatctggagcaccaaaaattagggcaatggaaataattgatgaacttgagaatacaaaaaggaaagtatacgcaggtggtattggatatttttctgcaaatggtgattttgatacatgtattgcattaagaactgcattaactaaaaataaaaaattttatgttcaatctggagcaggtattgttgctgatagcaaaccattgaatgaatttaaagaaacggtaaataaagcaaaagctttattaaaagcactagaataa

SEQ ID NO: 278775 - DNA, 352 bp, Unknown
  Bacterial polypeptide expressing nucleotide sequence isolated from the Sargasso Sea
aatgcatataaggtttcaaacgttacttggaaaaattcaaaaaaatttatctatctttgaaacatttttgtcaggattcccggccgggactgtaagcggcgcacctaagatacgagctatggaaattattgacgaattagaaagttcaaaaagaatgctctatgctggtggtattggttattttacggctaatcatgagtttgatacttgtatagctctaagaacagctctaattaaagataataaaatttatgttcagtctggtgcaggaatagtggctgatagtaatccaaaaaatgaatatgatgaaacagtgaataaggctaaagctttaatgaaagccattaattaa

SEQ ID NO: 278776 - DNA, 326 bp, Unknown
  Bacterial polypeptide expressing nucleotide sequence isolated from the Sargasso Sea
atgggatttgctaaaagcatcttttcctgctgggacagtcactggtgctccaaaaataagagctatgcaattgattaagcactttgaaaaagatgccagaggaccctatgctggcgtttatggatctattgatattaatggggcattaaatacggcaattacaataagaactatgatagttaaatgttcaagagatgggaaatatgatgtttcagtacaagcaggagctggaatagtagctgattcttttccagaaaatgaatatcaagagactataaataaagcaaaggggattctaaaagcaatatcctgtttggataaataaa

SEQ ID NO: 278777 - DNA, 390 bp, Unknown
  Bacterial polypeptide expressing nucleotide sequence isolated from the Sargasso Sea
aacgctattcccacgtgatgcatatctctagcaatgtaacaggtcaactccgagaggataaaacaccaatggatgttctgagagcaactctcccagtcggcactctgtctggtgcgccaaaaattcgggcgatggaaattattgatgagctagagccagtaaagagaggaatatatggtggtgctgttggctatttatcatggaatggtaatatggataccgcgatagctattagaactgcagttattaagaatgatactttgtatgttcaagctggcggcgggatagtcgctgattcagttcctaatcttgaatggaaggaatcgatgaacaaggcaagagctatctttcgggcggctgccgcggctaaccaactagaaaatgactaaa

SEQ ID NO: 278778 - DNA, 694 bp, Unknown
  Bacterial polypeptide expressing nucleotide sequence isolated from the Sargasso Sea
tttatatagatctctaagaagattaaatccttctccttacttagtttatttaaattttgataaatttggtttagtggcctcaagtccagaattattagttcaactaagaaaaggaaaagttacaataagacctattgccggcacacgtaaaagaggaaaaaatgcaaatgaagatctaaaattatcaaaagatttactttcagatgaaaaagaacttgctgaacatttaatgctccttgatttgggtagaaatgatgtaggaagagtagctaaaaataaatcagttaaggtaacagaaaaaatgattatagaacattattcccatgttatgcatattgtgtcaaatgttgaaggattaattgatgaaaaatatgatgcagtagatgcattaagagctggctttccagcaggtacagtttcaggtgctccaaaaattagagcaatagaaataattgaagaacttgaaaacttaaacagaagtttttatgctggatgtatgggctattttgactctaacggagatatggacacatgtataagtctaagaagcgggttagtaaaaaataaaaaactttatgttcagtcaggtggaggtgtagtatatgactcaaatcctgaagatgaatatcaagaaacaatcaataaagcaggagctctgatggcagcagctaaagactcatataaatataattga

SEQ ID NO: 278779 - DNA, 277 bp, Unknown
  Bacterial polypeptide expressing nucleotide sequence isolated from the Sargasso Sea
tttcctgctggaacggtatcaggcgcacctaaaataagagctatggagattatagatgaattagaaacgacgaggcgaaaagtttatgctggtggtattggttatttttctgcaaatggtgattttgatacttgtattgcgcttagaacagcaatttcgaaaaataaaaaattttacgtacaatcaggtgcaggaattgttgctgatagtaaacctattaatgaatttaatgaaacagttaataaagcaaaagctttaattaaggctttggagtaaa

SEQ ID NO: 278780 - DNA, 268 bp, Unknown
  Bacterial polypeptide expressing nucleotide sequence isolated from the Sargasso Sea
gaacggggtctctggtgccccaaaaataagagccatggaaatcattgatgagctagaaaccacgagaagaaaagtttatgcgggtggtataggttatttttctgcaaacggtgaatttgatacttgtattgctttaagaacagctgtcgccaaaaataaaaaattctatgttcaagctggtgcgggaattgttgctgatagcaagcctataaacgaatatgaggagacggttaataaggctaaagctttaattaatgcattaagataa

SEQ ID NO: 278781 - DNA, 235 bp, Unknown
  Bacterial polypeptide expressing nucleotide sequence isolated from the Sargasso Sea
aatggaaataattgacgaactagaaaatacaaaaagaaaggtttatgccggtggtattggatacttttcttctaatggtgattttgatacttgtatcgcattaagaacagcagtttcaaaaaataaaaaattttatgttcaagcgggagcaggaatagttgccgatagcaaaccaataaatgaatataatgagactcttaataaagcaagagcattaattaaatcattggagtaa

SEQ ID NO: 278782 - DNA, 955 bp, Unknown
  Bacterial polypeptide expressing nucleotide sequence isolated from the Sargasso Sea
cccattttcatctcttttaaaaatagcaaaggtgaaaaatactcatttcttttagagtcagtgaagggaggaagtaagagaggtagatactccttacttggttgtgatccagatcttattgggagagtaaataatggaaaatcttcaattaaatatttaggaaataattacaattacaaactaaataaaaacccactacaaggattaagacaactaataaatttgtcaaaattcaaaaacgtaaatagtagtgtgccctacccttcattagttggttacttgggatatccaatgatacaatttatggaaaatataaaattaaaaaataatgataatattaagattccagatgctacactaataagaccaaaagttgttgcagtttttgataacattaaagatattatatgcataatgacagtatgttttcccagtaaaaatgttaaacctgaaaaagcttttaaagattcaaatttacttttaataaaaactatcaataaattagaaaaaagtattttaaatacaacaaataagaaaataaaaaaaaatagtttaagatttaaatcaaattttaaaaaagatgagttttatacgttagtaaaaaaagctaagaaatatattaaagaaggtgatatttttcaagttgttacctcgcaaaggtttgaaacgccttatcatcttagagcaattgatttatatagatcattaagacgactaaacccctctccatatctagttaatttaaactttgataaatttggtatagtagcttcaagtccagagttgatggttcagttgagaaataaaaaaattacaattaggccaatagctggaactagaagaagaggtaaaaatatttctgaagatattgtactttcaaatgacttattgaatgatcaaaaagagttagctgagcatttaatgttattggatttaggaaggaacgatgtcggta

SEQ ID NO: 278783 - DNA, 122 bp, Unknown
  Bacterial polypeptide expressing nucleotide sequence isolated from the Sargasso Sea
tgctaaaaaaggaaaattttatgttcaagccggtgcaggtatcgtagcagatagtaaaccatcaaaagaatatgaagaaacagtaaataaagcaaaagctttgatcaatgcattaaaatgaa

SEQ ID NO: 278784 - DNA, 867 bp, Unknown
  Bacterial polypeptide expressing nucleotide sequence isolated from the Sargasso Sea
tctgccgccggatctgccgccgatggccgcaggtctgttcggatatctgggctacgacatggttcgccatgtggagcatctgcccgacgtcaacccagatccattggacctgcccgatgcggtgatgatgcgccccagcgtcgtggccatcgtcgatgcggtcaaggacgaggtgatcgtcgtctcgcctgtctgggccggttccgggcaaagcgcccgcgccgcgcacgcgcaggcggcggaacgggtgatggatgtcgttgccgacctggaccgcgcgcccaccggcgcccggcgagaggtcgttggcacctccgaaatgcctgagcctgtctccaacaccacgcgtgagggctacgccgccatggtggagaaggccaaggattacatccgcgcgggcgacatctttcaggtggttccgtcgcagcgctggtcactgccgttcgaggaatcgcccttcgcgctgtatcgctcgctgcgccgcacgaatccctcgccctacatgttctatttcgattttggcgggtttcaggttatcggcgccagccccgagattctggtgcaggtccgggcgggaaaggtaacgatccgacccatcgcaggcacacgcaagcggggtgccacgcccgaggcggatctggcgttggagcgtgaattgctggctgatcccaaggaacgggcggagcacctcatgctgctcgatctggggcgtaacgatgtggggcgcgtggcccgaatcggcacggtcaagccgacggaaaccttcatcatcgaacgctattcccacgtcatgcatatcgtcagcaatgtggaaggacacctgcgcgacggtgtcgatgcgctcgacgctttgctggccggtctgcc

SEQ ID NO: 278785 - DNA, 889 bp, Unknown
  Bacterial polypeptide expressing nucleotide sequence isolated from the Sargasso Sea
aatgattcaatatatggaaaaaattttattaaaaaataatgacaatataaatatacctgattctatcctgattaggccaaaaattgttgcagtgttcgataacataaaagataaaattacagttatgactgtagtctatccaaatgagaaaaaaaattatgaaaccgaatttaatgaagctcaggaattattagaatcaaaagtaaatcaacttaaagaaaatcttgttcaagaaactgctagtcaaattaaatcgaacttaaagtttatatctaattattccaaagaggagtatttttctatcatatcgaaagccaaaaaatatattgaggatggtgatatttttcaagtggttacttcccaaaggtttcaaacagaatatgatcttgaagcagtcagtctttatagatcattaagaagacttaatccttcaccttatttagttaatttaaactttaatgaaataggtcttgtagcttctagtcctgaattacttgttcaattaagaaatcaaaaaataacaataagacctatagcaggtactaggaaaaggggcaaaaatgcaaatgaagatcttgaactttctaaagatttacttcaagatgaaaaagagctagcagaacatttaatgctattagacctaggaagaaatgatgttggaagggttgcaaagaataaatcagtaaaagttacacagaaaatgattatagaatattattctcatgttatgcatattgtttcaaatgttgaaggattaatagatgacaaatatgatgcagttgatgctctaaaggctggttttccagcaggtaccgtatctggagctccaaaaattcgtgctatggagataattgaagagcttgaaaatctcaatcgaagtttctatgca

SEQ ID NO: 278786 - DNA, 262 bp, Unknown
  Bacterial polypeptide expressing nucleotide sequence isolated from the Sargasso Sea
cggcgagctcgagccggtacggcggggtatctattccggagcggtgggttatatcggctggaacggcaacatggataccgcgattgcgatccgcaccgcggtcatcgctgatggcgaactgcatatccaggccggtgccggcattgtggccgactcggtgccctcgcaggaatggcaggagacgatgaacaagggccgggccatcttccgtgcggtggcgatggcggtcgccggtcttgatcctggcgcgctggaagattga

SEQ ID NO: 278787 - DNA, 121 bp, Unknown
  Bacterial polypeptide expressing nucleotide sequence isolated from the Sargasso Sea
agcaaaaaaagataaattttatgttcaggctggagctggcattgtagcagatagtgttcccgaaaaagaatatgaagagacggttaataaagcaaaagcattaataaacgcattaaggtaa

SEQ ID NO: 278788 - DNA, 943 bp, Unknown
  Bacterial polypeptide expressing nucleotide sequence isolated from the Sargasso Sea
aacaaagataccagtttctagggagatcctagcagacatggaaactccattgagtgtctataggaaacttgcgaatggtccatatagctatttatttgaatcagttgaaggaggagagaattgggctcgatattctttgattggtttagaggcttcaaaaattatttctattaaaaagaatataatcgatattcaatcaaatggagaaattattgaatcttttaaagctgatgacccattagcatatatagacgaactgcaaagaagttttgaattaaagcaaaacaaaaatctacctattttcaatgggggcttggttggttattttggatatgattgtgttagatatattgaaaacaagttagttgattctgaaccaccagaccagatcggtactccagatgccttatttatgatttctgacgaagtggctgtctttgataacctgcaaaataaactacatctaattgttcttattgaatctcatgatgacgaagaacaagctaatgcccgattagatgaacttgaaaataagctaaaaataagcctaccttttgaagattttgtgaagccagttaaaagtattgaagaaaaagattttatctctggctttggcgagcaagaatttaagcattcagtacaaaaagctaaaaaatacattgaaagtggggacataatgcaggttgtttgttctcaaagaatgtctatcccttttaatgctgatccagtggctttgtatagatccataagacaattgaatccttctccttatatgtattatttaaatttaaaggaatttcatatagttggctcttctccagagatacttgcacgacttgaagatggaaaaataactgtaagacctatagctggaactcgcagaagaggaaaagacgacaaggacgatatggttatgcaagaggacatggttaatgatcctaag

SEQ ID NO: 278789 - DNA, 805 bp, Unknown
  Bacterial polypeptide expressing nucleotide sequence isolated from the Sargasso Sea
gatgtcctcgatgctcgttggttatttttcttatgatgttatccgttatattgaaaaaatacctaacgattgtaaagatgatcttaaagtgcccgatgttagattatcaagacctaaaaatttaattatttatgataatgtaaaaaaaaaaattttttatgtagagaatgtttatgcagatacaaaaattaaaaattataagaaagaatatcatgcgataaacaaaaggtttgatttgtatgaagattttgagaaaattaaactaccagaacaattcacatttagacctaacaagaatgtaataaagtcaaatacctcaaaagaaaaatttaaatcacttgttaaaaaagcaaaaacatacattaaaaaaggagatatttttcaagttgtattaagtcaaaggtttgagagaaagattaataaaaaacccattgaaatttacaattatttaagaaaatctaatccctcaccttttatgttttatttcaattacaaagattttaatattttaggtagtagtccagaaattttagttagacttagaagtggccaaataacaattagacctattgccggcacaagaccaaggggaaaaaataataaagaggataaaaaatatgaattagatcttttaaatgataaaaaagaattagcagaacatttgatgttattagatcttggaagaaatgatgttggaaaagtttcgaaggtaggtacagttaaagtaactgaaaagtttaaagtcgaaagatattctcatgtaatgcacattgtttctaatgtaataggtaaatttagtaacaaa

SEQ ID NO: 278790 - DNA, 888 bp, Unknown
  Bacterial polypeptide expressing nucleotide sequence isolated from the Sargasso Sea
atagggattcccaatcaattaccctcgatgtcctctatgcttgtagggtatttttcttacgatataattcgttatatcgaaaatattcctgacaaatgcaaagatgatcttaatatacctgatattagattagctagacctagaagcttagtaatttacgacaatttaaaaaagaaaattttttatattgagaatatttattcagatacaaagataaaaaattataaggaagcttataataatatcttgaaaaaatttgatttgtacgaacactatgagaatattaaattaccagaaacattaacctttaagaaaaataatagtccgatcaaatcgaatattactaaaaatagattcaagtttttagtaaacaaagcaaaaaattacattagaaaaggagatatttttcaagtagttttgagtcaacgttttaagagaaaattacaaaaaaaacctattgaaatttataactacttaagaaaatctaacccttctcccttcatgttttattttaattatgaagattttaatgtacttggaagtagccctgaaatacttgttcgtcttaggaaaaatgaaataacaataaggccaatcgcaggcaccagacccagaggaaaaaatagtattgaagataaaaaatatgaattagaacttttaaaagataaaaaagagttagctgaacatctcatgttacttgatcttggaagaaacgatgttggaaaagtagctaaaattaattcggtgaaagtaacagaaaaattcaaagttgaaaaatattctcatgtaatgcatatcgtctcaaatgttattggcaaatttaataataaattttctctatttgagacgttattatctggttttcctgcaggcacagtaagtggagct

SEQ ID NO: 278791 - DNA, 445 bp, Unknown
  Bacterial polypeptide expressing nucleotide sequence isolated from the Sargasso Sea
aatgactattggtagagtatgcaaagaaaactcaatcaccgtaccaaaaaaaatggttattgaaagatactctcacgtgatgcatattagctccaccattgaaggagaaataaaagataatcttgacgctttagacgccttagtttgcgcaatgccagctggaactgtttcaggagcgccaaaaattagagctatggagattattgaagaaatagaagaagaaaaaagaggattctactctggatgtgttggttatttttcaggaaatggtgatatgcaaacagccataactctcagaagtgcattaattaaaaatggcaaaattcattttcaatcaggcgctggagtagtttatgactctgttccagaaaaagaatatgaagaatgcctcaataaagttcaggttcttaaaaaagccttaaatggcatatataaatatctttaa

SEQ ID NO: 278792 - DNA, 928 bp, Unknown
  Bacterial polypeptide expressing nucleotide sequence isolated from the Sargasso Sea
aaaaaaaaaattataaaaggtagccctaaaaaaattcttgaaaatctaattgagatttttaaatttaaaactccaaaaaaattaccaccgatatgctcacttttatcaggttatttttcttacgatataattagatatatcgaaaaaattcctaatagctgtaaagatgatttaaaattgcccgatgtaagattgatgagacctaaaatattaataatacacgataattataaaaagaaaatatttttcattataaatgtttttaaagatgaaaaaataaataactataaaaaaaagtatgatgaaattaaaagtgaactaaataatttaaatattcaatctaaaataaaaaatgatgaaaaattaataaacaacaaaccaaaaaaaaatattattaaatccaatacatccaaaaataagtttattaacatggtcaaaaaagccaagaagtacattaaaataggtgatatttttcaagttgttttaagtcaaagatttgaagctaaactcacaaaaaaacccctcaacatttataaaaagttgcgtgttacaaacccgtcaccattcatgtttttttttaattttcatgactttcaaattattggggctagtcctgaaatattagttaggttacgtggtaagaaaattacaataagacctatcgctggtacaagaccgagaggtataaataagaaacaagacaaattttatatgaaagatttgcttaatgaccaaaaggaattagcagagcatttaatgcttttagatttaggtagaaatgatgttggaaaagtttctaatattaatactgttaaagttactgaaaagtttattatagagaaatattcacatgtaatgcatatagtttctaatgttgttggagtttttaataaaaaatactcaaaattcaaatcattacttgcgggat

SEQ ID NO: 278793 - DNA, 559 bp, Unknown
  Bacterial polypeptide expressing nucleotide sequence isolated from the Sargasso Sea
tgcgggaacaagaaaaagaggaaaatctattaatgaagatattaaattatctaatgatttattgaatgatgaaaaagaaatagctgaacatttaatgctattagatcttggaagaaatgatgttggaaaagttgctaaaattggtacagttaatgttactgagaaaatgattatagaatattattcacatgtaatgcatatagtctctaatgtagaaggtaaattagatttaaaatttgatgcaattgatgcattgatctcaggatttcctgcaggaactgtatctggagctcctaaaataagagcaatggaaattatagaagaattagaaaatgttagcagaagtttttatggaggtgccatgggatattttgattctaatggagacatggatacttgtatcagtttaagaactggattggttaaagacaaaaaattgtatattcaggctggaggcggaatagtttatgactccgatcctgaaaaagaatatcaagaaactattaataaagctaatgcactagtagttgcggcagaagactcttacaaatatgaataa

SEQ ID NO: 278794 - DNA, 427 bp, Unknown
  Bacterial polypeptide expressing nucleotide sequence isolated from the Sargasso Sea
aatgatacttggaaaagtttctaaaattaactctgttaaagtaaccgaaagttttaagatagagagatattcacatgtaatgcacatagtctccaatgttgaaggtgtatttaataaaaaatttggcaaatttgacacattattatctggttttcctgctggaacagtatcaggtgctcctaaaataagagctatggaaattattgacgaattagaaacaacgaggcgaaaagtttatgctggtggtattggttatttttctgcaaatggcgattttgatacttgtattgcacttagaacggcaatttcaaaagataaaaaattttatgtacagtctggagcaggaattgttgctgatagtaaaccaattaatgaatttaaagaaacagtaaataaagcaaaagctttaattaaggctttggagtaa

SEQ ID NO: 278795 - DNA, 466 bp, Unknown
  Bacterial polypeptide expressing nucleotide sequence isolated from the Sargasso Sea
atgctattagatctggggagaaatgatgtggaaaaagtgctaaaaattggctcagttaatgttactgaaaaaatgattatagaatattattctcatgtaatgcatatagtttctaatgtagaaggtaaattaaactcaaaatttgatgcaattgatgcattaatttcaggatttcctgcaggaacagtatcaggagctcctaaaataagagcaatggaaatcatagaagaattagaaaatgttagcagaagtttttatggaggtgccatgggatatttcgactctaatggagacatggatacttgtataagtttaagaactggattggttaaagataaaaaattgtatattcaagctggaggaggaatagtttatgactctgatcctgaaaaagaatttcaagaaactattaataaagctaatgcactagtatttgcggcagaagattcttataaatacgaataaa

SEQ ID NO: 278796 - DNA, 205 bp, Unknown
  Bacterial polypeptide expressing nucleotide sequence isolated from the Sargasso Sea
aaaaagaaaagtttatgcgggaggtattggttattttactgccgcaggtgagtttgatacgtgcattgctttaagaactgcaattgtaaaaggtggatatttatatgcacaagctggggctggaatagttgctgatagcaaacctattaatgaatatattgaaactgaaaataaagctaaagctttaataaaagcaatggagtaa

SEQ ID NO: 278797 - DNA, 874 bp, Unknown
  Bacterial polypeptide expressing nucleotide sequence isolated from the Sargasso Sea
cctgatttaaaaccatcaatcgatgaaatcccattttcaggaggaatggttggtttcagttcatttgatatgattcgtcattttgaaaaattaccagtacccgaagggaaggacggtattttaagtccatcagattgctcatatattgcaccgacatcattgctaatctttgatcatttggaaaataagatggcactgcttcattccggcaatgaggaggaaagaataaatttaagggatgaaatcttgtccctgctccgcaaggagatctctcaaagtcaaaaaaagaaaacatactcagaaccaatagcaaacatcaaaaaagaaatcttttacgatgctgttgaaaaagcaaaacaacatatctttgagggagacatttttcaaatcgttttatccattgcattttctggcagttatgatcttgacccatttgatgtttatcgagcaatgcgtttaattaatccatccccttatatgttctattgtgaatcagatggactgaagattgcaggctcctctcctgaggctctggttagactgggtggcaataaagcatctcttagaccaatcgcaggaacgaggccaagaggaaaggattcagaagaagaccagtcacatagaaaatcactgctcgcggatgaaaaagagattgcagagcatattatgttggttgatcttgcacgcaacgatcttggacgagttgcaaagcatggatcaattgaagtgaaaccataccaatcgatcgaatactatagccacgtgatgcatatagtcagcggtgttcaaggccatttagaagaagaaaaagatgcctttgatttatttgccgccgcctttcctgcaggaacattggttggcgctccaaaggtca

SEQ ID NO: 278798 - DNA, 376 bp, Unknown
  Bacterial polypeptide expressing nucleotide sequence isolated from the Sargasso Sea
gcatatagtcagtcaagttgagggaatcttaaaaaataatgctgatgtttgggatttgctcaaagcatcctttccggctgggacagttactggcgccccaaaaataagagctatgcaattgattaagcactttgaaaaagatgctagaggaccttatgctggtgtatatggatctattgatattaatggtgcattaaatacagcaattacgataagaactatgatagttaaaccttcaaaagatgggaaatatgatgtttcggtgcaagcaggagctggaatagttgctgattcttttcctgaaaatgaatatcaagagacgataaataaagcaaaggggatactaaaagcattagcctgtttggataataaatga

SEQ ID NO: 278799 - DNA, 760 bp, Unknown
  Bacterial polypeptide expressing nucleotide sequence isolated from the Sargasso Sea
tttagcaaaaaagtttcttgtacgaaaaaaaataatataaaagtaaaatcgaatatatctaaaaaaaaatttaaagatattgtcttaaaagcaaaaaaatatattgctaaaggtgatatatttcaagttgtacttagtcaaagatttgaatctaaacttactaaaacaccattagaaatttataaaaaactacgagttcaaaatccctcaccttttatgtttttttttaattttaatgattttcaaataattggtagtagccctgaaatacttgttaggcttagaaaaaacaagattacgataagaccaatagctggaactagaccgcgtggcactactaaaaagaaagataatttttataaaaaacaactattaaatgataaaaaagaattatcagagcacttaatgcttttagatctaggaagaaatgatactggaaaagtttcaaaaataaataccgtaaaagttacagaaaaatttcagattgaaaaatattctcacgttatgcacattgtttctaatgttgagggaacttttgataaaaaacattcactgcttgatacaatgctagctggttttcctgcaggaacggttacgggagctccaaaaatcagagcaatggaaattatagacgaattagaaaaatctaaaagaaaaatgtacgctggctctattggatacttttcatctaataaaaattttgacacttgtatagctttgagaactgcccttataaaaaacaataaattctatatacagt

SEQ ID NO: 278800 - DNA, 310 bp, Unknown
  Bacterial polypeptide expressing nucleotide sequence isolated from the Sargasso Sea
aaatttggtaaatttgatactttattggctggttttcctgctggaactgtctcgggtgcaccaaaaataagagcaatggaaattattgatgagttagagacaacaagaagaaaggtttatgcgggagggattggttatttttcagcaaacggcgattttgatacatgtattgcacttagaacagcaatttcaaagaataaaaagttttatgtacaatcaggagctggaattgttgcagatagtaaaccgattaatgaattcaatgaaactgttaacaaagcaaaagctttacttaaggctttagaataaa

SEQ ID NO: 278801 - DNA, 784 bp, Unknown
  Bacterial polypeptide expressing nucleotide sequence isolated from the Sargasso Sea
ccaaagggaaggatggtatttaagtccctcagattgctcatatattgcgccgacatcattgctaatctttgatcatttggaaaacaagatggctctgcttcattgcggcaatgaggaggaaagaataaatttaagggatgaaatcctatccctgctcagcaaggagatcactcaaagtcaaaaaaagaaaacatactcagaaccaatagcaaacatcaaaaaagaaatcttttacgatgctgttgaaaaagcaaaacaccatatcttcgagggagacatttttcaaatcgttttatccattgcattttctggcagttatgatcttgatccatttgatgtttatcgagcaatgcgtttaattaatccatccccttatatgttctattgtgagtcagatggactgaagattgcaggttcttctcctgaggctttggttagactgggtggcaataaagcatctcttagaccgattgcaggaaccaggccaagaggaaaagattcagaagaagaccagtcacatagagaatcactgctcgaggacgaaaaagagattgcagagcatattatgttggttgatcttgcacgcaatgatcttggacgagttgcaaagcatggatcaattgaagtgaaaccataccaatcgatcgaatactatagccacgtcatgcatatagtcagcggtgttcaaggccatttagaagaagaaaaagatgcctttgatttatttgccgctgcctttcctgcaggaacattggttggtgccccaaaagtcagagcaatggaa

SEQ ID NO: 278802 - DNA, 856 bp, Unknown
  Bacterial polypeptide expressing nucleotide sequence isolated from the Sargasso Sea
aaaattaccatcaatggcctctatgctagttggatatttttcttacgatataattaggtatattgaaaaaattccagacaaatgtaaggatgatttaaaaatcccagatgttagacttttgaggccaaaaaatctaataatttatgataatttaaaaaaaataatttattatatagaaaatatttatggtgatgaaaaaatcaaagattattttgaaaaatatcgcaatatcaaattaaattttgatttatatagaaactatgaaaaaattaaaattcctttgaggttaacttttaaaaaaaataataataaaattaagtctaatatatccaaaaaacgattcaaaaatatagttagtaaagcaaaaaaacatattgttaaaggcgatatttttcaagttgttttgagtcaaagatttgagagaaagtttaaaaaaacacctttagagatttacaatcatttaagaaaatcaaatccttctccatttatgttttattttaattttgaagatttcaaggttttaggtagtagtccagaaatattagtaagattaagaaacagcaaaataacaataaggcctattgcgggcacaaggccgagaggtaaaaataagtcacaagaccaaaaatataagaaagaactattgtctgataaaaaggagttagccgaacatttaatgttgcttgatcttggcaggaatgatgctgggagagtttccaaaacaaattcagtaaaagttactgagagtttttcggtagagaaatattctcatgtgatgcatatagtatctaatgtggttggaaattttgataaaaaaatgtcaatttttgagacccttctttcaggattccctgct

SEQ ID NO: 278803 - DNA, 649 bp, Unknown
  Bacterial polypeptide expressing nucleotide sequence isolated from the Sargasso Sea
gctaatctttgatcatttggaaaataagatggcactacttcattccggcaatgaggaggaaagaataaatttaagggatgaaatcttgtccctgctccgcaaggagatcactcaaagtcaaaaaaagaaaacctactcagaaccaatagcaaacatcaaaaaagaaatcttttacgatgctgttgaaaaagcaaaacaccatatctttgagggaaacatttttcaaatcgttttatccattgcattttctggcagttatgatcttgacccatttgatgtttatcgagcaatgcgtttaattaatccatccccttatatgttttattgtgagtcagatggactgaagattgcaggttcttctcctgaggctctggttagactggggggcaataaagcatctcttagaccgattgcaggaaccaggccaagaggaaaggattcagaagaagatcagtcacatagagaatcactgctcgcggatgaaaaagagattgcagagcatattatgttggttgatcttgcacgcaatgatcttggacgagttgcaaagcatggatcaattgaagtgaaaccataccaatcgatcgaatactatagccacgtcatgcatatagtcagcggtgttcagggccatttagaagaagaaaaa

SEQ ID NO: 278804 - DNA, 553 bp, Unknown
  Bacterial polypeptide expressing nucleotide sequence isolated from the Sargasso Sea
cacgaggaattaataatttcgaaagattcaaaatttgaaaaagatctattaaatgatgagaaagagttatcagaacatcttatgttgctcgatctaggtagaaacgatgttggaagagtttcacgaattaactctgtaaatgttactgaaagctttgttgttgaaaaatatagtcatgttatgcatatagtttcaaatgtcgagggaagccttttaaagggagtcgatagtatatcagctttactgtctggtttaccagctggcaccgtatcaggcgcacccaaaattagagctatggaaataattgatgaattagaaaaagaaaaaagaggtatttttggtggggggataggttactttgcagcgtctggacaaatggatttttgcatagccattcgtacggctattcttaaagataaaatattgtatgtacaatctggaggtggtgtcgtttacgacagtaaccccgaagctgaatatcaagaaacattaaataaagctaaagcattaattagagcggcagaagatgctatacattttgtaggaaattgaa

SEQ ID NO: 278805 - DNA, 247 bp, Unknown
  Bacterial polypeptide expressing nucleotide sequence isolated from the Sargasso Sea
ctactttgaaaaagatgctagaggaccttatgctggtgtttatggatctattgatataaatggtgcattgaatacagcgattactataaggaccatgatagttaaaccttcaaaagatggaaaatatgatgtttcagtgcaagcaggcgccggaatagttgctgattcttctcctgaaaatgaatatcaagagacaataaacaaagcaaaggggatactaaaagcgttagcctgcttgaataaataa

SEQ ID NO: 278806 - DNA, 172 bp, Unknown
  Bacterial polypeptide expressing nucleotide sequence isolated from the Sargasso Sea
acagcaaatcaagaatttgatacctgtatagccttaagaaccgctctaataaaaaataagaaaatttatgttcaggctggtgctggaatagtcgctgatagcaatcctaaaaatgaatataatgaaacggtcaacaaagcgaaagcattgctcaaagcagcaataaattaaa

SEQ ID NO: 278807 - DNA, 649 bp, Unknown
  Bacterial polypeptide expressing nucleotide sequence isolated from the Sargasso Sea
tccctcgccttttatgtatttttttaattttaatgattttcaaattattggcgccagtcctgaaatattagtgagattgagaaataatagagtaacaataagaccaatagcgggcacaagaccaaggggtaaaaataataaagaggatttatttttcgaaaaagatttattaaaagacaagaaagaactgtcggaacatttaatgctcctggatttgggaagaaatgatactggaaagatttcaaaaattaatactgtgaaggttactgaaagttttaaagttgaaagatattctcatgtaatgcatatagtctcgaatgtagaaggtgaatttaataataaattcagtaaatttgatactttgttgtcgggttttccggctggtactgtttcaggagctccaaaaattagagctatggaaataattgacgagttagaaaatactagaaggaaagtttatgcaggtggtattggttatttttcagcaaatggcgattttgatacatgtattgcactaagaacagctattgcaaaaaataaaaaattttatgttcagtctggtgcgggaattgtttcggacagcaaacccttaaatgaatataaagaaactgtaaataaggctaaagccctaatcaaagctttagaataa

SEQ ID NO: 278808 - DNA, 922 bp, Unknown
  Bacterial polypeptide expressing nucleotide sequence isolated from the Sargasso Sea
ttgggaatttaataataataattcttatctaattcaaaaaaataaaaaaagaaaattaaatgataaaccagataaattaattgaaaaaatcattgaagatttcaagtttgaaactccaaaaaatttacctaatatttgctcattaatctctgggtatttttcttatgattcaattagatacatagaaaaaattccaaataattgtaaaaatgatctgaatttgccagatgttagacttcttcgtccaagaactttagtcattcatgatgatttaaaaaaagaaattttttatatatctaatatttttaaagatgaaaaaattaaaaactataaaaataaatatgaagaaattaaatctgatttgtttaaattacttattcagtcatcaattaaaaatattggtaacaaaataattcaaaaatcaaaaaatataaaagtgaaatctaacacttcaaaaaataaatttttatcaatggttaacaaggcaaaaaaatatattaaattaggagatatttttcaggttgttttaagccaaagatttgaggcaaaattaacgaagaaaccaatagatatttatagaaaactaagagtaacgaacccttctccttttatgtttttctttaattttgatgattttcaaataattggtgcaagtcctgaaatacttgtgagactcagagataataaaattactgtaagaccaatcgcaggaactagaccaaggggtaaaactaaaaaggaagatcttttttatgaaagagatctacttaaagataaaaaagaactttctgagcatttaatgttacttgatttgggtagaaatgatgctggtaaagtctcaaagataaattccgtaaaagttacagaaagctttattattgaaagatattctcatgttatgcatatagtttcaaatgtgatt

SEQ ID NO: 278809 - DNA, 186 bp, Unknown
  Bacterial polypeptide expressing nucleotide sequence isolated from the Sargasso Sea
ttcagggggaaatggatttggcaataaccattagaactggcgttttaaaagatggtttgcttactgtccaggctggggcaggaatagttgctgattctgtgccagaaaatgagtggctagaaagtgagcaaaaagccctggcagttttaagagcagcagaaatggttgaaaaaaatttatggtaat

SEQ ID NO: 278810 - DNA, 877 bp, Unknown
  Bacterial polypeptide expressing nucleotide sequence isolated from the Sargasso Sea
gatgaactgccaccctttacgagcggagcaattggttatgcggcgtacgatgcaattcgttatgcagagcatcttccacatacacctccggatgaccttggcttacctgacatttattttgcactttacgatcaactcgttgtctttgatcatgtttcaaaatctatcgacgtcgtcgccttagcaaaacccactgcgaaatcacccgaggccatcaaatccgcttatgaatctgcaaagatgtgcgtgaatcagaccatcgaaaagctcaagcaggattgtgcttggccacctcttcatgacataagttcactcaacagcccaagccaaatgacacaggagaccatcactgctaatcgaagtcgtgacgactatttagaagctgttgagaaagcggtcgactacattcatgctggcgacatctttcaggtagtgctaagccgtcggctctcaataccatttgatgactcaccgcttgaactctatcgaacacttcgtgttgtcaacccgagtccgttcatgttctgcctccgcacaccatcggcaacactcgttgggagttcacccgagattatggttcgcgttatggacagaaaagtcacagtaaggcctctcgcaggcactcggccgcgcggagcaacccctgaagaagatgttgaacttgctgatgggctcctagcagacccaaaagaacgtgctgagcatatcatgctcattgatctcggtcgaaatgatatcggacgagtctcagaacttggctctgtcgaactcagtgacatcatgaccatcgaacggtatagccacgtcatgcacataacgagcaacgtcaatggcaaactccgacctgaggctactgctttcgacgcacttcgggcgt

SEQ ID NO: 278811 - DNA, 199 bp, Unknown
  Bacterial polypeptide expressing nucleotide sequence isolated from the Sargasso Sea
aaagtatatgcaggaggaattggatatttttctgcaaatggagaatttgatacatgcatagccttaagaactgcagttgctaaaaataaaaaattctatgtacaagcaggtgcaggtatagttgcggatagtaaacctaaaaatgaatatgaggaaacagttaataaagcgaaagctttaattaatgctttaagataat

SEQ ID NO: 278812 - DNA, 775 bp, Unknown
  Bacterial polypeptide expressing nucleotide sequence isolated from the Sargasso Sea
atcgggcttacctaagtttaccggaggtttagttggttatttttcttacgactgtataagaatgattgagaacagattgatcaattctgaacccgtagatcttttacaaacacctgatgctttgctgatgatttcagaagaagttgctgtttttgataatttaaagaacagattacacttgatcgttatggttgagagtgaggatgaagaaactttagttaaagccgaatcaagactcgatgaattagagcaaaaactaaaagaaaattatcaatttgaagaattctctaaaccaaatgattctgtagaggagtctgactttgtttcaagttttggagaaaaagaatttaaatctgctgtaaatagtgtcaaggagtacataaagaatggcgatgttatgcaagttgtttgctctcaaagaatgtcgatcccatttaactctgatccagttgcattatatagagctgttagatacttaaatccttctccttatatgtactatctgaatttaaaagatttccatatagttggatcatctccagagatattagctaggttagaagatggagatgtcactgtaagacctattgcaggcactagaagaagaggaaaaaacaatgaagatgatctgaatatggaaaaggatatggttaatgatcctaaagaaatagctgaacatttaatgttaattgatcttggtcgtaatgatgtaggcaggatcgctgaacctggtacagttgaggtaacagagaaatttggtattgagagatacagt

SEQ ID NO: 278813 - DNA, 172 bp, Unknown
  Bacterial polypeptide expressing nucleotide sequence isolated from the Sargasso Sea
ttcacgcccagtcaagattttgatacttgtatagctttgagaacggccttaattaaaaacaaaaagatttacgttcaagctggtgccggaatagttgcagatagcaatcctaataatgaatataatgaaacagtaaataaagccaaagcattgctaaaggcaataaattaaa

SEQ ID NO: 278814 - DNA, 850 bp, Unknown
  Bacterial polypeptide expressing nucleotide sequence isolated from the Sargasso Sea
aataaagggtctaagtttaaagaacatatgcctgagatctatctagtgaaagcagaaaaattgattgtttatgacaattctgaccaatctattcaaatagttgtgaatacaaatccattagaaagctcatatgaacaggcagaggcaacaataaaagaattagaagtattattaagcaatgattcggaagattctaaagataacttcagcaaactcaccggagaactagtttttgattctaattttttaaaagatgattatctaaatgcagttgattcagtaaagaaatacattaaagagggtgacgtcatgcaggttgttctggcccaagatttttctttgccatttaataaaaatccatttgatctatataaagctctaagagcactaaatccatcaccatatatgtattatcttgatcttgaggaatgtcaggttgttggtgcatctcctgagatattaataaggcttgaagaaaataaagtaaccttaagacctattgctggcaccagaaaaagaggcaccaatcctgaagaagatttagccaacgaaaaagatttattaaacgatcctaaggaaattgctgaacatctgatgttaattgatcttggaagaaatgatgttggcagagtatctgaaattggttctgtaaatgttacagacaaaatgataatagaaaaatattcacacgtaatgcatatcgtttcaaatgtagaaggaaatctatctgaagatttagattatatcgacgcgctcaaagcaactttgcctgcaggtactttatcaggagctcccaaaatacgagccatgcaaattattaacgaattagaacctagtctagaggcattat

SEQ ID NO: 278815 - DNA, 448 bp, Unknown
  Bacterial polypeptide expressing nucleotide sequence isolated from the Sargasso Sea
agggtctgtcagcccgaaagcgtggcagtgcaagacctgatggtgatcgagcgctactcccacgtgatgcacatcgtcagccaagtcgaaggacgcctcgggccggcacacgacgtgtgggatctgctgatggcggcgttccccgcaggcacagtcagcggcgcaccgaaaatccgggcgatgcaactcatccacgagcttgagcccgatgcccgtggtccctattccggggtctacggatccgttgatctggccggggccctcaacacggcgatcacaatccgcaccatggtggtgcaacccagtgatggcgggggatgccgggtgaaagtgcaggcaggagccggcgttgtggccgattcacagccgacggcggagtttgaggagaccctcaacaaagcccggggaatgctgacagcactggcgtgcctgaatccaccgggatgac

SEQ ID NO: 278816 - DNA, 248 bp, Unknown
  Bacterial polypeptide expressing nucleotide sequence isolated from the Sargasso Sea
aaaaataagagcaatggaaattattgatgaattagaaaaatcaagaagaaaagtctatgctggtggaattggatatttttctgcaaatggagaatttgatacttgtatcgctttaagaacagcagtggcaaaaaaagataaattttatgttcaagctggagctggtatagtagcagatagtgttccaaaaaaagaatatgaagaaacagtaaataaagctaaagctttaattaatgcattaagataat

SEQ ID NO: 278817 - DNA, 496 bp, Unknown
  Bacterial polypeptide expressing nucleotide sequence isolated from the Sargasso Sea
aatgacaaaaaagaaaatagctgagcataatatgttggttgatttacatagaaacgatttaggaaaagtagctaagtttggaactgtgaaagttcgaaatttaatggacataaaaaagtattcacatgttcaacatatttcatcggaaattgctggtattattgatgaaaaagaggatatgttttctgcattagcatcaaattttcctgctggaactctttctggtgctcctaaaattgaagcaatgaagataataaacgaaattgaaaaagaaggacgaggtccttatggaggtgcaattggtcaatttggatttaatggagactgcacgtttgcaatacctattaggtctatttttataaaaggtgaggaagcttttgctcaaacttgtggtggtaatgtatacgattcagatccagacaacgaatatttagaaatagaaagaaaattagcggcaatgaaatctgttttagactcttttaaagataatttgtag

SEQ ID NO: 278818 - DNA, 868 bp, Unknown
  Bacterial polypeptide expressing nucleotide sequence isolated from the Sargasso Sea
tttgggatatccaatgattcaatatatggaaaaaatttcattaaaaaataatgataatataaatatacctgactctattttgattaggccaaaaattgtcgcagtttttgataatataaaagatacaatcactgtgatgacagcagtttatccaaataagaaaaaaaattatgaaacagaatttattcaagcacaagatttattagagtcaaaagtaaatcaactgaaagaaaatctcgttcaagaacctgttagtcaaattaaatcaaatttaaaatttatatctaattattctaaagaggggtatttttcgattatttctaaggccaaacaatacattagggaaggtgatatttttcaagttgttacttcccaaagatttgaaactgaatatgatctcgaggcagtgagtctttatagatcattaagaaggctaaacccatcaccctatctagtcaatttaaactttaatggaattggtctagtggcttctagccctgaattacttgttcagttaagaaataaaaaaataaccataaggcctatagcggggacaagaaaaagaggtaaaaatgcaaatgaggatctaaaattatcaaaagatttactacaagatgaaaaagagaaagcagaacatttgatgctgctagatctaggaagaaatgatgttggaagagttgctcagaataaatcagtaaaagttacggagaaaatgataatagaatattattctcatgttatgcatattgtttcgaatgttgaaggattaatagatgataaatatgatgcagttgatgcccttatggctggtttcccagcaggtactgtatcgggcgctccaaaaattcgtgctatggagataaattga

SEQ ID NO: 278819 - DNA, 339 bp, Unknown
  Bacterial polypeptide expressing nucleotide sequence isolated from the Sargasso Sea
agaaggaagtaaaaaagaaagatttaagctttattgatgttttaaaatctgctctcccggctggaactttgtctggagcaccaaaaataagagccatggaaattattaatgaattagaaccaagctcaagaggcatatatggaggagcaattggtcatatatcttgggatggagacattgatacagcaatagctattagaactgcagtcattaaaaataataaaattcatgttggagctggagcagggattgtggctgattcaatacccgagaatgaatggagtgagtgtcttcaaaaggctcatgttttcttagatgccattgagataattaaatgat

SEQ ID NO: 278820 - DNA, 134 bp, Unknown
  Bacterial polypeptide expressing nucleotide sequence isolated from the Sargasso Sea
aagaactgcggttgctaaaaataaaaaattttttgtgcaagcaggtgcaggtatagttgcagacagtaaacctaaaaatgaatatgaggaaacagttaataaagcgaaagctttaattagtgctttaagataat

SEQ ID NO: 278821 - DNA, 922 bp, Unknown
  Bacterial polypeptide expressing nucleotide sequence isolated from the Sargasso Sea
gaagatacaaaaaaagaatgctatgaaaggattgaacttattcataaaaaaattttagagcctctaccttctcaaaaaccatccaagaaaggagttatcaactttgaatcatctgtaaaaaaagaggattatcttgaagctataagaaagataaaaaattatattgttgaaggagatgtcatgcaggttgtctacgggcaagaattctccacaaaatttgaaggatcgccaatcgatttatatagatctttgcgaaagctgaatccttctccttatatgtatctcatgaagattgatgatttacatattgtaggagcctctccagaaattttagtaagacttcaaaacgaagaggttacagtgagaccaatcgctggaaccgtaaaaagaggaaaagatagcaaagaagataaagagttggctgacaagttaaaaagtgatccaaaagaaatagctgagcatcttatgcttattgatttaggaaggaacgacgtcggaaggatagctgaggtcggcagcgttaaaactacagaggagatgaaaattgagaaatattcacacgtcatgcatcttgtatcaaatgttgtaggaaaaataaaaaaaggacttacttctattgatgttttaaaagcgacttttccagcgggtactttatctggtgcaccaaaaataagagcaatggaaataattgatgagcttgaacccgatagaaggggagtctatggaggagctgtaggttatttatcttggactggaaatatggatgtcgcaattgcaataagaacagcagttattcaagggaaaaatcttagtgtcagagctggtggaggtattgtttatgattctgatccagagagcgagtatcaagagtcattgaataaagctatgtccattatgaaagctgttgaggagatggactaat

SEQ ID NO: 278822 - DNA, 1006 bp, Unknown
  Bacterial polypeptide expressing nucleotide sequence isolated from the Sargasso Sea
aaagattttgatatacctgatgtttattatggcctatatcaaaatattatagcaataagtcaatttaatcatgaagctcatcttttttgtaatacaattgaaaaatcatcaaatattgatactattgaaagtataataaataacaaaagcttctcggtatttgattttaaaaaaattggtaaatctgagtctgaaattacagatgaggaatatatcgaatatgtcaataaggctaaagaccattgtaaaagaggtgacgtattccaacttgttctatcaagaaggtatactcaaaaatttaagggtgatgaatttaatgtttacagagctttaaggtctataaatccttctccatatttattcttttttgattatggtgattataagatttttggaagctcacctgaggcccaaatagtaattaataataggaaagcagaaatacatcccattgcaggaactttcaaaaggactggaaatgatgaaaaagatcaaattaatgcaaaagagttagcaaaagatccaaaagaaaattcagaacacatcatgcttgtagatttagctagaaatgatctcagcagaagtgggaataatgtaaaagttgaaaaaaatagagagattcagttttattctcatgtaatccatttagtttcaaaagtaactgcagatttgaaaaaaaatataaagtcttatcaagttgtggaagacacttttccagctggaacactatctggtgctccaaaacataaagcattagaactaattgaaaaatatgaaaaggttaataggaacttctatggaggagctattggatttattgattttgatggaaactttaatcatgcaattattattagatcattctttagtaaaaacaatattttaaattatcaagctggtgctggaatagttattgattcagatccagaaaaagaattagaagaagtccaaaataaattaggagcattagataaagctttaattgaagctgaattgataaaatgaa

SEQ ID NO: 278823 - DNA, 1399 bp, Unknown
  Bacterial polypeptide expressing nucleotide sequence isolated from the Sargasso Sea
tatgaaaataaagattaatacatatcacaaaaaaattatagctgatactataacccctgttgaagtgtatctcaaaataagagatagatttccaaatagtatattattggaaagcagtgactatatgcaaacagctaacaacttttcatttatttgttttaatcaaactggtttttttgaattaaaaaacaacttaattaatttaaaatatccaggcgaaaaaactaaagaaattccattaactaataaatctatatccgaatatttaaataattatataaacgggtatgatgtgaaaaaatctaaaacaaaatttatctcaaatggtttatttggatatatgtctcacgaatcggttaaatatcaagaaaaaataaagttcagtgaagataaggatgatctggatatacctgatatttattatggattttaccaaaatattatagccattagtttattcaaccatgaggcacatatttattgtaactcttataatggtgaaaataatataagagaggttgaagacatagttaatgctaaaaattattcagtttttaattataaaaatattggtaataagacttctaatataaatgatgatcagtacatagaatatgtaaaaatagcaaaggaacattgtaaaagaggtgatgttttccagcttgttttatcgagaaggtttaatcaaaattttgagggagatgaatttaatgtatacagagcactgcgctccataaacccatcaccatatttattcttctttgattatggtagttttaaaatttttggaagttctccagaagcacaaataattattaacaatggtaaagctgaaattcatccaattgctggtacattcaaaagaactggtgatgataaaagagataaagaaaaagctaatgccttatctaaagatccaaaagaaaactcagaacatataatgctagttgatttggctagaaatgatttaagtagaaatggcaccaacgttaaagtagaaaaaaatagagaaattcaattttactcacatgtaatacacttagtatccaaagtaaccgcaactttaaaagatactgctaaaatatttcaagtggtaatggatacttttcctgcaggaactcttacaggtgccccaaagcataaagcattaaatttaattgagaaatatgaaaaagtaaatagaaacttttatggtggagcaattggatatatggactttgatggaaatttcaatcatgcaatcattataagatcttttataagtaagaacaatacacttagttatcaggcaggtgctggtatagtaataaagtcaaatcctgaggatgaactacaggaagtatataataaactgggagctttagacaaagcacttaaaaatgcagaagatatcgtatga

SEQ ID NO: 278824 - DNA, 973 bp, Unknown
  Bacterial polypeptide expressing nucleotide sequence isolated from the Sargasso Sea
cctgtatcaaaatattatagcaataagtcaatttaatcatgaagctcatcttttttgtaatacaaatgaagaatcatcaaatatcgatactattgaaggtatactaaataacaaaagcttctcagtgtttgattttaaaaaaattggcaattctgagtctgaaattactgataaagaatatattgagtatgtcaataaggcaaaagaccattgtaaaagaggtgacgtcttccaacttgttctatcaagaaggtatactcaaaaatttaagggtgatgaattcaatgtttacagagcattaaggtctataaatccttctccatatttattcttttttgattatggtgactacaagatttttggaagctcccctgaggcccaaataataattaataatagaaaggcagaaatacatcccattgcaggaacattcaaaaggacaggagatgatgaaaaagatcaaatcactgcaaaggagttagcaaaagatccaaaagaaaattcagaacatataatgcttgtagatcttgccagaaatgatcttagcagaagtggaaataatgttaatgttgaaaaaaatagagagattcagttttattctcatgtaatccatttagtgtcaaaggtaactgcaacattaaaagaagggataaagtcttatcaggttgtagaagatactttcccagctggaacactttctggtgcaccaaaacataaagcattagaactaattgaaaaatatgaaaaagttaatagaaacttctatggtggggctattggctttattgattttagcgggaactttaatcatgcaattattattagatcattctttagtaaaaacaatattttaaattatcaagctggtgcaggaatagttattgattcagatccagaaagagaattagaagaagttcaaaataaattaggagcgttagataaagctttaattgaagctgagttgataaaatga

SEQ ID NO: 278825 - DNA, 1249 bp, Unknown
  Bacterial polypeptide expressing nucleotide sequence isolated from the Sargasso Sea
atgattacaaaagaagaatataacaactttaaagatgctaattttacggttcttcctattagtagaacagtttcagctcctggagatacgcctctatctttgtattcaaaaatatcagatcaaaaaaataattttttattagaatcagtagaagggggagagagatgggctcagtattcaattattggatttggctgccttgataccattaaagtttcaggcaacacaattgaaacattaataaatggagtcagtaataaatgtaaagttgaaaatcctttgttagctattcaagaaataacttctcaacatctatcaccaaacttagaacacctgccaagatttcatgggggctatgttggtttttttgcctatgaaagctctcaatatgcagaagctaaaatagccatgctgcctgaaaagggatctaaatttgccgagcacatgcccgatatcatgttagttaaagctgaaaagcttatagtctttgataatttgaataattcaacccaaattatttttaatgcctgtcttcaaagcatgacttatgagtttgcttgctcacaattagatgaaattgaaaaccttatctctaaaccaatatctttagaggctgataactttaaagagataacaaacacatttgaatttcactcaaattttacaaaggcagaatatcttgctgctgtcagtaccataaaaaattacatcgcagaaggcgatgtgatgcaggttgttttagctcaagatttttcagcaaattttgatcttgacccctttgatttatacaaagcaataagagagttgaacccttctccatacatgtattatttaaatttagatgaatgtcagattgtaggtgcatctccagaaatcttagtaagactagaaaatcaagaagtaacactcagacccatggcaggtacacgaaagagaggaaaaaatttagtagaagataaatccaatcaatctgaattactcaatgatccaaaagaaatagccgagcatcttatgcttattgatctgggcagaaatgatgttgggcgcgtatctgaaatcggatcagtgaaggtaacagctaaaatgattgtcgaaaagtactctcatgtaatgcatatagtatcgaatgtggtgggaagattgatatcaggattaaattattttgatgttttaaaagcagcattgcctgctggaacattatctggcgcgcctaaaataagagcgatggaaataatccatgagctagaac

SEQ ID NO: 278826 - DNA, 850 bp, Unknown
  Bacterial polypeptide expressing nucleotide sequence isolated from the Sargasso Sea
attgtctaaagatgataaactaacttatcatttccctagagaaaaatttataaagtctgttggtgttgcaaaaaagtatattacaaatggtgatgtaatgcaggttgttttatctcaaagaatttccatagatttcaaagagtgtccaattgaattttatcgtgaattacgaaaactaaatccgtctccgtatatgtattatcttaactttggagactttcatattataggctcatcacctgagatattggtaagattagaaaatgatactataacagtcagaccgatagctgggacaagacccagaggtaagaccgaagctgatgatacaaaactcgaaaaagacctgcttaacgatcctaaagaaattgctgaacatcttatgttaattgatcttggtagaaatgatgtgggacgagtatcagagattggttctgtcagactaactgataaaatgattattgagaagtactctcatgtaatgcacatggtctctaatgtcacaggtaaagttttaaaaacagttggtatcattgacgtgctcaaggcgtcttttcctgcgggtaccgtctctggagcccctaaaataagagcaacggagatcatctacgagttagagccacttaaaaggggaatatacgccggggctattggatatttaggttggaatgggaatatggatactgctatcgctataagaacttgtgtgataaaagataacaagcttaatattcaatgtggtgctggaattgtgtatgattctgtcccagaattagaatgggaagagacaattaacaagggcaaagctattatacaagcatataataatactagaaatagacagaaatga

SEQ ID NO: 278827 - DNA, 502 bp, Unknown
  Bacterial polypeptide expressing nucleotide sequence isolated from the Sargasso Sea
gaagatgatcttctaaatgatcccaaagaaatagcagaacacttaatgttaattgatcttggtagaaatgatgttggaagggtttcagagattggaacagtcaacgtgactgaaaaaatgatcattgaaaaatattcacatgtgatgcatatagtttctaatgtggttggaagactaaaagcaggacttacttcttttgatgttcttaaggcagcattgcctgcaggcacattatctggtgccccaaagataagagctatggaagtgattaatgaattagaacctagctcgagagggatatatggtggtgcaataggatatgttggatggaatggcaacatggacacagcaattgccattagaactgctgttataaaagacaaaaaaatacatgttggtgcaggggctggcattgtggcagattcaattccagagaatgaatgggaagagtgcaaacaaaaatctaaggtatttattgatgctatggagatgatttcatgat

SEQ ID NO: 278828 - DNA, 295 bp, Unknown
  Bacterial polypeptide expressing nucleotide sequence isolated from the Sargasso Sea
aaagcgacattaccagccggcactttatctggagcacctaagattagagcaatggaaataattaatgaattagagccaagctcaagaggtatttacggaggtgcaataggatatatttcttggaatgggaatattgatactgctatagcaatacgaactgcagttattaaagacaactttatacatgttggggctggtgcgggtattgttgctgactcaaatcctgaaagtgaatgggaagagtgtcttcagaaatcgagagtatttcttgatgctatggagatgatttcatgat

SEQ ID NO: 278829 - DNA, 1384 bp, Unknown
  Bacterial polypeptide expressing nucleotide sequence isolated from the Sargasso Sea
atatcatgtttattaaagttaaaaaaaaatcagaaatattcatttttattagaatcagttgaaggaggaagtctgagaggtagatattcactccttggctgcgatcctgatatagtttgggaagttaaaaataataaagcatctataacttatctagataataattatgattatgaaatatcagaaaagccaatagaatctcttaaaaacctaatagaaaattcaaaatttgataaaggagaaatagaagtgccttaccccattcttgttggttatttaggttatcccatgattcaatatatggaagaaataaatctaagaaatacagataatataaatatacctgactctgttttaataagacctaaaatagtaactgtatttgataacattaaggatagcataactgtgatgacagttgtgtatccttgtaaagataaagatttggagagtatttatgacaatgctcaagaaattttggaagaaaaagtaaatcaattaaaagaaagtttagtacagacaaaaaaaaatcaaatacaatcagatctgaactttatatcaaattattctaaagaagaatatttttcaattatttcacaagcaaaagaatatattaaaaaaggtgatattttccaggttgttacttctcaacgatttgaaacaaattatgatttagaagcaataagtttgtatcgatctctaagaagattaaacccctctccctatttagtaaatttaaactttgataactttggtttagttgcttcaagtccagaattattagttcaactaagaaaaggaaaggttactataagaccaattgctggaactcgtaaaagagggaagaatgcaaatgaagatcttgaattatcaaaagatttacttgaagatcaaaaagaacttgctgaacatttaatgcttttagacttaggaagaaatgatgttggtagagtggctaaaaataaatcagtaaaggttacagaaaaaatgataattgaatattactctcatgttatgcatattgtttcaaatgttgaaggagtcattgatgaaagatacgatgctgtagatgcattaaaagctggctttccagctggaacagtctcaggtgctccaaaaattagagcgatggaaataattgaagaacttgaaaatctaaatagaagtttttatgctgggtgtatgggatattttgatgcaaatggagatatggacacatgcataagtttgagaagtggattagtaaaagacaaaaaactttatgtccaagcaggtggtggagtagtttatgactcaaaccctgatgatgaatatcaagaaacactaaataaagctagagccttgatggctgcagctagagactcttacaaatataatcaatgat

SEQ ID NO: 278830 - DNA, 1150 bp, Unknown
  Bacterial polypeptide expressing nucleotide sequence isolated from the Sargasso Sea
aatgagtctagaaaaaaaaaattttataagtcaatataacaaaggcttacctcagatattaaaaaaaaatcttattgctgatattgaaacaccattttcatcattattaaaaattagtaaatcagaaaaatattcctttctattagagtcagtagagggtggaagtaaaagaggacgttactcattacttggttgtgatccagatttaatttggacagttgaaaaaggtaaggcaaaaattaaatatttggatcataattttgattataaactagatcaaaagccaattcatagtcttaaagaacttgtaaaaatttcaaaatttaaaaataatgaaattgacgttcctttcccaacactagttggatatctaggatatccaatgattcaatatattgaaaaaattaaactaagtaataaggacaatataaaaatacctgatgcaattttaatcagaccaaaaattgtcgcagtttttgataatattaaagatattatttcccttatgacagttacgtatccaagtaaaaaaatctcagcagaaaaagcctatagaaaaaataaattacttattgataaaacaattaaaaagttagaaaaaagtattttaaaacctgcgcaaaagaaaaataaaaaatctaaattaaaatttaaatcaaatttcaagaaagaacaattttataaaattgtaaataaagcaaaagaatatattaaaaatggagatatcttccaagttgtgccttcacagagatttgaaacaaaatataatttaaaggcagtcaatctttatagatcgttaagacgactaaatccatctccttatcttgtaaatcttaacttcgataaaattggccttgttgcatctagtccagaattaatggttcaattaagaaacaaaaaagttacgataagaccaattgctggaacaagaaaaagaggaaagaatgcctctgaagacctttatttatctaatgacttactgaatgataagaaagaactcgcagaacacttaatgcttttagatttaggaaggaacgatgttggtcgcgttgctaaaaaaggaacagtgaatgttactgaaaagatgattatagaatactactctcatgtaatgcatattgtttcaaacgttggagggaaaaatagataa

SEQ ID NO: 278831 - DNA, 226 bp, Unknown
  Bacterial polypeptide expressing nucleotide sequence isolated from the Sargasso Sea
atagatgaattagaaagttcaaaaagaaaactttatgctggaggtattggttatttcactgctaatcaagattttgatacctgtatagctttgaggacagcattaattaaaaataaaaagatttacgttcaagctggcgcaggaattgtagcagatagtgatcctgataatgaatataatgaaactgtcaataaagctcgagcattacttaaggctattaattaaa

SEQ ID NO: 278832 - DNA, 193 bp, Unknown
  Bacterial polypeptide expressing nucleotide sequence isolated from the Sargasso Sea
ttatgctggtggtataggttatttttctgcaaacggtgaatttgatacttgtattgccttgagaacagctgtcgccaaaaataaaaatttctatgttcaagcgggtgcaggaattgttgctgatagcaaacctataaacgaatatgaggagacggttaataaagctaaagctttaattaatgcattaagataa

SEQ ID NO: 278833 - DNA, 235 bp, Unknown
  Bacterial polypeptide expressing nucleotide sequence isolated from the Sargasso Sea
gatggaaatcattgatgaattagaaaatactaaaagaaaagtatatgctggaggaataggatatttttccgcaaatggtgactttgatacatgtatcgctttaagaactgccatctcaaaaaataacaaattttatgttcaagctggagcaggcattgtagcagacagtaaggctacaaatgagtatcaagaaacaattaataaagctaaagctttattaaaatctttggaataa

SEQ ID NO: 278834 - DNA, 241 bp, Unknown
  Bacterial polypeptide expressing nucleotide sequence isolated from the Sargasso Sea
gatgaattgacctcactgagaggcatttacggaggcacagtgggttatttttccaagaacggagacatggatcaggcaatcgcaattcgaacaattgttttttctgatgaaacatattgctttcaagctggagccggaattgtggctgacagtttgcctgagaatgaatacaaagaagtcttagcaaaaagtcagattctgcgaacagcactaaaaatggtgaaagagggagagttatgag

SEQ ID NO: 278835 - DNA, 1059 bp, Unknown
  Bacterial polypeptide expressing nucleotide sequence isolated from the Sargasso Sea
ttattgagccaaaattaaatctccattctccggatataccctttatatcaatttgccaatgtaatgaaataattgtttttgataacttcaaaggcactttttacataatagtaacaacagaacaaaaaactaatgatggttatcaaagtgctaagcgtagaattaaagaaattaaaagtgcaatttatagccttcaaccatcaatatcacaaaatattaatagagttgataaagaattagtaagcacaactaatcctgatgaaaaaacttttaaatcttatgtaaataaaatcaaatcacttattaatgatggcgaaattatgcaagctgttttatcaagggaagtgtcatttaaaggaaattttaacccgttcactttatatagagctttgagattaattaatccttcaccttatatgttttatatgaactttggcgatttaaatttaattggatcgtctcctgaaatacttgttcaaaattttcaagataaggtaactattagacctatagctggaacacgcaaaagaggaattgatgaatcagaagatttgcaaaataaaattgatttaattggtgatgataaagagaaagctgagcatatgatgttagttgatctagcaagaaatgatgtttcaaaagtttctaatccttctactgtatctgtagatgagatgatgattgttgaaaaatattcgcacgtgatgcatatgacatcaaacgtaattggacaaattaaagaaaatgccactcctatcgattgtttaaaagcagctcttcctgcagggactctgagtggtgcaccaaaaataagggctatggaaatactctctgaactagaaaatagagctagaggaatttatggcggttgtgtaggttacatcggatataacaaatctcttgatactgcaataatcataagaacagcgctacataagaaagatgaagttaaagtaggggtaggggctggaattgtgtttgactcggaaccacaaaatgaatggaatgaaacagttgctaaattaaatgttttcttggaggcattaaaatacgaatgaa

SEQ ID NO: 278836 - DNA, 1098 bp, Unknown
  Bacterial polypeptide expressing nucleotide sequence isolated from the Sargasso Sea
aatgataagtaaagaagaatatatagaatttgcagaaaatggatttaacattgttccattgattaaatctattgaaaaaaacttggattcacccattaaagttttttcaaaaattaagaataaaaaaaatactttcttgcttgaatccattgaaggtggagaaaaatgggctcagtattcaataattggattggattgcgaagactcaataaaagtatcagataacaaaattgaaattaaaacagctctgggaactagcctaattgaatgcaaagagcccttaaatgaactaaataaattaattgctgaatacaagaccccagttttagatggtatgccaagattttatggaggatatgtcggtttttttgcgtatgaaagtgctaagtatgctgaaaaaagaattaatgctcttcaaagaaaagactcaaaatttgatgttcatatgcctgatatctacttggtaaagtctgaaaaaataattgtttacgacaattttaataatagtattcaagctatttataatgcaaatcctcaaaagacatcatatgaagatgctttggaaatcattgatgagattcaaaacagcattgatcattctggagaacttgaagaaacttcatattcaaatactactggggaattagaatttaaatcaaattttacaaaaaatgagtacatgtcgtctgtgaataaaattaaagaatatataaaagaaggtgatgtgatgcaggttgtattagcacaagatttttatcaatcctttgaaggtgactcatttgaattatattcagccctaagacagataaacccatcaccatatatgtattacctcaaccttgatgagtgtgaggtggtcggatcttcacctgaaatattggttagattagaagatagcaatattactctcagaccaattgcaggcacgaggaaaagaggcgcaaacgaagaagaggataaaaataatgagaaagatttattaaatgatccaaaagagttagcagagcatcttatgcttatagatcttggaagaaatgatgttggaagagtttctgaaattggtagcgtgaaactgactgaaaaaatggtgatcgaaag

SEQ ID NO: 278837 - DNA, 427 bp, Unknown
  Bacterial polypeptide expressing nucleotide sequence isolated from the Sargasso Sea
catgaccatcgaacgttacagccacgtcatgcacataacaagtaacgtgaatggcaagcttcttcccgaggctactgctttcgatgcacttcgagcgtgtttacccgccggcaccgtatctggagcaccaaagattcgtgcaatggaaatcatcgatcaactcgagccaaacaagcgaggaccatacgctggagctgttggctatattgacttttgtggctcaatggacacctgtatcgcactacgcactattgtcatcacgcaaggcaatgctcatgttcagtcaggggcaggcattgttgcagacagtcaacctgaaaaagagtttgatgagacacttaacaaagccaaaggactcgtcgtcgcgatcgagatgaccattcaacggctcaaaggtgtcgatgccccagatgcagggaaacaatga

SEQ ID NO: 278838 - DNA, 982 bp, Unknown
  Bacterial polypeptide expressing nucleotide sequence isolated from the Sargasso Sea
tttgtctttaaagattaataattttgatgttaatcctttgttagtttttagaacaatgagatcaaaagattgtttttatatgcaaaaaaaatatcctggagataaagatccttatgaaactattatgggtcataaaatttcagagacaattaaaatcagtggcttaaatccaataaataaaataaggaaattgattgagaataccaagtcatcaacttattgtggtgaaaacaaacataatggatttttttcttatttttcttatgagtgtttccagtattttgataaagttccaagattaaaaaaagatcctaatgactgccctgagtgtttagttatgaatcccggaattatttcaacatatgaccataaagagaaatctattgttatttcaaaaaagtacaaatcatctccagaaaattatgccaattataaagaagatttagtaaaaattgctcaatcaattattgaaaaatcaaaacaattaaatatcaatacgccagaaaagcttaaagggttaaaaagtaaaacaataacaaataaaaataactatttagaaaaaattaataaaataaaaaaggagatagtttctggagaattaatacaatgtgtgcttactcaaagatttaaaaaagcctcaaagataagtgaccaagaattattagaatacttatctatgaattacccatctgaatacgtatatcaaatatcttgtaatgaattttctatttccggttcatctccggagatgtttttaaaagtaaaaaataatattgcaaccattaggccggttgcgggcactatagggtcaattaaaggtaaaacagataaattgattaaaaaattaaaatccagcatcaaggataaggctgaacatataatgcttgttgatttagctcgaaatgatctgggtaaagttgctaaaccagggacagtaaaagtagataaattaatggaaacaatgggtttacagaaatggtaa

SEQ ID NO: 278839 - DNA, 1399 bp, Unknown
  Bacterial polypeptide expressing nucleotide sequence isolated from the Sargasso Sea
atgaaaataaaaattaatacatatcacaaaaaaatatttgcagatacaattactcctgtggaagtatacttaaagataagggatatctttcctaatagtcttcttcttgaaaatagtgattacatgttagcaaataataattactcatacatatgctttaatcagattggacatattaaaataaaagattataaagttgattgtaaattccctggaggcactcttgagtcaaaagaattaaaaaaaggagaaaaaatttcaactgtaattcatgattatatagaaaaatttgaaacagataattcaagttttaaatttcttaataatgggatgtttggtttcatgagccatgaatcaataaaatattttgacagtatagagatagaaactaaaaaaaatttaaacatacctgatgtttattatggtttatataaaaacattatagcaataagtcagtataatcatgaagcccatattttctgtaattcaattgataaatcgtccaatatagatattatagagggcatattaaataataaaagtttttcagcatataattttaaaaaaattggaaaacctgaatctgagattagtgatgaagaatatattgaatatgtaaataaagcaagagatcattgcaaaagaggtgatgtatttcaacttgttttgtccagacggtatactcagaaatttaaaggtgatgaatttaatgtatatagagcattaagatcgataaatccctcaccatatctattcttttttgattatggtgattttaaaatttttggaagctcacctgaggcccagattgttattaacaataaaaaagctgagattcatccaattgccgggacttttaaaagaactggagatgatcaaaaagatcaaatgacagctaaagagctagccaaggatccaaaagaaaattctgagcatataatgcttgttgacctagctagaaatgatctgagtagaagcgggaataatgttaaagttgaaaaaagcagggaaattcaattttattcccatgttattcacttagtttcaaaagtaactgcagagataaaggaagatataaaatcatatcaagttgttgaagatacttttcctgctgggacactatctggagctcctaaacataaagcgttagaactaattgaaaagtatgaaaaagttaatagaaatttctatggtggagctattggttttattgatttcaaagggaattttaatcatgcaataatcattagatcattctttagtaaaaacaatattttaaattatcaagctggtgcaggaatagttattgattcaaaacctgaaaaagagttagaagaagttaagaacaaattaggagcattagaccaagccttgattgaagctgaaatgataaaatgaa

SEQ ID NO: 278840 - DNA, 328 bp, Unknown
  Bacterial polypeptide expressing nucleotide sequence isolated from the Sargasso Sea
attggaaaacaaaaaaaaaatttatcaatttttaatacttttctatccggttttcctgctggaactgttagtggtgcaccaaaaataagggcgatggaaattattgatgaattagagagttcaaaaagaaaattatatgctgggggaattggatattttacttcaaatcaagattttgatacctgtattgctttaaggactgccttaattaaagataaaaaaatttatgtacaatcaggtgcaggtatagtagcggatagcaatcctaataatgaatataatgaaactgttaataaagctaaagctttattgaaagctattagttaaa

SEQ ID NO: 278841 - DNA, 1390 bp, Unknown
  Bacterial polypeptide expressing nucleotide sequence isolated from the Sargasso Sea
tatgtacgtacacggtaaaaaggttttcttagatactgaaaacacaattactatttacaataagcttgctaaaaaatttaaagacgtttccattttagagtctgtaattggaggagataataaaggaagatattccattattctctttaatgtaaatcaaaatatagaaatttttcataattatgcgttaattaataatcgaaagaaaattataaagtcaccaaatatttttataaagaatatttataaaaatttaaaaattaaaacattatatgagcaaaatataccactccctgtttttattggtaatatttgttttgatttatgtaaatttacacttccaaaattaagttatgatcatagtaaaaatgaaattggaattccacttgcacactttgttaaaccaacaaatttaataataattgataatgttctcaacgaaactcacttaattgaggtatcaaataatatgaaaattccaactaaatctctaaaaactttagagagtttactcaaatcacccttttataaatttaacaaattaaatgttaaaaaattaaagaagtttaaaaatcacgtaaatagagaggattttttaaaaaaagtagatgaaatcaaatcagatatcaaggtgggtgaaatatttcaggctgttctatctcaaagattttctaatgaatatttaatagatccttttaatttttatagagccttaagatcaattaatccctctccttatcttgttttcttaaatttaaaaaactatcagattatttgttcaagtcctgaaactatgatcaaggtaaaaaataaagaaattaccttaagacctattgctggtactagaaaaagaggaaaaaatgaaatagaagataatgatttaaaaaatgaattactaaatgataaaaaagagttagcagagcatttaatgttagtagatttaggtagaaatgatgtaggtcaaatttcaaaaaataatacagtaaaagtaactgaacaaaatataatagagtattactctcatgttatgcatatagttagcaatgtaacaggggaattaaaaaataatttaacaccaattgatgttctttttgctggtttacctgctggtacagtttcgggtgcacctaaaataagagctctagaaatattagaaaaacatgaacatataaatagagaattctactctggatcagtctgttatatagatgctaacggagatatggacagttgtatcaacctaagaacagcaatgattaaaaataaaaagatatttgctcaaagtggtgcaggtatagtttttgatagtatagctaaaaacgaacacagcgagtgtattaataaagctaatgctttatttgaagcatacaaattggctcatcaaatataa

SEQ ID NO: 278842 - DNA, 1396 bp, Unknown
  Bacterial polypeptide expressing nucleotide sequence isolated from the Sargasso Sea
atgtacaaatataaatcaatacataaaaaaattattgttgatacaatgactccagtaagtatttatttgaaattgagagatcaattttcaaacacaatattactggaaagtagtgattacatagcaaaggataatagctatgcatacatatgctgcaatccaatttcaaagttttacattaaaaaaaatactctttatactgaatttccagataaaagccattatgaaaaaaaattgaatgcaaattctaatgttttttcagagcttacaagtttcatggagaagtttgtcataactgaaaaagaagaaaaaaataaaaaattcatgacaaaaggtttgtttggatacatgacatatgactctgtaaagttttttgaaaaaattgaaattgaaaataaatcatttggagatgatatacctgacatattttattctctatacagtgaaattattgtcattaatacatttaacaatgaagctactcttataagtcaaacaggagacttaaatcaattggataatattgaaaaaataattaaaaagaaaagtataaatgagtatggtataaagcttgaggggaagttaaaatcaaatttaaatgataacgaatttattgatgttgttaaaaaaggaatcaaacattgttacagaggggatgtgtttcaaattgtattatcaagaaagttttctcaaaaattttctggagatgaattttgtgtatatagacaattaagatcaataaacccctcaccttatttattctattttgactatggaaactttaaaatatttggaagttcaccagaagctcagttagtaattaataatcaaaaagctgaaattcatcctatagctggtacatttaaaagaactggagatgatctattggattcaaaaaaggcccttaagctttttaaagatgataaggaaaacagtgaacacatgatgcttgtagatttggctagaaatgatttgagcagagcttgctcagaagtaaaagttgaaaaagatcgtgaaattcaattttattcacatgtaattcatcttgtttcaaaggtaactggtaaactaaagtcacattcaaaagatataattggtagtacatttccagccggcacattatctggagcccctaaacatatggcaatgaaactcattgaaaagtatgaacaacacaatagatcattttatggtggtgcaataggttttattgattttgaaaataattttaatcatgcaattcttataagatcttttttaagtaaaaatcaaaatctattttttcaggcaggggctggcatagtttcaaaatccaatcctgatgatgaattaaatgaagtttataataaagttggtgctcttttaaaagcactcgaaaaagctgaagaaatatgaa

SEQ ID NO: 278843 - DNA, 429 bp, Unknown
  Bacterial polypeptide expressing nucleotide sequence isolated from the Sargasso Sea
aagctggtactgtaaatgttactgaacaatttgggatagaaagatacagtcacgttatgcatatggtttctaatgttgaagctgaattggaagacggcttgtctgccattgatttatttaaggctacttgtcctgcaggaactgtctcaggtgctcctaaaatcagagctatggagatcatcgatgaattcgagcctgtgaaaaggggtatttatggtggggcaattggatacctttcttggcagggcaatatggatatggcaatagcaatcaggacagcagttattaaagatgatgtactctatattcaggcaggtggaggttgggttgcagactcagttccggatctagaatggaaagaatcattaaataaaggtcgagctattttcaaagccgcagaaatggtgcaagaaaaactagaaggttgat

SEQ ID NO: 278844 - DNA, 1086 bp, Unknown
  Bacterial polypeptide expressing nucleotide sequence isolated from the Sargasso Sea
aatgaaattaagtacaagctttgatagcttcaaaaaattacataataataaatataatcaagcaatttatttttctcaaaattgtaagaactaccgctttgttgaaaatctatacaaatttattttggccaaaaaaaatagtttcatatttgaatctgttgaaaaaggaactgtaagaggtagatatacgatcataggctataatcctgacagaatttataacatacagaataacaaaattattgaggatgattttaaaaaaaaaacaataataaaaaaaaatgtttttaaatatttaaatgaactatttaaaagttttaaagtaaagtcatctggtattttgccaaatatgtcttctatgattgtgggctatttttcatatgatattgtgcgtcttatagaaaaaattccagacaaatgtaaaaaagatatagacattcctgatatacgattaatgcgaccaaaaaatttggttatatacgataatattaaaaaaaaaattttcttcgttcaaaatatttttaaagaagaaataataaatgatcattatattaaatatctaacaataaagaatacttttaaagaattacagcaccttggaaatatatcacttcctgaaaattttcacaaaaataagaaaaaaataaaagtaaaatcaaatatatcaaaatccaaatttaaaactattgtagcaaaagcaaaaaattatattagaaaaggagatatttttcaggttgttttaagccaaagatttgagtctcagattgataagccccctctagaaatttataatagtctaagaattataaacccctccccttttatgttttattttaattatgacgattttcagatcttaggtagtagccctgaaatattagtaaggttgttaaacaataaaattactattagaccaattgctggtactaggcccagaggaaaaaataaaaaacaagataaaaaattgactttggacttacttaaagatccaaaagaacttgcggagcatttgatgctcttagaccttggtcgaaatgacgttggtaaagaatcggaaagaaacagtgttcatgttactgagaaatt

SEQ ID NO: 278845 - DNA, 439 bp, Unknown
  Bacterial polypeptide expressing nucleotide sequence isolated from the Sargasso Sea
agaatagccaaaccaggcacagttaaggtcacccaacaaatggaaatagaaaggtatagccatgtgatgcatattgtttctcatgttgaggcagatatagataaaagttttaatgcttttgatgttttaagatcagcatttccagctggaacagtaacaggtgcccctaaagttcgggcaatgaaattaatatctgaaaaagaaaaatataaaagggggccttattcaggtgcagttggatatttttcgtacgatgggaacatggatacagcaatagctatcagaacaatagttttaaaagataatctagcaattcttcaagcaggtgcaggtattgttgctgattctgatcctgagtcagaacataacgaatgtttagcaaaaatgggagcattaattaaagccttagaacatgcagaaaactcaacaaagagataac

SEQ ID NO: 278846 - DNA, 616 bp, Unknown
  Bacterial polypeptide expressing nucleotide sequence isolated from the Sargasso Sea
ccaggaaaagcgcggcgaagatcgcatcgtgacgatccgcccgctcgccggcacccgtccgcgcggtaacacgcctgaacgcgacgcggagctcgccaccgaactgctgaacgatccgaaagaaatcgccgaacacgtcatgctgatcgacctcgcgcgcaacgacgtgggccgcatcgcgcagatcggctcggtggtcgtcactgaccagatggtgatcgaaaagtactcgcacgtgcagcacatcgtgagttccgtcgaaggcaagctgaaacccggcaccaccaatttcgacgtactgcgcgccaccttcccggccggcacgctgtccggcgcgccgaaggtccgcgcgatggaattgatcgacgagctcgaaccggtgaaacgcggcctgtacggcggtgcggtcggctatctgtcattcaccggcgaaatggatctggccatcacgatccgtaccggcgtgatcgcaaacggtaatctgtatgtgcaggcggcagcgggtgtagtcgcggattcggtgccggaatccgaatggcaagagaccgagaacaaggcgcgcgctgtgctgcgcgccgccgagcaggttcaagacggcctcgatagcgacttctga

SEQ ID NO: 278847 - DNA, 456 bp, Unknown
  Bacterial polypeptide expressing nucleotide sequence isolated from the Sargasso Sea
atcttggaagaaatgatgttggaaaagttgctctttttggctcggttaaggttactgaaaaaatgattatagaatattattcacatgtaatgcatatagtgtccaatgtagaaggtaaattaaactcaaaatttaatgcaattgatgcattaatttcaggatttcctgcaggaacagtatcgggagcacctaaaataagagcaatggaaattatagaagaattagaaaatgttagcagaagtttttatggaggtgccatgggatattttgattctaatggagacatggatacatgtatcagtctaagaactggattggttaaagacaaaaaattgtatattcaagctggaggtggaatagtttatgactccgatcctgaaaaagaatatcaagaaactattaataaagctaatgcactagtagttgcggcagaagactcttacaaatatgaataaa

SEQ ID NO: 278848 - DNA, 430 bp, Unknown
  Bacterial polypeptide expressing nucleotide sequence isolated from the Sargasso Sea
cgaaataggtaccgttgaagtcactgatttaatgagtatagaaaaatattcgcatgtgatgcatttagtatcacatataaaaggggttttgaagcatggtcttaatccatttgacgcattacgatcttgcttccctgctggaacgttatctggagcacctaagataagagctatggaaatcatatcggaattagaacaacaaaaaagaggaccttatgctggagcagtaggatatttttcattttctggaaatatagatacctgcataaccttaagaactagcgtaatcaagaacggcaccgcttacatacaagctggaggcgggatagtagcagacagtacagatgaagacgagtatctagaaacttattacaaatcaggagcattactcaaagcaatagaaaacgcagagtcccaatttaattcttag

SEQ ID NO: 278849 - DNA, 973 bp, Unknown
  Bacterial polypeptide expressing nucleotide sequence isolated from the Sargasso Sea
tatgactgttgtttatccgagtgaaaataaacattatgaaagtctctataagaaagcacaagaactattagaattaaaagtaaatcaacttaaggaaaaccttgttcaaaaatcagctattgcaatcaaatcaaatctaaatttcaaatcaaattattctaaagatgaatatttttcgattatttcaaaagcaaaggaatacattaatgaaggagatatttttcaagtagtaacatcacaaagatttgaaacagaatatgatcttgaagcaattagcctttacagatctcttagaagattaaatccttctccatacttagttaatttaaattttaatgacataggtttagtcgcctccagtcctgagttacttgttcagttaagaaataaaaaaataactattagaccaatagctggaactagaaaaagaggaaaaaatgctaatgaagatttagaactttcaaaagatttgcttaaagataaaaaagaactagcagaacatttgatgttattagatttgggaagaaatgacgtgggtagagtttctaaaaataaatcagtaaaagtaactgagcaaatgattattgaatattattcacacgttatgcatattgtatctaatgtcgaagggttaatagatgaaaaatatgatgcagtagatgctcttaaagctggcttccctgctggaacagtcactggtgctcctaaaattcgagctatgcagataattgaagagcttgaaaatcttaatcgaagtttttatgcaggatgtatgggttattttgattctaatggagatatggacacatgcattagtctaagaagtggattagttaaaaatggtaaattatttattcaagctggaggtggagttgtgtatgactcaaatcctgaagatgaatatcaagaaataataaataaagctggtgctctaatggcagcagcagaggactcttataaatataattcatga

SEQ ID NO: 278850 - DNA, 700 bp, Unknown
  Bacterial polypeptide expressing nucleotide sequence isolated from the Sargasso Sea
tcatgagccttttgatttatatcaggcgcttagatttttaaatccatcaccttacatgtattttctaaactttggaatttgtcaggtagtaggagcatctccagagatcttagtaagacttcaaggggatcaaataaccttaagaccaatagcaggaacaagaagaagaggctcaaacgagattgaagatgaagaaaatgccaaagaccttctttcagaccccaaggagttagctgagcatttgatgttaattgatttaggaagaaatgatgttggaaagatttctaaaatgggaacagtgaaagtttctgaaaaaatggtaatagaaaaatattctcatgttatgcacattgtttctaacgtagaaggtagtaaaaaagaaaacttaagctttattgatgtcttaaaatctgctcttcctgcaggaaccttgtctggagcaccaaaaataagagctatggaaattattaatgaattagagccaagctcaagaggcatatatggaggagcaattggtcacatatcttgggatggagacattgatacagcaatagctatcagaactgcggtcattaaaaataataaaattcatgttggagctggggcaggggttgtggctgactcaatacccgagaatgaatggaatgagtgtcttcaaaaagctcatgttttcttagatgccattgagatgattaaatga

SEQ ID NO: 278851 - DNA, 711 bp, Unknown
  Bacterial polypeptide expressing nucleotide sequence isolated from the Sargasso Sea
ttttgaagctaaacttactaaaaacccaatttgaaatatataaaaaacttagaattaataatccttctccctttatgtatttttttaattttaaagattttcaaattattggtgctagtcctgaaattctagtcagattaagaaacaataatattacaataaggcctattgctggaactaggccaagaggaaaaaacaaaaaagaagataaaaattttgaaagagatttgttaaatgataaaaaagagctttctgaacatttaatgcttttagaccttggtagaaatgacactggaaaagtatctaagattaatacagttaaagttacagaaaaatttgtaattgaaagatattcacacgttatgcatattgtttctaatgtagttggcaagtttaacaaaaaattttctaaatttgatactctgctttctggttttccagctggaactgtatcaggagccccaaaaataagagctatggaaataattgacgaattagaaaatacaaaaagaaaagtatacgctggtggaattggatatttttcagcaaatggagactttgatacatgtatagcattaagaactgcgttatcaaaaaataataaattttatgtacaagcaggtgctggaatagttgctgatagcaagcccataaatgaatataaagaaacaataaataaagcaaaagctttgctaaaatccttagagtaaa

SEQ ID NO: 278852 - DNA, 1036 bp, Unknown
  Bacterial polypeptide expressing nucleotide sequence isolated from the Sargasso Sea
ttcttgtattgatgatcttaatatacctgatgcgagaattttaagacctcaaactttaattatacatgataattatcagcaaaaaatttattatatagttaactgtttttcagatgaaaagataactaattacaaaactaaatatgatttgatagaaaatgaaattagtaatttaatttttattgcaaattacgatagaaatttagttaataatcagcttaagaagaaaattaaaattaaatcaaatatttcgaaaaataaatttttacaaaacgtcagaaaggcaaaaaagtacataaaaataggtgatatttttcaggttgttctaagtcaaaggtttgaagcaaaacttacaaaaaacccaattgaaatatataaaaaacttagaattaataacccatcgccttttatgtatttttttaattttgaagactttcagataattggggcaagtcctgaaattcttgttagattaagaaataaaaatattaccgtaagaccgatcgcgggaactaggccaagagggaaaaataaaaaagaagataaattttttgaaaaggatttattaaaagacaaaaaagaactttctgaacatttaatgcttttagatcttggaagaaacgatgctggtaaagtttccaaaatcaataccgttaaagttacagagaaatttgtaatagaaagatattcgcatgtaatgcatattgtttcgaacgtagttggtaaatttaataaaaaattttcaaaatttgatacacttcttgcgggttttccagcgggaactgtatcgggtgcaccaaaaataagagcgatggaaataattgatgatttagaaactacaaaaagaaaggtttatgctggtggtatcggttatttttcagctaatggtgattttgatacttgtattgcattaagaacagcagtttcaaaaaataataaattttatgtacaagcaggtgctggtattgtagctgatagtaaaccgattaacgaatataaagaaacagtaaataaagcaaaagctttattaaaatcc

SEQ ID NO: 278853 - DNA, 479 bp, Unknown
  Bacterial polypeptide expressing nucleotide sequence isolated from the Sargasso Sea
agaacttgcagaacatacaatgcttgtagatttaggtagaaatgatattggtagagtttgtgattatggaactgtaaaagtaaaagaactgatggaaattaaacgattcagtcatgttcaacatatcgtaacacatgtagttggagaattaagtgataaatatgacatgtatgatgcatttcaagcagtatttcccgcaggaactgtttcaggagcgccaaaagttagagcaatggagataattcatgaattagaacccatacaacgagaaacttatgcgggagcggtaggctatttttcatttaacggatgttgtgattttgcaatagctattaggagcatttttgcggattcaaaaaaagggtttgttcaagcaggagcaggcatagtatttgattcaatagcagaaaatgaactaaaagaaaccgagcataaagcaaatgcaatgattactgcactaaaagaggcatcaaaatgaa

SEQ ID NO: 278854 - DNA, 1019 bp, Unknown
  Bacterial polypeptide expressing nucleotide sequence isolated from the Sargasso Sea
tcttgaaagtttaagacagcttattaatttatccaaagttaaaataaaccctggaaatgttccttatccaactttagttgggtacttaggatatccaatgatacaattcatggaaaacattacattaagtaacaaagacaatataaatattcctgaagccacacttataagaccaaaaatagttgctgtatttgataatattagagatacaatctcactaatgaccatatcttatccttgcaaagaactaaaagcaaaagatgcttataaaaactcaaatttacttttaacaaaaacaataaaaaaacttgaaagcagcttattaaaatcaacaaataaaaaattaaaaagaattaaattaaattttaaatctaattttaaaaaagaggatttttataaaatagttaaaagtgcaaaaaaatatattcaagatggtgatatttttcaagtcgttccatcacaaagatttgaatcaaaatatactctagaagctattgacttatatagatcgttaagacgcctaaacccctcaccctatctagtcaatttgaactttgataaatatggaattgttgcatcaagtccagaacttatggttcagttaaggaataataaagtaactataaggcctattgctggaacaagaagaagaggtagaaatgctagtgaagatctaaatctctccaaagatcttataaatgatcaaaaagagctagcagaacacttaatgttgctagatttagggcgaaacgatgtaggtagagtttcaaaaaaaggatcagtcaaggtaacagaaaaaatgataatagagtattactctcacgtgatgcatattgtatcaaatgttgaaggtaaaatagagaaaaaatatgatgcaattgatgcattaaaagcaggatttccagcaggtacagtttcaggagctccaaagataagagctatggaaattattgaggaacttgaaaatttaaatagaagtttttatgctggttgtatgggttattttgattctaacggcg

SEQ ID NO: 278855 - DNA, 940 bp, Unknown
  Bacterial polypeptide expressing nucleotide sequence isolated from the Sargasso Sea
atgttttatataatcaatatttttaatgatgaaaaaattactaattatcaaaaaagatttgaagatataaaatctgaacttttcaaacttacaattcagtcttctataaaaaatttaagtaaatcaaaagttaaagttgttaaagatattaaggttaaatccaatacacctaaaaacaaatttcttaatatggttaataaagctaaaaaatacattaaaataggagatatttttcaagttgtcttgagtcaaagatttgaggcaaaattgacaaaaaatcctctcgatatttataaaaaattaagaattacaaatccttctccatttatgtttttctttaattttagtgattttcaaatagttggggctagtcctgaaatattagtaagattaagagacaacaaaataactgtaagaccaatagctggaacaagaccaagaggaaaaaccaacaaagaagacctttattatgaaaaagatttactaaaagataaaaaagaattatcagaacatttaatgctgttagatttaggcagaaacgatgcaggtaaagtttctaaaattaattcagtcaaagttacagaaagttttattattgaacgctattctcatgttatgcacatagtttccaatgttgtaggagaatataataaaaaattctcaaaatttaagtcgttgctagcaggttttcctgctggcacagtttctggagcaccaaaaattagagctatggaaattatagatgaattagaatcaacaagaagaaaagtatacgctggcggtattggatatttttcagcaaatggagaatttgatacctgtattgcattaagaacggctgttgcaaaaaataaaaaattttatgttcaagctggtgcaggaattgttgctgatagtaaaccaattaaggaatatgaggaaactgttaataaagccaaag

SEQ ID NO: 278856 - DNA, 838 bp, Unknown
  Bacterial polypeptide expressing nucleotide sequence isolated from the Sargasso Sea
tccctctgtggttgctgttttagatggagctaagggtgaggttatattagtagtgccagtctggcataatcagaaaaacgatgcaaaaaagtcttacgaaaatgcatcaaaattaattgctggtgccgttaaaaaacttcagtgtgaaatattagaaactagaaatttaggaaatccaaaagatatagatccaccaatttctaatttttcaaaatccaattatctaaaggccgttgagaaagctaaagagtacattacggctggtgatattttccaggtagtaccgtcacaaagatggacgcaagattttaagttaccacctttttccttataccgctctttgcgccgaacaaatccctctcctttcatgttcttctttaattttggagcttttcaagttatcggcgcaagtcctgaaattctagtaagagtatttgataacgaaattacgataagaccgattgccggcacacgtcccagagggaaaactcccgaagaggacaaagctttagaagttgaattactaaacgacaaaaaggaattagctgagcatttaatgcttttggatttaggtagaaatgatgttggacgtgtatctaaaatcggctcagtgacacctactgaagaatttataatcgagcgatacagtcatgtgatgcatatagtttcgaatgtagttggagagcttgcaccggaacatgacgctctatccgctttttttgcaggcatgccagcaggcacagtttctggtgctccaaaagttagagcaatggagatcatcgatgaattagaacctgaaaaaagaggcgtttacggtggcggggtcggctacttcagt

SEQ ID NO: 278857 - DNA, 667 bp, Unknown
  Bacterial polypeptide expressing nucleotide sequence isolated from the Sargasso Sea
ttatagggcccttcgatcgcttaacccgtcaccttatatgtattttcttgatttgggtgatttccagatagtaggatcatccccagaaatattagttagacttgaggataacaccgttacagtaaggcctattgctggcactagaccaagaggtaaaactgagaaagaggatgttgagttggaaaatgatcttttacaagacccaaaagaattagcggaacacttaatgttaatcgatctgggtagaaacgatgtcggtcgtgttgctgatatgggaagcgtaaatttgacagataaaatgataattgaacgatactcacatgttatgcatattgtttcaaatgtcactggcaaacttaaaaaggaaatgaatgcaattgatgtgctacgttccacctttcctgcgggaactgtttcgggtgctccgaaaattcgagcaatggaaattatcgatgaacttgaaccagtcaaacgaggtgtttattcaggagcggttggttacatatcatggaatggtaatatggatactgctatcgcaataagaactgcggtcattaaagataaaactcttcacatacaggcgggagctggtattgttgctgactcagtaccaaaaaacgaatgggatgaaactatgaacaaaggtcgtgctattttcaaggctgtt

SEQ ID NO: 278858 - DNA, 604 bp, Unknown
  Bacterial polypeptide expressing nucleotide sequence isolated from the Sargasso Sea
tttgggtagtagtccagagattttggtgaggttaataaatgatgaagttacaataaggcctattgctggaacaagaccaagaggaaaaaataataaagaggataaaaaatttataagtgaattattaagtgatcccaaggaattatcggagcatttgatgcttttagatcttgggagaaatgatattggtaaagtctctcagactaattccgtaaaagttacagaaaaatttaaagtagaaaaatactctcatgtaatgcatattgtctctaatgttgtaggtagattaaaaaaaaatctatcactttttgaaactttcttatcgggatttcctgcgggtactgttagtggagcaccaaaaataagagcaatggaaattattgatgaattagaaacgtccaagagaaaactttacgctggtggaattggatattttacggcaaatcaagagtttgatacatgtatagctttgagaacagccttaattaaagacaagacaatatatgttcaagctggtgctggaattgtagctgatagcaaacccgaacatgaatatgaagagacggtaaataaagcaaaagccttacttcaagcgatacgttaa

SEQ ID NO: 278859 - DNA, 796 bp, Unknown
  Bacterial polypeptide expressing nucleotide sequence isolated from the Sargasso Sea
atattaataaagcaaaaaaatatattaaagctgagtgacatatttcaggtagttccaagtcaaagatttgaaactaattttaaaagtaaaggcagctcactctacaaagtactgagattgactaacccctcaccttttatgtactactttaatttgcctaattttcaaattgttggctcaagtccagagattctggtcagacttagatctgaattaataactttgcgacctatcgcaggtacaaggccgagaggcaaaaacataaaacaggaccgaaagtacgagttggacttactttcagacgaaaaagaaacatcggaacacttaatgttgttagatcttggtcgaaatgatgtcggtaaagtagcaagaaaatcaactgtaagcgtaaccgccaaatttataattgaaaaatattctcatgtaatgcacttggtttctaatgtaactggaaaacttaaaaaaaatatcagtacaattgaagcactaatggcaggatttccagctggaacagtatcgggagcaccaaaaataagagctatgcaaattatagatgaattagagactgatgtccgcggtatttatgcgggtggaattggttatatctctcctgatggagatatggacacttgcatcgttttaagaacagggataattacaaaaaataaattatatgttcaggctggaggtggtgtagtttatgatagtgatccagaactcgaatatatggagactgtaaataaagctaaagcagtattaaatgctgctgaaatcgtacttggaaataacctatgat

SEQ ID NO: 278860 - DNA, 803 bp, Unknown
  Bacterial polypeptide expressing nucleotide sequence isolated from the Sargasso Sea
taaagaagatttcttaaaagctgtatctgtggctaaagaatacattgttgatggtgatgtaatgcaagttgttctagctcaagacttttcaaaggagttcactcgtgagccttttgatttatatcaggcgcttagatttttaaatccatcaccctacatgtattttctaaactttggaatttgtcaggtagtaggagcatctccagagatcttagtaagacttcaaggggatcaaataaccttaagaccaatagcaggaacaagaagaagaggctcaaatgagcttgaagatgaagaaaatgccaaagaccttctttcagatcccaaggagttagccgagcatttgatgttaattgatttaggaagaaatgatgttggaaagatttctaaaatgggaacagtaaaagtttctgaaaaaatggtaatagaaaaatattctcatgttatgcacattgtttctaacgtagaaggtattaaaaaagaaaatttaagctttattgatgtcttaaaatctgctcttcctgcaggaaccttatctggagcaccaaaaataagagctatggaaattattaatgaattagaaccaagctcaagaggcatatatggaggagcaattggtcacatatcttgggatggagacattgatacagcaatagctatcagaactgcggtcattaaaaataataaaattcatgttggagctggggcaggggttgtagctgactcaatacctgagaatgaatggaatgagtgccttcaaaaagctcgtgttttcttagatgccattgagatgattaaatgat

SEQ ID NO: 278861 - DNA, 485 bp, Unknown
  Bacterial polypeptide expressing nucleotide sequence isolated from the Sargasso Sea
gatcgcggaacatatcatgttggttgatcttgcacgaaatgatcttggacgtgtcgcaaaacatggatcaatcgaggtcgaaccatatcaatcgattgaatactatagccatgtgatgcatatagtcagtggtgttcaaggcaatttagaagatgataaagatgcctttgatttatttgccgcagcttttcctgcaggaactttggttggcgcaccaaaagtcagagcaatggaattgattgatgaaattgagccagaactcagaggtgtttatggaggcactgtaggctatttttcgaagaatggagacatggaccaggcaattgcaattcgaactatcgttttcacagatgagaaatattgctttcaggcgggtgcagggattgtagctgatagcttacctaagaatgaatacaaagaagtcttagcaaaaagccagattctcagaacagcattaaaaatggtgaaagagggcgagttatgag

SEQ ID NO: 278862 - DNA, 758 bp, Unknown
  Bacterial polypeptide expressing nucleotide sequence isolated from the Sargasso Sea
aaaatacattaaacttggtgatatttttcaagtggtattaagtcaaagatttgaggctagattatcgaaaaagccaatagatatctataaaaagttaagagtaactaatccttcccctttcatgttcttctttaattttaatgattttcaaataataggtgctagtcctgaaatattagtaaggttaagagataataaaattactgtaagaccaattgcaggaacaaggccgagaggtaaaacattaaaagaagatctttattacgaaaaagatttattaagagataaaaaagaactctctgaacatttaatgcttttagatttaggtagaaatgatgctggtaaggtatccaagataaattctgttaaagtgacagaaagcttcattattgagaggtattcacatgttatgcatatagtatctaacgtgattggtgattataataaaaagttctcaaagtttaaatctttgctagctggttttcctgcaggaacggtctctggtgccccaaaaataagagctatggaaatcattgatgagctagaaacaacaagaagaaaagtttatgcgggtggtatcggttatttttctgcaaacggtgaatttgatacttgtattgccttgagaacagctgtcgccaaaaataaaaaattctatgttcaagctggtgcaggaattgttgctgatagcaaacctataaacgaatatgaggaaacggttaataaagctaaagctttaattaatgcattaaaataat

SEQ ID NO: 278863 - DNA, 379 bp, Unknown
  Bacterial polypeptide expressing nucleotide sequence isolated from the Sargasso Sea
aaatttgttatagaaaaatattcacacgttatgcatatagtttcaaatgtaattggtaagtttaataaaaaatttaaaaaatttgatactttactatcaggattccctgcaggaaccgtatctggtgcacctaaaataagagctatggaaataattgactctctagaaacaacaaaaagaaaagtttatgcaggaggaattggatatttttcagcaaatggagattttgatacatgtattgctttgagaactgcagttgcaaaaaataaaaagttttatgttcaagcaggagctggaattgtagcggacagtgaaccagagaaagagtataaagaaactgttaataaagctaaagcattattaaaatcacttgagtaaa

SEQ ID NO: 278864 - DNA, 915 bp, Unknown
  Bacterial polypeptide expressing nucleotide sequence isolated from the Sargasso Sea
gatataagattaatgagacctaaaaatgtaattatttacgataatttgaagaaaaaaatattctttattcaaaacatttttaaagaagaaaatattgaaaattataaacttaagtatctttcaataaaaaaagctcttttagaacttcaatattttggaaacataagtcttcctgaaaattttcataaaactaataataaaatcaaagtgcgttcgaacatctcaaaatctaaatttaaaaaaaatgtgcttaaagcaaaagaatacataaaaaagggggatatttttcaagtcgttttaagccagaggtttgaagcaaaaattgataaacctgctttagaaatttacaatactttaagaattttaaatccttcgccatttatgttttattttaattatgatgactttcaaatattggggagtagcccagaaattttggtaagattattggatggaaaagttaccataaggcctatagcaggtacaagaccaagaggaaaaaacaaaaaacaagatagtaaactaactaatgaacttttaaatgacccaaaagaacttgcagagcatttgatgcttcttgatctaggaagaaatgatgttggtaaagtatcaagaacaaatagtgttaaagtaactgagaggtttaaaatagaaaaatattctcatgttatgcatattgtttctaatgttacaggcaaattaaaagaaaagttttctcttttcgaaacatttttgtctggttttcctgctggtacagtaagtggcgcacctaaaataagagctatggaaataatagatgaattagaaagttctaaaagaaaactttatgctggaggaattggctattttactgctaatcaagatttcgatacctgcattgcgttaagaacggcattgattaaaaataaaaaaatt

SEQ ID NO: 278865 - DNA, 882 bp, Unknown
  Bacterial polypeptide expressing nucleotide sequence isolated from the Sargasso Sea
aaagtattttaaaacctgcgcaaaagaaaaataaaaaatctaaattaaaatttaaatcaaatttcaagaaagaacaattttataaaattgtaaataaagcaaaagaatatattaaaaatggagatatcttccaagttgtgccttcacagagatttgaaacaaaatataatttaaaggcagtcaatctttatagatcgttaagaagactaaatccatctccttatcttgtaaatcttaacttcgataaaattggccttgttgcatctagtccagaattaatggttcaattaagaaacaaaaaagttactataagaccaattgctggaacaagaaaaagaggaaagaatgcctctgaagacctttatttatctaatgacttactgaatgataagaaagaactcgcagaacacttaatgcttttagatttaggaaggaacgatgttggtcgcgttgctaaaaaaggaacagtgaatgttactgaaaagatgattatagaatactactctcatgtaatgcatattgtttcaaacgttgagggaaaaatagataataatttagatgctctagatgctttaatggctggatttccagcaggtacagtttctggtgcaccaaaaatacgagcgatggaaatcatagaggaacttgaaaatttaaatagaagtttttatgctggttgtatgggttattttgattctaatggagacatggatacttgtattagtttgaggactgggcttgtaaaagataataaattatatatccaagctggtgctgggatagtttatgattctgttccaaaaaatgaacatcaagaaattttgaataaagcaggtgctttaatggcagcagctgaggattcatacaaatttgatttatgat

SEQ ID NO: 278866 - DNA, 862 bp, Unknown
  Bacterial polypeptide expressing nucleotide sequence isolated from the Sargasso Sea
gatgcaaacacaaaaaccgatactcgaactgcttgcctgcgatgccgcctaccgtgagaatccgacatcgctgtttcatcaggtgtgtggcgcacgtccggcaacgctgctgctggaatctgcagatatcgacagcaaagacgatctgaagagcttgctgctagtcgacagcgcattgcgcattaccgctctcggtgacactgtcactattcaggcgttatccacaaacggcgcatcgctgctgcccttgctggatgctgccctgcccgctggcgttgagaatgaaaaacagacgaatggtcgtcatctgcgattccctgccgtcagcccgctgttggatgaagacgcccgtttatgttctctttccgtatttgatgcttttcgcttactgcaggggctggtgaatgttcctgtgcaagaacgtgaagcgatgttcttcggcggtctgttttcctacgacctggttgccggttttgaagatttacctcagcttgaagcgggcaaccgttgtcctgactactgcttctatctggcagaaacgctgatggttatcgaccaccagaaaaaaagcacccgaattcaggccagtgtttttacccccaatgatgcggagaaacagcgtcttaacgcccgtctggcgcagctgagccaacagcttaccgagcctgcgccgccgctgcccgttactgaagtcccgcagatgcgctgcgaatgcaatcagagcgatgaagagtttggcgccgtggtgcgtgggatgcaaaaagcgattcgcgcgggcgaaattttccaggtagttccgtcccgccgtttctcgctgccctgcccgtcaccgctggcagcctactatgtgctgaagaaaagt

SEQ ID NO: 278867 - DNA, 523 bp, Unknown
  Bacterial polypeptide expressing nucleotide sequence isolated from the Sargasso Sea
ggaaaaaacaaaaaacaagacgcaaagctaacttctgagttgttaaaggatcctaaagaacttgctgaacacttgatgcttttagatcttggaagaaatgatgttggaaaggtttcaaaaactaacagtgttaaagtaacagaaaaatttaaggtagagaaatattctcatgtaatgcacatcgtttctaatgttagaggcaagctgaaaaagaatttttctctttttgaaacatttttatcgggatttccagcaggaacggttagtggtgctcccaaaataagagccatggaaataattgatgaattggaagactcaaaaaggaagctttatgctggtgggataggatattttacagcaaatcaagattttgatacctgtatagctttaagaacggctttgattaaaaataaaaaaatttatgttcagtctggtgcgggaatagtagcagatagtaatcctaaaaacgaatacaatgaaacagtgaacaaagcaaaggcattgcttaaagcgataaattaaa

SEQ ID NO: 278868 - DNA, 694 bp, Unknown
  Bacterial polypeptide expressing nucleotide sequence isolated from the Sargasso Sea
tgtcaagatccattgaatatttataaaaaattgagagtaacaaatccttcccctttcatgtatttttttaactttgaagattttcaaataataggtgctagtcctgaaatacttgtaagacttagagataacaaaataacaatcagacctattgccggtacaagacctaggggcaaaaataaaaaagaagataaatcttatgaaaaggatcttttaaatgataaaaaagaactttctgaacacttgatgcttcttgatcttggtagaaatgatacagggaaagtttcaaaaattaatacagttaaagtaactgaaagttttaaaattgaaagatattctcatgtaatgcatatagtatctaatgttaaaggtgaatttaataaaaaatttgggaaatttgatactttattagctggatttcccgctggtactgtttctggtgcaccaaaaataagagcaatggagattattgatgaattggaaacaacaaggaggaaggtttatgcagggggtattggctatttttcatcaaatggtgattttgatacttgtattgcccttaggacagcaatttcaaaaaataaaaaattttatgtacagtcaggagcaggaatagtagctgacagtaaaccaattaatgaatttaatgaaactgtaaacaaggcaaaagccttaattaaagctttggaataat

SEQ ID NO: 278869 - DNA, 788 bp, Unknown
  Bacterial polypeptide expressing nucleotide sequence isolated from the Sargasso Sea
agatattatttctcttatggctgtgacttacccaagtaaaaatatttcagctgaaaatgcatataaaaaaaatatattgcttattaaaaaaactattaagaaactagaaaagagtgtcttaagaccggcacaaaataaatataagaaatctaaactaaagtttaaatctaattttaaaaaagaacaattttataaaattgtaaataaagcaaaagagtatattaaaaacggagatatcttccaagttgttccttcacaaagatttgaaacaaaatataatttgaaggcagtaaatctatatagatcattgagacgtctgaatccatctccttaccttgttaatctaaactttgatagaattggacttgttgcatcaagtccagaattaatggttcaattaagaaataaaaaagttactataaggccaattgcaggaacaagaaaaagaggtaaaaatacttctgaggacatgtttttatctaacgatttagttaatgataaaaaagaacttgcagaacatttaatgcttttagatttagggagaaatgatgtgggtcgagtttcaaaaaaagggacagtaaatgttactgaaaaaatgattattgaatattattctcatgtaatgcatattgtttcaaatgttgaaggaaaaatagataataatttagatgctctagatgctttaatggctgggtttccagcaggcacagtttcaggagctccaaaaataagagctatggaaattatcgaggaacttgaaaatttaaacagaagttttttatgctggt

SEQ ID NO: 278870 - DNA, 685 bp, Unknown
  Bacterial polypeptide expressing nucleotide sequence isolated from the Sargasso Sea
ttcgaaatcaaaatttaaaagtaatattttaaaaggaaaaaaatatattaaaagaggagatatatttcaggttgttttaagccaaagatttgaagcgaaaattgataaaccggcattggaaatttataacacactgcgatcattgaatccttcaccttttatgttttttttcaattttaaagacttcaaaattctaggaagtagtcctgaaattttagttagatcaataaataatgaaattactataaggccaatagcgggcacaaggcctcgtggaaaatcaaaaactgaagacctgaaattaacaaaagagctactttcagaccccaaagaattagctgaacatcttatgcttctagatttaggcagaaatgatgttggaaaagtttctaagattggaacagttaaagtaacagaaagatttaaaattgaaaagtattcacatgtaatgcacattgtttctaatgtagtcggaaaacaaaacaataatttttcaaattttgaaacatttttatcaggatttccagctggaaccgtaagtggcgcgcctaaaataagggctatggaaataattgacgaattagaaacttctagaagaaatctttatgctggtggtgtgggctatttcactgcaaataaagattttgatacctgcatagcacttagaactgctcttataaaaaat

SEQ ID NO: 278871 - DNA, 596 bp, Unknown
  Bacterial polypeptide expressing nucleotide sequence isolated from the Sargasso Sea
tagtccagaaattttggtaagagttagaaataaaaaaataactataagaccaatagctggtacaaggaaaagaggaaaaaataaaatagaggactttaaattacaaagagagttgcttgctgacaaaaaagaactttccgaacatttaatgttattagacttgggacggaatgatacaagtaaaggatcgattggtggttcagtaaaagttactgaacaatttaaaattgaaaaatattcacacgtaatgcatattgtttctaatgttgaaggaaaatataatacaaaattatcattaattgatgcaatgtttgctggtttccctgcaggaactgtatctggtgcacctaaaattcgagcaatggagattatagataaactagaaataaataaaagaaagctatatgcgggagctataggatatttttccccaaataacagcatggatacttgtattgctttaagaaccgcattaataaaaaataataaactttatattcaagctggtgccggtattgttgcggatagcaatccagaaaaggagtatcaagaaactgtgaataaagctaaagcaataattgaggctgcaaagtgaa

SEQ ID NO: 278872 - DNA, 686 bp, Unknown
  Bacterial polypeptide expressing nucleotide sequence isolated from the Sargasso Sea
attatatgcagcgttaagaaagttaaatccgtcaccttatatgtattatcttaatcttgatgagtgtcacgtggtgggagcttctccagaaattttagtaaggttagagaaagacgaaataacattacgaccaattgcaggtacaaggaaaagaggtaaaaacgagcaggaagacaaactaaatgaacaagacttgttaaatgatccaaaagaacttgctgaacatttaatgcttattgatttagggagaaatgatgttggtagagttgctgatataggtacagtaaaagttacagaaaagatgataattgagagatattctcatgtgatgcacattgtttctaacgtagttggtagattatcttctgaacttagtttcatagatgcactgaaagcgacattaccagccggcactttatctggagcacctaagattagagcaatggaaataattaatgaattagagccaagctcaagaggtatttacggaggtgcaataggatatatttcttggaatgggaatattgatactgctatagcaatacgaactgcagttattaaagacaacttgatacatgttggggctggtgcgggtattgttgctgactcaaatcctgaaagtgaatgggaagagtgtcttcagaaatcgagagtatttcttgatgctatggagatgatttcatgat

SEQ ID NO: 278873 - DNA, 363 bp, Unknown
  Bacterial polypeptide expressing nucleotide sequence isolated from the Sargasso Sea
aatattctcatgttatgcatatagtatctaatgttgagggtaaatttagcgataaatattcaaggtttatgacattgttagctggttttccagctggaactgtatcgggtgctccaaaaataagggctatggaaataattgatgaattagagagatcaaaaagaaaagtttacgcaggaggtattggttatttttcatcaaatggagattttgatacttgtatagctttaagaacagcggtgataaaaaataataaattttatgtgcaagctggagcaggaatagttgcagatagtaaacctaaaaacgaatataaggaaactattaacaaagcaaaagcattgttaaaagctttagaataaa

SEQ ID NO: 278874 - DNA, 884 bp, Unknown
  Bacterial polypeptide expressing nucleotide sequence isolated from the Sargasso Sea
ttgagcaacagggccagcaacttgagtattcaataccagcgcccaccgttgttactcgaagaaaacgcccgcctgcaaatgccaaacccttttacggtactgcgtactttgcagcgcgaactgcattgtcagagtgatgaaccttttgcagtatttttaggcggtgttattggctacgacatggtggccacagttgaacaattacctgaagtagcggcggcggaaaaccaatgcccggactatgtgttttatctagctgaaaccttgctggtattggatcatcaaaccggcgacagccggctggtcggcaatgtgttttgtggtgagcaagcaccagcgaactgttttgttattggcaaacggctggaacagctaaagcagctgttgcaatcagcaccgacaacgcagcctcttacagctaaggtatctgctgagttaaaccttgatatcagcgacagcgactttatgcagcaggtcgaaaaactgaaacaacacattgtcgccggcgatatttttcaggtggtgccgtcgcgctgtttcagcttgccatgcccgcaaccactggccgcttatgcgcggttaaagcaacaaaaccccagcccttatatgttctacctaaaagatgccgcttttacgctgtttggcgcctcgcccgagtcggcactgaagtttgatgcccaaagccgccaggtagaaatataccctattgccggcacccggcgccgtggttttaaaagcgatggcagtatagacagggatctggacagccgcattgagttagagcttcgacaagatgagaaagagaaagccgaacatttaatgttggttgatttagcccgcaacgatgtcgcccgtatcagcgtgccgggcagccgttatgtcaa

SEQ ID NO: 278875 - DNA, 916 bp, Unknown
  Bacterial polypeptide expressing nucleotide sequence isolated from the Sargasso Sea
tttttttttattattaatacttttaaagatgaaaaaattggtaattatgaaaaaaagtttttagagatttctgaaaaactatttaatttagaaaatttaattagaattaaaaataacaacttatttaaaaactctaaaaaaaaaattattttcaaatctaatatttctaaaaaaaaattcatagataatgttagaaaggctaaaaaatatattaaaattggagatatttttcaggtagttttgagtcagagatttgaggctagattaacgaaagacccacttaaaatttataaaaagttaagaattactaacccttcaccgtttatgtatttttttaattttagtgactttcaaattatcggtgccagtccagaaattcttgtaagattaagagacaatattattacaataagaccaatagcgggaacaaggccaagaggtataaccaaaaaacaagatgaaaagtttaaaaaagatttactaaatgatcgtaaagaactttcagaacatttaatgctattagatttaggaagaaacgatacaggcaaagtatcaaaaataaatactgttaaagtgactgaaaaattcaagattgaaaaatattctcacgttatgcacattgtctcaaatgtaataggaaaatttaataataaattttcaaaatatgaaactttaatgtcaggatttccagctggaactgtctcgggcgctcccaagattagagcaatggaaataattgatgaattagaaaaaaacaaaagaaaaatatatgcgggtggaataggctatttttcctcaaacggagattttgacacttgtattgctctaagaacagcagtaagtaaaaataaaaagttttatgttcaggctggagcaggaattgtggctgatagcaaaccttataatgaatataatg

SEQ ID NO: 278876 - DNA, 574 bp, Unknown
  Bacterial polypeptide expressing nucleotide sequence isolated from the Sargasso Sea
gcttgagaaaggggaagtcactattaggccgatagcaggcactagaccaagaggaaaaaattctaaaattgataaaaaaaatgagttagatttgcttaaagatagaaaagaattagctgaacatcttatgctgttggacttaggcagaaatgatgttggtaaagtagttcaagaagactctgttaaagttacagaaaaatttaaagtagaaaaatattctcacgttatgcacatcgtctccaatgtaattggaaaatttaacaaaaaatgttctttatttgaaaccttgttatcaggatttcctgcaggaacggtaagcggtgccccaaaaataagagcaatggaaattattgatgaactagaaaagagtaaaagaaaattatatgcaggtggtattggttattttacaccaaataatgagtttgatacttgtatagcgttaagaactgctttgattaaagataataaattttatgttcaggcaggggcaggtatagtcgctgatagtaaacctgaaagagaatattacgagacaatacataaagctagagctttaatgaaagcggtagattaa

SEQ ID NO: 278877 - DNA, 813 bp, Unknown
  Bacterial polypeptide expressing nucleotide sequence isolated from the Sargasso Sea
tgtaaagatgatcttaaaattccagatattaaattatcaaggcctagaaatttgataatttatgataatttaaagaaaaagattcattatatagaaaatgtgtattcagatactaaaattaaaaactatgaagaaacttatggttcaattattgaaaaatttaatctttttcaaaactatgaaaatattaaattgccagaaaaactaacttttaaaaagaataaaaatataattaaatcaaatacatcaaaaaaaagatttaaattacttgttcagaaagcaaaaaaatacatcgaaaagggtgatatttttcaagtagttttaagtcaacgttttgagagaaaaattataaaaaagccaattgaaatttataattacttaagaaaatcaaacccttctccttttatgttttactttaattacaatgactttaatgttttgggtagcagtccagaaattttggtaagattaagaaataacaaagtaactattagacccattgctggtacaagaccaaggggaaaaaacattaaagaagataaaagatatgaaaaagatctacttaaagataaaaaagaattagctgaacatcttatgcttttagatcttggtagaaatgatgtagggaaagttgttacaaataattcagtcaaagttacagaaaagtttaaagtagaaaaatattcgcacgttatgcatattgtttctaatgtcgtaggatcatttgataaaaaatttactttatttgaaactttgctatctggttttccagccggtacggttagtggagctcccaaaataagggcaatggaa

SEQ ID NO: 278878 - DNA, 511 bp, Unknown
  Bacterial polypeptide expressing nucleotide sequence isolated from the Sargasso Sea
taaagaagacaaaaagtatgaagtagacttacttcacgacaaaaaagaattggcagagcaccttatgctattagatctaggaagaaatgatgtaggtaaagtggctaaaattaattctgtacaagtaactgaaaaatttaaagtcgagaaatattcacatgttatgcatattgtctcaaatgttataggaaaatttaattacaaattttctctatttgagaccttattatctggatttcctgcagggaccgttagtggtgctccaaaaattagagctatggaaattattgatgaactagagaaaaataaaagaaaaatttatgctggaggaattggatattttactcctaataacgaatttgatacctgtattactttaagaaccgctttaattaaagataaaaaaatttatgtccaagcaggagctggggtggttgctgatagtaagccagaaaaagaatatgctgaaacagtaaataaagcaaaagcactaatgagagctgtagattaa

SEQ ID NO: 278879 - DNA, 514 bp, Unknown
  Bacterial polypeptide expressing nucleotide sequence isolated from the Sargasso Sea
ttaagcgaagaccgtttttatgaaaaggatcttctaaaagacaaaaaagaactttctgaacatttaatgctattgaatcttggtagaaatgatgctggtaaagtatctaaaattgatacagtgaaagtaactgaaagcttcctaattgagcgatactcacatgttatgcacatagtttctaatgtggttggcgtatataataaaaaattttcaaaatttaagtctttattagctggttttcctgctggcacagtttctggtgcccctaaaattatagctatggaaatcattgatgaactacaaaaaactaaaagaaaagtttatgcaggtggtataggatatttttctgcaaatggtgaatttgatacttgtatagctttaagaacagctattgtaagaaaaaataaattttatgttcaagcgggtgctggaattgttgctgatagcgaacctttgaatgaatataaagagacagttaacaaagccaaagctttaattagtgcattaaaatgaa

SEQ ID NO: 278880 - DNA, 754 bp, Unknown
  Bacterial polypeptide expressing nucleotide sequence isolated from the Sargasso Sea
acattaaaattgggtgatatttttcaagttgttttaagtcagcgatttgaagcaaaacttactaaaaatcctatcgaaatatataaaaaacttagaatcaacaatccttcaccatttatgtatttttttaattttgatgactttcaaattattggagcaagtccagaaattttagttagattgagaaataataatattacgattagacctatcgcaggtactagacctagaggaagaaataaaaaagaagacaagttttatgagaaagatttattaagagataagaaagaactttctgaacatttgatgttattagacttgggaagaaatgatgctggaaaagtatcaaagattaattctgtaaaagttacagagaaatttgtaatagaaaaatattctcatgtaatgcacatagtttccaatgtaattggtaaatttaataaaaaatttacgaaatttgatactcttctatcaggttttcctgctggaactgtatcaggggctcccaagataagagctatggaaattatagatgaattagagagtacaaaaagaaaagtatacgctggtggaattggttatttttcagcaaatggagattttgatacttgtattgcactaagaactgcagtttcaaaaaataataaattttatgtacaagcaggagctggtattgttgcagatagcaaacctactaatgaatatagagaaacagtaaacaaagctaaagctttattaaaatcattagaataaa

SEQ ID NO: 278881 - DNA, 393 bp, Unknown
  Bacterial polypeptide expressing nucleotide sequence isolated from the Sargasso Sea
taaaagttaccgaaaggtttaaagtggaaaaatattctcatgtaatgcatattgtttcgaatgttaaagggaaactaagaaaagatttctctttatttgatacgtttttgtctgggtttcctgctggaactgttagtggtgcacctaaaataagagctatggaaattattgatgagttggaaaaatcaaaaaggaaactttatgcaggaggtattggttattttacggctaatcaagattttgatacttgtatagccttaaggacagctttaattaaaaataaaaaaatttacgtacaagctggcgcaggaatagttgcggatagtaatcctaaaaatgaatataacgagactgtaaataaagctaaagcattacttaaagcaataaattaaa

SEQ ID NO: 278882 - DNA, 624 bp, Unknown
  Bacterial polypeptide expressing nucleotide sequence isolated from the Sargasso Sea
gactcgaagatggaaaggtttcggttaggccaatagctggcacacgtccacgaggacggacaaatgacgaagatattgctcttgaagaggatttattggctgatccgaaagagatatcagaacatttaatgctgatcgacttgggacggaacgatgttggtcgagttgctgaaattggttcggttgaactaaccgaaaatatgctcgttgagcgatactctcatgtgatgcatatcgttagtcacgtcgagggtaatgttcggcaagaaataagcgcattagacgtattgagggcatgtttgcccgctgggaccctttccggcgcgccaaaagttcgcgcgatggaattaattaatcagtttgaacctattcgacgagggatatacggtggagctgtcggttatcttggttggtcaggcaatatggatactgctatagcaatccgaaccgccatcatcaaggatggcatgatgcacattcaggcgggcgctgggattgttgccgattctattccgcaatcggaatggatcgaaacgttgaataagggacatgctgttattcgagctgcaaatgcggctttggttggttttaaagatatcacgggtccgttgatacgagattaaa

SEQ ID NO: 278883 - DNA, 685 bp, Unknown
  Bacterial polypeptide expressing nucleotide sequence isolated from the Sargasso Sea
gattctatcttcaaaaaaaagataaatgtaaaatctaacactactaaaagtcaatttattgaaatggtcgaaaaagcgaaaaagtacattaaaattggtgatatttttcaagtggttttaagtcagagatttgaagcaaaacttacaaaaaaacctttggatatttataaaaaactaagagtgacaaatccatcaccttttatgtttttttttaattttaaagatttccaaattatcggtgcaagtcctgaaatattagttagattacgtgataatatcatcactgtaaggccaatagcaggtacacgtccaagaggcaaatcaagaaaacaagataattattatgcaaaagatcttttgaaagataagaaagaactcgctgagcacttaatgcttttagacttaggaagaaatgatgttggtaaagtgacaaagattaataccgtaaaagttacagaaaaatttacaattgaaaaatattctcatgttatgcatattgtttcaaatgtagagggtgttcacaatagaaaactctctaaattaaattcactattatgtggctttccagctggaactgtttctggtgctcccaaaataagggcaatggaaataattgatgaattagaaaaatcaaaaaggaaagtatatgcaggaggaattggttatttttctgcaaatggtgatt

SEQ ID NO: 278884 - DNA, 808 bp, Unknown
  Bacterial polypeptide expressing nucleotide sequence isolated from the Sargasso Sea
agaaaacaactttgaacctaaagatttctcattaaaggcatcagaggaagcttttgattcaaatttttctaaaaaagatttcttaaaagctgtatctgtggctaaagactacattgttgatggtgatgtaatgcaagttgttctagctcaagacttttcaaaggagttcactcatgagccttttgatttatatcaggcgcttagatttttaaatccatcaccttacatgtattttctaaactttggaatttgtcaggtagtaggagcatctccagagatcttagtaagacttcaaggggatcaaataaccttaagaccaatagcaggaacaagaagaagaggctcaaacgagattgaagatgaagaaaatgccaaagaccttctttcagaccccaaggagttagctgagcatttgatgttaattgatttaggaagaaatgatgttggaaagatttctaaaatgggaacagtgaaagtctctgaaaaaatggtaatagaaaaatattctcatgttatgcatattgtttctaacgtagaaggtagtaaaaaagaaaacttaagctttattgatgtcttaaaatctgctcttcctgcaggaaccttgtctggagcaccaaaaataagagctatggaaattattaatgaattagagccaagctcaagaggcatatatggaggagcaattggtcacatatcttgggatggagacattgatacagcaatagctatcagaactgcagtcattaaaaataataaaattcatgttggagctggggcaggggttgtggctgactcaatacccgagaat

SEQ ID NO: 278885 - DNA, 570 bp, Unknown
  Bacterial polypeptide expressing nucleotide sequence isolated from the Sargasso Sea
gaaataataatattacagtaagacctattgctgggacaagaccaagaggaaaaaataagaaagaagatagatattttgaaagagatttattaagagataaaaaagaactttctgaacacttaatgctgctagatttaggtagaaatgacacaggtaaagtatcaaaaattaatactgtaaaagtaacagaaaaatttgtaatagaaaaatattctcatgttatgcatatagtttcgaacgtagttggtaaatttaataaaaaattttcaaaatttgacacacttctttcgggctttccagcaggaactgtgtctggtgcaccaaaaataagagcgatggagataattgatgatttagaaaatacaaaaagaaaggtttatgctggtggcatcggttatttttcggctaatggtgattttgatacttgtattgcattaagaacagcagtttcgaaaaataataaattttatgtacaagctggtgctggtattgtagctgatagtaagccaattaacgaatataaagaaacagtaaataaagcaaaagctttattaaaatcactagaataaa

SEQ ID NO: 278886 - DNA, 415 bp, Unknown
  Bacterial polypeptide expressing nucleotide sequence isolated from the Sargasso Sea
aaagtatcaaaagtaaattctgtaaaagttactgaaaaatttgtcgtagaaaaatactctcatgttatgcatattgtgtcgaatgttgttgggaaatttaataaaaaatattcaaaatttgatactctattatcaggttttccagctggaacagtttctggtgcacccaaaataagggcaatggaaataattgacgaactagaaaaatctaaaagaaaagtttatgcaggtggtataggatatttttctgctaatggagatttcgatacatgtatagcattgagaacagctgtatcaaaaaataataagttttatgttcaagctggtgctggcattgtagctgatagtaaaccacttaatgaatataaagaaacaataaataaagctaaagcattattaaaatctcttgaatagt

SEQ ID NO: 278887 - DNA, 781 bp, Unknown
  Bacterial polypeptide expressing nucleotide sequence isolated from the Sargasso Sea
tttaaaatgggttaatatagctaaaaaatacattaaaaaaggtgatatttttcaagttgttctaagtcaaagatttgaaacaaatttaagcaaaaatcccctggaaatatataaaaaattaagaactactaacccctctccttttatgtatttttttaattttaaagattttcaaattattggtgctagtccagaaattttagttaggttaagaaatggtaaaattacaattagacctatagcaggaactagaccaaggggcataaataaaaaacaagataatttctacatcaaagatcttttaaaagacaaaaaagaactttcagaacatttgatgcttttagatctaggaagaaatgatgctggaaaagtatctaagataaatacagttaaagttacagaaagatttaaaattgaaaaatattctcatgtaatgcatatagtttctaatgtggttggaagttttaattatgaacattctaaatttaattctcttttagcaggatttcctgctggaacagtttctggtgctcccaaaataagggctatggaaataattgatgaattagaaaaatcaaaaagaaaggtctacgcgggaggaattggttatttctcttcaaatggtgattttgatacatgtattgctcttagaaccgctttggccaaaaaaaataaattttatgttcaagcaggggctggcgtagttgctgacagcaaacctataaatgagtacaaagaaactgtaaataaagccaaagctttaattaatgcattaagataa

SEQ ID NO: 278888 - DNA, 748 bp, Unknown
  Bacterial polypeptide expressing nucleotide sequence isolated from the Sargasso Sea
aaaattggtgatatttttcaagtagttcttagtcaaagatttgaaacaaaattaacaaaaaatcctgttgaaatttataaaaaacttagagtcacaaatccgtctccctttatgtatttttttaactttaatgactttcaaataataggtgcaagtcctgaaatattagttcgtttaagaaatggaaagataactataaggccgatcgctggaacaagacctcgtggaaaaaataaaattcaagacattaggtatgaaaaagatctactaagagataaaaaagaactagctgaacatttaatgcttcttgatcttggtagaaatgacacaggaaaggtatctaaaattaatacagtcagagttactgaacaatttaaaattgaacgttattcccatgttatgcatatagtttcaaatgtggttggtaaatttaataacaaatttagtaaattcgacactttgttatcaggttttccagccggaactgtatctggtgcacctaaaataagagctatggaaattatagatgaattggaaaatacaaaaagaaaagtttacgcaggtggaattggatatttctcagctaatggtgattttgatacatgtattgctctaagaacagcaatagcaaaaaataataaattttatgctcaagcaggtgctggaattgtagcagatagcaaacctaataatgaatataaagaaacagttaataaagctaaagcattaattaaatctttagaataaa

SEQ ID NO: 278889 - DNA, 587 bp, Unknown
  Bacterial polypeptide expressing nucleotide sequence isolated from the Sargasso Sea
tctgcgtgaaaaaaaaactcaagaatatgaacaagtcctaaaagaattaaatggtatagaaaatagcctttataaaaaaataaagaatcaagaaattaatctcgataaaaagaaaaggcttaaaattaaatcaaatataactaagtcaaaatttattaaaaatattaaaaaggcaaaaaaatatattaaagctggtgacatatttcaggtagttccaagtcaaagatttgaaactacttttaaaagtaaaggtagctcgctctataaagtactgagattgactaacccctcaccttttatgtactattttaatttacctaactttcaaattgttggctcaagtccagagattctggtcagacttagatctgatttgataactttgcgacctatcgcaggtacaaggccgcgaggtaaaaacataaaagaggaccgaaagtacgagttggacctactttcagacgaaaaagaaacatcggaacacttaatgttgttagatcttggtcgaaatgatgtcggtaaagtagcaaaaaaatcaactgtaagcgtaaccgccaaatttataatagaaaaatattctcatgtaa

SEQ ID NO: 278890 - DNA, 754 bp, Unknown
  Bacterial polypeptide expressing nucleotide sequence isolated from the Sargasso Sea
atacattaaagttggtgatatttttcaggttgttttaagtcaaagatttgaggcaagacttacaaaaaaaccaatagaaatttacaaaaaacttcgaataacaaacccatctccttttatgtatttctttaattttaatgattttcaaataattggcgctagtccagaaatattagtgagattacgaaataataaaataacaattagaccaatagcgggaacgagacctaggggaaaaaataaaaaagaagacttattttatgaaaaagatttattaaaagataaaaaagaattgtctgaacacttaatgttgttagatcttggaagaaacgatacaggaaaagtttcaaaaataaattctgtgaaagtaacagagagttttaaaattgaaaggtattctcatgtaatgcatatagtatctaatgtagaaggtgaatttaataacaaatatagtaaatttgatacactattatcaggctttcctgctggtacagtatcaggtgctccaaaaattagagctatggaaataattgatgaattagaaagtacaagaagaaaagtctatgcaggtggtattggttatttttctgcgaatggtgactttgatacctgtattgctttaaggactgctataacaaaaaataaaaagttctatgttcaatcaggtgcaggaattgtctctgatagtgttcctttaaatgaatataaggaaactgtaaataaagccaaagctttaattaaagcattagagtaa

SEQ ID NO: 278891 - DNA, 578 bp, Unknown
  Bacterial polypeptide expressing nucleotide sequence isolated from the Sargasso Sea
aggaagccaagtcacattaagaccaattgctggtactcgaaaaaggggtgcaaatgaagaagaagataagataaatgaaaaagatcttttaagtgatccaaaagaattagcggaacatttaatgttaattgatttaggaagaaacgatgttggtaaagtttcaaaaataggcagtgttaaagtaactgaaaaaatgatagttgagaaatattctcatgtgatgcacatcgtttctaacgtggtaggacaaatatcagaaggtctgcaggccatggatgtattaaaagcaacacttcctgctggtactctttccggtgccccaaaaataagagcgatggaaattattaatgaaatcgaacctagctctagagggatttatggaggagcaattggatatatctcatggaatggcgatattgatacagcaattgctatcagaactgcagttataaaagatcaattaatgcatgttggtgcgggtgcaggaatcgtagcagattcagatcctgaaaaagaatggcttgagtgcatacaaaaatcacaagtatttattgacgctatggagatgatctcatgat

SEQ ID NO: 278892 - DNA, 781 bp, Unknown
  Bacterial polypeptide expressing nucleotide sequence isolated from the Sargasso Sea
aatgattatcttcgactcagtagaagatacaatgacaattattactcctgtatttatgtcaaattacgacaaaaaaaattataaagacatatacaatgaagcttgtaataatataaaaaatatagttaatattcttaaaaaacctattgaaaataaagaaataatttataaaaaaaatgataaaattaaaattaaatcaaattataaaaaaagtgaatatttaaaaattataaaaaaagcaaaagaatatattttagccggtgatatatttcaagtagtcccttcacagagatttgaatcaaagtttaaacaatctccttttagcttatacaggtcattaagaaggttaaacccttctccatttctatactatctaaatttcaaagatttttctatcattggctctagtccagaaatactcgtaagggtaagaaataataatgtaaccattagacctattgcgggcacaagacctagaggtaaaaataaaattgaagacaataatttagctaaagaacttctttcagataaaaaagaaattgcagaacacttaatgctactagatttagctagaaatgacgtcgctaaagtttcaagatatggcaccttatctgttaccgaaaaaatggttatcgaaaaatatagccatgttatgcatatagtttctaatgttgagggaaaaaaattacaaaatattgattatcttgatgccttactttctggttttcccgctggaactgtaagtggggctcctaaaataagagcaatggaaataattgat

SEQ ID NO: 278893 - DNA, 383 bp, Unknown
  Bacterial polypeptide expressing nucleotide sequence isolated from the Sargasso Sea
agaaagttttataattgagagatactctcatgttatgcatatagtttcaaatgtaattggtgaatataataagaagttttcaaaatttaaatctcttcttgctggtttccctgcaggaactgtttctggtgccccaaaaataagagctatggaaattattgatgagttagagacaactaaaagaaaagtatatgcaggaggtattggttatttttctgctaatggagaatttgatacatgtatagctttgagaactgctatagctaaaaaagataaattttatgttcaagcaggggctggtattgttgcagatagtaagcccttaaaagaatatgaagaaacagtaaataaagctaaagctctaattaatgcgttaaaatgaa

SEQ ID NO: 278894 - DNA, 514 bp, Unknown
  Bacterial polypeptide expressing nucleotide sequence isolated from the Sargasso Sea
ttatcaaaagaactacttaatgataaaaaagaactagctgaacatctcatgctattagatttaggaagaaatgatgtgggtagagtttctaaaataaactcagttaaagtaactgaaaaaatgttgattgaatattattcccacgttatgcatatagtttcaaatgttgaaggaaatttagatacaaaatacgatgcagttgatgctctagtggcaggttttccagctggaacagtttcaggagcgcccaaaataagagctatggagattattgaagaacttgaaaatgtaaatagaagtttttatgcaggatgtatgggttactttgattctaatggtgatatggacacatgtattagcttacgaaccggcttagttaaagaaaacaaattatacattcaagcaggaggtggtatagtttatgattcagtagctgaaaacgaatatcaagaaactttaaataaggctaatgcattgatggctgctgcaaaagattcttataaatatatataat

SEQ ID NO: 278895 - DNA, 859 bp, Unknown
  Bacterial polypeptide expressing nucleotide sequence isolated from the Sargasso Sea
catgacaagtaatacaacaaaaaaagcgtttgaaaaaagtgttaaatcggcaaaagaatttatagaaaaaggtgatgtttttcagttggttttaagtcaaaaattagagtcgaatgttactcaaaaaccttttgaattatatcgaagcctgaggatggtaaatccctcaccatttatggcgttttttgattttggagattggcaactcattggttcgagtccagaggttatggtgaaagcccaacaaacagaaaaaggcattcaagccagtttgagaccaattgcaggaactcgtccaagaggtagaaatgatttagaagatgcaactctagaaaaagatcttttaaaagaccctaaagaaagagctgagcatgtgatgttagtagatctaggtcgcaatgacttaggtagagtttgttgcccaggtactgtttttgtaaaagaattaatggttatagaaaaatattctcatgtaatgcatatagtcagcgaagtggaaggaattctagaagcagtgaaggatgtgtgggatttgttgactgcttctttccctgctggaactgttagtggtgctccaaagattagagcaatgcaactaatcaatcaattagaaaaacaacgtcgagggccttattctggtgtttatggatctattgatttaaatggagcattaaatacagccattactattcgaacgatggttgttcgtaggaaaaataaaaatgattttactgttcaagtccaagctggggcaggtgttgttgccgattcaattccatctaatgagtatcaagaaactttaaataaggctaaagggatgtttactgctttagcttgcttagaagcttctgattcatga

SEQ ID NO: 278896 - DNA, 310 bp, Unknown
  Bacterial polypeptide expressing nucleotide sequence isolated from the Sargasso Sea
aaattttcaaaatttaaatcacttctagctggttttccagcaggcactgtttctggggcaccaaaaattagagctatggaaataatcgatgagttagaaaaaactaagagaaaagtttatgctggtggtataggttatttttcagcgaatggagaatttgacacctgtatagctttaagaacagctgttgctaaaaaaggcaaattctatgttcaggcaggagctggaatagttgctgatagcaaacctttaaaagaatatatagaaactataaataaggcaaaagctttaattaatgctttaaaatgaa

SEQ ID NO: 278897 - DNA, 526 bp, Unknown
  Bacterial polypeptide expressing nucleotide sequence isolated from the Sargasso Sea
agaggaaaaacaaagaaacaagataatttttataaaaaagatctgctaaaggataagaaagaactcgctgagcatttaatgttgttagatttaggaagaaatgatgttggtaaagtagctaaaattaatactgtgaaagtaactgaaaaatttttaattgaaaaatattctcatgttatgcatattgtttcaaatgttgtaggaattcataataaaagcctctcaaaattaaattcactcttagccggatttccagccggaacagtctctggggctccaaagattagagcaatggaaattattgatgaattagaaaaatcaaaaagaaaagtttatgctggtggtattggatatttttcttcaaatggtgattttgatacttgtatagctttaagaacagcagtcacaaaaaaaaataaattttatgttcaagcaggcgcaggaattgttgctgatagtaaaccgaataatgaatataaggaaacggtaaataaagcaaaagcattaattagtgcattaaaataat

SEQ ID NO: 278898 - DNA, 877 bp, Unknown
  Bacterial polypeptide expressing nucleotide sequence isolated from the Sargasso Sea
ttgattattcaatcatcaattaagaatttacattatagaactgagcttaaatcaagaaatattaaagttaaatcaaacacttctaaaaatagatttttgcaaatggtcaataaagcaaaagaatatattaaattaggagatatatttcaggtagttttaagtcaaagatttgaagctaagctaacaaaaaaaccaattgatatttataaaaaacttagagtaactaacccttcaccttttatgttttttttcaatttcaatgattttcaaattattggtgctagcccagaaatactggtgagactaagagataacaaaatcactgtaagaccaatcgctggaacaagacctagaggtaaaacattgggcgaggatcgtttttatgaaaaagatcttcttcaagataaaaaggagctttcagagcatttaatgttattggatttaggcagaaatgatgctggcaaagtttcaaaaattaatactgtaaaagtaactgaaagctttattattgagaaatattctcatgtaatgcacatagtatctaatgtcatcggtgaatatgataagaagttttcaaaatttaaatcacttctagctggttttcctgcgggaactgtttctggcgcaccaaaaattagagctatggaaataattgatgaattagaaacaactaagagaaaagtttacgctggtggtattggttatttttcagcaaatggtgaatttgatacttgtatagctttaagaacagctgtagctaaaaaaaataaattctatgttcaagctggtgctggaattgttgctgatagcaaacctttaaaagagtatgaagaaactgtaaataaagcgaaagctttgattaatgctttaaaatgaa

SEQ ID NO: 278899 - DNA, 946 bp, Unknown
  Bacterial polypeptide expressing nucleotide sequence isolated from the Sargasso Sea
atggcaggtgctttttttggttatatatcttatgaaaatatttataatatcgaggaaatatctaagttcaaaaaaaagaacactttaatgactcctgaacttatactttttattcctcagatattaattgtatatgataatgtttctaattctttatatatattaaagcatttcttatccggtgtaaaaaaagctcaagaatatgaacaagttcttaacgaattaaatgatatagaaaataacctttataaaaaagtaaacaatcataaaattaatctcaataaaaagaaaaggcttaaaattaaatcaaatataactaagtcaaaattcattaataatattaataaagcaaaaaaatatattaaagctggtgacatatttcaggtagttccaagtcaaagatttgaaactaattttaaaagtaaaggcagctcactctacaaagtactgagattgactaacccctcaccttttatgtactactttaatttgcctaattttcaaattgttggctcaagtccagagattctggtcagacttagatctgaattaataactttgcgacctatcgcaggtacaaggccgagaggcaaaaacataaaacaggaccgaaagtacgagttggacttactttcagacgaaaaagaaacatcggaacacttaatgttgttagatcttggtcgaaatgatgtcggtaaagtagcaagaaaatcaactgtaagcgtaaccgccaaatttataattgaaaaatattctcatgtaatgcacttggtttctaatgtaactggaaaacttaaaaaaaatatcagtacaattgaagcactaatggcaggatttccagctggaacagtatcgggagcaccaaaaataagagctatgcaaattatagatgaattagagactgatgtccgcggtatttatgcgggtggaattggttatatctctc

SEQ ID NO: 278900 - DNA, 280 bp, Unknown
  Bacterial polypeptide expressing nucleotide sequence isolated from the Sargasso Sea
ggttttccagcaggcacagtttctggagctcctaaaataagagcaatggagataattgatgaattagaaacaactaaaagaaaagtttatgcaggtggtattggatatttttcggcaaatggagaatttgatacttgtatagctttaagaacagcagttgctaaaaatgataaattttatgttcaagctggagctggtattgttgctgatagtaaacctattaaagaatatgaagaaacaattaataaagccaaagctttaatcaacgcattaaaatgaa

SEQ ID NO: 278901 - DNA, 517 bp, Unknown
  Bacterial polypeptide expressing nucleotide sequence isolated from the Sargasso Sea
acaaaaaaagaagatctgtcttatgaaaaagatctacttaaagataaaaaagaactttcagaacatctaatgcttttagatttaggaagaaacgatgctggcaaagtttcaaaaatcaattcagtaaaagttactgaaagcttcattattgagcgatattcacatgttatgcatatagtttcaaatgttattggaaaatatgataaaaaatttacaaaatttaagtcactgttagcgggttttcctgcggggactgtctctggtgctcctaaaataagggctatggaaataattgatgaattagagaatactaaaagaaaagtttatgcaggaggaattggctatttttctgctaatggagaatttgatacatgtatagctctgagaactgctgttgcaaaaaaaaataaattttatgttcaagcgggcgctggaatagttgctgatagtaaaccaataagagaatatgaagagactgtaaataaagctaaagctttaattaacgcactaaaatgaa

SEQ ID NO: 278902 - DNA, 715 bp, Unknown
  Bacterial polypeptide expressing nucleotide sequence isolated from the Sargasso Sea
cagagaatttgagaggaaaataaataaaacacctattgaaatttacaatcatttaagaaaatctaatccctcgccttttatgttctattttaattataaagattttaacattttaggtagtagtccagagatattggtaagacttagaggtggagaagtaacgatcaggccaatcgctggtacaagacctagaggaaaaagtataaaagaagataaaaaacatgaattagatcttttaaatgataaaaaagaattagcagagcatttaatgttactagatcttggaaggaatgatgttggaaaagtgtccaaagtaaatacggttaaggtaactgaaaaatttaaagttgaaagatattctcatgtaatgcacatcgtttctaatgttgttggtaaatttaataatagattctcattattcgagactttattgtcaggctttccggcaggcacggttagtggtgctcctaaaataagagctatggaaatcattgatgaattggagaaaaataaaaggaaattatacgcagggggtattggttatttcactcctgatggtgaatttgatacctgcatagctttaagaacagccctaataaaaaataagaaattttatgtacaagctggtgctggcgtagttgcggatagtaaacctgagaaagagtatgcggaaacagtaaacaaagctaaagcgttaatgagagcggtcgattaa

SEQ ID NO: 278903 - DNA, 782 bp, Unknown
  Bacterial polypeptide expressing nucleotide sequence isolated from the Sargasso Sea
agttaattcagtaaaaaattatattgctgagggtgatgttatgcaggttgttttagcacaagactttaaaatgccatttcatggcgactcttttcatctttataccgcattaagagagcttaatccttcaccatatatgtattatctcaaccttaatgaatgtaaagttgttggcgcatctcctgaaatattgattaggcttgaaggaagccaagtcacactaagacctattgctggtactcgaaaaaggggtgctaatgaagaagaagataagataaatgaaaaagatcttttaagtgatccaaaagaattagcggaacatttaatgttaattgatctaggaagaaacgatgttggtaaagtttcaaaaataggtagtgttaaagtaactgaaaaaatgatagttgagaaatattcccatgtaatgcacatcgtttctaacgtggtaggacaaatatcagaaggtctaaaggccatggatgtattaaaagcaacacttcctgctggtactctttctggtgccccaaaaataagagcgatggaaattattaatgaaatcgagcctagctctagagggatttatggaggagcaattggatatatttcatggaatggcgacattgatacagcaattgctatcagaactgcagttataaaagatcaattaatgcatgtaggtgcgggtgcaggaatcgtagcagattcagatcctgaaaaagaatggcttgagtgcatacaaaaatcacaagtttttattgacgctatggagatgatctcatgat

SEQ ID NO: 278904 - DNA, 511 bp, Unknown
  Bacterial polypeptide expressing nucleotide sequence isolated from the Sargasso Sea
aaaagaagacattttttatgaaaaagatttattgaaagataaaaaagagttatctgagcatttaatgcttctggatcttggaagaaatgacactggaaaagtttctaaaatcaatactattaaagtaacagaaagctttaaaattgagagatattcacacgttatgcatatagtttcaaatgtagagggtgaatttaataacaaatttactaaatttgacactttattatcaggttttccagcagggactgtttcgggtgcgccaaaaattagagctatggaaattattgatgaattagaaactacaagaagaaaagtttatgcgggtggcattggatatttttcagccaatggagactttgatacttgtatagctttaagaactgctattaccaaaaaagataaattttatgttcaagcaggtgctggaattgttgctgacagtaaaccaataaatgaatttaaagaaaccgaaaataaagctaaagctttattaaaagctctagaataa

SEQ ID NO: 278905 - DNA, 871 bp, Unknown
  Bacterial polypeptide expressing nucleotide sequence isolated from the Sargasso Sea
aaagaaaaagatgttgagcttaaatttgaatctaattttgaaaaagaaaaatttaaggaggcagtggaaaaggtcaaggaatatatattggaaggcgatgcaattcaagttgttctttctcaacgtttgaactttaacatcaaaaagagtgcctttgatatttatcgggctttaagaacgataaacccttctccatatatgtattttctgaaatttggcgatattgaagtcgttggttcttccccggaaattttggtgcgattagaagagcaaaaggtggaggtgcggcccattgcaggaactcgaaaacggggtaaaaatgaggatgaggatctggcgcttgaaaaagacttgcttaaggataaaaaggaactcgctgaacatattatgcttgttgatttagggcgcaacgatttgggaagggtagctaaattcagttccgtagaggtcaacgaaagttttactgttgagcgctattctcatgtaatgcatattgtttctaatgttcgcggtattttaaaagaagggctggattgttttgatgttttggcagcgacttttcctgcgggtacggtttcgggtgcaccaaaaataagggctatggaaataatagaagaattggaacccaatagacgaggtctttacgctggggctgtcggctatattggtttttcaggaaatatggatactgccattgccatccgcacattggtcgtgaaggataaaatggcttatttgggagtgggggcaggaattgtagctgattccgttccagaaaatgaatttgaagaaacaatgaataaaggtcgtgccctattgaaagctattgaattggctgagaaaagggtgggttatatgatcttaatgatcg

SEQ ID NO: 278906 - DNA, 859 bp, Unknown
  Bacterial polypeptide expressing nucleotide sequence isolated from the Sargasso Sea
taaaaaaaaatataatgaagttaagaaagaacttaatgaattaattttacaagcttcaaataaaaataataaaagaattatttcaaatattttaaaaaaaattgtcgtaagatctaatacatctaaaaataaatttttaaatatggtaaaaaaagccaaaaattacataaaaattggagatatcttccaagttgttttaagtcaaagatttgaagcaaaattaaacaaaacaccgttagaaatttataaaaaacttagagttactaatccctctccctttatgtttttttttaactttccagattttcaaattattggtgcaagtcctgaaatattagttcgattgagaaataacaaaattacaattagacccattgctggtacaaggcctagaggacaaaacaaaaaacaagaccatttttatgctaaagatctcttaaaagataaaaaagagttagctgaacatttaatgcttctagatcttggaagaaatgatgttggaaaagtttcaaaaattaatacagttaaagtaacagaaaaatttaatgtagaaaagtattctcacgtaatgcatattgtctcaaatgtgatgggtgaatttaataacaaattatctaagtttaaatcattattatcaggatttcccgctggaactgtctcgggcgcacctaaaattagagctatggaaattattgatgaattagagtcttcaagacgtaaagtttatgctggtggtattggttatttttcagctaatggtgaatttgatacatgtatagctttaagaacagctgttgctaaaaataataaattttatgtacaagctggtgctggtatcgtcgctgacagtaaaccacaa

SEQ ID NO: 278907 - DNA, 518 bp, Unknown
  Bacterial polypeptide expressing nucleotide sequence isolated from the Sargasso Sea
aacaaaaaaacaagacaatttttatatgaaggatttattaaatgataaaaaggaatgggctgaacacttaatgttgcttgatcttggtagaaatgatgtgggaaaagtttctaaaattaatactgttaaagtgacagaaaaatttaatatagaaaaatactcacatgtaatgcatattgtttctaatgttattggtttttttaataaaaaatttacaaagttcaactctttacttgctggatttcctgctggcacagtttctggtgcgcctaaaatacgtgctatggaaataattgatgaattagaaacctcaaaaagaaaagtttatgcaggtggaattggttatttttcggcaaacggtgaatttgacacatgtatagccttaagaaccgctttggctaaaaaaaataaattttatgttcaggctggagcaggtattgttgctgatagtaaacctttaaatgaatatgaggaaacagtaaataaagctaaggctttgttgagttctctaaattaat

SEQ ID NO: 278908 - DNA, 709 bp, Unknown
  Bacterial polypeptide expressing nucleotide sequence isolated from the Sargasso Sea
atttgaagcaaaattatcaaaagatcccatagatatatataaaaaattaagggtcacaaacccttcgcctttcatgtttttttttaattttcctgactttcaaattatcggtgcgagccctgaaattctagtcagactaagagacaataaaataactgtaaggcccatagccggaactagaccaagaggaaaaaattatactcaggataaattttatgaaaaagatttgctaaatgataaaaaggaactttcagaacatttaatgttattagatttaggaaggaatgatgcgggtaaagtttcaaaaattaacactgtaaaggtgacagagagctttactattgagagatattcacatgttatgcatatagtttctaatgtaacgggtgtatataataacaaatattctaagtttaaatcattactggctggatttcctgctggaaccgtttcgggtgcgccaaaaataagagccatggaaattattgatcagctagaaaaaacaaaacgaaaagtttatgctggaggtataggttatttttctgctaatggagaatttgatacttgtatagcactaagaactgcaatggtaaaaaataaaaaattttacgttcaagctggcgctgggatagtagcagatagtgtgcctttaaaagaatatgaggaaactgtaaataaagctaaagctctaattaatgctttaagataa

SEQ ID NO: 278909 - DNA, 526 bp, Unknown
  Bacterial polypeptide expressing nucleotide sequence isolated from the Sargasso Sea
gaggggtaagaacaaaaaagaagatataaaatacgaaaaagatttgttaaatgataaaaaggaattggcagaacatctaatgttactggatcttggaagaaatgatgcaggcaaagtttcaaaagttaatacggtgaaagtaacagaaagttttaaaattgaaagatactcacatgtaatgcatattgtttcaaatgttgagggaaaatttaataaaaaatatagtaaatttgacacattgctgtcaggattccctgctggaactgtatcaggtgctcctaaaataagagcaatggaaattattgacgaattagaaactacaagcagaaaagtttatgctggtggaataggttatttctcagcaaatggtgattttgatacatgtatagctcttagaacggctatatcaaaaaatggaaaattttatgctcaagcaggcgctggtatagttgctgatagcaagcctttaagtgagtattacgaaacggtaaataaagcaaaagctttattaaaatctttagaataa

SEQ ID NO: 278910 - DNA, 661 bp, Unknown
  Bacterial polypeptide expressing nucleotide sequence isolated from the Sargasso Sea
catgttctacgtgcgcacacctgaaggaacactcgttggcagttcacctgagatcatggtgcgcgttgttgatgacagaattacggtccgtccactcgcgggaacacgtcccagaggtaaaacccagaatgaagaccggcagctcgcagagtcccttcttgcagatccaaaggaacgggcagagcacatcatgctcattgatctcgggcgcaatgatgttgggcgggtcgctgaaataggttcagtagaactcagtgacatcatgtccattgaacgatacagccatgtcatgcacatcaccagtaatgtgaccggtcaacttgcagacgggcaaacgtcatttgatgcgttgcgagcctgcttaccggctggcaccgtttctggtgccccaaagatccgagccatgcagatcattgatgaactcgaaccacagagacgaggtccatacgctggtgctgttggttatattgattttggcgggacaatggacacctgcattgccctgagaacgatcgtcgtctcaaagggaaaggcctatgtacagtctggagcaggtattgttgcagacagcaaaccggaaaatgaattcgaggaaacagtaaataaagccaaaggcatgcttgtggccatcgcaatgacctccgcgcgatttcgacaatga

SEQ ID NO: 278911 - DNA, 844 bp, Unknown
  Bacterial polypeptide expressing nucleotide sequence isolated from the Sargasso Sea
atggaatttggaatttacaacgacggtatactttatgataacaaaaagaaacagtttttctatttttattatgatgaagatagaaaagacaaaattaaaaaaacagatgaagacgtaggaacatttgaaatgtcagatattgatataaatctgaacaaagaacaatttgaacgaattgtcaataaagcaaaggaatatgttctcagtggagatgtatttcaagttgtcttgtctagaagattttcatttgaagcaaaaggagattatttgcgagtgtatgaaaaacttcgagaattaaatccgtcaccatatatgtttcacttaaaaatggatgaaaatgtaatcattggatcaagtccagaaatgttattgagagttactggaagagatgtagaaacttttccaatagcaggtacaagaaaaattactgacgatgaagagaaaaatgaagaattaaaaaatgaattgttaaatgatgaaaaagaacttgcagaacatacaatgcttgtagatttaggtagaaatgatattggaagggtatgcgattatggaactgttaaagtaaaagaactaatggagataaagagattcagccacgttcaacacatagtaacacacgttgtaggtaaattgaatgagaaaaatgacatgtatgacgcatttgaagcagtttttcctgcaggaacagtctcaggagcaccaaaagtaagagcaatggaaataattcaagaattagaaccaactcaaagagaaacatatgcaggagccgtaggttatttttcatttaacggatgctgtgattttgcaattgcaattaggagtatttttgccaataaagaaagag

SEQ ID NO: 278912 - DNA, 791 bp, Unknown
  Bacterial polypeptide expressing nucleotide sequence isolated from the Sargasso Sea
aaatatgatgcaattctcaaaaaatttgaattatactcttgttttgaaaatataaaacttcctgatcaatttacatttaaagtaaacaaaaatttaattaaatctaacacctcgaaacaaaaatttatgtctttagtaaaaaaggcaaaaaactacataaaaaaaggtgatatttttcaagtagttctaagtcaaagatttgagagaaaaattcacaaaaaacctatagaaatttataatcatttgagaaaatcaaacccctctccttttatgttttattttaattacaaagattttaatattttaggtagtagtccagaaattttggttagactaagaaaagatgaagttacaattagaccgatagcagggaccagaccaagaggcagaaatttaaatgatgataaaagatatgaaatagatttgcttaaggataaaaaggagttggccgaacacctcatgttgcttgatcttggaaggaatgatgttggaaaggtagctaaagttaattctgtaaaagttacagagaaatttaaggtagaaaaatattctcacgtaatgcatatagtctctaacgtagttggaaaatttaataatcaatattcaatatttgagactcttttatcaggatttcccgctggaaccgtgagtggtgcacctaaaattagagcaatggaaataattgacgaactagaaaaaaataagaggaaattatatgcaggtggtattggttattttacccctaataatgaatttgacacatgtattgcgttaagaactgcgttgataaa

SEQ ID NO: 278913 - DNA, 331 bp, Unknown
  Bacterial polypeptide expressing nucleotide sequence isolated from the Sargasso Sea
gtcgttggaatatttaataaaaaatacagtaattttaaatctttattagcaggttttcctgctggtactgtctccggagctccaaaaattagagctatggaaattattgacgaattagaaatttcgaaaagaaaagtttatgcaggtggtattggctatttttcatctaatggcgagttcgatacatgcatagctttaagaactgctgttgtaaaaaataaaaagttttttgttcaagcgggtgcgggaattgtggctgatagcaaaccaatcaatgaatataaagaaactttaaataaagcaaaagctttattaagttctatagaataat

SEQ ID NO: 278914 - DNA, 730 bp, Unknown
  Bacterial polypeptide expressing nucleotide sequence isolated from the Sargasso Sea
aatgaagtacttattaccaggtttttcgttgtataggtctctaagaaggacaaacccatctccttacatgttttattttaattttaatgatttcagtattatagggtctagcccagaaatacttgttaaggtcgaaaatgatgacgaggttacaattcgaccaatagctggtacaagacctagaggtcttaacgaaagcgaagataaagcattggaaaacgagttattgaatgacaaaaaggaactcgcagagcacctaatgcttcttgaccttggtcggaatgatataggcaaggtgtcggaaataggatcagtaaagattacagaaagttttgtcattgaaagatatagtcacgttatgcatatagtttcaaatgttaagggaaagctttctgaaaatgttgataacatccgcgctcttctctcaggtttaccagccggaacagtttctggtgctcccaaaattagagctatggaaataattgacgaattagaaaatgaaaaaagaggtatttttggtggaggagttggttattttggagcatcgggccaaatggatttctgtatagctataagaactgctatactcaaagatcaggatttatatctgcaggctggaggtggagtagtttttgatagtgatgcagaaaaagaatttcaagaaacagtaaacaaatcaaaagctttgattaaagcagcagaagactcaatacacttttttggggattaa

SEQ ID NO: 278915 - DNA, 770 bp, Unknown
  Bacterial polypeptide expressing nucleotide sequence isolated from the Sargasso Sea
gaagtcacatattgtagaaggcgatatttttcaggccgttatttcacaacagttttctttacctcaacaaaaagatccattgactgtatatcggtccctacgaaatattaatccatcgccgtatatgtatttttttaattatgcagaccgttatattatcggatcatctccagagatattggtacaatcgcatcatcaaaaagcacgggttcgacccatcgccggcacccgtaaacgttcatttaaaaatgaaaaagcgttggtagatgatttaaagtcagatcaaaaagaaattgccgagcatatcatgttggtcgatttgggacgcaatgatttgggcaaggtatgtgaattcaagtccatcaaaatgactgatttaatgagcatagaaaaatattctcatgtgattcatatggtgaccaatgttgaaggtaaattaatggataatatgacccccatcgatttatttaaagccacatttccggcgggtacagtcagtggggccccaaaaatacgagccattgaaatcatacaagatatcgaaccaaccaatcgtgatatttactctggagcggttgggtattttaattttgatggagagatggatatgtgcattgctattcgtacaattattgctgaaaatgatcgatattatgtacaggcaggggctggaattgtgcatgattctgatccggaatcagaatacgaagaaacaaaaagtaaggctcacggcgtattattggcatgcttggaggaggtgagtacatgat

SEQ ID NO: 278916 - DNA, 921 bp, Unknown
  Bacterial polypeptide expressing nucleotide sequence isolated from the Sargasso Sea
atgaaattaaatataaaaatataaaaaaaaaattagaggaattattatttctttcaaatttaaatttaccaaataaagaagaattaaaaaaatacaaatcagaggtaagtgtaaaatctaatatctctaaaaaaaaatttatacaaaatgttttaaaagccaaagaatacattaaaagcggagatatttttcaggtagttttaagtcaaagatttgagacaaagctctcaaaaaaaccactggatatttataaaaaattgagatctgttaatccatcaccatttatgttttattttaattttaatgattttcaaataattggtgctagcccagaaatattagtaagacttagagatcaaaaaattactgttagacctatagctggaacgagacctagaggtaaaacttctaaacaagataggtactataaaaaagatcttctaaaggataaaaaagagttatctgagcatttaatgctattagatttaggtagaaatgatgcaggaaaagtatcaaaaataaatacagttaaagtaacagagagttttataatagagaaatattcacacgtaatgcacatcgtttccaacgtccaaggtgattacaacagcaaattttcaagatttgaaacattgctagcaggatttcctgctggaactgtatctggcgcacctaaaataagagctatggaaattattgatgaattagagaagaatcaaaggaaaatttatgctggtggcattgggtatttttctgcaaatggagaatttgacacatgtattgcattaagaacggcagtcgtaaaaaataataaattttacgttcaagcaggtgcaggaattgttgctgatagcaaaccagaaaaagaataccaagaaacagttaacaaagcaaaagctctaataaatgcaataaaatgat

SEQ ID NO: 278917 - DNA, 685 bp, Unknown
  Bacterial polypeptide expressing nucleotide sequence isolated from the Sargasso Sea
ccgattgatatttataaaaaacttagagtgactaacccatcaccttttatgtttttttttaatttcaatgacttccaaattattggtgcgagtccagaaattttagtgagactaagagataataaaattactgtaagaccaatagctggaacgagaccaagaggtaaaacattgagggaggatcgtttttatgaaaaagatcttcttaatgataagaaggaactttcagagcacttaatgttattagatttagggagaaatgatgctggtaaagtttcaaagataaatacggtaaaagtaactgagagctttattattgagagatactctcatgtaatgcatatagtatcaaacgttatcggtgaatataatcagaaattttcaaagtttaaatcacttcttgctggtttcccagcaggaactgtttctggagcaccaaaaattagagctatggaaataattgatgaattagaaacaactaagagaaaagtttatgcgggtggtatcggctatttttcagcaaatggtgaatttgatacatgcatagctttaagaacggctgtggcaaaaaaagataaattctatgttcaagctggcgctggaattgttgctgatagcaaacctttaaaagagtatgaagaaaccgtaaataaagcaaaagctttaattaatgctttaaaatgaa

SEQ ID NO: 278918 - DNA, 502 bp, Unknown
  Bacterial polypeptide expressing nucleotide sequence isolated from the Sargasso Sea
tatttattacgaaaaagatttgcttaaagataaaaaagaattgtcagagcatttaatgcttttagatttaggaagaaatgatgctggtaaagtatctaaaattaactctgttaaagttacagaaagcttcattgttgaaaggtactcacatgttatgcatatagtatctaatgtaatgggcgaatataataaaaaattttcaaaatttaagtctttattagcaggttttcctgcaggtactgtgtcaggtgcacctaaaattagagctatggaaataatagataaattggagacatcaaaaagaaaggtttatgctggtggtataggatatttttctgctaatggagaatttgatacatgtattgctttaagaacagctatagctaaaaataaaaaattttatgttcaagctggtgcaggaattgttgctgacagtaaaccaatcaatgaattcgaggaaacagttaataaagcaaaagctttgattaacgcattaaaataa

SEQ ID NO: 278919 - DNA, 475 bp, Unknown
  Bacterial polypeptide expressing nucleotide sequence isolated from the Sargasso Sea
agataaaaaagaattagcagaacacctaatgctactggatttaggtagaaacgatgtaggtaaagtttcaaaagtaaattcagtcaaagttacggaaaagtttaaagtggaaaaatattctcatgttatgcatatagtttcaaacgtaattggaaaatttaataagaatttttcaatatttgaaactcttttgtcagggtttcctgcaggaactgtaagtggagctccaaaaataagagcaatggaaattattgatgagcttgaaaaaaatagaagaaaactttacgcaggaggtataggctattttacacctaataatgaatttgacacttgtattgctttaagaactgctcttattaaagacaataaattttatgttcaagcaggtgcaggtattgtagcagatagtaaagctgataaagaatatttagaaacaattaacaaggcaaaagctttgatgaaagcggttgattaa

SEQ ID NO: 278920 - DNA, 826 bp, Unknown
  Bacterial polypeptide expressing nucleotide sequence isolated from the Sargasso Sea
ttggtaaaaaaaaccattaagtcaaatatttcaaaaaaacagtttttggaaaatgttaaaaaagcaaaaaaatacattcaaattggtgacatatttcaagttgttttaagtcaacgttttgaaacaaagctgacgaaaaaaccccttagcatttataaaaaattaagactgactaatccgtccccttttatgttttactttaactttaacgattttcaaattattggcgcgagccctgagatcttagttagactaagagataacaaagttacaattaggccgatagcgggaacaaggcctcgtgggaaaaatctcagtgaagataatttttataaaaaagaccttctatcagataaaaaagaaatttctgaacacctaatgctgttagatttagggagaaatgatattggaaaaatttctaaaataaacacggtaaaagtaactgaacaatttaaaattgagaaatattctcatgtgatgcatattgtttcaaatgtaacaggcgaatttgataaaaaaaaatcaaaatatgatacaatgatggctggcttccctgcgggtactgtatcaggtgcaccaaaaataagagctatggaaattattgacgaattagaaaaaaataaaagaaaaatttatgctggtggaattggttatttttctgctaatggtgactttgacacttgtattgccttaagaactgctttggctaaaaatggaaaatattatgtgcaagctggtgcaggtattgttgccgatagtgttccagaaaaagaatttcaggaaacagtaaataaatctaaagctttaattaaggctctcgactaaa

SEQ ID NO: 278921 - DNA, 711 bp, Unknown
  Bacterial polypeptide expressing nucleotide sequence isolated from the Sargasso Sea
gaagtttgaggatggttaatccatctccatacatgtcattttttgatttcggctcatggtatctgataggttcaagtcctgaagtaatggttaaagcagaaaaaaataaaaatagtcagattgttgccagcttaagaccaattgctggcacaagacctagagggattgataatcaacaagacttggcattcgaaaaggaattattaaaagatccaaaagagatagctgagcatgtaatgcttattgatcttgggagaaatgatcttggaagagtttgtgaaattggtactgtcaaggttaaggatttaatggttattgagaaatattcacatgttatgcatatagtcagccaagttgagggaatcttaaaaaaaaatgctgatgtatgggatttgctcaaagcatcttttcctgctgggacagtaactggcgccccaaaaataagagctatgcaattgattaagcactttgaaaaagatgctagaggaccttatgctggtgtatacggatctgttgatattaatggttccttaaatacagcaattacgataagaaccatgatagttaaaccctcaggagatgggaaatatgatgtatcggtgcaagcaggagcaggaatagttgctgattcttttcctgaaaatgaatatcaagagacgataaataaagcaaaggggatacttaaagcattggcctgtttggacaaataaa

SEQ ID NO: 278922 - DNA, 615 bp, Unknown
  Bacterial polypeptide expressing nucleotide sequence isolated from the Sargasso Sea
cagaaattttagccagattagaagacggagatgttaccgtaaggcctattgcaggtactagaagaagaggaaaaaataaagacgatgataaggctatggaattggatatggttaatgatcctaaagaaatagctgaacatctaatgctaattgaccttggccgtaatgatgttggcaggatcgctgaaccaggatcagttgaagtaacggaaaaattcggtatagagagatacagtcatgtaatgcatatggtttcaaatgtaacggcaaaaattaagaaaggtttaactgcaatggatgtctttaaagcaactttccctgccggaacagtatctggagctccaaaagtaagggcgatggagataattgacgaatttgagcctgttaaaaggggcatttatggcggagcagttggctatctttcctggcaaggaaatatggatatggctatagcgataaggactgctgtaataaaagacgatcttttatacatacaagccggaggtggatgggtggcagattccattccggaactggaatggaaggaagtattaaataaaggcagagtaatatttaaagccgcagaaatggttcaagaaaagctgaaaggatgat

SEQ ID NO: 278923 - DNA, 677 bp, Unknown
  Bacterial polypeptide expressing nucleotide sequence isolated from the Sargasso Sea
aatttataaaaaacttcgaaaaactaacccttctccatttatgtatttctttaattttaaagactttcaaataattggcgccagtccagaaatattagtaagacttagaaataataaaatcactattagacctatagcgggaacaagacctagggggaaaaataaaaaagaagatgttttttatgaaaaagatttattaaaagataaaaaagaattatctgaacatttaatgcttcttgatcttggaagaaatgatactggtaaagtttcaaaaataaatacggtaaaagttactgaaagttttaaaattgaaagatattcacatgttatgcatatagtttcgaatgttgaaggtgaattcaataataaattctcaagatttgatacactattatcaggatttccagccggaactgtatctggagcaccaaaaataagagctatggaaataattgatgaattagaaacaacaagtagaaaagtttatgcaggtggaataggttatttttcagctaatggagattttgatacatgtatagctttaagaacagctattactaaaaataaaaagttttatgttcaagctggcgcaggaattgtggccgatagtaaacccattaatgaatttaaagaaactgaaaataaagctaaggcattattaaaagctttaaaataaa

SEQ ID NO: 278924 - DNA, 550 bp, Unknown
  Bacterial polypeptide expressing nucleotide sequence isolated from the Sargasso Sea
ttcatgttcttctttaattttaatgattttcaaataataggtgctagtcctgaaatattagtaaggttaagagataataaaattactgtaagaccaattgcaggaacaaggccgagaggtaaaacatctaaagaagacctttattacgaaaaagatttattaaaagataaaaaagaactctctgaacatttaatgcttttagatttaggtagaaatgatgctggtaaggtgtctaagataaattctgttaaagtgacagaaagcttcattatagaaaggtattcacatgttatgcatattgtatctaatgtaattggtgattataataaaaagttctcaaagtttaattctttgctagctggttttcctgctggaacggtctccggtgccccaaaaataagagccatggaaattattgatgagctagaaacaacaagaagaaaagtttatgcgggtggtataggttatttttctgcaaacggtgaatttgatacttgtattgccttgagaacagctgtcgccaaaaataaaaaattctatgttcaagcgg

SEQ ID NO: 278925 - DNA, 829 bp, Unknown
  Bacterial polypeptide expressing nucleotide sequence isolated from the Sargasso Sea
gtattaataattcatgacaatgttaaaaaaaagattttttatattattaatgtttttaaagatgaaaaaataaaaaactataaaaaaaaatatgaagaaattaaaaatgaactaattagtttaagttttctatctcaacttaaaagtaaggaaaatgttttaagaaaatctaaagaaaatattattaagtctaatacttcaaaaggcaaatttattaatatggttaaaaaggcaaaaaaatacattaaaattggtgatatttttcaagtcgttttaagtcagagatttgagactaagcttacaaaaaaacctttagatatttataaaaaattaagaattactaacccatcgccttttatgtatttttttaattttcacgatttccaaattattggcgcaagtccagaaatactagttagattaagagataacgaaatcactataaggcctattgctggaacgcggccgaggggaaaaaataaaaatcaagataaattttatatgaaagatttacttaatgataaaaaagagctagctgaacatttgatgcttttggatttagggagaaatgatgttggcaaagtttcaaaaattaatacggttaaagtaactgaaaaatttaatatagaaaaatattctcacgttatgcatatagtttctaatgtggttggaatttttaatagaaaatattctaaatttaaatccttattggctggattccctgctggtactgtttctggagcgccaaaaataagagcaatggaaattattgatgagttagagtcttcaagtaggaaagtttatgctggtggaattggttatttctctg

SEQ ID NO: 278926 - DNA, 589 bp, Unknown
  Bacterial polypeptide expressing nucleotide sequence isolated from the Sargasso Sea
gcgcatgcgagtaaaacgcaagaagaggatgaggcgctcgaggtggacctcttggccgacgaaaaggagcgcgcggaacacgtcatgctcgtcgatctcggtcgcaacgacgtcggacgcgtgtccaaggctggaaccgtcaaggtggagaaactcatggagattgagcgatactctcacgtcatgcacatttcctcgaccgtgacgggtaacttgatagataacctcgggccctgggacgtccttcgcgcggcgcttcccgcgggcacggtgagcggcgcgcccaaggtgcgagcgatgcaaataatcgacgatttggaagtaacgcgccggggcccgtacggaggcggtatcggttacgtcggtttcaccggtgagatggatatggcgctcgcgcttcgaacgatggtgattccgacgcgtcaagcgaaagagagcgccgggtcgagagagtggatgattcacctccaggctggcgccggtgtcgtcgccgactcgaacccggaaagcgaatatcaagagacggtgaacaaggcagcggcgctcggtagagccatcgatttggcggagtccgccttcaccgactgag

SEQ ID NO: 278927 - DNA, 918 bp, Unknown
  Bacterial polypeptide expressing nucleotide sequence isolated from the Sargasso Sea
taataattataaacttaaataccagtctattaaaaaattattttcagaatttcaacattttggaaatataaaccttcctgaaaatttccatagaagtaaagctaaaataaaggttcggtcaaatatttcaaaaattaaatttacaaaaaatattcaaaaagcaaaagattacataaaaaaaggggacatttttcaagtggttttaagtcaaaggtttgagtcaaaaatagataagccccccattgaaatatataacactttaagagttatcaacccctcaccttttatgttttattttaattttgaggatttccaaattttgggaagtagcccggaaatactagttagattattaaatggagaagtgaccataagaccaattgcaggaaccaggcctcggggcaggaacaaaaaagaggatgataaatttacaactgaactattaaaggatccaaaagaattagcagaacatctgatgcttttagaccttggcagaaatgatatcggaaaagtatcaaaagttaatagtgtaaaagtgactgaaaagttcaagatagaaaagtattcccatgttatgcatattgtttctaatgttaaagggaaattaaataaaaatttttcactttttgaaactttcttatctgggtttcctgcaggtacagtaagtggagcgcccaaaataagagctatggaaattattgatgaattagaaaactctaaaagaaaactatatgctggaggaataggttattttacagcaaatcaagaatttgatacatgtatagcgttaagaacggctctaataaaagataaaaaaatttatgttcaggctggtgctggaatagttgcagatagtaatcctaaaaatgaatataatgaaactattaataaagcaagggcatttgctaaagcagcaat

SEQ ID NO: 278928 - DNA, 883 bp, Unknown
  Bacterial polypeptide expressing nucleotide sequence isolated from the Sargasso Sea
gatactggatcatataatcaatcaatggaagaaattgtccacattgaagacgagcttaaaaaacaaaacaactttgaaccgaaagatttctcatttaaggcatcaaaggaagcttttgattcaaatttttctaaagcagatttcttaaaagctgtgtctatagctaaagactacattattgatggtgatgtaatgcaagttgttctagctcaagacttttcaaaggatttcactcatgagccatttgaattatatcaggcgcttagatttttaaatccatcaccttacatgtattttctaaattttggagtttgtcaggtagtgggagcatctccagagatcttagtaaggcttcaaagggatcaaataaccttaagaccaatagcaggaacaagaagaagaggctcaaacgagattgaagatgaagaaaatgccaaagatcttctttcagaccctaaggagttagctgagcatttgatgttaattgatttaggaagaaatgatgttggtaagatttctaaaatgggaacagttaaagtttctgaaaaaatggtaatagaaaaatattcccatgttatgcacattgtttctaacgtagaaggtagtaaaaaagaaaatttaagctttattgatgttttaaaatctgctcttcctgcaggaaccttatctggagctccaaaaataagagctatggaaattattaatgaattagaaccaagctcaagaggcatatatggaggagcaattggtcacatatcttgggatggagacattgatacagctatagctatcagaactgcggtcattaaaaataataaaattcatgttggagctggggcaggggttgtgactgactcaatacccgagaatgaatggaatgagt

SEQ ID NO: 278929 - DNA, 893 bp, Unknown
  Bacterial polypeptide expressing nucleotide sequence isolated from the Sargasso Sea
ttctggttatttttcttacgatgtaattaggtatattgaaaatataccattctcatgcaaagatgatcttaaaataccagatgcccgaattttacgacctcgaacattaataatacatgataattataaacaaaaaatttactatatagttaattgtttttcagatgaaaaaataaataattataaaacaaaatttaatttaatagaaaatcaaattaaaaatttaatttttatatcaaattataatgctaatttatctgaatataattcaaaaaaaaaagttatagttaaatcaaatatttcaaaaaaaaaatttatacaaaatgtcaaaaaggccaaaaaatacattaaaataggtgatatttttcaagtggtattaagccagcgttttgaagcaaaattaacaaaaaatccagtcgaaatatacaagaagcttagaataaataacccctctccttttatgtatttttttaacttcaaggatttccagataattggagcaagtcctgaaattctagttagattaagagataataatattactataaggcctattgccggtactagaccaagaggtaaaaataaaaaagaagataaaaattttgagagagacttattgaaagataaaaaagaactttctgaacacttgatgcttttagatcttggtagaaatgatactggaaaagtatcaaaaattaattcagtaaaagttactgaaaaatttgtaattgagagatattctcatgttatgcatatagtatcaaatgtgattggtaaatttaataaaaaatattcaaaatttgacacacttctatcgggatttcctgcgggcacagtatctggagcaccgaaaattagagcaatggaaattattgatgaattagaaaatacaa

SEQ ID NO: 278930 - DNA, 952 bp, Unknown
  Bacterial polypeptide expressing nucleotide sequence isolated from the Sargasso Sea
aataatgtaaaaaatgatttgaatataccagatgttagattaatcaggcctaaatctttaatagttttagataattttgaaaaaaaaattcatttcataaaaaatttttttaaagaagaaaaagttacaaattatgccaaagctttaaataatgtaaaatcagaaattgagaatttaattttactagcaaataataaaaattattatgaagcaattgaattaaaaaaaagcataaaaattagatctaatataagtaaacaaaaatttttaaataatgtgattaaagctaaaaaatacattaaaaaaggtgatatatttcaagttgttttaagccaaagattcaaggctaaattggaaaaagatccaattgaagtttataaaaaacttagagtcactaatccttcaccttttatgtatttttttaattttcctgattttcaaattataggagcaagtccagaaatattggtaagacttagaaatggacaagtaacaataagaccaatagcagggaccagacctcgaggtaaaaataaaaaagaagatttattttttgaaaaagatctccttaaggataaaaaagaacttgccgaacatttaatgcttttagatttaggaagaaatgatgcaggaagagtttcaaaaattgatactgttaaagtaactgaaaaattcaaagtagagagatactcccatgtaatgcatatagtctctaatgttgtaggtaaatttaataataaatatagtaaatttgacactctgttatcaggttttcctgcaggaacagtttctggtgcgcctaaaataagagctatggaaattatcgacgaattagaaacaacaaaaagaaaagtttatgcaggtggtataggatattttaccgctgcaggtaaatttgatacatgtatagctttaagaactgcaatagttaagaataattattatacgctca

SEQ ID NO: 278931 - DNA, 809 bp, Unknown
  Bacterial polypeptide expressing nucleotide sequence isolated from the Sargasso Sea
atttttagaaaaagtaaaaaaggctattaaatatgttaagtcaggggacatactccaggttgttttgagccaaagatggaagataaaatttaaaaataatcctttttctttttaccgcgctttaagacaaacaaacccctccccttacatgttttttttcaattttaaaaatttccaaatagtaggtgctagccctgaaatattagtgaaagttgcaaatggaaaagtaacaataagaccaatagccgggacccgacccagaggtaaagatccgagagaagatttgtcattggagaaaaatctattggaagatccaaaagaaagagccgaacatctaatgctattagacttaggaaggaatgacgtaggaaaagtttgtaaaataggaacagtaaaaccaaccgaaaaatttgttgttgagaaatacagccatgttatgcatatcgtttctaatgtagaaggcactttaaaccccgacaaagataatatttctgccctattctcaggactacccgctggcactgtgtccggagcaccaaaaattagagcaatggaaatcataagcgagttggaagatgagaaacggggtgtatatgctgggggagtaggttattttggagcctctggagaaatggatatatgtattgccttaagaactgctgttatcaaaaatcaatatatttttattcaagcaggtgcaggaattgtttacgatagcgtacctgaaaacgaatactctgaaactgtgaacaaagctaaagccctattttcagctattaagcttgcccagaatcaaaattgggactaag

SEQ ID NO: 278932 - DNA, 712 bp, Unknown
  Bacterial polypeptide expressing nucleotide sequence isolated from the Sargasso Sea
tttcaagttgtgcttagtcaaagatttgaggcaaagttaactaaatcacccctcgagatttataaaaaactaagagtaacaaatccttctccttttatgtttttttttaattttaatgattttcagataattggagcaagtcctgaaattttagttagattaagggataataagattaccgtaagaccaattgcaggaactagaccaagaggaaaaaatgtatctcaagataaattttatgagaaagatttacttaaagataaaaaagaactctcagaacacctaatgttgcttgatcttggtagaaacgatgctggaaaagtatcaaaaataaattctgtaaaaatcacagaaagctttgttatagaaaaatattctcacgttatgcacatagtttctaatgtagttggtgaatataataataaattctctaagtttaaatctcttttagctggttttcctgcgggaacagtttccggtgctccaaaaataagagctatggaaattatagatgaattggaaaaaacaaaaagaaaagtttatgctggaggaattggatatttttcagcaaatggagaatttgatacatgtattgctttaaggacagcggttgcaaaaaaagataaattttatgttcaagctggagctggtattgttgctgacagtaaacctttgaaagaatatgaggaaacggttaacaaagcaaaagctt

SEQ ID NO: 278933 - DNA, 769 bp, Unknown
  Bacterial polypeptide expressing nucleotide sequence isolated from the Sargasso Sea
agaaaagctaaaaaatatattaaaattggtgatatttttcaggttgttttgagccaaagatttgaaacaaaattaactcaaaatccaattgaaatttataaaaaacttagagtaaaaaatccttccccatttatgtatttttttaatttcaaagattttcaaataattggggctagccctgaaattttagttagattaagaaataaaaaaattactgtaagacctattgctggtactagacctaggggtaaaaatctaaaggaagataaattttatgaaaaggatttattaaaagataaaaaagaactttctgaacatttaatgcttcttgacttaggaagaaatgatactggaaaagtttcaaaaattaatacagtaaaggtaactgaagaatttgtaatagaaaaatactcacatgtaatgcatatagtttcaaatgttacaggtgagtttaataaaaaatattcaaaatttgatacacttttatcaggttttcctgctggtactgtgtctggtgctcctaaaataagagctatggaaattattgatgaattagaaaatactaaaagaaaagtatatgcaggtggtattggatatttctcagcaaatggagattttgatacctgtatcgcattaagaactgcagtttcaaaaaataataaattttatgttcaggcaggcgccggtattgttgctgatagtaagccaataaatgaatataaagaaactgtaaacaaagccaaagctttattaaaatctttagaataaa

SEQ ID NO: 278934 - DNA, 812 bp, Unknown
  Bacterial polypeptide expressing nucleotide sequence isolated from the Sargasso Sea
aatggcaggctctttttttggatatctatcttatgaaaatattcataatattgaaatgattaaaaagtttaaaaaaataaataagttaaagacccctgacctcatattatttgttccaaaaaatttaataatttttgataatttagataattctctctattttataagacattttcttggtgaaaataatgaaactataaaatatgaaaacttgatcagagatgtaaataaaatacaaaacaaaatcataaataatattaaattagatccaataaattttgataaaggcattaaaacaaaagtaaagtctaatatgacaaaaacaaaatttattaaaaatattaaaaaagctaaaaattacatcaaaaatggagatatattccaagtagtccccagtcaaagatttgaagtagattttgatgcaaagggaagcactttgtacagggttttaagagagacgaacccctccccttttatgtattattttaatctaccagactttcaaattgttggctctagccctgaaattcttgtgagattaagaaaaaatacagttaccgtcagaccaatcgcaggaaccagaccgagaggtgtcaataaaaaacaagataaaaaatttgaaattgacctgatgtcagataaaaaagaactagcagaacatttaatgctgcttgatctaggcagaaatgatgttggtaaggtctcaagaaaatcaagcgtttctgtaacagctaagttcattgttgaaaaatattcgcatgtgatgcatatagtttctaatgttattggtaagttaaaaaaagatatatctc

SEQ ID NO: 278935 - DNA, 590 bp, Unknown
  Bacterial polypeptide expressing nucleotide sequence isolated from the Sargasso Sea
agaaatattagtgagattaagagataacaaaattactgtaagaccaattgctggaacaaggccaagaggtaaatcattaaaagaagacatttattatgaaaaagatttattaaaagataaaaaagaactctctgaacatttaatgcttttggatttaggaagaaatgatgcaggtaaggtatcaaaagtaaattctgttaaagtaactgagagctttattatagagagatattcacatgttatgcatatagtatccaatgtaattggtgattataataaaaaattttctaagtttaaatctttactagctggttttcctgctggaacagtgtctggtgctccaaaaataagagcgatggaaattattgatgaattagaaacgacgagaagaaaggtttatgcaggtggcataggttatttttctgcaaacggtgaatttgatacttgtattgccttaagaacagctgttgccaaaaataaaaaattctatgtacaagctggtgcgggaattgttgctgatagtaaacctataaacgaatatgaggagactattaataaagctaaggctttaattaatgctttaagataat

SEQ ID NO: 278936 - DNA, 799 bp, Unknown
  Bacterial polypeptide expressing nucleotide sequence isolated from the Sargasso Sea
aatggtagcaaaggccaaagattatattctggccggcgatatttttcaggttgttctgtcccaaaggtttaaaattccttttaagttgcctccatttgcactctatcggtcgctcaggcgaacaaatccatcgccttttttatattatctaaattttgaaaatttttcagtggtgggctccagtcccgaaatattggtgcgtatgagagatggcaaagttacaattcgtccactcgcgggcacaagaaaaagaggagcaacccaggccgaagatcaaaaactagaaaaagaattacttggtgatcaaaaagaactggcagaacatcttatgttacttgacttgggtcgaaatgatgtaggccgagtcgctaaaatagggacggtcaaggttactgaaaaaatgatgattgagaggtattcacatgtaatgcacatctcttcaaatgttcaaggagaaatagacccaaagagaggagctatggaagctctcactgccggattcccggcagggactgtctcaggcgcaccaaaaattcgggcaatggaaattattgatgaacttgaggtggagaaacggggaatatacgccgggactgtcggatacttctcagcgaatggcagcatggacacctgcatattacttagaaccgcgattttgaaagatggtaacatgtacgttcaagcaggagccggagttgtatcagacagtgtcgctgaggcggagtatcaagagtgtcagaacaaggcggaggctctgatccggtcagcggaggaggctcataaatatattaacgaataa

SEQ ID NO: 278937 - DNA, 508 bp, Unknown
  Bacterial polypeptide expressing nucleotide sequence isolated from the Sargasso Sea
gaggatcgtttttatgaaaaagatctgcttaaagataaaaaagaacttgctgaacatttaatgttgttagatttaggaagaaatgatgctggcaaagtttcaaaaataaactctgttagagttactgaaagctttataattgaaaaatattctcatgtaatgcatatagtttcaaatgttgttggaaaatataataggaaattttccaaatttaagtcacttttagctggtttcccagctggtactgtctctggagctccgaagataagagctatggaaataattgatgaattagaatcaactaaaagaaaagtttatgcaggtggaatcggttatttttcagcaaatggagaatttgatacatgtatagctttgagaactgcagttgcaaaaaaagataaattttatgttcaagctggagcgggtattgttgcagatagtaaacctttaaaagaatatgaggaaacagttaacaaagctaaagctttgatcaatgcattaaaatgaa

SEQ ID NO: 278938 - DNA, 877 bp, Unknown
  Bacterial polypeptide expressing nucleotide sequence isolated from the Sargasso Sea
gtgttcgaccaggtgcggcggcaagtgacggctgtcgcctatgccgatcacagccaaaacgacgatccaatagccgccagagccgcagctgaacggcggctggatgccctggagagccaattgcagcagccccttccggcgggcctgacgccactggcctggagagagcaggacgcccaatcgctcaaggtggtcagcaatacctcccagagcgcttttgaagacgctgtccgccaagcccgcaaccacatcggcgctggtgatgtcttccaactggtgctgtcgcagcgtttggaagcggaggtcagccatgacccctttgatctgtaccgcagcctgcggatggtgaacccatcgccctacatgggcttcttcagcttcaacggctggcatctgattggctccagccccgaggtgatggtgaaagccgacccccaagacgacggccgggtggtggcctcgctgcggccgatcgccggaactcgccgccgcggcagcacagccgccgaggatcaagccctcgaagcggagctgctcgccgatcccaaagaacgggccgagcacgtgatgttggtggatctcggccgcaacgacctgggccgggtctgccagcccggcagcgttgaggtcaaagagctgatgctgattgagcgctattcccacgtgatgcacatcgtttcccaggtggaaggcgatctgcagccgcagcacgatgtgtgggatctcctgcgggcgtccttcccagcaggcaccgtcagcggggcacccaagattcgggccatgcagctgatccatgagctggagcccgatgcccgcggcccctactccggggtctatggctcgatggacctcagtggtgccctcaacaccgccatca

SEQ ID NO: 278939 - DNA, 613 bp, Unknown
  Bacterial polypeptide expressing nucleotide sequence isolated from the Sargasso Sea
tttcaaataattggtgcaagtccagaaatcttggtcagattgagagataataacataactataagaccaattgctggtactagaccaagagaaaaaaacaaaagtgaggataaattttttgaaaaagatctactgaatgataaaaaagagttatcagaacacttaatgttactagatttgggaagaaatgacactggtaaagtatctaaaataaatagcgtaaaggttactgaaagatttgctgtagaaaagtattctcatgttatgcatatagtttctaatgtggttggtaaatttaatcaaaaatattctaaatttgatacacttttatcaggatttccagcaggaactgtatcaggtgctccaaaaataagggccatggaaattattgatgaattagaaagcactaaaagaaaagtttatgctggtggtattggctatttttcagcaaatggagactttgatacatgtatagctctaagaactgcagtaacaaaaaaaaataaattctacgttcaggccggtgcgggaattgtagctgatagcaagcctttaaatgaatataaagaaactataaataaagctaaagcactattaaaatctttagaataaa

SEQ ID NO: 278940 - DNA, 343 bp, Unknown
  Bacterial polypeptide expressing nucleotide sequence isolated from the Sargasso Sea
attgtctcaaatgttataggagagcatgataagaggttttcaaaatttaagtcattattagcaggttttcctgcaggaactgtttctggcgctcccaaaattagagctatggaaataattgatgaattggaaacaacaaaaagaaaagtttatgcaggaggtattgggtatttttccgctaatggagaatttgatacttgtatagcgctgagaactgctgttgctaaaaaaaataaattttatgttcaggctggtgctggaatagttgcagatagcaaaccactcaaagaatatgaagaaactgtaaacaaagctaaagctttaattaatgcactaaaatgaa

SEQ ID NO: 278941 - DNA, 616 bp, Unknown
  Bacterial polypeptide expressing nucleotide sequence isolated from the Sargasso Sea
ctcccccgaagctttggttagactaagtggtgataaagcttcccttttacccattgctggaactagacctcgaggaaaagatgcatccgaggatctctcgcacgaacaatctttgttggccgatgaaaaagaaattgcagagcacgttatgctggttgatcttgccagaaatgatctaggccgtgttgctaagcacagcacaatagaggttaaaccctatcagtcaattgagcactacagtcatgtcatgcacattgttagtggtgttgaagggacattagaagatgataaagatgcttttgatttgtttgctgcagcctttccagcaggaacccttgtcggtgcaccgaaggtgagagcgatggagttaattgatgagattgagcctaatttgagaggggtttacggcggaaccgtcggctattttgctaaaaacggcgatatggaccaagccatcgctatacgaaccattgtgttttcagacggtcaatattgctttcaagcaggtgctggtattgttgccgacagtgtacctgagaacgagtttaatgaggtcatggccaaaagtgaaatcttaagaacagcccttaaaatggttaaagaagggtcattatga

SEQ ID NO: 278942 - DNA, 673 bp, Unknown
  Bacterial polypeptide expressing nucleotide sequence isolated from the Sargasso Sea
tataaaaagctaagggtaaccaacccttccccttttatgtatttttttaattttcatgacttccaaataattggggcaagccctgaaatactagtaaggcttagagacaataagattacagtcagaccaatagctggaacaagaccaagaggtaaaaatatagctcaagataaattctatgaaaaagatttacttaaagataaaaaagaactttctgaacacttgatgttacttgatttaggtagaaatgatgctggtaaagtttcaaaaattaatactgtaaaagtaactgaaagctttgtaattgaaaagtattctcatgtaatgcatatagtttctaatgttgttggggaatataataaaaaattttcaaaatttaaatctctcttagctggttttcctgctggaacagtctctggagctcctaaaattcgagctatggaaataattgatgaattagaaacaactaaaagaaaagtttatgcaggtgggataggatatttctcagcaaatggtgagtttgatacctgtattgcgttaagaactgcaattgccaaaaacaataaattttatgttcaagctggagcgggaatagttgcagatagtaaaccaatcaaggaatatgaagaaacagtcaataaagccaaagctttaataaatgcattaaaatgaa

SEQ ID NO: 278943 - DNA, 592 bp, Unknown
  Bacterial polypeptide expressing nucleotide sequence isolated from the Sargasso Sea
cctgagattttagtgagattaagagataataaaatcacaatacgaccaattgctggcacaagaccaagaggaaaaaacaaaaagcaagacaaattttttgaaaaagatttattaaaagataagaaagaattatctgaacatttaatgcttttagatctaggtagaaacgacactggaaaagtttctaaaattaattcagtaaaagtaactgaaagttttaaaatcgaaagatattctcacgttatgcatattgtttctaatgttgagggatcttttaataataaattttctaagtttgaaactcttttatctggttttccggcgggaacagtttctggtgcgcctaaaattagagcaatggaaataattgatgaactagaaaatactagaagaaaagtatacgcaggaggaattggatatttttctgctaatggtgactttgatacttgtatagctttaagaacggctgtttcaaaaaataacaaattttatgttcaatctggtgctggtattgtagctgatagcaaaccaattagtgagtttaaagaaactgaaaataaagccaaagctttattaaaagctttagagtagt

SEQ ID NO: 278944 - DNA, 607 bp, Unknown
  Bacterial polypeptide expressing nucleotide sequence isolated from the Sargasso Sea
gttttaggaagtagcccagaaatactagttagattaagaaaaggagaagtaacaataagacccatagctggcacgagacctagaggaaaaaataataaggaagataaaaaatacgagatagatttactacgcgacaaaaaagaattagcagaacaccttatgcttttagatctcggaagaaatgatgtaggaaaagtagcaaagactaattccgtaaaggttactgaaaagtttaaagttgagaaatattctcatgttatgcatatagtgtctaatgttgtaggtaaatttaataataaattcactttatttgaaactttattgtctggctttcctgctggaacagttagtggagctcccaaaatacgagcaatggaaattattgatgaattagaaaaaaataaaagaaaactttatgcaggtggaataggatattttactccaaataacgaatttgatacatgtattactttaagaactgctttaattaaggataaaaaattttatgttcaagctggagcaggagtagttgcagacagtatacctgaaaaagaatatgcagaaacagtaaataaagcgaaagcgttaatgagagcggttgattaaa

SEQ ID NO: 278945 - DNA, 834 bp, Unknown
  Bacterial polypeptide expressing nucleotide sequence isolated from the Sargasso Sea
ttaagaatttttaaaaaagaatcttttaaaaaaattaaaacaaataaaaataaaatattctctaatataactaagaaaaaattcaaaaaaaatgtattgcaagcaaaaaaatacataaaaagaggtgatatttttcaagtagttttgagtcaacgttttgagacaaaacttactaaaaaacctattgaaatttacaaaaaattaagacttaccaacccatcaccatttatgtatttttttaattttaaagattttcaaattataggcagtagtcctgaaattttagtaagattaagaaataatagactaacaattagacctatcgcgggtacaatacctaggggaaacaatgtgaaaaaagataattttaataaaaacaaattattgaatgataaaaaagaattggcagagcacctgatgcttttagacttaggaagaaatgatataggtaaagtttcaaaaattaacaccgttaaagtaactgaaaagtttataatagaaaaatattcacacgtaatgcatattgtttctaatgttgaaggcatctttaacaaaaaatatagtattcttgatactatgttagctggatttccggctggaactgtatctggagctcctaaaataagagcaatggaaataattgatgaactggaaaaatctaaaagaaaaatgtatgcaggagctataggatacttctctgctaataaaaattttgatacttgtattgcgttaagaacagctcttataaaaaataataaattttatattcaatcaggcgccggagttgttgcggacagtaaaccagaaaaagaatatcaagaaacagtcaataag

SEQ ID NO: 278946 - DNA, 736 bp, Unknown
  Bacterial polypeptide expressing nucleotide sequence isolated from the Sargasso Sea
caataataatccctttaatttatatagaagtttgaggatggttaatccatctccatatatgtcattttttgatttcggctcatggtatctgataggttcaagtcctgaagtaatggttaaagcagaaaaaaataaaaatagtcagattgttgcaagcttaagaccaatagctggcacgagacctagaggtattaataatcaacaagacttggaattagaaaaggaattattaaaagatcccaaagagatagctgaacatgtaatgctaattgatcttggtagaaatgatcttggaagagtttgtgaaattggtactgtcaaggtcaaggacttaatggttattgagaaatattcacatgttatgcatatagtcagtcaagttgagggaatcttaaaaaataatgctgatgtatgggatttgcttaaagcatcctttcccgctgggacagtaactggcgccccaaaaataagagctatgcaattgattaaggattttgaaaaagatgctagaggaccttatgctggtgtatatgggtctattgatattaatggtgcattaaatacagcaattacaataagaaccatgatagttaaaccctcaagagatgggaaatatgatgtgtcagtgcaagcaggagctggaatagttgctgattcttttcctgaaaatgaatatcaagaaactataaataaagcaaaggggatacttaaagcattagcctgtttggataaataa

SEQ ID NO: 278947 - DNA, 535 bp, Unknown
  Bacterial polypeptide expressing nucleotide sequence isolated from the Sargasso Sea
aagaggctcaacgagattgaagatgaagaaaatgccaaagatcttctttcagatcccaaggagttagctgagcatttgatgttaattgatttaggaagaaatgatgttggaaagatttctaaaatgggaacagtgaaagtttctgaaaaaatggtaatagaaaaatattctcatgttatgcacattgtttctaacgtagaaggtactaagaaagaaaatttaagctttattgatgtcttaaaatctgctcttcctgcaggaaccttatctggagcaccaaaaataagagctatggaaattattaatgaattagaaccaagctcaagaggcatatatggaggagcaattggtcacatatcttgggatggagacattgatacagcaatagctatcagaactgcggtcattaaagataataaaattcatgttggagctggggcaggggttgtagctgactcaatacctgagaatgaatggaatgagtgccttcaaaaagctcatgttttcttagatgccattgagatgattaaatgat

SEQ ID NO: 278948 - DNA, 889 bp, Unknown
  Bacterial polypeptide expressing nucleotide sequence isolated from the Sargasso Sea
aattttcttcgttcaaaatatctttaaagaggaaaatattattaattatgaacttaaatatcaggctattaaagacactttttcagagttacaacattttggtaatataaagcttccagaaaattttcataaaagtaataaaaaaattaagattaaatcaaatatatcaaaatcaaagtttaaaaaaattgtacttaaagcaaaaaattacattaaaaagggagatatttttcaggttgtgttaagtcaaagatttgaagcatcaattgataaaccgccacttgaaatttataataccttaagaatattaaacccttcaccatttatgttttattttaactacgacgactttcaaattttaggtagtagtcctgaaattttagtcagattattaaataacgaaataactattaggcctatagcaggtacaagaccaaggggtagaaataaaaaagaagataaaaaattgaccactgaactattaaaagacccaaaagaactcgctgaacacctgatgcttctagatcttggaagaaatgacgttggtaaagtatcaaaaactaatagtgtcaaagttacagaaaggtttaaagtagaaaaatattcacatgtaatgcatattgtttcaaatgtaacaggaaaactaaaaaaagatttttctctttttgagacatttttatcaggatttccagccgggacagtcagtggtgctcccaaaataagagccatggagattatagatgaattagaaaatacaaaaagaaatctttatgcaggaggaataggatattttactgcaaatcaagattttgatacttgtattgctttaagaactgctctgattaaaaataaaaaaatatatgttcaagctggcgccggaatagtcgcc

SEQ ID NO: 278949 - DNA, 379 bp, Unknown
  Bacterial polypeptide expressing nucleotide sequence isolated from the Sargasso Sea
agtttcaaagtagaaaaatattctcacgttatgcatattgtttcgaatgttgttggaaaatttaataaacaagtgtcaacttttgaggctttgttagcaggttttccagctgggacagtaagcggtgcaccaaaaataagggctatggaaattatagatgaattagaaaaaaatagaaggaatttatatgcgggtggtattggatattttacgccaaataatgaatttgatacatgcatagctttaagaacagctttgattaagaataataaattttttgtacaagccggagcaggtattgttgccgatagcaagccagaaaaagaatttactgaaactgtaaataaagcaaaagcattaatgagagctgttgattaaa

SEQ ID NO: 278950 - DNA, 287 bp, Unknown
  Bacterial polypeptide expressing nucleotide sequence isolated from the Sargasso Sea
tttatcaggtttcccagcaggtacggtaagtggtgctccaaaaattagagcaatggaaataattgatgaacttgaaaaaaataaaagaaaattatacgcaggagggataggttactttacccctgataatgaatttgatacctgtattgctttaagaacagctctaataaaaaaagataagttttatgttcaagctggagcaggaattgtagctgatagtaaaccggaaaaagaatatttagaaacagtgaataaagcaaaagctttgatgaaagcagtagattaaa

SEQ ID NO: 278951 - DNA, 778 bp, Unknown
  Bacterial polypeptide expressing nucleotide sequence isolated from the Sargasso Sea
gccggcgatattttccaggttgtgccttcgcagcgttggacgcagaatttttcgcagccgccctttgccctataccgcagcttgcgccgcaccaatccttcgcccttcatgttctatttcaatttcggcggttttcaggtgatcggtgccagccccgaaatattggtccgcgtgtttggcaaagaggtgaccatccgcccgatcgccggtacccgcccgcgcggggccacaccggaacaagaccgtgccttggaagcggatcttttggccgacaaaaaggaattggccgaacacctgatgctgctcgatctgggccgcaatgacaccgggcgggtatcgaaaatcggcacggtgcatcccaccgagaaattcaccatcgaacgctatagccatgtcatgcatatcgtatccaatgtggtcggtgaactggccgacgatcaggatgcgctttcagcgctgctcgccggtctgcccgccggcacggtgtcgggcgcgccaaaggtccgcgcgatggagatcatcgacgagttggagccggaaaagcgcggcgtttacggcggcggtgtcggatatttcagcggcaatggcgatatggatatttgcatcgccctgcgcaccgcgatcgtgaaggatcaaaagctctatattcaagctggcggcggcgtggtctatgacagcgatccggaggccgaataccaagagaccgtgcataaatccaacgccatccgccgtgccgccgccgatgccgcgcggttcaccggcaatggcaatggttaag

SEQ ID NO: 278952 - DNA, 588 bp, Unknown
  Bacterial polypeptide expressing nucleotide sequence isolated from the Sargasso Sea
ttatagtccaaaatgataaagcagagattcacccaatagctggtacctttcgccgcacaggaaatgatgaaaaagatgcaaaagctgctggagcactgacaagagatccaaaagaaaatagtgaacatgtgatgcttgttgatttagctaggaacgatttaagtcgcaatggatcaaaggttgttgtggaaaaaaatcgtgaaattcaattttactcacatgtcattcacttggtctcaaaagtcagttgtatcatgaagaaatcaactaaaacattccgagttgtagcagatacttttcccgcagggacattaagtggtgctccaaaacacatggctttgcgattaattgatcgttatgaaaccaccaaacgtaatttttatggaggagcaataggttatatggattttagagggaattttaatcatgcaataattattcgttcatttttaagtaaggatcataaattacattaccaagctggagctggaattgttgctgactcagttcctaaaaatgaattacaagaagtttataataaattaggtgcactagacaaagccttatcacttgcagaaaaagtttaaa

SEQ ID NO: 278953 - DNA, 811 bp, Unknown
  Bacterial polypeptide expressing nucleotide sequence isolated from the Sargasso Sea
aataaaaactctaataaagaattaccaaaaaaagtaaaaattaaatctaatacaagtaaaaaaaaatttttggagatagttaataaagctaaaaaatacattaaaaaaggtgatatttttcaggtggttttaagtcaaagatttgaaacaagcttaagcaaaaaccctctagaaatatataaaaaattaagaattaccaacccttcgccatttatgtatttttttaactttgaagattttcaaattataggtgcaagtcctgaaatacttgtaaggttaagaaatggaaaaattactattagaccaattgctggtacaaggccaaggggtaaaaacaaaaaacaagatgatttttatattaaagacctattaaaagataaaaaagaactctctgaacatttaatgttattagatcttggtagaaatgatgctggcaaagtatccaaaattaacacggtaaaagttacagaaagattcaaaatagaaaaatactctcacgttatgcatatagtttcaaatgtaactggacattttaaccataaatattctaaatttaattctctattagctggtttccctgcaggcacagtttctggagctcctaaaattagagctatggaaataattgatgaattagaaaaatcaaaaagaaaagtttatgcaggtggtattggttatttttcatcaaatggagattttgatacatgtatagctctcagaactgcattagcaaaaaaaaataaattttatgtacaagctggtgcagggatagttgctgatagtaagcctttaaatgaatataaagaaacta

SEQ ID NO: 278954 - DNA, 694 bp, Unknown
  Bacterial polypeptide expressing nucleotide sequence isolated from the Sargasso Sea
ccttttgatttatatcaggcgcttagatttttaaatccatcaccttacatgtattttctaaactttggaatttgtcaggtagtaggagcatctccagagatcttagtaagacttcaaggggatcaaataaccttaagaccaatagcaggaacaagaagaagaggctcaaacgagattgaagatgaagaaaatgccaaagaccttctttcagaccccaaggagttagctgagcatttgatgttaattgatttaggaagaaatgatgttggaaagatttctaaaatgggaacagtgaaagtctctgaaaaaatggtaatagaaaaatattctcatgttatgcacattgtttctaacgtagaaggtagtaaaaaagaaaacttaagctttattgatgtcttaaaatctgctcttcctgcaggaaccttgtctggagcaccaaaaataagagctatggaaattattaatgaattagagccaagctcaagaggcatatatggaggagcaattggtcacatatcttgggatggagacattgatacagcaatagctatcagaactgcagtcattaaaaataataaaattcatgttggagctggggcaggggttgtggctgactcaatacccgagaatgaatggaatgagtgtcttcaaaaagctcatgttttcttagatgccattgagatgattaaatgat

SEQ ID NO: 278955 - DNA, 787 bp, Unknown
  Bacterial polypeptide expressing nucleotide sequence isolated from the Sargasso Sea
ttgctcattcaatcatcaattaagaatgtagatagtaagattccattaaaatcaaaaaatattaaagttaaatctaatacttctaaaaatagattcttgcaaatgatcaataaagctaaaaaatatataaaattaggagatatattccaggtagttttaagtcaaagatttgaagctaagttaacaaaaaaaccgattgatatttataaaaaacttagagtgactaacccatcaccttttatgtttttttttaatttcaatgacttccaaattattggtgcgagtccagaaatattagtgagactaagagataataaaattactgtaagaccaattgctgggacgagaccaagaggaaaaacattaaaagaggatcttttttatgaaaaagatcttcttaatgacaaaaaggagctttcagagcacttgatgttattggatttaggaagaaatgatgctggtaaagtttcaaaaattaatacagtaaaagtaactgagagttttattattgagagatattcccatgtaatgcacatagtatcaaatgtcgtcggtgagtataataagaaattttctaagtttaaatcacttctagccggtttccctgcaggaactgtttctggagcaccaaaaattagagctatggaaataattgatgaattagaaacaactaagagaaaagtttatgctggtggtattggctatttttcagcaaacggagaatttgacacatgtatagctttaagaacagctgtagcaaaaaaaaataaattttatgttcaagctg

SEQ ID NO: 278956 - DNA, 928 bp, Unknown
  Bacterial polypeptide expressing nucleotide sequence isolated from the Sargasso Sea
ccttttgcggtgtttttgggcggtgttatcggctatgacatggtggcctgtgtcgagcagttgcccgaggtgcccagtgctgaaaaccagtgcccggattacgtattctatttagccgaaaccttattggtggttgaccatcagcgccagcaaagccgtattgtcggcaatgtattttgcggcgagcaggcgccggcgaattgttttgccatcggcaaacgcctggagcaattaaaacagctattgcaaacaccggccgccgaacccgagtcagttacagccattgacactgacgtgcaggtcgatatcagtgatgctgattttatggcccaggttgaaaagctgaaacagcatatcgtcgccggtgatgtgtttcaggtggtgccgtcgcgctgctttacgctgccctgccccaatccgctcgcagcctatcagcgcttaaagcagcaaaatcccagcccttatatgttctatttaaaagacgcttcttttagcttgtttggcgcctcgccagagtcggcgctgaagtttgatgcaaaaagccgccaggtagaaatttaccccattgccggcacccggcggcgtggctttaaaagcgatggcagcatagaccgcgatttagacagccgcattgagctggagctaaggcaggatgaaaaagaaaaggccgagcatttaatgttggtcgatttagcacgtaacgatgtggcgcgtatcagcgtgccgggcagccgttatgtcaaagagctgctaaaagtagaccgttactcttacgtgatgcacttagtgtcacgtgtcgttggtacccttaagcccgagctggacgccctgcatgcctaccaggcttgtatgaatatgggcaccttggtaggcgcgcccaaagtcaaagccgccgagcttatccgcggtgtgagggtaagcgccgcgg

SEQ ID NO: 278957 - DNA, 970 bp, Unknown
  Bacterial polypeptide expressing nucleotide sequence isolated from the Sargasso Sea
gtttttgataatttaaaaaataaatgcaccctgataatcttagttaattccgacgaggaaaagactgaggctgaaaaccgtcttgatgatttagagtctaggttgcaaagtcctttgagttttgaatccttcacaacaccagaaagaagtattactgaatctgatttcatttcaggttttggcgaaactgattttaaaaaagcagtagagaaggctaaaaaatatattgaagatggagacattatgcaggtcgtttgttctcagagaatgtctctcccttttactgcagatccaatagctttatatagatctattagacaattaaacccttcgccttacatgtattatttgaacttagatgaattttatatagtaggttcttctcctgaaattttagctagactcgaagatgacaaagttactgttaggcccattgcaggaacaagaagacggggtaaagacgatgaagatgatgtagctatggaaaaagatatggtcaatgaccctaaagaaatagctgagcatcttatgttaatcgatttaggcagaaatgatgtcggcagaattgcagaaccaggctctgttgttgttactgaacaatttggagttgaaaaatacagtcatgtcatgcatatggtttctaatgttgaagcggagattagaaaggatttttctgcaattgatgtatttaaagcaacctttcctgcaggaacagtctctggagcaccaaaaataagagccatggagataattgatgagtttgagcctgttaaacggggtatttacggtggtgctataggttatttatcctggcagggtaatatggatatggccatagccatcagaacggctgtaataaaagacgatgttctctatattcaggctggaggaggttgggtagctgattctgttcctgatcttgagtggaaagagtctcttaataagggaagagcaatattaaggctgccga

SEQ ID NO: 278958 - DNA, 898 bp, Unknown
  Bacterial polypeptide expressing nucleotide sequence isolated from the Sargasso Sea
atgtttatacctaacaatttactgatatacgataatttttctaattctctttttataattaaacattatctatcaaatgcaaaagtaaaagatttccataagcaaattatagatataaatggaattgaaaattacataaagaagatgaagggctatagagatataaattttaataaaaagaaaaaaatcactgttaagtctaatatgacaaaaacaacctttaaaacaaatattaaaaaagcaaaacaatatataaaaaatggtgatatattccaagtagttccaagtcagcgatttgaaacttactataatcagaaaagtagttttctttatgaggtattgaggaaaactaatccctctccttttatgtactatttcaatcttcccaaatttgaaattgtaggatcaagccctgaaatactagtaagactaagatcaaatgaaataactatcaggccaattgctggaactagacctagagggaggaataagatcgaagacaaaaagtatgaaactgaattaatgaatgataagaaagaaattgctgaacatttaatgcttttagacctaggaagaaacgatgtaggaaaagtatcaaaaaaatcaagtgtcaaggttacatcaaaatttaagatagaacgatattcacatgttatgcatatagtttccaatgtaactggcaaattaaaaactgacacttcatcaatttcagcactaatggcgggttttcctgcaggaactgtttctggcgcgccaaagattagggctatgcaaatcatagatgagttagaaactactaagcgaggcatatactcaggagggataggatatatatcatctaatggagacatggatacatgtattgtcttgagaaccagggataattacaaaaaataaa

SEQ ID NO: 278959 - DNA, 633 bp, Unknown
  Bacterial polypeptide expressing nucleotide sequence isolated from the Sargasso Sea
tttattttaactttggtgactttcaaatattgggtagtagtccagaaattttagtaagattaataaatggtgatgtaactattagaccaatcgctggtacgagacctagaggcgtaaataaaattcaggataaaaaatttacctctgaattattaaaggaccccaaagaacttgcggaacatttgatgcttttagatcttggaagaaacgatgttggtaaagtatctaaaaaaaatactgtaaaagttactgaaaagtttaaagtcgagaaatactcacatgtgatgcatatagtttcaaatgtaatagggaaaataagaaataacttgtccctatttgaaacttttttgtcaggctttcctgctggaacggtaagcggtgcacccaaaattagagcaatggaaataattgatgaattagaaaattctaaaagaaaactttatgctggtggcattggatattttactgcaaatcaagaatttgatacctgtatagctttaagaacagcattaattaaaaacaaaaaaatctatgtccaatctggagcgggcatagttgctgacagtagtccaaagaatgaatatgaggaaacggtaaacaaagctaaagctttacttaaagcaataaattaaa

SEQ ID NO: 278960 - DNA, 862 bp, Unknown
  Bacterial polypeptide expressing nucleotide sequence isolated from the Sargasso Sea
gatgtcaagagcaacagcagccaggagcgcttcgaggcggccgtcaacaccgcccgggagcacatcgcagcgggtgacgtcttccaactggtgatcagccaacgcctggaaaccgttgtcccccagcaaccgctggagctctaccgaagtctgcggatggtcaatccgtcgccatacatggccttcttcgacttcggggactggcaactgatcggatccagccctgaggtgatggtgcaggccgacccagccccggaaggcatccgagccagcctcagaccgatcgccggcacccgtccgcgcggcaccacagcccacgaggaccgcgacctggagctggatcttctggctgaccccaaggagcgcgccgagcacgtgatgctggtggacctcggccgcaacgacctgggccgtgtctgccagccgggcagtgtggcagtgaaggacctcatggtgatcgagcggtattcgcacgtgatgcacatcgtcagccaggtggaaggtcgcctggcccccaagcacgacgtctgggatctgctgatggcgtcctttcccgccggaaccgtcagcggggcgccgaagatcagggccatgcagctgatccatgagctggagcccgatgcccgaggtccttattcgggtgtgtacggatcggtggacctggctggagccctgaacaccgccatcacgatccgcaccatggtggttcaaccgcaccccgccggtggttgccgggtgaaggttcaggcaggggccggcgtggtggccgattcaaacccgacggcggaataccaggagaccctcaacaaagcccgcggcatgctcacggccctggcctgcctcaacccagaaatgccatgag

SEQ ID NO: 278961 - DNA, 1169 bp, Unknown
  Bacterial polypeptide expressing nucleotide sequence isolated from the Sargasso Sea
agggcagctctacggtgtctggggctatgagctgattcagtggattgaacccagtgttccggtgcatccgcggcaggagtcggatccaccggacggcatctggatgctgatggactcgatcctgattttcgatcaggtgaagcgacagatcacggccgtggccttcgccgacctgagccagggtcaatcggaagacgctgcctgggacggggccatggcgcggattgcagcgctccggcggggcatggaagccccgctccccctggtggatccccttccctgggatgcgcaggccaagcagcttcccgatgtgaagagcaactgcagccaggagcgcttcgaggcggcggtcgacaccgcccgggaacacatcgccgccggtgacgtcttccagctggtgatcagccaacgcctggagacgtttgttccccagcagccgctggagctctatcgcagcctgcggatggtcaatccatcgccctacatggccttcttcgacttcggcgactggcagttgatcggatcgagtccggaggtgatggtgcaggccgaccctgcgccggagggcatccgagccagcctcagacccattgccggcacccgtccgcgcggcacgacagcccatgaggatcgcgacctggagctggatctgctggccgaccccaaggaacgtgccgagcacgtgatgctggtggatctcggccgcaatgacctcggcagggtctgtcagcccggcagtgtggcggtgaaggatctgatggtgatcgagcggtactcgcacgtgatgcacatcgtcagccaggtggaggggcgtctggccccccagcacgacgtgtgggacctgctgatggcatccttccctgccggaaccgtgagtggagcccccaagatccgtgccatgcagctgatccatgagctggaacccgatgcccgaggcccctattccggtgtgtatggatcggtggatctggcgggagccctgaacaccgccatcacgatccgcaccatggtggttcaaccggacccgtccggtggttgcagggtgaaggtgcaggcgggtgcaggcgtggtggcggattcgaagcccacggcggaataccaggagaccctcaacaaggcccgcgggatgctcacggccctggcctgcctcaacccggagcggccatgag

SEQ ID NO: 278962 - DNA, 1585 bp, Unknown
  Bacterial polypeptide expressing nucleotide sequence isolated from the Sargasso Sea
catgaacttacagcaaataactaccaccacaggacaagtggccagcttcagtcagaccctgagcattcagcccgatccgctgcaaagcttcagagccttaaccagccagggccaaatggcgttgttacttgaatcggcagaaatagacagcaaaaacagtttaaaaagcctgatgttaattgacgcggctttgcgtattgaatgcaatggcctgcaggttcaggtggaagccttaaccgacaacggcaaaaccttactgccttatctggcgtctttactgcaaggtaaagcagaacttgatttgtcatccaaccaactcagagtgcagtttgccaaagccgacccactgcttgacgaagaaagccgcttattgctgcctaactcgctgactgttttgcgtttactgcaacaacaactgcagaacaacagcgacgagcctttggcgatctttttaggcggtgtgattggttacgatttagtcgccatggtcgaagacttacctcaagtgccgaccgcggaaaaccaatgccctgactacctgttttatctggctgaaaccttgttagtggtggatcatcaggcaggcaacagccgccttattggtaatgtattttgtggcgcggcagcccagcagcagtattttgtcattggccagcgcttgtctgaactacagcagttgttgcagcaagcagcagagaccacaactcaggcagcagaaacagcagcaaaagctgaagttaaagtggatatcagcgacgccgattttgtcgcccaagttgaagccttaaaacagaatattgtggcgggtgacgtgtttcaggtggtgccatcccgttgtttcagtctgccctgccctgatccgcaagcggcttacgccaaactgaaacagcaaaaccccagcccttatatgttttacctgcaggacagaaacttcagcctgtttggtgcctcacctgagtccgctttgaaatacgaagccaaaacagctcaagtcgagatttatcctatagcgggcacccgccgccgtggttttgctgccaacggcactatagatcgcgatctggacagccgcatcgaactggaactgcgtcaggacgaaaaagaaaaagctgaacatttaatgttggtcgatttagcccgtaacgacgtagcccgtatcagtgtacctggcagccgttatgtcaaagagctgttaaaggtcgaccgttattcttatgtcatgcatttagtgtcccgtgtggttggtaccttaaaacctgaactggacgctttgcatgcctatcaggcctgcatgaatatgggcaccttagttggcgcacctaaagtgcgggctgccgaactgattcggggtgtcgagaaaaaacgccgtggcagttatggtggcgctgtaggttatttagctggcaatggcgattttgacagctgcatcgtgattcgttctgcttatgtccaacaaggcacagcttatattcaggccggtgccggagtggtgtacgacagcgtagcgcaagccgaagcggacgaaacccgcagcaaagctcaggctgtcattaacgctattcaatctgcaggagctgctgtatga
